United States Patent Application Publication US 2008/0034453 A1 - sequence listing, part 20

SEQ ID NO: 166753 - DNA, 271 bp, Glycine max
cactcgagccgattcggctcgagcagagaccgaaatacttcgagaacgcccgtacaaagcaaactgctcgtaagtcaactggaggaaaagctcccaggaagcagcttgcaaccaaggctgcacgtaagtctgctccaacaactggtggtgtgaagaagcctcatcgttatcgccctggaactgttgctcttcgtgagattaggaaataccagaagagcactgagctcctaatcaggaagcttcctttccagaggttggttcgtgaaattgc

SEQ ID NO: 166754 - DNA, 272 bp, Glycine max
tgtgactcgttcttcttcgtcgttatcttcttcttttgttgtttgtgtgtttgtactttctctcacctgaaaatgtcttgctgcggtggtaactgtggttgcggaagcgcctgcaagtgcggcaacggctgcggaggctgcaagatgtacccagacttgagctacaccgagtcaaccaccaccgagaccttggtcatgggagtggcaccagttaaggctcaattcgagagtgctgaaatgggtgttcccgctgagaacgatggctgcaaatg

SEQ ID NO: 166755 - DNA, 267 bp, Glycine max
actgagtagatggagatggatgaaaaattagttcgccagggaaaagcatatgttgatgacatagcacgtgaacaaatgcaaaaagagagaatggatggcatagattctaaatgcagaaataatagtgtagaggagaatctaaaattgtggaaggaaatgttggcaggaacagagagggggttgcagtgttgtgtccgtggcaagttggatatgcaggacccaaacaaatcacttagagatcctgtttattatcgttgcaatccaatg

SEQ ID NO: 166756 - DNA, 271 bp, Glycine max
tatcaatatattatgataatggagggatacaataagaaggttatgactgtggggatggtgttgggcatggccatgattgggatggccactggccaatactcgctttgtcgcatgcccagcgatgggttggcggcatgcaagccgagtgtgagtggggactatcctgctgatccctccactgcttgttgctcagccattgccaaggctgatcttaaatgcttctgccgcttcaaggattcgggccttctctctatgtatggtgttgatccca

SEQ ID NO: 166757 - DNA, 275 bp, Glycine max
cctcgagccgaatcggctcgaggaagaaccaacaagaggggtattcagattgagattcaagtcatggggaagagcaaggttcttgtggtggggggaactgggtacatagggaggaggatagtgagggcaagcctggcactgggccatgagacctatgtggttcagaggccagagttgagcctccagatagagaacctgcagaggctcctctccttcaagaatcaaggtgctcatctcattgaggcctctttcaatgatcacaagagccttgttga

SEQ ID NO: 166758 - DNA, 269 bp, Glycine max
ggatactgctcggagttaaaaggaaaacatgttcagaggttactagtatttgactacatggcaaatggaaatttgagggactgtttagatggagtttctggaaaacatgtcgattgggcgaatagtgttatgattgcaataggagctgcaaggggcttggagtatctccatgaagcagctgctccaagaattcttcatagagatgtcaaatcaataacattcttctggatgaaaattggcaagcaaaaataactgatcttggcatggct

SEQ ID NO: 166759 - DNA, 275 bp, Glycine max
  unsure (1)..(275): unsure at all n locations
ctcggtttcatctagttttccctctgttcttcttccgcgacagatgatacatcatcgaanctangngacnaaggttgagaaacgctcactggtgggctatgagtttgagatatcggagtgtggtcttggttgctttagtgcttctgccacacatggcttctgccgcttcaattgtgaagaacctaccgggttacaagggtgatcttccattcaaacttgaaatcgggtacataggagtgggagaagacgaagaggtgcaaatatttcacttattt

SEQ ID NO: 166760 - DNA, 273 bp, Glycine max
cgacgagagtgcagcggcaatgggtagaagcactttggcttcggttctcgagattctgatctcttttcagggaacccacgttagatccgatgcctccgatcaccgttacaaggatggagactccgtccctctttacgccaacaaagttggtccctttcacaaccccagtgaaacgtatcggtcatttgacctgccattctgtgtaacaggtcatgagaaagaaaagactgaagccctcggtgaggtgtcttatggcgatcgccttgttagtgc

SEQ ID NO: 166761 - DNA, 274 bp, Glycine max
tgtaatttcatatcgtaacaggttgttccttctatccctttctgttggtcttaggtcatatatcaatggcaacttcaacctctgcactcaataaaaggctggaaggaaaagttgcactgatcacaggaggagctagtggcatcggcaaacgcactgcagaagtgttcgctcagcaaggagccaaagtagtgatcgctgacatccaagacgaactgggacattccgttgctcagtccatagggccatcaacatgttgttatgtccattgcgatgt

SEQ ID NO: 166762 - DNA, 270 bp, Glycine max
ttggtgcaccgtttgtacccagagattgctccagctctgaaccctgaccacgtccctcacattctgaagaagtctcctgatgccattccagaccctaaggccgttcagtacgtgagacacgaccgtggcacccccatgattctagacaacaattactacagaaatatattggacaacaagggcttgttgatagtggatcaccaactagccaatgacaagaggaccaagccttatgtgaagaaaatggccaagagccaggactatttcttc

SEQ ID NO: 166763 - DNA, 233 bp, Glycine max
ggaacactcttcattgtgtctatgattgtgttgaggatttatctgggctggagttatgttggtgatagacttctatcagcggtcatcccttatgatgaaagtggatggtacgacggacagatgtgggtcaagccgctcgagatcctagctcgtgatagattgatgggctccaacaaggtactggacatcacatagtatcacagcattgcatgaattcagaaagatttgggata

SEQ ID NO: 166764 - DNA, 273 bp, Glycine max
ttggtgcaccgtttgtacccagagattgatccagctctgaaccctgaccacgtccctcacattctgaagaagtgccctgatgccattccagaccctaaggccgtgcagtacgtgagacacgaccgtggcacccccatgattctagacaacaattactacagacatatattggacaacaagggcttgttgatagtggatcaccaactagccaatgacaagaggaccaagccttatgtgaagaaaatggccaagagccaggactatttcttcaag

SEQ ID NO: 166765 - DNA, 273 bp, Glycine max
gaaattattattgtggacgatgggagtcctgatggtactcaggatgttgtaaaacaactgcagcaagtttatggagaagatcggattctgttaagagcacgccctaggaagttgggtttgggaactgcttatattcatggcatgaagcatgcatctggaaattttgttgtcatcatggatgctgatctatctcaccatccaaaatatttgccaaacttcattagaaagcagtcggagactggtgctgatatagttacagggactcgttatgtt

SEQ ID NO: 166766 - DNA, 269 bp, Glycine max; identical to SEQ ID NO: 160400

SEQ ID NO: 166767 - DNA, 273 bp, Glycine max
gtttcgggagaaaaagcaatccactcagagagctagacgaattcaacaatgcctcgctatgatgataaatacggcaatacccgcctctatgtgggacacttgtcttcgaggactcgttcccgtgatctggagcgtgcctttagcagatatggaagagttcgaggtgtggatatgaagaatgatttcgcttttgttgattttagtgatcctcgagatgctgatgatgcaagatataacctggatggtcgggatgttgatggaagtcggattatt

SEQ ID NO: 166768 - DNA, 272 bp, Glycine max
tgggaatgcagccccaatcgggcggtaaattccgtccaatgctaaatactggcgagagaccgatagcgaacaagtaccgcgagggaaagatgaaaaggactttgaaaagagagtcaaagagtgcttgaaattgttgggaggagtggatggggtgggaattagcaggaatccgtgactactcgtctcatattaatccttacatttgataaatttgttgataattattattagtcttttgaataatgattgtgcattagttaaagtggggtctg

SEQ ID NO: 166769 - DNA, 271 bp, Glycine max
gttcaaaattgcgttcgcgcccttcattttttcaggctatacgctgtatgtcatctgcctcaagcacagaactgtttattggatgtgtttcatattctactgacgagcaaagcttcagggaagctttttcaaaatatggtgaagttgttgatgctcggataattatggatcgtgaaactggtagatccagaggatttggctttattacatagacttcggttgaggaggcatcaagtgccattcaggccttggatggtcaggatctgcatgg

SEQ ID NO: 166770 - DNA, 273 bp, Glycine max
gtgactaggaatacacctccagcataaggactaaggtgtttcatccgtacatcaacagcaatggtagcatttgtcttgatatccttaaggagcagtggagctctggactcatcatctctaaggtactgctttctatctgctcattgctgactgatccaaatcctgatgatccacttgttccggaaatcgctcacatgtacaaaactgaccgggccaagtatgaggccactgcacgcagctggacccagaagtatgccatgggctgatttgtgt

SEQ ID NO: 166771 - DNA, 266 bp, Glycine max
  unsure (1)..(266): unsure at all n locations
aaaaaaagactattcagagagcgcgtcttaataaacgctcttctctgataacctcttttcttntcttctttcttcttctctttcgcttcttcgatcttcgatcttcgtcgctgaaaatgagagagtgcatttcaatccacatcggccaggcccgcattcaggttggaaacgcctgctgggagctttactgcctcgaacacggcattcagcctgatgggcagatgccaagtgacaagaccgttggtggaggtgatgatgcattcaac

SEQ ID NO: 166772 - DNA, 270 bp, Glycine max
tctcattctcccatttcctctcagaaccctcgatcactcccacgcgctcctatatcctctccttcaccgtcgctctctccaacgatcacaacaacatcgtcatcccatggcaaacgccgcatctggtatggcagtccatgatgactgcaagttaaggttcttggagctgaagacaaagaggacacaccgtttcatagtttttaagattgaggagcagcagaagcaggtcattgtggagaagttggtgagccagcccaaggctatgaagat

SEQ ID NO: 166773 - DNA, 269 bp, Glycine max
gcatcatcaacacctgattctgaagatcagttagaagcccctattcatccaggacatggagagtacttaatagagttagccattggaacaccaccagtgtcttaccctgcggttttggacactggcagtgaccttatatggacacagtgcaagccttgcacacggtgttacaaacaaccaacacccatttttgatcccaagaagtcctcttctttttccaaggtttcatgcggtagtagcttgtgcagtgctttgccttcttcaacatg

SEQ ID NO: 166774 - DNA, 269 bp, Glycine max
gtgaagccaccaatcatctatggtgatgtgagccgcccaaagccaatgactgtcttctggtcatctctggctcagagctttaccaagcgcccaatgaagggaatgcttaccggtcctgttaccattctcaactggtcctttgttagaaatgaccaacctagatctgagaccacctaccagattgctttggctatcaaggacgaagtggaggaccttgaaaaggctggcatcactgttatccaaattgatgaagctgctttgagagaggg

SEQ ID NO: 166775 - DNA, 272 bp, Glycine max
aattgaagcattaatcttcaaccatggccacacccttggcctaccaagagcaccttccggcggcacccggttggctgaacaaaggtgacaacgcatggcagttaacagcagccaccctcgttggtcttcaaagcatgccgggtctcgtgatcctctacgcaagcatagtgaagaagaaatgggcagtgaattcagctttcatggctctctatgcctttgcagcagttctaatatgttgggtgcttgtgtgttaccgcatggcctttggagaa

SEQ ID NO: 166776 - DNA, 270 bp, Glycine max
ctcgagccgccaattttctagggttttattcattttccgatggcttctgcagcacttgagtaccgttgctttgtcggtgggctcgcttgggccactgacgaccatgccctcgagagagccttctctcagtacggcgaaatcgttgaaacgaagattatcaacgatcgtgagactggcagatccaggggttttggatttgtgaccttcgcctcggagcagtccatgaacgatgcgatcggagcgatgaatggacagaacttggacggccgt

SEQ ID NO: 166777 - DNA, 267 bp, Glycine max
gagaatatagtatggcacaatctagtggcaaaaaattggttgagtggctggttgcagcattattgttcattgccttgttgagtggtagtgcacatgctgttgcaatatgtaacattgactcaagtcaactgaacttgtgtcgtgctgcagttactggtccaaaaccctccaccacctgatgagaaatgctgtgcagttattcgccaggccaatttgcgttgcctctgctgtacaagtctatcctaccttcatttggaattaacccca

SEQ ID NO: 166778 - DNA, 267 bp, Glycine max
gtttcctaaggcacgcagcgagtttaggcgcggcgggatcatcacgagattgcaaaatgaagttcaacattgcaaatcccaccactgggtgccagaagaagctggaaatcgatgacgacctgaagcttcgggcattttgggacaagaggatctcccaggaggtccttggtgacgccctgggtgaggagtttaaagggtatgttttcaaaatcactggtgggtgtgacaaacaaggattcccaatgaagcagggagtgttgacccctg

SEQ ID NO: 166779 - DNA, 269 bp, Glycine max
actcgagccgattcggctcgaggccgagatccttcacgtgcagggaggcgaatgcgggaaccagatcggttccaagttctgggacgtggtgtgcgacgagcacggcatagatccgacggggaagtacgtcggaaactcagatctgcaactcgagcgcgtgaacgtctactacaatgaagcctcgtgcgggcgcttcgtgccacgcgcggtgctgatggacctggagcccggaactatggacagcgtgcggaccgggccgtacgggcaga

SEQ ID NO: 166780 - DNA, 271 bp, Glycine max
gtagtgcaccagcaacaactacagtgaagagtgaggaggggatgcaaggcatagggatagggtgctgctcaaacgacgtcgtagggcagctggagctaagtcccactatgagcaactcctcttcctcgctatcgatggagctggacgagtcccccgagagccgaatccaacggctgatatcggagcaccccgtcatcatcttcacccgatcctcctgctgcatgtgccacgtcatgaagaagctcctcgccaccatcggcgtccaccccac

SEQ ID NO: 166781 - DNA, 268 bp, Glycine max
attgtctgttgttgtaactcgttcttcttcttttgttgttctgtgtttgtgcttgttctttctctcacctgaaaatgtcttgctgcggtggtaactgtggttgcggaagctcctgcaagtgcggcaacggctgcggaggctgcaagatgtacccagacttgagctacactgagtcaaccaccaccgagcccttggtcatgggagtgcgcactgttaaggctcaatttgagggtgctgaaatgggtgtgcccgctgagaacgatggctg

SEQ ID NO: 166782 - DNA, 271 bp, Glycine max
ggaatatgctgcccttatcatggaggaactggatccggacaaccttggatacattcagttatacaacttggaaatgcttcttctgcaagccccagcacaatcaacccacataaccacagatagcagggtactgagccaaattctaagccagaaactagtccctacaaaagagtacaaccccatcaagcgaggctttcgggcactggcatacttcgtgcaggacaattggaaacgcctctgggtcatagccctgtggctttccatttgcgct

SEQ ID NO: 166783 - DNA, 191 bp, Glycine max
ctcgagccggaaaaagctgccggaatgtattctgccttaccctatgcatttgcacaggttctacgtagagataccatatatcttcgctcaagctgtgacatacggtttaattgtctatgccatgatcggatttgactggactgcagagacattcttttggtatctatttttcagtttctactcaatggtgt

SEQ ID NO: 166784 - DNA, 268 bp, Glycine max
cgattaccgtgccaggattcggttgattaatcaggacaagaacaaatataacactccgaaataccgatttgtggttcgctttagcaacaaggacattgttgcacaaataatatctgctatcattgccggcgatttagttcttgctacagcatattctcatgagctgccacgatatggtcttgaagtaggacttacagattatgcagcagcttattgcactggtctcctgttggcccgaagagtcctcaaaacacttgagatggatgag

SEQ ID NO: 166785 - DNA, 285 bp, Glycine max
cagcctcacactcacacatacacacatctgaacgcgtatcgtccctcccatggcttcaaagcgcatcctcaaggagctcaaggacttgcagaaagacccaccaacttcttgcagcgctggtccagtagctgaggacatgttccattggcaagcaacgattatgggtcctgctgatagtccttatgctggaggtgtattcctagtcactattcactttcctccggattatcctttcaaacctcccaaggttgcctttaggactaaggtgtttcatccgaacatcaa

SEQ ID NO: 166786 - DNA, 280 bp, Glycine max
aagggcttattgaagtggctaaaattatatatgtagttcatgacgaggccaaggacaaagatttcgaattagaaatgagctgggtgtgtgatgaatcaaaccgccaacatgagaaggtaccagatgagcttcttgaattagcaaaggcagcggccaaagcagctcttgaagaaatggatgcagattaatggactagaaatgtttatttcaaagttgtatttcataactttgtaattgagcatttgaaacatctataggaaacactcggcttcgatagttg

SEQ ID NO: 166787 - DNA, 270 bp, Glycine max
ctcctcctacttagagccattagatcgaattcgatcatttcggatttgatctgatggttttggacttctaattagtctaagatggacaaggttacgaggttggcaacagaaaagggtgtggtggttttcaccaagagctcttgttgcctctgctatgcagtcaacattctgttccaagagcttggagtgatccctgtggttcatgaaattgacaaagaccctgagggcaaggaaatagagaaagctataacaaggttggggtgtcctaca

SEQ ID NO: 166788 - DNA, 264 bp, Glycine max
ctcattggcacagattttgtcagagaatcgtagcatcataagctatttgcaaaagtttcatcctgatgaccatgggccttttggaattacagccacctgccttgaaacatttataaaaagctgtgctggatactctgttataacatatatacttggtatcggagacaggcatttagacaatctcctccttagaaatgatggaggtcttttccatgttgattttggttttattcttggccgagatcctaagccatttccacacaa

SEQ ID NO: 166789 - DNA, 273 bp, Glycine max
tgaccttataaagatatcagagcaacttggcagcacagttaccaatgactatgattatgtattttctgagaatggtcttgtggctcacaaggaaggaaagctcattggaactcagagcttgaagtcattccttggtgaagaaaagctcaaggagtttattaactttacacttcattatattgctgatttggacatccccattaagaggggaacatttatagagttccgtagtgggatgctgaatgtgtcacctattggccgaaattgtagcca

SEQ ID NO: 166790 - DNA, 279 bp, Glycine max
tgatttaagtgttgccaagttccttggttttgaacagactttaaagaatgccttatcaccatacaaattaggaggagcagatggaggaagtgatttcgatccaaaaggaaaaagtgataatgagattatgcgattctgccaaagctacatgagcgaaatgaatcgctacctggggcctgacaaggaccttccgactgaggagatggctgttggttatcgagaaatgaagtatctcgttggacagtataggcgtcatacaggtcattctcagggaagctt

SEQ ID NO: 166791 - DNA, 284 bp, Glycine max
atgatgcagagagagtgagggattatcagcaagcaatgacaagcagatgtcaatgtaacaatcctgcttgtcaatgatgcagagagagtgagggattatcagcaagcaatgacttgtcaatcatgtagtgttcctttgacatctgctcacctgaagtccttagcctatctacagacaattttgactaccagcatctacggcgtcattttgtcaagggattgcttcttgatgatataatggggtacaaaatttttgttcatgaaatccactcagactatgctgca

SEQ ID NO: 166792 - DNA, 276 bp, Glycine max
gaaacactcactggtgggcattctacatgccgtcaatcgcgatggtagagtggatgttggatttctcgggctgcaaactctctggaatggaaactcttcggaactcgtaatcgcggaatcatactgcatctgccagtttgtcaggctcaaagacagcctttcaagtcctcgattcgaatggcgtcgcaaaatgggacgagcctcggccgctggcacgatttcatggattctaccacatggatgcttggttgtcaagttcccaggaatgctcccttt

SEQ ID NO: 166793 - DNA, 278 bp, Glycine max
cgaaatcgaaggtctcaacattgctgaagatgtcacccagctcatagggaaaacgccaatggtttacctgaacaatatcgtgaagggttctgtggccaatattgctgccaagcttgagattatggagccctgttgtagtgtaaaggacaggattggttttagtatgataaatgatgctgagcagagaggagctataacacctgggaagagtatattggtggaacctactagcggcaacaccggaattggtcttgcctttatagcagcttcaagaggtt

SEQ ID NO: 166794 - DNA, 260 bp, Glycine max
agttgatgaagctcagagctcgagatacacttctgcataaggaatctcaggaactactccttccagtttatctattctatcatacagtgacaacagcactgcgtcgagtcttcccacaccaaggtccgatggtggaatcttgtcttctcccaatcttaagcccttcacattcaatgagctgaagaatgctaccagatattttcgcaccgatagtcttctcggtgaagggggattcggatatgtctacaagggatggattg

SEQ ID NO: 166795 - DNA, 260 bp, Glycine max
cagggacagtcgggggcattcgtatttcatagtcagaggtgaaattcttggatttatgaaagacgaacaactgcgaaagcatttgccaaggatgttttcattaatcaagaacgaaagttgggggctcgaagacgatcagataccgtcctagtctcaaccataaacgatgccgaccagggatcagcggatgttgcttttaggactccgctggcaccttatgagaaatcagagtctttgggttccggggggagtatggtcgc

SEQ ID NO: 166796 - DNA, 278 bp, Glycine max
gcaaatttttcagtttcttctccccgttatctgagtaacgccacagactccgccggcataatcccaccggagacgaagcccgccgagagcgacagtggtggtgatagtcggccccggctcacgatcaagatcaatgttatgcacggatcctctcaacacgagttccacctcccggcccaatcaacttttggggatgttaagaaactccttgtcaataaaactggtttagagcctgtagagcaacgacttttcttcagagggatagacaagggtgataa

SEQ ID NO: 166797 - DNA, 281 bp, Glycine max
ccaccacacaggctccacaaaacatctcatccctcacccaccaaaatggctctgcttctgataattcccatctcacttgtcaccctctggctcggttacaccctataccagcgattaagattcaagctccctccgggtcaacggccctggccggcagtcggtaacctctacgacatacaacccgtccgcttccggtgcttcgcggagtgggcgcagtcttacggccccataatatcggtctggttcggctcgaccctaaacgtcatcgtttcgaactcgga

SEQ ID NO: 166798 - DNA, 275 bp, Glycine max
ttttggggtctcctgcagttcaccttcaacgttgctctgctttcaattttcgggaaagaagagattctgtacagagatgctctgaaacggtgctactacactctggagcaagggtactcctcaatgcccataaacgttccagggacactgttccacaaggcgatgaaggcaaggaaggaacttgcacaaatcgtggcccaaataatctcgagcagaaggcagaggaagcaggattttcacaaggaccttttgggttcattcatggatgagaaatc

SEQ ID NO: 166799 - DNA, 278 bp, Glycine max
aagggcttattgaagtggctaaaattatatatggagttcatgacgaggccaaggacaaagatttcgaattagaaatgagctgggtgtgtgatgaatcaaaccgccaacatgagaaggtaccagatgagcttcttgaattagcaaaggcagcggccaaagcagctcttgaagaaatggatgcagattaatggactagaaatgtttatttcaaagttgtatttcataactttgtaattgagcatttgaaacatctataggaaacacaaggcttcgatagt

SEQ ID NO: 166800 - DNA, 263 bp, Glycine max
caacgacgacgttgtatagcagtccttcttcttctttctgtgttgacggtggcgttgatctgattggaattctggatcaatggcaggggcagcctctgctctgttcctcctcgacatcaaagcccgcgtcctcatctggcgcgactaccgcggcgacgtctccgccctcgacgccgaacgcttcttcaccaaactcatcgaaaaacaggccgatccgcaagctcaagatccggttgtgcacgacaacggcgtgacctacatgt

SEQ ID NO: 166801 - DNA, 271 bp, Glycine max
cgtatgtgttggaaagtagctgcaaagaggaaccaaactgttgtctggcaaaaacctccaacaaatgactgctatatggaaagagaacctggtactcgccctcctctttgccagtctgacgatgactcagatgcagtatggggagtaaatatgaaagcatgcataacaccttacagtgatcatgacaacagagccaagggtagtggattagctccatggcctgcaagattgactagtcctcctcctagattagctgactttggctattcaa

SEQ ID NO: 166802 - DNA, 275 bp, Glycine max
gggcgagaatctgtaggacacatggatgatgatctcaaggttcgtgtttctgagtataacaatatccgcagtcagcttaatgctatcaaccgaaagcaaacaggaagcatagcagtccgtgatctttccaacttggtaaaacctgaagacattgtaacttcagaaaatttaactaccctccttgcaattgtttccaagtattcacagaacgattggctctcaagctacgaaacattgacaaactatgtggtccccaggtcttctaagaagttgta

SEQ ID NO: 166803 - DNA, 280 bp, Glycine max
tgctttgggaaatatgactgaagatgactggaggtggcacatgtatgacactgtcaagggaagtgattggctaggagaccaggatgccatccaatatatgtgtagggaagcacctaaagcagtcattgagctagagaattacggattaccattttcccgaacagaggatggaaaaatatatcaacgtgcatttggtggtcaaagcttaaactatggaaaaggtggtcaagcttaccgctgtgcatgtgctgctgatcgaactggacatgctttattgcac

SEQ ID NO: 166804 - DNA, 273 bp, Glycine max
catcgctgcctgatcgagcgatacggtttctccgaagacgacatcaacgttttgatcgacacggacgagtactacacggagcccaccgggaagaacatccggtcagcgctgaccaggctggtacgatcggcggacccggggacgttctgtttgtgcactacaagggacacggcacgcgcctccccgcggaaaccggagatgaccatgacactggatatgatgaatgcattggtccctctgacatgaaccttatcaccgatgatgatttcagag

SEQ ID NO: 166805 - DNA, 278 bp, Glycine max
tgatactagcagtaaaaaggatgaacagaatatctgagcagggggacgatgagttctgcagagaaattgaacttcttgctcggctgcaccatcggcatcttgttgctttaagaggcttttgcattaaaaaatgtgagaggtttctgatgtatgaatacatgggaaatggaagactctcagatcatcttcattcccctggtaaaacacctttaagttggcgaactagaatccaaattgccattgatgtcgccaatgcactggagtacctccatttctat

SEQ ID NO: 166806 - DNA, 279 bp, Glycine max
gcacacacaaaccctcccctcacactctccaaaccctagcggcactacacacgttatctctctctctctctctctctctccctctctcattccccaagatgtcgagcgccgatcccgagcaccgataagatgaggaggcacccgccgtcggcgacgacgaggacaccggagcacacgtcgctcacatcgacaagctcgatgaggttgctgtcaccaccggcgatgatgacgaagatgcaatcctagatctcaaatcgaagctttaccggttcgacaagg

SEQ ID NO: 166807 - DNA, 282 bp, Glycine max
  unsure (1)..(282): unsure at all n locations
ganaatcctcacccattttcttcgtagccaaacactctgaaattctcagttatgtcgtggcaagcgtatgtggatgatcacctactgtgtgaaatcgaaggtaaccacctcactcacgccgctatcatcggccaagacggaagcgtttgggctcagagcaccaacttccctcagttcaaacctgaggaaataactgccatcaataatgactttaatgagcctggatcacttgctccaactggattgtatatcggtggcaccagatacatggtcatccagggt

SEQ ID NO: 166808 - DNA, 273 bp, Glycine max
gaaacaacaagaagaaacaccatgcaagaatgtcatgtgatagccccaacaacaacaacggcaacatcatcgtatcgtggagttcgtcagcgaaaatggggcaaatgggtgtccgaaatccgtgagcctggaaagaagagcagaatatggttagggagctatgagtcaccagagatggctgcagcagcatatgacgtggcagcgttacaccttcggggacgagctgcaagactcaatttccccgaattagttgagacgctgccacgtccaacg

SEQ ID NO: 166809 - DNA, 260 bp, Glycine max
ggtgattgctgcaatgacgaatgggggtgtggatcgtgctgttgaatgtactggcagcatccaagccatgatctcggcattcgaatgcgtccacgatggttggggtgttgctgtacttgttggagtgccaaacaaagatgatgcattcaaaactcatccagtgaatttcttgaacgagagaactctaaagggtaccttctacggaaactacaaaccccgcactgatcttccttctgttgtggagaagtacatgaatgggg

SEQ ID NO: 166810 - DNA, 267 bp, Glycine max
gcattgtcccttgtggtatggctacaatgggaagttgaagcctctgatgaggcttgcttatatcaacaccattgtctacccatttacctcaatcccattgattgcttactgtacgcttcctgcattctgtcttctcacaaataaatttattattcctgagataagcaactttgccagcatgtggttcattcttctcttcgtctccatttttaccacttcaattcttgagcttaggtggagtggggtcagtatagaagactggtggag

SEQ ID NO: 166811 - DNA, 276 bp, Glycine max
tctcactgttgcacttactacatctggccgtgtctatacaatgggtagtcctgtctatggccagttaggaaatcctcaagctgatgggaagctaccaatccttgttgaagggaaattgtcagagagttttgtgcaggagatagcttgtggtgcatatcatgttgctgttttaacttcaaggactgaagtttacacttggggtaagggtgcaaatggccgattaggccatggcgatacagacgatagacataccccaacattagtagaagctctgaa

SEQ ID NO: 166812 - DNA, 276 bp, Glycine max
tgatctcaagcatctcagagctgttgccaccgaggatgctcagggttatgccgagaaggaaggcctttctttcatcgagacttccgctcttgaagcaactaatgttgagaatgctttccagactattcttgcagagatataccgcattatcagtaagaaatcactctcttccaatgaccctgctgccaatattattaaagaaggcaagactatcacagttgggggggcacccgaacccaacacaaacaagccttcttgctgtacatcatcttgaaa

SEQ ID NO: 166813 - DNA, 266 bp, Glycine max
gtggtttcagtgactgatcggagttcacttgatccttcataagtcgtcatcatcatcatcatcatcaccgttgattgaagaagatgccgatcagatacatcgccatcggaaggcctgaagaggctactcaccccgacacgttgaaggcgtggttggctgagttcatctccagcttgatcatcgtgttcgccggttcaggttccggcatcgcctacaacaagctcagcgacaacggcgccgccactctcgtcgggatcatctccgct

SEQ ID NO: 166814 - DNA, 270 bp, Glycine max
caattcacaaccgaaacagtttccatctctctcacaaaatgacaacaatatcaaattgctcccttctcttcctcttcctcttcctctccaccctccacatagcttccaccctctcaacccccaccaacttcatcaagtcctcctgcagcaccacccagtacccagccctctgcatccagtccctctccgtctacgcctccaccatccagcaagacccccacgagctcgtccagacagccctctccctctccctcaaccacaccgaggcca

SEQ ID NO: 166815 - DNA, 276 bp, Glycine max
gcgaagaggcgcaccgtagcagtaactcgtggaattgctagcaatggcgaggatcaaggtttacgagctgaggcagaagacgaaggctgatctgttgaatcagctgaaggacctcaaggccgagcttgccttgcttcgtgttgctaaggtcaccggcggtgcacctaacaagctctctaagatcaaggtggtgaggttgaacattgcccaggttttgacggtgatttctcagaagcagaaggccgcgttgagggatgcctacaagaacaagaagta

SEQ ID NO: 166816 - DNA, 277 bp, Glycine max
caagaatggcacttcgttgcttggtgatgtccctttctgttctcttcactcttggtcttgcgagagaaagccatgccagagacgaagatttttggcatgctgtttggccaaacactcccattccaagttcattgcgagatcttctaaagcctggccctgcaagtgttgaaatcgatgatcaccctatgcaaattgaagaaacacagtacccgaaaaccttcttctataaagaagaccttcatccaggcaaaacaatgaaagtacaattcagcaagcc

SEQ ID NO: 166817 - DNA, 278 bp, Glycine max
ctgctttgtgcgtgtggtcggtcactgcaaacgttaaaaccagaacattctcttcagcttaacccttctttttcgatggctaatcggcacacgattattcttatgcagacctcgcagaacagagcaactaggacgttcatggattatgaatccataactcaggccatggatggcatatgtgcactgtatgaaaggaaactgaaggagttgaacccgaccataagaaatctctcgtatgacattactgatctctacaacttcatagatggtcttgcaga

SEQ ID NO: 166818 - DNA, 268 bp, Glycine max
cggctcgagatggcatttcgatgctcagtcatctcttttaccattctcttctctcttgctcttgcaggagagagccatgtccatgcatcgctacctgaggaagattattgggcagctgtttggccaaacactcccattcccactgcactgcgagagcttctaaagcctctccctgcaggtgttgaaatcgatgaactccctaagcaaattgatgatacacagtacccaaaaacattcttctataaagaagaccttcatccaggcaaaa

SEQ ID NO: 166819 - DNA, 269 bp, Glycine max
agcatgtgttgctgttggcttgacatcacgttacactccaactctcttgttggaatctggtttgcaaaaagtcagagggttaattgtggagtactttggaaggatgtcttacgttgctcataacgttaatcagccccaagcgacagatttgttggagggaaatttttcctttgatattaaatctcgctctagattggaaaaagtttcctctacaaaagcacaatttgttagtggaaaaactttcaaatatgatataattggtgctggtt

SEQ ID NO: 166820 - DNA, 268 bp, Glycine max
cccgcctcacgggagacttcgaggagtcctccctggagttccagcggaagatcctcgaacgctctggcctcggggcggaaacctacgtccccgacgccatgcactctattccgccccagccctccatggccgctgccagggccgaggcggaacaggtcatgtttggtgtcttggacaacctcttccaaagcaccaacataaaaccacaggatattggtatccttattgtgcaattgcagcttgtttaaccctaccccctcactgtctt

SEQ ID NO: 166821 - DNA, 252 bp, Glycine max
catcaaagtttcacttcagccttatccggtttagggtttcggtttttgaccctacctttgacgtatcgaaaccttaagtttcggatcaggtctgagcaatctggttggtagaacctttggtcttagagagtcaagttttatgtctgaattagacgatcaaattcctactgccttcgatccttttgctgatgcaaatgctgatgactcgggtgctgggtcaaaggagtatgtgcatattcgggtacagcagcg

SEQ ID NO: 166822 - DNA, 261 bp, Glycine max
ctcagaaccttctgaggttaaagcaaaaaacaaagagagagagagagagaaaatgatgaagccatcgatgctcagatctctccactccgccgccacccgcggcgcctctcatctcttccgccgtgggtacgcctccgagccggtgccggagcgcaaggtagccgttctcggcgccgccggcgggcatcgggcagcctctctcccttctcatgaagcttcctcccctcgtttcgagcctctccctttacgcatatcgccgga

SEQ ID NO: 166823 - DNA, 272 bp, Glycine max
aactcggaatcggctcgactcgagcgtgagataacaatagcacctgaaaaagggccatgatgaagaagagaagctgattgaattcaaaacagatgaggaacaagttgttgatggacttgatagagctgtattgactatgaagaagggtgaggttgcgttgttgaccattgcacctgattatgctttcggtacatcagagtcccaacaggagttggctgtagttcctcctaactcagccgtgtattttgaagttgagctagtgtcatttgaga

SEQ ID NO: 166824 - DNA, 262 bp, Glycine max
aattcggctcgtgctcgagccgcacgatcctactaaaaccaaacaactactcgttgattgaacagacacagtgtgtgttgtgttgtgttgtgtcggtggcatttttgttggttcgagtgagcgagggaagatgtactctagagattcatggggtggtccgttggagataaacgcgacggactcggcaacggaggacgagcggagccggaacctgcaggacgtggacagggcggcgctgtcgcgtcccttgatcgacacgcac

SEQ ID NO: 166825 - DNA, 269 bp, Glycine max
gtcgtttccttcccttccctaacgatctgaggaagacacctagcttctctccacgcccttcttgggtaatctgaagtgcagcgatggcggatggattgcactcgcggcatccatcagtagttcagaagttatctggacagtcttatttgttgtctaggcttgcccctactcactcaagaaactattccacaactggtagttacttcaatggaggcttgcagtcttcgggtttggttccagtcatggcacatgcaccggctgagaaagga

SEQ ID NO: 166826 - DNA, 272 bp, Glycine max
ctcaaacctcttcgttccttcgattcattccatttcttccagaatggccaaagacccagttcgcgttctcgtcactggagccgcatggcaaattggatatgctcttgtccctatgattgctaggggagttatgctgggtcctgaccagcccgtgatcctccacatgcttgacattcctccagcagcagagtcgttgcatggggttacactggacttggtggatgctgcattcgctcttcttaaaggtgttgttgctacaaccgatgtggttg

SEQ ID NO: 166827 - DNA, 265 bp, Glycine max
gtactgttgtcggatcgaaaaccctaaattgaattcgaatacacaacatgcagcaggggggaggatctgagacggaagtaacatgggaagaccagcagaacatcaacaaattcggaaggttgaataatcgctttcacgagcttgaggatgagatcaaaatcgcaaaggaaacaaatgataatttggaggctgcaagcaacgagttgattctcacagatgcagaggtcattcggtttcaaataggcgaggtttttgctcatgtgcc

SEQ ID NO: 166828 - DNA, 184 bp, Glycine max
gcttaattttccaaacaacaatatacccaatgggggacagagtcaggtctgttcttgatgttggctgtggggttgctagcattggcggatacctcctatcctccaatgtgatagcaatgtcattggcaccaaatgatgttcatcagaatcaaatccagtttgccttagagatgggaattccagc

SEQ ID NO: 166829 - DNA, 266 bp, Glycine max
cgagaatctgacggaggaaaatagaaggttgcagaaggaggttcaggagcttagagcactgaaactttccccacagttttacatgcaaatgaccccactcacgacgctcaccatgtgcccctcttgcgagcgtgtggctgttccgtcctccgccgtcgatgctgccacgcgtcatcatcccatggcccagacccaggcccaggcccagattcggcacaggcccattggcccgtgggcttccgcctctcccattacgcaccggccgt

SEQ ID NO: 166830 - DNA, 242 bp, Glycine max
gttcttttaggggacatgccagttctgatatttataccatctgctctcaagactgagaattatggcatctctgcttgcataaaagctatgaccatgtcatttaatccaaacccgtgttctgattcatggagtttggaatcactgaagcgtaccggatttacattgtgatatcatttgtgttactggatggactgctaccccaatgcaggatgttcaggatacaattgcttggttgagttcct

SEQ ID NO: 166831 - DNA, 315 bp, Glycine max
  unsure (1)..(315): unsure at all n locations
cgagaatctgacggaggaaaatagaaggttgcagaaggaggttcaggagcttagagcantgaaactttccccacagttttacatgncaaatgcaccccacccacgaacggctacaccatgtgncccctnttggcgagccgtgtgggctgttcccgtacctaccggccgtacgcatggctggccacgcgtncatncatccccatgggccccagaaccccagggcccaaggcccaaaatttngggccaanggnccnnttgggccccttggggntttcgggnttntccccatttaaggcnaccggccggttttgaatt

SEQ ID NO: 166832 - DNA, 265 bp, Glycine max
agcttccacaaggttccaatgctgtcttgctcaaaaatttgtatttgtcttgtgatccgtatatgaggactctcatgaacaggcccgaaggccctcccaatagtcgtgcttacactcctggctctccattaataggatatggtgtgtctaaagtcctggaatctgggcacccagattataaggaaggtgatttagtgtggggctttaccaaatgggaagagtatagcttgttaccctcagctcaaatactcttcaaaattgagca

SEQ ID NO: 166833 - DNA, 266 bp, Glycine max
gctctctgtgaggcttcaatttctaattagggtttcgcttagagtaaccaataaccatgggagtcttcacctttgtcgtccgcaaatccggcagcgaatggagcgccaagcaacattccggcgacatcgaggcctccgccgattccaccttcgatctccaacggaagctcgtgcaagccgctctcgccgttgattcctccggtggagttcagtcctctttctctcccgtgtctcctacctccgctgtgttccaggtgatagtgggt

SEQ ID NO: 166834 - DNA, 264 bp, Glycine max
aaaaaagtgtagtgggaaatggcaggtgcgggtgcaggtggagtgtatggggacgcgaaccacagtggtagactacgtgttcaacgtggtgctgatacgggactcggcgatgcggaagtcgcagataatagttcggattacgaagaacgagttcagcttggactccaagtccaccatcggtagttggatttcagacgaagactttggttatcggtcacatgaccgttaagggtcatatctgggacactgtcggccaagatcgat

SEQ ID NO: 166835 - DNA, 264 bp, Glycine max
attttctggctaacaaaccctgacactccttcttctccgcttcctcttcgatcatcgcttcagaatgccgccgaagttcgacccctcccagatcgtcgacgtcttcgtacgcgtcaccggcggtgaggtcggcgcggcgagttccctcgtcccgaagatcggtcccctcggtctctcccccaagaagatcggagaagatatcgccaaggaaaccgccaaggactggtttggcctccgcgtcaccgtcaagctcaccgtgcagaa

SEQ ID NO: 166836 - DNA, 247 bp, Glycine max
attgtaaagctggtatggggaggactggactgatgatatgtagtcttcttttgtttcttaagttcttcccaactgcagaggaagccattgattactttaaccataaaagatgtgtagatggaaaggctttagtcctccctagtcagattagatatgtaaaatactttgaacggactttaacacacttcaatggagaagtccaaccaggacgaaagtgcatgctaagagggtttcggcttcacaaatg

SEQ ID NO: 166837 - DNA, 258 bp, Glycine max
atctctgccgtcgtcgacgacgctttcttgcaaaaatacggtatcaagttgaacgatgcgattctcgctgaggataagcacaaacctatgtatgaagaattggctaacaatcctaatgtggagtacattgctggaggtgctactcagaattcaatcagggttgctcagtggatgcttcaagcaccaggtgccacaagttacataggttgcataggacccgacaaatttggagaggagatgcagaagaaatgtacactt

SEQ ID NO: 166838 - DNA, 233 bp, Glycine max
atgaacttggggttctccatgtttgttatgtctcttatggtagcaccagtcatagactggacctcaagcagcaccaagctcaatgagcgaccgagtggcgcctacagcttgacggttgcagcagtggtgatatgtggtttagcagatggcttggtgggtggaagcttgataggatcagctggaaagctcccaaaacagtatatgcaagcagtttttgctggaactgcttcttc

SEQ ID NO: 166839 - DNA, 267 bp, Glycine max
cgctcttttcaagccttaaatgagtaaaaaagagtgcagaaaggaaagacaggagcaccatttttggtttgagagacatcattagcaagagagttcaacatggggcagagagagtttaatggggtggtgttgatgatgctgtgtttgtgggtttctggtgtcacagcctctgtgacttatgaccacaaagccattgtggttgatggcaagagaagaattttgatctctggctccattcattatcctagaagcacacctcaaatgtgg

SEQ ID NO: 166840 - DNA, 262 bp, Glycine max
tttcatccttcgatcatacacttagttgcttccaattaagatggttctgctagagaagctctgggctgatgttgtggctggccctcaacctgagcgtggccttggcaagctcagaaaactcaccaccctcaaaactattgatgaaggagaaagtagcaagctgcagaagacgttgtcgatgccgtcgacaccaacaaccccgatgactccgacgactccaacgacaccgggatcggcccgtaaagctgacaacgtttggagg

SEQ ID NO: 166841 - DNA, 262 bp, Glycine max
  unsure (1)..(262): unsure at all n locations
gacaaatgtgattggcacaccataacatgcctgggntcgctaagcgagtaggagcaaggattctgcttacatcaactttagaggtatatggggatcctcttgtgcatccccaacctgaaagttattggggcaatgttaaccctattggagttcgtagttgctatgatgaggggaaacgggtggctgagacattgatgtttgattaccataggcagcatggaattgacatacgcattgcaagaatctttaacacatatggacc

SEQ ID NO: 166842 - DNA, 211 bp, Glycine max
cgctctctaattacatttctcatctcattctccttctgttcaaacactctcatggcatcagataagaagattaggatcggcatcaacggatttggaaggattggccgtttggtggccagggttgcccttcaaaggaatgatgttgaacttgttgctgtcaacgatcctttcatcaccactgattacatgacatacatgttcaagtacgaca

SEQ ID NO: 166843 - DNA, 261 bp, Glycine max
gagaaatgatatggttctccatgaacaagaacatcaatatcaagctcttcttgaagttcttgttcatggagaaccagagagatatgatatggttgagtacttcggtgagcaattgtcaggctttgccttcactgttaatgggtgggtgccatcctatggttcccgttgtgtgaagccaccaatcatctatggtgatgtgagccgcccaaagccaatgactgtcttctggtcatctctggctcagagctttaccaagcgccc

SEQ ID NO: 166844 - DNA, 260 bp, Glycine max
ctcttcttctcttgcggcttcggtttagcggcttcttctagatttaaggaagatgggtaaggaaaaggttcacatcagtattgtggtcattggccatgtcgactctgggaattccactaccactggtcacctgatttacaagcttggaggcattgacaagcgtgttattgagaggtttgagaaggaagctgctgagcatgaacaagaggtctttcaagtatgcctgggcgctggacaaacttgaggctgagcgtgaaaga

SEQ ID NO: 166845 - DNA, 265 bp, Glycine max
gtctattccggcgacaacggccgttgtcgacggcggcggtgttctccggttacacgcgccggaactgggaaacggatcagtgctggtagtgagtcactgagtcgactcgctcgagtgaatgagagaagacgcggttattgaagcgcctttctttgcatataagtacttaatcactagttagttagtcgttagagtttgtatgatactacgtctatgtatagctacatacatacatatacgcgtagagtagaatagactgccactt

SEQ ID NO: 166846 - DNA, 263 bp, Glycine max
ggtaaacaaagatggctaggtctagtgcttatcctttgttcttgatttcttccattctgtttatttcacacatttatgcctcccgagtagaagccaagcccccagtagtgaagggactatcatattctttctattccaaaacatgccccaagcttgagtccattgtgaggaaacatctcaagaaggtgttcaaggatgacaatggccaagctcctgccttactccgcattttcttccatgattgttttgttcagggatgtgat

SEQ ID NO: 166847 - DNA, 260 bp, Glycine max
cggtttttgaccctacctttgacgtatcgaaaccttaagtttcggatcaggtctgagcaatctggttggtagaacctttggtcttagagagtcaagttttatgtctgaattagacgatcaaattcctactgccttcgatccttttgctgatgcaaatgctgatgactcgggtgctgggtcaaaggagtatgtgcatattcgggtacagcagcgaaatggtaggaaaagcctgacaaccgttcatgcgatgaaaaaagaat

SEQ ID NO: 166848 - DNA, 261 bp, Glycine max
cagaaagagtgcttgggaagtaggacccactcaaaagagagagtgaagatcatggcctcatctagctactctaactctccctatgatgcctgcaagttcttgagacgaaaatgcatgctggattgcattttctccccgtatttccctccaaaagagcctctaaagttcgccaatgtgcacaagatatttagagcaagcttctaaatgaggtgcagcctcatcagagggaggatgcagtgaactcactgccctatgaagccg

SEQ ID NO: 166849 - DNA, 259 bp, Glycine max
gtgtcacaatcactacctgcgccgcactgacacgttcactctccgaccacgtctgcgcgaggtggtctgtctcgacttcggacgaagatgacgtgagattcatcacatccattggacggccatgcgggaaccagatcggagccaagttctgggaggtggtgtgcgcgagacacgggctcgattcaacggggaggtaccaaggggacaacgagttgcaactcgaacgagtcaacgtctactagaatgaagcgagttgcgg

SEQ ID NO: 166850 - DNA, 261 bp, Glycine max
gttctacatagcatctcctttaccaccaatctagatatcagagaactttgcagctctcttaggtttttaaaaaacaccacgcaaacagcaagatggccacttccgacagtaacatgctactaaattatgttccagtttatgtgatgctcccactcggagttgtcaatgttgacaatgtttttgaagacccagatggccttaaagaacagctcttgcagcttcgagctgcgggtgttgacggggttatggttgatgtgtggt

SEQ ID NO: 166851 - DNA, 259 bp, Glycine max
caatttaccagctatacttgttccttttgaaggttagaagtgctacaatacaaacaatggcagctactcaggaagatgtgaagcttttgggtattgtgggaagcccatttgtgtgcagggtccagattgcccttaagttgaagggagttgaatacaaatttttggaagacaatttgggcaacaagagtgatttgcttctcaaatacaaccctgttcacaagatggttccagtgtttgttctccaatgagcagcccatag

SEQ ID NO: 166852 - DNA, 256 bp, Glycine max
tctgagttgaactacctgcgtttctacctgccagatatcttccctactctaaataagattctgctctttgatcacgatgtggtggtgcaacaagatctcagtggactatggaatgccaatttgaaaggaaaagtaattgcagcagtgggcacctgtcaggaaggtggaacctcatttcataggatggatatgctcataaacttctcagatccattcattgcagagaggtttgatgccaatgcttgcacatgggcat

SEQ ID NO: 166853 - DNA, 291 bp, Glycine max
gccagctcttggtactgctgttttcagcaccatatctgtcccgcgtggtggtgtcacatcgcttattgtctggattccttggaatgaaaacttcaacttacgccaatgcaagaaccaccctggacgcaagaaagggtgttgggaaggctttcattacggcttttagatctggtgcagttatcggttttctccgtgctgcaaatggtcttttggggctttacattggcatcaacttgttcaagatttactatggtgatgactggtgtggtcttttgaggccatcactggtta

SEQ ID NO: 166854 - DNA, 283 bp, Glycine max
gcccgttctgcattcccttttccacaataacttcaaggacttttttctcctgcacaaccttttctcccttgcactgtgggcagcgatctctgtcgttgatggtttctccagtacccttgcattcattgcaagcatgctgcatctgctgaatcatggactggcagaagattacattccctggcgaactgatgaagcggcagacacaattactggggatattgtctttgtccttcagcagaaggaacatctcaaattcataagaacagctgaagatctttttgta

SEQ ID NO: 166855 - DNA, 268 bp, Glycine max
cagcccgtgaggcagccaagtttcagatggagacgagccagctttttaatgttcttgccatttttgctctctcggacccttttgctgttgtgaatgcaaactctgaaggtgatgctctgttcgcgttcagaagagctgtgaaagacccagataacgttctagagagctgggatccaactttggtggatccttgtacatggttccatattacctgtgatgatgataagcgagttacccgactagacctcggacacgcaaaactgtctgg

SEQ ID NO: 166856 - DNA, 284 bp, Glycine max
  unsure (1)..(284): unsure at all n locations
cgagaatctgacggaggcaaatacaaggttgcagaatgaggttcaggagcttagagcactgnaactttccccacagttttagatgnccaatgaccccanccacgacgctcannatgtgccctcttncgngcgtgtggctgttccgtcctccgccgtcgatgctgccacgcgtcatcatcncatggcccagacccaggcccaggcccagattcggcacaggcccattggnccgtgggcttccgctgctncnattacgcancggccgtttgatgtctccaccatgt

SEQ ID NO: 166857 - DNA, 283 bp, Glycine max
gctgaatggtgcgtttgttgatgttgggcatgctatcatgcaattctgcattgctggattcaagaaggggcagctgaaagtgttggctcattcatatgataggtctctcggcggtagggattttgacgaggttttgttccatcactttgctgggaagtttaaggaggagtacaagattgatgtgttccagaatgccagggcttgcatcaggctcatgactgcctgtcagaacatcaagaagatgcttagtgcgaatcctgtggcgcctctcaacattgagtgc

SEQ ID NO: 166858 - DNA, 286 bp, Glycine max
gcttgtcactgctcattttcgcgttctgcgccgtcgccgtcgccgtcgcgggctcctccttcgatgatgccaaccctatccgtttagcgtcggacttggagtcgcaggtgctggacgtgatcggacagagccgccacgctctctccttcgcccgcttcgctcgccgccacggcaagcgctaccgttccgtcgacgagatccgcaaccgcttccggatcttctctgataatcttaaactcatcagatccaccaacaggaggtctctcacctacacgctcggcgtcaa

SEQ ID NO: 166859 - DNA, 280 bp, Glycine max
ctctaaaataaaaaaccctaacttctgaacctttcaccgcatcgccaccgattccctatctccactaatcaaagaaaagaaaatgagtagacgctcgagcagaactgtctacgttgggaatctacccggtgatatccgtgaaagagaagttgaagatttgtttctgaagtacggacacataacacacatcgacctaaaggttcccccaagaccacctggttatgcatttgtagagtttgaagatgctcaagatgctgaggatgcaattcgtggtcgtgat

SEQ ID NO: 166860 - DNA, 288 bp, Glycine max
attgactagtatcattaagatggctaattcctacttatccttgattgtactgatccttgtagctctgctcctcacccctcaagggcttgcttatgaatctgattcttactataagccaccagtttactagaaaccaccagtgtacaagcccaagcccaagccacacattcacaagcccaagccacccgtttacaagcccaagccacccgtttacaagacacccccttatggtaagtacccaccagttcaagacaacgatcacttctaaaccatgcgacaacgcatgtt

SEQ ID NO: 166861 - DNA, 279 bp, Glycine max
ctcaatggcaaaaattttgatgacaaagaatggtatgttagaaaagctcagaaggaatctgaaagggagaatgaattgaaacaacgatttgagcagagcatgaaagaagctgctgataaatatcaaggcgcaaacttgtatgtaaaaaatttagatgatagcattggtgatgaaaaacttaaggagctgttctccccttttggtaccattacctcttgcaaggttatgagagacccaaatggcttaagtcgtggatcaggttttgttgcattctcgact

SEQ ID NO: 166862 - DNA, 279 bp, Glycine max
atctctgccgtcgtcgacgacgctttcttgcaaaaatacggtatcaagttgaacgatgcgattctcgctgaggataagcacagacctatgtatgaagaattggctaacaatcctaatgtggagtacattgctggaggtgctactcagaattcaatcagggttgctcagtggatgcttcaagcaccaggtgccacaagttacataggttgcataggaaaggacaaatttggagacgagatgaagcaggaatgtacacttgatggtgtagagttaactatt

SEQ ID NO: 166863 - DNA, 284 bp, Glycine max
gccaattgggacggcggcgcagagccaagacgacggaaatgactaccaggacgccgtgcgccggcgccgctggttgacccgacggagtttacgtcatggtcgttttacagagcagggatagcagagtttgtggccacttttctgtttctctacatcactgtcttaaccgttatgggagtcgccggggctaagtctaagtgtagtaccgttgggattcaaggaatcgcttgggccttcggtggcatgatcttcgccctcgtttactgcaccgctggcatctcagg

SEQ ID NO: 166864 - DNA, 284 bp, Glycine max
gttgttggaaagaaaccctagcaagcggaacaatggcagacgttgaggtcgatgtggcggctgcagcagcagcagggcagccgaagaagagaacgttcaagaagttcagtttcaggggcgtggatctcgatgcgcttctggacatgtccaccgatgaactcgtgaagatgttcagtgctcgcgcacgtagaaggttccagagaggcctcaccagaaagcccatggccttgatcaagaagcttcgcaaagcgaaaagagaagctccaccaggtgagaagccagaa

SEQ ID NO: 166865 - DNA, 283 bp, Glycine max
atataacaagattgattcttttcatatccaatattcattgcttgtgcttgtgcttgctatggtgatcacattgatgaaccctaccaatgcaaccctctctccccatttctatgataaagtttgccctgcaggcattgccagttataaagtcagtggttcaacgagcaattatccgtgagcgacgcatcggagcatctcttctgcgcttgcatttccatgattgtttcgtaaatgggtgtgatggataatattgctaggtgacacccgaaacttcactggcgag

SEQ ID NO: 166866 - DNA, 272 bp, Glycine max
cagacttaacaacagcacaaagcgggttactgtctgttcaagctaccatctctctctctctttcttagtggctccttgccacaagttaaaatggcccaagaaactttcctattcacatctgaatcagtgaacgaggggcaccctgacaagctctgtgaccagatctccgatgctgtgctcgatgcatgcttggagcaggaccctgacagcaaggttgcctgtgaaacctgcaccaagaccaacatggtgatggttttcggagagatcacaac

SEQ ID NO: 166867 - DNA, 273 bp, Glycine max
ctttcatcagcctaactttggtggttcttcaataagaaaaggtggtccaagggaaccttggcactccatccattctcgacttgaaggccctattgcttgggatgttttgttcaactttgagcagagatggaggaagcagggaggaaaggacttacttgttccactgagagaccttgaagatgtcattattcccccatccccggtaacttacattgatgatcatgagacatggaatgttcaattatttagatccattgatggtggagtggtttt

SEQ ID NO: 166868 - DNA, 278 bp, Glycine max
gttcgacttcgactccatgagacgaagacgacgtcgtctctctggtcagaactcagaagcagtcctaattcctcaatggagagttctgaagaggaaactgatggagtctctggtaatcatgctcctaaggaactgattcgtttggcatcaaatggtgcataatttatagatgaagtactcaatggtcaaaatgaatgctgtctggataattttcgcatggataaacatgtattctataagttgtgtgatatcctgcaagccaagggtttattgcgtca

SEQ ID NO: 166869 - DNA, 271 bp, Glycine max
tacctattccggcgacaacagccgttgtcgacggcggcggtgttctccggttacacgcctcgggactgggaaacggatcagtgctggtagtgagtcactacgtcgactcgctcgagtgaatgagagaagacgcggttattgaagcgcctttctttgcatataagtaattaatcactagtgagttagtcgttagagtttatatgatactacgtatatgtatagctacagacatacatatacgcgtagagtagaatagactgccacgtgtact

SEQ ID NO: 166870 - DNA, 270 bp, Glycine max
cttatggtggatacctaggcacccagatacgatgaagggcgtagtaagcgacgaaatgcttcggggagttgaaaataagcgtagatccggggattcccggtataggtcaacctttcgaactgctgctgaatccacgggcaggcaagagacaacctggtgaactgaaacatcttagtagccagaggaaaagaaagcaaaagcgattcccgtagtagcggcgagcgaaatgggagcacctaaaccgtgaaaagggtgtcttggagactatac

SEQ ID NO: 166871 - DNA, 265 bp, Glycine max
tggtaccggcacatttcaaaaggtgcttggccttttgcaactggagatgatggatcgcgaatttctgactgcacagctgaaggactgaaagctgttctattactatccaaaattgcaccagaaatagttggtgagccaatagacgtgaagcgattatatgattccggaaatgtcattccctcactacagaatgaagatggtgggtttgaacatatgagcttaaacgatcttataattggttggagataatcaatcctgctgaaac

SEQ ID NO: 166872 - DNA, 282 bp, Glycine max
ctggacttctgatgccggtccattagaggcatttaagaggtttggaaagaagcttgaagagattgaaaagaagcttatagagaagaacaaagatgagacattgagaaaccgctatgggccagctaaaatgccttacactctgctctatccttctagtgaggagggattgactttcagaggaattcccaacagtatctctatctaaggaccctatggttgcttaagtactgttcctggttttaaataaatgtgagattgaaggaaccagattccttaatcagt

SEQ ID NO: 166873 - DNA, 280 bp, Glycine max
ctccgcaccagtttcaccgaacgaatatcttattgtttggagcgatccgagacaaactctgtaaacatgttggtttaccaggacctccttacaggtgatgagcttctctctgactccttccgttacaaggaaattgagaatggaatgctgtgggaagttgaggggaagtgggttgttaaaggagcagttgatgtagacattggtgcaaacccttctgctgagggtggaggagaagatgagggagttgatgatgcagctgttaaggttgttgacattgttg

SEQ ID NO: 166874 - DNA, 277 bp, Glycine max
aggaaggttataaccctagttatggagctagacctctaagaagagccataatgcgacttttggaggacagcatggctgagaagatgcttgccagagagatcaaggagggcgactctgttatagtggatgttgattctgatggtaatgtgattgtgctcaatggtagcagcggagccctgaatccttgccagagacgcttcctgtataatgcggttaatttgctaatactatgtacttaatttgtttaaaccatagtcatagtatgttttacttgtca

SEQ ID NO: 166875 - DNA, 280 bp, Glycine max
aaaatcatttgtcacggtcaatggacaatgtccagggcctactctctatgcaagagaggatgatacggttattgtaaaggtcactaaccacgttaagtacaatattacaatccactggcatggaatcaaacagcttcgaactggttggtctgatgggccagcatatgttacacaatgtccgattcagccagggcagagctatgtctacaacttcaccatcaatggtcaaagaggcacacttctctggcatgcacacatcacgtggctaagagccacggtg

SEQ ID NO: 166876 - DNA, 284 bp, Glycine max
ctcggaccatattcgcattatatttctcacttctcctccgatcaatgaagaactaatccgcaaaaagctcagtgcaacgcaatcaggaagaaccaatgaatcctgtggagagtatgcagatgggttaatggagctttgtgaggagatgaatatcaaggccattaatctgtggtctgcaattcagacaagagaggattggttagacgttagcttcacggatggagttcatctatcagcagagggaagcaaggtagtggtgaaggaaatattaaaggttctaagag

SEQ ID NO: 166877 - DNA, 260 bp, Glycine max
gttgccaagtgaaccaagaacaacaacaaaaatcaagccaatgtttgtgggttttggtttcatttcattaagatgatctgtttatctcttttcttctttttaaaatttaaagtctttgtattttgtatgtaaagatgtaaaattatgattattaggtggtgcatgtgtcgcgtcatgggccaatgttaccctctgcttttaagtttggagaggccagctcatgtgtgatgtacggtgtgatggtgatatttaatttgcaa

SEQ ID NO: 166878 - DNA, 277 bp, Glycine max
ctcgagccgctgagctgagaaaacccctaaccccaacctcaaccttaacctctcctcacttacttttcaaccagaactatgattaatctttttaaagtaaaggaaaaacagagagaactggcagaaaatgcgagtggcggaccacccgttaagaagcaaagtgccggcgagttgcgtcttcacaaagatataagcgagctgaatctaccaaaatcatgtaccatgcaattccccaatggcaaagatgacctgatgaactttgaagtttcaattcgac

SEQ ID NO: 166879 - DNA, 260 bp, Glycine max
gtggaattgaacactggggtcatgatcatcaacctagctagctagtgtatacaacaacaatatgaggaagcccgaggtttctggaaaaaacaacaacattagtaacaagcttagaaaggggttgtggtcacctgaagaagatgacaagctcatgaactacatgctaaacagtggacaaggttgttggagcgatgtagccagaaatgcgggccttcaaaggtttggcaaaacttgtcggcttcgatcgatcaatgacttga

SEQ ID NO: 166880 - DNA, 274 bp, Glycine max
tgagcgacacaagggaattgctactggttggcaccccttaaacccccaactttttgcttcatggccgttaatggtgcgagcgtgatgcagcggtgcagcgtggctgcgaggttgttcatgacggcggagagggcggctccggcggtgcctcaagtgtgtggacgcggggaccagaagacgaagaaagggaagaggttcaagggttcgtacggtaacgctaggccgaagaaagagaagagcatagagcgcatcaaggacaaggtcgaagttccca

SEQ ID NO: 166881 - DNA, 279 bp, Glycine max
tcaagatgtggatatcaaagttcttaagccttgaggcatgagtacagatatgataagggagtttacagaggaagtttaggtcatgaagaagattcggcacaataatgttgttcacttcattagaggatatactaggcgcccaaatctatggatagatactgagtttatggctagggggagcttatatgactttctgcacagacaaagacgtgtatttaagcttcgatcattggtaagagtagcaactgatgtttccagaggggtgaactatttgcacca

SEQ ID NO: 166882 - DNA, 279 bp, Glycine max
tgcagatcttggtggtagtagcaaatattcaaatgagaactttgaaggccgaagaggggtgaggttccatgtgaacggcactttcacatgggttagtcgatcctaaggcacgggggaagcccgtcttatagcgctctgtgcgcgtactccgaaagggaatcgggttaaaattcctgaaccgggacgtggcggctgacggcaacgttagggagtccggagacgtcggcgggggccccggaaagagttatcttttctgtttaacagcctgcccaccctggt

SEQ ID NO: 166883 - DNA, 275 bp, Glycine max
cgaagagaatggctcccaagggtttaatctttttggctgtgttatgcttctcagcactgtcactgagtcgttgtcttgcggaggataatggacttgttatgaacttctacaaggaatcatgccctcaggctgaagacatcatcaaagaacaagtcaagcttctctacaagcgccacaagaacactgctttctcctggctcagaaacatcttccatgactgtgctgttcagagttgtgatgcttcactgttgctggactccacaagaaggagcttg

SEQ ID NO: 166884 - DNA, 280 bp, Glycine max
gtgaacgtgcatacaggaaaaggaggtggcagtggcaccactgtcaacgttggtggaaaaggaggcggaggcgtaaacgtgcatgcaggccacaagggaaagccagtgcatgtttcagttggctcaaagtctccatttgattacgtctacgccgccacggaaactcaattacacgatgaccccaacgtggcactcttcttcttggaaaaggacttgcattctggaacaaagttggacttgcacttcaccaggagtacatctaatcaagccacgttcttgt

SEQ ID NO: 166885 - DNA, 263 bp, Glycine max
cacaaagcgggttactgtctgttcaagctaccatctctctctctctttcttagtgcctccttgccagcagttaaaatggcccaagaacctttcctattcacatctgaatcagtgaacgaggggcaccctgacaagctctgtgaccagatctccgatgctgtgctcgatgcatgcttggagcaggaccctgacagcaaggttgcctgtgtaacctgcaccaagaccaacatggtgatcgtattcggagagatcacgaccaaggc

SEQ ID NO: 166886 - DNA, 234 bp, Glycine max
caacaggcatctcggttggggattgctttatctagaacaattcctctttgagacttagttaacgtgttggtcgtgaggtaactacgatgtttcattttgaccgccacatgtagttgttggcatatcttgcaaacgaaagtcgtgtttatcttggtgacaaagagtttaatgttatgggatacacactgcttttaagcttaattgggtacaagacactggtcgtgcgtggtgatt

SEQ ID NO: 166887 - DNA, 283 bp, Glycine max
  unsure (1)..(283): unsure at all n locations
ggttttncttnttctcttctcactgcatcgcttcaggttcttctgaaaagntgtctgcgcgtgtatgttggtaacttggattcacgagtcantgagagagatctcgaagacgaattccgcgttttcngagttattcggagtgtttgggttgcacgtagaccacctggtnatgcttntattgactttgatgaccgcagagacgcacaggatgctatccgtgaattggatggcaagaatggttggagggtgagctttctcacaactctagaggtggagtggtggt

SEQ ID NO: 166888 - DNA, 275 bp, Glycine max
gttgccaagtgaaccaagaacaacaacaaaaatcaagccaatgtttgtgggttttggtttcatttcattaagatgatctgtttatctcttttcttctttttaaaatttaaagtctttgtattttgtatgtaaagatgtaaaattatgattattaggtggtgcatgtgtcgcgtcatgggccaatgttatcctctgcttttaagttggaagaggcccaactcatgtgtgatgtacggctgtgattgtgtaatttaatttgcaaaatcaaaaataac

SEQ ID NO: 166889 - DNA, 271 bp, Glycine max
ctcgagccgctcgagccgaagagtctgagggaaaggatccaagtattttgacaaatgagtcgcagagagatcctagagtgctggagtggaggcccaatggtgggaaaatgcttgctgtgggttgcaagggtggaatttgcatgtgggctgcttcttatcctggaaatgctgcatctgttagatctggagctgcttcctttttaggaggtttgtctagaagctcagggaatcggtatatcctggtcgattttcttcgtagtccatatgatga

SEQ ID NO: 166890 - DNA, 277 bp, Glycine max
gccagtagtcatatgcttgtctcaaagattaagccatgcatgtgtaagtatgaactaattcagactgtgaaactgcgaatggctcattaaatcagttatagtttgtttgatggtatctactactcggataaccgtagtaattctagagctaatacgtgcaacaaaccccgacttctggaagggatgcatttattagataaaaggtcaacacaggctctgcctgttgctttgatgattcatgataactcgtcggatcgcacggcctttgtgccggcga

SEQ ID NO: 166891 - DNA, 187 bp, Glycine max
cttagcattcctaggcgcaggccaggagatgagacccaggaaactctgcgtacatctcaatttccaagcacacatgttaaggaaaaatggtcaaaaaacctttaccttgcttgtttgtgctatgggcgcacagtatgctaatttccttcacaggtcaacgtactgtgtctgaaattatatattttgt

SEQ ID NO: 166892 - DNA, 269 bp, Glycine max
attagagcttaaaccctagccgctcttctctgcattcctcactttggaaacaatcataatggagttctgtaataaggttcgaaatgtcttgaggcagggtgctgctcgtagcacacatgcccctgttgcgtccatgcttaattacatccgctgcatgtcttcaagcaagcttttcatttgagggccttcatatggagctgatgaccagtctcttaaggatgcatgttccggctttggagatatggttgatgcaaagttattactgatag

SEQ ID NO: 166893 - DNA, 274 bp, Glycine max
ggcgtttgctcacgacttggagttggaatcctcttcttcccctctggtgttctcagtacggaggagtgaaccggagctggtggctccggccaagcccactccccgcgaaattaagatcctatctgagatagattctcaggcgggtcttcgtacccaaattccaatcatacagttctatcgtaacgacccatcattggcaggcaaggacccagttcaagccattcgaaacgctcttgcggaagcacttgttttctactacccgtttgcgggtaga

SEQ ID NO: 166894 - DNA, 273 bp, Glycine max
acttgggagataaagaatctgtaaataaaatattttcagagaataaatttgatgccgtgatgcactttgctgccgttgcatacgtgggagagagcacacttgaccctcttaagtattatcacaatattacatcgaataccttgttggtattggagtctatggctaaatatggtgtgaagacattaatatattctagtacgtgtgcaacatatggggaacctgaaaagatgcctattatagaaacaacagaacagaaaccaattaatccatacg

SEQ ID NO: 166895 - DNA, 224 bp, Glycine max
gcctggtgtgtgggagtactgacagcgcatgtgcacgctcttattgtagaggagttgcaacctgctgagtaccttcaattgaaggaagcacttgctgatggtagtatctaatggcgactttgtgcttgagtaggactttgaagcactcaatgcagccttctactgcgtcagctcctaacaagtcaactggagatggtgtggagtactcatgcgccacctttctg

SEQ ID NO: 166896 - DNA, 283 bp, Glycine max
gctaaacctgcatttgctaatcatggggtcaagttttcatctgttgaggtttattagcaaccatgatggcccaaaaatataaagcagttcctaatcttatcaagggtattgaaggtctattcaagaaaaacaaggtaaactatgtcaaaggttatgcaaatttgtttcaccatctgaagtctctgtggccaccactgaaggtggaaatactgttgtgaaaggcaagcatattataattgccactggctcggatgtgaaatcattgcctggcgtcactattgat

SEQ ID NO: 166897 - DNA, 286 bp, Glycine max
cgcagcgatcccgatccaggctactccccgtctcccttcgagcaagtgcacgagaatgggaccggaaatggaaccgtaaacggctacggcgacggcgttttcgtctccgatggaccggtgcttccgccgccggaagaagtggagccggaggaaggtcacgcacttcgggagtggcgccgtcaaaatgccattcagcttgaggagaaggagaacagggaaaaagaaatgagactgaagattattgaggaagctgaggagtataaggtggctttctatgagaaaagga

SEQ ID NO: 166898 - DNA, 242 bp, Glycine max
cttagttttgtgcaagaagctatatccaggacataggaagaaagagatagacaatttcattatcaatgcagttcgaagccgtgaagatacacaaacagctgatggatcatggtatggaaattggggagtttgcttcacttatggctcttgggttgcactggaggtctagcagctgctggtaagacttacaccaattgtgctgtcattcggaagccgttaaatttctacttgacaacaccaag

SEQ ID NO: 166899 - DNA, 299 bp, Glycine max
taagaatcttcatcaaaatcaaaggcaaaaacggaagaataagaggacatgaacaaacagagatcgcgttttttggctccagagttggaagcaactgaatcccgtttgcttcgattgattaaagtctttcccattgctgaaagagatggttgcctttgggagaagttgaaagacagataaattcaagaatggcaaggatattacataaactacaaactcatgaagaaacgagtgaagcagtatgcccaacaaattcaacttggaacactagttcggcgacatgtactcaaggatttctc

SEQ ID NO: 166900 - DNA, 292 bp, Glycine max
ctcgagccgctcgagccgagtcattctccatacctcaacgaagaggctaaagcgacggcaaacactttgctatccgccttgaccgagcagagcttcgtcttggccctcgattttgccctaaagtactctcagtcacaacagacaccgtcgtcgtcgtcgtcgcatcaatggcaccgaagcagaccaaggctgagaagaagatcgcttacgatgcgaactgtgcgacctaatggaggagtacggccagatcctcgttgtgaactccgataacgtgggatcgaacagctccaga

SEQ ID NO: 166901 - DNA, 298 bp, Glycine max
ggccagtccaatctaagagaaaaacatggatctagaactccctgctcatgctgcaactgtgaatgaatctcaacaacaaaagtttgctctacctgtggattctgaaaacaaggcaactgtgttcagattattttcctttgccaaaccccacatgagagccttcacctatcatgggtctctttcttcgcatgctttgtgtctagctttgctgcaccacctcttctccccataatccgcgacaacctcaacctcacagccactgacattggaaatgccggtgtggcatcagtctcaggtg

SEQ ID NO: 166902 - DNA, 261 bp, Glycine max
ttcggctcgaggtgagtcactcttctttgataggccagatctgacaatatgcgaagaactggcttgttacatttgctatgccttgtcagtgcttgagtcagtgtggcagcagaagatgtgtataagtattacacatggacggtgacttatggagatatttctccattgggtagtccccagcaggttattcttatcaatggtcagtttcctgggcctagacttgacttggtgactagtgcgaatgtgattctcaaccttatc

SEQ ID NO: 166903 - DNA, 296 bp, Glycine max
cggctcgagtagcaacaaagtggagagacacctccagtgggcagcatgttgaatatgatcaacgccctgatatgtttagagggactgttcgatatgccagtgttcatgctcatttgggaagaactgctagtagaagggatgatcttgaatctcttgcaatacactcatcttccttcataaaggcagattaccttggcaaggttatcagggtgataacaaatccttccttgtttgcaaaaagaagatgggaacatctcctgagatgctatgctgtttttgcactgctccttttaggc

SEQ ID NO: 166904 - DNA, 298 bp, Glycine max
gcacattcttctttctatatattccaaatcccttttccgatttccaccaaaatctaaaccgaaattcccaattacccttcccaattttcaccaaaacctaatactcccacaccaatcttcgatcatggacgccgattcacaacctcaacaactcgaagaagaacagaggagcaagaactgaagtacctggaattcgtgcaattcgcgaccatacaggctctgatgcgctgcgccatcctctactcatacgccaaggagcgcgcgggtcctctgaagcccggtgtcgacaccgtggagg

SEQ ID NO: 166905 - DNA, 283 bp, Glycine max
cttacccctcttaatcccaattttctagggtttatacaattttcgatggcttcttcagatgttgagtaccgttgctttgtcggtgggctcgcttgggccactgacgacctagctctcgagagagccttctctccgtacggcgaaatcgttaaacgaagattatcaacgatcgtgagactggaagatccaggggttttggatttgtaaccttcgcctcggagcagtccatgaaagacgccatcgaagggatgaacggccaaaaccttgacggccgtaacatcac

SEQ ID NO: 166906 - DNA, 284 bp, Glycine max
gctattagttcgattttgtagtaagtgaggtgccaatatggtgaagatagctcttggtactttggatgactcttttagcgctgcctctcttaaggcttatttcgcagagttccacgcaactctgattttcgtgttcgctggtgttggatagccatcgcttacaacgagcttacaaaagatgcagccttggatccaacggggctggtggcagtagctgtggcacatgcatttgcactgtttgtaggtgtctccgtcgccgccaacatctcaggtggccatttgaa

SEQ ID NO: 166907 - DNA, 283 bp, Glycine max
acttaccaggtccagacatagtaaggattgacagactgagagctctttcttgattctatgggtggtggtgcatggccgttcttagttggtggagcgatttgtctggttaattccgttaacgaacgagacctcagcctgctaaatagctattggaggtaaccctccacggccagcttcttagagggactatggccgcttaggccacggaagtttgaggcaataacaggtctgtgatgcccttagatgttctgggccgcacgcgcgctacactgatgtattcaac

SEQ ID NO: 166908 - DNA, 289 bp, Glycine max
tagggttatcatttctccatttccattttctctctcacttttcaagaatcgtaagctatgggaaagtcttacccaactgtgagtgctgattaccagaaggccgttgagaaggcgaagaagaagctcagaggcttcatcgctgagaagagatgcctcctctaatgctccgtttggcatggcactctgctggaacctttgacaagggcacgaagaccggtggacccttcggaaccatcaagcaccctgccgaactggctcacagcgctaacaacggtcttgacatcgctgt

SEQ ID NO: 166909 - DNA, 289 bp, Glycine max
cttctctctctcaatctctttcatggtgagggtagaaccacaacaagacacaaaccacacactctcctaactctaggttatttatttctgtccccaaagaggcatgagttgcaacgggtgccgcgtccttcgaaaaggtttcagcgagtcttgtatctgcggccgtgtctacagtggatcgatacgcccgaagcacaaggccatgccactgtcttcgatgccaaattcttcggtcgtgccgacctcatgtccttcatttctaacgtctccgaaccccataggcccgctc

SEQ ID NO: 166910 - DNA, 285 bp, Glycine max
gttcgccagacaatgcttctatcctcctcctggtccgccgccggctccgccgtctccggcgagatcatgctgttcggcgtgagagtcgtagtggactccatgaggaagagcgtgagtatgaacaacctctcgcagtacgagctccctcgcgacgccgcaacgccaaagacgacgtcgctgccggctacgcctccgctgacgatgccgctccgataaactccggcaagaaccgcgaccgcaagcgagggattccatggacggaggaagagcacacagctattcttg

SEQ ID NO: 166911 - DNA, 295 bp, Glycine max
gctgtctgctgttagatctgtacccgcctagccattgatttggaaaagtccaacttcaaggatgagtaagcttcagagtgatgctctaagagaagctatctcaggaatcatggctgattccaaggaaaagaacaggaaatttgtggagaccattgaactccaaattgggttgaaaaattatgatccccagaaggacaagcgtttcagtggctctgttaagttgcctcatattcctcgccccaagatgaagatttgtatgcttggagatgcccagcacgttgaggaggctgagaag

SEQ ID NO: 166912 - DNA, 291 bp, Glycine max
taagagatatcaatatattatgataatggagggatacaataagaaggttatgattgtggggatggtgttgggcatggccatgattgggatggccaatggccaatactcgttttgtcgcatgcccagcgatgggttggcggcatgcaagccgagttgagtggggactatcctgctgatccctccactgcttgttgctcagccattgccaaggctgatcttaaatgcttctgccgcttcaaggattcgggccttctctctatgtatggtgttgatcccaacaagtgcatggaa

SEQ ID NO: 166913 - DNA, 252 bp, Glycine max
cccaatcaaaacagacatgggtttgaaggaggattttgagcagtatgctgagaaagcaaagactttgccaccgactcaatcaaacgaagacttgcttatcctttatggattgtacaagcaggccaccgttggacctgtcaacaccagccgccgggaatgttcaacatgagggacagagctaaatgggatgcatggaaggctgttgaagggaaatccacggacgacgcaatgactacttacctcactaaggtg

SEQ ID NO: 166914 - DNA, 290 bp, Glycine max
ttcatttttctctctcccttagtcaaagggattcatcgttcttcttcccaggttatttagaaaagcaaaatggtgaagatttgctgcattggtgctggatatgtggggggtcctactatggcagtcattgcacttaagtgcccatccattgaatcgctgttgttgatatctctaaatcccgcattgcagcctggaacagcgaccagcttcctatctatgaacctggccttgatggtgttgtgaagcaatgccgtggcaagaacctcttcttcagcactgatgttgaaaag

SEQ ID NO: 166915 - DNA, 291 bp, Glycine max
ctcgaaacttcaccgaacgcattccattcaccaattcgtccaagtctcgtatcaatcagtcaatccgtctcgtggaggttggagagatcggaggggaaaggatccatggcgcatcgagtggaccacgagtatgactatctgttcaagatcgtttgatcggagactcaggtgtaggaaaatctaacatcctctccaggttcactcgaaacgagttctgtttagagtccaaatccactatcggagttgagttcgccaccagaactcttcaggtagagggaaagactgtgaaag

SEQ ID NO: 166916 - DNA, 290 bp, Glycine max
ttggaagaggtcagtgaatattaccaaaatagaggttgcttcaatgagctaatatccctcatggagagtggtttaggattagaacgggcacatatgggtatctttacagagttaggagttctgtatgctagatatcgttatgagaagctcatgagcatatcaaactatttgcgacccgactcaatattccaaaactcataagagcttgtgatgaacaacaacattggaaggagctgacctatttgtacatccaatatgatgagtttgataatgctgcaacaaccatcatg

SEQ ID NO: 166917 - DNA, 290 bp, Glycine max
ctcgagccgctgtcggtggtctcattaacggctatggtatagaaggcagctcccacaaatatggtttgttcgctgatactgttgtggcctatgaaattattttggctgatggcactcttgtgagagccaccaaggacaatgagtactctgatctatactatgccattccgtggtctcagggaacactcggccttcttgttgctgctgagatcaggcttatacccgttaaggagtacatgaagctaacctataaacctgttgttggcaccctgcaagatcttgctcaggca

SEQ ID NO: 166918 - DNA, 289 bp, Glycine max
cgcaacaaaaagaaagaatcccaggcgaggagaaagatggaggggaaggagcaggatgtgtcgttgggagcgaacaagttccccgagagacagccaattgggacggcggcgcagagccaagacgacggcaaggactaccaggagccggcgccgcgccgctggttgacccgacggagtttacgtcatggtcgttttacagagcagggatagcagagtttgtggccacttttctgtttctctacatcactgtcttaaccgttatgggagtcgccggggctaagtctaagtg

SEQ ID NO: 166919 - DNA, 275 bp, Glycine max
ctcgagccgttccattacaaagaaccagtttggaatatatttttattccttctttgtttcttcactttcttccatacacataaccatgtcttctcagaccgttgtcctcaaagttggtatgtcatgtcaagggtgtgctggagcgtaaacagggttttggaaaaaatggaaggtgttgagtcatttgacattgatctgaaggagcagaaggtgacagtgaaaggaaatgtgcagccggacgaattctgcaagccgtttccaaatccggaaagaag

SEQ ID NO: 166920 - DNA, 278 bp, Glycine max
cactgatctccattcccattccatggcttccactgaatcatcccctttcaagaaaattcagattcaaagggatgacactacatttgacgcatatgtggttggaaaagaggatgctcctggaattgttgtgattcaggagtggtgggggtggattacgaaattaagaaccatgccgtgaagatttctcagcttggtagtgggtttaaagctcttattccagatttatacagaggaaaggttggtctggatgttgctgaagctcagcatttgatggatgg

SEQ ID NO: 166921 - DNA, 286 bp, Glycine max
tagaaaccatctcttcctctctcagctgtctttttaatcccccttttctcattttcccttttgcaattctcactaaaagtccttctttctatcttagctctcagaaacttcaataacaatgaagaaagttgtgttgaaggtggaagtacagaagacaaaatcaagcaaaaggctatgaaagttgtctctggcatttcaggggttgagtcagtttctgtggacatgaaagacaagtaattgaccgtaattggggacattgatccagtaaaagtagcaggcaagctga

SEQ ID NO: 166922 - DNA, 286 bp, Glycine max
gtttctttctctctcatgttgtagtatctcactagtgtttttcattcgtttctgaaccacacaaacatcaccaccgaacaatgccgacggggttaccggcggcgaattccttagtggcgccggacgaagaggggtgggtgtgggggcagacaaggcggaggcgcgccgcgacgccgagtcggagcctgctttggcgagctacctctactcgacgatcctctcgcactcgtcgctcgagcgttctctgtcttttcacctcggaaataagctctgttcctccacgctt

SEQ ID NO: 166923 - DNA, 288 bp, Glycine max
ttgaattcacatttcaacaaccatagccatggctttctccttctccaaagcacttgtccttgcctgctccttctgcttatttgcgtctttggcttttggacgcgatttctccattgtgggctattcatcggaggacttaaagtccatggacaagctcattgaactctttgaatcatggatgtcaaaacatggcaagatttaccaaagcattgaggagaagcttcttaggttcgagattttcaaggataacctaaagcacattgatgagagaaacaaggtggtcagcaa

SEQ ID NO: 166924 - DNA, 288 bp, Glycine max
cgtgtgtttgcgaattgtgcaattttcaagatctgaatcagagaatagataataatggctacaccggaccacctgttcaacctccgcaacaacttgtatctcggggcgtaccaagccgccatcaacagcggcgacgtcaccaacctctccaagaagactccctcgagcgcgacaccctcgtccaccgctgctacatcgccctcggccagcttcagttcgtcatctccgagatccatgacgacgctcccacacctctccaagccgtcaaactcctcgctctctatttct

SEQ ID NO: 166925 - DNA, 287 bp, Glycine max
cggctcgaggtgagattcacaacctcttccgccgccgccccggcttcgactcctgccaactcaagtacaccggccgcgccaaccaggtcgtagcgttcgccacgtttttcaaccaccaatcggcaatggcagcgttgcacgccttgaatgtgtgaaatttgatcctcaaactggatctgttttacatattgaacttgccaggtcaaactctaggaggaagcgtaaaccaggtggtgaagcctacgtggttatagataaaaggtccacaggggagcctgatcttcagg

SEQ ID NO: 166926 - DNA, 285 bp, Glycine max
gcgagaattgatcaggctcatccagttggtgtcacttcggtgtcatgggcaccatcgatggcacccggagcccttgtcggtgcagggctgcttgatcctgtacagaagctgtgctctggtggttgtgataatactgtgaaggtatggaactaaacaatggactctggaagatggactgcttccctgctcttcagatgcacacggattgggttcgagatgttgcttgggcacccaatttagggctccctaaatctaccattgctagcgcatcacaggacggtaaag

SEQ ID NO: 166927 - DNA, 272 bp, Glycine max
atgcaaaatcatagcagtgatgaaacaaaggtggaagatgaggatgagaagtaaaaacatgctgaactcctttcaattcctcctcatgggtctgaagtatacattggtggcattcctcatgcctcagatgaggatttgaaatctttatgtgagcgtattggggaagttgcagaggttcgaataatgaagggaaaggattcttccgagaacaagggctttggttttgtgacctttagaagtgtggaattggcttctaaaccattgaggagcta

SEQ ID NO: 166928 - DNA, 278 bp, Glycine max
gtcttcaaaatgagcaagcagtaccttgcaaatgttgctttgaaaattaatgtcaaagttggagggagaaacactgtactggttgatgcgctctcacgacgcattcccttggtcagtgacagacctacaattatttttggagctatgtgactcatccacatcctggagaggattcaagtccatcaattgcagcagttgtggcttcgcaagactatcctgaaattacaaagtatgctggtttagtttgtgcccaagctcataggcaggaactcatccag

SEQ ID NO: 166929 - DNA, 273 bp, Glycine max
ctcaactgcgcggtgagtgagtgagagacggaaagtgcaaagccatcgtcttctcttctcagagcttggctttgcttatcgattctctctcctctcatctttctcattcaaggtttgtaaaagatggccgatgctgaggatattcaccccttgtttgtgacaatggaactggaatggtcaaggctggatttgctggtgatgatgctcccagggctgtctttcccagtattgttggccgacctcgacacactggtgttatggttgggatgggtc

SEQ ID NO: 166930 - DNA, 281 bp, Glycine max
cggatcgagcgaagagatcttgaaagagaatccaaacatgtgtgcttacatggcacttctttggatgctaggcaagacatggtggtggtagaggtaccaaagctagggaaagaggctgcagtaaaggccataaaggagtggggccaccaaagtcaaagattacccacttgatcttctgcaccaccagtggtgttgacatgcctggtgctgattaccaactgaccaaacaattgggccttcgcccctatgtgaagaggtatatgatgtaccaacaaggttgc

SEQ ID NO: 166931 - DNA, 283 bp, Glycine max
tgctaatggagtgttcccaaggcgctgcaatgcatccttcatagctttaatccccaaggtggctgaccctcaattcttgaatgactatagacccatctcattaataggttgtatgtacaagattgtctctaaggtgctggctaaaagatgaagaaggtgatgtcctttattgtagatgagacacaatctgcttttattgaaggaagacatctactacatagtgtcctcattgcaaataaggtgattgaagaggccaaaagaagcagtcaaccttgccttgagt

SEQ ID NO: 166932 - DNA, 279 bp, Glycine max
cggctcgagggaaagctgtttatttcaacaacccaatgtggccaggagaagcccattcaatcaaagtagaaaagatcttatacaaggaaaagtcggagtaccaagaggtcttggtttttgagtcatcaatgtatgggaatgtgcttgacttgatggaatagttcaattgactgagagggatgaatgtgcttaccaggagatgatagctcatcttcccctctgttcaattcattcgcccaaaaatgttttagttgttggtggtggagatggcggtgtact

SEQ ID NO: 166933 - DNA, 275 bp, Glycine max
ctcgagccgtcctgccagtagtcatatgcttgtctcaaagattaagccatgcatgtgtaagtatgaactaattcagactgtgaaactgcgaatggctcattaaatcagttatagtttgtttgatggtatctactactcggataaccgtagtaattctagagctaatacgtgcaacaaaccccgacttctggaagggatgcatttattagataaaaggtcaacacaggctctgcctgttgctttgatgattcatgataactcgtcggatcgcacgg

SEQ ID NO: 166934 - DNA, 273 bp, Glycine max
ctagctgtgacttgttttgagttcaatcaaatcgcattggtatctgaaatcaggaaagatggttagcgtagctgagatcaggcaggcacaaagggcagaaggcccagcaaccatccttgccattggaactgcaaacccaccaaaccgtgttgatcagagcacctatcctgattactacttcagaatcaccaacagtgaccacatgaccgagctcaaagagaaatttcagcgcatgtgtgacaagtctatgatcaagacgagatatatgtacct

SEQ ID NO: 166935 - DNA, 270 bp, Glycine max
attctgtgttgcgattatgctagttttgatggtttgattaccaagcaagttatgagcaagatggcagaaatgataaacagtctttgtggtggtgatgaaaaattgatgcgtgaaaggacacacctgctgttggcttgttgttcaaggatggcaatttgtaagaaagatgtttggagagttgaatgtggaatcccttctggatttccgctcacagttatttgcaatagcatttttaatgagatgctcattagatatagctatgaaaaatta

SEQ ID NO: 166936 - DNA, 190 bp, Glycine max
aaaagttggtaagcagcttgagagctaccataaggcttcatcacttactcttgctatccaagatgggccccaagcaggacagatggtaccgcatgttcacattcatcttatccctcggaaaagtggtgattttgagaagaatgacgagatatatgatgcaatagatgagaaggagaaggaattgaaacaa

SEQ ID NO: 166937 - DNA, 273 bp, Glycine max
ccgattgctagaatggaatttcgatgctcagtcatctcttttaccattctcttctctcttgctcttgcaggagagagccatgtccatgcatcgctacctgaggaagattattgggaagctgtttggccaaacactcccattcccactgcactgcgagctcttctaaagcctctccctgcaggtgttgaaatcgatgaactccctaagcaaattgatgatacacagtacccaaaaacattcttctataaagacgaccttcatccaggcaacaca

SEQ ID NO: 166938 - DNA, 154 bp, Glycine max
gccagatcctatagagaaattcaagaggataatgcgggcaacccaaggtgctcttattgttgcttcaactcttcaaatagtactaggctttagtggcctttggcgtaatgttgcaaggttcttgagtccactttcagcagttcctttggtatct

SEQ ID NO: 166939 - DNA, 274 bp, Glycine max
gacaaagtgtaattggtgatcttaaacttcttactgatgggaagttgtatgagggtaggcatattcctgtatctaatattagtgcaggggaaaatcatgtagttcagatacccctaatggcacaggaggaaattctgtcttctagtgcaagtgctttcagaactgcaatggtgagtaaaaatagcaagcctcaagctactgcaatgcatgttggagctatagaaattatcattgatagtttcgcaagtactgactgcaacatagttggtgcaat

SEQ ID NO: 166940 - DNA, 274 bp, Glycine max
gaaatacatagctgctgacgtgtcagtcccgccgctggagaacagccggaagcgccagaggctggataggcgcgcttctccggcaagggagtgcgataacgcggttcatagttccaaatcgaaggtagttgaggttgttccgaattattcttcgaagagtccaacgttggactccacaagtccaacagttgtcgaggagtatccgaggtatggggtaacgtccgtttgtggaaggaggagggacatggaagacgccgtttcggtccatccatcg

SEQ ID NO: 166941 - DNA, 272 bp, Glycine max
cagcgcagcaatacgtaacaagttctatcattgaggaagtttccggtctccgaaaatgaacgacgcagatgtctcgaagcaaatccagcagatggtgcggttcatccgccaggaagctgaggaaaaggccaacgagatctctgtctccgccgaagaggaattcaatatcgatcagctgcagttggtcgaagccgacaagaagaagatcaggcaagaatacgaacgcaaagagcgccaagtcgaaattcgcaagaagattgagtactcgatgc

SEQ ID NO: 166942 - DNA, 241 bp, Glycine max
cttaaaccgaatgctgcatacctattcatcagaggcatgaaaacgctgcatctccgtgtacagcagcagaattcaacaggaatgaggatggccaaacttttagaggcacatcccaaggtgaagcgggtctactatccaggcttgccgagtcaccctgaacatgagcttgccaagaggcagatgactggtttcggtggtgttgtcagttttgagattgatggagatctacataccacaataa

SEQ ID NO: 166943 - DNA, 271 bp, Glycine max
tttccacattgcatacctcacatcttccgaattcgaagttaatttgcaagatgggttatgaaaacgctcagatactcattgtggtggttggtcatgtggaccctgaggaggcaaccaccattaacgagctgaagaagcctgttgtggagaaagaagctccagggcatgccatatgagggcatgcacgcacggcctcggaggggaaccagaaaatcatgttaacaaaataatctggaaccctaatgtatcagtgtcatcatcagtgtgtagt

SEQ ID NO: 166944 - DNA, 273 bp, Glycine max
cctttggcgaaatgttgcaaggttcttaagtccactttcagcagttcctttggtatctcttgttggttttgggctttatgagttaggctttcctggggttgctaaatgtgtagagattggactgccagagcttatattactagtatttatttcacagtttgtacctcatgtgctacatgcaggaaaacatgtcttcgatcggttcgctgttttatttacaattgcaattgtatggttatatgcttatctgctcactgttggaggggcatacaa

SEQ ID NO: 166945 - DNA, 274 bp, Glycine max
caacacttcatttcttactctcactgaaaaaaaatagcttgttcacaccatcctattttttcaactcatatatacaaatatatataacatggcttctaccttctctcgaagcctagcacttgtaagcttttacattgtcgtttgtgctgccggtaacttgaaccaagactttcagcttacgtggggagatggtcgtgctaaaatactcaacaacgaaaatcttctcactctctcccttgacaaggcctctggctctggcttccaatccaaaaag

SEQ ID NO: 166946 - DNA, 271 bp, Glycine max
attgcggctgaaggatattgaattcatggaaagaaagatagaagatattgagaaaagcatgaagaggagcaatgacaaacagttaaaaatcgagcttgaatgttgtcaaagggtgaaggcattgcttgaggaaggaaaagatatacgtctaggggattggaaggctgctgatattgaaattttgaattcctttcagttgctgactgccaagcctgttgtatacttggttaatatgacagaaaaagattaccaaagaaaaaagaacaagttt

SEQ ID NO: 166947 - DNA, 272 bp, Glycine max
gttcaatccaaataaaccacgtcgtctaaagtccagtccatatcgcgttatcaaagttgtttttatttctttttctgagagcgacagaaagtggagaagaaaaagatggagaaaatagagcacaaaacggtgaggacgaatggaataaacatgcacgtggcatccattggcacaggcccagttgtactgttcctccacggcttcccggagctttggtacacgtggcgccaccagcttctgtccctctccgccgtgggctaccgggccatcgc

SEQ ID NO: 166948 - DNA, 268 bp, Glycine max
attttgcttcagttgtgacggttgtcagatgggggcggtctgtatatgcaaatattcagaaatttatccagtttcagcttacagtaaatgtggccgctctagtgattaatgttgttgctgcagtttcgtctggtgatgttccattaaatgcagtcgcagcttctttgggtgaatcttatcatggatactctgggagcgctggccctggcaactgaaccaccaactgatcacctcatggatcgaactccagtgggtcgaagagaacctc

SEQ ID NO: 166949 - DNA, 269 bp, Glycine max
aattcgtgattttttccgaaaaccctcgtcttcgaaatcagcaacaaaaacgcgaagtgtactaagcgaagcattgcagcgtgagaatgcggaagaaggcaaaacggtcaaggaagggtaagaaggcatggagagctaacatcagcaccgaagagatcgaagatttcttcgagaaatcaacgaaggacgctctttctggtggctctctacaagccgtttcttccgattctctcttctatgaagacaagtccaaagatcttgctgtgaag

SEQ ID NO: 166950 - DNA, 266 bp, Glycine max
cattgttggtcgtccccgtcacacgggagtgcatggttggcatgggccaaaaagatgcatatgttggggatgaagctcagtccaagagaggtatattaactctcaaatatcccattgagcatggtattgtgagtaactgggatgacatggagaagatctggcatcacaccttctacaatgaactccgtgtcgctccctgaggagcacccagttctgctaaccgaagcacctctcaacccaaaggctaatcgtgagaaaatgaccca

SEQ ID NO: 166951 - DNA, 272 bp, Glycine max
aaatggcacttatgtcactgaaaaagggaagttcttcttgacctggtattctaacaaattgctgaaccatggtgatcaaatactagatgaagctaacaaagccttcctgagctgtaaagtcaaattagcaatcaaagtatctggaattcactggtggtacaaagttgaaaatcatgctgctgagcttacagctggatattacaaccttaataatagagacggataccgtcccattgcaagattgctgtctcgccatcatgccattttgaact

SEQ ID NO: 166952 - DNA, 273 bp, Glycine max
gcgaagagaatggctcccaagggtttaatctttttggctgtgttatgcttctcagcactgtcactgagtcgttgtcttgcggaggataatggacttgttatgaacttctacccggaatcatgccctcaggctgaagacatcatcaaagaacaagtcaagcttctctacaagcgccacaagaacactgctttctcctggctcagaaacatcttccatgactgtgctgttcagagttgtgatgcttcactgttgctggactccacaagaaggagc

SEQ ID NO: 166953 - DNA, 270 bp, Glycine max
ctgcaatgatgctggattatgttttgcaggggttcatgattcgttttggacacacccatgcgatgttgagaaaatgaatcagattctaagagaaaaatttgtggagctttataacatgcctatacttgaaaatttgcttgagggcttccagactacatatccagggttggctttccctccattgccaaagagaggtgattttgacttacagaaggttcttgattctccatacttcttcaactgagcaattctccacattcaacaactata

SEQ ID NO: 166954 - DNA, 267 bp, Glycine max
gactttgtaattgaggtgctgcaatggcttcaagtcaggaagaggtgactcttttgggagtaattggaagcccatttgcttgcagggtgaagattgcccttaagttgaagggagttgaatacaaatatgtggaagaaaatttggccaacaagagtgatttgcttctcaaatccaacccagttcacaagaaagttccagtttttattcacaatgagaagcccatagcagagtctcttgtgattgttgagtacattgatgagacatgga

SEQ ID NO: 166955 - DNA, 259 bp, Glycine max
gcagcgaaagcttgtggttttggggattccgtgggatgtcgatactgagggattaagggaatatatgagcaagtttggtgagctggaagattgcattgtcatgaaggagcggtcaactggacggtctcgtggttttggatatgttacatttgcttcagtggatgatgctaaggaagtactatcaagtgaacatattattggtaataggacgctggaagtcaaagtggcaacaccaaaggaggaaatgagggcaccagtc

SEQ ID NO: 166956 - DNA, 266 bp, Glycine max
cttaagccgaatgctgcatacctattcatcagaggcatgaaaacgctgcatctccgtgtacagcagcagaattcaacaggaatgaggatggccaaacttttagaggcacatcccaaggtgaagcgggtctactatccaggcttgccgagtcaccctgaacatgagcttgccaagaggcagatgactggtttcggtggtgttgtcagttttgagattgatggagatctacataccacaataaaatttattgattcattgaaaatccc

SEQ ID NO: 166957 - DNA, 265 bp, Glycine max
caatggcaaggtgttgggagaaagtcttgatttgatcaaatatgtagatgcaaactttgaagggacacctttgtttcccagtgatcctgccaagaaagagttcggtgagcaattgatatcccatgttgatacattcagcaaagacctgttcgtttcattgaaaggggatgctgtacagcaagccagtcccgcttttgaatacttggagaatgctcttggtaaatttgatgatgggccattcttgcttggccaattcagtttggtg

SEQ ID NO: 166958 - DNA, 178 bp, Glycine max
caatggcaaggtgttgggagaaagtcttgatttgatcaaatatgtagatgcaaactttgaagggacacctttgtttcccagtgatcctgccaagaaagagttcggtgagcaattgatatcccatgttgatacattcagcaaagacctgttcgtttcattgaaaggggatgctgtacag

SEQ ID NO: 166959 - DNA, 268 bp, Glycine max
ggcgggtagggtttcgacgtgcttcttcttcgtgtttgctctttctctccttcttccttttcagatctccgctgaggaatcatcggagaaagagttcgtactcacattggatcactctaactttcacgacactgtcagcaagcacgatttcatcgttgtcgagttctacgctccatggtgtggccactgtaagaaggatgctcccgagtatgagacagctgcttctatcttgagtagtcatgatcctccggttgttttggctaaaatt

SEQ ID NO: 166960 - DNA, 266 bp, Glycine max
aggtgctgctgataaaattcacggtgacgtattaaaaatgaacggggatttccatgcttatacacttttggaaccaattggtgttgtgggacacataattccatggaatgcccccagcctctcatttttcatcaaggttagcccttccttagctgcaggctgtactatggtcctcaaacctgctgaacaaacacccctctctgctttgttttatgctcatctagctaagttggctggaatcccagatggtgtgcttaatatagtac

SEQ ID NO: 166961 - DNA, 204 bp, Glycine max
aagaagttgaactcagaaagtttgcagggctttcgtgagtggcagtcagaaatcaatttcttaggaaggatttctcacccaaacctggtcaagctattgggttactgttgtgacgatatcgaatttctccttgtgtacgagttcatgccaaagggaagcttggagaatcatctctttagaagaaatactaacagtgaaccactc

SEQ ID NO: 166962 - DNA, 269 bp, Glycine max
gaattttatagaccagagagagtttttagagagagaaaggatgaagatcacggcattgttggtgcttaaatgcacaggtgagggttccgatcccgttattctggcgaacgcatccgacgtcagccacttcggttacttccagcgttccagcgtcaaggagttcatcgtcttcgtcggtcgcaccgtcgcccgtcgcacccctcagggccaacgccaatccgtacaacacgaagagtacaaggtgcacacatacaacagagatggtcttt

SEQ ID NO: 166963 - DNA, 258 bp, Glycine max
taagaatgtcagacgacgatttcgagcttcaaattttcaagctgtcactcgagtaaagccctacatttgcactatgccactgagaatggatgagggatggaatcaaatccagtttaacctggttgatttcaccaagagagcttatggtactaattatgtggagacactgcgagtacaggtccatgcaaactgtcgcctgagaaggatatacttctctgatcgcctgtactctgaggaggaactcccaccggagtttaa

SEQ ID NO: 166964 - DNA, 257 bp, Glycine max
ggatattgcatcagcttgtgcacggtcgtcatatgggggcggtctgtaatctgcaaatattcagaaatttattcagtttcagcttacatagatgtggccgtctagtgattaatgttgttgctgcagtttcgtctggcgatgttccattaaattcagtgcagcttttttgggtgaatcctatcatggatactctgggagctgtgggcctcgcaacttgaccaccaactgatcaccctcaggatcgaactccagtgggt

SEQ ID NO: 166965 - DNA, 255 bp, Glycine max
cggtcaagccacggacccacacaggcatcgctgaaaggttacgtagggagagaatcgccgagagaatgaagggcctacaagaactggttcccaatgccaacaagacagacaaggcatccatgctagatgagatcatcgattacgtgaagttcctgcagctccaagtcaaggttctgagcatgagcagattgggcggtgctgctgctgtcgctccccatggttgctgatatgtcctctgagggaagcggagactgc

SEQ ID NO: 166966 - DNA, 263 bp, Glycine max
caacaacaatcgcaaccgccactccgaccactaccgcctcctcaagtccaacgtcgacgctctcaacctcatccaggtcggcctcactctcaccgacgccgccggcaaccttcccgatctcgccggaaaccgctccatctgggaattcaacttccgtgacttcgacgttgcgcgtgacgcctacgcgctggactccatcgatctcctccgccgtcaaggaatcgatttcgcgcgtaacgccaccgacggcgtagagtccacgc

SEQ ID NO: 166967 - DNA, 264 bp, Glycine max
ggttcttccatttgactcttgttctgaacgacttttgcagagaatcaaaccatggcagtgaaagtatacggtccgcactgtgcttccaccaagcgggtgctggtttgtctggttgagaaggaagtcgaatttgaggttgtccctgttgatgtcactaagggggagcagaaggatcctgagtacctcaaactacagccatttggagtagttcctgtcatcaaagatggagattataccttatatgaatctcgtgctataatgagg

SEQ ID NO: 166968 - DNA, 192 bp, Glycine max
cccttgttatctctctttcattctcacttgtactcatctctttttcacaactttttttgtaccttctgatctaatggcagttccagtgattgatttttcaaagctgaatggtgaagaaagaaccaaaactatggcacagattgctaatgggtgtgaagagtggggattttttcagttgatcaaccatggtat

SEQ ID NO: 166969 - DNA, 266 bp, Glycine max
ggatgaagcaatgaaagtgagagagtccaattatgcgaacgctttgtgatgcttgtgagagtgcggcggctatagttttctgcgccgctgatgaggctgcactttgtcgtgcctgtgatgagaaggttcacatgtgcaataagctagctagtaggcatgtgagggttggtcttgcaagtccaagtgatgtgccacggtgtgacatatgtgagaatgcaccagctttcttctattgcgagacagatggaagttccctttgtttgcag

SEQ ID NO: 166970 - DNA, 302 bp, Glycine max
  unsure (1)..(302): unsure at all n locations
cggctcgaggttcactgttgtacaagctcaagtgcacacatttttcatcaagcaaggtgccactctggtacgttccataggaccacatttccaagtcccaccagcatcgctccaaggcctagttggagtcacaatactctttgctgtgccattctatgaccgtgtctttgtgccactagcaaggaaaatcacagggaaacccactgggataacagtgctacaaagaattggggtaggacttttcttgtcaatccttaacatggttgtgtcagcacttgtggaggccanaagggttggtgttg

SEQ ID NO: 166971 - DNA, 291 bp, Glycine max
cgaaaagtaaaaggaagaagcttcgtcctttctatctccgcaggctgcagacaaaccaaattttgagtcacacatacatgatacccattcctcaccattgacttcctcaaccgatccatttttcttagtttttcgctttcctcagatggcaagtgggtttggggaatcaacagggaggtcacccccaagcccttcctacttcaacaataatactaacagcgatgctgccaattttgaatgcaacatttgctttgaattagcgcaagacccgataattactttgtgtggtca

SEQ ID NO: 166972 - DNA, 291 bp, Glycine max
atcctatcctatcgtagcaaagaaagaaagaaagaaaaccctagcttaccttttcaactttcaagatgcatatcttcgttaagacactcactggtaagacaatcacccttgaggtggagagttcagataccatagataatgtaaagtccaagattcaagacaaggacgggatcccaccagaccagcaacgtctcatttttgctggcaagcagcttgaggatggacgtacacttgctgattacaactctcagaaggagtccactcttcacttggtgctccggctccgtggtg

SEQ ID NO: 166973 - DNA, 291 bp, Glycine max
caacaaccctcttgagtagtaatggccatggacatcaacgcaagctctctgctcttgccgttatgcttcaccactcttaccgaggctctatggttaaccatccccagcaagggaaccaagtgcatgtccgaggaaatccagacacacgtcgtcgttttagcagattactatgttgtagccgatgatgtccagggtcaccaacttcaaactatttctgccaaggtgacatccccttatggaaataatcttcaccagaatgaaaatgttactcacggtcagtttgcatttaca

SEQ ID NO: 166974 - DNA, 292 bp, Glycine max
ctgcaatgatgctggattatgttttgcaggggttcatgattcgttttggacacacccatgcgatgttgagaaaatgaatcagattctaagagaaaaatttgtggagctttataacatgcctatacttgaaaatttgcttgagggcttccagactacatatccagcgttggctttccctccattgccaaagagaggtgattttgacttacagaaggttcttgattctccatacttcttcaactgagcaattctccacattcaacaactataagttgcactgaaagtattcttt

SEQ ID NO: 166975 - DNA, 213 bp, Glycine max
ctctccgtggccttttccattgacaaccgtcagatcgtgtctgcctctcgtgaccgcacgatcaagctgtggaacaccctgggagagtgtaagtacacaatccaagacggcgatgcgcattctgattgggtaagctgcgtccgtttcagccctagcacccttcagcccactattgtttctgcctcgtgggaccgcaccgttaaggtttggcac

SEQ ID NO: 166976 - DNA, 283 bp, Glycine max
ctaacatgatggtcacgtcatgttgagttatgtgcttgtgtttgctactacttcacattttcctgcgctttgtgccaatacagtcagcacctgaaagtgccattgtgacacagattcctggcttcagtggcactctaccttccaagcactatgctgggtatctgacgctggataagagtcatgggaggaccttgtactactattttcttgaatcagagggtataccttccgaggagcctgtgggtctgtgagctaatgggggacctggctgctctagcttcga

SEQ ID NO: 166977 - DNA, 295 bp, Glycine max
  unsure (1)..(295): unsure at all n locations
atcganatctcactcgcttctcgaaccctactttcttccgcggtgattgcatttgaattcctgtaatggcgattgataatatgtttaaaaatgaagctagtgaagaaaaaggagagcgtgccagaatggcttcttttgttggagccatggctattgctgacttagtgaagacaaccttggggccatcgggaatggataaaattttgcagtcaacaggtagtcagagtgaagttactgtcacgaatgatggcgctacaatcttgaagtccctccatattgataacccagctgctaa

SEQ ID NO: 166978 - DNA, 284 bp, Glycine max
tcgctctttcgtcgtcgtcacaagtcacaactcgcaaaccacaatgcctaagcagatccacgagattaaggattttcttctgacggcgcggaggaaggatgcgaggtcggtgaaaatcaagaggagcagggatgtcgttaagtttaaggttcgatgctccaagtacttgtacacgctttgtgtctttgaccctgagaaagccgataagttgaagcaatctcttcctcccggtttgagtgttcaagacctgtagagctgtcgagtgtggcagcatgcgtttgttt

SEQ ID NO: 166979 - DNA, 285 bp, Glycine max
cggctcgagaaaaaagcatccaaaaatggttctcacatccactgccactcacccagatgaaaaagaccagagcctaaactctacttttgcttccagatatgtgcgtgatcctattccaaaattcaagatgccagagaaatcaataccaaaggatgcagcttttcagataataaacgatgagttgatgttggatggtgcaccaaggctcaacttggcttcgtttgtgaccattggatggagctgagtgtgacaagctctatggcttcattaacaaaaactagttga

SEQ ID NO: 166980 - DNA, 294 bp, Glycine max
cttctctcttggttgccatgttaggccaagcaagatacctttgtgtctataggaagggcacggcttgtgccatcttggttagccaaagtgcatccttcaaccggcacaccattgaatgccacggtctttttgggactttgcacagcaacaattacactattcaccgagcttgacattataattgagttgattagcatcggcacactgttggtgttctacatggtagccaacgctcttatataccgtcgatatgtaatcactagccatgccccacctacgcacactctcgttttc

SEQ ID NO: 166981 - DNA, 288 bp, Glycine max
cttaacccgaatgctgcatacctattcatcagaggcatgaaaacgctgcatctccgtgtacagcagcagaattcaacaggaatgaggatggccaaacttttagaggcacatcccaaggtgaagcgggtctactatccaggcttgccgagtcaccctgaacatgagcttgccaagaggcagatgactggtttcggtggtgttgtcagttttgagattgatggagatctacataccacaataaaatttattgattcattgaaaatcccatatattgcggcctcgtttggt

SEQ ID NO: 166982 - DNA, 290 bp, Glycine max
cggagagtttgctgctacatcgatcatcatcacctcatggacggacacgatccacaagacccaaagcagagccctgctgacatgactgcctttgtgcaaaatcttcttcagcagatgcaaaataggttccagacaatgtccgactccattgttacaaagattgatgatatgggaagtcgcataaatgagttggaacaaagcatcaatgacctgagagcagagatgggagtggagtcctctccatcacctgcagcccctgctaagctaacggaggagataaccaaagaaga

SEQ ID NO: 166983 - DNA, 293 bp, Glycine max
gtacttccctacctcttccttcaagatgcagatcttcgtcaagaccctcaccggcaagaccatcacccttgaggtggaaagctctgacaccatcgacaacgtcaaggccaagatccaggacaaggaaggaatccccccggaccagcaacgtctcattttcgccggaaagcaacttgaggacggccgtacccttgctgactacaacattcagaaggagagtactcttcacctcgtcctccgtctccgtggtggcatgcagatcttcgttaagacactcaccggcaagaccataa

SEQ ID NO: 166984 - DNA, 295 bp, Glycine max
gaaaatgaaagtccttgttttctttgttgctatagttctagcagcatggcattgccatggctcagaccatgaccatgaccatggccacacctaccaaattttccctctgagaatgaaaactggccatggtggccactacattccggaggtatcatgccaaagttggaggcttggtgtggaagcacacaacgtcattgactggaaaaccgttcctcaagattgcgagggatatattgggaactacatgcttggcgaacaatatagatcagactccaaaatagttaaccaacaagct

SEQ ID NO: 166985 - DNA, 287 bp, Glycine max
tttctctcttctctctccccgcccaaaccctaactccctaccctattccgctttctctcatccatcatgaaaggaggaaagtccaagaccgaatctaagagagccgatgccaaacttgctgtgaatacgaagggcgccgccaccaagactaggaaacccgccggaaaggggaaggcagcgaaagatcctaacaagccaaagaggcctccaagtgctttcttcgttttcatggaggaattcaggaaggtgttcaacaaggaacatcccgacaacaaagcagtgtctgc

SEQ ID NO: 166986 - DNA, 290 bp, Glycine max
cctcgagccgaatcggctcgaggtttggagtaatcttcgatgcttcactcaccgatccccgaaccggggccagtctcatgaggcttcattttcatgattgctttgttcaaggttgtgatggatcagttttgctgaacaacactgatacaatagaaagcgagcaagatgcacttccaaatatcaactcaataagaggattggacgttgtcaatgacatcaagacagcggtggaaaatagttgtccagacacagtttcttgtgctgatattcttgctattgcagctgaaata

SEQ ID NO: 166987 - DNA, 286 bp, Glycine max
gaagaaccatctaaaagttggactcaaaggccagcctccaattattgagggggagtttcataagtcttaagcctgatgattgctattggagtattctggatcagaattcaatttctattcttttgaccaagcatgatcaaatggaatggtggaaatgtctagtgaaaggtgatcctgaaattgatacccaaaaggttgaacctgaaaacagcaaacttggtgacctggatcctgagactcgacagactgttgaaaaaatgatgtttgaccagaggcagaagtctat

SEQ ID NO: 166988 - DNA, 282 bp, Glycine max
ccgcacagtatttgagttcatcgaaattagagaaatttgagggtttgaacaaacaggctcttgaagttgtttacagggtcactgttgggggtgttaaagttaccccttttaatgattccttgtggagaacttgggttcctgatgatgggtttttcagaccaagtgttgggtcggaaaagctttactttggtgggagaatcaattaccatgttggaggggctagtcgtgaggttgggcctgataatgtgtataatagtgctaggttgattaggagtaagaatg

SEQ ID NO: 166989 - DNA, 284 bp, Glycine max
gccacacgcttcagaagacatggcctcattgggtgggttacaaaatgtgagcggcatcaattttcttatcaaagagggtccaaaagtcaatgcaaagttcgagctgaagccgccaccatatccatcgaatggtttggagccggtgatgagccagcagacacttgagtttcactgggggaagcaccacaagacttatgtggaaaatctgaaaaaacaagttgttgggacagagcttgatgggaagtcactagaagagattattgtcacatcatacaataagggtg

SEQ ID NO: 166990 - DNA, 280 bp, Glycine max
gtttcaccgcacgaatatcttgttgtttggagcgatccgagaaaaactctgtaaacatgttggtttaccaggacctccttacaggtgatgagcttctctctgactccttccgttacaaggaaattgagaatggaatgctgtgggaagttgaggggaagtgggttgttaaaggagcacttgatgtagacattggtgcaaacccttctgctgagggtggaggagaagatgagggagttgatgatgcagctgttaaggttgttgacattgttgacacattcag

SEQ ID NO: 166991 - DNA, 289 bp, Glycine max
cattttcaagctctcaacgccatctccagctgcttccttatcagaagcgcttcgccccagagattctcgcttcctctccttcaatccttcttccaacgctattaattacaaaattaacctctccgcttccctccgatccattcactccctccctcttaaaacctccttgcggatcacctgctcccaaacagatgggaatggaagtcctgcaaagaggacagtgcttcatgatctttatgagaaagaagggcagagtccatggtatgataatctctgcagacctgttaca

SEQ ID NO: 166992 - DNA, 292 bp, Glycine max
ctcttttaacaatccacacccaaattctagggttccgaaatggacgctggcggaaagatcaagaagggcgccggaggtagaaagggcggcggcccaaagaagaagccggtttcaaggtccgtcaaagccggtctccaattccccgtcggaagaattggccgttatttgaagaaaggaaggtacgctcagcgtgtcggtaccggtgctcccgtatacttggctgcagttctcgaatacctagctgccgaggtgcttgagttggctgggaatgccgcacgtgacaacaagaaga

SEQ ID NO: 166993 - DNA, 294 bp, Glycine max
gtgaatgacaaacctttctatgtcaatggattcaacacgtattggctgatggtatttgctgcagatgagtccaccagaggaaaggtcactgaggtgttcaaacaagcatcctcagttggtatgacagtttgtaggacttgggcattcaatgatggccagtggagggccctacagaaatccccatcagtttatgatgaagaagtcttcaaggctttggattttgtggtaagtgaagcaaagacatacaaaatcaggcttatattatcattggccaacaactgggaggcatatgga

SEQ ID NO: 166994 - DNA, 223 bp, Glycine max
ctctcgcaaaccaattttcacattctttgtattgagttacttgagctagccgcaaccatggaaccatccaaaaactcgcagaagccctcacatttccatgactacctccccgtgatggcgaacaagctcggcggggacggcctcatcgatgagctctgcaacggcttcaacctgctcaaggactccgacagaggggtgataacctttgagagcctcaagagga

SEQ ID NO: 166995 - DNA, 279 bp, Glycine max
gtaacttcttgttgcttttcacttatagttaacaactttcatcactaccattacgtgcattacagatccatcattcatcccaagttggtggaaggcgttggcttcgatctttttgatatggttttagagtttgaatatcaagaagaatacaggaggaactcaaggggagtgcaactcttcacttgcaaatggttgcctttctcttctccgaagggcctggttttcctttgccatggttatggtatggaatgcagtggcttcatgagagaatgtggtgta

SEQ ID NO: 166996 - DNA, 279 bp, Glycine max
tgttagcatttcacacactaattaagcatcatatcccaaaccctaatcgttgtgatattcctagttgtgtgaaatggcttccaagggcacagttgcatccacttatgttgctctattcctatgtctcaacatgctttcctacactatggtgagctccacctacaatatccctgtaatccctgatccatcagtgccttatcaaaagggtacctgccctatagatgcacttaagttgggtgtgtgtgccaatgtgttgaacttggtcaatgttaaattagg

SEQ ID NO: 166997 - DNA, 280 bp, Glycine max
acagaattgattgtataagttccaatatcctcttccttgttaaaaacagcttgttactctctgggagggaaagattggtaaaactcttgaaagaatctatgttccagaagaacaactcctgaagcaaattgaagagtccgcaccacccgtgaatgtgatcctgtcaattaaccactcttcttatgtaaagggggatcatactaactttgaaattgagtcttcttttggagtggaagcttcagctctatatcctgatgtgaaatacatcactgtggatgag

SEQ ID NO: 166998 - DNA, 281 bp, Glycine max
cccacaagaatccctccctttctggctttctctctctaaaactatcatgtcctccaccgcggctcccgtccttcccatatccaacccccaaaccaccgccgcaagacagagcgccatcgaggctccggcgaacaacccggccttccgcgccttcatcaacaacctctccgcgtccctccgacacggcctcgaccagcgccgcccgtggtcggagctcggggaccgctccgcgttctcgaagcccgagtccttctccgaagccagcctccgcgtccgcaaga

SEQ ID NO: 166999 - DNA, 286 bp, Glycine max
gctagctaggttgaaaatagtttggttttgtagtaagtgaggtgaggtgccaaaatggtgaagataactcttggtactttcgatgactcttttggtgttgcctctcttaaggcttatttggcagagttccatgcaactctgattttcgtgttcgctggtgttggttcagccatcgcttacaacgagcttacaaaagatgcagccttggatctcacggggctggtggcagtagctgtggcccatgcatttgcactgtttgtaggtgtctccgtcgcagccaacatct

SEQ ID NO: 167000 - DNA, 290 bp, Glycine max
gattgataggacaggaaggatacctatgttgaagctccgcgatcgagagtcatatgtacggaataagacaaaggaatatgatgatattgctatgaagtatttgttctatgttctatttctccttgttgctggtttttctgtttactcgctgatgtatgagcgtcacaagagctggtattcttggattctgtcttcgctcacaagttgtgtatacatgtttggctttattatgatgtgccctcaattgttcatcaactacaagctcaaatctgttgctcatctaccttgga

SEQ ID NO: 167001 - DNA, 283 bp, Glycine max
tcggggagatctgttctaccgattagtgtctcagaaatttgaggatccagcagaaggggaagctgctttggttgcgaaatttcagaagttacatgaggacctgactaatggtttccgcaaccttgaggacgaaacccgatgattgatgattgaagatttggtagtttgctcaaatattgtgttatttccaattgtaagacgcagtctagcatcgcagggttgcaacgtcccgagtgttctcatatttgactgttcgattcattcatatcacatttatttcctt

SEQ ID NO: 167002 - DNA, 281 bp, Glycine max
aaagccttgaccatgaaagcaacccctttagtgctcttcctcctcttcaccatagccaaagggcttcacaaccccaaatgtgatgctacccatcaacatgaccatgatggctcaaccctgcaagtgttccatgtgttcagcccatgttccccatttaggccctcaaagccaatgtcatgggaagagagtgtcctaaagctacaagccaaggaccaagccaggatgcagtacctttctagcttggtggctaggaggtccattgtcccaattgcctcagggag

SEQ ID NO: 167003 - DNA, 122 bp, Glycine max
attcggcgcgttctccattgacaaccgtcagatcgtgtctgcctctcgtgaccgcacgatcaagctgtggaacaccctgggagagtgtaagtacataatccaagacggcgatgcgcattctg

SEQ ID NO: 167004 - DNA, 242 bp, Glycine max
ctttgctgaggcaggatgtaaaagcttctttgacggctttgattaagcacattggcagtgttgaagagccaagcacggatgatgtcattcgtgagaaagttataaactttgttagagataaggttttccctatcaaagctgaattgttgaaaccccaggaggaaatggaaagacacataactgatctcattaaaaagagtttagaagatgtaactggcatataatttgcgatgtttgtggct

SEQ ID NO: 167005 - DNA, 187 bp, Glycine max
cttttctgtcttgtgcatccttagtcatttctcatattactacagtcaaggtatattacattcatagatgatgattaataaagctttaataaacaagagaagatgagtacttaggcttccttaagctccttagtgctgctccttgcagctctaattctatcccctcaagttcttgcaaactatgaga

SEQ ID NO: 167006 - DNA, 262 bp, Glycine max
gatgaaacaagctgcagcacttggaggagtgcaaagagccaggaagaggtttgttggtgtaaggcataggccatcaggtagatgggtggctgagatcaaagacaccattcagaagataagagtgtggctgggaacttttgacactgctgaggaagctgcaagagcctatgatgaggctgcttgcttgcttcgtggcaccaacacaaggactagcttctggccttgttctcaatcctccacaagtccagctctttcctcaaag

SEQ ID NO: 167007 - DNA, 260 bp, Glycine max
gcagagatcaacatccacatgtgtatagggtttctcctgaacagaggaaggctcttggctctggttcaaccaaagctttgaaggaccatatgaagtcctctgcaactgatggtaaaatgcaacagtggttccgtgaaggtcttgcagggccaatgttaagttctggcatgtgcactgaagttttccagtttgatgcttctccaagtcctggagcaatagttcctgcaacatcagtagccaatgtttccaccgaaaaccat

SEQ ID NO: 167008 - DNA, 236 bp, Glycine max
ggcacaatctagtggcaaaaaattggttgagtggctggttgcagcattattgttcattgccttgttgagtggtagtgcacatgctgttgcaatatgtaacattgactcaagtcaactgaacttgtgtcgtgctgcagttactggtcaaaaccctccaccacctgatgagaaatgctgtgcagttattcgccaggccaatttgcgttgcctctgcagtaagaagtctatcccacctt

SEQ ID NO: 167009 - DNA, 263 bp, Glycine max
ctggttctgctttctctctgctgcttcgattcattcacacaaccatgactagccttactaatggcgatgctggctccctcaacaaggtccccacgatcaagttcaccaagctcttcattaatggagacttcgttgactctctgtcaggaaagacatttgagacaatagatccaagaacaggagatgttatagcgaggataagcgagggagataaagaagacattgacattgctgttaaagcagcacgtcatgcatttgacaac

SEQ ID NO: 167010 - DNA, 258 bp, Glycine max
cttaatcccaattttctagggtttatacaattttcgatggcatcttcagatgttgagtaccgttgctttgtcggtgggctcgcttgggccactgacgaccaagctctcgagagagccttctctccgtacggcgaaatcgttgaaacgaagatactcaacgatcgtgagactggaagatccaggggttttggatttgtaaccttcgcctcggagcagtctactgaagacgccatcgaagggatgaacggcaaaaacctt

SEQ ID NO: 167011 - DNA, 258 bp, Glycine max
atcaaattagttcattctctttgcgcagttccctacctctcctttcaagatgcagatcttcgtcaagaccctcaccggaaagaccatcacccttgaggtggaaagctctgacaccatcgacaacgtcaaggccaagatccaggacaaggaaggaattcccccggatcagcaacgtctcatcttcgccggaaagcagctcgaggacggccgtaccctcgccgactacaacatccagaaggagtcaacccttcaccttgt

SEQ ID NO: 167012 - DNA, 255 bp, Glycine max
tcgagcttcgtttgcgtttttatcacagaggaattaacatatatatagacagcatggcagtcacactctacgaccttagctcttcctctgggttgaataaacttgatgagtaccttctcccacgcagttacatcaccgggtaccaagctacaaaggatgatcttactgtttatgcagctttgccaactgctccatcagatgaatatggaaatgtttccaggtggtacaagcacattgatgctttgttgataatct

SEQ ID NO: 167013 - DNA, 260 bp, Glycine max
gctttttgcagtcctcctttacctgcaaaaactgcaaatggctctgcttaacctcatacttgtctggttatttttcttgagtctgtgtcactattcgtgtcctacttcggcccagttaagtagacaccactatgcaaaaacttgccccaatgtagaaaacattgtcagagaagcagtcaaaaagaagtttcatcaaacatttgttacggtccctgccaccattcgtctcttcttccatgattgcttcgtgcagggctgtg

SEQ ID NO: 167014 - DNA, 261 bp, Glycine max
caaaattatcttccgtttcaggattagcgtttcaccgttacagtgaaacatgggagaaccaaaacgaatctatctgcgtatctttgcgctgctcctcttcatttccgcctcttcgtttcagcttctccgcgctttcgatgacgcgatcttttacgagtcgttcgacgaggatttcgaagaccgttggattgtgtctcagaaagatgagtacaatggtgtctggaaacatgccaagagtgagggacatgatgattatgggct

SEQ ID NO: 167015 - DNA, 263 bp, Glycine max
gcaagaacaaaaccttaatccaaccggaccgggtatcaaaggcagagaagagagtagcaaggttgcttcgaacagtttagaatcatgtcttggtgcaccattgaggtccgatcccggtgtgtttacagaactcattcagcaaatgcaagtgaaaggagtacaggttgaggaactgtattcattggaccttgactctctcaacagccttaggcctgtttatgggttgatttttcttttcaaatggcgtccaggagaaaaggatg

SEQ ID NO: 167016 - DNA, 274 bp, Glycine max
ctcttctatggtgctcatcaagatgcgtgagattgctgaggcttaccttggctccacggtgaatcaatgctgttgtcactgtccctgcttgactcaatgattctcagcgtcaagccaccaaggatgctggagtcattgctggtcttaatgtgatgcgaattatcaatgagcctactgcagctgccattgcttatggtcttgataagaaggccacaagtgttggtgagaagaatgtgttgatttctgaccttggtggtgggacatctgatgtttc

SEQ ID NO: 167017 - DNA, 271 bp, Glycine max
acacactccatcacccccatatataccccttctcctctcacactaattaacacactcatcaacaaacccttctttctttcaggttcattacttgatcagtgtcaaaagggtagttgcaaattgcaatggctaagcatgatgttgagggtggttccttctcagcaaaggactaccatgatcctcctccagcacctttgattgatgctgaggaactcacacagtggtccttctacagggctttgattgctgaattcattgccacattactttt

SEQ ID NO: 167018 - DNA, 287 bp, Glycine max
gctcggaattcggtcgcgcagtaacggcgccatcattgatgcgcagagacagcaggccttagccgttaagaagccgccgtctaatgaccgtcacagcaaggtggacggccgacggcgccgcataaggatgccaatcatatgcgccgcacgtgtgttccagctcacgcgcgagcttggccacaagtccgacggtcaaaccatcgagtggctcctccgccaggccgagccctccatcatcgccgccaccggctccggaaccacccccgccagcttctcgtccgtctccc

SEQ ID NO: 167019 - DNA, 261 bp, Glycine max
cttggaagctcttttgcctggagtgctgatgatattaagcctgaagacattggtgctttgcatctaatcccaaaggaactttcactcaagattgttagtaagattgaagctggggaaaggtttgctgtgtatgttgtagtcccaatgtggccagagggtgttccagaaagtgcatcagttcaggcaatattggactggcagaagagaacaatggagatgatgtacaaggacattattcaggcactcagagctaagggaatc

SEQ ID NO: 167020 - DNA, 266 bp, Glycine max
gacaaatttcacatggaaagagaacgaacacggaaacgccctcgtcttgcatgggacgttgcccctccctcagtgtccgaggcgcaacgggctctgccagtgcccggtgacgaagaattcgaaagaaagcacgtttcgcctccgaaaagggacgacgatcgagagggccattatgtcttcaatcttggcgaaaatctcactcctagatataaaatcctcagcaagatgggtgaaggttagcggtcaagtgtcctctgaatacgaga

SEQ ID NO: 167021 - DNA, 261 bp, Glycine max
ggggccttgttgagtgtgtttttgcaagacggtatggcgaaggacgttgaggttgctgagcgtggctccttctctgggaaggactaccaggaccctccaccagcaccactccttgatgctgaggagctcacaaagtggtccttttacagggctcttattgctgagttcattgccactttgctcttcctctacattactgtgctcacagttatagggtacaagcaccagacggatcatgctgatgcgtgtggtggggttggc

SEQ ID NO: 167022 - DNA, 262 bp, Glycine max
gcaaatatggcatactctcaacttcaaaagcgtggaaactagcctgcagatcaaggcttctgctgaacagttctatgatgttttttgcaacaagccacacactattgccaacatttcaccagaaaatattcagtcagttgaagttcataaaggtgaatggggcaaagagggatcaatcgtctcctggaactatttacatgagggaacagtttgtgtagccaagcaagtgcttgaaggcatagacaaggaaaataacaaaatg

SEQ ID NO: 167023 - DNA, 259 bp, Glycine max
aattggaaacagagttggtttacaatgggaatgctcccagagaagcatatgcaacaattctgcattcagctcatgtttacgtttgtggggctatagctgcggcacaaagcatccgcatgtctggatcaactcgagaccttgtaatacttgttgatgagacaatcagcagctatcacagaagtggtctggaagcagcaggttggaaggttagaacaatacaaaggatcagaaaccccaaagctgaaaaggattttacaat

SEQ ID NO: 167024 - DNA, 260 bp, Glycine max
gattatcctaagtctttgggaatagtgctgcaatggcttcaagtcaggaggaggtgacccttttgggagctactggaagcccatttgtgtgcagggttcatattgccctcaagttgaagggagttcaatacaaatatgtcgaagaaaatttgaggaacaagagtgaactgcttctcaaatccaacccagttcacaagaaggttccagtgtttattcacaatgagaagcccatagcagagtctcttgtgattgttgaatac

SEQ ID NO: 167025 - DNA, 258 bp, Glycine max
cgttaatgggtgggtgcaatcctatggttcccgttgcgtgaagccaccgatcatctatggtgatgtgagccgcccaaagccaatgaccgtcttctggtcatctctggctcagagctttaccaagcgcccaatgaagggaatgcttaccggtcctgttaccattctcaactggtcctttgttagaaatgaccaacctagatctgagaccacctaccagattgctttgtctatcaaggacgagtggaagaccttgaaaag

SEQ ID NO: 167026 - DNA, 229 bp, Glycine max
ctcagtgaaagagaatccgaggcgaagagaagagaaaaattaagatggaggggaaggagcaggatgtgtcgctgggagcgaacaagttcccggagagacagccgattgggacggcggcgcagagccaagacgacggcaaggactaccaggagccggcgccggcgccactggttgacccgacggagtttacgtcatggtccttttacagagcagggatagcagagtttgt

SEQ ID NO: 167027 - DNA, 257 bp, Glycine max
gagattcaggaaaaagttgtattgaaattttcacaagaggaatttcttacagcttggtcaactcaggtgcgtcctgcaacaactctgttggctgatgggtgtcctatttgtatgctatggtgcatgatagttcagtgtctacaataccaggtgattttgtcattggtgttaagttgacaaccataaacaatatgtgtgcatatgggctcaatcctggtatttcaggttctcgtcttttgggcaccattcctcagtcc

SEQ ID NO: 167028 - DNA, 259 bp, Glycine max
ttctatatcactctcaactttactcctcttcaatcagttgcatattctttgctattccaatggccactgttgaggttgtgtcagccaaggttgccctcccagaggacacaaaagaggcatcattgaaggttgacgaggagaagaacacagaagaagttgttgagactccaacaccagaaactgtagtcactgagcaaaccaaggaggaaagtactgaggccccacgacctgcagcttcagaagacaagccctcggttga

SEQ ID NO: 167029 - DNA, 262 bp, Glycine max
cctcgagccgagttcggctcgagatgcagttttcatttgttcaacttacgagaagaagagaaggcggaaaaggaaaaaaaggcacaatgggtaaggatctgagcgatgagcaagtgtcttcaatgaaggaagctttctctttattcgacacagacggtgacggtcggatcgcgccgtcggagctggggatcctgatgaggtctctgggagggaaccgactcaggcccaactcaaagccatcgtggccgaagagaacctcacg

SEQ ID NO: 167030 - DNA, 264 bp, Glycine max
cgatactctcaaaaacttccgtcaaatttctccggtcgttcagaatcacctcaagcaggtttattttactctgtgtttcgccgtggttgctgcggctgttggggcttaccttcatgtcctcttgaacattgggggttttcttactacagtggcatgcgtgggaagcagtgtttggttactctcgacacctccttttgaagagaggaaaagagtgactttgttgatggccgcatcactgtttcagggtgcctctattggaccctt

SEQ ID NO: 167031 - DNA, 278 bp, Glycine max
gcagagatcaacatccacatgtgtatagggtttctcctgcacagaggaaggctcttggctctggttcaaccaaagctttgaaggaccatatgaagtcctctgcaactgatggtaaaatgcaacagtggttccgtgaacgtcttgcagggccaatgttaagttctggcatgtgcactgaagttttccagtttgatgcttctccaagtcctggagcaatagttcctgcaacatcagtagccaatgtttccaccgaaaaccatcagaatgctaccagtgtt

SEQ ID NO: 167032 - DNA, 248 bp, Glycine max
attaagtttccacattcatagttaacaccattcaaagtcaaaattctttagcacaaattttcaacaagatctttgtttcactcacatcaactccaacgatggtgcagaggctcacttatcgcaagcgccatagctatgctaccaaatccaaccagcaccgggttgttaagacccctggtgggaagttggtgtaccagaccactaagaagagagcaagtggacctaagtgccctgtcactggcaagagg

SEQ ID NO: 167033 - DNA, 200 bp, Glycine max
aaacccgtccctcacactctccaaaccctagcggcactacacactagttctatcgctatctccccaagatgtcgagcgccgatcccgagcacagagaagaggaggaggcacccgccgttggcgacgacgaggacaccggagctcacgtcgctccaatcgtcaagctcgaggaggttgctgtcaccaccggcgaggaggac

SEQ ID NO: 167034 - DNA, 260 bp, Glycine max
caataagcttctccaaagaatttgaaggagctagattcattcatgttcattttttccttttccccttcgtccccatcaagtttctgattctctcttttcacttcctttctctttcttcattcttctatctcttttcaactattttctttagatttttttctttttctctcgcttttttcgcgttcactttctctactctgttttacgcattttatttattgttttgttagttaattttgcgattcgagtaattggtatgc

SEQ ID NO: 167035 - DNA, 257 bp, Glycine max
ccgccattgaattcttcttccatttctcttttttctgcatacccatttcgtttttcttcccaaatggccctttcttgctccaaagttttaagcttgtatctctcgcccgttgtgggtggtggtgatgttccgaaaaagctcactttttcttcttttttgggtctttctaagggtgttggtggaagcaggatctctaaggtgtgtgctgcttcaaatgcacccgcaccactcgctggggtcatatttgaaccatttca

SEQ ID NO: 167036 - DNA, 249 bp, Glycine max
ggccagttaatcaatgggagtcctgtggctgttaagaagctactcaacaatctaggacaagctgaaaaggaatttagagtggaagttgaggctattggccatgtgcggcacaagaatttggttagacttctaggctattgcattgaaggcactcacaggttgctggtttatgagtatgttaacaatggcaatttagagcaatggcttcatggagccatgcagcagtatggttctcttacttgggatgct

SEQ ID NO: 167037 - DNA, 258 bp, Glycine max
gttgtcggatcgaaaaccctaaattgaattcgaatacacaacatgcagcaggggggaggatctgagacggaagtaacatgggaagaccagcagaacatcaacaaattcggaaggttgaataatcgctttcacgagcttgaggatgagatcaaaatcgcaaaggaaacaaatgataatttggaggatgcaagcaacgagttgattctcacagatcaagaggtcattcggtttcaaataggagaggtttttgctcatgtg

SEQ ID NO: 167038 - DNA, 257 bp, Glycine max
gcaaaaacaaaaccttaacccaaccggaccgggtatcaaaggcagagaagagagtaacaaggttgcttcgaacagtttagaatcatgtcttggtgcaccattgagtccgatcccggtgtgtttacagaactcattcagcaaatgcaagtgaaaggagtacaggttgaggaactgtattcattggaccttgactctctcaacagccttaggcctgtttatggggtgaattttcttttcaaatggcgtccaggagaaaa

SEQ ID NO: 167039 - DNA, 274 bp, Glycine max
gtcggacgaagagcaccatttcgagtccaaggcagacgccggtgcctccaaaacctaccctcagcaagccggtaccattcgcaagaacggctacatcgtcatcaaaggacgcccctgcaaggttgtggaagtttcgacttccaaaactggaaagcacggtcacgccaagttccactttgttggaattgatattttcactgccaagaaacttgaggatattgtgccctcttctcacaactgtgatgttcctcatgtgaatcgtactgattaccag

SEQ ID NO: 167040 - DNA, 128 bp, Glycine max
gctctgtgcattcttctctcgctctctgccttccatcacactcggcatttcctttcccaagatagtagaagatggcagacactgaggatattcaacctcttgtttgtaccaatggaacaggaatggtt

SEQ ID NO: 167041 - DNA, 264 bp, Glycine max
aagctcccgtagttaaatctgcgagccattagttaaagaaaaaaaaaaccctaaaaagtttaagatgggttccaaaactcgctctttccttgctcttttcctcacgatcaacattctcttctttgcccttgcctctgcctgcgggacatgccctagccctaagccaaggcataataagcacaagcctgttaagccaagtccttcaggtggctcaggtggttcgggtggttcaggaggctctggtggttcaggtggctctggtgg

SEQ ID NO: 167042 - DNA, 263 bp, Glycine max
caatgatgtgagacagacaaagaaacatgaattagggggtatagaagactggagatgtataacagaatagtgggacagtgggagtgaattggtggcattatggcataggcctgggaaggttcttttggaactgtacatcatgcagagtggaatggctcggaggttgctgtgaaaattctgatggaacaagacttcaaaggtgaacgcttcaaggaattcctgagggaggttgcaataatgaaaggcttacggcatccaaacat

SEQ ID NO: 167043 - DNA, 257 bp, Glycine max
aagtgctcaaagaaatatgctgttcagtctgattggaaagcccattcgaaaatatgtggaacaaaggaatacaaatgtgactgtggcaccatcttttctagaagagatagtttcatcacccacagagctttctgcgatgcactgagtgaggagaacaacaagttcaacgaaggacaattgccaaagatgcatggttcaaacttgcaaccaccaacaataatcccaaacctagttgcatcattaccaatcaatggcgc

SEQ ID NO: 167044 - DNA, 258 bp, Glycine max
cgagggagccgtagcagcggaagctctagcttgggtagcgaatcacaatggcgagaggattaaagaagcatctgaagaggcttaatgccccaaagcattggatgcttgacaaactgggtggtgcatttgctcctaagccctcatctggaccacacaaatcgagggaatgcctgccactcatactcattttgcgaaaccggctgaagtatgctctaacataccgtgaagtcattgctattctgatgcagcgacatgtcc

SEQ ID NO: 167045 - DNA, 239 bp, Glycine max
ggaagatgtgttagacttcctcgtgaacgctcctctgctacataggcttcctggctcgtctgtgcggcagatatctgagcttgtgattctcaaacactatgggccacgagagtatgtcgttcgtgagggagaacgtggggacggtctttacttcatctgggagggagatgctgaggttgttggctctgtcaatgcggatgatgataatcatccagagtctcacttgaacagatatgact

SEQ ID NO: 167046 - DNA, 276 bp, Glycine max
cagagatcgaccattagcactctaatggctccaacaaatgtcacacgcttcagagaagaaaatgaatccgagaaaggggaggaaataacaatagaagaagacaagctaagtcaagaatgtaaggagttgatactctctcttcctagggagagaggttggagaacacgttatatatatctatttcaaggattttggtgccagccattggaaatccaagcaataatcactttcagaagcacttccaagctaaagacagtgatgttattgtggccacaa

SEQ ID NO: 167047 - DNA, 272 bp, Glycine max
gaaaacgcgtcttcataaacgccgcccaaaacttctcatacccttttattcattccattcgtttctagggccttcttttctttgccgagaaaatgagagagtgcatttcgatccacattggccaggccggtatccaggttggaaacgcctgctgggaactctattgccttgaacacggcattcagcccgatggacagatgccgagtgacaagaccgttggcggagggacgacgccttcaacacatttttcagcgagaccggcgccggaaagc

SEQ ID NO: 167048 - DNA, 272 bp, Glycine max
ggtgacaaaactactcacagagaaagacactcggagaccttgcaagacttcatcaatggctgtcaaagtttatattgtgtactactccatgtatgggcatgttgagaaactagcagaagaaataaagaaaggggcttcctctgtggaaggtgttgaggccaaattatggcaggtacctgagacgctgcaggatgaggtgctcggtaagatgagtgcaccacccaaggcgatgtaccagtcattaccccgaatgaactatccgaggctgatgg

SEQ ID NO: 167049 - DNA, 273 bp, Glycine max
ggagacgcctctcttatctaaaaaccatgtcttgccggaaaagacaaaagacttcgccggacaaaacctccgattgcttcgactctctccctgacgacctcgtcctctctatcctctgcaagctcagctccaccgccacctccccctccgatttcatcagtgtcttaataacgtgcaagagactaaactccttaggccttcactctcttgtcttatcaaaagcttccacaaaacattctcagccaaagccaaaaactggtgcgactctcttca

SEQ ID NO: 167050 - DNA, 264 bp, Glycine max
gcgccaaacgcgtcactgtggtgctctccacgcgacttgcagcggtgacaagatcctgatcgcgaatagaggcgagattgcggttcgcgttattcgaaccgctcatgaattggggattccgtgtgtggctgtgtactccaccattgataaggacgcccttcatgtcaaactggctgatgaagctgtatgcatcggcgaacgccgagtagccagtcgtattgctgattccgaatgttctgtcggctgctattagccgcagatgca

SEQ ID NO: 167051 - DNA, 265 bp, Glycine max
cttgattgtcccttgagtataaaaagggtgaaaaccaaacaaatgctgaactgctcaaagaagaagactggagtctcttattgaagatggaagaagaatatattgaggagctatgcatgcagatattgaagtttaaaccagacttggtaatcacagagaagggtctgagtgatttggcttgccattatctcagcaagcatggagttagtgcaatcaggagctgaggaaaactgataataatagaattgcaaaggcttgtggtgct

SEQ ID NO: 167052 - DNA, 268 bp, Glycine max
aagaaagaatcccaggcgaggagaaagatggaggggaaggagcaggatgtgtcgttgggagcgaacaagttccccgagagacagccaattgggacggcggcgcagagccaagacgacggcaaggactaccaggagccggcgccggcgccgctggttgacccgacggagtttacgtcatggtcgttttacagagcagggatagcagagtttgtggccactttctgtttctctacatcactgtcttaaccgttatgggagtcgccggggc

SEQ ID NO: 167053 - DNA, 274 bp, Glycine max
gcaaagaaggtgtgtgtaacaggtgctggaggattcgtagcgtcttggcttgttaagcttcttctttccaaaggctacattgtccatggaactgtgagagaccctgaacctgctactcagaaatatgaacacttgctcaaactccacggagcttctgaaaacctcactctcttcaaggcagatctcttgaactacgaatctcttcgctcagcaatttctggatgcatgcagttttccatcttgcttgccctgtaccctcaatcagtgttcccaa

SEQ ID NO: 167054 - DNA, 264 bp, Glycine max
cacactcactctcactaaatggcttcctctgttgctttagttttgggtctatgtctagcactcaacatggttctgccgacacgtgcagctacccacacagtgggagacacctcaggttgggcactcggtgctgattacagtacatgggccagtggcttgaaattgaaagtcggagatagtcttgttttcaattatggggctggtcacacagtggacgagtgaaagaaagtgattacaagagctgcaccacaggcaattcactaa

SEQ ID NO: 167055 - DNA, 266 bp, Glycine max
actaactaaagccgagcagcgagagagagaaaccctagcaaaaatgccggctggtcacggtttgagatcccgcaccagagattccttctctcgtcccttcaggaagaagggtaccatcgccctcaccacatacctcagaacctaccacgtcggcgattatgtcgacgtcaaggttaacggcgccgtccacaagggaatgcctcacaagttctaccatggcgcaccggtcgcgtctggaatgtcaccaaacgtgctgttggggtcga

SEQ ID NO: 167056 - DNA, 269 bp, Glycine max
gcaagattgactagtcctcctcctagattagctgactttggctattcgagtgacatgtttgaaaaggacatggaactatggcaaaggagagttgagaagtactgggatctcttgagttcaaaaatcacatcaaacacattgaggaatattatggatatgaaagcaaacatgggttcatttgcagctgctcttagagacaaggatgtttgggtgatgaatgtttacctcaagatggaccaaacacacttaagctcatatatgacagaggc

SEQ ID NO: 167057 - DNA, 268 bp, Glycine max
cttttgttctcaaactccttgatttgtttgactctgaggaccctcgtgagcgtgagtatttgaaaaccatattgcatcgtgtgtacgggaaattcatggtgcatcgtcccttcattaggaaggccattaacaacatattttttcggtttatatatgagacggagcggcatagtggtattggggagcttctcgagattctgggaagtattattaatgggtttccctgcccatgaaggaggagcataagttgtttcttgcgagggcgctt

SEQ ID NO: 167058 - DNA, 269 bp, Glycine max
gaccattttccatttgaacccttctggcaggtttgtcatcggagggccgcatggcgatgctggtctcaccggccgcaagatcatcatcgacacctatggaggatggggtgcacatggtggtggtgccttctctgggaaggatcctaccaaggttgataggagtggtgcctacattgtgaggcaagctgcaaagagcattgttgcaaatggacttgctaggaggcaattgtgcaagtttcctatgccattggtgtgcctgagcccttgtc

SEQ ID NO: 167059 - DNA, 275 bp, Glycine max
ttcaacctctctgattttgtaattgagttcgatcaaatagctcccagtactttaattgatttctgaatatcatcacttaatttgaaggaaagatggtgagcgtactgagatccgccaggcacaaagggcagaaggcccagcaaccatccttgccattggaactgcaaacccaccaaactgtgttgatcagagcacctatcctgactactacttcagaatcaccaacatgagcacatgaccgagctcaaagagaaattccagcgcatgtgtgacaa

SEQ ID NO: 167060 - DNA, 273 bp, Glycine max
cgtcgctccacaggacttccagaagggagatccactgcaagtaaaagtaaacaaattgacttcaacgaagacccagcttccttatacatattattctcttccttattgtccaccaaataaaatagtggatagtgctgaaaatcttggagaagtgcttcgtggtgatcgcattgaaaattctcgttatgtgtttaaaatgcgtgaaccacaaatgtgcaatattgtgttaagcttaaacttgatgccaaaactgcaaaagagttcaaggagaag

SEQ ID NO: 167061 - DNA, 274 bp, Glycine max
tattcttctcagtctcagatcagaaccttagccatggcagcgttccagaagatcaaggtcgccaaccccatcgtcgagatggacggagatgaaatgactagggttatctggaagtcaatcaaggacaagctcattttgcccttcttggagttggacatcaagtattatgacttaggccttccttaccgtgatgagaccgatgataaagttacaattgaaagtgcggaagcaactctcaagtataatgtggcaattaagtgcgcaactattactc

SEQ ID NO: 167062 - DNA, 269 bp, Glycine max
cgcatcttgctttttgcaatcagtccacgtattgctcaagtttgtatgaacactgtgttgctgcacggcgatcgatacatgttgtgaatcttgaccctgctgctgaaaattttgactatcctgttgcgatggatataagggaactcatttccctagatgatgttatggaggaacttggattgggtcctaatggtggtcttgtctactgcatggaacaccttgagataacctagatgattggctcactgaggaactggacaattatttag

SEQ ID NO: 167063 - DNA, 270 bp, Glycine max
gagaaacaaagaaaagaagaaaatggctgtggccaacaatgtgctttgcattttcttcattatctccttaacatgtatggttcaagctcgaatcccaggggtttactctgctggtgcatggcaaagtgcccacgccaccttctacggaggctccgatgcttccggcaccatggggggagcgtgtgggtatggaaacctgtacagccagggttatggtgtgaaacggcggcattgagcacggcgctcttcaacagcgggcttagctgcggt

SEQ ID NO: 167064 - DNA, 270 bp, Glycine max
gttgttgtaactcgttcttcttcttttgttgttctgtgtttgtgtttgtcttttctctcacctgaaaatgtcttgctgcggtggtaactgtggttgcggaagctcctgcaagtgcggcaacggctgcggaggctgcaagatgtacccagacttgagctacactgagtcaaccaccaccgagaccttggtcatgggagtggcacctgttaaggctcaatttgaggtgctgaaatgggtgtgcccgctgagaacgatggctgcaaatgtgga

SEQ ID NO: 167065 - DNA, 272 bp, Glycine max
tccattctctctgtgtatttccctacctctcccttcaagatgccgatcttcgtcaagcccctcaccggcaagaccatcacccttgaggtggaaagctctgacaccatcgacaacgtcaaggccaagatccaggacaaggaaggaatccccccggaccagcaacgtctcattttcgccggaaagcaacttgaggacggccgtacccttgctgactacaacattcagaagagagtactcttcacctcgtcctccgtctccgtggtggcatgcag

SEQ ID NO: 167066 - DNA, 271 bp, Glycine max
ctcgttcttcctttgccttctccttcttcttcaaccctttttctttctctttctttcgcactttcattctctaaaaaaatctaagtccctttggtcttcatcttctgtactgatccaggtatggcttctaaacccatctcgaaggcgctcaaggatttgctgaaggttcctcctacctcatgcagtgcaggctctgtggctgaggacatgtttcactggcaagcacaatcatgggacctgctgatagcccatatgcaggtggtgttttcct

SEQ ID NO: 167067 - DNA, 270 bp, Glycine max
aagatgatgaggttaaggtggagtttagtcgtaacggtcacgttcgctgttttgctgttttggattggatcgctgcaagttcaagcctctaattctgtttccgccttcgttcaaaacgccatctactccaacagaatcgccgttttctccaaatcctattgcccctactgtttgcgcgccaaacgcttgcttgctgagctcaatgagaaaccgtttgtggtgggctcgatttgcgagatgatgggtatcaaattcagagtgttcttctgg

SEQ ID NO: 167068 - DNA, 268 bp, Glycine max
tttccattaacacccgattctgcttaaattggcacaccaccaattttcgtgggaacccgaaccaataaaacaaaaaaagagtccaattttgtgaaaattattaccattcattcttattcatcaacgtccccccttctgtgcccacttccaaatcttctcctctcgctatgggttgtggctcctcccttccagatagggattcaaggcagttgggtcgacccaatccgagaatggtggagggcaggacgccaagaattcaagggtcaag

SEQ ID NO: 167069 - DNA, 268 bp, Glycine max
atttttggacaaggcatttatcaatactgcaatgagtattgaccctgagtcgaaaatgataacaagagatgaaggacgaattgagaagtggattctgaggagagcctttgatgatgaagagcatccttatctgccaaagcacattttatacaggcagaaagagcaattcagtgatggagttggctatagctggattgatggccttaaggcccatgctgcaaacatgtgactgacaaaatgatgcttaatgctggtaacatctaccctc

SEQ ID NO: 167070 - DNA, 269 bp, Glycine max
gattatcctaagtctttgggaatagtgctgcaatggcttcaagtcaggaggaggtgacccttttgggagctactggaagcccatttgtgtgcagggttcatattgccctcaagttgaagggagttcaatacaaatatgtcgaagaaaatttgaggaacaagagtgaactgcttctcaaatccaacccagttcacaagaaggttccagtgtttattcacaatggaagcccatagcagagtctcttgtgattgttgaatacattgatgaga

SEQ ID NO: 167071 - DNA, 272 bp, Glycine max
caacccttcacctcgtcctccgtctccgtggtggcatgcagatcttcgttaagaccctcaccggcaagactattaccctagaagtcgaaagctccgacaccatcgacaacgtcaaggctaagattcaggacaaggagggaatccccccagaccagcagaggctgatcttcgccgggaagcagctcgaggacggacgcacccttgctgactacaacatccagaagggtcaactctccacttggtgttgcgtcttcgtggtggtatgcagattt

SEQ ID NO: 167072 - DNA, 271 bp, Glycine max
atcaaagtttcttcctttctctgctctttgtcttctctgacacatttggggccttgttgagtgtgtttttgcaagagggtatggcgaaggacgttgaggttgctgagcgtggctccttctctgggaaggactaccaggaccctccaccagcaccactcattgatgctgaggagctcacaaagtggtccttttacagggctcttattgctgagttcattgccacttgctcttcctctacattactgtgctcacagttatagggtacaagcac

SEQ ID NO: 167073 - DNA, 272 bp, Glycine max
atttttggacaaggcatttatcaatactgcaatgagtattgaccctgagtcgaaaatgataaaaagagatgaaggacgaattgagaagtggattctgaggagagcctttgatgatgaagagcatccttatctgccaaagcacattttatacaggcagaaagagcaattcagtgatggagttggctatagctggattgatggccttaaggcccatgctgcaaaacagtgactgacaaaatgatgcttaatgctggtaacatctaccctcacaa

SEQ ID NO: 167074 - DNA, 272 bp, Glycine max
gccatgcagagcgtgcacgccgcactcatcaacctcggtctcgacaaacaaataaccgtcaccactactcactcccttgccgttctccaaacctcctaccctccctcggcaggagccttccgtccggacccagctccgtgcctagctccaatcctgagcttccaagccaaaaccggatctccgttcttaatcaacgcgtacccctacttcgcatacaaggcgaatcgaagcaggttccgttggagtacgtgctcttccaacccaacgaaggg

SEQ ID NO: 167075 - DNA, 271 bp, Glycine max
acaccacacaccacacacatagtagctattatactctctagagtaattgcggaatctgctagaattttctaataatggcgaaagacgttgagcaggtcacagagcaaggtgaatactccgcgaaggactaccatgaccctcctccggcaccgttgatcgacccagatgagctcacaaagtggtccttgtacagagccgccatagctgagttcatagcaacactctttttctttacatcaccgtgttgaccattattggctacaagagacag

SEQ ID NO: 167076 - DNA, 268 bp, Glycine max
gcggagaactgatgcagataatgctgcttgcatttgctgtgattgcatttgttggtggatatgtcatggcttctttccaaatgatgattctcatatatgctgggggtgtggttttcaccaccttgctcactgtccccaattggccccttttcaatcgccatccacttacgtggttggatccaactgaggtggaaaagcatcccaagccacaaccatctgtcatgtaactcaaaagaagaaacccgttaagaagtaggttttttttatt

SEQ ID NO: 167077 - DNA, 268 bp, Glycine max
gctttttgcagtcctcctttacctgcaaaaacagcaaatggctctgcttaacctcatacttgtctggttatttctcttgagtctgtgtctttattcgtgtcctacttcggcccagttaagtagacaccactatgcaataacttgccccaatgtagataacattgtcagagatgcagtctaaaagaagtttcatcatacatttgttacggtccctgccatcatcgtctcttcttccatgattgcttcgtgcagggctgtgatgcctcgg

SEQ ID NO: 167078 - DNA, 270 bp, Glycine max
gctaaacatggatttattcaggaagtgcatggagcccgtggagaagtgtttgcgggatgccaagatggataagagtaccgtccatgatgttgttcttgttggtggttctactaggattcccaaggttcaacagttgttgcaggacttcttcaacggaaaggaactttgcaagagtattaacccagatgaagctgttgcttatggtgctgcagtgcaggctgcgattctcagtggcgagggtaatgagaaagtgcaggatcttcttttgtt

SEQ ID NO: 167079 - DNA, 266 bp, Glycine max
atggagttcgtcttttgattgaggactatccttatgcttctgatgggctagagatatgggatgccatcaagtcctgggtgcaagaatatgtctcattctactacaagtcagatgaggaactccaaaaagaccctgaactccaagcttggtggaaagaacttgtagaggtgggtcatggtgatttgaaagataagccatggtggcaaaagatgcaaactcgtgagagttggttgaagcttccgctatcctcatatggattgcttcag

SEQ ID NO: 167080 - DNA, 270 bp, Glycine max
ctcgagccgattcggctcgagtattcattcaagattcagcaagtgacgtttcggaagcagagaccgaaatacttcgagatggcccgtacaaagcaaactgctcgtaagtcaactggaggaaaagctcccaggaagcagcttgcaaccaaggctgcacgtaagtctgctccaacaactggtggtgtgaagaagcctcatcgttatcgccctggaactgttgctctcgtgagattaggaaataccagaagagcactgagctcctaatcagga

SEQ ID NO: 167081 - DNA, 268 bp, Glycine max
ctagaatggaatttcgatgctcagtcatctcttttaccattctcttctctcttgctcttgcaggagagagccatgtccatgcatcgctacctgaggaagattattgggaagctgtttggccaaacactcccattcccactgcactgcgagagcttctaaagcctctccctgcaggtgttgaaatcgatgaactccctaagcaaattgatgatacacagtaccaaaaacattcttctataaagaagaccttcatccaggcaaaacaatg

SEQ ID NO: 167082 - DNA, 266 bp, Glycine max
attcattcaagattcagcaagtgcgtttcggaagcagagaccgaaatacttcgagatggcccgtacaaagcaaactgctcgtaagtcaactggaggaaaagctcccaggaagcagcttgcaaccaaggctgcacgtaagtctgctccaacaactggtggtgtgaagaagcctcatcgttatcgccctggaactgttgctcttcgtgagattaggaaatacagaagagcactgagctcctaatcaggaagcttcctttccagaggtt

SEQ ID NO: 167083 - DNA, 267 bp, Glycine max
agcatctgatgcattctataggcttaccaacacaagggagcagatccaatcatatgtttttgatgtcatcagggccagtgtaccaaagttggagttggattctgtctttgagcagaaaaatgatatagcaaaggctgtggaggaggagcttgagaaggccatgtcaacctatggatttgagatagttcagactctcattgttgatatagagcctgatgttatgtcaagagagcaatgaacgagataaacgcagctgctagattgagg

SEQ ID NO: 167084 - DNA, 265 bp, Glycine max
gaaaattcataaagttaagcaaaagaaaggaacacgactgcggaatggtgaaacccctgaagttgtaccgtcacatgtaaaactgcatcagttacttcttcaggagcgcattgagaatgcttgtggggatcgtgctcgccttgtgaagttgaaaaagaaacaattgaatggatctgcagttgaagcaaaaacatggaaaagttacatggagaaaattctggaatcccctcccctgatcataaaatggtttgtgaaattcaattcc

SEQ ID NO: 167085 - DNA, 266 bp, Glycine max
ggaagctcgttctttcgtcgtcgtcacaagtcacaactcgcaaaccacaatgcctaagcagatccacgagattaaggattttcttctgacggcgcggaggaaggatgcgaggtcggtgaaaatcaagaggagcagggatgtcgttaagtttaaggttcgatgctccaagtacttgtacacgctttgtgtctttgaccctgagaaagccgataagttgaagaatctcttcctcccggtttgagtgttcaagacctgtagagctgttg

SEQ ID NO: 167086 - DNA, 268 bp, Glycine max
gtttattaccaataatagcggagaataaaaaatatcaaggacaggataaactccctgtcattgtttgggtgataactcaggcttctcaaggagatctagttatggggttgtacttgtgggtatatcttctattgccaatgctgagtgtgaagtctggttgtaatccacagtcaagagacttgatattacagttggttgagagaattatcacatctcctaaactcgttctatcttgctaaatggggctgtcagaaggggggagcgtgtt

SEQ ID NO: 167087 - DNA, 270 bp, Glycine max
cccttgaaaaggctggcatcactgttatccaaattgatgaagctgctttgagagacggtcttccactgaggaaatcagagcaagctcactacttggactgggctgtccatgccttcagaatcaccaatgttggtgtccaggataccacccagatccacactcacatgtgctactcgaacttcaacgacatcatccactccatcatcgacatggacgccgatgtttcaccattgagaactctcgctccgacgagaagcttctgtcagtctt

SEQ ID NO: 167088 - DNA, 264 bp, Glycine max
gtggtttcagtgagtgatcggtgttcacttgatccttcataagtcgtcatcatcatcatcatcatcaccgttgattgaagtcgatgccgatcagaaacatcgccatcggaaggcctgaagaggctactcaccccgacacgttgaaggcggggttggctgagttcatctccaccttgatcttcgtgttcgccggttcaggttccggcatcgcctacaacaagctcaccgacaacggcgccgccactcccgccggcctcatctccg

SEQ ID NO: 167089 - DNA, 262 bp, Glycine max
gaaatcacaaacaaattgttggtttccatgttgctggaagcaaaggaagactgggatatgcttcattgataccatatgttgagccagttgtgcaagctcaaagtgctgaagtttactttgacttcttccctgtggaggttgatagtcaagagggagttgctcacattggtgaattgaaatctggtgtctatgttccactgcctacaaaaaccaatttggtggaaactcccaaggaatggcaactggatctaccttgtgacaa

SEQ ID NO: 167090 - DNA, 266 bp, Glycine max
gtaagagtaagagaagagatggaaagagtagcatcagtatctcggccactgaaaatatacttcctcccattcttctcaccggggcacctaatccctctggtccagctggctcgcttggtggcggcacgaggccagcacgtgaccatcatcaccacccccgccaacgctcaactcttcgaccagaacatcgacaaggacaccgcctccggccaccacatccgcgtccacatcatcaagttccccaacgcccacgtagggctaccgga

SEQ ID NO: 167091 - DNA, 267 bp, Glycine max
cttcaacttgctccctcagaagcgaagaagaagccacagagaactagtctcctactctcacccgcaagacaaaaatggcatctcacatcgttggatacccccgtatgggtcccaagacagagctcaagttcgctctcgagtctttctgggatggcaagagcagcgccgaggatttgcagaaggtgtcttctgatctcagggcatccatctggaagcagatggctgatgcttgcgtcaagtacatccccagcaacactttctctcact

SEQ ID NO: 167092 - DNA, 268 bp, Glycine max
ggttttgtagtaagtgaggtgaggtgccaaaatggtgaagataactcttggtactttcgatgactcttgtggtgttgcctctcttaaggcttatttggcagagttccatgcaactctgattttcgtgttcgctggtgttggttcagccatcgcttacaacgagcttacaaaagatgcagccttggatccaacggggctggtggctgtagctgtggcccatgcatttgcactgtttgtaggtgtctccgtcgcagccaacatctcgggt

SEQ ID NO: 167093 - DNA, 269 bp, Glycine max
tcgattgtttggaactggcaatggatcctctgtatctgtagaaaatgctggtcttctcgctttaactcgtgttgtgcaatcgcagagtggtgcgaatagcggccggttttatgattttcttttcaattctcgggaaatttggagccgtttttgcatccattccacctcccattgttgctgcactgtactgcttgtttttcgcttatgttggagcgggaggtctaagttttcttcaattctgcaacctcaacagttttagaacaatattt

SEQ ID NO: 167094 - DNA, 263 bp, Glycine max
gtcgggaaaagcggcaaagggattgataacaggtaaaacctcagcttcagccaaagacaaagacaaagacaagaagaaacccgtttctcgttcttctagagctggtcttcagtttcctgttggacgaattcaccgtcttttgaagtcaagggtgagtgccaatggaagagttggggccacagctgctgtgtattctgctgctatactggagtatctaactgcagaggtgttggagttggctggtaatgcaagcaaggatctga

SEQ ID NO: 167095 - DNA, 264 bp, Glycine max
gcacggccacctcacaaagaggcctgaggagattggtgctggtgaccaaggtcatatgttcggctatgccactgacgagactcccgagctcatgcccttgagccatgtccttgccacgaagctcggtgccaagctcaccgaggttcggaagaacgggacatgcccttggctgagacctgatggcaagacccaagtcactgttgagtactacaatgacaagggtgccatggttccaatccgcgtccacactgtgctcatctccac

SEQ ID NO: 167096 - DNA, 263 bp, Glycine max
ctcagtgtgagcgttctgccatactcctgcgttcaatcgacttcaccatcttcttcttcttctgctgtctcccccatagatggattggcaagggcaaaagctagcggagaactgatgcagataatgctgcttgcatttgctgtgattgcatttgttggtggatatgtcatggcttctttccaaatgatgattctcatatatgctgggggtgtggttttcaccaccttgctcactgtccccaattggccccttttcaatcgcca

SEQ ID NO: 167097 - DNA, 265 bp, Glycine max
ctttttctccaggaacatggtccagtgttaaggcttcagtttctcgaaaaccattttctcttggcttcaatcaacaagtttggacaacttcgttatcaggatgttacaatgggttccatggttggtaattttcgaactggcttaggacgtacaaatgtaatgcaagtcaaccccttcaatggggttgtttctttaggtcactcaggtggtactgttaccatgtggaagccaaccagtgcttctcctcttgtcaagatgttatgtc

SEQ ID NO: 167098 - DNA, 267 bp, Glycine max
caaatgtgggatgccaagaatatgatgtgtgccgctgatcccaggcacgggcgttacctcacggcatcagccatgttccgtggcaagatgagcacgaaggaggtggatgagcagatgataaacgtgcagaacaaaaactcttcgtactttgtcgagtggattcccaacaatgtcaagtcgagtgtgtgtgacattgctcctagagggctctccatggcgtccacattcattggaaactcgacctcgattcaggagatgttcaggagg

SEQ ID NO: 167099 - DNA, 266 bp, Glycine max
attaattgcaagaatggcacttcgttgcttggtgatgtccctctctgttctcttcactcttggtcttgcgagagaaagccatgccagagacgaagatttttggcatgctgtttggccaaacactcccattccaagttcattgcgagatcttctaaagcctggccctgcaagtgttgaaatcgatgatcaccctatgcaaattgaagaaacacagtacccgaaaaccttcttctataaagaagaccttcatccaggcaaaacaatga

SEQ ID NO: 167100 - DNA, 270 bp, Glycine max
cagatagtgctttgggttgagaaatttcaggtacattgagaccatcaaagaagctttggaaaggcgatgaccaggagttgtttcctgtgctgatatcctcgttctctctgccagagatggcattgtttcgctaggaggtccccatatccctcttaaaacaggaagaagggatggtagaaggagcagagccgatgtggtagagcagttcctcccagaccacaatgaatccatttctgcagttcttgacaagtttggtgccatgggaattga

SEQ ID NO: 167101 - DNA, 272 bp, Glycine max
gtcgcgtgtactttcttgcgaaacagaagggcgaatcgggaaacacaacttttttgtttttttgtagagcgagagagaaaaaaatgttggggatcttcagcagttccgtggtgtcgccgccggaggagctggtggctgccggcagcagaacgccgtcgccgaagacgacggcggggaagctgctgaaccggttcgtggagaacaaggcgtcggcggtgtcgctgcaggtgggagaacacgtgcagttggcttacacgcaccacaacgagtca

SEQ ID NO: 167102 - DNA, 249 bp, Glycine max
tgtggaattagtcgaggtaggacgcagaggcgcggagaagatgtggttcaccctctcaaggtctctctggaggacctttatctcgggacttctaagaagctctccctctccagaaatgtcatatgctccaagtgcactgggtgagtgaattcagagtttgcttggtgattagattttaggaaaaaattactatttgtttggtttaaaattatgatgtttattaatacgacgtagcatggtcttaaattg

SEQ ID NO: 167103 - DNA, 264 bp, Glycine max
tctccaagttggaaatcatgctgcagggaaagtggatgccaaactcatgctgtaacctgtggagctggtactggagtgtttctgttgattaagagaacaacaatcctactacagagatctgcacgtcaggccccctggccctctccttacttagatgcttttggtgaggaggattttgaaatgcatcgaggcaagccactttatctgaatgaggaacgctatgcagctttgacttatatggtcgcttctcatggtctggaccgg

SEQ ID NO: 167104 - DNA, 265 bp, Glycine max
aatatattccattctctctgtgtatttccctacctctcccttcaagatgcagatcttcgtcaagaccctcaccggcaagaccatcacccttgaggtggaaagctctgacaccatcgacaacgtcaaggccaagatccaggacaaggaaggaatccccccggaccagcaacgtctcattttcgccggaaagcaacttgaggacggccgtacccttgctgactacaacattcagaaggagagtactcttcacctcgtcctccgtctc

SEQ ID NO: 167105 - DNA, 265 bp, Glycine max
  unsure (1)..(265): unsure at all n locations
cttctctttacacccccctctctattttgcgttcattctgttttccagttgaagtctttccctagccaatggccactcgatcgtttgacncggggtcacagtctccgtgagaggcttgatgaaaccctcactgccaacaggaacgaaattttggcccttctgtcaaggatcgaagctaagggcaaggggatcctgcaacaccaccaggtcattgctgagtttgaggaaatccctgaggagaacaggcagaagcttactgatggtg

SEQ ID NO: 167106 - DNA, 265 bp, Glycine max
cggctcgagctgggccgtgcagcactacatccgccccggcgacgccgtgatcctgctccacgtcagcgctaccaacgtcctcttcggcgccgactggggctccatcgacctctccatcaacaccggccccaactccgacgaggatgccgtcagcgccgtcaacaacagcaacgaccacaacagcaagcgcaagctggaggacgacttcgacgcctttacggcgtccaaggcggcggatctcgcgaaaccgttacgggaattgcag

SEQ ID NO: 167107 - DNA, 263 bp, Glycine max
cttctttattccttttgtaatttcattcattcttaatctttgtgacaaataatgttcatcgagaattttaaggttgagtgtcctaatgtgaagtacaccgagactgagattcagtccgtgtacaactacgaaaccaccgaacttgttcacgagaacaggaatggcacctatcagtggattgtcaaacccaaatctgtcaaatacgaatttaaaaccaacatccatgttcctaaattaggggtaatgcttgtgggttggggtgg

SEQ ID NO: 167108 - DNA, 266 bp, Glycine max
aacattctcatcattcacccaacaaaatggctctgcttctgatagtagccatttcactggtaaccctctggctcggttacaccctataccagcggctacgcttcaagctccctcctggcccacggccctggccggtagtcggtaacctctacgacataaaacccgtccggttccggtgcttcgctgagtgggcgcagtcttacggccctatcatatcggtctggttcggttcgaccctaaacgtcatcgtttcaaactcggagttg

SEQ ID NO: 167109 - DNA, 269 bp, Glycine max
cacattcaatggatgttggagggctgcatgagaaaaaggcatctgttgaagaaaatatcaataatgtttcaagtccagacttgaacaagaccactagcagtgatgatgtagggtattcagaaaagttgaacttggacagaagttctggtgatgattctatggaagaggatttgcctgagactaagcaaattgattctaagtttaatgttgatgaacttaaagacaaagtagagattgaaaagcctattgtgaaggaggaaagtagtact

SEQ ID NO: 167110 - DNA, 261 bp, Glycine max
atcaattgcaacggttgaattttgactgaagacaaagttagaaaacaaaaacatgtcttgctccgtcgcggtttccaattcgccggtgttctctccttcttcttccctcttctgctcgaagccctccatcatctcttcttcgccggaatccctctccctctctctgtcgcatctcaaaccttcgaactcttctacgtcgtcgtcttgttcttcgacttctgctgctgctgcttcttcttctccttcttctccgtttcgact

SEQ ID NO: 167111 - DNA, 264 bp, Glycine max
ctcgagccgcctaaaccctactcattctccatacctcaacgaagaggttaaagagacggcaacactttgctgtccgccttgaccgagcagagcttcgtcttggccctcgattttgccctaaagtactctcagtcacaacagacaccgtcgtcgtcgtcgtcgtcatcaatggcaccgaagcagaccaaggctgagaagaagatcgcttacgatgcgaactgtgcgacctaatggaggagtacggccagatcctcgttgtgaact

SEQ ID NO: 167112 - DNA, 265 bp, Glycine max
ctgactaccttggaaagggtgtatcaaaggctgttgacaatgtgaacaccattattgcccctgctttggttggcaaggacccaactcagcagactgctattgacaacttaatggttcaacaacttgatggaactgttaacgaatggggttggtgcaagcaaaagcttggagcaaatgccatattggcagtgtctcttgcagtctgcaaagctggtgctgctgtcctgaaagttcctctttacaagcatattgcaaatattgcggg

SEQ ID NO: 167113 - DNA, 268 bp, Glycine max
aattagccaaacacaccacagcaccaaactagttggctcaattctctttgaatggctttggaggtttgaattcaccaacagcagccaccactcccttccgtggttaccaagaagaggaggaggaggttgaccttcacctacgcgagccttgggccaagagaaaacgctccaaacgacctcgttttgagtcggaggaagagtacttggctctttgcctcatcatgcttgcacaaagcggtaacaacaacaacacccaattaccgtcttc

SEQ ID NO: 167114 - DNA, 269 bp, Glycine max
gtcagagagacattttggtccttgaacataatttggaccacaaccaaaagatgatggaatccgggggtcaattctgtaattcttgtggtgaacaaattggacttgatgctaatggggaggtgtttgtggcttgtcatgagtgctattttccaatttgtaaggcttgttttgaatatgaaatcaatgaggggcgtaaagtctgcttgagatgtgccactccctatgctgatagagcaaaggataataatgacaccaaggtttatgaaaac

SEQ ID NO: 167115 - DNA, 262 bp, Glycine max
ctaggagctattacaaatgtacaacccaaggttgcaatgtgcggaacacgtggagagggcttcaacagatcctaaagctgtcataacaacatatgaaggaaaacacaatcatgatgtgccagcagctaagaataacagccacactatggccagcaatactgcatcacagttaaaatcgcataataccaatcctgagaagcataattttggcagcagaggtatgggaggaaatgaacaacagccggttgcacggcttcggttg

SEQ ID NO: 167116 - DNA, 259 bp, Glycine max
ctcgagccgctcgagccgaatcggctcgagcagcatcgaacccgtactagcagaaaaactgccacatggcttcttccgacaaggatccacgagaggatctccttcaagcctggtacatggatgatagtgatgaagatcaaagactcccccaccacaaagaacccaaggagtttgtctcgttggaccaacttgctgaacttggagtccttagctggaaactagatgctgataaccatgaaaatgatccagagctgaagaa

SEQ ID NO: 167117 - DNA, 264 bp, Glycine max
gtcaggccggcgcagccgctgagtataagcatatcaataagccgaggatcagacactaccaaggattcacttacgtaacggtgagcgaaccgtgaaaagcccaccatgataatcggtcgccctcggcgtccgacttgtagtctggagaagcgtcctcagtggcggaccgggcccaagtcacctggaagggggcgccagacagggtgagagccccgtcgtgctcggacgctgtcgcaccacgaggcgctgtcggcgagtcgggtt

SEQ ID NO: 167118 - DNA, 264 bp, Glycine max
ctcacgctacaagaccattctttcttcttctgaattgaagaatggcacaagatactgctactccaccagttccttttgatttcgaactcttggttggtgatcaccttagaactgtctcagcctcatccagcagcagcagggcagacccatggattgaacctgaaaggttgaaactcagacacaggattggtcggggaccctttggtgatgtttggttagcaactcatcatcaatcaactgaagattatgatgagtatcatgaag

SEQ ID NO: 167119 - DNA, 201 bp, Glycine max
taccaaaaaaaatggctttggaaactctcaactcaccaacaacaaccgccccatctttccccttcgacgacccaactattccatgggccaaaagaaaacgttcaaagcgttgttcacgcgaccacccttcggaggaagagtacctcgctctctgcctcatcatgctcgctcgcggcggcaccacccgccgcgtcagcactc

SEQ ID NO: 167120 - DNA, 261 bp, Glycine max
cccaacaatttgaggcatttgaatctctctggctccaaaaatctaattaaaatgccatacattggagatgccctatatcttgagagtcttgatctcgaaggatgtatacaactcgaagagatcggtctgtccgttgttctttcacgaaagcttacttctctgaatttgagaaattgcaaaagtcttatcaagttgccacggtttggagaggatctaattcttaaaaatctagatctcgaaggatgtaaaaaactcagacac

SEQ ID NO: 167121 - DNA, 261 bp, Glycine max
caaccctagctttccgttgtttgcaaatctatggctggtgaatctgataaacccgaaaacaccctctcttgtgctaactgtggcaaacctgcgaatcttcagtgtccaaaatgtatggaattgaagcttcctcgagaaggtgctgccttctgctctcaggattgtttcaagtcttcatggagctcgcacaaatcagtgcatctgaaggcaaaactatccccacctggcacacaaaattcagactcacttgatgaaggttgg

SEQ ID NO: 167122 - DNA, 260 bp, Glycine max
aaacaattgagaactgtgtttgtttgcatgaagaagatcatggtattttatggaagcatcaagattggagaacaggattggctgaagttcgaaggtctagaaggctgacagtgtcttttatatgcactgtggctaactatgagtatggatttttctggcacttttatcaggatggaaaaatagaagcagagatcaagctcacaggaattctcagcttaggatcacttcaaccaggtgaaactcgaaaatatggcacaacc

SEQ ID NO: 167123 - DNA, 266 bp, Glycine max
caaaactgaacgctatagaaaatgttcaaaaaattttcaggtgaagatgtatctgcacagaaccaagtgaaggcatctgttcaacgaaaaatacggcaaagtattgctgaagagtatacgggtcttgaacctgtgttggatgatatacttcccaagaagtcccctctaatagttgctaaatgtcagaaccatctcaatctggttcttgtgaacaacgtgccactgtttttcagtgtccgtgatggaccatacatgcccaccttgcg

SEQ ID NO: 167124 - DNA, 267 bp, Glycine max
tcgagctcagaaggaacgctagctatatgcttaacacatgcaagtcgaacgttgttttcggggagctgggcagaaggaaaagaggctcctagcgtgaaggttgcttgtctcgcccaggaggtgggaacagttgaaaacaaagtggcgaacgggtgcgtaatgcgtgggaatctgccgaacagttcgggccaaatcctgaagaaagctaaaaagcgctgtttgatgagcctgcgtagtattaggtagttggtcaggtaaaggctgacc

SEQ ID NO: 167125 - DNA, 298 bp, Glycine max
ctttcttttttcccgcagtcatgggcaaggtcaagatcggaatcaacggatttggaagaattggccgtttggtggccagggtggctctgcagagagacgatgttgaactcgttgccgttaacgatcctttcattaccaccgattacatgacatacatgtttaaatacgacagtgttcacgggcactggaagcatcacgatgtcaccgttaaggatgagaagacccttctcttcggtgacaagccagtcactgtttttggacacaggaaccctgaagagatcccatggaagtcgactgg

SEQ ID NO: 167126 - DNA, 293 bp, Glycine max
cgtcccagctcaactctctagttgttgttgctgcatttttcattttctaggcttagtcattagatagaaagagaaggaaaaaaaggctattatggcaggaggaggagctccagctaaagcagatgagccacagccacatccaccaaaggatcagttaccagatatttcttactgtattactagtcctcctccatggcctgaggccatacttcttggttttcaacattttcttgtgatgcttggcacaactgtgttgattcccactgctcttgttccccagatgggaggtggca

SEQ ID NO: 167127 - DNA, 287 bp, Glycine max
cctgacacggggaggtagtgacaataaataacaataccgggctcattgagtctggtaattggaatgagtacaatctaaatcccttaacgaggatccattggagggcaagtctggtgccagcagccgcggtaattccagctccaatagcgtatatttaagttgttgcagttaaaaagctcgtagttggaccttgggttgggtcgatcggtccgcctccggtgtgcaccggtcggctcgtcccttctgccggcgatgcgctcctgtccttaactggccgggtcgtgcct

SEQ ID NO: 167128 - DNA, 288 bp, Glycine max
ctagagtaattgcggaatcagctagaattttctaataatggccaaagacgttgagcaggttacagagcaaggtgaatactccgcgaaggattaccatgacccacctccggcgccgttgatcgacccagatgagctcactaagtggtccttgtacagagccgccatagctgagttcatagcaacactccttttcctttacatcaccgtgttgaccattattggctacaagagacagagtgacaccaaaatccccggtaacaccgagtgcgacggcgttggcattttggg

SEQ ID NO: 167129 - DNA, 284 bp, Glycine max
agcagcttcatctgtttttctgcatcggcgtgaacaatggcgacgtacgctgcgatgaagcccaataagcctggcttggaggagtcccaagaacagatccacaagataaggatcaccctttcctccaagcacgtcaaaaatctcgagaaggtttgtggggacttggttcgtggtgcaaaggataagaggctcagggttaagggacctgtcaggatgcccactaaggttcttcacatcactaccaggaagtccccctgtggtgaaggtaccaacacatgggacag

SEQ ID NO: 167130 - DNA, 284 bp, Glycine max
gaatcttgagaaatggcaggggacagcaagagcaagattctgttcatcggagggactggttacatcggaaaattcatcgtggaagccagcgccaaagctggccacccaactttccttttggtgagggagtccactctctccaaccccgcaaaatcacccctcatcgacaatttcaaaggcctcggtgtcaatcttgttttaggagatctatacgatcaccaaagtttggtgagtgctataaagcaggtcgatgtggtaatttctactgtaggacactgcagcta

SEQ ID NO: 167131 - DNA, 283 bp, Glycine max
ccaccttctatgcccaaattaccaaaatcatcatcctgctgttgctgcccctcaaagaagcaaaccaaagatgtctccgagctttatagagatgcaaagagggaagaacttgatgctgccatttttaatcttagggagattgacaactatgatgaatatgagaggtcaatgctgatttcacaaatgagctttgagaaaacatttggtttgtccactgttttcattgaatctacactgatggagaatggaggacttcctgaatcttctgatccctcgatgctga

SEQ ID NO: 167132 - DNA, 281 bp, Glycine max
gtagagaagcactcttcgttcttcgactgtctacgatctgctttctctgaattgtgaaaatgtcgctcggagaaactgcttgttcatacgcagctctcatccttcatgaagatggaattagtgtaactgctgacaagatcagcaccttgttgaaaactgcaaaggttccagtagactcttattggccaaccttgtttgctaaacttgctgagaagaaaaatcttggcgatttgatagcaaatgcggcaggcggtggtgcaccagttgctgttgcagctgcc

SEQ ID NO: 167133 - DNA, 289 bp, Glycine max
atggacctccatcgccggccgccgcccgccgctgacgacggagcaatccaccccaagaagaggagggacacttcctctcccaaggcctccgacgctctccctctccctctctacctcaccaacgcgatcttcttcacgctcttcttctccgttgcttacttcctcctccaccgctgttcctctgtttctcgtttttgtgttcagaccgaaccctagctccgcatcgcaaccatgtcgaccaagcaaggtggaaaagctaagcctttgaagaaacccaagtctgataaga

SEQ ID NO: 167134 - DNA, 290 bp, Glycine max
caatcttcaaaagggagaagaaaaggaaagaaaactctcaaaaaactattatagcaatggcagaacaaaaccaaaaccaaacaactgaagctggaaggcaccaagaggttggtcacaagagccttctccagagtgatgctctttaccagtatattctggagacaagtgtctacccaagagaacctgaatccatgaaagaactgagagagttgacagcaaaacacccatggaacatcatgacaacctctgcagacgaagggcagttcttgaacatgctccttaagctcatc

SEQ ID NO: 167135 - DNA, 288 bp, Glycine max
cttaaccatcactggcacataggtgtttattgctacacactagacagaattatggaagctctcaagaccctcttcttagccatttttgttgtcttggcttccgcattgtattcagccaatgccaaaatccaggagcatgaatttgttattcaagcaacgccagtgaagaggctgtgcaacacccacagcaccatcacagtgaatggacaattccctggtccaacattggaagtcaacaatggtgacactttggtcgtcaaagtcactaacaaagctcgttacaatgtg

SEQ ID NO: 167136 - DNA, 286 bp, Glycine max
catttatcaactcactcatcaatctcgtttgttctcactaactattacttcatcatgtcgtcgagcacagttggtcaagtcatcaaatgcaaagctgcggtttcatgggaggcagggaagccacttgtgattgaagaagtagaggtggcaccaccacaagctggtgaagtgcgtttgaagatcctctacacctctctttgccacactgatgtttacttctgggaagccaagggccaaactccattgtttcctcgtatatttggtcatgaagctggagggattgtgg

SEQ ID NO: 167137 - DNA, 276 bp, Glycine max
caggacatatcattgtgactaccattgggggtagaaatggtcagcccaagcagactataagctacatggcagagcgtgttgtagggcatggatcatttggagttgtcttccaggctaagtgcttggaaaccggtgaaactgtggctatcaaaaaggttcttcaagataagaggtacaagaaccgggagctgcaaacaatgcgccttcttgaccacccaaatgttgtcgctttgaagcactgtttcttttcaaccactgaaaaggatgaactatact

SEQ ID NO: 167138 - DNA, 279 bp, Glycine max
ccggaatcagaggctccccctaacttctggggccacaccccggaagaagaatactacacctcccaaggcgttcgcaacaccaagtcccacttcgaaacccccaacggcaaaatcttcacccagtccttcctccctctcaacctccaaccccaccaagtcaaagccaccgtctttatgacccacggctacggctccgacaccggctggctcttccagaaaatctgcatcaacttcgccacctggggctacgccgtcttcgccgccgacctcctcggccac

SEQ ID NO: 167139 - DNA, 278 bp, Glycine max
ttttctttatccaaaacatgttggtgatatatcaaaaggaatggctgaagcagatcacaagattctttctgctgagttgaaacttgggtctcaatactatttctatatggagacacaaactgcacttgctgttccagatgaagacaattgcattacagtttactcctcaaaccaatgccctgagtttgcgcattctactatagcaagatgcctaggaattcctgaaaataatgttcgtgtaataacaagaagggttgggggtggttttggtggaaagg

SEQ ID NO: 167140 - DNA, 292 bp, Glycine max
ccattttcaagctctcaacgccatctccagctgcttccttatcagaagcgcttcgccccagagattctcgcttcctctccttcaatccttcttccaacgctattaattacaaaattaacctctccgcttccctccgatccattcactccctccctcttaaaacctccttgcggatcaaatgctcccaaacagatgggaatggaagtcctgcaaagaggacagtgcttcatgatctttatgagaaagaagggcagagtccatggtatgataatctctgcagacctgttacaga

SEQ ID NO: 167141 - DNA, 280 bp, Glycine max
cggctcgagtttgggagttaggttctgcacgctctgcttccagcgagtgttctttcttcgtttcaacaccttaatttgcacacgctgcttcttcagcttgagaaatggcacaagaaacctttctattcacatctgaatctgtaaacgagggtcaccccgacaagctgtgcgaccagatctctgatgcagtgctcgatgcgtgccttgaacaggaccctgacagcaaggttgcctgtgagacatgcaccaagaccaacatggtcatggtctttggagagat

SEQ ID NO: 167142 - DNA, 286 bp, Glycine max
aatccttcaaaaattttgtttctttgtgtgtgtatggtgatgataacttaattagtgttcatgaatatgtcaagccttactttagtggttctaaattgaaaagctttctagctggtcataatatcaccattactgatggcattgacaaaactagtgcaactttgcaatttagaaagttagcagattgcgattttctcaagagaaactttaagcagatgtctaatgttttgtgggtggctctcgaggacaaggcgagtttatggtcacaacttcattatgtttcgtg

SEQ ID NO: 167143 - DNA, 283 bp, Glycine max
cggctcgagcggctcgaggcacaaaccctaacaccaaagccagaagcgaaatcgcaatcgcaatccagcgaatatgaaggtcgtcgctgcatacttgctcgcagtgttgggagggaatccttccccttctgccgatgacatcaaacacatcctcggcgcagttggagctgaggctgagaatgagttgattgagttgctcttgactgaagtcaagggaaaagacttcaatgagctaattgctagtggaagtgaaaagatgtctgcagtgtctggtggcggtgca

SEQ ID NO: 167144 - DNA, 282 bp, Glycine max
aaccgaccttggtttaatttctcaatgttgtttgacaaagcatgtctttaagatcacaaagcagtatttggctaatgtgtctctgaaaatcaatgtcaagatgggaggtagaaacaccgttcttgttgatgctgtaagcagtagaataccattggttagtgacataccaactataatatttggagcagatgttacccatcctgaaaatggagaagactccagcccttcaatagcagccgttgtagcatctcaagactggcctgaagtgacgaaatatgccgg

SEQ ID NO: 167145 - DNA, 281 bp, Glycine max
agaggatccatcaagcccagggagtttaggcatagccatatcagaagctgtggaggttgctgctaaaaatgctgataccaagtactgcttggggagtgtactcaatcatgttttactccaccagagtgttataggagaagagtgcatcaaacaaatggaagctattggggaaaccccagatgtcattataggatgtactggtggtggctccaactttgcaggacttagtttcccgttccttcgagagaagctcaataaaaaaatcaatcctgttataagag

SEQ ID NO: 167146 - DNA, 278 bp, Glycine max
aattcatgggcatttcagcactacatttcccgggatttgaaaaccatcccaaatgctgcgactgagacagaaaactccaatggttgttttgattgcaacatctgcctagactttgcacatgagccggtggtgaccctatgtggccacctctactgctggccatgcatctacaagtggctccatgtccaaagtgattctcttgcacctgatgagcatccacaatgccccgtttgcaaggcagatatatccaatagcacaatggtcccactctatggccg

SEQ ID NO: 167147 - DNA, 272 bp, Glycine max
ctcagaagcgaagaaaaagccacagagaactagtctcctactctcacccgcaagacaaaaatggcatctcacatcgttggatacccccgtatgggtcccaagagagagctcaagttcgctctcgagtctttctgggatggcaagagcagcgccgaggatttgcagaaggtgtcttctgatctcagggcatccatctggaagcagatggctgatgctgggatcaagtacatccccagcaacactttctctcactatgaccaggttctcgacgc

SEQ ID NO: 167148 - DNA, 283 bp, Glycine max
aaaaaatgggttcttcttcttctatgtggacggtgtgtgtgattttggcatcactggcctctgcagcactctgtgccaacccacgcaggccagtggatgtacaatttggccgaaactacgtgcccacatgggcctttgatcacatcaaatatttcaatggtggttctgacattcagcttcatcttgacaagtacactggtactggcttccagtccatagggtcttacttgtttggtcacttcagcatgtacataaagatggttcctggagattctgctggcac

SEQ ID NO: 167149 - DNA, 279 bp, Glycine max
gggtgcagaagcaaatggcggcgagaagcaattgaaatttctgatctacggtcgcagcggttggattggtggtctactgggtaagctctgcgaagagcgcgggatccaatatgagtacggcaccggcagattggagaaccggtcgtcgttggaggcggacatagcggctgtgaagcccagccacgtgttcaacgccgcgggtgtcacgggtagacccaatgtggactggtgcgaatctcacaaagttgaaaccatccgaaccaacgtcgtcggcactct

SEQ ID NO: 167150 - DNA, 281 bp, Glycine max
aatcgagccgattcggctcgagaaacaaccttctttctttcaggatcttgatcagtgtcaaaaccaaaagggtggttgcaaattgcaatggctaagcatgatgttgagggtggttccttcgctgcaaaggactaccatgatcctcctccagcaccattgattgatgctgaggaactcacacagtggtccttctacagggctttgattgctgagttcattgccacaatgctcttcctttacatcacagtgctcactgtgattggttacaagagccagagtga

SEQ ID NO: 167151 - DNA, 279 bp, Glycine max
  unsure (1)..(279): unsure at all n locations
caaggattcaggaatcaaatgctgaatgctattaaaggcttctcaagatcacgtcagaatggattgttcataaattcatgttttgctcactgccaatctgagaggcaggatacatggtttgctgacaactctcctgtcattgggaacaaggcaattgctctttctgttggagactggtatttcgaccgagcagttgttaaggccattgattgtccttacccttgtgataatacatgccaccatcttgtcttcagatgagccanatctcgtcaatctcca

SEQ ID NO: 167152 - DNA, 288 bp, Glycine max
gggtgcagaagcaaatggcggcgagaagcaattgaaatttctgatctacggtcgcagcggttggattggtggtctactgggtaagctctgcgaagagcgcgggatccaatatgagtacggcaccggcagattggagaaccggtcgtcgttggaggcggacatagcggctgtgaagcccagccacgtgttcaacgccgcgggtgtcacgggtagacccaatgtggactggtgcgaatctcacaaagttgaaaccatccgaaccaacgtcgtcggcactctcaccctcgc

SEQ ID NO: 167153 - DNA, 290 bp, Glycine max
cttgctcttagccctcctcctcttcgccgcagtgaccaccgccgcgatggcggtggccgcgtccgacgccgacgacatcctgatccgtcaggtggtgccagatgttggcgaagcgaagtaggaggacaacctgctgaacgccgagcaccacttcgcgagcttcaaggccaagttcgccaagacctacgccaccaaggaggagcacgatcatcgcttcggcgtcttcaagtccaacctccgcagagccaggctgcacgccaagctcgacccctccgccgtccaggcgtcac

SEQ ID NO: 167154 - DNA, 286 bp, Glycine max
aatagatcctcaatacaatgaggttcaggctcagatggaaacaaatttgtttaaattgtctcttgatgatgttgaaactcctaaaggttccatgttggatcttaaaatttctcaatctaaaattgcacttcccaaaaacacagttggaggaactattctgcgtagtgatctattggcaaattttttgacagagcggcaattttagagcaagtgttgatttgcagcgcactcatcgtattaaaggaatgattaaactggtggccacagttggtattcctgagaatac

SEQ ID NO: 167155 - DNA, 287 bp, Glycine max
gcatccttcgtttcaatttctctctctcagcgctttctgcaatcgaacctttcatctccaaagggatccacaggccgaaggagaaatggggctgacattcacaaagcttttcagtcggcttttcgcgaagaaggaaatgcgaattctgatggttggtcttgatgctgctggtaagaccactatcctgtacaagctcaagctcggagagatcgttaccacaattcctaccatcgggttcaatgttgagactgtggaatacaagaacattagcttcactgtttgggatg

SEQ ID NO: 167156 - DNA, 275 bp, Glycine max
gccatttgggagttaggttctgcacgctctgcttccagcgagtgttctttcttcgtttcaacaccttaatttgcacacgctgcttcttcagcttgagaaatggcacaagaaacctttctattcacatctgaatctgtaaacgagggtcaccccgacaagctgtgcgaccagatctctgatgcagtgctcgatgcgtgccttgaacaggaccctgacagcaaggttgcctgtgagacatgcaccaagaccaacatggtcatggtctttggagagat

SEQ ID NO: 167157 - DNA, 282 bp, Glycine max
gccagtagtcatatgcttgtctcaaagattaagccatgcatgtgtaagtatgaactaattcagactgtgaaactgcgaatggctcattaaatcagttatagtttgtttgatggtatctactactcggataaccgtagtaattctagagctaatacgtgcaacaaaccccgacttctggaagggatgcatttattagataaaaggtcaacacaggctctgcctgttgctttgatgattcatgataactcgtcggatcgcacggcctttgtgccggcgacgcat

SEQ ID NO: 167158 - DNA, 281 bp, Glycine max
ggaggctgctaagaagtccctggaaaaagctgctgagcgtgtgagatgccttgaggatgatttagcaaagtctaggagtgagattattgtattacgatcagaacgtgacaagagtgcacttgaagcaaattttgctagagagaaacttaatgacattatgaaagaatttgaacatcagaaaactgaagcaaaaggcattttagaaagaaatattgagttttctcagctggttgttgactaccaacgaaaattgcgtgaaagcactgagtcattgattgctg

SEQ ID NO: 167159 - DNA, 276 bp, Glycine max
gaaattttaaaaatgactgggataaacttaagaattcacttattgaaattgaataaataaacaatttaattggattggtcgaatgatatcaaaaaaatggagtactaactcccatttcttatttattcttgaattaaccgatcaacttgctttgttatcgaacatatctttttgatttcaaaaattttccggaaaaaatttgaatctatttttatatgcgaatcaatcctactacttctggtactgaggtttctgcgcttgaaaaaaaaatctggg

SEQ ID NO: 167160 - DNA, 278 bp, Glycine max
tgggatgaattctcttcagcggtgaaggaagctcatgccgatcgcatgggtagccaaacaaagaggtttgtaatccctgagaggccaaaagaagaggattatttctatgccaacccacaggagtgtttggaacaatcagcagatgaaccgttggcgttgagtagtagtacgtgagtgagtgagtaatatgttgggaaatagtggaatttacttgtgccatcatctcctggtgcacttggtttttctaccacagatagtttttccacgcattttagcga

SEQ ID NO: 167161 - DNA, 279 bp, Glycine max
cgctgactgcatgatatcttccggttatgcgaaggaatgcgtcacgtctacatcttaattcgaaaatctatcatcgacgaaggaatctaccgcctcggcgtggagaaacttagctcctcgcgcgctaacaagatggattgggaagttcttgatttgaagatcaagagttggttagaggcgacaaggatttccgttagaacactctttaacggagagagaatactctgcgaccacgtcttcagttatcagattccgtcagagaatcatgcttcgccgaga

SEQ ID NO: 167162 - DNA, 279 bp, Glycine max
tggctcgtcactccttgctcttagccctcctcctcttcgccgccgtccccaccgccgcgatggcggtggcgcgtccgacgccgacgacatcctgatccgtcaggtggtgccagatgttggcgaacgcacgaggaggacaacctgctgaacgccgagcaccacttcgcgagcttcaaggccaagttcgccaagacctacgccaccaaggaggagcacgatcatcgcttcggcgtcttcaagtccaacctccgcagagccaggctgcacgccaagctcgac

SEQ ID NO: 167163 - DNA, 276 bp, Glycine max
ttccgattgaaagatgggtcaagcattcggttgctaccaagtcgatcagtcaaatgtggctatcaaggagcattttggaaaatttgatgatgtcctagagcctggatgtcactgcctgccttggtgtcttgggtaccagattgctggtagtctgtcgctgcgagtgcagcaacttgatgttcgatgtgagacgaaaaccaaggacaatgtctttgtcaatgtggttgcatctgtgcaataccgagctgtgtctgagaaagcatctgatgcattcta

SEQ ID NO: 167164 - DNA, 276 bp, Glycine max
ctgagaaaacagaactatacaaaatggaagatacactttctgcgttgaggtctttgatgctttctcagtctccaccgcttgatgccttagttgttccttctgaagattatcaccagagcgaatatgtgtccgcacgagacaagcgccgcgaattcgtttccggcttcactggaagtgccggcttggcacttataacaaagaatgaagcactgctgtggacggatggacgatattttttgcaggctgagcaagaacttagtgctcagtggaagctta

SEQ ID NO: 167165 - DNA, 269 bp, Glycine max
ccactcgaagcaaagcgaatcagagatccaaactcagttctccaactctctgatctcaacttccacttcagattcacgccccaaggccaacgacgattgctgcgccacgcaactcatcgacggcgccggcgagttcaacgtcgccggcctcgcaactttatcagaaccgtcaatgctcgcctcctgcggcctctcctatgccgtcgtcgcaatcatgggacctcagagtagcgggaagagcacgttaatgaatcatcttttccacacaa

SEQ ID NO: 167166 - DNA, 288 bp, Glycine max
ggaatgcatgtttctatgtgatgatagtggttttgggtctgggacaacagagacaatgggcctcggcccaagcccaatagcccctgtggtggtgcactggccccagtagtctttgcaacacacccaaaggtgtagtcaggaatagggcagtggctagagtaactgtgtcttggaccacattagcagctattgaggagctaccataagtcaagttgaaggtgcacgcgctggttccgcaactggggttgggtacctgaaaaaaatgttcacattaaaacaacaacgtta

SEQ ID NO: 167167 - DNA, 273 bp, Glycine max
tacacactgttccaatgggtgaagaccgctccgaaatagtgttcttcgatgtggagaccagcgttcccacccgaacggggcagggttttgcgcttctggaattcggcgccattttggtttgccccaaaacgctcacggagcttcggattactctactctcgttcgtcccgccaacctctccgtcatctcccccttgtcggagcgctgcaatggcatcaccgccgccgccgtctccgccgacccttccctcgccgacattgctcacctcgttta

SEQ ID NO: 167168 - DNA, 286 bp, Glycine max
ggaacttataaagaaaatgttgaaatcggcaagaagaagaccaacgtgatgcttgtaggagatggtaacgatgcaactgtaatcaccggcaacttgaatttcatcgacggaacaaccacgtttaagactgccactgttgctgctgtggtgatggatttatagctcaagacatatggtttcaaaacacagcaggcccacagaagcaccaagcagtggctcttcgtgtaggcgctgaccaatccgtcataaaccgctgtcgcattgatgccttccaagacactctcta

SEQ ID NO: 167169 - DNA, 281 bp, Glycine max
  unsure (1)..(281): unsure at all n locations
attgaatgagagcactggttatatcgattatgaccagttggagacaagtgcagtactttttaggccanaattaatagttgctggtgctagtgcttatgctcgcctttatgattatgcacgtgttcgcaaggtctgtgataagcagaagcagttctgttggctgatatggcacatatcagtggattggttgctgcaggtgttattccttctccttgtgattatgncagatgtgtcacaaccacaacacatcagtcacttcgtggtacacgtggggctatgat

SEQ ID NO: 167170 - DNA, 288 bp, Glycine max
gtaggctgataaagacaacactcataccgttggaaagaaggatgctgctggccatgttgcttaatttagttcttgcttcctttgtcttcttgagttttatcagagacgggagtgcagggatcactagctctttcattcggtcagagtgccggcagttgacatcccccttgatcatgaagcatttgcagttccaaagggttataatgcacctcaacaagtgcacatcacgcaaggtgactatgatggaaaagcagtaatcatctcatgggtgaccacagaagagccagg

SEQ ID NO: 167171 - DNA, 290 bp, Glycine max
  unsure (1)..(290): unsure at all n locations
gcacagcatcgaaatttccctatacttgcttccgcaaggcaagaattctacagtactcgccgataaggggttttccaaagcaggagcaatgtcttcctcttatcttcctgacacaactgaactccttgntctggcaaatgaggccaaagcccatctgaggccatctccattctttatcgggtacttgatgatccttcttcttcaccagatgctttgcgtatgaacgagcaagcaatcacaaacctcactaagcttctcactgatgaaaataggggagaggatctgtgcag

SEQ ID NO: 167172 - DNA, 291 bp, Glycine max
ctttcttccaaccttggagatggttgggcgccctttaatggatcagctgggacatcccttcttggtcaattggatgttgcttttcttgcagtctatgcttttggaatgtacttttctggacattttggtgataggtgtaatttgaggactttctaacggtggggatgataggaactggcttgtttacttcactgtttggggtagggtactggggaaacatccacaacttctactattatttaatagttcaaatgattgctgggttgtttcaatccactggatggccgtccg

SEQ ID NO: 167173 - DNA, 284 bp, Glycine max
cctcgagccgattcggctcgagttggaattagcacaattcgcagaaacagaagctttggcccacttcgctactgatcacccacccactacctctcatcaattagcaacaggtcaacgattgcgcgacatgcttaaacaatcccaatcactcctcttaccgtggaagaacagataataactatttatactggtccgaatggctatcttgattcattagaaattggacaggtaaggaaatttcttgctgagttacgtgcttacttaaacacgaataaccctcaatt

SEQ ID NO: 167174 - DNA, 282 bp, Glycine max
ggctactgcacaagaatttgagcctgtgcctcggatctgtcggctaatcttagccgtctacgaagatgatattcgtaaccctcaatgggctccccaaggaggttatggcattaatccagattgggttatcttgcgtaaagactacacgataaccaaggtcgcgttactccatacatgatataccttgatcatgatcatgctgaaatcatactggctgttagtggactcaatttggggaaggaaagtgattatatggttttgcttgataacaagctgggacag

SEQ ID NO: 167175 - DNA, 287 bp, Glycine max
gttcttttagtggccaagcttcagcaccggaatttagttaggctacttggtttctgtctggaaggcacagaaagactacttgtctatgaatttgttcctaataaaagccttgattacttcatatttgatccaataaagaaagcacattgaattggcaaaggcgttacaaaatcattggaggtattgctcgaggcattctctacctccatgaagattctcgactgcgtattatacatcgtgacctcaaagcaagcaacattctcttggatgaagagatgcatcctaag

SEQ ID NO: 167176 - DNA, 281 bp, Glycine max
atttttgtttgggttttttcatcacagtgcttttctttccttccttctgagattgctgaagagagaaaagcaaaatcgaaagaactgaattggatttcattggcggagtgaaagtgaagtgttgcgcaaatctgattggcaagaatgcgccagtgtcagctctcgcaaagtacaagctggtgttcttgggcgatcaatccgttgggaaaaccagcatcatcactcgcttcatgtacgacaaattcgacaacacttatcaggctacaatcggtatcgatttt

SEQ ID NO: 167177 - DNA, 287 bp, Glycine max
caaggactacttcaagaggctttttaactttaagaaggatagggatggctactggaaatggtttgctggcaacttggcctctggtggtgctgctggtgcttcatcccttttgtttgtttactctcttgactatgcccgtacccgtctgccaatgatgctaaggctgcaaagaagggaggagagagacagttcaatggccttgttgatgtctacaggaagacattggcatctgatggtgttgctgggctctaccgtggtttcaacatctcatgtgttggaatcattgt

SEQ ID NO: 167178 - DNA, 290 bp, Glycine max
gtcaacgttagtgctttgtttaggtgaactaattcggagaccttgcaagacttcatcaatggctgtcaaagtttatattgtgtactactccatgtatgggcatgttgagaaactagcagaagaaataaagaaaggggcttcctctgtgaaggtgttgaggccaagttatggcaggtacctgagacactgctggatgaggtgcttggtaagatgagtgcaccacccaagagtgacgtaccagtcattacccccaatgaactatccgaggctgatggctttgtattcggctt

SEQ ID NO: 167179 - DNA, 286 bp, Glycine max
gcaaaaacaaaaccttaacccaaccggaccgggtatcaaaggcagagaagagagtaacaaggttgcttcgaacagtttagaatcatgtcttggtgcaccattgagtccgatcccggtgtgtttacagaactcattcagcaaatgcagtgaaaggagtacaggttgaggaactgtattcattggaccttgactctctcaacagccttaggcctgtttatgggttgatttttcttttcaaatggcgtccaggagaaaaggatgatcgtgtcgttatcaaagatcccaa

SEQ ID NO: 167180 - DNA, 286 bp, Glycine max
gtgccttacaggaatagcaagctgactcaaatactgaaagattctcttgggtatggctcaaaggtgttgatgttggtgcatataagcccttctgaagaggatgtttgcgaaacagtttgttccttaaattttgcaaagagagcggagcaatagagtccaacaaagaagtgccagtggaagtgaagaagcaaaaagagaagaagattatggagctagaggaagacatcaaggaagccgaaaaacagagccagaatttaagggaacaaatacagcagattgagttgaa

SEQ ID NO: 167181 - DNA, 284 bp, Glycine max
  unsure (1)..(284): unsure at all n locations
ctcgacggggtagcgctgagtttaagcatatcgataagcggaggaaaagaccataacaaggattcccttagtaagggcgagcgaagcgggaaaagcccaccatgaaaatcggtcgccctcggcgtccgaattgtagtctggagaaggtcctcagtggcggagcgggcccaagtcccctggaagggggcgccagagagggtgagagccccgtcgtgcccggaccctgtcgnancacgaggcgctgtcggcgcatcgggttgtttgggaatgcagccccaatcggg

SEQ ID NO: 167182 - DNA, 281 bp, Glycine max
gaaatgtatggagccggtggagaaatgtttgagggatgctaagatggacaaaagaagtgttgatgatgttgtccttgttggtggttctaccagaattcccaaggttcaacaactgctgcaggacttctttaatggaaaagagtttgcaagagcattaatcccgatgaggctgttgcatatggtgctgctgttcaggctgcaatcttaagtggtgagggcaatgagaaggttcaggatcttctcctcctggatgtcacccctctgtctcttggtttggagac

SEQ ID NO: 167183 - DNA, 284 bp, Glycine max
gggtgttggaaaccaatcctattcctgtgacatggaattctaacaaaggtgtggagaaagagtcttatggcgagattgtcacggcgcttgttaaggatgttcaagcgctgaattcttcagcaataggaacaaattcatcttattctatgggaagcaggttggaagggctgcgaggttggcgttgatagcggaagaagtgtcttaccctaaagtgattccaaaggttaagaaatttctgaaggagactattgagccctggttggatggaactttcaaagggaatg

SEQ ID NO: 167184 - DNA, 280 bp, Glycine max
cagctcggtacattttggagaggattacagagatggccggagtaattgtttcatttgatcccaagcctattccgggagattggaatggagctggagctcactcaaactacagcaccaagtccatgagagatgagggtggttataggtgattaagaaggccattgaaaagcttggattgaggcacaaggagcacattgcagcatatggagaaggcaacgagagacgtctcactggaagacatgaaactgcagacatcaacaccttctcttggggtgtggca

SEQ ID NO: 167185 - DNA, 279 bp, Glycine max
gtgaagataactcttggtactttcgatgactcttttggtgttgcctctcttaaggcttatttggcagagttccatgcaactctgattttcgtgttcgctggtgttggttcagccatcgcttacaacgagcttacaaaagatcagccttggatccaacggggctggtggcagtagctgtggcccatgcatttgcactgtttgtaggtgtctccgtcgcagccaacatctcgggtggccatttgaacccagctgttacttttggattggccattggaggca

SEQ ID NO: 167186 - DNA, 281 bp, Glycine max
atcaaatcacacttttgtgttgtgttgggaaaccctaaaccccgttttcggtgagatcgagatcgatcgaacatggatgaggagtacgatgtgatcgtgttgggcacgggtctcaaggagtgcattctcagcggtcttctctcgtcgatggcctcaaggttctgcatatggataggaacgactattacggaggagaatccacttcgctcaatcttattcagctttggaagagattcaggggagatgacaagcctcctccacatttgggcgctagcagggac

SEQ ID NO: 167187 - DNA, 282 bp, Glycine max
gtcgtaggagggtttcaaaagatggagaacatgcagagcttctggcaattgggcgatgaactccgtggacactcaaaagcatcggaggatcacaaatggttaatggttgcttcgaaattggcggaacagacaagattgaaggggagcgtgtgaacaaccttgatctttcaaagggccccattgaaacaaggtcaagggataaatttgggttccaggaagagaacaaatttgattctcttaacttaagcatgttgaacctggactctaaatttactgagaatg

SEQ ID NO: 167188 - DNA, 286 bp, Glycine max
gtaatttcaagtactgttaagaaacctattggtgctaagaaagcagtgaagagtggggggctcggcgctcgtaaactcactaaaaagccaagtgagtctctctatgagcagaagcctgaggaaccccctgctccagtttcatctcaacaaacaatatgcctgctgggccatctccaacgtctcggtttgagtatgtagaaaatgtccaatcatctgagttgaacactggaggttcacatttgcttagtcatgtgtctccaccaaagtcatcaagcttctttgcaga

SEQ ID NO: 167189 - DNA, 287 bp, Glycine max
ctcttagtcccaattttctagggttttattcattttccgatggcttctgcagatgttgagtaccgttgctttgtcggtgggctcgcttgggccactgacgaccatgccctcgagagagccttctctcagtacggcgaaatcgttaaacgaagattatcaacgatcgtgagactggcagatccaggggttttggatttgtgaccttcgcctcggagcagtccatgaaagatgcgatcggagcgatgaatggacagaacttggacggccgtaacatcactgtcaatgaa

SEQ ID NO: 167190 - DNA, 278 bp, Glycine max
tccttcgaaaagctaatcgtgctctaaggcaggctaccttgggaaccttaaattcacttatagttgcttatggtgataagattgttttgtctgcttatgaagttattatcgtagaactgtcgggactaattagtgattctgcttgcatatgacagctcttgccctggaactctgctgcacattaatgggtgacaagaggtcaaatcaaagtattggtttggccgttagaaacaaagttcttcctcaagctttaacattaattaaaagctcattgttgc

SEQ ID NO: 167191 - DNA, 277 bp, Glycine max
  unsure (1)..(277): unsure at all n locations
gaacaaaatgccacatgaataagggttttttgatgtgttattacttcgcttccaatcaatccatgatcccannnaacattgcatcggatttgatagatgaagctaaaaatgctggtcaacaaggtcttgcggggattttgtgtggatgagattcatggctactaggcagctcatacggtacaatacttacaatgtgaagccacgtgagataagtaaagcacaggataggcttacagactcgctccaggatgtttatgcaagttacccacagtatagg

SEQ ID NO: 167192 - DNA, 281 bp, Glycine max
attctctgtctctctctctctctctcgatcaatcatggctttgcccaatcagcaaaccgtcgattaccctagtttcaaactcgtcatcgtcggtgacggtggtacaggaaagacaacgttcgtgaaaaggcatcttaccgggaatttgagaagaaatacgaaccgaccattggagtggaggttcacccattggatttcttcacaaactgtggaaagattcgcttctactgttgggatactgccggacaagagaagtttggtggcctcagggatggatatta

SEQ ID NO: 167193 - DNA, 277 bp, Glycine max
gccagatcctatagagaaattcaagaggataatgcgggcaacccaaggtgctcttattgttgcttcaactcttcaaatagtactaggctttagtggcctttggcgtaatgttgcaaggttcttgagtccactttcagcagtcctttggtatctcttgttggttttgggctttatgagttgggctttcctgtggttgctaaatgtatagagattggactgccagagcttatattactagtatttttttcacagtttgtaccccatgtgctacatgcag

SEQ ID NO: 167194 - DNA, 284 bp, Glycine max
ggaaaaagtcaaagctcggtttcaccgtttatccatcccctcaggtttcgacctcggtcgtggaaccctacaacagcgtcctttcaacgcattctctcctcgaacacaccgatgttgctgtgcttctcgacaacgaggcaatctacgacatttgcaggagatctcttgacatcgaacgccctacctacaccaacctgaaccgtctcgttttccaggtgatatcatccctcactgcctctttgaggtttgatggagcactgaatgttgatgtgactgagtttcaa

SEQ ID NO: 167195 - DNA, 275 bp, Glycine max
gagcaccacaaccatccaccgccaccggttcaggcacctccggcaggtccaccaccgccaaatctagcactttctagaggccccgtttggcatccagctgaacaactctcgcagcttcactattgcatccactcaaatccttcatggccggtggcaattctactgggttttcagcactacattgtgatgcttggaacaacggttctgattgcaaccacactggttcctgcaatgggtggggaccatggtgacaaggctcgtgtgattcagtcatt

SEQ ID NO: 167196 - DNA, 275 bp, Glycine max
ctatacaaataacatatatggcttcttccttctctccaagcctatcatcacttgtgcctctgcttgtgagccttttcattgtggtttgtgctgccggtaacttcaaccaagactttcagattacgtggggagatggcgtgcaaaaatactcaacaacgccaatcttctcactctctcccttgacaaggcctctggctctggcttccaatccaagaacgaatacttatttggcaagattgacatgcagctcaagctcgttcctggaaactctgctg

SEQ ID NO: 167197 - DNA, 278 bp, Glycine max
cagcacaacgcgggttactgtctgttcaagctaccatctctctctctctttcttagtgcctccttgccagaagttaaaatggcccaagaaactttcctattcacatctgaatcagtgaacgaggggcaccctgacaagtctgtgaccagatctccgatgctgtgctcgatgcatgcttggagcaggaccctgacagcaaggttgcctgtgaaacctgcaccaagaccaacatggtgatggttttcggagagatcacaaccaaggccaacgtggactat

SEQ ID NO: 167198 - DNA, 276 bp, Glycine max
gcaaatatggcatactctcaacttcaaaaggtggaagctaatgtgcacatcaaggcttctgctgatcagttccataatgttttatgcaacaggacacaccatattgccaacattttccctggaaaagtacagtctgttaaattcataaaggtgaatggggcactgagggatccgtcatctcctggaattatttacatgagggcaaagtttgtgtggctaaggagatggttgaaggcatagacatgaaaaacaataaaatgacctttaaggtcatag

SEQ ID NO: 167199 - DNA, 277 bp, Glycine max
caattgtctaaacttccaagtgcgccgtattcctaagcttaggctttcaatctgaatttctgaattctctgctgctggaaaatgaaactgagtccaagggacatcgagaaactatacctgcataatgcaggctacctgcacagaaacgccttgctcgtggtttaaggctcaattatgttccaactgtggctctcatagcaacacagatttcggaatttgttcgtgatggtgacaagactgttgcacagctaatgtgcattaggagagaccttctggg

SEQ ID NO: 167200 - DNA, 278 bp, Glycine max
ttacaacaatgggttgccttcaaatctcactgctagcagaaatcctagcttggactatgggttcaagggagctgaaattgccatggcttcttactgctctgaactccaatatcttgcaaatccagtaactagccatgccaaagtgctgagcagcataaccaggatgtgaactctttgggtttaatttcatccagaaagacaaatgaagctatcgagatccttaagctcatgtcttccacattcttgattgcactttgccaagcgattgacttgaggca

SEQ ID NO: 167201 - DNA, 274 bp, Glycine max
gttcacagacaccaggggtggcgcctcatcacttgtatgtggctacatgctggggttttccatctgttggcaaatatgctgggtattctagtcattggaattcggcttgcgcaagaatttgggtttgtgctaattgactgctatttgtcatatctggatttggggggagtttgctttctgctctgtttatccagtcaaacatttctgttggtgcttctggtgcactttttggcttgctgggaggcatgctttcagaactcattactaactggtc

SEQ ID NO: 167202 - DNA, 278 bp, Glycine max
gcaaaaacaaaaccttaacccaaccggaccgggtatcaaaggcagagaagagagtaacaaggttgcttcgaacagtttagaatcatgtcttggtgcaccattgagtccgatcccggtgtgtttacagaactcattcagcaaatgcaagtgaaaggagtacaggttgaggaactgtattcattggaccttgactctctcaacagccttaggcctgtttatgggttgatttttcttttcaaatggcgtccaggagaaaaggatgatcgtgtcgttatcaa

SEQ ID NO: 167203 - DNA, 273 bp, Glycine max
cgaaatttcttagacaaaaaacaaggatcagaaccgttgaatcaagttgaggaagatggcactagtctctggaggaagatcaacactgaaccctaacgcccctctttacattcctgccgcgtttcgccaagtggagatttctctccggaatggtggcagctgccgacgacgctgacatggtaccatgactactggctaagccagcagcacgatgagggagccttctacggcgaggacgacgggtttgatggcaatgatgtcgttgatttgctt

SEQ ID NO: 167204 - DNA, 273 bp, Glycine max
cgaaatttcttagacaaaaaacaaggatcagaaccgttgaatcaagttgaggaagatggcactagtctctggaggaagatcaacactgaaccctaacgcccctctttacattcctgccgcgtttcgccaagtggagatttctctccggaatggtggcagctggtgacgacgctgacatggtaccatgactactggctaagccagcagcacgatgagggagccttctacggcgaggacgacgggtttgatggcaatgatgtcgttgatttgctt

SEQ ID NO: 167205 - DNA, 279 bp, Glycine max
gttgtcggatcgaaaaccctaaattgaattcgaatacacaacatgcagcaggggggaggatctgagacggaagtaacatgggaagaccagcagaacatcaacaaattcggaaggttgaataatcgctttcacgagctgaggatgagatcaaaatcgcaaaggaaacaaatgataatttggaggatgcaagcaacgagttgattctcacagatgaagaggtcattcggtttcaaataggagaggtttttgctcatgtgccaaaggatgaagttgagaaca

SEQ ID NO: 167206 - DNA, 290 bp, Glycine max
cctcgctctcttcttccctgcttcacaatttttattttaatgatactattttgttattgttaagacggcatcatcagggaaatggatcgggtgaagggtccatggagcccagaagaggacgaggctttgcggaggctggttcaggcccacgggcctcgaaactggtcggtgataagcaagtccgttccgggacgatccgggaaatcgtgccgcttacggtggtgcaaccagctctcgccgcaggtggcccaccgccccttctcgccggacgaggacgaggccatcgtcag

SEQ ID NO: 167207 - DNA, 269 bp, Glycine max
atgtaccgagttataaagcactacactactatgaaccagagaatgcctctcatctatgtgaaactgtatacatatcaaatctttaggggattagcatatatccataccgcactgggagtttgccatagggatgtgaagcctcaaaatcttttggttcatcctcttactcaccaagttaagctatgtgattttgggagtgccaaagttctggtcaagggtgaatcaaacatttcatacatatgttcacgttactatcgggctccagaact

SEQ ID NO: 167208 - DNA, 189 bp, Glycine max
tgaattcggatggaggttacagcttgtcagtggatgggaccccaataggagggttcaagaacatggaatcaccaggggttgcattcccgaaggagcagccggtgaggatatagtcgactctatggacatgctgatgactgggcaacaagacgtggacttgtgaagacaggttggtcacaagcacgattc

SEQ ID NO: 167209 - DNA, 280 bp, Glycine max
gggatctccatacgccggatctgctaaaatacgcttgatccatatgggcctcctcgaccacttgtgggacgacaccgtcgccggcccaaggccggaaaacggtctcggcaagctccgaaaacagcacaccttcactttccgacctagctccggcaaggaaacggagggcgggagcgtgagatcgtacggagacgaatcgtcggacgaagcgacgagagtgacgcgtagtatcatgatcgtgaaaccgcccgggtaccagagtggatcgcctccggtttct

SEQ ID NO: 167210 - DNA, 279 bp, Glycine max
ttgagagttgcagtttgcactttgtaggatcatctcctagcattgatcgattgagatggcagacgaagctaacagaactgctttccttgaaattcaaagtcgcatgatcgatactactggaaaaataaaacaggtgcaaacccagatgcgttccaaagaagcagaaaaaaagcgtgcttttctgaccatggaggagctgaagcaagttcctgatgatacgaatgtttacaaatccattggaagaatgtttgtattggagaccaaggcaacattaatgaa

SEQ ID NO: 167211 - DNA, 278 bp, Glycine max
tccgatacctgcaagaaaaagatgtttttgagaagtactacaaacagcatttggcaaagcggcttttgtctggaaaaacagtttctgatgatgcagagagaagtctcatagttaagctcaagacagaatgtggttaccaatttacatctaaattggagggaatgtttacagacatgaaaacctctcaggacacaatgcagggcttttatggctgccaccctgaactaagtgacggtcctacgcttactgtccaagttcctacaacagggtcttggcca

SEQ ID NO: 167212 - DNA, 300 bp, Glycine max
gctcggaattcgcgctcggctcctccacccatacacaaacggacacacactttgattgagaatggggcgtgttcgcacaaagacagtgaagaagtcctcgcggcaagtgatcgagaggtactactctcgcatgacgctggacttccacacgaacaagaaggttctggaagaggtggccatcattccctccaagaggctccgcaacaagatcgcgggattctccacccacctcatgaagcggatccagaagggtcccgtacgtggaatcgcctccaactgcacgacgacgaacgcgagcgc

SEQ ID NO: 167213 - DNA, 276 bp, Glycine max
gaagtcttgagatctacacaggaagccatagttttgccaccatgggttgctctggctgttcgtccaagacctggtgtgtgggagtacctgagagtgaatgtgcacgctcttgttgttgaggagttgcaacctgctgagtacctgcacttcaaggaagaacttgttgacggaagttctaatggcaactttgtgcttgagttggactttgaaccattcaatgcagccttcccccgcccaacccttaacaagtcaattggaaatggtgtgcaattcctc

SEQ ID NO: 167214 - DNA, 276 bp, Glycine max
atttgaggttgttacagggatggccaagaaacaaggaaaggaaaagtcatcagtttcgaatcatagcagtaccaagtcgaagtcaaactctaagcgcggttctgaatcaaagtacacaaaagcaatgcaatccaaggacgaggacgatgaaggtgtgggtgtggaagaggaagacgaagatgaacatggagagactttgtgtggggcatgtggagagagttatgctgccgacgaattctggatttgctgtgacatctgtgagaaatggttccatgg

SEQ ID NO: 167215 - DNA, 271 bp, Glycine max
aaacaaccttctttctttttctgtgagcctttctttcaggttcttaacttgatcagtgtgcagtgtccaaatcataagggtagttgcaaattgcaatggctaagcatgatgttgagggtggttccttctctgcaaaggactaccatgatcctcctccagcaccgttgattgatgctgaggaactcacacagtggtccttctacagggctttgattgctgagtccattgccacaatgctcttcctttacatcacagtgctcactgtgattgg

SEQ ID NO: 167216 - DNA, 271 bp, Glycine max
cggcaccgtccatgttcctctcagggaactcatggacaatcccggcgacgacggttccttccgccaagtcagttaccaggtgatgaaacagtcagggaaatccaagggatccttgaatttctcctacaaagtaggcgaacatgttcccgccccggcccctaaagcacccaagacgggacaagagcctgtgatggcttatcctccgaccggggcgggatccagttcgatgccttatgggacaccacatcctcccccgccgccgcctgtggca

SEQ ID NO: 167217 - DNA, 282 bp, Glycine max
caaccaggtcggccaagtcgtttcggtgcgcgtctgcagggtccttactacgcgtcgttcactcggttacggctacgttaatttcagtaaccctcaggatgcggcgagggcattggatgtgctgaatttcactccacttaacaacagatctattaggatcatgtattctcatcgagatcctagtcttaggaagagtggtactgcgaatatttttatcaagaatttggataaggctattgaccacaaggccttacatgatactttttcttcttttggactcat

SEQ ID NO: 167218 - DNA, 284 bp, Glycine max
aacaaagctaaagaaggaattcatataaacctaaagggatttgccattggtaatgggcttactgatcctgggatccagtataaagcttatacagattatgcactggacatgggcataattcagaaggctgactatgaacgcatcaacaaagtgatggttccagcctgcgaaatggcaataaaactatgtggcactgatggcaaaatcgcatgcacggcatcatattttgtttgtaatacaatattcaattccatcatgtcacatgctggtgatatcaatctatt

SEQ ID NO: 167219 - DNA, 275 bp, Glycine max
cagcacttgatgcagctttaaatgctcaatttttggtccagattggtgttttcactgcagtaccaatgataatgggttttatacttgaattaggattgctggaggctgttttcagtttcatcacaatgcaactacaattgtgttctgtcttcttcactttctcattgggaactagaactcattattttgggcgtaccattctccatgggggtgcaaaatatcgtgctactggtagaggctttgttgttcgtcacataaagtttgctgaaaattac

SEQ ID NO: 167220 - DNA, 275 bp, Glycine max
gaaagaaagacaaaaaaaaaacagcgccctagatttgctcttctttgcttcggaagaaagagaaaaacaaataacaatggcgttcgcttctttcctcggcagagttctcttcgcttccgtcttcatactctctgcttaccaagaatttaacgaatttggcgttgatgggggacctgcagcaaaagcactcagacctaagtttgatgcctttacacatcgagtgcattctcaagttggctttcaacttcctgagattgatctgaaatttttaattg

SEQ ID NO: 167221 - DNA, 277 bp, Glycine max
cctcgagccgaatcggctcgagggactgtaactagccgcagcacgaggagcagcctcaggaggcagtggatgtctcacaggaacttcgagcacccaaggcacggttcactgggatttcttcccaggaagcgtgctgctcgtcacaggggaaaagtgaaggcattccccaaggatgacccatccaaggcacccaagctcactgcattcttgggttacaaggccggtatgactcacattgttagagaggtcgagaagccaggatcaaagcttcacaaga

SEQ ID NO: 167222 - DNA, 276 bp, Glycine max
cattattctcctcattccttcatttttaaacctagctccatctccctccactcaccataacatgccatcagaagcaaatgctgccaacaccaacttctgtgtaaatgttagcaacaatggctacattagtgctaatgaccccttgaactggggtgcggcggcggaggctatggctgggagccacctcgacgaggtcaagcgcatgctagaggagtaccggaggcccgtcgtcaagctcggtggagagaccctgaccatctcgcaggtcgcggcgat

SEQ ID NO: 167223 - DNA, 275 bp, Glycine max
tgggagttaggttctgcacgctctgcttccagcgagtgttctttcttcgtttcaacaccttaatttgcacacgctgcttcttcagcttgagaaatggcacaagaaacctttctattcacatctgaatctgtaaacgagggtcaccccgacaagctgtgcgaccagatctctgatgcagtgctcgatgcgtgccttgaacaggaccctgacagcaaggttgcctgtgagacatgcaccaagaccaacatggtcatggtctttggagagatcacaac

SEQ ID NO: 167224 - DNA, 275 bp, Glycine max
gaggatatatttgatgcaatcactgatgctaaacacttcatatacattactggttggtctgtttatactgaaatttccttggtaagggattctaggaggcctaagcctgggggagaccaaacacttggtgagcttctcaagaaaaaggcaagtgaaggtgttaaggtattgatgcttgtttgggatgatagaacatcagttggtttgttgaaaaaagatggactgatggctactcacgatgaagacactgcacatttctttgatggcaggggggt

SEQ ID NO: 167225 - DNA, 219 bp, Glycine max
aactgctgcctcactctctcactctctcaggagtatataatctgagcgatgtcagatctcgtggctcccttgcgccctaagaggaagaaggtttgggtggactattttgttcagtttcgatggatccttgttatttttgtgctccttcccatctccttcaccatctatttccttacatacctcagggctgtaagatccgagtggaagtcctataagacg

SEQ ID NO: 167226 - DNA, 284 bp, Glycine max
  unsure (1)..(284): unsure at all n locations
taaaaatcatcgaagtactcaaattagcatggctgtcacggttgcattcttgaatttgatcatcatgttttcagtagtctctacaagcaagtcactgagcttaaactactattcaaaaacatgacctgatgtggaatgcattgttgccaaggcagtgaaggatgccactgctagggacaaaactgttccagctgcacttctgcgaatgcacttccatgactgtttcgttcgggggtgtgatgcctctgtgctgctaanattcaaaggaagcaacaaagcagaaa

SEQ ID NO: 167227 - DNA, 280 bp, Glycine max
gggcagaatgacatctactacattactggtgaaagcaagaaagctgttgagaattcccctttccttgaaaagcttaagaagaaggggttcgaggttctctacatggttgatgctattgacgagtatgctgttggtcagcttaaggaatttgagggaaagaagttggtctctgctactaaggaaggcctgacacttgacgagagcgaagacgacaagaaaaagaaggcagaagtgaaggagacatttgacggtctctgccatgtgatcaaggatgtgttgg

SEQ ID NO: 167228 - DNA, 275 bp, Glycine max
gtttcttggttggaaaggggcatcagggttctcagcctcttccacagccgaacaagtccctcaagggattgatggaaccgccctcaccgccatcgtcacaggagcaacaagtggccttggtctggagaccacccgggttcttgcattgcgcggtgtccatgttgttatggcagtaaggagtctggacagtggtaagaatgtcaaagaaacaatacttaaggaaatcccctcggctaaaattgatgtcatggagttagatctaagctctatggcat

SEQ ID NO: 167229 - DNA, 274 bp, Glycine max
gtgaaggttaaattggcatacgtggcccttgatttcgaacaagaaatgtagactactaagagtagttctgcagtggaaaagtagctatgaattgcctgatggacaggtcattacaataggttctgagagattccgttgcccagaagtactgttccagccttctctgattggtatggaagctactggaattcatgaaacgacatacaattccatcatgaaatgtgatcttgatattaggaaggatctgtatggaaacatcgtgcttagtggaggg

SEQ ID NO: 167230 - DNA, 273 bp, Glycine max
gagtgagtgagcaattcactgctatgttcaggaggaaggccttcttgcattggtataccggggaaggcatggacgagatggagttcactgaggctgagagcaacatgaacgatcttgtgtcagagtatcaacagtaccaggatgccactgctgatgaggatgagtatgaggaggaagaggaggaggaggagtatggccaacatgatatgtgattttgaacttggtaatgtattgcggtggcttgaagatgtataacatgccgcaacttcctgt

SEQ ID NO: 167231 - DNA, 275 bp, Glycine max
tgacacagtgctggtgggtggtcctaaactgagggtggcaacggcatctgatgcctttgttgaactggctgatgcgtgtggttatgcgcttgctgtgatgccatcggctaaagggcaggttccagagcaccatccccatttcatcggaacttattggggtgctgtgagcactgccttctgtgctgagattgtggagtctgcggatgcatacttgtttgctggtcccatttttaatgactacagctctgtggggtattcgctccttctcaagaagg

SEQ ID NO: 167232 - DNA, 267 bp, Glycine max
cttgtggaactcttggcctttctacagcaactgtcaaacttttgagtagtgatggtagcacacatgttgcttgttctgttggtacaggaccagtggattcggcatacaaggctgtggatctgattgtgaaggagccagtaacacttcttgagtactcaatgaatgcagtcacggaaggcatcgatgcaattgccactacccgggttgtgattcgtggggagagtgaaacaagtactagtactactcatgctttaactggagaagctg

SEQ ID NO: 167233 - DNA, 216 bp, Glycine max
actgtatgttgttgtaactcgttcttcttcttttgttgttctgtgtttgtgtttgtattttctctcacctgaaaatgtcttgctgcggtggtaactgtggttgcggaagctcctgcaagtgcggcaacggctgcggaggctgcaagatgtacccagacttgagctacactgagtcaaccaccaccgacaccttggtcatgggagtggcacccgtta

SEQ ID NO: 167234 - DNA, 278 bp, Glycine max
ctcgagccgttgaaattcttcattcaaataatgtttctgaattgagttggtatcttccttgacttgtgtgaaccatttttggttgttgcttttgttttgtaaggtttccaagttaggatttggttgtatgggcctaagtggagtgtacaacgatcctgttcccgaagaggttggcatctctttgatcaaacacgcattcaccaaaggggtcactttctttgattctgcagatttttatggagcacgtgccaatgaagttttggtcggaaaggctctca

SEQ ID NO: 167235 - DNA, 276 bp, Glycine max
gttttcttttcgttcgcatcttctctctctctcagaaagatgaaggtggtcgccgcgtatttgctcgccgtcctcggtggcaacaacagcccctccgccgatgtcatcaaggaaatccttggctccgttggagtagaagcagatgaagataggattgaatcgtttttgtctgaagttaagggtaaggatatagttgagcttattgctgccggtagggaaaagttggccacggttccttctggtggtggtggtgccgttgccgtcgccgcagctcct

SEQ ID NO: 167236 - DNA, 272 bp, Glycine max
gttaacgctctccaatacaaaataaccactcactgaatattcggtcgaagatgtccgccgccgaagaagctaaagttcccgccgtcgaaaagccggtggaggaggtgaaggcgccgaagcttgccaaggagaagaaacctaaggctccgaaggaaaagaagccgaaacaggccaaaactgcttctcatcctccatatctccagatgattaaggacgctttgattgctctgaacgagaaaggaggatcgagtccatatgcgatagcgaagtac

SEQ ID NO: 167237 - DNA, 270 bp, Glycine max; identical to SEQ ID NO: 112843

SEQ ID NO: 167238 - DNA, 268 bp, Glycine max
ggcgttgtgaaagcgtttgcgaggaatctgttgttccatggaaggaacactgaatgcagtcgctcctacagtctgatcccaatggtgatagagcactcttcccgaggtgagagggcatacgacatcttctcgcgccttctgaaggagcgcattatctgcatcaacgggcccatctccgacgacaccgctcacgtcgtcgttgcgcagtcctcttcctcgaatccgaaaacccttccaaacccatcaacatgtacctcaattcccccgg

SEQ ID NO: 167239 - DNA, 269 bp, Glycine max
tttcgatctgggtactaaccctaacccgcttcgaaccgtggcttcctcaggctcgcagaacctctctcgaagaaaaccttcttcttcttcgtcttcgtcttctcaacaaacacccgggtcgacccggatcgtttaccgagaatctcggatcccatcggaatccgatttcccgatctggcagcagaactggttcatcgcattgctcttcgtcatggctctcggattcttcgccctcgccattttcctcttcctcactctcgactctgaca

SEQ ID NO: 167240 - DNA, 258 bp, Glycine max
caggaccctgacagcaaggttgcctgtgagacatgcaccaagaccaacatggtcatggtcttcggagagatcacaaccaaggccaacgtagactatgaaaagattgtccgcgacacatgccgcgaaattggattcatctctgatgatgttggtcttgatgctgacaaatgcaaggtgttggtcaacattgagcaacagagcccggatatcgcccagggtgtgcacggccacttcaccaagcgcccagaggaggttggt

SEQ ID NO: 167241 - DNA, 174 bp, Glycine max
ggttcagcttctcagtggctgggaccccaataagcgaattcaagaacatggaatcaaaaggagttgcattcccaaaggaacagccaatgaggatatactccagtctcaggaatgctgatgactgggcaacaagaacgtgacttgtgaagacagattggacacaagctccattca

SEQ ID NO: 167242 - DNA, 268 bp, Glycine max
gtccaagggaagagaattctgaggctggaaaaagtaggtgagaatggtgacgcatggcagagagctgatgtcgctgtcttcaaaacagggcattggtggagtcatcaaggatctcttcaagggtgggattatgtagaattgggaggcaagtactacccagatatggatggcttagcagctttggaaagtggtatgaaaacatgggctaattgggtggacaacaatattgatagaagcaaaaccagggtgttctttcaggcaatttctc

SEQ ID NO: 167243 - DNA, 283 bp, Glycine max
ggcattcggctcgagagacaaacctgcatcatatgtctcaactaatactcgaatcgtggttccaacatccaagaatgttaactcctctcagaaacctgctctcaagttcttgatctatggcagaacaggttggattgggggtttgctggggaagttgtgtgaaaagcaaggaattccctatgaatatggaaaaggacgcctggaggaccgatcatcacttgtggctgatattcagaatgtgaagccaacacacatttttaatgcagctggagtcaatggcaga

SEQ ID NO: 167244 - DNA, 267 bp, Glycine max
atcaaatcacacttttgtgttgtgttgggaaaccctaaaccccgttttcggtgagatcgagatcgatcgaacatggatgaggagtacgatgtgatcgtgttgggcacgggtctcaaggagtgcattctcagcggtcttctctccgtcgatggcctcaaggttctgcatatggataggaacgactattacggaggagaatccacttcgctcaatcttattcagctttggaagagattcaggggagatgacaagcctcctccacatttg

SEQ ID NO: 167245 - DNA, 267 bp, Glycine max
cacgacttcaactcacttcaagaactccctgactcttacgcttggacacaacctgatgatgatgatcaccgtctcacaaattacccttccaacaataagactaagaccgttgtccccatcatcgatttgaacgacccaaatgctccaaacctcataggccatgcatgcaaaacatggggtgtgttccaagtggtgaaccatggcatccccacgagcctcttcagtgacattcagagggctagtcttgctctattctcccttcctctt

SEQ ID NO: 167246 - DNA, 271 bp, Glycine max
cactcttctatattcctagtactttgaactgatattgaaataaacaacaatggccaattccatgagctttttcctgcttctttctttactagcttttgctcccttgtgcctctgtcactataaccaagagggttacctctaccctcagttttatgactattcatgcccacaagttcagcatattgtcaagtctgtccttgccaagtatgttgcagagcaacctcgattggcggcttcaattctcaggcttcatttccatgattgttttgtc

SEQ ID NO: 167247 - DNA, 255 bp, Glycine max
gattgttgtaagactttgtaattgaggtgctgcaatggcttcaagtcaggaagaggtgactcttttgggagtaattggaagcccatttgcttgcagggtgaagattgcccttaagttgaagggagttgaatacaaatatgtggaagaaaatttggccaacaagagtgatttgcttctcaaatccaacccagttcacaagaaagttccagtttttatccacaatgagacgcccatagcagactctcttgtgattgt

SEQ ID NO: 167248 - DNA, 258 bp, Glycine max
aacaaagctaaagaaggaattcatataaacctaaagggatttgccattggtaatgggcttactgatcctgggatccagtataaagcttatacagattatgcactggacatgggcataattcagaaggctgactatgaacgcatcaacaaagtgatggttccagcctgcgaaatggcaataaaactatgtggcactgatggaaaaatcgcatgcacggcatcatattttgtttgtaatacaatattcaattccatcatg

SEQ ID NO: 167249 - DNA, 177 bp, Glycine max
ctctgcgactagaacatccagaaggagtcaaggcttcagctgatccaacgtctcagtagtggcatacatatcttcgttaagactctcactggcgacaatataactctagtggtcgtgaattctgacaccattgactatgtctaggcaaaaatccgggtcaaagtctgtatccccccg

SEQ ID NO: 167250 - DNA, 271 bp, Glycine max
aatccttcaaaaattttgtctctttgtgtgtgtatggtgatgataacttaattagtgttcatgaatatgtcaagccttactttagtggttctaaattgaaaagctttctagctggtccataatatcaccattactgatggtattgacaaaactagtgcaactttgcaatttagaaagttagcagattgcgattttctcaagagaaactttaagcagatgtctaatgttttgtgggtggctcctgaggacaaggcgagtttatggtcacaac

SEQ ID NO: 167251 - DNA, 275 bp, Glycine max
cattattcactcacttcccccctcttcatttactagtcctcctttacctgcaaaaaacagcagatggctcagcttaacctcatacttatctggttatttttattgagtctgtgcctttattcatgtcctacttcggcccagttaagtagacaccactatgcaaaaacatgccccaatgttgaaaacattgtcagagaagcagtcaaaaagaagtttcatcaaacatttgttacggttcctgctaccattcgtctcttcttccatgattgcttcgt

SEQ ID NO: 167252 - DNA, 285 bp, Glycine max
gcaatatttaaaattggtaacagcagagatatgcctgaaattccggatcacctctcaagtgaggcaaagaatttcattcagctatgcttacaaagagatccatcagcccgcccaacagcccagaagttaatagagcatccctttattcgagatcagtcagcaacaaaagctacaaatgtcagaataaccagggatgctttcccctacatgtttgatggaagtcggacgcctccggtatagtcctcaatgcttatttattttctttttgaaattatgttccttttg

SEQ ID NO: 167253 - DNA, 283 bp, Glycine max
tctctcaccaaagccttcctagaacgaaaaaaaaaagaagagcaattttccctcaccaagaagaagaagcaaacaatggccgatcaacttaccgatgaacagatctccgagttcaaggaagccttcagcttgttcgacaaggacggcgatggttgcatcacaaccaaggagcttggaactgttatgcgttcattggggcaaaacccaactgaggcagagctccaggacatgatcaatgaagtggatgctgatgggaatggtaccattgacttccctgagttcc

SEQ ID NO: 167254 - DNA, 280 bp, Glycine max
gaaagatggtagcaggaagatttgtaaatgcttattcaagaaatgactggatgcttggagttgcttgctttccgtgccagtctactttctcaaggattagctggaatccaacccgtcgatgtttctgggatccaaaatgttgacgtgacagatcacatagagggccattcttcatatttgtgggctacagaacaggtcctagatgaacttgaattagatacgtattatcccgtttataacaatatcccaaagaaacatacagtgtcgctgtcaagtgaat

SEQ ID NO: 167255 - DNA, 285 bp, Glycine max
ggaatttcgatgctcagtcatctcttttaccattctcttctctcttgctcttgcaggagagagccatgtccatgcatcgctacctgaggaagattattgggaagctgtttggccaaacactcccattcccactgcactgcgagagcttctaaagccactccctgcaggtgttgaaatcgatgaactccctaagcaaattgatgatacacagtacccaaaaacattcttctataaagaagaccttcatccaggcaaaacaatgaaagtacaattcaccaagcgtcc

SEQ ID NO: 167256 - DNA, 278 bp, Glycine max
gttgtaactcgttcttcttcttttgttgttctgtgtttgtgtttgttttttctctcacctgaaaatgtcttgctgcggtggtaactgtggttgcggaagctcctgcaagtgcggcaacggctgcggaggctgcaagatgtacccagacttgagctacactgagtcaaccaccaccgagaccttggtcatgggagtggcacctgttaaggctcaatttgagggtgctgaaatgggtgtgcccgctgagaacgatggctgcaaatgtggaccaaactgct

SEQ ID NO: 167257 - DNA, 265 bp, Glycine max; identical to SEQ ID NO: 165896

SEQ ID NO: 167258 - DNA, 285 bp, Glycine max
cggctcgaggcttggaatgggaacaatgaagctaggccggttagcaaaggaattagcagctgatgtaaatgttaggcgtagaaccaaagggctacttccccgtgcggttcaagctggaatagttggataccctaatgttggaaagtcatctttggtcaaccgtttgttaaagcgaagaatgtgcccagcagctcccaggccaggagtcacaagagaattgaggtgggttcgttttgggaaagatcttgaactgctggactctcctgggatactcccaatgcgaat

SEQ ID NO: 167259 - DNA, 282 bp, Glycine max
aattgttgtaactttttgattcctaaattctctaaaattcgaaattctaatttcgttaggggaaagagattgtttgtgtgtgagtgagtatggctggaaaaggcgagggtcctgctatcggaatcgatttgggaacgacgtactcttgcgtcggcgtgtggcaacacgatcgtgttgaaatcatagccaacgatcagggtaacagaactaccccatcctacgtggctttcaccgacacagaacggttgatcggcgatgcggcgaagaaccaggtcgctatga

SEQ ID NO: 167260 - DNA, 280 bp, Glycine max
caagaaccatatttttcttgaaaaatgatggaactttgacgccattggccattgagttaagtaagccgcatcctcagggtgaagaatatggtcctgttagcgaagtctacgtgccttcgagtgaaggagttgaagcttacatttggttactggcaaaggcttatgttgttgtgaatgatgcatgctaccatcaaatcattagcattggctaaacactcatgcgcgtgttgagccatcgcgacatagcgacaaacaggcatctgagcgtggttcaccctat

SEQ ID NO: 167261 - DNA, 294 bp, Glycine max
catccctttattcgagatcagtcagcaacaaaagctacaaatgtcagaataaccagggatgctttcccctacatgtttgatggaagtcggacgcctccgccagttttagatcattccaatagaacaagtttaacttcattcgatggagattatgcaacaaagccaattcccgtaacttcacgtacagtaaggagcccaagagataacacaagaatgatcacatctttaccagtatctccctgttcaagtcctttgcgacagtatgggccagcacacaagagctgtttcctttct

SEQ ID NO: 167262 - DNA, 282 bp, Glycine max
tagaatggaatttcgatgctcagtcatctcttttaccattctcttctctcttgctcttgcaggagagagccatgtccatgcatcgctacctgaggaagattattgggaagctgtttggccaaacactcccattcccactgcactgcgagagcttctaaagcctctccctgcaggtgttgaaatcgatgaactccctaagcaaattgatgatacacggtacccaaaaacattcttctataaagaagaccttcatccaggcaaaacaatgacagtacaattcac

SEQ ID NO: 167263 - DNA, 280 bp, Glycine max
ctgccagtagtcatatgcttgtctcaaagattaagccatgcatgtgtaagtatgaactaattcagactgtgaaactgcgaatggctcattaaatcagttatagtttgtttgatggtatctgctactcggataaccgtagtaattctagagctaatacgtgcaacaaaccccgacttctggaagggatgcatttattagataaaaggtcaacacaggctctgcctgttgctttgatgattcatgataactcgtcggatcgcacggcctttgtgccggcgac

SEQ ID NO: 167264 - DNA, 279 bp, Glycine max
cgaacctagtaaaacaaagaaatggcttctcatcatctccaatatcttgtgcttgccatagccacacttctcacaatctcttcacatgcacaactcactcctgatttttacaacaatgtttgccctcaggcactgcctatcattaagtcagttgttcaacgagcaatatttcgtgaacggcgcattggagcatctttacttcgtttgcacttccatgactgttttgtcaatggctgtgatggatcaattctgctggatgacacccccaacttcactggg

SEQ ID NO: 167265 - DNA, 279 bp, Glycine max
gtaacaggcgaactgatttcgttatcagaacaagaattggtggattgtgatactggatataaccaaggatgcaatggaggacttatggactatgcatttgagttcataatcaacaatggcggcattgattctgatgaggattacccataccgtggtgttgatggtagatgcgacacatataggaaaaatgctaaagtcgtttctattgatgactacgaagatgttcctgcctatgatgagttagccttgaaaaaggccgttgcaaatcagcccgtgagc

SEQ ID NO: 167266 - DNA, 281 bp, Glycine max
ccgatcctctgtcctctcgaagctttcatcgttcaacatattctcaccatctcagtcatgggcctgctatcttgttttaggtctaccgtcctgagaaaatgttccaaaggaagctctggcatgtcaagattcctgtatacgaacaattttcaacgaaacttgatttcgtctggtggcaatgaatcgtattatgggtattttaacaggagatcatacacttcactttatatgggaactggaactgtgggtgggattacaagtgctagaatcagggtgccaaa

SEQ ID NO: 167267 - DNA, 278 bp, Glycine max
ataaaccacgtcgtctaaagtccagtccatatcgcgttatcaaagttgtttttttttctttttctgagagcgacagaaagtggagaagaaaaagatggagaaaatagagcacaaaacggtgaggacgaatggaataaacatgcacgtggcatccattgggtcaggcccagttgtactgttcctccacggcttcccggagctttggtacacgtggcgccaccagcttctgtccctctccgccgtgggctaccgggccatcgcccccgacctccgcggct

SEQ ID NO: 167268 - DNA, 275 bp, Glycine max
agcagatcaatctctctctctctctcaaccataatagtcatgggtttgaaggaggattttgagcagtatgctgagacagcaaaaactttgccaccgactcaatcaaacgaagacttgcttatcctttatggattgtacaaacaggccaccgttggacctgtcaacaccagccgtcctggaatgttcaacatgagggacagagctaaatgggatgcatggaaagctgttgaagggaaatccaaggacgaagcaatgggtgattacatcattaaggt

SEQ ID NO: 167269 - DNA, 279 bp, Glycine max
ccgcactccgtcttcatcaatcagcatcaccaccgctccaacacaggggaacaacagggagatccttcacgttcagggagggcaatgcgggaaccagatcggttcgaagttctgggaagtggtgtgcgacgagcacggcatagatccgacggggaagtacgtcggaaactcagatctacaactcgagcgcgtgaacgtgtactacaacgaagcttcctgcgggcggtttgtcccacgcgcagtgctgatggacctggagcccgaaactatggacagcgt

SEQ ID NO: 167270 - DNA, 279 bp, Glycine max
aagagttgaaggatagaatggagcagtcacatggaacatgggaggatgtatataaaagtgctaagagggctgatagatcaaagaatgatttacacgaaagagatgaaggagagcttgagcggacaggacaaccgctatgcatatatgaaccttattttggggaaggatcctggccttttctacataaaaaatctctttatcgaggaattggcctgtccggtaaaggtcgaagcccagggagagatgatgttgatgctccttctcgtcttccactgctga

SEQ ID NO: 167271 - DNA, 280 bp, Glycine max
gccagagaagccaacatgcttggaattgagtggtggtactagtactaattgtactaccccactttggggttgttcatcggtttgtggaaggagagaggagatggaagatgctattgctgttaagcctcatctttttcaagtcacttcaaggatggtaagggatgatcatgtgagtgcaaacacaaaatactcaccaacccatttttttggtgtctatgatgggcatgggggcattcaagttgccaattactgccgggaacatcttcattcggtgttggtt

SEQ ID NO: 167272 - DNA, 279 bp, Glycine max
ataaatttgatgcacacagaatggtgaggactggtcttcaaaaagaaggatcaaaagtaatttttggtgttcctaaaccggggaagaaaaggaaatttatggaagtaagcaagcattacgtggcacatgaaaacagtaagatcagtgatagaaatgattcagttaaacttgcaaatttcttgatgcctccaagttccggacctagaggatggaaaaatagttccaaaaatgatgccaaagagaaacatggagctgactccaagccaaagacaagtcata

SEQ ID NO: 167273 - DNA, 276 bp, Glycine max
gtgatttagcatttaccacaccaaaatcaatccgcggagtcagaaagccatggatccctacaagaatcggccatcaagcgccttcaattctcccttctggactacaaattccggtgctcccatctggaacaataactcatcgctgactgttggatctagaggtccaattctgctggaggattaccatctggtggagaagcttgcaaactttgacagggaacggatccccgaacgtgttgtccacgctcgtggagctagcgcaaagggtttctttga

SEQ ID NO: 167274 - DNA, 277 bp, Glycine max
ctcgagccgctcgagccgctcactcgcaagcaaaaagaaagaatcccaggcgaggagaaagatggaggggacaggagcaggatgtgtcgttgggagcgaacaagttccccgagagacagccaattgggacggcggcgcagagccaagacgacggcaaggactaccaggagccggcgccggcgccgctggttgacccgacggagtttacgtcatggtcgttttacagagcagggatagcagagtttgtggccacttttctgtttctctacatcactgt

SEQ ID NO: 167275 - DNA, 273 bp, Glycine max
ctcgagccgtgcgtcctgtggtaaagttactgggatacttggatgctggaagaagcagctacatatagctaaggatgcccggcgtgtagatgtactctgttacaggatatatttgagctacaggctcctggatggaacctcaaaattcaaagatttgcatcaaacagtacaagaggcaaaggctaaactggagacagaagttggtcctgtcaatggtgtttcttccaagatggctcgaggcattgtcagcagactccatattgccagtgatat

SEQ ID NO: 167276 - DNA, 284 bp, Glycine max
atcacacagctcactgataatgtttacgtgtgtcgctctggatcggctgctgattctcagattgtctctgactatgtgcgctacttccttcaccaacacacgatacaacttggacaacctgcgacagttaaagttgctgcaaaccttgtccggcttctcgcatataacaataagaatttcttacagaccgggttaattgttggtggttgggataaatatgaaggtggacaaatttatggagttcctctgggtggaacaatagtacagcaaccttttgctatcgg

SEQ ID NO: 167277 - DNA, 287 bp, Glycine max
ctccagcaccgcctccaggccttaatcgagggcgcccgagagacctggacctacgccatcttctggcagtcctcttacgactattccggctccactctcctcggttggcgcgacggttactacaaaggcgacgacgacaaagccaaggcaaaggccaagtccaaagccacctccgccgccgagcaggaacaccgcaaaaaggttctccgggaacttaactccctcatctccggctcctcctccgcttccgcctccgacgacgtcgacgaggaagtcaccgacaccga

SEQ ID NO: 167278 - DNA, 280 bp, Glycine max
tccgagcagttttagggaaatacgcaccagggtcaacgtccccttcatgttcttctggccatgaccaagagaatagaagctctttggatttttacactggaatttttggacttgataagtcaaggataatggatacagtaaaccaagctatggaggagctcatcaagatggctaccgtgggggaaccattatggcttcgtagcttcgagactggtcgcgaaattcttaactatgatgaatatgttagggagtttgcagttgaaaattcaagcagtggaaa

SEQ ID NO: 167279 - DNA, 280 bp, Glycine max
ctcgagccgttttgaatgtctcaggcaacttcatcgaatccctccccaaaaccattgagaactgcagagccttagaagaactgaatgcaaacttcaacaagctgagcaagcttccagacacaatagggtttgagctcgtaaacctaaagaagctctcagtgaactccaacaagcttgtgtttcttccaagctccacttcacacttaacagctttgaaggttcttgatgcacgcttgaattgcctaagggcacttccagaggaccttgagaaccttatcaa

SEQ ID NO: 167280 - DNA, 277 bp, Glycine max
gaagaaatgagtatgaaagacacaagctgcaggctttaaatcagcggcagaaattggttcttcagagaaaaactgaagaagctgcaatggccaccaagaggttaaaggagttgttagaagcacgtaaaacttccagccgagaaactttagttacaatgaatggaagtggaacaaatggtcagagcaatgagaaatctttacaacggtggcttgatcatgaactagaagtcatggtaaaagagcatgaagttcgttttgagtatgagaaacaaagcca

SEQ ID NO: 167281 - DNA, 284 bp, Glycine max
gtgcatagcagagtcagagacagagacgcagccatggggcggagacctgcgaggtgttataggcaaattaagaacaagccataccccaagtcacgtttctgccgtggtgttcctgatcccaagatcaggatttatgatgttggtatgaagaagaagggtgttgatgagtttcctttctgtgtccatctggttagttgggagaaggaaaatgtttcaagtgaggccctggaagctgctcgcattgcttgcaacaagtacatggccaaatttgctggaaaggatgc

SEQ ID NO: 167282 - DNA, 280 bp, Glycine max
agaagatggagatgtatcagatctggagcaggagaatagcgttgggagcgttcgcgtttgttctgcttgtcctatcggcctcagcagacgacgtcgttgtgctctctgaagataacttcgagaaggaagttggtcaggacagaggagctctcgttgagttctatgctccttggtgtggacactgcaaaaagcttgctccagaatatgaaaagcttggtagcagcttcaagaaagccaaatctgttttaatcggcaaggttgactgtgatgagcacaagag

SEQ ID NO: 167283 - DNA, 288 bp, Glycine max
gaggagccgttgacctgggcattgcagttcaaaaagcctgcgagaatgtgacacagccattgaagttcctgtatcctgttgacctgagtataaaagagaaaatagaggcaatagcaaagtcatatggagccagtggtgttgagtactcagaacaggctgagaagcagattgagatgtatagcaagcaaggattttcaggtcttccaatatgcatggctaagactcagtattctttctcagacaatgctgcagcaaagggagctccaagtgggtttgtcttacccataa

SEQ ID NO: 167284 - DNA, 285 bp, Glycine max
caatccactgcagaagccacaatgagaaaagctcgtgtctcagttcgtgcccgatcagaagctcccatgattagtgatgggtgccaatggagaaaatatggacaaaaaatggctaaggggaatccatgccctcgagcatactacagatgcactatggcagttggttgcccagttcgcaaacaagttcaacgttgtgctgatgatagaacaattttggtgacaacatatgaaggcacacataaccatccactaccacctgctgccatggccatagcagcaggtggt

SEQ ID NO: 167285 - DNA, 278 bp, Glycine max
aaggcaacatgacaggagtatgcctgtaaatctattgcaaagaggaagctcgtcaccgatgatgatgtcgaggatctgagaagagaaattcagatgatgcaccacttggctgggcatcctaatgttatatccatcaagggtgcatatgaggatgccatggctgtccacgttgtgatggaactatgtgcaggtggagagcttttcgataggattattcagtatgggcattataccgagagacaggcagcggagcttactaggactataattggggttgt

SEQ ID NO: 167286 - DNA, 285 bp, Glycine max
cttgagtggcattatgtgttggagggaagtgaaggaacaccttctgcaggtggatattactatggaaaaatcaagtttcctcctgaatatccatataaacctcctggaatcagcatgactacacctaatggacggttcatgacacagaaaaagatctgtttgtctatgagtgactttcatccagaaagttggaatcccatgtggtctgtatcaagcatattaacagggcttctttcattcatgatggacaacagtccaaccactggcagtgtaaacaccaccact

SEQ ID NO: 167287 - DNA, 292 bp, Glycine max
atccaatccaattcccaattttcgaatctaccctttctctctctacgatggagccttcctcgatctctccaccgccagccccgcctgccaccgccgtccccttccccgccgaacccaacgaccaccttccaccacccattcccgacccaccttctaaccacccaccctacgccgagatgatatacacggcaatcgaggcgctgaaggagaaagacggttctagcaagagggcaatagcgaagtatattgagcaagtgtatacgcagcttccaccgaatcactcagacttgtt

SEQ ID NO: 167288 - DNA, 290 bp, Glycine max
cctatctcactcactcactcacaccgttccatttctcaacaacttctgctacttcctactccaatcgcacttctgttccgcaattatcatgggcaaggtcaagatcggaatcaacggatttggaagaattggccgtttggtagccagagtggctctgcagagagacgatgttgaactcgttgccgttaacgaccctttcatcaccaccgattacatgacatacatgtttaaatacgacagtgttcatggacactggaagcatcacgatgtcaccgttaaggacgagaaga

SEQ ID NO: 167289 - DNA, 287 bp, Glycine max
cacgcccattcaaccataccgtaccagcagaggaaagagagaaaatttcagaacaaaaaagaagcagaggaaaagagagatagagagagaagaaaagctgtgaagagaagagtctgaaatctgaatcataaataattggtttttgagatgaagaactgcgagttgtgcaagcttccggctcggactttctgcgagtcggaccaggctagcttatgctgggactgcgacgccaaggttcatggagccaacttcctcgtggaaagacacacgcgcacgctcctctgcca

SEQ ID NO: 167290 - DNA, 285 bp, Glycine max
cttctttctttgttccgttctactttcccttcccaacaacaacaagaacatgccttctgcagaagcttcctccgaaaccatttgtgtcaccggcgctggtggcttcatcgcctcttggatggtcaaactcctcttggaaaaaggctacactgtccgaggaaccctcagaaatccagatgatcccaagaacgggcacttgaaggagtttgaaggagcctccgagaggttaactctgcataaggttgacctccttcatcttgactccgttagatcagttattaacgg

SEQ ID NO: 167291 - DNA, 287 bp, Glycine max
gtcgcattgaactgcctaggacgcatccctcggtcccagcacccaaccctctccctggtctccaaacccatccgcaccctcctctcttccccaatcctcttcaccacgcgaaccctcctccaatgcacccaacccctcctctacctcactctccgctcacgccactcctctctcctccaattcttcacgctccaccgcacaaaccctaataaccccctcctcgctccccttcccccgatcccctcccccgccgtcggctccgcctacgccgtcctcggccccaccat

SEQ ID NO: 167292 - DNA, 285 bp, Glycine max
agacaaacccaacgaccccttttgccatttcctgcaaaacccgtttctcttcttcttcttcttcttcttcttcttcaccctccatcacagacgccgaaacaaagccgttttctgttctcttcgtgtgcctcggcaacatctgcagaagccccgctgctgaaggagtcttcactgacttagtcaacaaaagggacctcaattcgaagttcaaaatcgactctgctggcaccatcaattaccacgagggaaatgaagcggattcgagaatgagggcagcttcaaaaa

SEQ ID NO: 167293 - DNA, 281 bp, Glycine max
actcgagccgaatcggctcgagggctaattctgaaaccaagggtactcttaatgatggggaagatattgtctttggaaatgcagtttttgaaatgtggaagatggggaaagataggcttgcattgccactgttaattgatctttgtgagaaggctggggtggatcttccgccttgttttatgcggctaccgatggagcttaagctcttgattttggagcgtcttccgggtgttgatttggccaaagtggcttgtacttgttcggagctgcgatacttgtcc

SEQ ID NO: 167294 - DNA, 283 bp, Glycine max
gttcctttgtcaataagcaagagcaatacactgtggaaggagtgcagaatcttggagacaaagcagtgatgtgtcatgggctaaatttcagaactgcagtattttactgccataaagtccgtgaaacaacagctttcatggttccattggtggctggtgatggaaccaaaactcaggcacttgctgtttgccactcagatacttctggaatgaatcatcacatgcttcatgaactcatgggagttgatcctggaactaaccctgtttgccatttccttggaag

SEQ ID NO: 167295 - DNA, 284 bp, Glycine max
gtgagaaagagaaagagagaattcgtaaaccctaatttcggaaagatcggcgatgactgcctccaaggatcgcgagaacttcgtctacatcgccaaactcgccgagcaggccgagcgttacgaagagatggtggaatcaatgaagaacgttgcgaatctcgacgttgaactgacggtggaggagcggaatttgctttctgttgggtacaagaatgtgattggtgctcgcagacgtcctggaggatcctgtcttccattgagcagaaggaagaaacaaaagggaa

SEQ ID NO: 167296 - DNA, 292 bp, Glycine max
tcggagattctttgcttcatttacatgtgataagtccaagtggtctggatgtactggaagatgttcatgtaattcagatgttaactgtgatccatcaaagttaggtactgatcatggcgcccaaccatgccaatatcaaactgttatagcagaatattctgctaatagctctggatcccagccttcctcggtggaaagtgctaaaccaactgaagtgagaagaatatttaccatggggctcccatttacatctcaacatggaggtcaaatactctttggacccgatgatggg

SEQ ID NO: 167297 - DNA, 284 bp, Glycine max
cgctgccgcaccattgcgctgcagcccgacaaagacgaggaggttcgcatcctctgcatagtcaacgctcgctccaagtttgaccctcctctgcctagcggttactacggcaacgcttttgccttccccgttgctgtcaccactgcggggaagctgtgcgataaccctttgggatacgctctcgagttggtgaggaaagccaaagcggatgtgactgaggaatacatgcactcggtggctgatttaatggtcaccaagggccggcctcacttcactgttgtgag

SEQ ID NO: 167298 - DNA, 282 bp, Glycine max; identical to SEQ ID NO: 165212

SEQ ID NO: 167299 - DNA, 284 bp, Glycine max
caaagacgctctcgccgccggttacgcctccgaagacgacgccgctcctcagaactccggccgcctccgagagcgcgaggagaagcgaggagttccgtggacggaggaagagcacaagctgtttttggttggattgcagaagttagggaaaggtgattggagaggaatctccaaaaactacgtcaaaacgcgaacgccaacgcaggttgcgagccatgctcagaagtactttctccgacgaagcaacctcaatcgccgtcgccgtagatccagcctctttgaca

SEQ ID NO: 167300 - DNA, 284 bp, Glycine max
cagagtttcagaaactcccaaagaccagaaaacgcttcaacagagaaaccactccaagtgtgagggcacccaccccaaacaacgtagccaaaaagccccaaagtgaggacccaccaagagaagttaatagtagcagcagcaccaacaacaccaaactgaagcttgaacacgaacaaccaacttacaaacacatgcaccacgagcaccaccagagacacccacgctatgggcgcggtcttcagctggcactgcaagaacctctgcagagggaactgaaacgcaaa

SEQ ID NO: 167301 - DNA, 285 bp, Glycine max
cacacactctcatagctgtagcggcgacactaagatcggagaaagaatggcgaaaacgacgtcgttgctgctctttacactgctcctcttcggaaccctagctctcatccaggcgaagaaatcgaaggaggatttgaaggaggtgacccacaaggtttactttgatgttgagattaatggaaaagaagcaggtcgtattgtaatgggtctttatgggaaggctgttccaaaaactgcagaaaacttccgagcactttgcacaggggaaaagggaactggtaaaag

SEQ ID NO: 167302 - DNA, 282 bp, Glycine max
tgactctgctagaaaggcgcggtcgtcttcctcaacacacctaccttgactacaccctcaccaactgcatggctgctgttatcattgctttcacctttggtcagattggcaacgctcaacccaacttcttgtctcagctttctcaggataactggccttctgttctgtttgccatggggggtggagtggtccttagtgttggaaatttgtcaacacaatatgcttgggcttttgttggtttatcagttgtagaagtgatcacatcaagcataactgttgtta

SEQ ID NO: 167303 - DNA, 284 bp, Glycine max
ggcactcccagcatccgcccaggccacaactaagcatccacgccatagacctggctgctcttgcattgtttgcattcagcctcccagtggaaagggccccaagcataagcagacatgcacatgtaatgtatgcttaacagtgaagcgacgattccgtacccttatgttacggcgtgagaagaaacaatcagaaaaagaagcagagacaactcgtaaaaagcaacagcaacaacatcctctaccattaccttcatctgaaattttgcttgatgaagattccttgc

SEQ ID NO: 167304 - DNA, 284 bp, Glycine max
tatatatctaaaaaccaagcgtgaaacccactcagttgaagaatcaatctctccctttcacctttctccatagcctaccacttttcttctttctctgctttcatctatctactctcacttctcttcacacactgagacacagagagagagagagaacaaaaaaagaaagggagtgatgggtgtgagactcagtgttttctttttataatgaacaaagtactacacatcctcttcttcactgaagaagatggcaattcagcaccacaatgaacaactagagcata

SEQ ID NO: 167305 - DNA, 282 bp, Glycine max
cgtagaaaaggaaaataaagaaattagcgtgaaaaatgttgggtgtgttcagcagctccatagtgtcgccgccggaggagctcgttgccgccggcagccgtacaccgtcgccgaagatgacggcggcggcgctgcggaagtggttcgaggagaagaacccctccgcagtgtcggtggaggtcggagagcatgtccagctcgcttatacccaccagaacgagtcgccgtttcagcccagatcctttgctgtgaaggatgacgtattcagcttgtttgagggag

SEQ ID NO: 167306 - DNA, 284 bp, Glycine max
gttggtaaagaaagagaagaaaagagtggaatcgaagacgaagacgaagatggaggacgcatcagcatcaaagttcatcccacaccaaatcggaggggtccaaaacgacgtgcttcgatttggtctccatggagtcaagagcgacatcgttggttcccaccctcttcaatcttcactccaatctacaaggagaatggatgaagcgatgaagaagcaatgcaaagttaacctgtacggaactgcttttcccctgaaggaggagcttgacaggcaaatcctgtcta

SEQ ID NO: 167307 - DNA, 290 bp, Glycine max
gacgatggcgcctccgccacatcaaagcctccgtccgccctcgtccgcaacccccaccctctcgagaattcctggaccttctggttcgacaacccttccgccaagtccaaacaagctgcatggggcagctccatccgacccatctacactttcgccaccgtcgaagagttttggagcatttacaataacattcaccacccgagcaagttgggtgtgggggcggactttcattgcttcaagcacaagattgagcccaagtgggaggatcctatctgcgctaatgggggaaa

SEQ ID NO: 167308 - DNA, 281 bp, Glycine max
ataaatttgatgcacacagaatggtgaggactggtcttcaaaaagaaggatcaaaagtaatttttggtgttcctaaaccggggaagaaaaggaaatttatggaagtaagcaagcattacgtggcacatgaaaacagtaagatcagtgatagaaatgattcagttaaacttgcaaatttcttgatgcctccaagttccggacctagaggatggaaaaatagttccaaaaatgatgccaaagagaaacatggagctgactccaagccaaagacaagtcatact

SEQ ID NO: 167309 - DNA, 281 bp, Glycine max
atagagtgaaagaatgggtgagaaaagcaagattttgatcataggaggcaccggctacatcggcaaacatatactggaagcaagcgcaaaggctggaaatcccacttttgctttggtgagggaatccacactctctgacccctccaaggcacaactcatccacaattttgaggctttgggcgttaatttggtccgcggggatctgtacgatcatgagaagttggtgaaagctatcaagcaagtagatgtcgtcatatccacgctgggtcacctgcagcttg

SEQ ID NO: 167310 - DNA, 281 bp, Glycine max
ccggcaaagagcttgagaaggagcccaagtttttgaagaacggtgatgctggttttgttaagatgattccaaccaaacccatggttgttgaaactttctccgagtatcctccacttggtaggtttgctgttagggacatgcgtcaaactgttgctgtgggagtcatcaagaacgttgagaagaaggatcctaccggagccaaggtcaccaaggctgcccagaagaagaagtgaatcgtgcgggctggttcatcaggggatgttggttacaataaatgttgg

SEQ ID NO: 167311 - DNA, 282 bp, Glycine max
gccaaaaggtgtgtagtttaagtgtgaatccctttccctctctactcttctttcactttccatttccatttccattttttctggttcactttctcgatggcctccgagaaccccaccgccgacgacgccgtcaacggcttcaatcggccggaaatgttctcggaaaacctcgccggcaccgtcgacgcctacgaccgccacgtgttcctctgctacaagagtcacctgtcctggcccccgcgcatcgaggcctccgacgccgatcccttccccaagcgcgtc

SEQ ID NO: 167312 - DNA, 278 bp, Glycine max
aatcacatagctagttgtttaaagtgagagaaaaagaaagaagaaaatggcaaactttccagttgttgacatggggaaacttaacaccgaagagagagcagcagccatggagattataaaagatgcctgtgagaactggggtttctttgagttggtgaaccatgggatatccattgagttgatggacactgtggagaggctcacaaaagagcactacaagaagactatggagcaaaggttcaaagaaatggtggccagcaaagggcttgagtcagttc

SEQ ID NO: 167313 - DNA, 284 bp, Glycine max
tgcaactacaacaacattcattcattcacagctgtcacgccgtgaacggaaaatggcaacggcgagacgcagtttcccgcctatcaccgaatgcaacggaacgacgccgtgcgagtctgtggccgccgacctcgacggtacgctcctcatctcccgtagatcgttcccgtacttcatgctcgtcgccgtcgaagccggcagcctcctccgcggcctcatcctcctcctctcccttccgttcgtcatcatcgcctacctcttcatctccgaatctctcggcatcc

SEQ ID NO: 167314 - DNA, 283 bp, Glycine max
aaaaccatctcttcctctctcagctgtctttttaatcccccttttctcattttcccttttgcaattttcactaacagtccttctttctatcttagctctcagaaacttcaataacaatgaagaaagtcgtgttgaaggtggaagtacatgacgacaaaatcaagcaaaaagctatgaaggttgtctctggcatttcaggggttgagtcagtttctgtggacatgaaagacaagaaattgaccgtaattggggacattgatccagtaaaagtagcagccaagct

SEQ ID NO: 167315 - DNA, 280 bp, Glycine max
ccaatctccaaccttcttctccattgttccgtttctctctccaacgggaagaactttttttttagtgtgtgtttttggtggtgagtttgtaagaagcaatggcacgcaagaagatcagagagtatgactccaagagattgttgaaggagcactttaagagactctctggccaggacttgcccatcaagtccgcacaagttacagaatccaccgatttcaatgagctaacagagaaggaaccctggcttttatcttcaaaattggttgtgaaacctgacat

SEQ ID NO: 167316 - DNA, 281 bp, Glycine max
cttttagcaagttaacaacacttttgtcttcgttccattatctagttctcaattctcttcaccctttgcctctgaaagaaatgggtagtcttgaagcggaaagaacaacagtaggattggcagcaagagacccttcagggattctctccccatacacctacaatctaagaaacacaggccctgatgatgtttacattaaagttcactactgtggaatttgccattctgatctccaccagattaaaaatgatcttggcatgtccaactatcccatggtccca

SEQ ID NO: 167317 - DNA, 278 bp, Glycine max
caatgttgttattctttctccccatggttaccctgcccaagataatgtcttgggataccctgacactggtggccaggttgtttacatcttggatcaagttcgtgctttggagaatgagatgctccatcgcattaagcaacaaggattggacattgttcctcgtattctcattatcacccgtcttctccccgatgcagtaggaactacttgtggccaacgtcttgagaaggtgttcggaactgagcactcccacattcttcgagttccctttagaactg

SEQ ID NO: 167318 - DNA, 280 bp, Glycine max
tagaatggaatttcgatgctcagtcatctcttttaccattctcttctctcttgctcttgcaggagagagccatgtccatgcatcgctacctgaggaagattattgggaagctgtttggccaaacactcccattcccactgcactgcgagagcttctaaagcctctccctgcaggtgttgaaatcgatgaactccctaagcaaattgatgatacacagtacccaaaaacattcttctataaagaagaccttcatccaggcaaaacaatgaaagtacaattc

SEQ ID NO: 167319 - DNA, 283 bp, Glycine max
gactgaaacccctaggaaaaaccccagtttctctctttcactagttccgttcaagttctaaccaagcactcacagtacttttgcttctctcgaagatgtctctacgagtgctgaaccctaacgccgaagtgctgaacaaatcggcggcacttcacatgaacatcaatgccgccaagggtttgcaagatgtcctcaaaaccaacctcggtcccaaaggaaccatcaaaatgctcgttggtggtgctggtgatatcaagcttaccaaagatggcaacactctctt

SEQ ID NO: 167320 - DNA, 265 bp, Glycine max
cgacttccaccatctcctcaggagtacccaattctgggtctcaacctgttgagattacttgtgcagaataggattgctgaattccatactgagttggaattgctttcatctgctgctcttgagaatacttgcattaagcatgctgtggagttggaacaatcttttatggaaggggcttacaatcgtgtcttgagtgcacgacagacagtgccacatgatacatacgtttattttatggatcttttggcaaagactgtcagagatg

SEQ ID NO: 167321 - DNA, 259 bp, Glycine max
cctcggcgaatggctcactctcccacctactcttctccactctcttcttctgctgctcgatcgatcgatctcgtcactctcttagctaccatggcgactgagaatcctttcaatagcattttgacgacgctcgaaaagcccggtggtgctggcgactttggaaagtactttagcttgcctgctctcaacgatcctagaatcgatagacttccttactctgtgaggatacttttggaatctgcaatccggaactgtgatg

SEQ ID NO: 167322 - DNA, 259 bp, Glycine max
gttttgtagagggagagaattccaaaccaaaaatccgaaataaataattttctttttttaaaaaaaaagaaccgggtgtgggtgttgttggtgttggcggaggcagatcggagatctgtgatagattcagatggagggagttggggcccggcttgggcggtcctcgacccgctacggaccggccacggtgttcactggaccggtccggaagtggaagaagaaatggatccacgtgtccccttcttctgcttcctctaat

SEQ ID NO: 167323 - DNA, 266 bp, Glycine max
aacacgctgttcctacaatcattccaaatgtgcccttccggtcgcaccctcctcccttcctccgtctccgatttccgaccggcattcgacgtcctcgatgccgaccgcgacggcaaaatcagccgcgacgacctccgcgccttctacgccggagtcggcggcggaggagatgacgtgatcggggcaatgatgacagtggctgacaccaataaggacgggttcgtggagtacgaggagttcgagcgcgtggtctcggcggagagaaa

SEQ ID NO: 167324 - DNA, 267 bp, Glycine max
cttttaagttgtcatgttgatgatttgacactactcggggaatggtcctctacttgaatgtgaccctgtagtgaaagcatactttgctggtccttttgttaatttttagatttggcttggtggtggttgttgtatgtttaatttaattttcaacatattgtgcaacagggatcttcctcagtcagaaagggccaagtataagatttatgacaacctggttcgcttcagctttggagttgaagattttgaggatttgaaggctgatgt

SEQ ID NO: 167325 - DNA, 270 bp, Glycine max
gtcgtattgatgttaatgttaaaaacctctactgggctgatagcggtgatctagtgacgattgctagtgatacatcattctatatcctgaagtacaatcatgatgttgttgcatcatatttagatagtggagggcctgtagatgagcaaggtgttgaagatgcctttgagctccttcatgaaatgaatgaacgtgtcaggacagggatctgggttgggggattttttatctacagcaattcttcttggaggcttaactattatggtggtg

SEQ ID NO: 167326 - DNA, 257 bp, Glycine max
attaaggagatggtatactatggcccagtctagtcgcaaaactttggtgcagtggttggtaggagcattgctcattgccttgttgggtggtgcacaagctgttgcaatatgtaacatagactcaagtcaattaaacttgtgtcgtgctgcagttactggtcaaaaccctccaccaccggatgagaaatgttgtgcagtcattcgccaagccaatttgcgttgcctctgcagttaaaagtctatcctaccttcattcg

SEQ ID NO: 167327 - DNA, 264 bp, Glycine max
gaaaaaaacatcagaacaagaagaagatgatattaattcaataggagaagaagagaaagaacaattaaatgacgtagattacttgacagggaatccacttcctaatgacattctcttatatgctgttcctgtttgtggtccttatagtgcagttcagtcttacaaatatcgggtgaagataattcctggaccggcgaagaaagggaaagctgcaaaaactgctatgaacctattcagccacatgtcagaagcaacaacccggga

SEQ ID NO: 167328 - DNA, 260 bp, Glycine max
cagcgttacttgcgtcctgagaaggactatttgtctttctcacttatttacagtaacggaaagcgatcgcttgatttgatttgcagagataaagttgaggcagaagtgtggattgctggcctcaaagctctgatagcttctggtcaaggtggtcgctccaaaattgatggatggagtgatgggggtctcattcttaatgatagcagagacttaacatcaaataatccaagtgtaagtttggctagcacgtcacgaggcat

SEQ ID NO: 167329 - DNA, 266 bp, Glycine max
tcgacctcgagcgaatcggctcagaagatgatgaagacattgatacagatgcggctgaggaccttcagaatcagatggaacaagattatgacatagggtcaacaataagagacaagattattccccatgctgtatcatggtttactggggaggccattcagggggatgagtttggagatctggaggatgacgaggatgatgaagatattgaagaggatgatgatgaagaggaggaggaagatgaagatgacgatgatgacgaagat

SEQ ID NO: 167330 - DNA, 267 bp, Glycine max
accaattaaggtctctcatagagtagtatttaacttgcactacgtactggctactatatgtatttaagcagaagcaggtgagtgagtgagtgagcaagagtgaagagcgaagagaatggctcccaagggtttaatctttttggctgtgttatgcttctcagcactgtcactgagtcgttgtcttgcggaggataatggacttgttatgaacttctacaaggaatcatgccctcaggctgaagacatcatcaaagaacaagtcaagct

SEQ ID NO: 167331 - DNA, 267 bp, Glycine max
gtgcttctttaggtgaagtctcgtgaagctcaaaagccatggccttcttgaattgtttcgacatgttggtccttctgcttttgcttgtcaatatgagcttttatggaaatgttgatgctcagaaaaatggcttaggagcctctttcatctttggggattccttggtggatgcaggaaacaacaactatttgtcaactctttctaaggcaaacatccctcccaatggaattgatttcaaagcctctggaggaaatcccactggtcgct

SEQ ID NO: 167332 - DNA, 256 bp, Glycine max
agatctgtcttccgaagcaggaactaaatatggctgacttgttggaatggtcaaagcaagataagaaacgaatgcttcatgtcgtctaccgtgttggtgaccttgatcgcaccatcaaattttacacagaatgtttaggaatgaagcttttgaggcaaagagatatcccagaggagaaatatgctaatgcttttcttggatttggccctgaagaatcccattttgttgttgaattaacatataattatggggttac

SEQ ID NO: 167333 - DNA, 260 bp, Glycine max
cggctcgagattatttcatttttactgaaatgcacaaaatatcaactttaaacattcaaaaccactcgggaaaataacattacattgttcacaaataaaacatggcttcccaggagctggtggcatgcctggaggggtgcctggaaacattgattttagcaaaatcttgagtgaccctgaactgatggcggcatttagtgatccggaggttatggctgctcttcaagatgttatgaagaaccctgctaattttgccaagc

SEQ ID NO: 167334 - DNA, 261 bp, Glycine max
gccaaagaaaaagatggtgtatttgtgaacgggaaattctgcaaggaccccaagcttgtcaaagcagaagatttcttcagacatgtggaacctgggaaaactgacaacccactaggttcaaacgtgactcaggtgtttgttgatcaactaccgggactaaacacgctcggcataggtttggctcgcatagattttgctccaaagggtttgaacgctccccacactcaccctcgcggcactgagatccttatagtccttgag

SEQ ID NO: 167335 - DNA, 263 bp, Glycine max
tgaagatcccttgtatatttttgatgaaaagtttggtgaagctgtacctagcttattgaaggattattgtgtgcctcatctttttcaagaagacttctttgatatcttagatacagaaaaacgaccatcctataggtggctcataattggaccagagagatctggtgcctcttggcatgttgatccagctcttaccagtgcatggaatactcttctttgtggccgtaaaagatgggcattatatcctccaggaaaagtgcctt

SEQ ID NO: 167336 - DNA, 253 bp, Glycine max
cattgatgcacagttacgttatgctgctggtgtcaaagacatgcttgataggcacttcaagggtgaagactttccagaacaaaactacattgtgaaggagggtcaacttgcaagccagtatcgttgaagtgatgcttttgttgaatttgaatactccattttaaagttccacggattagcaaataaagatctatatagagggcactctaattatataatgtacttgctttgttgaatttgaactcgttcaatt

SEQ ID NO: 167337 - DNA, 264 bp, Glycine max
  unsure (1)..(264): unsure at all n locations
ccatttccagaattagtagcactagtgctctcttttgtttcgaaaaaaatggttcaacaggaagtgcgtaaaggtccttggacagaacaggaagacttcnnaattggtgtcctttgttggattgtttggagaccgtagatgggactttatagctaaggtttgaatagaacaggtaagagttgcagattaaggtgggttaattacctacatcctggcctcaagcgtggaaagatgaccccccaggaagaacgccttgtcttggaa

SEQ ID NO: 167338 - DNA, 257 bp, Glycine max
cgcgtcgctgctccgtaacattttcactgcataaatttgagaggaaactctggaaacatgttggtttatcaggacctccttacaggtgatgagcttctctcggactccttccgttacaatgaaattgagaatggaatgctgtgggaagttgaggggaactgggttgttaagggagcagttgatgttgacattggtgcaaacccttctgctgagggtggagaagatgatggagtcgatgacgcagctgttaaggttgt

SEQ ID NO: 167339 - DNA, 268 bp, Glycine max
ctcgagccgcaaggaattgttgattctgaagatctcccactcaacatttcaagagaaatgttgcaacagaagaagatcttgaaggtcatccgtaagaacttggtcaagaagtgccttgagctcttcattgaaattgcagagaacaaggaggattacaacaagttctatcaggctttctctaagaacttaaagcttggtatccatgaggattcccagaacaagggaaagattgctgaattgctcaggtaccactccaccaagagtggtg

SEQ ID NO: 167340 - DNA, 255 bp, Glycine max
ctcgcattccgtggagatctagtgcttctgctgcaagacctcgctgaaaattagggtttcgattcggaggtagacgaagatgttcggaagggctccgaagaaaagcgacacaccaggtactacgaaatcctcggcgtttccaagaacgcttcgccggatgacttaaagaaggcttacaagaaagccgccattaagaaccatcctgacaaaggcggggatcccgagaagtttaaagagcttgctcaagcctatgag

SEQ ID NO: 167341 - DNA, 255 bp, Glycine max
ggggaattggattcatatgagattgaaggtggcgagacaaaagctgaaattcttcagaatctggctgagttccagttttcttgtgtcatgtacaatgctgtgttggagaatgcttgtagtgagcaaggagcaagaatgtctgcaatggacagctctagcaggaatgctggggatatgcttgatcgtctcaccctcacctataacagaactcgtcaagcatcaatcaccactgaattgatagagattatctctgga

SEQ ID NO: 167342 - DNA, 260 bp, Glycine max
aataaaaagacttccttttttgcaattgtcatttgtcaccaaacaattgttgttagctctcacaatgaagcttcagcaacgacaatgaagaaagtagtcttacagtttaacttacatggtgatagaatcaagcaaaaagctatgaaaacagcatctggcctttcaggggttgaatcaggttctgttgatatgaaagacatgaaaatgatcgtgttgggggacattgatccagtgagtgcagtgtccaagctacgaaagtg

SEQ ID NO: 167343 - DNA, 266 bp, Glycine max
tataactcctgtttctttattaatcctctctttcaaatatatggcagaagatgcttcaattattccaacacacacaaaagctcttgtactactctgaacatggtagtccaggtgatgttctcaaatcagatcctaattggcccttaccccaacaactcaaagatgaccaagtgctcatcaaggtcatcgctgcatccattaatcccgttgattacaagaggatgcacggcgagttcaaggacactgaccctcatctgcctattgtg

SEQ ID NO: 167344 - DNA, 256 bp, Glycine max
aagagaatccgaggcgaagagaagagaaaaattaagatggaggggaaggagcaggatgtgtcgctgggagcgaacaagttcccggagagacagccgattgggacggcggcgcagagccaagacgacggcaaggactaccaggagccggcgccggcgccactggttgacccgacggagtttacgtcatggtccttttacagagcagggatagcagagtttgtggccacttttctgtttctatacatcactgtcttaa

SEQ ID NO: 167345 - DNA, 256 bp, Glycine max
ctttccttctctctctcaccaaaacaatttgctcacaaaggaggaaaaatggcacctttcgtttccctctctttgttgcttctctttctcaaccaccccctcctttccctctcaaccaaccctgaagggaacgctctgcatgctttgagaagcaggctttctgatcccaacaatatgttgcagagttgggacccaacactggttaatccctgtacttggtttcatgttacctgtgactccaacaatcatgtgattc

SEQ ID NO: 167346 - DNA, 252 bp, Glycine max
cgcaattctcatttttctctctcccttagtcaaagggattcatcgttcttcttcccaggttatttagaaaagcaaaatggtgaagatttgctgcattggtgctggatatgtggggggtaccacgtcgggcagtcattgcacttaagtgcccatccattgaagtcgctgttgttgatatctctaaatcccgcattgcagcctggaacagcgaccagcttcctatctatgaacctggccttgatggtgttgtga

SEQ ID NO: 167347 - DNA, 274 bp, Glycine max
cagacaccatgtcacttattaaccagctctttaacagaggcgttttcggcactcgatgcaaaacatgcctgaacctggcaatttcacgaattaagctgctgcaaaacaagagagatatccaactgaaacaaatgtgcaaggagattagccaattcttgcaggctggccaagaggcaattgctagaattagggtggagcatatcatacgagaacaaaatacatgggctgcatatgaaatattggagttgttctgtgaaattgttctagcacgtgt

SEQ ID NO: 167348 - DNA, 279 bp, Glycine max
ctcgagcgattcggctcagatcctatcctatcgtagcaaagaaagaaagaaagaaaaccctagcttaccttttcaactttcaagatgcaaatcttcgttaagacactcactggtaagacaatcacccttgacgtggagagttcagataccatagataatgtaaagtccaagattcaagacaaggaagggatcccaccagtccagcaacgtctcatttttgctggcaagcagcttgaggatggacgtacacttgctgattacaacatccagaaggagtct

SEQ ID NO: 167349 - DNA, 278 bp, Glycine max
tgcttcttccgattccggcacgcccccatcaccatggtgaacgttccgaaaacaaagaagacatactgcaagagtaaggactgcaggaagcacaccctgcacaaggttacccaatacaagaagggtaaagatagcattgctgcccaaggaaaacgccgttacgatcgcaaacaatctggttatggcggacaaactaagcccgtcttccacaagaaggctaagaccaccaagaagattgttctgaggttgtcatgccagggttgcaagcatgtctccca

SEQ ID NO: 167350 - DNA, 217 bp, Glycine max
aatattaatatgaacctctctcaattcaattccagatagactttgttggcatttgagttttgttgaattgaaccaaaaaaaaaaatgggaaggcaaccttgctgtgacaaagtggggttgaagaaggggccatggactgcagaggaggataagaaactcatcaatttcatcctcactaatggtcaatgttgctggagagctctccctaaactagcag

SEQ ID NO: 167351 - DNA, 278 bp, Glycine max
ctcgagcgattcggctcgagtcctgccagtagtcatatgcactgtctcaaagattaagccatgcatgtgtaagtatcaactaattcagactgtgaaactgcgaatggctcattaaatcagttatagtttgtttgatggtatctactactcggataaccgtagtaattctagagctaatacgtgcaacaaaccccgacttctggaagggatgcatttattagataaaaggtcaacacaggctctgcctgttgctttgatgattcatgataactcgtcgg

SEQ ID NO: 167352 - DNA, 264 bp, Glycine max
cgagaaacatggcttccttaagctccttagtgctgctccttgcagctctaattctatcccctcaagttcttgcaacctatgagaaccccccagtgtacaagcctcccactgagaaaccaccagtttataagcccccagttgagaagcctcctgtttacaagcctccagttgaaaaccctccagtttataagcctccagtagagaagccaccagtgtacaagcccccagttgagaaacccccagtttacaagcccccagttgaga

SEQ ID NO: 167353 - DNA, 278 bp, Glycine max
cttctctgttacgtcctcctctcacagccacagccacagccacaaccacaaccacaaccacaacccttcgagtttcagaaaccctaaccccacaataacctctcacaaactcactatttttcatcattcgataattcgaacttccaccatcttccccaaactttgctatcatggctgggtcggcacccgaaggatcacaattcgatgctcgtcaatatgatgctaagatgaatgagttacttggaactgatgggcaagatttttttacttcttatgac

SEQ ID NO: 167354 - DNA, 283 bp, Glycine max
caaagtatagagtgaaagaatgggtgagaaaagcaagattttgatcataggaggcaccggctacatcggcaaacatatagtggaagcaagcgcaaaggctggaaatcccacttttgctttggtgagggaatccacactctctgacccctccaaggcacaactcatccacaattttgaggctttgggcgttaatttggtccgcggggatctgtacgatcatgagaagttggtgaaagctatcaagcaagtagatgtcgtcatatccacgctgggtcacctgcag

SEQ ID NO: 167355 - DNA, 274 bp, Glycine max
tgtgaattctgccaaaaatggagtcagaaatcgccgtggtcgtcgaatgcagacttgtcagactccaattcgtcctataacacccaacaaccttctagactctatctgctggtctatatccgagccaacttcaactgcttccatttacacagactctttcagtgttgaagatcctagtgaaaatcatacttcaatattttttgacgcaaaaggggatggcaaggattcggaagcttcgttttcaaactccactcgtcctctgacagaaagcgag

SEQ ID NO: 167356 - DNA, 276 bp, Glycine max
aaataacatagtcctcctcctttgtttttccacatcacatcacatccacagagagagagagatccatcgatcaattaatttccaatggccgatcagctcaccgacgaacagatctctgagttcaaggaagcctttagcctcttcgacaaggacggcgatggttgtattaccaccaaggaacttgggactgtgatgcggtcgcttgggcagaacccaactgaggctgagctgcaggacatgataaatgaggttgatgctgatgggaatggtaccatt

SEQ ID NO: 167357 - DNA, 279 bp, Glycine max
aaaaaaaaagaataataaatagaaaaaggagcatgttgattatatagaaagtaaagggcaacaatcatttttgtttaccatgggtaaggacaccatcgctgacataataacctatataagaaatgctgacatgaataaaaaaggaatggttcaaataccatttactaacataacagaaaacattgtaaaaatacttttacgcgagggttttgttgaaaacgtcagaaaacatagagaaaacgacaaatattttttagttttaactctacggtatagaag

SEQ ID NO: 167358 - DNA, 273 bp, Glycine max
ctcgagcgatccgaacaagggcatatctctacgatttccacgactacttcgagtcacgcctgacaaagctcctgaacaggcctcatcatctgagcaggttgctgaaatgtataaggctcaaaaacacaatcacacgaacaaccaaaatgacgatgaagatgatgattgagtgaaaaaattctgtttctcatgctgagctataaaatctcagtaatttttgctgatgcaaatgcgaattctttaccttcaagcataggtcagagagcataactg

SEQ ID NO: 167359 - DNA, 276 bp, Glycine max
tttcgcaaacctaattactgctattacgagacgacgcagatttagttcggattgttcgattgctatggctaggaagatgcttatcgatggtgaagctgaattggctcaaggtggtggagaagaagtgtcgaattttgacttcgacttgtttattattggggctggaagtggtggcgttcgtgccgctagattttcatccaattttggagctaaggtggggatttgtgagcttccatttcatccaattagttcagaaacaattggaggagtcggtgg

SEQ ID NO: 167360 - DNA, 277 bp, Glycine max
gatattttgggagtgattggagcattggggttttggcctctaacggtgtactttcctgtggagatgtatatcttgcaaaagaggatcccaaaatggagtatgagatggatttctctggaattgctgagtgtggtgtgcctcatagtaacaattgcggctggtcttggctcaatggttggtgtcttgcttgacctccagaaatacaaaccattcagttcagattattaaacaccacataatctatttgcctccttggggatgtaagaaactctgaggg

SEQ ID NO: 167361 - DNA, 281 bp, Glycine max
gtttttggagtaaccaaaagcaatggctaatacaccttcgaattcttcaattctcctctccctttttctattggccatcgccctctccctcgctgagtcccaatctttcatcggagtaaactacggccaggtcgccgacaaccttccggcgccggaggacacggccagcctcctcaaatccaccaccatcggaaaagtccgtctctacggcgccgatcccgccatcatcaaggccctcgccaactccggcatcggaatcgtcatcggcgcctccaacggcg

SEQ ID NO: 167362 - DNA, 238 bp, Glycine max
ccgctgcgcacagctgctccgccgtgactctgtggtcgacggtataaaatgaaggtgaaaaagcagaagaggcacaggaagattttgacgttttacactgcttgcttcggttttcggaagccttacaaggttctatgtgatggcacatttgttcatcaccttcttgtgaatcgaataacccctgctgacacggccattggcaatgtcctcagtgctacgatcaagctccacacaacat

SEQ ID NO: 167363 - DNA, 274 bp, Glycine max
cgcttgaactctgcgagatcttgagtcgccgatttgaaaagatgagtaagcttcagagtgatgctttgcgtgaagccatctcaggaatcatggccgattccaaggagaagaatcgcaaatttgtggagaccatcgaactccaaatcggtttgaagaactacgatccacagaaggacaagcgtttcagtggctccgtcaagttgccccacatccctcgccccaagatgaaaatttgcatgcttggtgatgctcagcatgttgaagaggcagagaa

SEQ ID NO: 167364 - DNA, 275 bp, Glycine max
gtcggacgaagagcaccatttcgagtccaaggcagacgccggtgcctccaaaacctaccctcagcaagccggtaccattcgcaagaacggctacatcgtcatcaaaggacgcccctgcaaggttgtggaagtttcgacttccaaaactggaaagcacggtcacgccaagtgccactttgttggaattgatattttcactgccaagaaacttgaggatattgtgccctcttctcacaactgtgatgttcctcatgtgaatcgtactgattaccagc

SEQ ID NO: 167365 - DNA, 273 bp, Glycine max
cacagagccacatccatgggcttcccagccaacggcgcctctgcggcccagcccctaaacttcctcatctacggccgcacgggctggattggcggcctcctcggctccctctgccgggcccagggcatctccttccattacggctcgggccgcctcgagaaccgggcctccctcgaaaccgacatagccctcctcaagccctcccacgtcttcaacgccgccggcgtcacgggccgccccaacgtcgactggtgcgagtcccacaaagtcgag

SEQ ID NO: 167366 - DNA, 277 bp, Glycine max
gagctcgagccgcgagtttgggcgtttagatcagaaccaaatcgtgttctcttccattggcaaacatggcaactcaaatgagcaagaagagaaagtttgttgcggacggagtgttctttgccgaactgaacgaggatctgacacgtgaattggcggaggacggttactccggcgtggaagttagggttacgccgatgcgcaccgagatcatcatcagagccaccagaacccaagccgttctaggtgagaagggaaggagaattagggaacttacctc

SEQ ID NO: 167367 - DNA, 276 bp, Glycine max
cacatattgtgtgaagaaggccatcattctccctggattccaccaatgtactcaaaccgcaatccgtaactttgaggtccccgttctcatcaaaaagaaggttctctggcttgagatcgcggtgacacacccctcggctgtggcagtgatcaacagcatcaatcagctgctggaaatatttatcttggcacatcctccctcaacctcactcgggacactttatagaccagttcagcaccttgcaccatttccattgccagatatatctttgtcttg

SEQ ID NO: 167368 - DNA, 278 bp, Glycine max
ccctaacgcgtgcagagcagagagagacgcagccatggggcgaagaccgcgaggtgttataggcaaattaagaacaaaccataccccaagtcacggttttgccgtggtgttcctgatcccaagatcaggatttacgatgttggtatgaagaagaagggtgttgatgaatttcctttctgtgtccatctggttagttgggagaaggaaaacgtttctagtgaggccctggaagctgctcgtattgcttgcaacaagtacatggccaaatttgctggaaa

SEQ ID NO: 167369 - DNA, 260 bp, Glycine max
cttgtcaaccctttgagagttagaatggctgctgctattgaaatccccacaatagtgtatcccaactcctctgcgcaacagaggatgccagtggttggaatgggatctgcccctgacttcacatgcaagacagacacaaaggaggctatcattgaggccgtgaaacagggttacagacacttcgacactgctgctgcttatgcgtctgaacaggctctcggtgaagctctcaaggaaactatccatcttggcctcgtctc

SEQ ID NO: 167370 - DNA, 265 bp, Glycine max
ggctgatccagtttcatgctgttatgcactgtatgcaaagttgaaccccgatacagttctcttgcagcaatcacctttagcccttgcaaaagctttaaagaactcggtggagttggatgggttaaaaaaggcacatattcgggatggtgcagcagttgtgcaatatcttgtctggctggataagaagatgcaggatatttatggagcttctggttactttttggagaaggattctgtgaaaaaggagaaacatttgcaatctttg

SEQ ID NO: 167371 - DNA, 272 bp, Glycine max
ctttatttgaagtatatgcgcggagttagggtttcactttgaggtctagcgcaatgatgagttgacagacggaggagttgaaaaggaaaaattccagaagagtgctgatatcacccgggccaggagcacctcaagattcgggcatatctttgcaaacagttttggagcttggaccaactgtgccattgttaggtgtgtgcatgggtttgcagtgcattggagaggcttttggagggaagattgttcgtgctcctcatggtgtcatgcatgga

SEQ ID NO: 167372 - DNA, 274 bp, Glycine max
ctttatcagatttgtcccatgttttctcttctgttaggagagacctcaatttcattgatcacactggtgaccttggatggaaagagagcgataggttccagcctattgtagttgacccgggactatatttagcaaggaaaagtcaaatttttcaagctacacaaaagaggccaacgcctgacgcgttcaaactctttacaggttcaccatggctcatcttgagccggccctttctggagttctgcatttttggttgggacaatttacctcggac

SEQ ID NO: 167373 - DNA, 275 bp, Glycine max
ggctgatccagtttcatgctgttatgcactgtatgcaaagttgaaccccgatacagttctcttgcagcaatcacctttagcccttgcaaaagctttaaagaactcggtggagttggatgggttaaaaaaggcacatattcgggatggttcagcagttgtgcaatatcttgtctggctggataagaagatgcaggatatttatggagcttctggttactttttggagaaggattctgtgaaaaaggagaaacatttgcaatctttgaaattgactg

SEQ ID NO: 167374 - DNA, 278 bp, Glycine max
ccctgagacccttggacccaacatggtggttgatatgtgtaagggagtccagtatttgaatgaaatcaaggattctgtggttgctggattccagtgggcatcaaaagaaggtgctttggccgaagaaaacatgagagccatttgctttgaagtatgtgatgttgttctgcacgctgatgctatccacagaggaggtggtcaaatcatccctactgccaggagagtcttctatcttcccagattactgccaaacccaggcttcttgagcctgtctacct

SEQ ID NO: 167375 - DNA, 278 bp, Glycine max
cttgaatcttcgttatccttctttttttctccttgaactcgaatattcactatggcagatgaggtggttctgctagatttctggccaagtccatttgggatgagggtcaggattgcacttgctgaaaagggtatcaaatatgagtccaaagatgtggacttgcagaacaagagccctttgctcctcaaaatgaacccggttcacaagaaaatcccggttctcatccacaatggcaaacctataagtgaatctctcgttgctgttcagtacattgagga

SEQ ID NO: 167376 - DNA, 271 bp, Glycine max
ctcgtgcctctagggttatcatatctccatttccatttcctctctctcagtttccaagaatcttaagctatgggaaagtcttacccaaccgtgagcgctgattaccagaaggccgttgagaaggcgaagaagaagctcagaggcttcatcgctgagaagagatgcgctcctctaatgctccgtttggcatggcactctgctggaacttacgacgtgagctcgaagaccggtggtcccttcggaaccataaagcacccctccgaactcgctc

SEQ ID NO: 167377 - DNA, 267 bp, Glycine max
gaacgagttcagcttggactccaagtccaccatcggtgttgaatttcagacgaggactttggttatcgatcacaagaccgttaaggctcagatctgggacactgccggccaagaacgatacagagcagttacgagtgcatattacaggggtgctgtgggggcaatgttggtttatgacatcactaaacgccaaacctttgatcacataccacgttggttagaagaactgcgcaaccatgctgacaagaacatagtcatcattcttac

SEQ ID NO: 167378 - DNA, 267 bp, Glycine max
tgatggttatacttttaattatgagtcatatatttcttattgtactaatatagtacagcagcatatacaacaggcagtgtttgattctaaggttgaaaaccctgtacttttggtggagaaccattctcgatgcccacaaaatattatgggagagaaaattctcccaaatggacaagtttggagatctcaactcttgttattttgcatttgtaccaaagttttgggtgatgtaaattctcttctaaagtttcagaacagtgtagagct

SEQ ID NO: 167379 - DNA, 271 bp, Glycine max
acaaaatccaatgctggactgagcttcactaaagatgacttgattgcctcattgactctgaatgacaaaggtgatgctttgaatgctgcatattaccatgtagttaaccccttgaccaacactgctgttggtgctgaagtgacccatagattctcaactaatgagaacactctcacccttggtacccagcatcagttggatccattgaccacattgaaggcacgtgtgaacaactttggaaggacaagtgctctgatccagcacgagtggg

SEQ ID NO: 167380 - DNA, 268 bp, Glycine max
ctgactctcctgctgcctcaacacctaccaatgcagcgccaactccttctgctggtctggtagttgatcaatcattgccatcaacctcaatacaactcaggttggctgatggaacccgcttgatatcacattttaattaccaccacacaatcagcgacatccgtgccttcattgatgcatctagacctgggggtcggcagaattatcaacttcagttgatgggtttccccccaaagattctaattgatgaaactcagactatagagca

SEQ ID NO: 167381 - DNA, 269 bp, Glycine max
aagcaacacaagaacactctcttgaacattcatggatccagtgagcgtgtggggtaacacgcccttggcgacggtggatcccgagatccatgacctcatcgagaaggagaagcaccgccaatgccgcggcatcgagctcatcgcctccgagaacttcacctccttcgcagtcatcgaggccctcggcagcgccctcaccaacaaatactccgagggcatgcccggcaaccgctactacggcggcaacgaattcatcgaccagatcgaaa

SEQ ID NO: 167382 - DNA, 279 bp, Glycine max
cacaagcactacaacattttctttggtctctcattttctctatagctagatgggctctggtgctttacaacttcttctgatcttgggtcttctggctagctcatgcttagcacaagccccaggtgctgcacccacacaaccacccacttcaatcccatcaccaccaccaccaagatcagcacctgcaccagcacccaccccgccagcaacaccaccaccagcaacaccaccaccagcagcagcaactcctccaccagcaacatcaccaccagcaacaac

SEQ ID NO: 167383 - DNA, 267 bp, Glycine max
ctctctcgcgatccccatgtcgttaggttaatggatgtgaagcaaggccagaacaaggaagggaagacagtgctctacttggtgtttgagtacatggacaccgatctcaagaaattcattcgctctttccgccaaaccggacaaagcattccaccccaaactatcaaatgcttgatgtatcagctttgcaaggggattgctttctgccacggtcatgggatcttgcacagggacttgaagcctcacaatctgttgatggaccggaaa

SEQ ID NO: 167384 - DNA, 265 bp, Glycine max
gttccggaacaaggtcgcaagacttgggatggaccaaaacccatttcaattgtggggagtactggttcaattggaactcagacactagatattgtggcagagaatccagataagtttaaagttgtggcacttgcagctggttcaaatgttactcttcttgcagaccaggtaaaaagatttaagcctcaacttgttgctgttagaaatgagtccctaattgctgaacttgaagaggcttgcatgatgttgaagaaaaacctgagat

SEQ ID NO: 167385 - DNA, 266 bp, Glycine max
ctcttcgttttgttcttccttgcgctcctcctcgttcgttcgttctccctcgcgtagatcggcaatggcggagaccgagacgtttgctttccaggctgagatcaaccagctcctcagtctcatcatcaacaccttctactccaacaaggaaatcttccttcgtgaactcatcagcaacgcctctgatgctttggacaagattagatttgagagtttgacggacaagagcaagctcgatgctcagccagagttgttcattcatatta

SEQ ID NO: 167386 - DNA, 267 bp, Glycine max
caaccttgtctactgatcttggagctcttcaagagcgtattacaacaaccaagaagggctcaattacctctgtccaagctatctatgtgcctgctgatgacttgacagatcctgctcctgctaccacttttgctcacttggatgccacaacagtgttatcacgacagatctccgagcttggtatctatcctgctgttgaccccttggattctacatctcgtatgctttccccccttattttgggtgcggatcactatgaaactgctc

SEQ ID NO: 167387 - DNA, 267 bp, Glycine max
ggggaattggattcatatgagattgaaggtggcgagacaaaagctgaaattcttcagaatctggctgagttccagttttcttgtgtcatgtacaatgctgtgttggagaatgcttgtagtgagcaaggagcaagaatgtctgcaatggacagctctagcaggaatgctggggatatgcttgatcgtctcaccctcacctataacagaactcgtcaagcatcaatcaccactgaattgatagagattatctctggagcttcagcactg

SEQ ID NO: 167388 - DNA, 265 bp, Glycine max
aggtagttcactaattgatcaagaacgggagggagaacagattgatcgagctctattaaagaatgtgttatacatatgtgttgaaatgtgaatggggcaaatggatcactatgagaatgattgtgaagctgccatgcgcaaagacacttcttcttattattctcgaaaggcttcaaattggatcctagaagattcttgtcctgattatatgctcaaggctgaggagtgcttaaaacgggagaaagatagggttgcgcattacttg

SEQ ID NO: 167389 - DNA, 277 bp, Glycine max
cttcagcgttttggtttgggagggaaaattctaaaacctaaaaaatttcaatctcaatcaactcaacgtctgtgatcccaatcgatcacatttaataccacccttcaggattaggtagtaattccgttcccttgaataaataacatgagcaccacagtgcaaagaactccaagatccagcaggcattctttatttttccaggatttggcttcacctgtttctgcccgtagaggaaaattttcgagtccaggtcaagcagctgcagtatcttcactat

SEQ ID NO: 167390 - DNA, 288 bp, Glycine max
tgcacatatactcccggttattgttaacttctcccaggataagtcttggcgcgtgcgttacatggttgcaaatcaattgtatgagctttgtgaagctgtaggccctgaacctaccagaacggaattggtacctgcttatgtgcggttgcttcgagataatgaggctgaagtgcgcatagcagctgctggaaaagtgaccaagttttgccggattttaaatccagatctttcaattcagcatattctttcttgtgtgaaggaattgtcatcagattcttctcagcatgt

SEQ ID NO: 167391 - DNA, 285 bp, Glycine max
aaccgtgtgcggcggcgcggagatggacgacgcggagtcctgctgcgggagcacagaggaggactgcgaacgacagaaagtggggtggcgcacgttagcggggtgcgcaggggtgaaggataaggacgaggggggtgagagtagtaatggtaatgggagaatgtgcaggaattgtgggaaggaagagtcgtgcgtgctgattttgccgtgccggcatctgtgtttgtgtactgcgtgtgggtcttcactccacatttgtcctatatgtaaatccttcaagactgc

SEQ ID NO: 167392 - DNA, 286 bp, Glycine max
atcaaggctaagcagggctatgtgatttaccgtgttcgtgttaggatcggtggccgaaagagaccagttccccagaggtattgtttatgggaagcccacaaaccagggagttacccaactgaaatttcagcgaagcaagaggtcagttgccgaggagcgagctggacggaagctgggtggacttagggtcctcaattcttactgggtgaatgaggactctacttataaatactttgaggtgattctggtggatgttgctcatgctgctattagaaatgatcccaga

SEQ ID NO: 167393 - DNA, 274 bp, Glycine max
gcaagcttatgaggttctgagtgaccctgagaagcgtgagatatatgatcagtatggtgaagatgcgcttaaggaaggaatgggtggtggcggtggccatgatccatttgatatcttttcatctttctttggcggtgggagtccctttggatcaggtggaagtagtcgaggtaggaggcagaggcgcggagaagacgtggttcaccctctcaaggtctctttggaggacctttatcttggaacttccaagaagctctccctctccagaaatgtt

SEQ ID NO: 167394 - DNA, 272 bp, Glycine max
acgctcttccaagctttctactcactcgggtgaagtggcattgcctggtgggaaaactgaccgaggggataaggatgatggggatactgcaaaaagagaggcaaaggaagaaattgggttggacccggaacttgtcaatgttgttactgtacttgaaccattcttgtctaagcacctcctaagggtagttccagtcattggcatacttcatgacaagaaagcattcaaacctgttctgaatccagctgaagtggaagcagtatttgatgcac

SEQ ID NO: 167395 - DNA, 271 bp, Glycine max
gaagaacatggaaactcaccacaaggtggatgcgatgatggagaaggtgttgagggagatgaggaggctagggctaaggaatatgctgactctgataggaagaaggatctttttgatattttgttgaacctctctgaagctgatggtgctgacaataagctcactagagagagtgccaaagctcttgctctggacatgttcatcgccggcacaaacggccccgcaagcgtcctagagtggtcactggcggagcttgtgagaaaccccacgt

SEQ ID NO: 167396 - DNA, 289 bp, Glycine max
  unsure (1)..(289): unsure at all n locations
cttctggaatgaacattttcaaatccccactggaccatgatttgaactgtggtggaatattccacgantcagcagactaccttattcgtctgaaacaaggagcaccccctcagacgaagaagtnattctagcgtcaggcggccaaagaagcgagcgggaagaagagtcttcaaggagacaaggcaccccgtctaccgaggagtgcgtcgcaggaacaagaacaagtgggtctgcgagatgcgagtccccaacaacaactcacggatttggctcgggacatacccaacgc

SEQ ID NO: 167397 - DNA, 287 bp, Glycine max
catgaattgagaggattagcattatgccttgcaaatcatggagagttgactcggctaagtggtttggttaacaacttagtccatgcttggcttgggacgggaagctgcatttgctggtgctgttttgggcgacaatgctctgatggagacagcatggcaggatactggaatgctggcagaggctgtgcttcatgctcatgcacatggacgtccaactttgaagaacttagttcaggcttggaaccaagagctgcagagagaggttgaacctactccatcacagaaga

SEQ ID NO: 167398 - DNA, 281 bp, Glycine max
ctagaatggaatttcgatgctcagtcatctcttttaccattctcatctctcttgctctttcaggagagaggcatgtccatgcatcgctacctgaggaagattattgggaagctgtttggccaaacactcccattcccactgcactgcgagagcttctaaagcctctccctgcacgtgttgaaatcgatgaactccctaagcaaattgatgatacacagtacccaaaaacattcttctataaagaagaccttcatccaggcaaaacaatgaaagtacaattc

SEQ ID NO: 167399 - DNA, 282 bp, Glycine max
cacaaacaccaaatcaaacatggccaccacttttctttctctcctcttcctcatcttctctctcctcagcccaaggcctcatttcctcttcccctgtccaagaccctgaatttgtggcccaagaagttaacaggaaaatcaatgcttccgtagctagaaggaatttggggtacttgtcctgtgcgacaggtaaccccattgacgattgttggaggtgtgacccgaactgggagaagaaccgccagaggctagcggattgtgcgattggtttcgggaaaaacg

SEQ ID NO: 167400 - DNA, 280 bp, Glycine max
attaacatcaaccctcactccttcgcacaccaaacccttctttcctatctctcactaatctaatgggaatccgcagcaactgtcgcgcataggcctggcgggcctggcggtgatgggccaaaacctagccctaaacatcgcagaaaaggggttcccgatctccgtgtacaaccgcacggcctccaaagtggaccagaccgtagatcgtgcccgcaacgagggctccctccctctcacgggccaatacacccctcgcgacttcgttctctccctccagcgc

SEQ ID NO: 167401 - DNA, 290 bp, Glycine max
caccattcttaacttcactcacttacaaatcacaatgacacaacaagcaacaacctcttccgaaacaacaacttcctcttcttcttcttcttcctcctcctcctccacattttcaccctcgcagcattcgggcccaaaggcccaggcccagaaacagagcaagaggcccagggactgcagcaagcacccggtgtaccacggcgtgcggaagcgcaactggggcaaatgggtgtccgaaatccgcgagccacgcaagaagtcccgaatctggctcggaacattcgccactc

SEQ ID NO: 167402 - DNA, 287 bp, Glycine max
caatcccatgttaatgttactagttgtggtactgctggtggttggttttgcaaagtcagatttaagtaaggacagagaagaatgtgcagacaaactaattgacctagctagctgtgttccttacgttggtggtgaagccaaaacccccaccatagattgctgcactggtctcaaagcggttcttgaccggagcaagaaatgcctctgcatcctcatcaaagatcgcgacgaccccaatcttggcatcaagatcaatgctactctcgctattcagctaccctctgctt

SEQ ID NO: 167403 - DNA, 285 bp, Glycine max
gctacgtttccgttttcaatttcttcttctttttcttcattattctagtgacgaaccatctcaattttctcacacaattcctctgttctcgagcgtaggaggagagggtttcgttccgtttcaatggggagcgaagagcagaacggcgaattctacctgcgttactacgtcggtcacaagggcaagtttggtcacgagttcctggagttcgagttccgcccccgacggcaagctccgctacgccaacaactccaactacaaaaacgacaccatcatccgcaagga

SEQ ID NO: 167404 - DNA, 282 bp, Glycine max
gcgtgctgaaggaccgcagcaagccgattatcttcaccatggcaaggttggaccgtgtgaagaacatcacaggactcgtggagtggcacggtaagaacgcgaactgagggagttggtgaaccttgtggttgttgccggagacaggaggaaggagtcgaaggacttggaagagaaggccgagatgaagaagatgtacggcctgatcgagacctacaagttgaacgggcaattcagatggatttcatctcagatgaaccgtgtgaggaacggagagctgtaccg

SEQ ID NO: 167405 - DNA, 281 bp, Glycine max
gcacgttctctgcccaactggcgtttgctttagctgcaagggattttcaggtgggtcttcttgacgttgatatttgtagtccaagcattccaaagatgcttggcctagaaggtcaagagatacatcagagcaaccttggttggtcccctgtctatgtagagtccaaccttggggtcatgtcaattgggttcatgcttcccaatccagatgaagctgttatatggagaggcccacgcaaacatgcacttatcaagcagtttctaggagatgtctactgcgga

SEQ ID NO: 167406 - DNA, 275 bp, Glycine max
atccgaggaagagtatgttaagtcaattaaggaggaaattcgcaaagttgttgaacttcaagaagagcttgatattgatgttcttgttcatggagaaccagagagaaatgatatggttgagtacttcggtgagcaattgttacgctttgccttcactgttaatgggtgggtgcaatcctatggttcccgttgtgtgaagccaccaatcatctatggtgatgtgagccgcccaaagccaatgactgtcttctggtcatctctggctcagagcttta

SEQ ID NO: 167407 - DNA, 273 bp, Glycine max
caggcaataaacgaaaataagctgtttatgattgattatcatgatatatatctacctgtcttagaaggggatcaatgcccttgatggtagcaaatcatatgccacacgcaccatctttttcttgacaccacgtggcactctcaagcctgtggctatagaacttagcctccctcatgctggacctaattcccggtcaaagcgcgtggttacacctcctgttgatgctactactaattggatgtggcagcttgccaaggcccatgtttgctccaa

SEQ ID NO: 167408 - DNA, 270 bp, Glycine max
atcgcgtattggttggtcgaaaaacaaagagtgtgtgtagtgtggcttggtttggtctttcacttttcttcatctttttgcgagaagacacacacacagagagagatggctacgacgaggattgaggcagagaagaagccgaagacgaagatcgtgtgcactctgggccccgcatcacggtcggtcccaatgatcgagaagcttctgcgagcaggcatgaacgtggcgcgcttcaacttctcccatgggtcccacgagtaccaccaggaa

SEQ ID NO: 167409 - DNA, 290 bp, Glycine max
ctcagaagcgaagaagaagccattcagaactagtctcctactctcacccgcaagaataacatggcatctcacatcgttacggtacccccgtatgggtcccaagagagagctcaagttcgctctcgagtctttctgggatggcaagagcagcgccgaggatttgcagaaggtgtcttctgatctcagggcatccatctggaagcagatggctgatgctgggatcaagtacatccccagcaacactttctctcactatgaccaggttctcgacgccagcgccaccctcggtg

SEQ ID NO: 167410 - DNA, 285 bp, Glycine max
  unsure (1)..(285): unsure at all n locations
cctcgagccgaatcggctcgagtactagtcccaattttctagggtactattcatttttcgataccttctgcagatgttgagtaccgnntgcttgtcggtgggctcgcttgggccactgacgaccatgccctcgagagagccttctctcagtacggcgaaatcgttgaaacgaaggtctgtttgttgcaggcatcacatctgatctcacacgattcggattcggaattttctcgatcccgttctgatctgtgatctctgatctgtttgcgttacttgatcttatga

SEQ ID NO: 167411 - DNA, 287 bp, Glycine max
gagctcactctaatattctcatactcacagctactttatcatttttctcgctttcttttcttcttctgttcagcttagacactcatttgtattagttttgttgctgagtgtgtgtgaaactgtgaaagagagttatggcaggaggtggtggagctccagcacctaagattgatgagccacaacctcatcccccgaaggatcagttaccgaatgtttcttactgcattacgagtcctcctccatggcctgaggccatacttcttggttttcaacattatcttgtgatg

SEQ ID NO: 167412 - DNA, 269 bp, Glycine max
aaaagagagaagatcgtgtccgacgccagcaagaagaaggccgcacagaagaaggacgccgacgccgccaagagaaggtcgaagggccgcagccgcagccgttatggaggcgtcttccaaagccgccaggaaggtcgccaacggagtcgccgatattcagatttcggatcggacctgcaccggcgtcctctgttcgcatcctctctccagagatattcgaatagagtctctatctggtacgttccatgggcatgatctcactgacgatt

SEQ ID NO: 167413 - DNA, 285 bp, Glycine max
atgtgtttgagaaacttggaccaagcttatacgattttcttcgggtaccaaattatcgctcattgtcccattggatcttgtcaggtgagattggcagacaactattggaatgtatagcattcatgcatgacttgcgcatgattcatgctgacctgaagcctgaaaacatactactagtttcaccagagtatgtcaaagttcctgactacaagagttcatctagatcagcaagttcctatttcaagatagttcccagatcaagtgctataaaggttattgattttg

SEQ ID NO: 167414 - DNA, 271 bp, Glycine max
ggcgcagagtagagcagcacagaagagggaaaacggcaccgccgccgtagaagaaaacaaccatggtgaacgtctccttttacaggaactatgggaagacattcaagaagccgcgtcgtccgtacgagaaggagcgtctcgacgcggagttgaagctggttggtgagtacgggcttcggtgcaagagagagctgtggagggtgcagtacgcgctcagccgcatccgcaacaacgcgcggaacctcctcaccctcgacgagaagaacccgcg

SEQ ID NO: 167415 - DNA, 272 bp, Glycine max
cacttccaattgctctcactagtcactactactagtggagatggcttcaactgcctcttgcacttccatttcccccttcttttgatggttgcctttgctggtgacttaaacaaagactttgacatcacttggggagatggccgcgccaagatactaatcaatggagagttactcactctttcattggacaaagcatctggttcaggttttcaatcaaagaatgagtatctctttgggaagattgacatgcagctcaagctcgtccctggaaa

SEQ ID NO: 167416 - DNA, 273 bp, Glycine max
cggaggcataccgatgacgatggcgatgacggcgtcgcagttgcggtgcggttgggggtggaggccaaacgccgaatcagcagcagcaacgacgtcgtatggttccggtggtgtgttccatcgctatagagaacgcgaacaacaaagagagagcgaaactgaagaagctcttcgatgaagcgtacgagaggtgccgcactgctcccaccgaaggcgtttccttcactctccaacaattcaccgacgctctcgacaagtacgacttcaacgccg

SEQ ID NO: 167417 - DNA, 271 bp, Glycine max
cgcgtttcggagagagacgtcgcaatggggaggaggcctgcaaggtgttatcggcagataaaaaacaagccataccccaactcacgcttttgccgtggtgttcctgatcctaagatcagaatttatgatgccggtatgaagaagaaaggtgttgatgagtttcccttctgtgttcatctggttagctgggaaaaagaaaatgtttcaagtgaagcattggaagctgctagaattgcatgcaacaaatatatggcgaaatttgctggaaaag

SEQ ID NO: 167418 - DNA, 284 bp, Glycine max
acaccggcggcggcccctctgagccggtacgaatcgcagaaacggcgagactggaacacctttggccagtacttgaagaaccagacacccccagtttcgctttcacagtgcaacttcaaccacgtgcttgagttccttcgctaccttgaccaatttgggaagaccaaggtccacttgcacggttgtatctttttcgggcagcctgatccgcccgctccctgcacctgtcctctcagacaggcttgggggagtctcgatgcgctcatcggacggctcagggctgc

SEQ ID NO: 167419 - DNA, 284 bp, Glycine max
ccctaacaaaaacccgaacggcggaaagcttcaatggggaaggcgaaagggaagcaacgtttggacaagtattaccacttagcgaaagagcacagttacaggtctcgagcctcatggaagctggtccagctcaactccaagttcggcttcctggaatcggcccgcgccgtgctggacctctgcgccgcccccggagggtggatgcaggtggtggtccagcgcgtacccgtggaccacctggtgatcggcgtggacctcgaccccatcgcccccgtccgtggcgg

SEQ ID NO: 167420 - DNA, 280 bp, Glycine max
caggaatccaccacccaccacacccaacctctgttgtgttgtgttgtgtgtcttctttattctatcgctagaataagatctggttggaaaattggtgttgaagtgtacggatctggtagtttctcttgtttgtgggatggggtggagatacaacgctggtttgttcctcatagtcactgtcgttattatttgggtcacctccgccgaagttacccaggatatttttaccgattataagcagccatttgcagtaacatatcttggagcttctcttatggta

SEQ ID NO: 167421 - DNA, 280 bp, Glycine max
caagaaggtcgcattagcttcttcatcgcgcaatggcccatccctctgctgtcgtctccgtcagaaaggccattcacccacgtcgtttttgacatggacggtctcttgctcgacactgagaggttctatactcaagtccaggaaatcatactcgctaggtacaacaaaacctttgattggtccctaaaggcaaagatgatgggaaaaaaagcaatagaatctgctaggatctttgttgaagagactggaattagtgattctcttagtgccgagcaattcc

SEQ ID NO: 167422 - DNA, 274 bp, Glycine max
agcggggctaccgctgagtttaagcatatcaataagcggaggaaaagaaactaacaaggattccctagtaacggcgagcgaaccgggaaaagcccaccatgaaaatcggtcgccctcggcgtccgaattgtagtctggagaagcgtcctcagtggcggaccgggcccaagtcccctggaagggggcgccagagagggtgagagccccgtcgtgcccggaccctgtcgcaccacgaggcgctgtcggcgagtcgggttgtttgggaatgcagccc

SEQ ID NO: 167423 - DNA, 270 bp, Glycine max
ggaatcatgaaatctgatgtggagtaattccatgagacatatgggtttgtcattcaacatactcaatggccttgtctgcaagttggcaatacacagagacctaactatttgccaatggaggtttgcaagatagtggaaggtcaaacgtactcaaaaaggcttaatgagaggcaaatcaccgctttgctgaaagttacatgccagcgtcctgttgagagggagcgtgatatcatgcagacagtacaccacaatgcataccatgaagatcct

SEQ ID NO: 167424 - DNA, 277 bp, Glycine max
ctcgagccgctcgagccggaaaaagcgttcaactcgtttgagggtggtgagtatgaccccaagcagcagcatcagcagcaggtccggtgatagaaacggcagcgttgtgatggagacgccgttgaaagaattgaaaaaggaatccacggtggctgacgtggacgataacgccatctccgccggcggccctcaagatgtctacggcgaggatagggctacggaggatcactttgttaccccttggagtgtttctgttgccagtggttatacactattg

SEQ ID NO: 167425 - DNA, 268 bp, Glycine max
ggactatatctggtatgctgggcttgcttccatctgatcagtttcacgttgtcattgaggccttgtgggaacccctttccaagttactaatttcttcaatgatgactgggtatacgctgcacaatgttgaatatagactttgtcttgagaaaaaccttgatatgtttgaaggagatatagagaagccaaaggcagaaagtacgaaagtggacttacaagggttgatgcatgacagtgtaaatgtaattgactttggtagagataagag

SEQ ID NO: 167426 - DNA, 255 bp, Glycine max
cggctcgagtgatgcttctcactgcccttttgctgaaaggggttttaattgccttgctaatgggagacaagatagaggttacacaaaatggaggtggaaacctacgaactgtgagattccaaggtttgatgtccgtggaatactcgaacgacttcgtgggaaaagggtggttttcgtcggcgattctttgagtaggacgcaatgggagtccatgatatgtttgctcctgacaggagttgaggataagacgagtgt

SEQ ID NO: 167427 - DNA, 269 bp, Glycine max
ttctcactctagatctgtgtttctctctccaaccttcgtttcaccacacttccatcacttgtcgagtgtagaaatggctccaccaattgagaccccaaccaaggtttccagctatcagcactccccaaaccctcgtcttaacgagaggattctttcatccatttccaggaaacatgttgctgctcacccgtggcatgatcttgagataggacctgaagctccaaagatcttcaactgtgtggttgaaattgggaaaggcagtaaggtga

SEQ ID NO: 167428 - DNA, 273 bp, Glycine max
ggactatatctggtatgctgggcttgcttccatctgatcagtttcacgttgtcattgaggccttgtgggaacccctttccaagttactaattacttcaatgatgactgggtatacgctgcacaatgttgaatatagactttgtcttgagaaacaccttgatatgtttgaaggagatatagagaagccaaaggcagaaagtacgatagtggacttacaagggttgatgcatgacagtgtaaatgtacttgactttggtagagatcagagcttgt

SEQ ID NO: 167429 - DNA, 260 bp, Glycine max
cggctcgagtgacgcttctcactacccctttgctgaaaggggtcttaatcgccttgctactgggctaatagatagaggttacacaaaatggaggtggaaacctaagctctgtgagcttccaaggtttgatgtccgtggaatactcgaccgacttcgtgggacaagggtggttatcgtcggcgagtccttgagtacgccgcaatgggagtccatgctatggatgctactgacacgagttgaggataagcagagtgtctatg

SEQ ID NO: 167430 - DNA, 269 bp, Glycine max
ttctcactctagatctgtgtttctctctccaaccttcgtttcaccacacttccatcacttgtcgagtgtagaaatggctccaccaattgagaccccaaccaaggtttccagctatctgcactccccaaaccctcgtcttaacgagaggattctttcatccatttccaggaaacatgttgctgctcacccgtggcatgatcttgagataggacctgaagctccaaagatcttcaactgtgtggttgaaattgggaaaggaagtaaggtga

SEQ ID NO: 167431 - DNA, 268 bp, Glycine max
cgttcggtggaaggagccgtagcagcagcggaagctctagcttgggcagcgaatcacaatggcgagaggattgcagaagcatttgcagaggcttaatgccccaaagcattggatgcttgacaaactgggtggtgcatttgctcctaagccctcatctggaccacacaaatccagggaatgcctgccactcatactcattttgcgaaaccggctgaagtatgctctgacataccgtgaagtcattgctattctgatgcagcgacatgtc

SEQ ID NO: 167432 - DNA, 269 bp, Glycine max
caatttcaatctctctctctcactgactctctctctctagacttagattttgtgaatggctgaagtggcacagggacaggtcatcggcgtccacaccgttgatgagtggaagctgcaactccagaatgcaaaagactccaaaaaactgattgtggtggattttactgcttcctggtgtggtccatgccgttttatggccccagttcttgcagagattgcaaagaaaactcctgaattgatcttcctcaaagtggatgtggatgaagtga

SEQ ID NO: 167433 - DNA, 271 bp, Glycine max
accattcaccaacctgcatctctgatctcttctttcccttcccaagaagactaagaagaagatgcctacttcagaatcatcatcaggcttctccgaaaccatttgtgtgaccggcgctggtggcttcatcgactcttggatggtcaaactcctcttggagaaaggctacactgcccgaggatacctcagacacccagatgatcccaagaacgggcacttcacagagtttgtaggagcttcgcagagactaactctgcataaggttgacctc

SEQ ID NO: 167434 - DNA, 260 bp, Glycine max
ggactgggcagtatagagacacggtgcgcctgtttatcacgggtacagatggctttgctggagcttttgctgaatgcctttgtgggagtcctaatttatatcagggaggaggcagaaaaccgtggcatagtattaactttgtatgcgctcatgatgggttcactctagctgatttggtgagctataacaacaagaataatttgtcaaatggagaagacaataatgcatggagaacatcataataatagctggaactgcgg

SEQ ID NO: 167435 - DNA, 252 bp, Glycine max
cggctcgaggaagcttttagtcacatggacttgcttgaaagcttgaacctctcaagaaatcatttaaacggtgaaatccctgaaatattggcagagcttgatcgtcttagttccctagatctttctcagaatgacttgaagggaactattcctgagggctttgccaatctttccaacttggtgcatctctacctttcattcaatcaacttgaaggtcatgtaccaaaaactggaatatttgcacacatcaat

SEQ ID NO: 167436 - DNA, 269 bp, Glycine max
ttttggtttttcatgaacaactagcaaccaccctttttgctaagatggcaatgagcaacaatgtgatcggatgcataaacttcgtggccgtgatcctctcaatcccgatcatcggcgccggaatctggctaacaaacggggatgccgattcatgcgtccagttcctgcaatggcccgtcatcatcctcggagtcctcatcctcgtcgtggcccttgcaggtttcatcggagccttcttcagagtctcgtggctcctcatcgtttacctc

SEQ ID NO: 167437 - DNA, 265 bp, Glycine max
cagcatctcaatctcagtctaaaccgctccaagaccgagttgcaatcgtcaccggctcgtcccgcggaatcggccgagacatcgcgcttcacctcgcctcactcggcgcgcgactcgtcgtcaactacacctccaactcggcccaagccgactcagtcgcggcgcagatcaacgccggttccgccaccacgacaccgcgcgccgtcgtggtccaagccgacgtgtccgatccggctcaggtgaagtcgctcttcgactcggccga

SEQ ID NO: 167438 - DNA, 266 bp, Glycine max
gttggtaacttttttgctgctttacttggaaacaactcggcacttactggtggcagtgggaaggttgtggacagtggacctgatgatcatatactctgtatactatactgaccatggaggtccaggggtgctcgggatgcctgctggtccttacttatatgcggatgatctgattgaagtcttgaagaaaaaatatgcttctggaacgtataaaaacctagtattttatctggaggcatgtgaatctgggagtatctttgaaggtc

SEQ ID NO: 167439 - DNA, 267 bp, Glycine max
gcgcacaaaactttctatagagaatgtggagcatctccttatgaaaagcctatctgttcatctaattgagggtataattgatcaagttgagggcacagtgcatgtttcctgggcccagccaagagctctgggtattcaacagatcaactccttacgggatcgactggacagttggactggaaaagttcacactgcattgctgtccattgaggctgctccacctgatctaattggatcgtgcatttttctttaatttggtttctgttc

SEQ ID NO: 167440 - DNA, 261 bp, Glycine max
gcgaaaaccaaatcaagatgctgagagtgggcgcaaagaggcttttgggcacgacgtcgttgggcgttagggttccggcgaggctgtaccacgagagggttgtggatcactacgacaacccccggaacgttggatcgttagacaagaacgacccgagcgtggggacgggtttggtgggggcgccggcgtgcggcgacgtgatgaagctccagattaaggtcgacgacaaaaccggaaaaatcgtcgatgctcgattcaaga

SEQ ID NO: 167441 - DNA, 264 bp, Glycine max
atctctctctttcgatctgggtactaaccctaacccgcttcgaaccgtggcttcctcaggcttccagaacctctctcgaagaaaaccttcttcttcttcgtcttcgtcttctcaacaaacacccgggtcgacccggatcgtttaccgagaatctcggatcccatcggaatccgatttcccgatctggcagcagaactggttcatcgcattgctcttcgtcatggctctcggattcttcgccctcgccattttcctcttcctcac

SEQ ID NO: 167442 - DNA, 265 bp, Glycine max
tgctgcctctctgtatgtgacagaggtttctcctgcttttgtgcggggcacctttggagctttcatccagattgccacatgccttggtctaataggagctttatttattggaatccctgtcaaagaaatatctggatggtggcgggtttgtttttgggtatctaccattccagctgctatacttgccacagctatggtcttctgcgcagagagtccacattggttatacaagcatttgcgaactgctgaagcagaagctgagttt

SEQ ID NO: 167443 - DNA, 265 bp, Glycine max
gtcaggaggagcactagctaagttcacaatttcaaaatggctaggggactaaagaagcatttgaaaaggctcaatgctcctaagcattggatgcttgacaaactgggtggtgcatttgcgcctaaaccctcatctggaccacacaaactgagggagtgcctccccctcattcttattctgcgaaaccggctgaagtatgctctgacataccgtgaagtcattgctattctgatgcagcgccatgttcttgttgatggcaaagtca

SEQ ID NO: 167444 - DNA, 265 bp, Glycine max
atttccttgatatcttagttatctaattacctcaattaatcccttaattgcaagcatcatggctgaggagaagcaccaccaccactttcaccaccacaagggcgatgatgtgcctggcgaggttgattataagaaggaggagaagcaccacaagcatcttgagcaccttggggaacttggtgctgtcgctgccggtgcttatgccttgcatgagaagcatgaggccaagaaagacccagagcatgctcacaggcacaaggtagaa

SEQ ID NO: 167445 - DNA, 266 bp, Glycine max
caaaatattaccatagacagagtgtagcatcctaaattaagaaaaacaaagagagaaaattgtgagaggagttttcacgtctttgagaaatgggtgcttcgctatcggtctcggaaaaatccatccatgaattcatggtcaaggatgctaagggcagagacgtgaacctcagcatctacaaagggaaggttcttcttgtagtaaatgtcgcttcaaaatgtggatttacgaataccaattacacccagttaactgagctttacagc

SEQ ID NO: 167446 - DNA, 264 bp, Glycine max
gtcgctgtttgtgtgtgtatcaggtgcagctaccaacgatggtgaagggtcgtcaattagaacgcgtcagactctacgtgaggggtacaatccttggatacaaaaggtccaagtccaaccagtacccaaacacatccctgatccaaattgagggagtgcacaccaaagaagaagtaggatggtatgctggcaagaaaatggcctatatctacaaggctaaggtgaaacaggatggacaccattaccgctgcatatggggcaagg

SEQ ID NO: 167447 - DNA, 268 bp, Glycine max
gaggtccggttgttcccatcttctctctcgtaccaatcaaatcacacttttgtgttgtgttgggacaccctaaaccccgttatcggtgagatcgagatcgatcgaacatggatgaggagtacgatgtgatcgtgttgggcacgggtctcaaggagtgcattctcagcggtcttctctccgtcgatggcctcaaggttctgcatatggataggaacgactattacggaggagaatccacttcgctcaatcttattcagctttggaagag

SEQ ID NO: 167448 - DNA, 264 bp, Glycine max
ctttgctctctgtgaggcttcaatttctaattagggtttcgcttagagtaaccaataaccatgggagtcttcacctttgtcgtccgcaaatccggcagcgaatggagcgccaagcaacattccggcgacatcgaggcctccgccgattccaccttcgatcttcaacggaagctcgtgcaagccgctctcgccgttgattcctccggtggagttcagtcctctttctctcccgtgtctcctacctccgctgtgttccaggtgata

SEQ ID NO: 167449 - DNA, 265 bp, Glycine max
gtttacacatctctccaacctttcactttcgtttctcagttttattcgaatccctctctcaatctcctttccaaatggccagcgttgaggttgcacattaaacaccaacaacagttccagaaaatgaaacaaccgaggtaagcaagacccaggaaacaaccccagtcactgaggctcctgcaacagaacaaccagcagctgaggttcctgcaacagaacaaccagccgctgaggctcctgccccagaatcaaccaccgaagcacc

SEQ ID NO: 167450 - DNA, 264 bp, Glycine max
gcactgcgccacaagcaggaggagcatggcctattgttggtcatttgcacctcttcggggctcatcaacttatacacaaaacactagggacgatggctgacaaacatgggctaattttcacgataaaacttggttcatacaaagttctggtgttgagtagctgggagatggccgaagagtgtttcactgtccatgacaaagcattctccacgaggccctgtgttgcagcctcaaagctaatgacctacaactctgcaatgtttg

SEQ ID NO: 167451 - DNA, 250 bp, Glycine max
tcaagattcagcaagtgcgtttcggaagcagagaccgaaatacttcgagatggcccgtacaaagcaaactgctcgtaagtcaactggaggaaaagctcccaggaagcagcttgcaaccaaggctgcacgtaagtctgctgtgataactggtggtgtgaagaagcctcatcgttatcgccctggaactgttgctcttcgtgagattaggaaataccagaagagcactgagctcctatgtcagaacttcctt

SEQ ID NO: 167452 - DNA, 263 bp, Glycine max
agttctctggcaattaaggtctcatccaaataagcacaaatgggtagccagagttacttcaaggctttgattatttgccttatagcactaattggatcaactcaagctcaattgcagcttggtttctatgccaaaagttgtccaaaatctgagcaaataattctgaagtacgttgttgagcatatccacaacgctccatcactagcagctgctctcataagattgcacttccatgatctgttttgtcaatggttgtgatggat

SEQ ID NO: 167453 - DNA, 277 bp, Glycine max
ggagaattgtatacctttaagtggactactctcttgattcctccaaccactatcttgatcattaacattgttggtgttgttgctggaatctcagatgccataaacaatgggtatcaatcctggggaccactgtttggaaagcttttcttttccttctgggtgattgtccatctctatccattccttaaaggtttgatgggtcgacaaaaccgcacacccaccattgtagtgatttggtcagtcctattggcctctattttctccttactatgggtaa

SEQ ID NO: 167454 - DNA, 276 bp, Glycine max
gttgtaactcgttcttcttcttttgttgttctgtgtttgtgtttgttttttctctcacctgaaaatgtcttgctgcggtggtaactgtggttgcggaagctcctgcaagtgcggcaacggctgcggaggctgcaagatgtacccagacttgagctacactgagtcaaccaccaccgagaccttggtcatgggagtggcacctgttaaggctcaatttgagggtgctgaaatgggtgtgcccgctgagaacgatggctgcaaatgtggaccaaactg

SEQ ID NO: 167455 - DNA, 279 bp, Glycine max
gtgcgggcccatggtcctggacgcgctgatcaagatcaagaacgagatcgacccgagcctcacgttccgccgctcgtgccgcgaggggatctgcggctcctgcgccatgaacatcgacggttgcaacggcctcgcgtgcctcaccaagatcccctccgaaggcgccgccaccacgatcacccctctgccacacatgttcgtgatcaaggacctcgtcgtcgacatgacgaacttctacaatcagtacaagagtatcgagccgtggctcaagaggaagaa

SEQ ID NO: 167456 - DNA, 277 bp, Glycine max
attcacaaccttaaacctttctttcttgtaaactttattgattgattctgagaatagaactaagagggtatagacatggctagcgcaattgcagcttcttttttggttctgcttctggctttccccactgtatttggagctgaccatgaagttggtgacactagtggatgggccctcggagttaattacaacacctgggcctctgggaaaactttcacagttggtgacactttggtgttcaagtatgactccactcatcaagttgatgaggttgatg

SEQ ID NO: 167457 - DNA, 279 bp, Glycine max
cggctcgaggtcgtttcggtgaataagtgtcgtttaaagatgcagagtctgcaacagaaggcttccgaatggagcggtgtttccatagacgacgctttcggcatcgacgacaccaatctcttccagaaactcggcctccaaaccttcattaacctctccaccaatttctacaacagggtttacgatgacgaggaagaatggtttcgttcaatattcgcgaattctgagaaggagaatgccattcaaaaccaatacgagttcttcgtgcagcgaatgggt

SEQ ID NO: 167458 - DNA, 278 bp, Glycine max
gcaatatgataagggttgttcagcaatctttactcggttcaatcttgtcaaatatgcttctagttcttggctgtgcattctttactggtggcattgtccactacaaaaaagtgcaggtttttgataaggcagctgctgttgtcaattctgggttactcttgatggctgtaatgggaatactatttcctgctgtgctttactttactcactccgaagttcatcaagggaagtcagtcttatctctttcaagatttagcagctgcataatgctactggcc

SEQ ID NO: 167459 - DNA, 279 bp, Glycine max
attattattagggtttggcgattcagagagaaagagaaatgggagaacgaaaaggaatcccaattgctctggggctcttggcgatgctcctcttcttcattgcttcttcctcttcctctcacctcgttcgtgccttccgatgacgccgacgacgcgatcttctacgagtcattcgacgaggattttgacggacggtggattgtgtccgacaaggaggattacaacggtgtctggaagcatgctaagagtgatgggcatgatgattatggacttcttgtt

SEQ ID NO: 167460 - DNA, 275 bp, Glycine max
gtttcttcctcctcattaagccgccactctctctctctttccttttcgtcttctttttcttcttcgttgggtttgttgccacttagtaagaaagagggtgtgaagagagtggggagaagatttggtgttgtggccatggcggagtctaagagtactgtgcttgttacgggagcgggtggtcgcacaggacaaatagtttacaaaaaattaagagagaggccaaaccaatatgtggctagaggtctggttagaacagatgaaagcaaacagaacat

SEQ ID NO: 167461 - DNA, 274 bp, Glycine max
ctcattttccctcactttctcgctcgccaaacgcccctctctctcctccaatggccgaccagctcaccgacgaccagatcgccgagttcaaggaggccttcagcctcttcgacaaggacggcgatggttgtattactactaaggaacttgggactgtgatgcggtcactagggcaaaacccaactgaggcagaactgcaggatatgattaatgaggttgatgctgatggcaatggaaccatcgacttcccagagttcctcaacctgatggctcg

SEQ ID NO: 167462 - DNA, 285 bp, Glycine max
gccgcagattgcgagcttcggctgctggggatgaggaggtggatctacttctacccggtacagcaagactacaaatccagctaggtgtgaacatgccagcgagggcagaacagattccaggaaaagaggaaatgcaaatgttccatgaggcttatgatgtcgtactttacctgggtataattgacatattgcaagagtacaacatgactaagaagattgaacatgcatacaaatcaattcagttcgattcattgtctatctcggcagtggatccaacattctact

SEQ ID NO: 167463 - DNA, 278 bp, Glycine max
  unsure (1)..(278): unsure at all n locations
atttcaacaaccatagccaatacctntctccttctccaaagcacttgtccttgcctgctccttctgcttatttgcgtctttggcttttggacgcgatttctccattgtgggctattcatcggaggacttaaagtccatggataagctcattgaactctttgaatcatggatgtcaaaacatggcaagatttaccaaagcattgaggagaagcttcttaggttcgagattttcaaggataacctaaagcacattgatgagagaaacaaggtggtcagca

SEQ ID NO: 167464 - DNA, 276 bp, Glycine max
ctgattgctacagtaatagcagtgtatgccaactggggttttgcaaggatccaaggaattggttggggttgggcaggagtgatttggctctacagtattgtcttctatttcccacttgacctcatgaagttcgccatccgctacatcttgagtggcaaggcttggaacaatctccttgaaaacaagactgccttcaccaccaagaaagactatggtaaagaggagagggaagctcaatgggctcttgctcagaggaccctgcatggacttcaacca

SEQ ID NO: 167465 - DNA, 190 bp, Glycine max
gccatggctgctctgcaatacttggaatcgctgcgcaacgcgcatcctgagctctccgattggtacaattcgctggcggatctataccagaacaagctctggcaccagcttaccctcaagcttgagcagttcgtggctctcgccgtcttccaggccggtgatgcattaatacaattatatcacaatttca

SEQ ID NO: 167466 - DNA, 277 bp, Glycine max
  unsure (1)..(277): unsure at all n locations
gtcatggtccgttatgtgcttgtgtttgatcttacttcacattttcctgcgctttgtgccactacagtcagcacctgctagtgccattgtgacacagattcctggcttcagtggcactctaccttcccagcactatgctgggcatgtgacggtggataagagtcatgggaggacattgtactactatacagttgaatcagagggcgtaccttccgaggcacctctngttctgtggctctactgggggtcctggctgctctagcttcgatggattcat

SEQ ID NO: 167467 - DNA, 286 bp, Glycine max
gcagcgtctccgattacgacgacgaaatctcaatcaccgaggacgagttccgcgtttccgagaccgagcgcgtttccatgctcgccatggaggatttgaaagccatagctgagtgcatgatttcctccggctacggcaaggagtgcgtcaaggtttacatcgtcatgagaaaatcgatcgtcgacgaagcgctgtatcatctcggagttgaaaaattgaacctctctcaggtccagaagctggattgggaggttctcgagttgaagatcaagagctggttaaaagc

SEQ ID NO: 167468 - DNA, 283 bp, Glycine max
ggaaagtaagatcatctgcatcgccgacgcttccaacaataacaatggccgataatgcaacaacgcaaggaagcaacaccctattttctccttacaagatggccaaattcaacctctctcatagggtggtgttggctcctatgacaagatgcagagcgttgaactggattccacaggcagcgcttgccgaatactacgctcaaagatcaacaccaggtggatttctcatcagcgaaggcaccttgatctcccccactgctcctgggtttccccatgttcccgg

SEQ ID NO: 167469 - DNA, 278 bp, Glycine max
cgtgaaatcgctggagtcatcgctggccacggggaacctccagaagatgtcggagaccatggactcgttcgagaagcagttcgtgaacatggaggtccaggccgagttcatggagagcgccatggccggatccacctccctctccactcccgaaggagaggtcaacagcctcatgcagcaggttgccgacgactacggcctcgaggtctccgtcggcctcccgcagcccgccgctcacgccgtccctgccaaggaggccgacaaggtcgacgaggacg

SEQ ID NO: 167470 - DNA, 276 bp, Glycine max
cgatgtcaacggttctggtgacgggaggggcaggcttcatcggatcccacacggtgcttcagcttctgaagcagggcttcagggtttccatcatcgacaaccttgacaattccctcatcgaagccgttcacagggttcgccgcctggtcggtcctcatctttccaacaacctcaccttctctccacggagatctccgcaatgttcaggatttggaggcagtgttctcgaaaagcaagtttgatgcggtgatccactttgctgggctgaaaggtgtc

SEQ ID NO: 167471 - DNA, 275 bp, Glycine max
tactcttcctgtttctacccaccacctgcttctctttctcatttcaaactccttcaagcaataatgaattctcgaatcaaagttcttctctgaagcagcagattctggagctagctaatagtcccagaacggtgaaatggatgaagagaataaggagggaaatccatgagcacccagaacttgcatatgaagagttcagaacaagtgctatcataaggcgtgagcttgacctgttgggtgttggttacaagtggcctgtggctgggactggtgtg

SEQ ID NO: 167472 - DNA, 276 bp, Glycine max
gcgtcgctccgcaccagtttcaccgcacgaatatcttgttgtttggagcgatccgagaaaaactctgtaaacatgttggtttaccaggacctccttacaggtgatgagcttctctctgactccttccgttacaaggaaattgagaatggaatgctgtgggaagttgaggggaagtgggttgttaaaggagcagttgatgtagacattggtgcaaacccttctgctgagggtggaggagaagatgagggagttgatgatgcagctgttaaggttgtt

SEQ ID NO: 167473 - DNA, 275 bp, Glycine max
tttttcaggggagccagaaacaaatcaaaagaagaacgaggaatatatgtgaagcatttcaaaaacattccaatggccgatatggaaatagttcttccagaaaagaaaaaccctggattaactccaatggattgggtcaagtttcttggatcagctgtagttggtctggttgctgtagttagttcacttgaaatgccttcagctgattggtgggtcatcattgctgttgtctccacagtaattggttatattgctaagacttacttcacgttcca

SEQ ID NO: 167474 - DNA, 277 bp, Glycine max
cctcgagccgattcggctcgagtcagaattctctaaaagagatctactttctgctctttgaagaaagaagggtctttgcttgcttttggagatgtctctgctctcagatctcatcaaccttaacctctccgataccaccgagaaggtgatcgcagagtacatatggatcggtggatcaggaatggacctgaggagcaaagcaaggactctcccaggaccagttagcgacccttcagagcttcccaagtggaactatgatggttccagcacaggtcaa

SEQ ID NO: 167475 - DNA, 273 bp, Glycine max
ctcgagccgcgaggatccatcgaatcatgatgctgctgctgtgttgagagagaaccctaagatgtttgaatctaatgtgaggagggcaatggctggagggtatgtggggcaaacctttttcccacgctgtatttagaccttttgcacgataccttcaagttcctgttcaaatatgttatcaatgcgtgaaggcccttggtttgtaaaatttatcaaaaaattggattttactttcgtcagttatgttatttttcttggtggagcgacaggcca

SEQ ID NO: 167476 - DNA, 253 bp, Glycine max
cggctctcgggtaactgcccgcgccagtgtatctcagcggggggtcagacacgcgggctgcgactgggccatagagtctatcatcgtctgggtgagtgcaccgaccacgcggatgcccggagccattctacagctcatacgcgctccataccccgcccaccgcgatggacgcattcatccgacctaacgtctcgacaggccctgccagttgcgacgcggaaacatgataacccggcggcgcgtatggactatg

SEQ ID NO: 167477 - DNA, 274 bp, Glycine max
cacaaactcagggtagggcagagagagagagagagagagagagagagagagagaatgggagggtgggctatcgcggtgcatagtggcgctggtgtcgaccctaatctcccactcgagcgccaagaagaagcgaaacaacttctcacgcgctgtctcaatcttggaatctctgctctaaattctaatcttcccgccatagatgtcgtcgaacttgtggtgagggaattggaaacggatccgctgttcaattcggggcgtggatctgctctgacag

SEQ ID NO: 167478 - DNA, 273 bp, Glycine max
gcgtggctagcagagactagagagatagaattagaattaaaaagcgtgaaggacagtgataggtttggtttggaaggaagaagaaaatgaaggccatagtgataacgaggccaggaggtcccgaagtgctccaacttgaggaagtggaagatcccctagtcggagacgacgagcttctcatcggagtccacgccacttcccttaacagagccgatacctttcagaggaaaggctcctaccctccccctaagggcgccagcattacctcggtct

SEQ ID NO: 167479 - DNA, 273 bp, Glycine max
gacttaacaacagcacaaagcgggttactgtctgttcaagctaccatctctctctctctttcttagtgcctccttgccagaagttaaaatggcccaagaaactttcctattcacatctgaatcagtgaacgaggggcaccctgacaagctctgtgaccagatctccgatgctgtgctcgatgcatgcttggagcaggaccctgacagcaaggttgcctgtgaaacctgcaccaagaccaacatggtgatggttttcggagagatcacaaccaa

SEQ ID NO: 167480 - DNA, 274 bp, Glycine max
gcaagaatggcacttcgttgcttggtgatgtccctttctgttctcttcactcttggtcttgcgagagaaagccatgccagagacgaagatttttggcatgctgtttggccaaacactcccattccaagttcattgcgagatcttctaaagcctggccctgcaagtgttgaaatcgatgatcaccctatgcaaattgaagaaacacagtacccgaaaaccttcttctataaagaagaccttcatccaggcaaaacaatgaaagtacaattcagca

SEQ ID NO: 167481 - DNA, 276 bp, Glycine max
attcagggacgggggcttggtgaaatgtgagatctatggtgaagtccaagtaaattcccggatctcaggttttcctgatttaaccctttcatttacaaatccttccatcctcaatgatgtgaggttccatccctgtgttcgttttcggccttgggagtctcatcaaattctttcctttgtgcctcctgatggacaatttaagcttatgagttacagagttagaaagttgaagagcaccccaatatatgtaaagccgcagttaacttcagatggtgg

SEQ ID NO: 167482 - DNA, 275 bp, Glycine max
atattttgatcaaattgggtcgcactcttcagtgacaacaccgtggtgggctaagtattgccacgcatacaagggatatcccccatcacaaccagatccacacagaaagccacagcatgcaagaaggtcattaacagagagagagatatttacatcaaaatgaatgcaaaagcgatctgacaatgattcaacagcaccaaatgcccaacaagaaccacagtgaccctgatctagaattcttccaatagtgctacactgagaccaagctgtccttg

SEQ ID NO: 167483 - DNA, 276 bp, Glycine max
ctcgagccgttcgtatgttgcagttggcaggagttcaatgtgctggcaacccacatttttgcgtcaatgaggatggttcctaccaagaagaggggcagaagaatacaaggggatatatatggggaaaggctggaacgaagctactatgtgctttcctgtccctgccagttccttctaaatcttcaaattctttgggagaacaaccctccagtctggctagcagaacaatgcctgactaccttgagcatgggatagttcagaagcttctcttagttg

SEQ ID NO: 167484 - DNA, 273 bp, Glycine max
cctggggataatgtttgggtcaatgttgatattttgatgacacatgatgtgtgtggccctggttctattgggattttcaagagggagtttggcgaggatgccaaggtttgggaccgtgaaaagcttgtaataatacctgaccactatattttcacaagtgatgaacgtgccaatcgcaatgtagacatattaagagatctctgccatgagcagaatatcaagtacttttatgatattaacgatcttagtacattttcaggtcaatccagacta

SEQ ID NO: 167485 - DNA, 269 bp, Glycine max
attcacaagtgtgccgccgtcaccgagcgtgtccttgcagcatgctacaaggctttgaatgatcaccatgtccttcttgagggtaccctattgaagccaaacatggtcacccctggatcccaatctgctaaggtttcccctcaggtggttgccgagcacactgtcagagcccttcagagaactgtgcctgctgcagttcctgctgtcgttttcttgtctggtggccagagtgaggaggaggcatccgtcaacctcaacgccattaacca

SEQ ID NO: 167486 - DNA, 271 bp, Glycine max
gttctggtacctttgggactgtgtatcatgggaaatggcgaggaacagatgttgccattaaaagaataaagaaaatctgcttcactggtcgatcatctgagcaagagagactgactgtagaattctggcgggaggcagaaattctttccaagcttcatcatccaaatgtggtggcattttatggtgtagtgcaggatggaccaggaggaacaatggctactgttgcagagtacatggtggatggttctcttaggcatgtattacttcgcaa

SEQ ID NO: 167487 - DNA, 274 bp, Glycine max
gtccgactggaacgtttgtgactttttctgaggaaatggggcttcctagcatattgaactccaaacctgtcagttatcccccacctcgtgagaagtgtgctggtccatcttgtacaaatccttataagtatcgggattcaaaatcaaagcttcctctttgcagtctccaatgctacaaggctgtccaggagaaggtggtggctgaaactacctgttgatgttgtcaatgatcctctatcactggcttcttccagttatatggaaccatcaatgt

SEQ ID NO: 167488 - DNA, 247 bp, Glycine max
gtggaaatgcgctgggtggatacttatatcccatttactaatccaccgtttgaactggaaatatatttcaaggaaaagtggttggaagttttgaggtgtggagtgacagcgccagagagtctggagtgagatgggaaacctaataatgttgcatgggcttaaggcctatggttagagacgtcagctatggttctatttgacataccagatattcgtctcatttagtcacatgatgagcgagttacct

SEQ ID NO: 167489 - DNA, 271 bp, Glycine max
gctgcttcttccgccactcagcacttcgctccctctgtgcttcaccaaccatggccgaaatcgaagctaccgttccagatccctctcaaatcgacgtcaaacttttcaaccgctggagcttcgacgacgttgaggttactgatatgtctctggctgattacattggagtgtccccgtcaaagcatgctacatatgttcctacccatgctggtaggtactcagtgaagaggttcaggaaggcgcagtgccccattgttgagagactcaccaa

SEQ ID NO: 167490 - DNA, 279 bp, Glycine max
taaatttttgatcgggatatacctcagcattaccaaaacagagaaggcctctgcagatagtgagaacgataagcttcgcttcggttagtcttccatgcacggctggcaccttatcatggaagatgctcatgcagctcatccatgtatggacgagtccacgtcatacttaggtgtttatgatggacatggatgcaaagcagtatcagaattctgtgccctgtatctacacctgcaggtgcttaagagtgaagcttacttagctggagatttaggcacatc

SEQ ID NO: 167491 - DNA, 275 bp, Glycine max
aagaaaccctagcaagtggagcaatggcagacgttgaagtcgatgtggcggcagcagcagcagcagggctgccgaagaagagaacgttcaagaagttcagttttcgaggcgtggatctcgatgcacttctcgacatgtccaccgatgaactcgtcaagatgttcagtgcccgcgctcgtagaaggttccagagaggcctcactagaaagcccatggccttgatcaagaagctccgtaaagcgaaaagggaagctccaccaggtgagaagccagaa

SEQ ID NO: 167492 - DNA, 277 bp, Glycine max
attggccaattccaccaaagctcctcacgctcacactcactcatttgcaaagaaagagagagtaatggcactgagggcagccgtgctccgccacgttcgtgtgccactccaagccgctccaaaactgcagccatggcgtgccatgtcatcacacggcgacgatcatctctccaaagaggaggtcgtcgaaagagtcctcgccgtcgtcaaagatttccccaaagtcgatccttccagggtgagtccagatgtacatttccagaaggatttgggtttg

SEQ ID NO: 167493 - DNA, 273 bp, Glycine max
gttgataaacatatcctagcccgccaaaccggtctctccagaagtcaggtttcgaattggttcattaacgcgagggtgaggctatggaagccaatggtggaggaaatgtatttggaagaagagaaggagcatcaaaacgacgtagcatcgtcggagggaggaggcatcaatattctcggggatcagaagccaacacaggctcgactcgttcgaattgactcagagtgcatgtcgtctatcgtcaacaacccagatgacaaaaacgacacaaag

SEQ ID NO: 167494 - DNA, 274 bp, Glycine max
gcaaaaagaaagaatcccaggcgaggagaaagatggaggggaaggagcaggatgtgtcgttgggagcgaacaagttccccgagagacagccaattgggacggcggcgcagagccaagacgacggcaaggactaccaggagccggcgccggcgccgctggttgacccgacggagtttacgtcatggtcgttttacagagcacggatagcagagtttgtggccacttttctgtttctctacatcactgtcttaaccgttatgggaatcgccggggc

SEQ ID NO: 167495 - DNA, 272 bp, Glycine max
gactccagcgaatcccccgcaccctaacgattacgtctttcgaaacgggattcgatacgttagaccatactacttcgaattcatcgctcatgttaaaaatcggtgggcagggaaaaccattgtggatttgttcgctgaggaattcaaaggtcgaccttatgagtattatgttagtgcagtgaaatgtggaaggattcaagtggatggtgagatggtaccggtttcatacatagttaaatcatctcaaaagataagccatttcttacacaggc

SEQ ID NO: 167496 - DNA, 264 bp, Glycine max
  unsure (1)..(264): unsure at all n locations
gccttcccctcgcgcttcccccctcttcattttgtacgtctcctttanctgcacaacaccccagatggctcagcttaacctcatacttatctggttatttttattgagtctctccctttattcatgctctacttcggcccagttaagtagacaccactatgcaaaaacatgccccaatgttgacaacattgtcagagaagcagtcaaaaagaagtttcatcaaacatttgttacggttcctgctaccattcgtctcttcttcca

SEQ ID NO: 167497 - DNA, 272 bp, Glycine max
atttctacagaagtggaaagttttgttgtagagattgaagaaagtgcaaagacagggatactagtagcatatgatgatatattaattggagtcttagggattgcagacccactaaagagagaagctgctgttgttatagaaggcctacagaaaatgggagtcatacctgttatggttacaggagataactggagaacagctcgagctgtagccaaagaggttggcattcaagatgttagggcagaagttatgcctgcaggaaaggctgatgt

SEQ ID NO: 167498 - DNA, 273 bp, Glycine max
caacaatataaattgactaaagagaggactatatctggagattcatactatggctctcacgtgatgcagtatggtgatgtacggcttagcagtgatgttctcttccattatttgggtacagatcctgctaatgataatttcacttttgtggacgaaaactccttatggtcaccttcaaaaccagtcaaccaacgtgatgctgatctcatccatttttgggataagttccgcaaagctcctgagggttctctcaggaaaaatgcagctcagaaa

SEQ ID NO: 167499 - DNA, 267 bp, Glycine max
gctactacaccaaagtactccaaggccaggtatgatgaaattgtgaaggaagtttcttcctatttgaagaaagtaggatacaaccctgacaagattccttttgttcctatatctggttttgagggagacaacatgattgagaggtccacaaaccttgactggtacaagggtcctactctgctagatgcacttgaccagatctctgagcccaagaggccttctgacaagcccctcaggctaccccttcaggatgtgtacaagattgga

SEQ ID NO: 167500 - DNA, 279 bp, Glycine max
gagatatatactgacattttggccctttgatagaaggtggtgcaaaactaaaagatggtgctatctagtgttcccctctgcaacacttgtggggaacaagtgggacttaatggtaatggggaagtgtttgtggcttgtcatgaatgcaatttcccaatttgcaaggattgttttgagcatgagatcaatgaggaccatagggtctgcatgaggtgtggcactccctatgaagagagaacaaaggaggaggatgatttccatgagataaaggttcacgaa

SEQ ID NO: 167501 - DNA, 265 bp, Glycine max
gcaagcttatgaggttctgagtgaccctgagaagcgtgagatatatgatcagtatggtgaaagatgcgcttaaggaaggaatgggtggtggcggtggccatgatccatttgatatcttttcatctttctttggcggtgggagtccctttggatcaggtggaagtagtcgaggtaggaggcagaggcgcggagaagacgtggttcaccctctcaaggtctctttggaggacctttatcttggaacttccaagaagctctccctctc

SEQ ID NO: 167502 - DNA, 266 bp, Glycine max
tggctgatctccaaggggatgaagaccactccttcaagaagattcgtttgagagctgaagacgttcaagggaagaatgttctgataaacttctggggaatggatttcacaactgacaagttgaggtctttggtgcgaaaatggcaaactttaattgaagctcatgtggatgttaagaccactgataattatacattgaggatgttctgcattggctttactaagaggcgtagtaaccaggtgaagaggacctgttatgcacaatcg

SEQ ID NO: 167503 - DNA, 268 bp, Glycine max
tcgtctttggttctggtttatagatctctgtgaagtcgctttataacactcaacctaagatgcagaacgaggaaggacagatcaccgagctttacattcctaggaagtgctctgccacaaaccgattgattaccgctaaggaccatgcttcggttcaggttaacattgggcatgtggatgagaatggcgtctacaatggccatttctccacttttgctctctgcggcttcatccgtgctcagggtgatgctgacagtgccctagatcg

SEQ ID NO: 167504 - DNA, 269 bp, Glycine max
atatctaaacaaagatgctgttcttcttgcatctcaggatattagtgagtggcctgcgatcgaaccactcccatcatacggtagaggaagagacgcaccagcaggaaggtacactagcctcatatttggaacaaacctcactgatgttattgtgacaggtggcaatggcaccatagatggtcaaggagcattttggtggcagaaatttcacaagaaaaagttgaagtacactcgcccttacttgattgaattaatgttctcagaccaga

SEQ ID NO: 167505 - DNA, 269 bp, Glycine max
aaagaaaccaaaagctgtgggggttattttccaagatgaacatgggaaacaacacgaggctattctgtcagatgataggcatagtgaagtgattatgtctagtggggcaattgggactcctcaattgctaatgcttagtggaattgggccaaaagcagaactccagaagttgaacatcccagtggtccttgacaaccactttgttgggaaaggaatggtagacaatcccatgaacacaatgtttattccttctaatagaccagttcatc

SEQ ID NO: 167506 - DNA, 264 bp, Glycine max
ctcgagccgtggcatctcagggggacacataaacccggcggtgacatttgggctgtttttggcgaggaagttgtcgttgcccagggcgattttctacattgtaatgcaatgcttgggtgctatttgtggcgctggcgtggtgaagggtttcgaggggaaaacaaaatacggtacgttgaatggtggtgccaactttgttgcccctggttacaccaagggtgatggtcttggtgctgagattgttggcactttcgtccttgttta

SEQ ID NO: 167507 - DNA, 266 bp, Glycine max
caaaaccctaaacccttcttctctgatatttaaaacctctctcaacaccttcacctatctctatttcctttctgatcaatcaatctcctcttctcttccagccatggcctccttcctccgctctctccgccgccgcgatgtcgcctccgcctccctctctgcttatcgctcgttaacgggcagcaccaagccagcatatgtagctcacaactggtctagtttgtctcgaccattcagttcaaggcctgctggcaacgatgtcattg

SEQ ID NO: 167508 - DNA, 265 bp, Glycine max
tcctaattgtttaaacctaattctcatttcttcatcgttcgattcttctcctcctaaagatgcagatcttcgtgaaaactttgaccggtaagaccatcacccttgaggtggagtcctccgacaccatcgataacctgaaagctaagattcaagacaaggaagggatcccacctgaccagcagagacttatctttgcgggtaaacagcttgaggatggtcgaacccttgccgactacaacatccaaaaggaatccactctccacct

SEQ ID NO: 167509 - DNA, 264 bp, Glycine max
ctgattaccagttcatgcggccacgtgcacgggacaatcagcttgttgaagaatgggcagttcccttgaaaagcgttgaagatctatatgagaggtttagactgtattgccttggacagttgagaagcaatccttggtcagaacttgatggtcttcagcctgagacaaagatcataaatgagcagctggagaagattaacacaaagggcttcctcaccatcaatagctctgcagctgtcaatggggaaaagtcagattctccta

SEQ ID NO: 167510 - DNA, 266 bp, Glycine max
ctcaacttctgctcttccaactcctacaacgcttttctctgcactcatgggcaaggtccagatcggaatcaacggatttggaagaattggccgtttggttgccagagtcgctctgcaaagagacgatgttgaactcgttgccgttaacgaccctttcattaccaccgattacatgacatacatgtttaaatacgacagtgttcacggacactggaagcatcacgatgtcaccgttaaggacgagaagacccttctcttcggtgaca

SEQ ID NO: 167511 - DNA, 267 bp, Glycine max
aaaaaatccgcgattcgctcttctcttggaaaagtgaaaaccagaagtacgaacgaaagagaagagcgatttagaagtgagagaagatggggttgtcgttcacgaagctgttcagcaggttgtttgcgaagaaggaaatgaggattctgatggtaggtctcgatgctgctggtaagacaaccatcttgtacaagctcaagcttggagaaatcgtcaccactatccccaccatcggatttaatgttgagactgtggagtacaagaaca

SEQ ID NO: 167512 - DNA, 266 bp, Glycine max
gcacgttctctgcccaactggcgtttgctttagctgcaagggattttcaggtgggtcttcttgacgttgatatttgtcgtccaagcattccaaagatgcttggcctagaaggtcaagagatacatcagagcaaccttggttggtcccctgtctatgtagagtccaaccttggggtcatgtcaattgggttcatgcttcccaatccagatgaagctgttatatggagaggcccacgcaaaaatgcacttatcaagcagtttctaaaa

SEQ ID NO: 167513 - DNA, 267 bp, Glycine max
ttttctcttcttcgttcgtttcgttgaaaagcgactttttctctctgcaactctcccttttcttccttcgtagatcgaaagggaatcttcttccatggcctccaagcggattctgaaggagcttaaggacctccagaaagaccctccaacctcttgcagcgccggtcctgtagcggaagatatgtttcattggcaagcgactataatgggtccccctgatagcccttatgctgggggtgtttttctagttactattcattttcctcc

SEQ ID NO: 167514 - DNA, 268 bp, Glycine max
gcctgctcccgcccctcgccacgtggcacaaatccaaggacgtggcgcggagaatcctcgattcggtagagtaccacatgatgaggtgcacgtacaccttaggtttaggagagggtaatctcgcgggtaagaagatattcctttacgacgccgtttgcaggccgagcgagattcactcgttggagacgacgccgtttgattacgtggggaactgcgagaacaagacgctgcacgcgacgcagcagatcgcggagtgttggacgcgcgc

SEQ ID NO: 167515 - DNA, 266 bp, Glycine max
aaaaaatccgcgattcgctcttctcttggaaaagtgaaaaccagaagtacgaacgaaagaggagagcgatttagaagtgagagaagatggggttgtcgttcacgaagctgttcagcaggttgtttgcgaagaaggaaatgaggattctgatggtaggtctcgatgctgctggtaagacaaccatcttgaacaagctcaagcttggagaaatcgtcaccactatccccaccatcggatttaatgttgagactgtggagtacaagaac

SEQ ID NO: 167516 - DNA, 270 bp, Glycine max
gccagtagtcatatgcttgtctcaaagattaagccatgcatgtgtaagtatgaactaattcagactgtgaaactgcgaatggctcattaaatcagttatagtttgtttgatggtatctactactcggataaccgtagtaattctagagctaatacgtgcaacaaaccccgacttctggaagggatgcatttattagataaaaggtcaacacaggctctgcctgttgctttgatgattcatgataactcgtcggatcgcacggcctttgtg

SEQ ID NO: 167517 - DNA, 267 bp, Glycine max
gtttgttgttgtaactcgttcttcttcttttgttgttctgtgtttgtgtttgttttttctctcacctgaaaatgtcttgctgcggtggtaactgtggttgcggaagctcctgcaagtgcggcaacggctgcggaggctgcaagatgtacccagacttgagctacactgagtcaaccaccaccgagaccttggtcatgggagtggcacctgttaaggctcaatttgcgggtgctgaaatgggtgtgcccgctgagaacgatggctgca

SEQ ID NO: 167518 - DNA, 263 bp, Glycine max
cctcgagccgaatcggctcgagtcttagtcccaattttctagggtactattcattttccgatagcttctgcagatgttgagtaccgttgctttgtcggtgggctcgcttgggccactgacgaccatgccctcgagagagccttctctcagtacggcgaaatcgttgaaacgaaggtctgtttgttgcaggcatcacatctgatctcacacgattcggattcggaattttctcgatcccgttctgatctgtgatctctgatctg

SEQ ID NO: 167519 - DNA, 264 bp, Glycine max
gaagatgagagtattgatgctgaagtactgaattctatggcagtttcaaatgagcatttccatattgctttgggaacaagcaatccatctgctttacgagaaactgttgttgaggtgcctaatgtcagctgggaggatattggaggccttgagaatgtcaagcgtgagctgcaagagactgttcaatatcctgtggagcacccagaaaaatttgagaagtttggtatgtcaccgtcaaaaggggttctcttctatggtcctcca

SEQ ID NO: 167520 - DNA, 261 bp, Glycine max
ccctcgagccgctcgagccgctcgagcgctcgagccgtcgctccccactatgggttgacccttctccttcttctaataacaaaaccctgcttcctttgccttctccttcactaggctccccaagcaacaacaacaactactcttttttctctttcatcgacgatcttcactaagctctttcactcaaacacacacccttgattatatcactttctcttgttctcttaccgtagaacattgcatttactcctatctctcact

SEQ ID NO: 167521 - DNA, 265 bp, Glycine max
gagcaacataggaagtgaagtgtaggtaagtgagagccatgaagggttatgagccccgttcaagctcttcatgtgcagcttgcaagctattgaagagaagatgcataccaaattgtatttttgcaccttactttaggtctgatgagtgcaagaagtttgcaaaggtgcacaaggtgtttggagccagcaatgtgagcaagattctgattgaagtgccagaagagcagagagaggacacggtgaattctctggcttatgaggctga

SEQ ID NO: 167522 - DNA, 261 bp, Glycine max
caacttagttattctttcagctgttgttggcacaggtgctcagcttgcgttgctggttcttcttgtcgtcttgttggctattgttgggatgttgtatgttgggcgaggagccatcatcactactttcattgtgtgttatgctctcacatcttttatttctggttatgtgagtggggggatgtactcacgaaatgggggtaaacactggattaaatccatgattcttactgcttctctgttcccattcatgtgctttggaat

SEQ ID NO: 167523 - DNA, 267 bp, Glycine max
atttcctctcagaaccctcgatcactcccacgcgctcctatatcctctccttcaccgtcgctctctccaacgatcacaacaacatcgtcatcccatggcaaacgccgcatctggtatggcagtccatgatgactgcaagttaaggtttttggagctgaagacaaagaggacacaccgtttcatagtttttaagattgaggagcagcagaagcaggtcattgtggagaagcttggtgagccagcccaaggctatgaagatttcactgc

SEQ ID NO: 167524 - DNA, 263 bp, Glycine max
gcctagatataagcaaatagttaaagaccttgcagacaaatatcatactgagaacttgctgcttgtcacacacggggaaggtgttggggtggctctttcttcattcaaaaaggatgttacagtgtacgaagttgattactgtggatacgtccaacttagacgcccaattttcaagaaagaccagtcatttactgcaggagaatctgaagttcttaatcacaatggtcaaactggcgtaaatttcatcccaaattaatggccat

SEQ ID NO: 167525 - DNA, 262 bp, Glycine max
gccgcttttgtccctaatgacggttgcttgaactacattgaagagaatgacgaaggtggggtgacaagtcatacaagaaatcacatcttggaaatgaatggaagaaaccttttgctggttcatcccatgccaagggaattgtccttgaaaagataggtattgaggctaagcagcccaactctgccattcgtaagtgtgccagggttcaacttatcaagaatgggatcaagattgccgcttttgtccctaatgacggttgctt

SEQ ID NO: 167526 - DNA, 260 bp, Glycine max
tacaaggttctcctcgataaccggttagggcaacaaatgtttgatggtgggtatgttcatcatgggttgttgaaatcggcagtgtggttgttgaaccgtgaatcggagacgctgaagcggttgtgggtggagaatggttcggagtatgagatggttttcgcggggcactcgttgggttctggggtggtgtcgctgttgaccattttggttgtgaatcatagggaccgtttgggtgggattcccaaggagaagattcggtg

SEQ ID NO: 167527 - DNA, 263 bp, Glycine max
ctaccaggtccagacatagtaaggattgacagactgagagctctttcttgattctatgggtggtggtgcatggccgttcttagttggtggagcgatttgtctggttaattccgttaacgaacgagacctcagcctgctaaatagctatgtggaggtaaccctccacggccagcttcttagagggactatggccgcttaggccacggaagtttgaggcaataacaggtctgtgatgcccttagatgttctgggccgcacgcgcg

SEQ ID NO: 167528 - DNA, 266 bp, Glycine max
cttagatgttctgggccgcacgcgcgctacactgatgtattcaacgagtctatagccttggccgacaagtccgggtaatctttgaaatttcatcgtgatggggatagatcattgcaattgttggtcttcaacgaggaattcctagtaagcgcgagtcatcagctcgcgttgactacgtccctgccctttgtacacaccgcccgtcgctcctaccgattgaatggtccggtgaagtgttcggattgcggcgacgtgagcggttcgct

SEQ ID NO: 167529 - DNA, 260 bp, Glycine max
cccaaattcattttaatcctaattttgcacttcttgatcattcgatttttctcctcaagatgcagatattcgtaaaaactttgaccggcaagaccatcacccttgaggtggaatcctccgacaccattgacaacgtaaaagctaagattcaagacaaggaagggatcccacctgaccagcagagacttatctttgcgggtaaacaacttgaggatggtcgcacccttgccgattacaacatccaaaaggaatcaaccctc

SEQ ID NO: 167530 - DNA, 259 bp, Glycine max
tgatcccagatgattttcgatgtcctatatctcttgaactaatgaaagatcctgtaattgtctccactggtcagacatatgaaagatcttgcattcaaaaatggcttgatgctggtcacaaaacctgccctcagacacagcagacacttgtgcatacagcccttacccctaactatgttttgaagagtttgattgctttgtggtgtgaaagcaacggtattgagctaccaaagaaacaagggaactgtagaacaaagaa

SEQ ID NO: 167531 - DNA, 262 bp, Glycine max
ctctctctgcgttcggcaccagcgaaacgctcttcgttatctttttctcgactccgcgggcgtagatccgaggagttcgggaaaccctaactcatcttccttcacaacagaacaagacttcttttccctatccatcatctcaactgaagtcatggctggactagcacctgaggggtcacagttcgatgctcgtcaatatgattccaaatccagtgacttactttcatctgatggacaggacttcttcacatcctatgacgag

SEQ ID NO: 167532 - DNA, 261 bp, Glycine max
cacagcaatacgtatcattgaggaagtttcctgcggatcgtctccgaaaatgaacgacgcagacgtctcaaagcaaatccagcagatggttcggttcattcgccaggaagctgaggaaaaagccaatgagatctctgtctccgccgaagaggaattcaatatcgagaagctgcagttagtcgaagccgagaagaagaagaccaggcaagagtacgaacgcaaagaccgccaagtcgaaattcgcaagaagattgagtactc

SEQ ID NO: 167533 - DNA, 261 bp, Glycine max
caaatcttagttactttatcagtatcattcatcacaacaacaagatgagttcaggaattagagcatggagtgtggcaactagtgttggagttgtggaggccttgaaagaccaaggcatatgcaggtggaatcatgcattaagatcagctcaacaccatctcaaaaaccatgttggctcattctctcaggctaacaagctttcttcttctgctatgatctccacaacactaaaacatgagaaggcaaagcaatcagaggagt

SEQ ID NO: 167534 - DNA, 262 bp, Glycine max
cagatgatgacttcagagaatttgtagatggggtccctagagaatgtaagctcacaatagtatcagattcttgccatagtggtggcctaattgatggagctaaggagcagataggaactagcacaaagggagaagggcaacaacattctggttctggttctggctttggattatccagttttcttcgtcgctccgttgaggacgccatcgaatctcgtggagttcatatcccttcagcattgcgccatcatagacacaagca

SEQ ID NO: 167535 - DNA, 265 bp, Glycine max
ctgatggctcaggaactattgatgccaaagagctgaatgttgccatgagggcccttggatttgagatgacagaagagcaaattaataaaatgatagaagatgtggacaaggatggaagtggagcaattgattatgatgaatttgagtacatgatgacagccaaaataggagaaagggacactaaagaggagctcatgaaagctttcaatattattgatcatgataaaaatgtaaagttcttcactgctatacatcatttatactt

SEQ ID NO: 167536 - DNA, 260 bp, Glycine max
gcatgccaaagcgaccagcattcaagggatctgccccaataaatctatcagatagattgcaccaagttctgaggtgggctcttggctctgttgaaatttttcttagtcgtcattgcccgttgtggtatggctatggaggaaaacttaagtacctacagaggatggcttacaccaacaccattgtttaaccatggacttccatccctctgcttgcatactgcacaattccagctgtgtgtctcctgactggaaagttcatc

SEQ ID NO: 167537 - DNA, 259 bp, Glycine max
  unsure (1)..(259): unsure at all n locations
cttacccctcttaatcccaattttctagggtttatacaattctcgacgngttcttcagcatgtgagtaccgttgctttgtcggtgggctcgcttgggccactgacgaccaagctctcgagagagccttctctccgtacggcgaaatcgttgaaacgaagattatcaacgatcgtgagactggaagatccaggggttttggatttgtaaccttcgcctcggagcagtccatgaaagacgccatcgacaggatgaacggcc

SEQ ID NO: 167538 - DNA, 259 bp, Glycine max
ggagtttctcaaacaggcaaaccctcctgatccaagggcatttccgtttattttactcggaaacaagatcgatattgacggtgggaatagtcgagtggtttctgagaagaaagcgaaggactggtgtgcctcaaaagggaatattccctactttgaaacatctgcaaaagaggattacaatgttgatgctgcattcctgtgtattgccaaggctgctctagccaatgagcacgaacaagacatatattttcaagggatt

SEQ ID NO: 167539 - DNA, 261 bp, Glycine max
gagagaaccacgcagaactgacgcaatgggaagcacaagtttgcttcatctattacttggtgttgttttggctctgctgagtgtgtctcttgtggaaggagaagatgcatacaaatactacacgtggactgtgacatatggcattctttctccactaggtagtcctcagcaggtggttcttatcgatggtcagtttcctgggcctcaactagacttggtaactaatgaaaatgttgttctcaaccttgtaaacaagttaga

SEQ ID NO: 167540 - DNA, 263 bp, Glycine max
gcttgctcatcaagtccaagaaccaacctaccttttgcaatctcaattcaatggcgtcctctctcattgcgaacgcttcctctcctcttccctcctctccaggtccctccttcgccccgccgcttccgcttcccaccgctctttcaacaccaacgccatgcgccagtatgacaaccgcgccgacgaccacagcaccgacatcgatcgtcactccgaacgctctttccctagcactgcgcgccgcgacgatatcttctcagatg

SEQ ID NO: 167541 - DNA, 262 bp, Glycine max
ctcttagtcccaattttctagggttttattcattttccgatggcttctgcagatgttgagtaccgttgctttgtcggtgggctcgcttgggccactgacgaccatgcccccgagagagccttctctcagtacggcgaaatcgttgaaacgaagattatcaacgatcgtgagactggcagatccaggggttttggatttgtgaccttcgcctcggagcagtccatgaaagatgcgatcggagcgatgaatggacagaacttgg

SEQ ID NO: 167542 - DNA, 268 bp, Glycine max
ctagcacacaaaacttgctatagcagtaagctataactcatttgaggctctgtgagaattgagaaatggctaaagatgttgaggttcaagagcaaggaggagagtactctgccaaagactaccatgaccctcctccagcacctttgttcgacccagaggagctcacacagtggtccttctatagagccctcatcgctgagttcatagcaacccttctcttcctttatgtcactgtgctcaccattattggctacaaaaggcagactga

SEQ ID NO: 167543 - DNA, 296 bp, Glycine max
gtggtggtggtgttgttcttcttctcttcccctttctttttcttcttctgagcttgtttaagctcttgtctattatgatatccacttaacatagtattattcacaatgtgtggtattcttgctgttcttggttattctgatgactctcgagccaaaagggtccgcgtgcttgagctctctcgcagattgaagcaccgtggccctgactggagtgggctccatcaacatggtgactgctttttagcacatcaacggttagccatagttgatcctgcttctggggatcacctctcttt

SEQ ID NO: 167544 - DNA, 293 bp, Glycine max
aaaaacattaatagagtatagaaagaaaaaagatgatgtccccatcccatgtgatcctatccatatttttcttggtgtgtacaacaacaccaccactgtcccttgcccagaacacccctcaagactttcttgatgtgcacaatcaggctcgtgccgaggttcgtgttggtccactctcatggaaccacacccttcaagcctacgctcaaaggtatgccaatgagagaatccctgactgcaacctcgaacactccatgggacccttcggcgagaatctcgctgaagggtacggc

SEQ ID NO: 167545 - DNA, 308 bp, Glycine max
cggaatccagctcgatctcgagccgtgttggcaacgatttgtctctcagaagatctgcagttaaggcccctaacttaaacttttgggataaatcatgggcaccagtatttactttggacttgaagccaaacaacccaagtttaagaagtcgtcatgtggtatgcatgtccgtgcaacaagcaagtgtatccaaagttaatgtctcacctttagaattggaagatgctaaagaacctccattgaacttatacaagcctatagaaccctatacagcaacaattgtttctgttgataggctagtggggcca

SEQ ID NO: 167546 - DNA, 290 bp, Glycine max
tgtggtttcacattggctgttcaaatcaaaaatgactttctccctcccattcaccactctgctttcccttctctctctcattctgcttcatgtcaatgccttccccgttcatttcaatcaccccatacaccatcgccaccctcgcttgccgctcataactacagagacgctctcaccaaatccattctcttctttgaacgccagaggtcagggaagctccctcctaaccagagaatgtcttggaggagagactctggcctctctgatggctctgccatgcatgttgattt

SEQ ID NO: 167547 - DNA, 288 bp, Glycine max
ttccctctctatctctatctctctttctctgtctcttttctggttgaagtttgaaagacaaatacaccatggcagatatcctgagtgaagaacagattgttgattttaaagaggcctttggcttgtttgacaaagatggagatggttgcattactgtggaagaacttgccactgtcattcggtcattggatcagaaccccactgaagaagagctccaagatatgataagcgaagtcgatgcagatggcaatggaaccattgaatttgacgagttcttgagcttgatgg

SEQ ID NO: 167548 - DNA, 293 bp, Glycine max
ccaaaagcaatggctaatacaccttcgaattcttcagttctcctctccctttttctatctgcgatcgccctctccctcgctgagtcccaatctttcatcggagtaaactacggccaggtcgccgacaaccttccggcgccggaggacacggccagcctcctcaaatccaccaccatcggaaaactccgtctctacggcgccgatcccgccatcatcaaggccctcgccaactccggcatcggaatcgtcatcggcgcctccaacggcgacattgcgagtctcgccggcgatcc

SEQ ID NO: 167549 - DNA, 290 bp, Glycine max
gctacttaatgcttcggttgcttcgagagagaatcctccaggagctgatgaatttcttcctgtgcttatttatgtaaccataaaggcaaaccctccacaactgcactcaaatctactgtacatacagaggtttagacatcaatctcgattggttgcagaagcagcatattattttacaaacatgctctctgctgagtcattcatctcaaacatcgatgcaaaagccatttcaatggaggaagctgagtttgatggaaacatggaatttgctcgtgctatgctttcgggta

SEQ ID NO: 167550 - DNA, 291 bp, Glycine max
gcaaaggataatgatgcgagcacctcaattatcggatttgggtattggatcatttgtccatgatccagaatcagaggcctacataaagcttaagaataccattctcaagcgcaagtccataaccagtttgtcaggatttttggaagttgctcctcattgtcttgcagcaatatatcctatttgcccgaacttaacatccttgaacttgagctatgcagcaggcattcagggtagtgatctgataaaactgattcgtcactgtgtgaaacttcagcgcttattgataatgga

SEQ ID NO: 167551 - DNA, 292 bp, Glycine max
gacgagcatcatggcctcgagagcagtgctattgttggctatgtgtgtgcttccggccatggttgtggccattcgaccagcaaagaaccctttttgcgtgaagggtcgcgtctactgtgacccttgccgtgctggttttgagacctcagcaaccacctacattgccggtgctgagattatgttgcaatgcaagagcagggttagcaacgaggttgtgtacaccaagaaggggtacactgactcaactggagcatacacaatgtacgtggacgaggctcacgcagatcaaata

SEQ ID NO: 167552 - DNA, 293 bp, Glycine max
cacaaatgatgagattgcagctgatcttaaagaacacgtgattaagcctgtgattcctgagaagtaccttgatgagaagaccattttccatttgaacccttctggcaggtttgtcattggagggccgcatggcgatgctggtctcaccggccgcaagatcatcatcgacacctatggaggatggggtgcacatggtggtggtgccttctctgggaaggatcctaccaaggttgataggagtggtgcctacattgtgaggcaagctgcaaagagcattgttgcaaatggacttg

SEQ ID NO: 167553 - DNA, 295 bp, Glycine max
tagaagagggagtgagagtgttcttcgtttgctaccttctgctcagaaatggttacgttcaggtttcaccagtaccaggtggtcgggagggctctaccaacggaagcagatcagcatccgaagatctaccgaatgaagctctgggccaccaacgaggttcgcgccaagtctaagttctggtattttttgaggaagctgaagaaggtaaagaagagcaatggtcaagttcttgctatcaacgagatttttgagaagaacccaaccaagattaagaactacgggatatggttgcggt

SEQ ID NO: 167554 - DNA, 288 bp, Glycine max
cgaagtttgagaagaagtttgggcaatcatctgttttcatagcttcaacactcttggaagatgggggtgttccaaaagcagcaagttccgcaacactcttgaaagaggccatccatgtaattagttgtggttatgaagataagacagaatgggggaaagaggttgggtggatatatggctcagttacagaagatattttaacaggtttcaagatgcattgtcatggttggagatctgtgtactgcatgccaaaaaggcctgcttttaagggttcagctcctataaatc

SEQ ID NO: 167555 - DNA, 289 bp, Glycine max
gtaaccacgctgatggggaatgcatcagttttaggtcaaagtgggcttgaacacgctagccccctggctactggaggaatattttcaaatggaggtgccgatgtgaacggatgggcatcacgagatcaatcagaaagacccagcttgttacagtcctcatcaacacaaaactggctgagtccacaaggtagctcatctggtattattgttaaaaagacggtcagagtagatattcctgtggacgcatatcctaattttaactttgttggtcgcctcctaggccctagag

SEQ ID NO: 167556 - DNA, 291 bp, Glycine max
ctcgagccgctcatgtgtacgtaacctatcggcatattctggctgcggctatgatgttcccacttgcatactttttggagagaaatgcaagaccaaagctgacatttgctcttttcatggaaatttttgtgatttctctgttaggggttagtgtgactcttaatatgtactttgcaagcctgaactacacaaatccgacctttgttgcttccatggtcaacaccatagcttcccttaccttcatcattgcagtggcactcgggtttgcttaattctttatctgcatgaatt

SEQ ID NO: 167557 - DNA, 284 bp, Glycine max
  unsure (1)..(284): unsure at all n locations
tctcaatcgaacaacacagcacaatccttaaactctctctctctctctctctctcttcaatttcgttgatggcgtcacaagcaagcctcctccttcagaagcagctcaaagatctttgcaagaaccccgtcgatggcttttccgccggtttggtcgacgaaaccaacatttttgaatggagtgtgactataattggacctcccgatactctttatgaggggggatttttcaatgccattatgagctttccacacaactaccaatctaaccancatcagtgaaat

SEQ ID NO: 167558 - DNA, 285 bp, Glycine max
ctattataaccaaacactcttcttcatattcttcttcttcttcttgttcttttctatctgtgacgagcatcatggcctcgagagcagtgctattgttggctatgtgtgtgcttccggccatggttgtggccattcgcccagcaaagaaccctttttgcgtgaagggtcgcgtctactgtgacccttgccgtgctggttttgagacctcagcaaccacctacattgccggtgctgagattatgttgcaatgcaagagcagggttagcaacgaggttgtgtacacca

SEQ ID NO: 167559 - DNA, 287 bp, Glycine max
  unsure (1)..(287): unsure at all n locations
gttctctccacatctccaacactcatataatcacaaanaaaaaaattaaaaaaaatataaaaaataaaaaaaagtttgaacttcttcaacaaaccatggagggacttccccaaggttaccgtcccaacgttggtgtctgtctcatcaactccgatgatcagatttttgtggcttctaggttgaatgtcccaggagcatggcaaatgcctcaggggggaattgaagatggtgaagagcccaaatctgctgccgttagggaacttcgagaagaaactggaatagtgtct

SEQ ID NO: 167560 - DNA, 287 bp, Glycine max
gatataaggaagatgtcttctaatgcaataaatctgggccttggagatgatgagtgggactatcgatggatggactaccctgaatatgcaagaaatttaaagcatcctcatgatcagtcattagcaacatataaaggtcactcagtgttgcgtactttagtgcgctgttatttctctccttcgtatagcactggtcaaaagtacatttacacagggtctagtgattcatctgtttacatatatgacctggtaagtggtgcacaagttgcaaaacttgatcatcatga

SEQ ID NO: 167561 - DNA, 291 bp, Glycine max
cacaaaatgaagagcctcctcttctctctcttcctcttcctcttcttagcctcctccgccgtcgccaccgtccccgcccacaacatcacccgcatgctggccgcacaccccggcttctccaccttcaaccactacctctccgtcacccacctggccgaagagatcaaccgccgccagaccatcaccgtcctggccctcgacaatgccgccatgtcctccctcctcgacaagcacctctccctccccaccatcaaaaacgtcctctccctccacatcctcgtcgactacttc

SEQ ID NO: 167562 - DNA, 281 bp, Glycine max
attgtttgttgttgtaactcgttcttcttcttttgttgttctgtgtttgtgtttgttttttctctcacctgaaaatgtcttgctgcggtggtaactgtggttgcggaagctcctgcaagtgcggcaacggctgcggaggctgcaagatgtacccagagatgagctacactgagtcaaccaccaccgagaccttggtcatgggagtggcacctgttaaggctcaatttgagggtgctgaaatgggtgtgcccgctgagaacgatggctgcaaatgtggacca

SEQ ID NO: 167563 - DNA, 286 bp, Glycine max
agcagcagcagcaagctatggcggaagaaccgaaagttccaccaccttccaatcctacgttgtcgtttgatcctagtcgaacggttggtattatcaagaggaaggccttgatcaaagacttagctgcggtataccatgccgaatgccttgcatactgtcaagagcttttggaacttcaaactaaatgggaagagccatatattgacttaaaaactccagaggaatcaaaaaaggagacagcacgaccctctaaacgtgtaaaaaagttgcgttaggttttcaggtg

SEQ ID NO: 167564 - DNA, 282 bp, Glycine max
attaactctcctgtttcaggaaaagtggtcgatcttaatgagaaacttaccagttctcctgctttggtcaacacaagcccttacaaagatggatggataattaaagtggagatgagtgacagtggtgaactaaacaacctgatggattcagagaagtactccaagttctgtgaagaagaagattccaaccattgatagccttgccaagtgctttcattagtactcttcatgatgttgatcatgttcgactagggaagctaaaaattgcttgatttctcctcc

SEQ ID NO: 167565 - DNA, 288 bp, Glycine max
tgaaatttggcagtacctagctgcaaggaaagagcagtctgcactcagggctgtgattaaatgcattgaagaatacaaacttgaggatgagttccctccagaaaatctgaagaagcgacttgaccagttagagaaggtgaagaccgagaaaaggaaaccagtggcagttcctgccaataagagaactagagcaagcaacggcaatggaggtccaatgccaccagccaaagctgggcgtttgactaatgcgtatgtatcatctttccctgctgctcctacatttgtcag

SEQ ID NO: 167566 - DNA, 288 bp, Glycine max
gatcgatcagagaaagaggggagatggaagttgaagggtcatcgaagaagatgatagcgactcaggaggagatggtggaggccagggttcctctggcctacagggaccagtgcgcccacttgctcatccctctcaacaagtgcaggcaggccgagttctacctcccatggaagtgccaggaccagcgtcactcctacgaaaagtgccagtacgagctcgttatggagagaatgctccagatgcaaaagatccgcgagcaccaacaaaaccccaacgccaaacaacccc

SEQ ID NO: 167567 - DNA, 289 bp, Glycine max
ggaatgtattgttggtaacgattgagggtgcagatgcacgtcttgtcagcattgatgtcttgcacttggttttttcagcctttggatttgtgcataagattactactttcgagaagacagcaggatttcaggcactggtgcaattctcagatgcagagactgccacctctgcgaaggatgctttggatggaagaagcatacctaggtatctgctgcctgagcatatgggaccatgtacccttaggatcacttattctggacattcagatttaagtgtaaagtttcaaag

SEQ ID NO: 167568 - DNA, 271 bp, Glycine max
gtttctcttgctctcactctgtctgcttcatcactttctctcgtgtcaatcgagaaaaatcatgggcagaaaattcttcgtcggtggcaactggaaatgcaatgggaccactgaagaggtgatgaagattgtgactactttagatgaagctaaagtccctggagaagatgtagtagaagttgttgtgagccctccttttgtgttccttccttcagtaaaaagtttgctgcgccctgatttccatgtctcggcccaaaattgttgggttcgc

SEQ ID NO: 167569 - DNA, 310 bp, Glycine max
tccgtattccgctcattctgctcgcgcggattgcgccgataattgggttgattgaggaaggtctcaaggttgagcagaagagaaccaagcgccaagagtgtggcggttcgcacggttatgacaatgcggttttctccatgaggactatttttattggacatggtcctcgatttgctagagggaggaagataccgtcgtttgagaatgttgagatttataatttgattacttctattctcaagataaagggagcacctaataatggctctgcctcatttgctgagtccgttctactatctgctgcataagc

SEQ ID NO: 167570 - DNA, 287 bp, Glycine max
cctcgagccgattcggctcgaggtttgttgttgtaactcgttcttctccttttgttgttctgtgcctgtgtttgtcttttctctcacctgaaaatgtcttgctgcggtggtaactgtggttgcggaagctcctgcaagtgcggcaacggctgcggaggctgcaagatgtacccagacttgagctacactgagtcaaccaccaccgagaccttggtcatgggagtggcacctgttaaggctcaatttgagggtgctgaaatgggtgtgcccgctgagaacgatggctg

SEQ ID NO: 167571 - DNA, 287 bp, Glycine max
cgagactcgcgtcaatgcccaggccgatgcctacgagtacatggtcgattattcccagaccaacaaacaggctgggcggttggagaatgttgtgggatggtatcactctcatcctggttacggttgctggctgtcggggatcgatgtttcgacgcagatgctgaatcagcagtttcaagagccgtttctagcggttgtgattgacccgacgaggactgtttcggcggggaaggttgagattggggctttcaggacttatcctgaagggtataagcctccggatgagc

SEQ ID NO: 167572 - DNA, 285 bp, Glycine max
gcattttccagattggtatcagattgcatgatgggtacccggctgaaccccccaagatgcagtctacaaccaaagtttagcagactactattagcggccaaagtggagctatctgcctgggtatctttcgggaccactggagcacagcattcactctgaagactgcacttctttctgtggacgcacttctctctgctcctcagcctgatgatcctcaagctgccgtggtggcacagcagtatctggaagactatcagacatttgtgatcactgctcgctagtgga

SEQ ID NO: 167573 - DNA, 140 bp, Glycine max
gttgaaagtagcaaagatgtttcctttcgggcaaaagggtcaaaagataaaggggactatggtggttatgcagaagaatgtgttggatatcaacagcatcaccagtgttggagggatcgttgaccaaggcttaggcttca

SEQ ID NO: 167574 - DNA, 279 bp, Glycine max
gtgaaaagtgaaaagtgaaaatggacttggaagcagtgaagaggtacttagagaaaggaggagaaacagcatcggcggtggatgggttgcctccgaggtttctggaaccgttaataatgaacgctcttaaggtcgatctcatcgaaactggtcgcgttgtctgctccatgaagatacctccgcgtttactcaatgctgggaattcgttacacggtggcgccatcgctgctctggtcgacgtggtggggtccgctgcgattcccaccgttggatattcgg

SEQ ID NO: 167575 - DNA, 277 bp, Glycine max
gctctctaattacatttctaatctcattctccttctgttcaaacactctcatggcatcagataagaagattaggatcggcatcaacggatttggaaggattggccgtttggtggccagggttgcccttcaaaggaatgatgttgaacttgttgctgtcaacgatcctttcatcaccactgattacatgacatacatgttcaagtacgacaccgttcatggccagtggaagcattttgatgtgaaggtgaaggactctaagacccttctctttggtga

SEQ ID NO: 167576 - DNA, 278 bp, Glycine max
cacgcagtcgcagtgagtgaaaaggaaaaccctaattgcggtattctcagtgccttcgagagaaagaaaaaatggcagataatcttgttctccgtggcaccatgcgcgcccacaccgacgttgtgacggcgattgccactcccatcgacaactccgacatgatcgtcaccgcctcacgcgacaaatccatcatcctctggcatcttaccaaggaggacaagacttacggtgtcccccgccgccgcctcaccggccattctcattttgtccaggacgtc

SEQ ID NO: 167577 - DNA, 276 bp, Glycine max
ctcagaaggaacgctagctatatgcttaacacatgcaagtcgaacgttgttttcggggagctgggcagaaggaaaagaggctcctagcgtgaaggttgcttgtctcgcccaggaggtgggaacagttgaaaacaaagtggcgaacgggtgcgtaatgcgtgggaatctgccgaacagttcgggccaaatcctgaagaaagctaaaaagcgctgtttgatgagcctgcgtagtattaggtagttggtcaggtaaaggctgaccaagccaatgatgct

SEQ ID NO: 167578 - DNA, 277 bp, Glycine max
gacggatccagatctgcgacgaacggggtgctgcctctggcgcgcaaggtggcattgattaccggaattaccggccaagacggttcgtacctgacggaattccttctagacaagggttacgaggtgcacggtctgatccgtcgctcctcgaacttcaacacgcagcgcatcgaccacatctatgtggatccccacaacgcccacaaggcccgcatgtagctccactacgccgatctctccgacgcctcctccctccgccgctggctcgacaccatcc

SEQ ID NO: 167579 - DNA, 276 bp, Glycine max
atttgaggttaaataataacagccttacaggatcctgccctcagtctcttagcaacattgaaggtctaacccttgtggacctctcctacaacaatctgagtggttccctgccaagaatatcagcaagaactttaaagattgtgggtaactctttaatttgtggcccaaaagcaaacaactgttctactattttaccagagccactttccttccctccagatgcactgagaggccaatcagactctggtaaaaaaagccatcatgtggcacttgctt

SEQ ID NO: 167580 - DNA, 273 bp, Glycine max
ctcgagcgcgccgtcgggaaacggggtggccctccgtttgcgacggttgggacgcgaccacgtggcgaacgcgcagtcctttaacagggaactggtgaagcacctggcgacgacggaagggaacgccgttgatgccaaaccgaagcttcgagacttacatcttcgcgctcttcaatgagaaccaaaagcccggcccaatagccgaacgcaactggggcctcttccaacctgatttcactcccgtctacgactccggaatcctccgcaacggac

SEQ ID NO: 167581 - DNA, 279 bp, Glycine max
ctgatccatacagttcgtactcacaagggtgcagatgacaaatcatatggttgtgtcttccaagaagaagatgagaagaaaacaattggtgtggcactctcaaaggacttaatggctgttgcaggagaagccctcaagaccaacatcacaacacttggcccattagtccttcccatgtcagagcagcttcttttttttgcaactttggtggctagaaaagtgtttaagatgaaaataaagccatacatccctgactttaagctagcttttgagcacttt

SEQ ID NO: 167582 - DNA, 278 bp, Glycine max
gtctgttttccttgtttcccctattattatctcgctctcacaaaatcatggcattctctagtgctttgattctgtggtcgttgctagcaatcaacatggccctgccaaccctcgcaaccgtctacaccgtgggagatacttcaggttgggcaattggtactgattatagcacttggactggcgacaagatcttttcagtgggtgatagtctcgcgttcaactatggagctgggcacacagtggatgaagttaaagagagcgattacaagtcgtgcacc

SEQ ID NO: 167583 - DNA, 282 bp, Glycine max
ctcgagccgctcgagccgctcgagccgattcggctcgaggagagagagagagagagagacagagaatgaccagggtgggctatacgcggtgcatggtggcgctggtgtcgaccctaatctcccactcgagcgccaagaagaagcgaaacaacttctcacgcgctgtctcaatcttggaatctctgctctaaattctaatcttcccgccatagatgtcgtcgaacttgtggtgagggaattggaaacggatccgctgttcaattcgggccgtggatctgccct

SEQ ID NO: 167584 - DNA, 274 bp, Glycine max
atttttccgattcggcagtttgatctatgctatgatttatcattcatggacgttgataagatccttccatctagcagcaccttaggatggcatagccttaaagttaagggcgaggttcaaacgaagaaaggcttatggtggatacctaggcacccagagacgaggaagggcgtagtaagcgacgaaatgcttcggggagttgaaaataagcgtagatccggggattcccgatataggtcaacctttcgaactgctgctgaatccacgggcaggc

SEQ ID NO: 167585 - DNA, 273 bp, Glycine max
agattttgatgtctacatcatggaaacatccagccatcaaatgaagtctgaactggaccagtatctggaagaatcactgttgccacgtgttccggactttgatgtattgggttggtggaagctaaacaaactcaagtaccctactctttccaagatggctcgggatatattgtctgttccggtttcaagtgttcctcctgaatctgtctttgatacaaaagtcaaagagatggatcagtatagaagttccttgcggccagagacagtagaggc

SEQ ID NO: 167586 - DNA, 276 bp, Glycine max
ctcaaacccatttccttgatatcttagttatctaattacctcaattaatcccttaattgcaagcatcatggctgaggagaagcaccaccaccactttcaccaccacaagggcgatgatgtgcctggcgaggttgattataagaaggaggagaagcaccacaagcatcttgagcaccttggggaacttggtgctgcagctgccggtgcttatgccttgcatgagaagcatgaggccaagaaagacccagagcatgctcacaggcacaaggtagaaga

SEQ ID NO: 167587 - DNA, 277 bp, Glycine max
gctctggctctctccattaggaagcaccacattcaatactcacgaaagaatcacaaaacaactcaggagatggcaagttcagttgtggttgctaatgggaacttgaatccaaatgatacaaggggaaagaccattacatgcaaagctgccgtggcatatggtcctggagagccctttgtggtggaacgtatccttgtccatcctcctcagaaaatcgaggttcgaatcaagatcctcttcaccacaatctgtcacacggatctcacggcttggcaag

SEQ ID NO: 167588 - DNA, 275 bp, Glycine max
attctttctctcttctctctctgtccgaagatggcttcacgcaggttcgtatcttctctgattcgatcctcccttcgtagatctcaatcgaaaccctcgatttccgcatccgcatcgaggctcacgtcatccaaccgtgcctctccgcacggttacttgctgaaccgcgtcgccgaatacgctaccgcggcggcggctgctaccgctcctccctctgctccgcctccgggcaagaaggaggttagcggcggcgggaagatcaccgatgagttcac

SEQ ID NO: 167589 - DNA, 274 bp, Glycine max
ctcaaacccatttccttgatatcttagttatctaattacctcaattaatcccttaattgcaagcatcatggctgaggagaagcaccaccaccactttcaccaccacaagggcgatgatgtgcctggcgaggttgattataagaaggaggagaagcaccacaagcatcttgagcaccttggggaacttggtgctgcagctgccggtgcttatgccttgcatgagaagcatgaggccaagaaagacccagagcatgctcacaggcacaaggtagaa

SEQ ID NO: 167590 - DNA, 271 bp, Glycine max
cctcaaagcaacacaagaacactctcttgaacattcatggatccagtgagcgtgtggggtaacacgcccttggcgacggtggatcccgagatccatgacctcatcgagaaggagaagcaccgccaatgccgcggcatcgagctcatcgcctccgagaacttcacctccttcgcagtcatcgaggccctcggcagcgccctcaccaacaaatactccgagggcatgcccggcaaccgctactacggcggcaacgaattcatcgaccagatcg

SEQ ID NO: 167591 - DNA, 279 bp, Glycine max
atgttctcaagctgagggaggaaaagcttgggatagcaaatcctgattttgacgatgagaagcgtcgtctggcagagcttctgaaagaagcaggcaagacacggcgacagaaaagcaaaatctctggaaaaccttattgatcctggctcaaagcggacgaagaaggagggggcaaagaggtggcctggtttggggtttagaatttaaccatagttttattcatttaaatatatatattgaatgcacattctgtaacataggatatcttgtatagggttg

SEQ ID NO: 167592 - DNA, 279 bp, Glycine max
tgcctctagggttatcatatctccatttccatttcctctctctcagtttccaagaatcttaagctatgggaaagtcttacccaaccgtgagcgctgattaccagaaggccgttgagaaggcgaagaagaagctcagaggcttcatcgctgagaagagatgcgctcctctaatgctccgtttggcatggcactctgctggaacttacgacgtgagctcgaagaccggtggtcccttcggaaccataaagcacccctccgaactcgctcacggcgctaaca

SEQ ID NO: 167593 - DNA, 277 bp, Glycine max
cgaacatcagtgcaagtcacgccactgtgtggagtgtacaatgagaaccctctctcgtatttggtctccattgatggcttcaacttcctcgtcgactgtggctggaacgaccacttcgacccttcccaccttcaacccctcgccagggtagcatcaaccatagatgctgttttgctttcacatgcggatacacttcaccttggtgcccttccatatgccatgaagcggcttggactttctgccccggtttattcaacggagcctgtctacagattgg

SEQ ID NO: 167594 - DNA, 269 bp, Glycine max
ctcgagccgaatcggctgagaattagtgttcatgaatatgtcacagccttactttagtggctctaaattgaaaagcttactagctggtcataatatcaccattactgatggtattgacaaaactagtgcaactttgcaatttagaaagttagcagattgcgattttctcaagagaaactttaagcagatgtctaatgttttgtgggtggctcctgaggacaaggcgagtttatggtcacaacttcattatgtttcgtgtaataatctgg

SEQ ID NO: 167595 - DNA, 279 bp, Glycine max
acctcgagcgattcggctcgaggaatcaatctctccctttcaccacttctccatagcctacacacttttcttctttctctgacttcatctatctactctcacttctcttcacacactgagacacagagagagagagagaacaaaaaaagaaagggagtgatgggtgtgagactcagtgttttctttttataatgaacaaagtactacacatcctcttcttcactgaagaagatggcaattcagcaccacaatgaacaactagagcataatgaaaatgtc

SEQ ID NO: 167596 - DNA, 273 bp, Glycine max
caagctagctattagttcgattttgtagtaagtgaggtgccaatatggtgaagatagctcttggtactttggatgactcttttagcgctgcctctcttaaggcttatttcgcagagttccacgcaactctgattttcgtgttcgctggtgttggatcagccatcgcttactacgaggttacataagatgcagccttggatccaacggggcttgtggcagtagctgtcgcacatgcatctgcactgcatcgaggtgtctccgtcgccgccaaca

SEQ ID NO: 167597 - DNA, 275 bp, Glycine max
catttctccatttccattttctctctcacttttcaagaatcgtaagctatgggaaagtcttacccaactgtgagtgctgattaccagaaggccgttgagaaggcgaagaagaagctcagaggcttcatcgctgagaagagatgcgctcctctaatgctccgtttggcatggcactctgctggaacctttgacaagggcacgaagaccggtggacccttcggaaccatcaagcaccctgccgaactggctcacagcgctaacaacggtcttgacat

SEQ ID NO: 167598 - DNA, 270 bp, Glycine max
cccagttcaaaggtaaggtaggttaacactcttcttcatcgtcgtcgcaatgggacgtgtgatccgtgcgcacgtaagggagcaggctcggtcttcaagtcccacacgcaccaccgcaagggccctgctcgcttccggagcctggacttcggggagcgcaacggctacctcaagggcgtggtcaccgacgtcatccatgaccctggccgcggcgcgccgctcgccaaggtcgccttccgccaccctttcagatacaagaagcagaacgag

SEQ ID NO: 167599 - DNA, 271 bp, Glycine max
gtaactatgaaacatattcattatgaagatgagactagtcgatacataaccattggttgtgtggaaaaggttttatgtatgcttgcttgttgggtggaagatccaaacggagatgctttcaagaagcatcttgcaagggtcccagattacttatgggtttctgaagatggaatgaccatgcagagttttggtagccaagaatgggatgctggctttgctgttcaagctttgcttgccactaacataattgaagaaattggtcctacgtttg

SEQ ID NO: 167600 - DNA, 270 bp, Glycine max
gtttcttcctttctctgctctttgtcttctctgacacatttggggccttgttgagtgtgtttttgcaagagggtatggcgaaggacgttgaggttgctgagcgtggctccttctctgggaaggactaccaggaccctccaccagcaccactcattgatgctgaggagctcacaaagtggtccttttacagggctcttattgctgagttcattgccactttgctcttcctctacattactgtgctcacagttatagggtacaagcaccaga

SEQ ID NO: 167601 - DNA, 275 bp, Glycine max
gttcgttatgcacttctcccgtatttctacacattattcagggaggctaacactacaggtgttcctgtggtccgtccattgtggatggaattcccatctgatgaagctacttttagcaatgacgaaactttcatggttgggagcagtattttagttcaagggatctatacagagcgagctaagcatgcatcagtctatttgcctggaaaacaatcctggtatgacctaagaactggagctgtgtacaagggaggggtgacacacaagttggaggt

SEQ ID NO: 167602 - DNA, 288 bp, Glycine max
gctggtcgacggctcaacttctgctcttccaactcctacaacgcttttctctgcactcatgggcaaggtcaagatcggaatcaacggatttggaagaattggccgtttggttgccagagtcgctctgcaaagagacgatgttgaactcgttgccgttaacgaccctttcattaccaccgattacatgacatacatgtttaaatacgacagtgttcacggacactggaagcatcacgatgtcaccgttaaggacgagaagacccttctcttcggtgacaaggcagtcac

SEQ ID NO: 167603 - DNA, 275 bp, Glycine max
ggaatatgcaaagactgaactgcagttgggaagcttccccacaatactactcttccccaaacactcttctcaaccaattaagtacccttcggaaaagagagatgttgattcattgacggcattcgtgaatgctttacggtgatggttaattgagtatcttgctcaatgttccgtcgtacaataccggcaataaatttcttcacagttttggcaattcactgaaaatgggaatggcagttttgacagcaaaacgaagattctcagctagaagtatc

SEQ ID NO: 167604 - DNA, 273 bp, Glycine max
attttgttcctcacccagtcaccaaccccgttgtccggagccaccattttgcgctccggcaatgttcttcccggtggccatcgtcccttaaacccaccacacttcaaagtcatgggtattccatgggacgacgtcgttgtgatccagcaagggaaggatcacaatgagccctgcatcgtcaccgtcaattgccccgacaaggctggtctcggctgtgatctttgcagaatcatcctcgagttcggtctccgcattacccgtgctgatatttcc

SEQ ID NO: 167605 - DNA, 274 bp, Glycine max
gcgaagagatggccaccgttccagggcagctcgtgtgggagatcgtcaagaaaaacaattccttcttggtcaagcagtttggaaggggcacccagagcgtcgaattcagcagagagagcaacaatctctacaacctcaattcgttcaagtactctggtttggcaaacaagaaaactgttactgttcagcctgagggcaaagatcaggctgtgttgttggctacaaccaagacaaagaagcaaaacaagcccgctgcattgctccacaaatctgt

SEQ ID NO: 167606 - DNA, 274 bp, Glycine max
gaggaaagaaagatgttttttaacggatatgggtatcaagggacatcatcatttgagcagacatttcgatgttactctgcttcgtttattgaaaagcccgaaattgaaaatggtgataaaattataatgcctccttcagtccttgaccgtctagcatttctacgtatggattatccaatgatgtttgaactcagaaatggtgcttctgagagggtttctcattgtggggttctggagttcattgcagatgaaggaactatatatatgccatact

SEQ ID NO: 167607 - DNA, 272 bp, Glycine max
tggagacttaattaaaagccctttgtcacggcccctatttattgctgctgaatctgggatacctgagattgtaattgagcttctttactcatatccagatctactttggaaagttgacggccaaaatagaagtctttttcacattgcaatcatgcatcgtcaggagaaaatatttaacctgatttatgacataggggcacacaaggatctgataacttcatacagagataataacaatcacaatatactgcatttggctggaaaattggccc

SEQ ID NO: 167608 - DNA, 270 bp, Glycine max
tgtgaatcttcttatgtcttcaaaaggtgttgttttacgctgtgatgttacggggaaggttcttatgaagtgctttctttctggaatgcctgatttgaagttgggtttgaatgacaagattggccttgagaaagagtcacaacttaaatctcgtcctactaaaagtggtaaaactattgagcttgatgatgtcactttccatcaatgtgtaaatttgacaaggttcaactcagagaagacagttagttttgtgccacctgatggtgaatt

SEQ ID NO: 167609 - DNA, 272 bp, Glycine max
gaccatccaaacgaagcagaaagagctcatagaagttctcgtcctcttctctctatcttgaatcttcttctcttatcagaaacgcgcgttgctcggataaggttgtgctgcgccgactcactggtactttgcttaatatggcggctgagaagtcaaacattgcaaaagatgtgactgaattaattggcaaaactccattggtatatctcaaccacatcgtggatggttgtgttgccaaagttgctgccaagcttgaaatgatggaaccttgc

SEQ ID NO: 167610 - DNA, 274 bp, Glycine max
aaaccttgcagattgtgcagtggttgtggaagagctatggtggaaggcattagactttgcagctctcaaacggagttctgtgtcattctttgatgttgaaaaaccagaaaccgccgcgtcacggtgggcaagggcaaggacaagagtagctaaggtcggcaaaggtttatccaaagatgaccaagcacaaaaactagccctgcaacattggcttgaagctattgacccacgtcatcgttatggacacaatttgcacatgtattatgatatttgg

SEQ ID NO: 167611 - DNA, 283 bp, Glycine max
ctttttactctctctctgtctctctctacgctttctcgttcgagatccctcaagggatccactaactgaaggagaaatggggttgacattcaccaagcttttcagccggctgctcgccaagaaggaaatgcgaattctgatggtgggtctcgatgcagctggtaagaccaccatcctgtacaagctcaaacttggagagatcgttaccacaattcccaccattgggttcaatgtggagactgtggaatacaagaacattagtttcactgtctgggatgttggt

SEQ ID NO: 167612 - DNA, 280 bp, Glycine max
tacgatatcaagaattatgtcgggtgcataatgctgctttaagagcccaaccagcactagttcaaaatgagcaaaagttgttggaaaagatcaacattctgtgtctgatggagattatattcagtcggccttcggaagatcgaactattcccttgagtgtaattgcagagcgcacaaaactttctatagagaatgtggagcatctccttatgaaaagcctatctgttcatctaattgagggtataattgatcaagttgagggcacagtgcatgtttcctg

SEQ ID NO: 167613 - DNA, 276 bp, Glycine max
gcttaaaggagttaaagagtaaaagcaccgtctccgtctccactctcggcttcttcttcgttgcgctttttcccaaaaccaattgcatcactctcgtccgttaccgccgctgccctagaccaccgcaagcgacgtcgcacaccgccttcatccgttagggcaaaaatgagtcgaggaagtggaggtggatacgatcgtcacatcactattttctcccctgaaggacgtctctttcaagtggagtatgctttcaaggctgtgaaggctgcaggaatc

SEQ ID NO: 167614 - DNA, 271 bp, Glycine max
acctcgagcgattcggctgagataaaaacgtccgtctctttgtacttgttgtttcagatctgatctgaatgtgattgatgatgggtgctattccagaggccaacggaaatgtcgccgacgaagaaaacgggagcagcgttggtggatccatcgatttcggcacggcggaggccgttcaatacgtccgttccctcaccgacgttggcgccatgacgcgcctccttcacgaatgcatcgctcaccagagagcggtggacgttgaactcgacga

SEQ ID NO: 167615 - DNA, 269 bp, Glycine max
ctcagaaggaacgctagctatatgcttaacacatgcaagtcgaacgttgttttcggggagctgggcagaaggaaaagaggctcctagcgtgaaggttgcttgtctcgcccaggaggtgggaacagttgaaaacaaagtggcgaacgggtgcgtaatgcgtgggaatctgccgaacagttcgggccaaatcctgaagaaagctaaaaagcgctgtttgatgagcctgcgtagtattaggtagttggtcaggtaaaggctgaccaagccaa

SEQ ID NO: 167616 - DNA, 269 bp, Glycine max
tctttggctattagcaaacactctcatatttggttgttctagttctcactaccatgtcaacccacattgaaagcctgtgggtgttggccttagcctcaaaatgcattcaagagaacattgcatggtcactcttgatcatcatggtcactctctggctcaccatgaccttcttctactggtctcaccctggtggtcctgcttggggcaaatactactactttaattactggaaaaaacacacctcaaccagcactaacatcaaccttaaa

SEQ ID NO: 167617 - DNA, 270 bp, Glycine max
tctctctctctctctctctcacacacacacacaccaaacactctcaagttttctctcagtggttgcagatttggtactttagggtattgttgaaggagagagtgtaaatgaataaaccaacaagcgacgcaattaatatggggaaaaggagcctggagggtggagaagatgatcagcccgaacgaaagaggcctgctcttgccagtgtaattgtggaagctctcaaggtggacagtttgcagaagctttgctcatctttagaacccattc

SEQ ID NO: 167618 - DNA, 275 bp, Glycine max
cctcgagccgaatcggctcgaggcattgtagaaggcgatggccgaccgactctgttgaccaccaaaaaccctagccaccgacgctccgaacgacgcgaacccataatcggagttggcataacagcagcggctactcattcacgcgggttgcacgtgtacacgctacccgatctggattacgactatggcgcactggagccagccatcagcggcgacatcatgcagctgcaccaccagaagcaccaccagacttacatcaccaactacaacaaggc

SEQ ID NO: 167619 - DNA, 274 bp, Glycine max
ctgaagatgatgatgattctagtgatgatggtgattctaatgatgatggtcctgtggagtgggcttcatattggaaaccaaatataacaataaacttggttgctgacttcactcagtacccaaagacaggtgtagcaccaaacattgctccttacttgaatgtcgatcctcttactgggaactactatccaattgtttatttcaatgagttctggttactcagggataagctgatacctttaaacgagacagtgactgaattatcacttaacct

SEQ ID NO: 167620 - DNA, 278 bp, Glycine max
acccagcaatgaaggccttgctggcggagaatgcggcggatggtacgcggtggtggctcggcgccacctgcgggtccgggagcgggtccgggtgtgcctggtgctggtggagacactagcggaagggactggtgaggttgcaggagaagaagcaggtgtaggtgcagctgttggtgttggcgttggtgttgttgctggtggtgatgttgctggtggaggagttgctgctgctggtggtggtgttgctggtggtggtgttgctggcggggtgggtgctg

SEQ ID NO: 167621 - DNA, 273 bp, Glycine max
gtggtttcagtgagtgatcggtgttcacttgatccttcataagtcgtcatcatcatcatcatcatcaccgttgattgaagaagatgccgatcagaaacatcgccatcggaaggcctgaagaggctactcaccccgacacgttgaaggcggggttggctgagttcatctccaccttgatcttcgtgttcgccggttcaggttccggcatcgcctacaacaagctcaccgacaacggcgccgccactcccgccggcctcatctccgcttccatcg

SEQ ID NO: 167622 - DNA, 272 bp, Glycine max
gagagagagagagagaggcacttggaatccaaaaatgagagagatcatcagcattcacataggtcaggccgggatccaggttggcaactcctgctgggaactctactgcctggaacatggcatccagcccgatggcatgatgccaagtgactcctccttcggtgtagcccacgacgccttcaacaccttcttcagcgaaaccggatccggcaagcacgtcgctcgcgccgtcttcgtcgatctcgagcccaccgtcatcgacgaatccgttg

SEQ ID NO: 167623 - DNA, 270 bp, Glycine max
gagatatcaatatattatgataatggagggatacaataagaaggttatgattgtggggatggtgttgggcatggccatgattgggatggccaatggccaatactcgttttgtcgcatgcccagcgatgggttggcggcatgcaagccgagtgtgagtggggactatcctgctgatccctccactgcttgttgctcagccattgccaaggctgatcttaaatgcttctgccgcttcaaggattcgggccttctctctatgtatggtgttga

SEQ ID NO: 167624 - DNA, 272 bp, Glycine max
actcgagccgaatcggctcgagcaaactcagggtagggcagagagcgagagagagagagaacgagagagagagaatgggagcgtgggctatcgcggtgcattgtggcgcttgtgtcgaccctaatctcacactcgagcgccaagaagaagcgaaacaacttctcacgcgctgtctcaatcttggaatctctgctctaaattctaatcttcgcgacatatatgtcgtcgaacttgtggtgagggaattagacacggatccgctgttcaattcg

SEQ ID NO: 167625 - DNA, 268 bp, Glycine max
ctcaaagcaacacaagaacactctcttgaacattcatggatccagtgagcgtgtggggtaacacgcccttggcgacggtggatcccgagatccatgacctcatcgagaaggagaagcaccgccaatgccgcggcatcgagctcatcgcctccgagaacttcacctcctacgcagtcatcgaggccctcggcagcgtcctcaccaacaaatactccgagggcatgtcggtcatcggtactacggcggcaacgaattcatcgaccagatc

SEQ ID NO: 167626 - DNA, 269 bp, Glycine max
gaaaacaacgcgatcaggggaactcctacttctaccaaagtcgtacaattttgaacaaagcacgggagcttgctgcaaagaaagatattaatgcgattgaggaactggcacaaactgaggttgagaaagctatgtcactctggaacagtgacaaatcctttagggatgactatgagaaaagacttttgccatcactggacatgcgacaattatgtagggatggacggatgaggaacccagatgaaaagccactgctggaagaaccgaaa

SEQ ID NO: 167627 - DNA, 271 bp, Glycine max
ctttctcgagagaagcgtccaggctatgatcacgacaggacagccggggccatgaatgccttggctcgagcctcagctataatgtctaatggtccttctatactcaatcttgactgtgaccactatatctacaactcaaaggcaatgagggaaggcatgtgctttatgatggatcgtggaggtgaccgcctttgttatgtccagttcccccagaggtttgaaggaattgatccctctgatagatatgctaaccataatactgtcttctttg

SEQ ID NO: 167628 - DNA, 276 bp, Glycine max
aaaggagcataaggagaagaaattgaacagtccttggagagacaggccaatttcagagtcattgaagctctttgaggatatgaaaaatggcagtatagaagaaggaaaagccacacttagaatgaagcaagacatgcagagtgataactacaatatgtatgaccttattgcatatagaattaagtttaccccacaccctcatgctggagacaaatggtgtatctatccaagttatgattatgcacattgcattgtggattctctagagaatatcac

SEQ ID NO: 167629 - DNA, 142 bp, Glycine max
gtgaccccagatgagcttgatgaggaatttgacacattccccagctcaaagagccctgacattctacgttggaggtacgaccggttaagaactgtggctgggaggattcagagtgttgtaggagatttagctactcaaggag

SEQ ID NO: 167630 - DNA, 283 bp, Glycine max
agctgacaccttgaatatgaaccttgattacgctttatttgaatccaaaactgtaaccgttaaggatccggtttcgggtttggtttacactaacctgtttgaccaaatggtggacgcggtttattttgcgatgaagagattaggttttccgggtgttcggatctttatcgcggaaacgggttggcccaatggaggcgacttggaccagattggagcaaatacttacaacgctgccacttacaaccgacacttcataaagaaagtcactaaaaaaccgcgggtg

SEQ ID NO: 167631 - DNA, 282 bp, Glycine max
gcaattttcattgaaaagaaaagaagcaccgagcgaagccagccaggttgtcttccgattccttcgtgcgtgcgattcttctgatattccaaggcgacgcaccgacaccggacccatctccggcgacatctcaccgatctccggcgaatccccggtccccactttcttccctcgaaatgaatcccgagtatgattatctgttcaagctccttcttattggagactctggtgttggtaaatcatgccttcttctgagatttgctgatgattcgtacatcgaga

SEQ ID NO: 167632 - DNA, 279 bp, Glycine max
ctcgagccgtggttgtggctgtaaaacgtgcaaagaaggaacatcttgatagtttgagaacagaattcagcagtgaaattgaacttttggccaaaattgatcatcgaaacctggtgaagctactaggttatattgacaaaggaaatgaacgccttcttattacagagtttgtgccaaatggtacccttagagaacatttggatggtatgcgtggaaaaatcctagacttcaatcaacgcctcgaaattgcaattgatgttgctcatggcttgacctatc

SEQ ID NO: 167633 - DNA, 276 bp, Glycine max
cttgggtatttccatgtggtgaacaatgattatactcactgggacatgtatgccattggtggaagtgccaatccaaccatcaactgccaaggcaacagatttgttgcacccgatgacagattcagcaaagaggtgacaaaacgtgaagataccccagagagtgagtggcaggattggaattggaggtcagaaggggacttgttagtaaacggtgcctttttcacagcatcgggtgctggagcctcctctagctatgcaagggcttctagcttaagt

SEQ ID NO: 167634 - DNA, 279 bp, Glycine max
ggctagggttagtgctttgtttcactctttgctcttgatttcttcccttgtattggcttctcaaatccatgtttcctctgggaaactagtccctggactatcatggaattactatttgttgacatgtcccaagcttgagaggattataaggaagcatcttgaggatgtcttcgagaaggacagtggagtagctcctggcatacttcgactcttcttccatgactgctttcctaatggatgcgatgcgtctatattgttgaatggagacggtgacgagaa

SEQ ID NO: 167635 - DNA, 278 bp, Glycine max
ggtagtttctgaaaccacgaagggtggtggcctacgtggaaaattgaataaggtggtgctggcttatagtggtggcttagacacatcagtcattgttccatggctgagagagaattatggttgtgaagttgtttgcttcactgctgatgttggccaaggcataaaagaattggatggtttagaagcaaaagccaaagccagtggggcttgtcaattagtggtaaaggacttgaaggaggaatttgttagagagtacatatttccttgcctgcgtgctg

SEQ ID NO: 167636 - DNA, 280 bp, Glycine max
cattccttgaggcatggggggattatcttagtgatgaaaaatgctttgaagatgctgcggcaatttatatgtcctgtttcaatctggataaggctctgaagtcttatcgtgctattaataactggagtggggtgcttacggttgctgggttccttaatttgggaaaggatgagctactacatcttgccagtgagctctgtgaagaacttcaagcactaggtaaacctggggaggctgccaaaattgccctggagtactgtggagatgttaacaccggtgt

SEQ ID NO: 167637 - DNA, 276 bp, Glycine max
cattcacgataaatcatgttctagtttttatcgaggaataaaggcaagctctatttggagtcaagtgaaacatctatcttcctgtccaagttctttgaataaaagtctgaatgtgtcatctctgcactacaatatttgtgattctgaccaagttggttctatttgtttgatggccatcttgcacgtcctgatcttattgtgttcaagtgacagacaaatcagaacagggaagagagatttgaaatgtacatgccaagtgaaagtgaaaagtacagt

SEQ ID NO: 167638 - DNA, 274 bp, Glycine max
ttcggccgatcgatccgggaagaagacattgtcaggtggggagtttggctggggcggcacatctgttaaaagataaccaggtgtcctaagatgagctcaacgagaacagaaatctcgtctggaacaaaagggtaaaagctcgtttgattctgatttccagtacgaatacgaacagtgaaagcgtggcctatcgatcctttagtccttcggaatttgaagctagaggtgtcagaaaagttaccacagggataactggcttgtggcagccaagcgt

SEQ ID NO: 167639 - DNA, 277 bp, Glycine max
cgcggaataacgaagcctcctcgttcttcttcttccgccctttctctctctagaaccgtacggtcgtttctttctctctcctcaaccggagacagcgtcgccttcttttctgaatctcgcggtgttgttagttctgcggcggttgtagttccggcggcgatgggacagcaatcgttgatctacagcttcgtcgctcgcggcaccgtgatcctagcggagtacaccgagttcaccggaaacttcaccagcgtggcggcgcagtgcctccagaaactcc

SEQ ID NO: 167640 - DNA, 274 bp, Glycine max
gtgggctctcagttcttcacgctcacgcgccgccacgcgctcgtcgtcgttaaggacaggacactttggaggaaattcaagatcccgtgttaccgtgacgatgagtgttaccccgaggagcattattttcctaccctgttgtccatggcggatcctgatggatgcaccaaatacacgctcacgagtgttaactggaccggcaccgtcaacggccatccttagacttaccggccgacggaaatctcgccggaactcattctccggctccggaagt

SEQ ID NO: 167641 - DNA, 280 bp, Glycine max
ctccggacttaattacgtcattttgttagggtcaccgtttcgagatattctaaacttgtactgaaaaatatggagggaaaagaagaggacgtaagacttggagccaacaggtacggagagaggcagccaatagggaccgctgctcaggctaaagactacagagagccaccgtcggcgcctctcttcgaaccgggagagttgtcatcgtggtctttctatagggctggcatagcagagtttgtggccactttcttgttcctctacatcacagtgctgactg

SEQ ID NO: 167642 - DNA, 278 bp, Glycine max
caatgtcattgtggaaattgccactatcctctccccggaagagcttttggcggttagacgcgcctatctcaaccgctacaagccctccttggaagaagatgttgcagctcatacctctggccatctacgccagcttttagtggggttggtgaccgcattcaggcatgttggtgatgagatcaatccaaaattggcacaatctgaggctgaaattcttcatgatgctgtaaaagagaagaagggtagctatgaagagaccattagggtcttgactacaa

SEQ ID NO: 167643 - DNA, 278 bp, Glycine max
tagcagtagcagcaaggacgcccaagaccttttccgcgctctttggtctgcttatgcttcaaccccaacaaatctcaagatcattgacctctacgtaatctatgccgtcttcaccgctctcatccaggttgtttacatggctttggtgggatcatttccatttaactccttcctatcaggagtactttcttgtgtaggaactgctgttcttgctgtctgtctcaggatccaagtgaataaagataacaaggaattcaaggatcttgcacctgagcgtg

SEQ ID NO: 167644 - DNA, 278 bp, Glycine max
atttcagctatggccgacgaagctgtggttgttccagatcccacccagatcgatgtcaagctctttaaccgctggagctctcgacgatattgagattactgacatttctctggctgattatatcggagtggcgacatccaagcacgccacgtatgtgcctcacaccgccggcaggtactcggtgaagcggttcaggaaggcgcaatgccccattgttgagaggctgaccaactctctcatgatgcacggtagaaacaatggcaagaaactcttggctg

SEQ ID NO: 167645 - DNA, 275 bp, Glycine max
gtttcagctaactctgcatcacttggtagttgagtggttctagtaattcagtgctgctagaaggatggaaactagtataatggcatatcgagcgaagatctagcttcggctctgaatcccccttagcaagagaggcaggaaatgtgcctgaaactgggtcactctctattgtggtgcttggtgcttctggtgatcttgctaagaagaagacatttcctgcacttttccacctatacctgcagggattcttaccaccagatgaagttcatattttt

SEQ ID NO: 167646 - DNA, 275 bp, Glycine max
ctcttcctcatgcaattcttcggttggaccttgctggccgtgatttaacggagtacttggtgaaaatccttactgagagaggatactccttcagcacctctgctgaaaaggaaattgtccgtgatgtgaaggagaaattggcatatgtggcccttgattttgaacaagaaatggagactactaagagtagttctgcagtggaaaagagctatgaattgcctgacggacaggtcattacaataggttctgagagattccgttgcccagaagtactg

SEQ ID NO: 167647 - DNA, 275 bp, Glycine max
gggtttttcatctgcttcaatggggaagggaacagggagttttggtaagagaaggaacaagactcacactctctgtgtgaggtgtggccgccgcagcttccatctccagaagagtcgttgcgccgcttgtgctttccccgccgcacgcactaggaaatataactggagcgtcaaggcaatccgcagaaagaccaccggaactggcaggatgaggtacttgcgtaacgtgcctcgccgattcaagagtggcttcagagaaggtaccgaagctgcac

SEQ ID NO: 167648 - DNA, 277 bp, Glycine max
tgcagcatatgccttgaagctttctgtgatagtgatccctccacggtgacaagttgcaagcatgagtttcatcttcagtgcattctggaatggtgtcaaagaagctcccagtgccccatgtgttggcaacctatcagtctcaaagatccaacaagccaagaattacttgaggcagtggaaagagagcggaactttaggttcaatccatctagaaatgccaccatatttcatcatccaacactgggggattttgagttacaacatttgccagttggag

SEQ ID NO: 167649 - DNA, 277 bp, Glycine max
caccagtgtggctgaagtgtttggccgcattgatcacaagtttgatctcatgtatgccaagcgtgcttttgtccactggtacgtgggtgagggtatggaagaaggtgaattttctgaagcccgtgaggaccttgcagcccttgagaaggattatgaagaagtgggtgctgagtctggtgagggccaggaagaggatgaagactactagaatctacttcagattcttgttcttgtggtctgttttctgttgtgtttgatgttcagatgtgtaccagta

SEQ ID NO: 167650 - DNA, 275 bp, Glycine max
  unsure (1)..(275): unsure at all n locations
tgcgtggaagaaccagggcaccactctgagaagaaacgacgactaagcgtggatcaggtgaaggctttggagaagaacttncgaagtagagaacaaactcgaacctgaccgaaagttgaanctggcacaagancttggcttgcaaccaagacaagttgcggtttggttccaaaaccgtcgtgccagatggaagacaaagcaattggaaagagattacggcgtcctcaaagccaattatgaatcacttaaacttaactacgacaccctccaacaag

SEQ ID NO: 167651 - DNA, 274 bp, Glycine max
cacacaccacacacatagtagctattatactctctagagtaattgcggaatctgctagaattttctaataatggcgaaagacgttgagcaggtcacagagcaaggtgaatactccgcgaaggactaccatgaccctcctccggcaccgttgatcgacccagatgagctcacaaagtggtccttgtacagagccgccatagctgagttcatagcaacactcctttttctttacatcaccgtgttgaccattattggctacaagagacagagtgac

SEQ ID NO: 167652 - DNA, 274 bp, Glycine max
ggcaggtccaagccagtttagccccaccttcagctgaccgccttggttcttggaatgaatgcaaatcgaaccatgcaaattgtagctcatctcaaatgcagttccttcaagacttcagaaatcaaatgctgggtgacattaaagacttctcaagctcatctcaaactgggctattcataaattcttgttttgctcattgtcagtctgagagacaggagacatggtttgctgatgactctccccttatcgaggacaagccaattgcagttgctgt

SEQ ID NO: 167653 - DNA, 279 bp, Glycine max
agatctctctcacgagagcacggtcgccgaagaagtaagaaaaccaatgccagaaaccgaaatcccggcggcggcggcgatggaggaggataacaacaccgccctgttcggaaaatacgaggttggaaggctcctaggatgcggcgcgttcgcgaaggtgtaccacgcgcgcaacaccgagactgggcagagcgtggcggttaaagtcataagcaaaaagaaactaaactcgtcagggttagcttccaacgtgaaacgcgagatttccatcatgagccg

SEQ ID NO: 167654 - DNA, 275 bp, Glycine max
ggagatgtcggtggagcagaaagcagcagggaaggaggaggagggaaaactgcagaagggaattgcagagttctacgacgagtcgtctggcatatgggagaacatttggggcgatcacatgcaccacggcttttatgacccggattccaccgtttctgtttctgatcatcgcgctgctcagatccgaatcgtccaagaatctcttcgttttgcctctctgctttctgagacccttctaaatggcccaagagtatagttgatgttgggtgtggcat

SEQ ID NO: 167655 - DNA, 283 bp, Glycine max
ggtttagatcatcaactgcaactgccggtccttccagtgtctgttccttctgaacagcaaatcaattcagggatacctgttggaggttacaacgataataatatagtaacacgatatccaacccagtcattgattccaaactccagctcccggaatcagttcgatagctcattatatgtgtcgaatgaccaattaatcagcaatgctcaccaaacccaaagcactagtaatgatcaggcaccattgggttagctcttggtcctcctcaatcatcgacatcagg

SEQ ID NO: 167656 - DNA, 279 bp, Glycine max
cctcgagccgattcggctcgagtcttcttctcttgcggctagggactttagcgcagttctatctagatttaaggaagatgactaaggaaaaggttcacatcagtattgtggtcattggccatgtcgactctgggaaatccactaccactggtcacctgatttacaagcttggaggcattgacaagcgtgttattgagaggtttgagaaggaagctgctgagatgaacaagagtctttcaagtatgcctgggtgctggacaaacttaaggctgagcgtga

SEQ ID NO: 167657 - DNA, 286 bp, Glycine max
ggattttatgcaggcaagccctttgtgaatgtcttgaaggaagctggtgtgcttcctggcatcaaggttgacaagggcacagtcgagcttgctggaactaatggagaaaccaccactcagggtctagatggccttggtcagcgttgtgccaagtactacgaagctggtgcacgttttgccaaatggcgtgcagtgctgaagattggtcccaacgagccatctgagctgtctatccatagaacgcctatggcttggctagatacgctgtcatatgccaggagaatgg

SEQ ID NO: 167658 - DNA, 275 bp, Glycine max
cacacaccgcaggagacggtttctttcactctctgcgattcgcgatggctgacgaggactatgaagatattgacatggggtacgaagatgaaccgccagagcccgagattgaggaaggtgcagaggaagatgtggagaacaaaaacgatgaaataactggagagcctattgacaccgaggataaggccgaggaacaaccagtgaagcggcctcgaaagacatcgaaattatgactaagtatgagcgtgctagaattttgggaccccgtgctcttc

SEQ ID NO: 167659 - DNA, 275 bp, Glycine max
caaaatggaagacacagtttctgcgttgaggtctttgatggtttctcactctccgccgctggatgccttagtggtgccctctgaagattatcacctgagcgaatatgtgtctgcacgagacaagcgccgcgaattcgtttccggcttcactggaagtggcggcttggcacttataacaaagaacgaagcactgctgtggacggatggacggtattttttgcaggctgaaaagaacttagtgctgggtggaagctaatgcgaattggtgaagatcc

SEQ ID NO: 167660 - DNA, 282 bp, Glycine max
ccctcgagccgctcgagccgctcgagccgctcgagccgctcgagccgatgcggctgcaaatgcacctatgttacctgaggttgtccatgtaaaacaccgtaccaagatttatgcatttgatcgagcttttgaaggctcgttttcttctattgcggctcctctggttgggattctttctgagaagatgtttggctataattcaaagtctgttgatcccatcaaaggatcttcaccgaggctcttgccttgtccaagggccttctttccatgatggctgttcca

SEQ ID NO: 167661 - DNA, 278 bp, Glycine max
actcaatgaaatgtataagcggttacaggattacattacaagcttacaacagtacaatggaaaacttcactctgagctttcgtcggttgaggatgaacttcaacgcgtagaaaaggagaaggtttcggtagtggagaacatcaccttgttaaggggtcaacttactgtatccgtttcttctcaagaggaggccataaaacagaaggatgtcttcgctacagaagtttccttcttagaggagagttgcaacaagtaagagatgagcgagaccggcaatt

SEQ ID NO: 167662 - DNA, 277 bp, Glycine max
  unsure (1)..(277): unsure at all n locations
ggttgatagtcaagacggagttgctcacattggtgaattgaaatctggtgtctatgttccactgcctatagaaactccnttggtggaaactctcaaggaatggcaactggatctaccttgtgacaaaattcctcgtgtcttgactacaactgatgaaagattggtaggcacagaacatgagggatatgatccttttcttggtggaattcaaaaatatgccactcccatgtgcccctagatgaagaaattctttctaaggttgcacaagatatggttg

SEQ ID NO: 167663 - DNA, 277 bp, Glycine max
ctcgagccgctcgagccgaatcggctcgaggtgatttcagtgagtgatcggtgttcacttgatactcatcactaatcgtcagcgtcaattgaagaagatgccgatcagaaacatcgccgtcggaaggcctgaagaggcgactcaccccgacacgttgaaggcggctttggctgagttcatctcaaccttcatcttcgtgttcgccggctcaggctccggcatcgcctacaaaagctcaccgacaacggcgctgccacccctgccggcctcatctccg

SEQ ID NO: 167664 - DNA, 286 bp, Glycine max
cttaattagtgttcatgaatatgtcaagccttactttagtggttctcaattgaaaagctttctagctggtcataatatcaccattactgatggtattgacaaaactagtgcaactttgcaatttagaaagttagcagattgcgattttctcaagagaaactttaagcagatgtctaatgttttgtgggtggctcctgaggacaaggcgagtttatggtcacaacttcattatgtccctgtaataatctggaaatgcccgaagcttatcttgtcaatctcgtaaatg

SEQ ID NO: 167665 - DNA, 276 bp, Glycine max
aagatggctaggtctagtgcttatcctttgttcttgatttcttccattctgtttatttcacacatttatgcctcgcaagtagaagccaagcccccagtagtgaagggactatcatattctttctattccaaaacatgccccaagcttgagtccattgtgaggaaacatctcaagaaggtgttcaaggatgacaatggccaagctcctgccttactccgcattttcttcatgattgttttgttcagggatgtgatggatcattgctgctagatggga

SEQ ID NO: 167666 - DNA, 270 bp, Glycine max
tcgagctggtggtgacagtccgaatgatcactattgctggatgcgtccggaggcatggactatgaccgccctgtgactgaatgccacagttgttccgatctcgcggctgagatggctgctgccttggcttctgcttccattgttttcaaggacaacaaggcctattccaagaaactggtgcatggtgcgaccacgctgttcaagttttccagggatcagagggcaggtacagtgctgggagttcagaggcttcaatattttacaattcta

SEQ ID NO: 167667 - DNA, 276 bp, Glycine max
cacaaacagaggtgttgagtgagttcaaatcaattttaggcagaaaaatgaggtgttttggtcttgtagtgataggtctagtggttgtgcttggagggttacccttctcttcaaatgcaggattagatcccttcttttacaagaagagttgtccccaggtgcatttcattgtatttagagtcgtagagaaagtttcaagaaccgatacacgtatgcctgccagcctcgtcggcttttctttcatgactgctttgttcaaggctgtgacgcatcaat

SEQ ID NO: 167668 - DNA, 275 bp, Glycine max
ggcaaatcgcgaagactagatctgatctgagagaatggctcctcggtctagcagtaaggacgcccaagaccttttccgcgctctttggtctgcttatgctgcaacccccactaatctcaagatcattgatctctatgtcatctatgccgtattctccgctttcatccaggttgtttacatggctttggttggatcatttccatttaactccttcctatcaggagtacttcttgtgtaggaactgctgttcttgctgtttgtctcaggatccaagt

SEQ ID NO: 167669 - DNA, 270 bp, Glycine max
tctattcttaactcaacttctgctacccactctcttcttccaagtccaaccacgcttttctctacagtcatgggcaaggtcaagatcggaatcaacggatttggaagaattggccgtttggttgccagagtcgctctgcaaagagacgatgtggagctcgttgccgttaacgaccctttcattaccaccgattacatgacatacatgtctaaatacgacagtgttcaggacactggaagcatcacgatgtcaccgttaaggacgagaaga

SEQ ID NO: 167670 - DNA, 201 bp, Glycine max
tttcgctatctctcccattctctcgcatctcaatacccttttgatttgtgaaaggaaagcaaacatgcttgatcaggtgcaacaccctacaatcatggacaaggttgctggccagctccatctccgttctggtgtttctggtattaggagttatgaaggagcctattgccaccccacattgtaccaaagaccctctttggg

SEQ ID NO: 167671 - DNA, 275 bp, Glycine max
actcagtgaaagagaatccgaggcgaagagaagagaaaaattaagatggaggggaaggagcaggatgtgtcgctgggagcgaacaagttcccggagagacagccgattgggacggcggcgcagagccaagacgacggcaaggactaccaggagccggcgccggcgccactggttgacccgacggagtttacgtcatggtccttttacagagcagggatagcagagttgtggccacttttctgtttctatacatcactgtcttaaccgtcatggga

SEQ ID NO: 167672 - DNA, 191 bp, Glycine max
cttgacttctctttcctcttctttgactccagccaacgtccaaatccattaaagaaattgcagtgttagagttagaagttatgtatttggaacaatatcttctctccttgtatcgtaaagcatttgatcaacaattaccctctgtagctccattcaccaaggaggaaaaagtgaagtcgcttcaataaaca

SEQ ID NO: 167673 - DNA, 264 bp, Glycine max
gagtattgttagaggcgcaaggtagaacaaccaagggaaaggctattgacttggaagacataaaatttcatcagtgtgtgcgtttggctcgatttgaaaacgatcgaacaatttcctttataccacctgatggatcgtttgatttgatgacatacaggctcagtacacaggttaagcctttaatttgggtggcagcaaatgttgaaaagcattcaaagagtcggattgagttatggtacaagctaggtttcaatttgaggaacg

SEQ ID NO: 167674 - DNA, 241 bp, Glycine max
ttagatttcatctttaaactcattgacattaagtgaagttgctcaatagatatataagttgcatcccaagaattgagggaggcaatgtgggatgttccaacatcctcttccatagatgcttgctaccataggaaattaggcgatttaccaagatagattgtaggctttaataccatattagatttcatcttaaaaccaattagtattaagtgaagttgtccaacagatatatagttgcaca

SEQ ID NO: 167675 - DNA, 280 bp, Glycine max
aactctgctgatggtgattcctccgtcgccgcacctcccatcctcttcgattatcatcttatcgaccaaaaacttctccaaaacatagtctacgatgctcttgtctggagcaccctcaactgcctccttgttggtgacaaatcagttcagagatcaggaacagttcctggtgttggcctggtgcatctcccgctttctttattacctgggccatttcctgaaaatcattggagcaagcgtgcgaattagctcctatatttaatgaacttgttgatcgggt

SEQ ID NO: 167676 - DNA, 275 bp, Glycine max
aaattctctgtctctctctctctctctcgatcaatcatggctttgcccaatcagcaaaccgtcgattaccctagtttcaaactcgtcatcgtcggtgacggtggtacaggaaagacaacgttcgtgaaaaggcatcttaccggtgaatttgagaagaaatacgaaccgaccattggagtggaggttcacccattggatttcttcacaaactgtggaaagattcgctttactgttgggatactgccggacaagagaagtttggtggcctcagggat

SEQ ID NO: 167677 - DNA, 268 bp, Glycine max
aaaacaatggctgttgccaacaatgtgctttgcattgctttcattatcactttaacgtgggcagttgaagctcgaattccgggcatttactctggtggtgcatggcaaagtgctcacgccaccttctacggaggatccgacgcttccggcaccatggggggaccgtgtgggtatgcgaacctgtacagccaggggtacggtgtcaacacggcggcattgagcaggcactcttcaacagcgggcttagctgaggtgcgtgttttgcgat

SEQ ID NO: 167678 - DNA, 262 bp, Glycine max
ctttctctagtcctgttatttctcagcgcgtaaagcatggctttgtcggtggagaaaaccacgagtggtcgcgagtacaaggtcaaggacctttcccaggccgacttcggccgcctcgagatcgagctggccgaggttgacatgcccggcctcatggcctgtcggaccgagttcggcccctcccagcccttcaagggggcccgcatcaccggctccctccacatgccatccagaccgccgttctcattgagaccctcacggc

SEQ ID NO: 167679 - DNA, 273 bp, Glycine max
tgggatattttgtcttggttctggtgccaccgttgttaatggagtacagaacttgtggattgcacagccccctgagaatatgaaatatgcagctttggtgatatgcggttcattcgtcattgaaggtgcctctcttattgttgccatacaagctgtcaagaaaggtgctgctgcagagggaatgaaattaagagactatatttggcgaggccatgatcccacatcgttgctgtgatgacagaggatggtgctgcagtcaccggccttgttatt

SEQ ID NO: 167680 - DNA, 273 bp, Glycine max
  unsure (1)..(273): unsure at all n locations
cgctaaaatcaaccatgggttcagcagctgagactcagatcactccaacccatgtatctgatgaagaggcaaacctttttgccatgcaactagccagtgcctctgtactccctatggttctcaaatcagctcttgagcttgatctgttggaaatcatagccaaggctggccctggtgttcatctttcccccactgacatttctcctcagcttccanatcagatacgttctcatncgntatattggaccgcattttgcggctcttggcttgcta

SEQ ID NO: 167681 - DNA, 270 bp, Glycine max
attaattgcaagaatggcacttcgttgcttggtgatgtccctttctgttctcttcactcttggtcttgcgagagaaagccatgccagagacgaagatttttggcatgctgtttggccaaacactcccattccaagttcattgcgagatcttctaaagcctggccctgcaagtgttgaaatcgatgatccccctatgcaaattgaagaaacacagtacccgaaaccttcttctataaagaagaccttcatgcaggcaaaacaatgaaagta

SEQ ID NO: 167682 - DNA, 271 bp, Glycine max
gatagatccatcaagatctcttccccaaatggagatgatgttagagtccattataaggtctcaattccccttacaaaattaaagtctgtcaacaaaagtcagaatgtggagaagccttcacaaaagtacatagaaatagtaactgtggataatttcgatttctggttcatgggtttcttcaattatcagaaagctttacgatgtcttcagcaggctgtccctcagcttagagagaaaaaactgtacaagtaaaattgtttgtcccctctgc

SEQ ID NO: 167683 - DNA, 193 bp, Glycine max
gtttctctttctctttctctgtctgcttcttcactttctctcgtttcaatcgaaaaaaatcatgggcagaaaattcttcgtcggtggcaactggaaatgcaatgggaccactgaggaggtgaagaagattgttactactttaaatgaagctaaagtccctggagaagatgccgtagaagttgttgtgagccct

SEQ ID NO: 167684 - DNA, 302 bp, Glycine max
gcgcattccgcacgtcgcgtggtgtccggtgcgcccccggcggcccttgaaaatccggaggaccgagtgcctcccacgcccggtcgtactcataaccgcatcaggtctccaaggtgaacagcctctggtcgatggaacaatgtaggcaagggaagtcggcaaaatggatccgtaacctcgggaaaaggattggctctgttcgctgggcacgggggtcccagtcccgaacccgtcggctgtcggtggactgctcgagctgcttccgcggcgagagctggtcgtcgcgtgccggtcgggggacg

SEQ ID NO: 167685 - DNA, 299 bp, Glycine max
attgaattctccagagagaagaagaaacttaatcgatcatcacttcacttcactaatacatcatggcagacgagacccagaacaagtatgagagctctgaggttgaggtccaggatcgtggtgtttttgactttctcggtaagaaaaaggatgaagaagacaagcctcatcctcaggaggaggtcatcgccaccgagtttcaaaaagtcactgtctcagaccaaggagagaacaagcacagcctcttagaaaagcttcaccgatctgacagcagctctagctcttcaagtgaggaggaa

SEQ ID NO: 167686 - DNA, 302 bp, Glycine max
ccactcttaatttctctctgccttccttcatttacacatctctccaacctttcactttcagctttatttgaatccctctctctcctttccaaatggccagcgtttaggttgcacatcaaacaccaacaacagttccagaaaatgaaacaaccgaggtaatcaagacccaggaaacaaccccggaaccagtaccagccactgaggctcctgcaacagaacaagcagcagctgaggttcctgctcaagaagaacaacaagcaactgaggttcctgccccagaatcaaccaccgaagcaccaaag

SEQ ID NO: 167687 - DNA, 301 bp, Glycine max
ccatctcttcctctctcagctgtctttttaatcccccttttctcattttcccttttgcaattttcactaacagtccttctttctatctttgctctcagaaacttcaataacaatgaagaaagtcgtgttgaaggtggaagtacatgaagacaaaatcaagcaaaatgctatgatggttgtctctggcatttcaggggttgagtcagtttctgtggacatgaaagacaagaaattgaccgtaattggggacattgatccagtaaaagtagcagccaagctgaggaagctttgtcacgcagaa

SEQ ID NO: 167688 - DNA, 298 bp, Glycine max
gggttacctctaccctcagttttatgactatccatgcccacaagctcaacatattgtcaagtctgtccttgctaagtatgttgcagagcaacctcgattggcggcttcgattcctcaggcttcatttccatgattgttttgtcaagggttgtgatgcttcgttgttgttagatagcagtgaaagcatcaacagtgagaagggatcaaatcccaaccgtaattcagctagaggatttgaagtcattgatgcaattaaagccgaactagagagacaatgcccttctactgtgtcttgtgc

SEQ ID NO: 167689 - DNA, 262 bp, Glycine max
  unsure (1)..(262): unsure at all n locations
cttaacttggagggtgctagagagaaatggcttcgtcttgttctagctttatgatcactttggccgttttggtccttttgttggggactagtagtgccaatgccaatccaacacttcacacaaacttctacacaacatcttgcccaaaactctttgacactgtgaaacgcacagtggaatcggccatatcaaaggagacccgcatgggtgcttctctcctacggttgttcttccacgattgcttcgttaccgngagtgatgg

SEQ ID NO: 167690 - DNA, 296 bp, Glycine max
ccgattgctagaatggaatttcgatgctcagtcatctcttttaccattctcttctctcttgctcttgcaggagagagccatgtccatgcatcgctacctgaggaagattattgggaagctgtttggccaaacactcccattcccactgcactgcgagagcttctaaagcctctccctgcaggtgttgcaatcgatgaactccctaagcaaattgatgatacacagtacccaaaaacattcttctataaagaagaccttcatccaggcaaaacaatgacagtacaattcaccaagcg

SEQ ID NO: 167691 - DNA, 299 bp, Glycine max
tattctcagtttgcggtgtttgatagaaataatggatcggaacgggccaaagatcaaaagtacaattcttcaccatctctatgagaagcagagacagagcccttactatgacaatctctgtcgccctgtttcaggtttgcttccatttattgccaatgggatcagaggtgtcactaccaacccagcgatttttgaaagagctatttcatcctcaaatgcctacgatgatcagttgagggaattggtaggggcagggaaggacatagaaagtgcttattgggaattggttgtgaaggaca

SEQ ID NO: 167692 - DNA, 300 bp, Glycine max
acgatacgtaataagttctatcattgaggaagtttcctgtgcatcgtctccgaaaatgaacgacgcagatgtctcaaagcaaatccagcagatggtgcagttcatccgccaggaagctgaggaaaaggccaacgagatctctgtctccgccgaagaggaattcaatatcgagaagctgcagttggtcgaagccgacaagaagaagatcaggcaagaatacgaacgcaaagagcgccaagttgaaattcgcaagaagattgagtactcgatgcagctaaatgcttctcggattaaagtctt

SEQ ID NO: 167693 - DNA, 300 bp, Glycine max
atcgaacaaaaaaaggttgacagaagagagatacagttttcacagaagttaggagagaaaaagaacagagtacagatctgtgtgaccaaaacctcttacaaacacatacaaatcagacagaagactaacagagtgaagagaagcaaacagagcaatggaaggaggaggagctgctccgccggccgacaccgtgatgtccgacgcggcgcctccgccgcagcaagcgatggctatggggatcgagaatattccggcgacgctgagccacggtggcaggttcatccaatacaacatattcgg

SEQ ID NO: 167694 - DNA, 294 bp, Glycine max
tttcaacttcgcggtgtgagttagacggagagtgctaagcaatcgtcttctcttctcggagcttggctttgcttatcgattctctctcctctcgtttctctaattccaaggtttgtaaaagatggcagatgccgaggatattcaaccccttgtttgcgacaatggaactggaatggtcaaggcaggatttgctggtgacgatgctcctagggctgtctttcccagtattgttggccgacctcgacatactggtgttatggttaggatgggtcaaaaggatgcctatgttggtga

SEQ ID NO: 167695 - DNA, 299 bp, Glycine max
gctcgagcggctcgagccgcgactatacagccaaactttctgattttggactagctaaagcaggaccacaaggtaccgaaacccatgtatctacccgagtcatgggtacctatggttatgctgcccctgaatatgtaatgactggccacctgacggctaggagtgacgtctatagctttggcgttgttcttttggagcttttaacagggaggaaatctgttgacaagaccagacctggaaaggaacagagcttggtagattgggcacggccgaagctcaatgacaagagaaagttcctt

SEQ ID NO: 167696 - DNA, 290 bp, Glycine max
gagatatcaatatattatgataatggagggatacaataagaaggttatgattgtggggatggtgttgggcatggccatgattgggatggccaatggccaatactcgttttgtcgcatgcccagcgatgggttggcggcatgcaagccgagtgtgagtggggactatcctgctgatccctccactgcttgttgctcagccattgccaaggctgatcttaaatgcttctgccgcttcaaggattcgggccttctctctatgtatggtgttgatcccaacaagtgcatggaac

SEQ ID NO: 167697 - DNA, 293 bp, Glycine max
gcgaaatcatttaagataagagtgcattactactaagaggagaaaaaatgaaagttgtatacttccttgttgctatcttggctttgacatccactgtggtctctgcctatgaccctagtcctctgcaagatttttgtgtggcggccaaagaaaaagatggtgtatttgtgaatggaaaattctgcaaagatcccaagcttgtgaaagctgaagatttcttcaaacatgtggcacctgcgaatactgcgaatccactaggttcacaagtgactccggtctttgttgatcaacta

SEQ ID NO: 167698 - DNA, 296 bp, Glycine max
ttcagatctctctcccttccttccatcccaaccacaagatcgctgagaagacataaaaaatggtgaagatttgctgcattggagctggctatgttggtggcccaaccatggctgtaattgccttgaagtgtcctgagatcgaggtggtcgtggtggacattgctgcaccgcgaatcaacgcgtggaacagcgaccacctcccgatatatgagcctggccttgatgatgtggtgaagcagtgcagggggaagaatctcttcttcagcactgatgtagagcacatgttgccgaggctg

SEQ ID NO: 167699 - DNA, 292 bp, Glycine max
cggctcgagaccaattccaaatgctcttgtcatcaacattggagacacaatagaagttcttacaaatgggaaatacaggagtgtggagcatagagctgtggctcatgaggagaaagctagactctcaattgtgacattttttgctcctagctatgaagtggagcttggtccaatgcctgagtttgtggatgaaaaccacccatgcaagtataaaatatacaatcatggagagtacagtaaacactatgtaacaaacaagttacaaggtaaaaagaccctggaatttgccaag

SEQ ID NO: 167700 - DNA, 286 bp, Glycine max
ttttgatagatgatatccctcttaaagacttggacatcatgtggtcgagagagagaattggatttgtgggccaggaaccgaaactcttccggatggatattagttcaaacatcagatatggatgcacccatagatgtaaagcagaaggatattgaatgggctgcaaagcaggcctatgcccacaattttatctcagcacttcccaatggttatgaaacacttgttgatgatgatctgttaagtggaggacaaaagcagcgaattgctattgctagggcccttctta

SEQ ID NO: 167701 - DNA, 293 bp, Glycine max
ctcttctcttaagctctactagttaagaaacattagttgaagaacataagaaacattatacctagctattagagtttaagatggcttcaaaaacttgttcctcccttgcccttttcctcacactcaacctcgttttcttctcacttgtctctccatgcggttatacaccatgccctggtccaaacccaaagccaaggcccaaccccaaccctaaccctaaccccagcccaagtggctcgtgcccccgtgacgcactcaaactaggtgtatgtgccaatgtgctaaacttggtg

SEQ ID NO: 167702 - DNA, 293 bp, Glycine max
cactcgagccgattcggctcgagatggaaatatggccaaagtggtacagggccaccgcagatactcttgggttcaagagaacgcttttattgaacagaaagctcctagttgaattgatagatcagtacaataatggagtgctaaactgggatgaattctcttcagcggtgaaggaagctcatgccgatcgcatgggtagccaaacaaagaggtttgtaatccctgagaggccaaaagaagaggattatttctatgccaacccacaggagtgtttggcacaatcagcagatgaa

SEQ ID NO: 167703 - DNA, 296 bp, Glycine max
gacagacagtgagaaatgatgatgaagcgtcggttccttttggttctcttggttctctatgtcacagtggagcagagtaagctactccaccacgtagaagccgatggtgggtttgtaaaaacaagaggagtgcagcttatgctgaatgggagtccctactatgctaatggctttaatgcctattggcttatgtaccttgcctctgatccttcccagagaaacaaaatctcatcggtatttcaacaggcttcaaatcatggactcaacattgccagaacttgggccttcagtgatgg

SEQ ID NO: 167704 - DNA, 301 bp, Glycine max
atcaaagtcggagagaaagggtactacgtacgtacctgcaggctgcagcaacctcgaagctagttcaaactagtgggaggttgtgtgcatagaagcacaaacaaacaaactcatcatcatactcacaattaatgcaaattaagcattgattaatggctcgcggaaaggttcagctgaagagaattgagaaccctgtgcacaggcaagttaccttctgcaagcgccgagctgggcttcttaagaaggctaaggagctatctgtgctgtgcgatgctgaaattggcctattcattttctctgc

SEQ ID NO: 167705 - DNA, 291 bp, Glycine max
agatgggagaaatagaaagagaggagatgtcgtcgacaaggtgggagaaggaggaggaagaagaagaagaagaggcccaaatggatatctggaagtacatatttgggtttgtggaaccggcagtgataaaatgtgcgattgagcttggcatagctgaagccatagagaagcatggaagtcccatgacactatcggagatatcatcaagtttagggtgtgatacttcacatctgaagcgcatcatgaggttcctggtgcaaagaaagatattcaaaggcgacgggtgcagca

SEQ ID NO: 167706 - DNA, 292 bp, Glycine max
  unsure (1)..(292): unsure at all n locations
cacaatcaaacctcttctttcaggtccaattcactcgcttattcttttctttccacacaacataaaacccaaaaaangaanaagttcaggactggcatngacttctttcancgtgcgaaggcggtgcgcctccgcagccaccacgacaagtacctcctcgcgaaggacgacgaggattcggtgacgcaggaccgcaaaggctcctcgaaaagcgcgcggtggacggtagaatacgtggctgaatacgataacataattcgcctgaagagctgttacggcaagtacctcaccg

SEQ ID NO: 167707 - DNA, 295 bp, Glycine max
ttttcatcaactgctaagctaactgaactctctctcgttgttcccttggcctctcgctctataaatacacatcgcatcattctctcacttgcacattgaaatctgaaccttccggatttcgttttgctttgttcaggtagccagccagtcatggtgctcttcaatgtttcacgcgtagagaccactcccttcgatggccagaagcctggaacctctggtctccgcaagaaggtgaaagtgttcgtgcaacctcattacctccataactttgttcagtcaacattcaatgcattaa

SEQ ID NO: 167708 - DNA, 288 bp, Glycine max
ttcagcagggacaacagggacagcgtccggtggaaggcgtccaggtgcagttcagcagtcccagcagccagttcctatgatgccacagcagatgcttcctaggggacgtgtctatcgttatcctcctggtaggggtattcctgatgttcctatacctggggttgctggaggtatgttttctgttccatatgatgtgggtgggatgccgatgcgtgatgcatcaatctcccagcaaatacctgttggggctctggcaacggctctggctaatgcttctccagagcagca

SEQ ID NO: 167709 - DNA, 295 bp, Glycine max
ccgcaacataaagtgcagcacaccagtgcttctcttaccatcaatgagaattacgactccaatgttcgcgatgatactgaaaccttcctcaatcggatagttcctgaggtttctttctttctatcaccaatttgatgcattcatctgctccatggaagcatactctagaggggccagatgacatgccagctcatattaaatcatcgatgtttggttgtacactcgcggtacccattacaaatgggaagcttaacatgggcacatagcagggtatatggctctgtgaacatcggga

SEQ ID NO: 167710 - DNA, 297 bp, Glycine max
cagcaagtgcgtttcggaagcagagaccgaaatacttcgagatggcccgtacaaagcaaactgctcgtaagtcaactggaggaaaagctcccaggaagcagcttgcaaccaaggctgcacgtaagtctgctccaacaactggtggtgtgaagaagcctcatcgttatcgccctggaactgttgctcttcgtgagattaggaaataccagaagagcactgagctcctaatcaggcagcttcctttccagaggttggttcgtgaaattgcccaggatttcaagactgatctgcgtttcc

SEQ ID NO: 167711 - DNA, 295 bp, Glycine max
ctcgagccgccggatattacgtccttgggggcacgcaatcattcgtgaatcccattattttccagatgctatcacaaccattggtaagggtatgcgttgggaatgtcgtaaagaagatactgagaatggcagtgacattcagaagatattagtatgccagaaaaagctatggtattcatccaaccagggttcaagatgacaaactatggaacttaagccatggtaactggtaagatggtggtggttagagtagtagtatagtggagtagaagcatagggaagccaaatcagagat

SEQ ID NO: 167712 - DNA, 296 bp, Glycine max
tgttgatcatcagacacctgatgagataaaggagcatagggagaagaaattgaacagtccttggagagacaggccaatttcagagtcatagaagctctttgaggatatgaaaaatggcagtatagaagaaggaaaagccacacttagaatgaagcaagacatgcagagtgataactacaatatgtatgacctctattgcatatagaattaagtttaccccacaccctcatgctggagacaaatggtgtatctatccaagttatgattatgcacattgcattgtggattctctagag

SEQ ID NO: 167713 - DNA, 287 bp, Glycine max
gttttgtcgaccggttcaccgagtcactgcactattattcaactctattcgactcgctggagggttcgcctgtgaacccgaacgacaaggccatgtcggaggtttacttagggaagcaaatctgcaacgtggtggcgtgcgagggaatggaccgcgtggaaaggcacgagacgctgaaccagtggcggaaccggttcggttcgatcgggttttctccggttcacttgggttcgaacgcgtacaagcaggccagcatgttgctatcgcttttcgggggtggggatggg

SEQ ID NO: 167714 - DNA, 292 bp, Glycine max
gaagatcgagatatctatttagatctcagaaaaacagtgtttcatttcaattcattcagtcttatcattattagggtttggcgattcagagagaaagagaaatgggagaacgaaaaggaatcccaattgctctggggctcttggcgatgctcctcttcttcattgcttcttcctcttcctctcacctcgttcgtgcttccgatgacgccgacgacgcgatcttctacgagtcattcgacgaggattttgacggacggtggattgtgtccgacaaggaggattacaacggtgt

SEQ ID NO: 167715 - DNA, 293 bp, Glycine max
gcatcattcaaatttctgccctatcaactttcgatggtaggatagtggcctaccatggtggtgacgggtgacggagaattagggttcgattccggagagggagcctgagaaacggctaccacatccaaggaaggcagcaggcgcgcaaattacccaatcctgacacggggaggtagtgacaataaataacaataccgggctcattgagtctggtaattggaatgagtacaatctaaatcccttaacgaggatccattggagggcaagtctggtgccagcagccgcggtaattc

SEQ ID NO: 167716 - DNA, 288 bp, Glycine max
atctagagcgtttcgattgtatggtgaaaaggatcccaatgggatacgcattgacataccaatgatgctccccctaattgatatgtgcaatcatagtttcaatccgtatgctagaattgttcaagaacaagataccagtaactcaaggatgcaagtgaaggttgtggccgagacagcaatcaaagaagatgatcctctgttactttgctatggatgtttaaacaatgatcttttccttcttgattatggatttgtgatgcactcaaacccttatgattgtattgagct

SEQ ID NO: 167717 - DNA, 292 bp, Glycine max
ctcgagccgctcgagccgcgaaatttcttagacaaaaaacaaggatcagaaccgttgaatccagttgaggccgatggcactagtctctggaggaagatcaacactgaaccctaacgcccctctttacattcctgccgcgtttcgccaagtggaggatttctctccggaatggtggcagctggtgacgacgctgacatggtaccatgactactggctaagccagcagcacgatgagggagccttctacggcgaggacgacgggtttgatggcaatgatgtcgttgatttgctt

SEQ ID NO: 167718 - DNA, 293 bp, Glycine max
gtcgggtgggaagaaacggggacccgctccgtatagaatatttaacctggggaacacgtcgccggttactgttcccactcttgtcagtatattggagcgccatttgaaggtgaaggccaagaggaatattgtggacatgcctggaaacggcgacgttccgtttactcacgcgaatattagttcggcccggagagaactcgggtacaagcccaccaccgatttgcaaaccgggttgaagaagttcgtcaagtggtacctttcctattacggctacaatcacggcaaacctgtaa

SEQ ID NO: 167719 - DNA, 289 bp, Glycine max
gattgttgtaagactttgtaattgaggtgctgcaatggcttcaagtcaggaagaggtgactcttttgggagtaattggaagcccatttgcttgcagggtgaagattgcccttaagttgaagggagttgaatacaaatatgtggaagaaaatttggccaacaagagtgatttgcttctcaaatccaacccagttcacaagaaagttccagtttttattcacaatgagaagcccatagcagagtctcttgtgattgttgagtacattgatgagacatggaagaacaaccca

SEQ ID NO: 167720 - DNA, 289 bp, Glycine max
agagaatccgaggcgaagagaagagaaaaattaagatggaggggaaggagcaggatgtgtcgctgggagcgaacaagttcccggagagacagccgattgggacggcggcgcagagccaagacgacggcaaggactaccaggagccggcgccggcgccactggttgacccgacggagtttacgtcatggtccttttacagagcagggatagcagagtttgtggccacttttctgtttctatacatcactgtcttaaccgtcatgggagtcgccggggctaagtctaagtg

SEQ ID NO: 167721 - DNA, 293 bp, Glycine max
ctttcttgatgtgcacaatcaggctcgtgccgaggttggtgttgatccactctcatggaaccacactcttcaagcctacgctcaaaggtatgccaatgagagaatccctgactgcaacctcgaacactccatgggacccttcggcgagaatctcgctgaagggtacggcgaaatgaagggttcggatgctgtcaaattttggctcactgagaagccttactatgaccactactccaacgcttgtgtccatgatgagtgcttgcattatactcagattgtgtggcgtgattctg

SEQ ID NO: 167722 - DNA, 288 bp, Glycine max
attgaaaggaagacaaaacacaagacagagtcattcagcaaggcttgaaacgagaagcgaggatgcccatcagatgtattctgcattggcaaccgaaccaaggaagcgttgtgaacagccaagtcctcgaatgagatctcgcagtgcgtcgaaagccttaacggcgtcaaagaaggaagatgcaaagcctccctcactttctacagacccaatttacgagaccaatcggtgaccatcgattttcctcgcgattttctggggatatcgatgctggagcagccgaacaaa

SEQ ID NO: 167723 - DNA, 288 bp, Glycine max
gccaaaagtccctcgttccatttccccctttcctccgcccggcgagaaactgagagaactcctccacatccagggcggcccatgcggcaaccagatcggagccaagttctgggaagtaatctgcgacgagcacggcatcgaccacaccggaaagtacagcggcgactccgaactccaattggaacgcatcaatgtctactacaacgaggccagcggcggaaggtacgttcctcgcgccgtcctcatggatctggagcctggcacgatggactcggtcagatccgggcc

SEQ ID NO: 167724 - DNA, 285 bp, Glycine max
tcgagctcctaccctacttaaggctcttggtgaatgtccacacttcaaagtcaatattgtcgggcactcacttggtggtggtactgctgcactgttaacatatattcttagagagcagaaagagttctcttcaagcacgtgcgtcacatttgccccaggcatgtagttttactacttaatgaattcgattatttattagtttttgcatttttataactccatctcattgtcttggatggattgtgtgaatgtgcatgcaagttcactgaactttcttggtggtga

SEQ ID NO: 167725 - DNA, 279 bp, Glycine max
ctcctcttctatgtaccctactcttgaagtaggtgaccgtgttcttaccgagaaggtttcgttcttctttagaaagcctgatgtttcggatatagtcattttcaaagctcctccttggttagaggagtttggttttagttcgtctgatgtatttataaagaggattgtggctaaggctggggacactgttgaggtgcgtgatgggaaactactgataaatggtgctgctgaagaacaagaatttgtattagaggctctagcttatgagatggatccaat

SEQ ID NO: 167726 - DNA, 148 bp, Glycine max
agctagaatggaatttcgatgctcagtcatctcttgtaccattcacttctctcttgctcatgcaggagagagccatgtccatggatcgctacctgaggaagattattgggaagctgtttggccaaacactcccattcccaatgagctg

SEQ ID NO: 167727 - DNA, 272 bp, Glycine max
  unsure (1)..(272): unsure at all n locations
gtcctctgcacttgcacacannggggtcgtcaatggntaggnncatgaaacacganngtgccccattntgntctgttgctctgtgcctatcnagnacaaatacagcggcangaccgtgnncntgcnanggaggcngtantngcnnnangggaantggagcagtctctgcaaagcttgncaggtgtgtctcctggtganggancgggtgctacaatgtcagacgatgaagatgaccnngcagagagcntgccaacttatacgaagggagcctt

SEQ ID NO: 167728 - DNA, 269 bp, Glycine max
gagatatgggttataatgtcagtatgatggcagattctacatctagatgggcagaagcattgcgtgaaatctctggacggctggcagaaatgcctgcagatagtggatatcctgcataccttgctgcacgtttagcctctttctatgaacgtgctgggaaggtaaaatgtctaggaggccctgaacgtacaggtagtgtaacaattgttggtgctgtttcgccacctggaggagatttctcagaccctgtgacatctgcaaccctcagc

SEQ ID NO: 167729 - DNA, 270 bp, Glycine max
gaaaaaggagagcgtgccagaatggcttcttttgttggagccatggctattgctgacttagtgaagacaaccttggggccaaagggaatggataaaattttgcagtcaacaggtagaggacgtgaagttactgtcacgaatgatggcgctacaatcttgaagtccctccatattgataacccagctgctaaagtccttgttgacatatcaaaagttcaagatgatgaagttggggatggaactacctcagttgttgtgttggctggtgaa

SEQ ID NO: 167730 - DNA, 271 bp, Glycine max
agagagtgtaggcttggaatccaagtgctacccttgttgcctattactgagacattgttctctgatgctgattatgtgaaggagctagtggaatggacagtgccctttttaagtagtcaagggtggaagggaatgacctatgccttgcaaggaatttatgatagggaaacagcactgcagaatattagaaagttgacaggttttgatgatgggaattcgttcactaatctcttgtggtggattcacagcagatgaggagtgttgcacacaa

SEQ ID NO: 167731 - DNA, 267 bp, Glycine max
gctgactatgagaagcccccaatttacaagccacctgtttacacaccgccagtttataagcccccagttgaaaaaccaccagtgtacaaacctccagtttacaagcctccagttgataaaccacctgtttataagcccccagtttataagccacccatttacaagcctccagtgtataaacctccagttgaaaaaccaccggtttacaagcctccagtgtataaacccccagttgaaaaaccacccgtttataagccaccagtttac

SEQ ID NO: 167732 - DNA, 265 bp, Glycine max
attctctccttcctcttcctacttcttgtttcatctgccactgcttgtgatcgctgcttgtatcaatccaaggcttcctatttctccaaagcttctgctctttcatctggggcatgtgggtatggctctttggcactagacataagtggtggacaccttgcagctggtgtggattctctcttcaaaaatggagcaggttgtggtgcctgctttcagataagatgcaagaacccaactctatgtagcaaagaaggtaccaaagtgg

SEQ ID NO: 167733 - DNA, 268 bp, Glycine max
caaaattcaattttgagcactaaccagcaccacttccaatggcttcaaatcatgaagaagtgatacttttgggcaagtgggccagcccatttagcaacagagtagaccttgctctcaagctcaagggagttccctacaaatactccgaggaagatcttgctaacaagagtgctgatcttctcaggtacaaccccgtgcacaagaaggttccggttttggtccacaatgggaacccattacccgagtcacttatcattgttgaatacat

SEQ ID NO: 167734 - DNA, 262 bp, Glycine max
cttcactctctctcactcttctctcgaatcttccaccgcaatggccaccactgccgagaaactctccgctctcaaatccgccgtcgccggattgaacgaaatcagtgagaatgagaagaacggattcatcagcctcgtcggccgctatctcagtggcgaacgcagcatgtggaatggagcaagatccagacgcctacggacgaagtggatgtgcctacacgacactttggcgccaactcctgaaggttcttcggaagtgaag

SEQ ID NO: 167735 - DNA, 266 bp, Glycine max
ggagtttcaagggttaccggaaggttgcattgctagtatactctctcgcactacgccggcggacgtgtgtaggttttccgtcgtatcaaagattttccgttcggccgctgaatcggacgctgtgtggaaacgttttctcccttccgattaccattccatcatttcccagtctccttcgcctctcaactatccttccaagaaggagctctatctcgctctctcggatcgccctatcatcatcgatcagggtaaaaagagcttcaatt

SEQ ID NO: 167736 - DNA, 263 bp, Glycine max
cggaggagaagaaaatagtcgttcgagatggcccgtacgaagcaaactgctcgtaagtccacaggaggaaaggctcctaggaagcagcttgcaaccaaggctgcacgtaagtctgcaccaactactggtggtgtgaagaagccacatcgttaccgtcctggtaccgttgctcttcgtgagattaggaaataccagaagagtaccgagcttttgatcaggaagctccccttccagaggctggttcgtgaaattgctcaggactt

SEQ ID NO: 167737 - DNA, 266 bp, Glycine max
ctcgagcgtgcagaatttatttggagagagcttttgaagaaggatggttttctggtgaatgcgggcttcccaacagctgatgctcctgatctcacactgaagagtgccaataaatatttgcaggactcaattgttttgatgaggaagttgcttcagaagcaactttcgggctcaaagaaaggtaataagaaaggtcctccagctgcatcagtgacagaaaacaaggtgacaggcttgatatatgtaaatgaacagtttgatggttt

SEQ ID NO: 167738 - DNA, 268 bp, Glycine max
atcaaattagttcattctctttgcgcagttccctacctctcctttcaagatgcagatcttcgtcaagaccctcaccggaaagaccatcacccttgaggtggacagctctgacaccatcgacaacgtcaaggccaagatccaggacaaggaaggaattcccccggatcagcaacgtctcatcttcgccggaaagcagctcgaggacggccgtaccctcgccgactacaacatccagaaggagtcaacccttcaccttgtccttcgtctc

SEQ ID NO: 167739 - DNA, 268 bp, Glycine max
gatcctgccagtagtcatatgcttgtctcaaagattaagccatgcatgtgtaagtatgaactaattcagactgtgaaactgcgaatggctcattaaatcagttatagtttgtttgatggtatctactactcggataaccgtagtaattctagagctaatacgtgcaacaaaccccgacttctggaagggatgcatttattagataaaaggtcaacacaggctctgcctgttgctttgatgattcatgataactcgtcggatcgcacgg

SEQ ID NO: 167740 - DNA, 269 bp, Glycine max
gcgactgcgcttcacgatgggtgcttacaagtatgtttcggagctatggcgcaagaagcagtctgatgttatgagattcttgcagcgggtgaggtgctgggagtaccgccagcaaccttctattgtccgtttgacaaggtctactcgcccagacaaggctcgccgcttgggtttcaaggctaagcagggttatgtgatttaccgtgttcgtgtacgaaggggtggccggaagagaccagttccaaaaggtattgcttatggtaagccca

SEQ ID NO: 167741 - DNA, 272 bp, Glycine max
cgaagctggtgcacgttttgccaaatggcgtgcagtgctgaagattggtcccaacgagccatctgagctgtctatccatgagaacgcctatggcttggctagatacgctgtcatatgccaggagaatggcctggttcccattgttgagcctgagatccttgttgatggacctcatgacattcacaagtgtgccgccgtcaccgagcgtgtccttgcagcatgctacaaggctttgaatgatcaccatgtccttcttgagggtaccctattga

SEQ ID NO: 167742 - DNA, 276 bp, Glycine max
gttctttgccctcatctctctctcgccggcgtcgctacgaaggaaagcaatttactgtgaagaacaatgaggaagctaaagtttcatgaaaagaagcttttgaagaaggttaattttttggaatggaagagggaagggggtcacagagagaacctcattatgcaacgctaccatgttactggacgggacgattacaaaaaatattcaggtttatgccatatggttcagaagttagtaaacatattgaaacagatggacccaaaggatccttttcgg

SEQ ID NO: 167743 - DNA, 277 bp, Glycine max
ctcgagatcatctttagttcttcagtaatctattgcgggattctattctaagattttgagaatgtctagctgtgggtgtggaagcagctgcaactgtggcagcaactgcggttgcaacaagtactcttttgacttgagttacgttgagaagacaaccacagagactctagttttgggtgttgggcctgtgaaggcccaattggagggtgctgaaatgggtgttgcatctgagaacggtggctgcaactgtcgatcaagctgcacctgtgacccatgc

SEQ ID NO: 167744 - DNA, 264 bp, Glycine max
  unsure (1)..(264): unsure at all n locations
aaacaagangccccaaaacccaaaccctattctggttggcttgcnattatggcgtctganagcgcttctcgatcgagttcagcggccgattcgtacattgggagcttgataagcttgacctctaagagtgagatcagatacgaaggtattctctacaacatcaacaccgaagagtccagtattggcctcagaaacgtgcgatcttttggaacagaaggaaggaaaaaggatggcctacaaattcctccaggtgacaagatttat

SEQ ID NO: 167745 - DNA, 263 bp, Glycine max
gaagaagaagatggctttaggtgttcctgctcttccgttgacatacgtggctcacgttctggcagttgttgccagcgtcttggtcgtggtctgggtcgtcaatttcaggggtggcttggcttgggattctgataacaagtccctcatcttcaacattcatccagttcttattgttattggcttactagttcatgggggtgaagctattataagttacaaagcttttcccctaaagaaggaagtgaagaaattgatacaccttg

SEQ ID NO: 167746 - DNA, 267 bp, Glycine max
atttggagcttcaactgatgatcttgaaagatgcagactccatggcattgtggagtgtggtgatcgacataagcacatttatcaaagaacaatgctacttgtggagcaagttaaagtgagtaaaggaagcccacttgtcacttgtctccttgaaggttcccgtggaagtggtaaaactgcactttcagctactgttggtgttgacagtgacttcccatatgtcaagatagtttcagctgaatcaatgattggtctacatgagagcac

SEQ ID NO: 167747 - DNA, 270 bp, Glycine max
catttctccatttccattttctctctcacttttcaagaatcgtaagctatgggaaagtcttacccaactgtgagtgctgattaccagaaggcagttgagaaggcgaagaagaagctcagaggcttcatcgctgagaagagatgcgctcctctaatgctccgtttggcatggcactcagctggaacctttgacaagggcacgaagaccggtggacccttcggaaccatcaagcaccctgccgaactggctcacagcgctaacaacggtctt

SEQ ID NO: 167748 - DNA, 269 bp, Glycine max
gagccttctctcagtacggcgaaatcgttgaaacgaagattatcaacgatcgtgagactggcagatccaggggttttggatttgtgaccttcgcctcggagcagtccatgaaagatgcgatcggagcgaagaatggacagaacttggacggccgtaacatcactgtcaatgaagctcagtcccgcggtggcggcggcggcggcggaggaggaggatacaatcgtggtggcggtggatatggtggtcgtagtggcggtggcggtggtgga

SEQ ID NO: 167749 - DNA, 155 bp, Glycine max
attcggctcgagcttaatcccaattttctagggtttatacaattctcgatggcttcctcagatgttgagtaccgttgctttgtcggtgggctcgcttgggccactgacgaccaagctctcgagagagccttctctccgtacggcgaaatcgttga

SEQ ID NO: 167750 - DNA, 269 bp, Glycine max
ctcgagccgcgcacactctctctcaccaaagccttcctagaacgaaaaaaaaaaagaagagcaattttccctcaccaaagaagaagaagcaaacaatggccgatcaacttaccgatgaacagatctccgagttcaaggaagccttcagcttgttcgacaaggacggcgatggttgcatcacaaccaaggagcttggaactgttatgcgttcattggggcaaaacccaactgaggcagagctccaggacatgatcaatgaagtggatgct

SEQ ID NO: 167751 - DNA, 259 bp, Glycine max
gttgaaacgaagattatcaacgatcgtgagactggaagatccaggggttttggatttgtaaccttcgcctcggagcagtccatgaaacacgccatcgaagggatgaacggccaaaaccttgacggccgtaacatcactgttaacgaagctcagtcccgcggtggcggtcgcggcgatggaggtggtggaggaggtgatggtggtggaggagaatggtagtagtatggactcttagggggagctggtggggagtgatagt

SEQ ID NO: 167752 - DNA, 264 bp, Glycine max
cttcactccaaaaaaatactactaaagagatgagttttgcaggttttctttctcttcaatcaatgtctgctacctgcggcttcttcttcttctccttcacccttctcttctccttcttctccttcctcgtcttcatctccaggatgaagccctggtgtaactgcgatctttgcaagagctacttgacggtgagttggctgaaaaagttccccaatctctgcgactggtacactcatctcttgcgtaaatccccaaccggcacca

SEQ ID NO: 167753 - DNA, 139 bp, Glycine max
gattgctagaatggaatttcgatgctcagtcatctcttttaccattctcttctctcttgctcttgcaggagagagccatgtccatgcatcgctacctgaggaagattattgggaagctgtttggccaaacactcccatt

SEQ ID NO: 167754 - DNA, 263 bp, Glycine max
ggcagacaaagggagaagtaaaaaacacagagcaaccaccgatcaaagaagaaacaaccgcaacagatctccgtttctcgccaaacaaacacaaaatggctgccttcagcggcgacgaaaccgcacctttctttggcttcctcggagccgccgctgccctcgttttttcctgtatgggagcggcgtacggaaccgcgaagagcggcgtcggggttgcgtcgataggcgtgatgacgcccgagctggtgatgaaatcgatcgtg

SEQ ID NO: 167755 - DNA, 270 bp, Glycine max
cgaggatatcttttagttcatacaaatggcgggctcaaccaaatgcgttctgggatatgtgatatggtagcagtagctcgaatcataaatgccactcttgtaattccagaacttgataaaaggtcattttggcaagatactagcaatttctctgatatttttgacgaagagcattttatgaattctctagctaatgatgtaaaaatcattaagaaacttcccaaagaattggttaatgcaaccagagtggtcaagcaattcataagctgg

SEQ ID NO: 167756 - DNA, 278 bp, Glycine max
atacagctcgagctatcatctttagttcatcagtaatttattgtgggattctattctaagattttgagaatgtctagctgtgggtgtggaagcagctgcaactgtggcagcaactgcggttgcaacaagtactcttatgacttgagttacgttgagaagacaaccacagagactctagttttgggtgttgggcctgtgaaggcccaattggagggtgctgaaatgggtgttgcatctgagaacggtggctgcaactgtggatcaagctgcacctgtga

SEQ ID NO: 167757 - DNA, 262 bp, Glycine max
agaaatttgtgtggcaagttctcgggtgtttgtccaggaagagatctatgatgaatttgagaagaagttggtggagaaggcaaaatcttgggtcgttggggatccttttgatcccaaatccctgcaagggcctcaggctgacaggaaccaattggagaaaatactctcctatattgaacacggaaagagagaaggagctacccttttgaccggaggtaatacagtgggcaacaaaggttactacatagaacctacaattttc

SEQ ID NO: 167758 - DNA, 266 bp, Glycine max
ctggggtgttaaatagaaaagaggagtttgagaatggcaacgatcagcgcggttcaggtggagttcctggagtttccagcggtggttacttcaccagcctccggcaagacctatttcctcggcggcgcaggggagagaggattgacgattgaggggaagttcataaagttcacaggcataggagtatacttggaggataaggcggtgccatcactcgccgctaagtggaagggtaaaacttcagaggagttagttcacaccctcca

SEQ ID NO: 167759 - DNA, 266 bp, Glycine max
ctaagccctctcttgctcgggattttactctcacggtagcaccagacatagaactctagatctcttgttttcctatccaatagattagagattgaagatggtgtctgacgcgagcaagaagaaggctgcgcagaagaaggcggcggcagcggccaagagaggaggcaaagcagcagctgcttcgtcgaaaacgacgtcgtcggagaaggccgccgacaagcttgccaacggaattggggaaattcagatatccgatcgaacctgca

SEQ ID NO: 167760 - DNA, 269 bp, Glycine max
ggctaacaaaccctgacactccttcttctccgcttcctcttcgatcatcgcttcagaatgccgccgaagttcgacccctcccagatcgtcgacgtcttcgtacgcgtcaccggcggtgaggtcggcgcggcgagttccctcgccccgaagatcggtcccctcggtctctcccccaagaagatcggagaagatatcgccaaggaaaccgccaaggactggaagggcctccgcgtcaccgtcaagctcaccgtgcagaaccgtcaggccaa

SEQ ID NO: 167761 - DNA, 281 bp, Glycine max
cgcaacaaaaagaaagaatcccaggcgaggagaaagatggaggggaaggagcaggatgtgtcgttgggagcgaacaagttccccgagagacagccaattgggacggcggcgcagagccaagacgacggcaaggactaccaggagccgggccggcgccgctggttgacccgacggagtttacgtcatggtcgttttacagagcagggatagcagagtttgtggccacttttctgtttctctacatcactgtcttaaccgttatgggagtcgccggggctaag

SEQ ID NO: 167762 - DNA, 273 bp, Glycine max
cctgccagtagtcatatgcttgtctcaaagattaagccatgcatgtgtaagtatgaactaattcagactgtgaaactgcgaatggctcattaaatcagttatagtttgtttgatggtatctactactcggataaccgtagtaattctgagctaatacgtgcaacaaaccccgacttctggaagggatgcatttattagataaaaggtcaacacaggctctgcctgttgctttgatgattcatgataactcgtcggatcgcacggcctttgtgc

SEQ ID NO: 167763 - DNA, 280 bp, Glycine max
agcgctggggattctgatggccccaaagatactgctttgaagaaaagggctagatgtgattcaagtactgcttctagctctaaagcgtgtcgggagaagttgcggagggataggcttaatgacaaatttgttgaattgggctccatcttggagcctggaaggcctcccaaaacagacaaggctgccattctgattgatgctgcccgaatggtaacacagctgcgggatgaagccctgaagttgaaagactcaaatacgagtcttcaagagaagattaaag

SEQ ID NO: 167764 - DNA, 280 bp, Glycine max
aggttcagacataagaaattcacataagtgctgaaaagggtggagagtttttcatagacactgagaaacatatgcaaacagtagctactgcagcaagtccaatacctagtccacaaagtagcggagactttggtgcgctgagtccattgttggaggttttgtcatgagttgtagagttcaaggtgaagggaagcgaagtaaaccattggtacaattggcaatgcgacacgtgacatgcgtggaggatgctgccatcttcatggcacttgcagcatctgtt

SEQ ID NO: 167765 - DNA, 281 bp, Glycine max
tagcacacaaaacttgctatagcagtaagctataactcatttgaggctctgtgagaattgagaaatggctaaagatgttgaggttcaagagcaaggaggagagtactctgccaaagactaccatgaccctcctccagcacctttgttcacccagaggagctcacacagtggtccttctatagagccctcatcgctgagttcatagcaacccttctcttcctttatgtcactgtgctcaccattattggctacaaaaggcagactgatacaacggtaggtgg

SEQ ID NO: 167766 - DNA, 284 bp, Glycine max
cctcaagccaaccatgtcttccttcaagagcaagtaccaagatgaactcattgccaatgctgcttacattggcaccccagggaagggtatccttgctgctgatgagtcaactggtacaattggcaagcgattggccagcattaatgtcggaatgttgaagcaaataggcgtgctcttcgtgaactcctattcaccacacctggtgcttttgagtgcctcagtggtgtgatcttgtttgaggaaaccctataccaaaagacagcttcaggaaaacccttcgtaga

SEQ ID NO: 167767 - DNA, 276 bp, Glycine max
atcggaagaaaccctagccactctcccggcgtcacgatgcagatcttcgtgaaaaccctaacgggtaaaacgatcacgttggaggtggagtcttcggacaccatcgacaacgtgaaggccaagatccaggacaaggaaggcatcctccggaccagcagcgcctcatcttcgccgggaagcagctggaggacggccgcaccctcgccgactacaacatccagaaggagtccacgcttcacctcgtcctccgcctccgtggcggcgccaagaagcgca

SEQ ID NO: 167768 - DNA, 276 bp, Glycine max
ctttttatggaaacatgtccagatgtttacaacctacccgtggagagtggaaagacctacctgttgagaattatcaatgctgcactcaatgaagagctcttcttcaaaattgctgtccacaagctcacagtggtagaagttgatgcacatatgtaaagcccttcaagattgaaacaattttgatagcccctggtcaaaccaccaatgttgttttaaatgctgaccaaaaatttggcaagtacttggtagcagcttctcctttcatggatgctccta

SEQ ID NO: 167769 - DNA, 279 bp, Glycine max
  unsure (1)..(279): unsure at all n locations
ccatcagccgctgattcccgagtaatggattttggatcagtctttctattgtctggtgccaaggttgacaatgatgatgccccatcatcggctccacctgctggaagtcagcaaaatggggtgaatgttgctgagttaatagtggccgtggctttggaactgtcattagacatcgtgactttgaagagagatctaactattatgattctcttcttgctgctgaatcgcgtgcaatttctggacggaaaggcacccactctgccaangatcctccagtga

SEQ ID NO: 167770 - DNA, 279 bp, Glycine max
ctcgagccgctcttcctcaccgattgctagaatggaatttcgatgctcagtcatctctttaaccattctcttctctcttgctcttgcaggagagagccatgtccatgcatcgctacctgaggaagattattgggaagctgtttggcaaacactcccattcccactgcactgcgagagcttctaaagcctctccctgcaggtgttgaaatcgatgaacaccctaagcaaattgatgatacacagtacccaaaaacattcttctataaagaagaccttcat

SEQ ID NO: 167771 - DNA, 281 bp, Glycine max
gtttccacaggagacgatttctagcactggtgctggacttggatcgctagacttccttagaaataacccccagtttcaagcattgcgttcaatggtgcaatccaatccacaaattctacagcctgtgcttcaggaacttggtaagcgaatcctggtcttttaagactgattcaagagcatcatggggagtttctgcagttgataaatgaacctgttgatggttctgaaggagatatatttgagcagcccgagcaagacatgccccatgccatcaatgtgac

SEQ ID NO: 167772 - DNA, 279 bp, Glycine max
ctttggcacacaacactagctatagtaagctacacttatttgaggttggagaaatatggctaaagatgttgaggttcaagagcaaggaggagagtactctgcaaaagactaccatgaccctcctccagcacccttgttcgacccaaggagctcacacagtggtccttttatagagccctaatcgctgagttcatagcaacccttctcttcctttatgtcaccgtgctcaccattattggctacaaaaggcagactgatgccacgctaggtggcaccgag

SEQ ID NO: 167773 - DNA, 275 bp, Glycine max
  unsure (1)..(275): unsure at all n locations
attggatgccaagtggacagcanaagtgtctgattttggactctctctcatgggccctgaccctgaagatgaggatgcccacctttcacttctggccgctggcactgttggctacatggaccctgaatactataggcttcaacattgacccccaagagtgacgtctacagctttggggtggttttgcttgagttgctctccggctacaaggccatccataaaaacgagaatggggtgccacgaaatgttgttgattttgtggtgccattcatttt

SEQ ID NO: 167774 - DNA, 276 bp, Glycine max
ctagaatggaatttcgatgctcagtcatctcttttaccattctcatctctcttgctcttgcaggagagagccatgtccatgcatcgctacctgacgaagattattgggaagctgtttggccaaacactcccattcccactgcactcgagagcttctaaagcctctccctgaccggtgttgaaatcgatgaactccctaagcaaattgatgatacacagtacccaaaaacattcttctataaagaagaccttcatccaggcaaaacaatgagagtac

SEQ ID NO: 167775 - DNA, 280 bp, Glycine max
ctctattccatcatcaatggagaacaccgagggatccggatctgcgacgaacggggtgctggctccgccgcgcaaggtggcattgataaccggaattaccggacaagacggttcgtacctgacggaattcctcctggacaaggggacgaggtgcacggcctgatccgccgctcgtcgaacttcaacacgcagcgcatcgaccacatatacgtggatccccacaacgcccacaaggcccgcatgaagctccactacgccgatctctccgacgcctcctccc

SEQ ID NO: 167776 - DNA, 280 bp, Glycine max
ctcaaaggtatgccaatgagagaatccctgactgcaacctcgaacactccatgggacccttcggcgagaatctcgctgaagggtacggcgaaatgaagggttcggatgctgtcaaattttggctcactgagaagccttactatgacactactccaacgcttgtgtccatgatgagtgcttgcattatactcacattgtgtggcgtgattctgttcatcttgggtgtgctagagcaaagtgtaacaatggctgggtgtttgttatttgcagctattcccca

SEQ ID NO: 167777 - DNA, 277 bp, Glycine max
agaaagaagtcttatattttatttactgtggtaattagtcttccatgcatgttgctgaacttcagagccttcccctctatatgtatctcttcatttccaacaatgtccctcattcatttaacatttcttgaagaggcaaggtggggtggttcaggaatgagtggtctatctctgagggaagaggaggacagagttggcaatgaagaattgaagacaatcatcagcactctataatatgtttcaggcactcttttttaattgttcaatgggtctcata

SEQ ID NO: 167778 - DNA, 276 bp, Glycine max
catccctgtcaaacaaaccatggcttccgaaacaaaccagtccaagaatgtgtgtgtaattggagctggaccctcggggctattggcagcgagggagctgagaaaagaaggtcacaaggtggttgtgttggagcagaaccatgatttggaggtcaatggctatatgacccaaatgtacaagaggaggatcccttaggaagagacccttggctaaaggtgcacagcagcatctatgagtctttaaggttcatgtctcccagagagatcatggggtca

SEQ ID NO: 167779 - DNA, 267 bp, Glycine max
atttgcgtgacaacgacacaagaactccaaaaccctaacgcactcgagatcctgagattttgtcatacttcgcttctcattctctttttgatcatggacgtacgaggtgcggcagatcttcaacaagttcgacaagaacggcgacggaaaatctcggtaacggagctcaaggacatgctcgcggccctcggctccaaaacgacggccgaggagttgaaacgcatcatggaggacctcgaccagaacggcgacggtttcatcgacctc

SEQ ID NO: 167780 - DNA, 278 bp, Glycine max
cctcgagccgaatcggctcgagattctcataagaacaaaggaaagagccagagagagatggaagcatttcccgtgatcaactaggagaatctcaacggtgaggcgaggaaagctaccctgcaccagattgaagatgcttgccagactggggattttttgagttggtgaatcatggaataccccttgaacttttggatacggtggaaaggttaacaaaagagcattataggaaatgcatggagaagaggttcaaggaggcagtgtcaagcaaagggtta

SEQ ID NO: 167781 - DNA, 255 bp, Glycine max
  unsure (1)..(255): unsure at all n locations
aattccattcattcgttcattcncaggttgtgatggcagcagcaccagcagctaccttcgctattggaaccaccggttccctcggccaaagaggaagctcgcttcctcaatcaaagtcctttgggttgcaattcaactctctgatcatttgaagagcttctgtggcctcaaggccatgtcatccgtgagatgtgagtcggaatcctcctttctcggtaacacaaccggtgctgctctacgggcgtcttntgcatc

SEQ ID NO: 167782 - DNA, 276 bp, Glycine max
gcaagaatggcacttcgttgcttggtgatgtccctttctgttctcttcactcttggtcttgcgagagaaagccatgccagagacgaagatttttggcatgctgtttggccaaacactcccattccaagttcattgcgagatctctaaagcctggccctgcaagtgttgaaatcgatgatcaccctatgcaaattgaagaaacacagtacccgaaaaccttcttctataaagaagaccttcatccaggcaaaacaatgaaagtacaattcagcaagc

SEQ ID NO: 167783 - DNA, 278 bp, Glycine max
tgaagatcttgacgcgccgtaacttaccgacgcggttggaagaattcttgaaaaccgtgaaggtgttttttggggacaacgtttatgatgtcaagcacatgatgaggttctgtgacacgctctacggcggattggaccgcgtcgacggtcgcttaacgtggaacgcgccgtagggaagtgccaccaggctgggtcagacagcttgctgacgtggcacgcgttccagaagattgttgacatttattttgtaaaggatgagcaccgaaaacacgccggtg

SEQ ID NO: 167784 - DNA, 274 bp, Glycine max
gttaattctggcattagaaaaattcttccagattctgagatttgtgactttgactttgagccatgtggttattcaatgaactctgttgaaggtgctgctgtttctaccattcatgttaccccagaagatggtttcagttatgaagctttgagactgttgggtatgacttcaaagtggtgaatctgaacgaaatggttaagagggtattggcatgttttctcccaactgagttctctgttgcagttcatgtggatggtgcaagcaagttgtttga

SEQ ID NO: 167785 - DNA, 272 bp, Glycine max
tggagatgttgttgtccttgacatctcagcaacaaccattgatcaagatgaatcaaatgttaaaagtattccttctgctgaaagtaaaggctttaattttgatacagaatatggtgaaaaagtattaccgggtttccttgatgtataattggaattcaacaaggtgaatcaaagtcttttcctcttgtatttcctgaaacatggaaccaagaaaatcttcgaggtgttcatgctcagtttactgttgaatgcaaagaacttttttacagaga

SEQ ID NO: 167786 - DNA, 274 bp, Glycine max
gtaaaaaatcagggttcgtgcggatcgtgttggtcctttagcgccgttggagcgttggaaggtgctcattttctttctacaggtgagctcgtgagccttagcgagcaacaacttgtggattgcgatcatgagtgtgatccggagagcgtggagcatgtgactcgggttgtaacggtgggttgatgaccactgcatttgagtacacactccaggctggtggactaatgcgagacaaggattatccttacactggaagagaccgtggtccctgcaa

SEQ ID NO: 167787 - DNA, 278 bp, Glycine max
ttcgttcgcaaccaccggccatactcactgttgttctcaagggattcgattctctctgcactcacttctagggttttctctgcgctataagcaatcatggcggatgaaacaccaaatgagatgaaggaggaggttccagaaatgttccttttgatcctaccaagaagaagaagaagaagaaaattacaattgtagatcctgctgatgaacctgtggagaaattggctgagaagacagaaaacctctcagtttccgagggggttgagactgcatttact

SEQ ID NO: 167788 - DNA, 273 bp, Glycine max
ctagctattagttcgattttgtagtaagtgaggtgccaatatggtgaagatagctcttggtactttggatgactcttttagcgctgcctctcttaaggcttatttcgcagagttccacgcaactctgattttcgtgttcgctgtgttggatcagccatcgcttacaacgagcttacaaaagatgcagccttggatccaacggggctggtggcagtagctgtggcacatgcatttgcactgtttgtaggtgtctccgtcgccgccaacatctca

SEQ ID NO: 167789 - DNA, 275 bp, Glycine max
agcaaggcagtcagagaggccatgtgctttttaatggaccccaaccttgggaagaagctgtgctatgtccaatttccacaaagatttgatggcattgatcgccacgatagatatgctaaccgaaacacggtgttctttgatacaatatgaaagggcttgatgggattcaaggtccagtatatgttggtactggaactgtgttcaacaggcaggcattgtatggctacgatccaccagtatctgagaaaaggccaaagatgacatgtgactgctgg

SEQ ID NO: 167790 - DNA, 276 bp, Glycine max
cctcgagccgaatcggctcgagttttcagatccgagattgagctccactacccatcatcatcacggagctcctcgggtacctgaatcagggtcacccttctagaggaacaacacttgttattactctttcattggtgctttcacacttgtgtccttctccactttcacacatgccttctctccttctgcgtttccggaactgaatcctataaaacctaggcactcacgtcttctcaggagtgccgtgcaacatgaaactcctacatcacagctttc

SEQ ID NO: 167791 - DNA, 278 bp, Glycine max
cgctcgagccgaatcggctcgagctcagcactcacatcctctgagagccgaaaaaattagggttgcgcatttcgggtcagacagactcagacatgggaggaggcaatgcccagaagtcaaagatggctcgcgagaagaagctcggaagcagagggctgccgcgaagggaagccagttggattcaaacaagaaagccatgtctattcagtgcaaggtgtgcatgcaaacatttatatgcaccacatcagaagtgaagtgcaaggcgcatgctgaagcca

SEQ ID NO: 167792 - DNA, 278 bp, Glycine max
gattgctagaatggaatttcgatgctcagtcatctcttttaccattctcttctctcttgctcttgcaggagagagccatgtccatgcatcgctacctgaggaagattattgggaagctgtttggccaaacactcccattcccatgcactgcgagagcttctaaagcctctccctgcaggtgttgccatcgatgaactccctaagcaaattgatgatacacagtacccaaaaacattcttctataaagaagaccttcatccaggcaaaacaatgaaagt

SEQ ID NO: 167793 - DNA, 273 bp, Glycine max
cctcgagccgaatcggctcgagctcaatccttttcgcctttgtctgacgatggcgtcgttcgaccaggcacctcccggcgatgaccaaatccggtgacaaaatcttcaggaccaagtgtgctcagtgtcacaccgtcgaaaaagtgccggtcacaagcaaggacccaatctgaatggtttgtttggaaggcaatcaggcactactcccggttattcttactcttcagctaacaagaacatggctgttacttgggaagaaaagacactatacga

SEQ ID NO: 167794 - DNA, 273 bp, Glycine max
cattctctctgtgtatttccctacctctcccttcaagatgcagatcttcgtcaagaccctcaccggcaagaccatcacccttgaggtggaaagctctgacaccatcgacaacgtcaaggccaagatccaggacaaggaaggatccccccggaccagcaacgtctcattttcgccggaaagcaacttgaggacggccgtacccttgctgactacaacattcagaaggagagtactcttcacctcgtcctccgtctccgtggtggcatgcagatc

SEQ ID NO: 167795 - DNA, 277 bp, Glycine max
cacaaacacaaacacatggcttcctccttcttctttctaacattgcttctcctctccattatctccgccgccaccccctgcccgccgtcagaacgggcagcactactggccttcaaagctgccctgaccgaaccctacttggcatcttcaacacatggtcgggcaccgactgttgccggagctggtacggcgttgcctgcgaccccaccaccggccacgtcaccgacgtcaacctccgcggcgagtcccaagacccaatgttccagaagcttggccg

SEQ ID NO: 167796 - DNA, 272 bp, Glycine max
ccaaaccctaacactcctcttcctcttcgatcatcacctctccacaatgccgccgaagttcgacccctcccagatagtcgacgtcttcgtccgcgttaccggcggcgaagtcggcgcggcgagttccctggccccgaagatcggtcccctcggtctctcccccaagaagatcggagaagacatcgccaaagaaaccgccaaggactggaagggcctccgcgtcaccgtcaagctcaccgttcagaatcgtcaggcgaaggtcacggtggtcc

SEQ ID NO: 167797 - DNA, 272 bp, Glycine max
gttacaacacatatttctttttcttttccctttttcctaggcacagcacacgccctctcaaatagaaactgagagatgaattctgatcagtttcagaagaacagcatgttcgtagaaacccctgaagatggtggcaaaaactcgacgatgatggacgagtcagaagaacgggtacatggataactgcgagtgcccatatcataacggcagtgatagggtcaggagtgttgtcacttgcatgggcaattgcacaaatgggttgggtggctggc

SEQ ID NO: 167798 - DNA, 274 bp, Glycine max
aaggaactgagagtatgtgttggaacgtggaatgttggaggaaaacttccacctgatgacctagatattgatgattggtttggcattaacgagccagctgatatctatgttcttggtcttcaggagattgtaccattaaacctggtaacatttttggtgctgaagacactcggccagtactgaaatgggaaaacattattcgagatacactgaatagagctagaccaaaagcaccaaagctgaaatccttcagtgatcctccatcaccatcaaa

SEQ ID NO: 167799 - DNA, 293 bp, Glycine max
aatcattcttcgtttgtctaagatccgccttctctgaattgtaaaaatgtcgctcggagaaactgcttgttcatacgcagctctcatccttcatgaagatggaatcagtgtaactgccgacaagatcagcaccttgttggaaactgcaaaggttcaagtagatacctattggccaaccttatttgctaaacttgctgagaagaaaaatcttggcgatttgatagccaatgcagcaggcggtggtgcaccagttgctgttgcagctgaccctgttgctgcctcaggtggtggtg

SEQ ID NO: 167800 - DNA, 296 bp, Glycine max
gcgaagagaatggctcccaagggtttaatctttttggctgtgttatgcttctcagcactgtcactgagtcggtgtcttgcggaggataatggacttgttatgaacttctacaaggaatcatgccctcaggctgaagacatcatcaaagaacaagtcaagcttctctacaagcgccacaagaacactgctttctcctggctcagaaacatcttccatgactgtgctgttcagagttgtgatgcttcactgttgctggactccacaagaaggagcttgtctgagaaggaaacagatag

SEQ ID NO: 167801 - DNA, 298 bp, Glycine max
accaaacagcatccgccgcacgacggtaaccctccaacaacaacacttccgctgcgaaaaatgtctctggtggcgaacgaggatttccagcacattctgcgtgtgctgaacaccaacgtggatgggaagcagaagataatgttcgcaatgacctccatcaagggtattggaaggagattcgccaacatcgcttgcaagaaggctgatgttgacatgaacaaaagggctggtgagttgactgctcgctgagttggatagtgtgatgactgtggtggcgaaccctaggcagttcaagatc

SEQ ID NO: 167802 - DNA, 291 bp, Glycine max
cgcatctctctctgctttctagaatgggagctgggcgtggagtctccatctcacttgatggggtgagggacaagaaccttatgcagctcaaaaagctcaatctcgctcttttccccgttcgttacaatgacaaatactatgtcgatgcactcgcttccggtgaatttaccaaactagcttactatagtgatatttgtgcttgagcaattgcatgccggctggagaagaaggaaggtggggggcagttcgggtttacatcatgacgttcagtgttttggcaccttaccgtgg

SEQ ID NO: 167803 - DNA, 296 bp, Glycine max
cctcgagcgattcggctcgaggttggattttcttaggtatctaccccagtttgggaagaccaaggttcaccttcaagggcgcatgttctatggccagccagaacctccagcaccttgcacatgcccccttagacaagcttgggggagccttgatgctctcataggggaggctcatggctgcttatgaggaaaatggtgggtccccagagactagccctgttgcaagtggctccatcagggtgtatctcaaagagattagggagtgccaaccaaggcacgaggtatcccttacaaga

SEQ ID NO: 167804 - DNA, 277 bp, Glycine max
cagggcggttgttgtccatgctgatcctgatgatcttgggaaaggtggtcatgagcttagcaaaactactggaaatgctggtggcagagtagcttgtggtatcattggtctgcaaggataaactaatcacatgaagttggaaacgtgctttagatttgtggaataaagtagcacccatttaaacccgtttggttaggtccggtctgtactgctgaattctgtgttttgcttgtattgtatcgacacttgatgcttaatcaaattgttacattgcttg

SEQ ID NO: 167805 - DNA, 292 bp, Glycine max
cacaaagcgggttactgtctgttcaagctaccatctctctctctctttcttagtgcctccttgccagaagttaaaatggcccaagaaactttcctattcacatctgaatcagtgaacgaggggcaccctgacaagctctgtgaccagatctccgatgctgtgctcgatgcatgcttggagcaggaccctgacagcaaggttgcctgtgaaacctgcaccaagaccaacatggtgatggttttcggagagatcacaaccaaggccaacgtggactatgagaagattgtgcgtg

SEQ ID NO: 167806 - DNA, 272 bp, Glycine max
ggcacttggaatccaaaaatgagagaaatcatcagcattcacataggtcaggccgggatccaggttggcaactcctgctgggaactctactgcctggaacatggcatccagcccgatggcatgatgccaagtgactcctccttcggtgtagcccacgacgccttcaacaccttcttcagcgaaaccggatccggcaagcacgtcgctcgcgccgtcttcgtcgatctcgagcccaccgtcatcgacgaagtgcgttgtggcacttaccgtca

SEQ ID NO: 167807 - DNA, 296 bp, Glycine max
gtgatcggtgttgacttgatccttcataagtcgtcatcatcatcatcatcatcaccgttgattgaagaagatgccgatcaggaacatcgccatcggaaggcctgaagaggctactcaccccgacacgttgaaggcggggttggctgagttcatctgcacgcttgatcttcgtgttcgccggttcaggttccggcatcgcctacaacaagctcaccgacaacggcgccgccagtcccggcggcctcatctccgcttccatcgcccatgctttcgccctcttcgtcagcgtctccgtc

SEQ ID NO: 167808 - DNA, 294 bp, Glycine max
cactaacatcacaacttctctctttctacacaagtaactctacacgcagtgtgagcagttgataagagagatgatgatcaacgtgaacgaatcgaccatggtgcggccggcggaggaggtggcgcggcgggtggtgtggaactccaacgtggacctggtagtccccaatttccacacgcccagcgtctatttctataggtccaatggcgcccccaactttttcgacggcaaggttatgaaggaggcactgaccaaggtgctggtgcccttctacccaatggctgggcggctcct

SEQ ID NO: 167809 - DNA, 289 bp, Glycine max
tcttgacgttcggagagacgctgtgctcggtgttcattccgctcataggaatagtcgaagctttggttttcacattcgccagttgcttcgatttccaatctcccaagaagaataagaaacattcttctaccttcgatgacattctcaccctcgccgaggattctccatttagtgttaatgaaatcgaggcgttgcatgagttgttcaagaagttgagtagttctatcattgatgatggctcatccacaaggaagagtcgcattggcatgttgaagacaccactggcgag

SEQ ID NO: 167810 - DNA, 291 bp, Glycine max
caaagattgagccatgcatgtgtaagtatgaactaattcagactgtgaaactgcgaatggctcattaaatcagttatagtttgtttgatggtatcttctactcggataaccgtagtaattctagagctaatacgtgcaacaaaccccgacttctggaagggatgcatttattagataaaaggtcaacacaggctctgcctgttcgcttgatgattcatgataactcgtcggatcgcacggccttggtgccggcgacgcatcattcaaattctgcctatcaccttcgatgga

SEQ ID NO: 167811 - DNA, 294 bp, Glycine max
cgacttaacaacagcacaaagcgggttactgtctgttcaagctaccatctctctctctctttcttagtgcctccttgccagaagttaaaatggcccaagaaactttcctattcacatctgaatcagtgaacgaggggcaccctgacaagctctgtgaccagatctccgatgctgtgctcgatgcatgcttggagcaggaccctgacagcaaggttgcctgtgaaacctgcaccaagaccaacattgtgatgggtttcggagagatcacaaccaaagccaacgtggactatgaga

SEQ ID NO: 167812 - DNA, 290 bp, Glycine max
actcgagcgaatcggctcgagcgttcagctcgcggataaggctaacgtttgcacccagcgactcatggaaacgtccttatacagttggactcctggtagctggattagatgaatcaggagctcacctctattacaactgtcccagtggaaactattttgaatatcaggcttttgctattgggtctcgctctcaagctgcaaagacatatttggaacgcaggtttgagaattttgtgggctcttcacgagaagatctgatcaaagatgcacttattgcaactagggagtcc

SEQ ID NO: 167813 - DNA, 289 bp, Glycine max
cctcgagcgaatcggctcgaggccagcttttagtggggttggtcacctcatataggtatattggtgatgagatcaatccacaaattggcacaaactgaggctgaaattcttcatgatgctgtgaaagacaagaagggtagctatgaagagaccattagggtcttgaccacaaggagcaggacccaacttgttgcaactttcaaccgctacagagagatccatggcacttccatctctaagaaactggtggatgaaggatctggtgagtttcaaagggcattgtacactg

SEQ ID NO: 167814 - DNA, 289 bp, Glycine max
cccgaacaaaatgtcgattaacagcgaatctacgccgccaccgctgatcggcaaaatcgggccttacaccgtcttcatgacgccgccgtctacacccaaaccctccgacgaccaccccgtcaccaccaagatcgcacctccgccgcctcagattcccaaagccgttccttcccccaaacccgtctccgaccccgacgattccgtcttcggcttcttcagaaatgccgttaccaaggtccaaaccgcacactcaagtttggatgatcatttggcacgttggtttgggttg

SEQ ID NO: 167815 - DNA, 293 bp, Glycine max
gtggtgcttatcgctgtggttatcatcttcttcttcctctttcttagatctcttctttctctacgccgcacgccgaaaccatggccggaaaaggagagggtcctgctatcggaatcgatctcggaaccacctactcttgcgtcggtgtgtggcaacatgaccgcgttgaaatcatcgccaacgaccaggggaacagaaccacgccgtcttacgtcggattcactgacaccgagcgtctcatcggtgatgcggccaagaatcaagtcgccatgaaccccatcaacaccgtcttc

SEQ ID NO: 167816 - DNA, 295 bp, Glycine max
tcgatgatgaaaaacgtatcatggttttggacccggtttggccgtggatcatcctccaatttcagcacagtaagtatagcatccagttcttccaatgactccgtcgacagtagcatccaaaaccaaaactacagatacgatgtatttatcagtttcagaggtcctgacacccgcaacactttcgttgatcatctttatgcccatctcctccgaaagggtattttcgtctttaaggatgacgaaaagctccagaaaggagaatccatatcagcacagcttctacaagcacttcaag

SEQ ID NO: 167817 - DNA, 294 bp, Glycine max
  unsure (1)..(294): unsure at all n locations
gagattcccaacaacagttctggactatnttgttcagagtcatgagattcccaacaacagttctgatcaccattgttcacagttatggtgtgattctaaaacccaatgtttcaatggacacatgcaatgtgtttgaaggaagttgggtgagggatgatagctaccctttgtatgatgcttctcactgcccttttgctgaaaggggttttaattgccttgctaatgggagaaaagatagaggttacacaaaatggaggtggaaacctaagaactgtgagattccaaggtttgatg

SEQ ID NO: 167818 - DNA, 264 bp, Glycine max
cttctcatcattcacccaacaaaatggctctgcttctgatagtagccatttcactggtaaccctctggctcggttacaccctataccagccgctacgcttcaagctccctcctggcccacggccctggccgcgtagtcggtaacctctacgacataaaacccgtccggttccggtgcttcgctgagtgggcgcagtcttacggccctatcatatcggtctggttccgttccgacctaaacgtcatcgtttcaaactcggagttg

SEQ ID NO: 167819 - DNA, 288 bp, Glycine max
cgtttccatttcttgcttctattatttacttgtttttctctagtattcatggtgctcgctggtaaacttagtactgaacttggggtgaaagcatccgctaccaaatggttcaacctcttaaccacgcaacttcaccatgttcagaacctttgtgaaagagtgcatgaaaccaagctgcatgatggtgatgactggcacggtgttggtaattcggttaaacactggacttatgtcatagacggcaaggtacacacatgtcaggagagtattgaagccattgatgaagag

SEQ ID NO: 167820 - DNA, 290 bp, Glycine max
gagatgatggcatcatttgcagggactactcagaagtgcaaagcatgtgagaagactgtgtatttggtggatcagctcactgctgacaacaagatctatcacaaatcatgtttcagatgctaccactgcaagggtacccttaagttgagtaattattgttcctttgagggtgttttatactgtaagcctcattttgatcaactctttaagaagactggcagcttggacaaaagttttgaaggtattccaagaactgcaagacttgaaagatctgccgatcaggtccaaac

SEQ ID NO: 167821 - DNA, 290 bp, Glycine max
ctagaatggaatttcgatgctcagtcatctcttttaccattctcttctctcttgctcttgcaggagagagccatgtccatgcatcgctacctgaggaagattattgggaagctgtttggccaaacactcccattcccactgcactgcgagacttctaaagcctctgcctccaggtgttgaaatcgatgaactccctaagcaaattgatgatacacagtacccaaaaacattcttctataaagaagagcttcatccaggcaaaacaatgagagtacgattcaccaagcgtc

SEQ ID NO: 167822 - DNA, 293 bp, Glycine max
tgcacctgttcctttctccctcgccgatcgcgatgttcagactattgttgatgcatataaggatgatcctgggaaccccaagtacgcctttaagcatttgttgttcagtgtaacagaaccgcagtttagagtgaagcctgctggtgtatcagatatcatgtgggcagaggcaatagggaagcttcagggtatggaacagtcctgatagagaacgcctgtggccacagcttgttcagggttttaaggatctttcacaacgccttaagatacaagatgaagtcatcgtttctgat

SEQ ID NO: 167823 - DNA, 291 bp, Glycine max
caacacttcatttcttactctcactgaaaaaaaatagcttgttcacaccatcctattttttcaactcatatatacaaatatatataacatggcttctaccttctctcgaagcctagcacttgtaagcttttacattgtcgtttgtgctgccggtaacttgaaccaagactttcagcttacgtggggagatggtcgtgctaaaatactcaacaacgaaaatcttctcactctctcccttgacaaggcctctggctctggcttccaatccaaaaacgaatacttatatggcaa

SEQ ID NO: 167824 - DNA, 293 bp, Glycine max
ctaaggacttgtggtcctggaaaaatgaaggtattgtattggcagcagaggaatccaatgtaacccatgacctgtacaagactaatgtgcttgagaggccaaaagtaatttacaacgagaaaatcagaaagtatgtgatgtggatgcacatcgacgatgccaattatacaaaagcttctgttggcacagcaattagtgacacacctgatggtccatttgaatatcttggtagccaaaggccccagggatatgaaagcagggatatgacagttttcaaagatgaggatggtgtg

SEQ ID NO: 167825 - DNA, 290 bp, Glycine max
ggtgatgataacttaattagtgttcatgaatatgtcaagccttactttagtggttctaaattgaaaagctttctagctggtcataatatcaccattactgatggtattgacaaaactagtgcaactttgcaatttagaaagttagcagattgcgattttctcaagagaaactttaagcagatgtctaatgttttgtggtgtggtcctgaggacaagccgagtttatggtcacacttcattaggtttcttgtaataatctggagatgcaagaagcttatctggtcaatctc

SEQ ID NO: 167826 - DNA, 287 bp, Glycine max
acaacatcgatatgaaccccaagtttattatggctaatggcaatttggtgcgggttctcatacataccgatgttactaagtatctctatttcaaagctgtggatgggagctatgtgtttaataaaggaaaggttcataaggtgcctgcaaacgacatggaggccttgaagtccccacttatggggctatttgaaaaacgccgggcacgcaagtttttcatttatgtgcaaaactacaacgagagcgatcccaagacccacgaggggatggacttgacaagagtgtct

SEQ ID NO: 167827 - DNA, 287 bp, Glycine max
ccggaagaacgaagcctcctcgttcttcttcttctgcgctttctctctccctctctagaaccgtaaccgtcgtttctttctttctctctcaccaaccagagataaagagtcaccttcttatttttctgaatctcgcggcgttgttctttctgctgctgcggctgtggttccggcggcgatgggacagcaatcgttgatctacagcttcgtcgctcgaggcaccgttatcctcgcggagtacaccgagttcaccggaaacttcaccggcgtggcggcgcagtgcctcc

SEQ ID NO: 167828 - DNA, 289 bp, Glycine max
agaagatgtcgtacctgttgcctcacttgcactctgggtgggcggttgatcaagcaatcctggcagaagaggagcgtctggtcgtgatccgtttcgggcacgactgggacgaaacctgcatgcagatggacgaggtgttggcgtcggtggcggagacgataaagaactttgcggtgatatacctggttgacataacggaggtgccggatttcaacaccatgtacgagctctacgacccttccacggtgatgttcttcttcaggaacaagcacatcatgattgatctggg

SEQ ID NO: 167829 - DNA, 290 bp, Glycine max
ctcggcgtcgccatggacgaagaagaggtgcgcaagatcttcagcaagttcgacaagaacggcgacggcaagatctcgtgcgcggagctgaaggagatgatggcggcgctgggatccaaaacgacgtcggacgaggtgaagcgcatgatggcggagctggaccggaacggcgacggctacattgacttgaaggagttcggcgagttccactgcggcggcggtggcgacgggagggagctccggaggcgttcgagctgtacgatctggacaagaacgggctgatctcggcg

SEQ ID NO: 167830 - DNA, 289 bp, Glycine max
agaagatgtcgtacctgttgcctcacttgcactctgggtgggcggttgatcaagcaatcctggcagaagaggagcgtctggtcgtgatccgtttcgggcacgactgggacgaaacctgcatgcagatggacgaggtgttggcgtcggtggcggagacgataaagaactttgcggtgatatacctggttgacataacggaggtgccggatttctccaccatgtacgagctctacgacccttccacggtgatgttcttcttcaggaacaagcacatcatgattgatctggg

SEQ ID NO: 167831 - DNA, 176 bp, Glycine max
aggggtactcgtattattggtcgtctttgtgctggtaacaagaatgggcttctcttgccccataccaccacagaccaagaacttcaacatttgagaaacagtctacctgatcaagttgttgttcagcgattagacgaaaggttatctgctctgggaaattgtatagcatgtaatga

SEQ ID NO: 167832 - DNA, 283 bp, Glycine max
catcaatctcgtgtgttctcactaactattacttcatcatgtcgtcgagcacagttggtcaagtcatcaaatgcaaagctgcggtttcatgggaggcagggaagccacttgtgattgaagaagtagaggtggcaccaccacaagctggtgaagtgcgtttgaagatcctctacacctctctttgccacactgatgtttacttctgggaagccaagggccaaactccattgtttcctcgtatatttggtcatgaagctggagggattgtggagagcgtaggtga

SEQ ID NO: 167833 - DNA, 290 bp, Glycine max
cttgttctatgtcttactctccctgtgtttttcttgttcttcatccaacaccttacagccttcaagaaacccccctacctccaggtcctaaaggccttccaataattggaaatttacataaattagataactccattctttgcatgcagctatggcacctctcaaagaaatatggccctatattttcccttcaattaggtttaaggaaaactattgttatttcctcaccgaaattggccaaagaggtactgaaaaaccatgacctagagtttagtggacgacctaaacta

SEQ ID NO: 167834 - DNA, 285 bp, Glycine max
cgcaatgagttcgtcgaacctcagagatcttcaacgcgaattggagaacaaagccaatgatctcagcaagcttcaaaaggaaattgcgaagaatcaccaaatgagaaagaaatacacggtccagcttggcgagaacgagctcgtccttaaggaactggatttattgaaagacgacgcaaatgtttataagttgattgggccagtacttgttaagcaagatttggccgaggccaatgcaaatgtccgcaagagaatcgaatacatctcagctgaattgaagcgtct

SEQ ID NO: 167835 - DNA, 285 bp, Glycine max
cactcgagccgattcggctcgagaagaaatcaggagaaggtctcttacagtgtgttctccaagaccaagaacaagaagaaaatgctggggaaagactatgttagaaaagggtcagggtccatgtttgatcttgaagagattgaagaagggcttgaacggtatgaggatctagagaaatcatccctcatgtcccagaaaagttttgagaacgattcgggcagtcaccagtgttcattgcttccaccttgatggaaaatggaggacttctgaaggcacaaatagcca

SEQ ID NO: 167836 - DNA, 265 bp, Glycine max
cggctcgagattcagttctatacaaaatcctcaaaaactcttcctctctgccatgaccatggaatacagaaccttagaactcaacatcatatccgcaaaggacatcaagaatgttaatctcttctccaagatggacgtatacgccgccgtttcgctctccggtgaccctctccaccctcagggcgccaccacccacgtccacaaagacgccggcagcaaccccacgtggaactacccctgaaatccctgtcacggatcgctggcg

SEQ ID NO: 167837 - DNA, 287 bp, Glycine max
ctacaacttctgctacttcctactccaaccgcacttctgttccgcaattatcatgggcaaggtcaagatcggaatcaacggatttggaagaattggccgtttggtagccagagtggctctgcagagagacgatgttgaactcgttgccgttaacgaccctttcatcaccaccgattacatgacatacatgtttaaatacgacagtgttcatggacactggaagcatcacgatgtcaccgttaaggacgagaagacccttctcttcggtgacaagccagtcactattt

SEQ ID NO: 167838 - DNA, 285 bp, Glycine max
agtcgagcgattcggctggcccctttctccttctaacgagtgaggaaaaatggcgcgtaagaagatcagagaacgtgactcaaagaggttgttgaaggagcactttaagagactctctggcaaggagttgccgatcaagtctgcacaaattaccgcatcaactgatttcactgagctacaagagaaggaaccctggctttcatcttctaaattggttgttaaacctgacatgttatttggaaagcgtggcaaaagtggtttggttgccttgaatttggattttgc

SEQ ID NO: 167839 - DNA, 285 bp, Glycine max
tgatgacccaaattatgtttgagactttcaatgtgcctgccatgtatgttgcaattcaggctgtcttgtctctgtatgccagtggacgtactacaggtattgtgcttgattctgggtggtgtgagccacacggtgcccatatatgaagggtatgctcttcctcatgcaattcttcggttggaccttgctggccgtgatttaacagagtacttggtgaaaatccttaccgagagaggatactccttcagcacctctgccgaaaaggaaattgtccgtgatgtgaag

SEQ ID NO: 167840 - DNA, 285 bp, Glycine max
cagcgttttctgactctcctgctccatcagtaacaagggtcttgtatactgacaaggatgttttaggtcgcaggtatgtaaaaacccagatggaacttgctggtctatctgtgagagaggatgctgttggtaacatatttggtcgttgggatggcgttgaacctgagcttgctgcagttgcaacaggttcgcacattgatgctataccttactctggaaaatatgatggagttattggtgttttaggtgctattgaagccatcagagtcccgaaaaggtctggtt

SEQ ID NO: 167841 - DNA, 283 bp, Glycine max
agaataccctgttgatatatcactgccagacataaacaacggtgtatatggaacagatgattttaggatgtacaacttcaaggtgaagccttgctcaagggcttactcccatgactggaccgagtgtccattcgttcacccaggggagaacgctaggaggagagacccacggaaatacccttacagctgtgttccttgccagagttccgcaaagggacctgccagaacggtgattcctgtgagtatgctcaggtgtttttgagtcctggctgcatcctgccca

SEQ ID NO: 167842 - DNA, 288 bp, Glycine max
cttttctctcttctcacagccttcttcactcacaggaggtgcagatgtcgactccggctaggaagagactgatgagggattttaaaagattgcaacaagatcctcctgctggcatcagtggggctccccaagacaataatattatgctttggaatgctgttatctttggcccagatgacaccccttgggatggaggtacgtttaagttgacacttcagtttacagaggattatcctaataaaccacctactgtgcgctttgtttctcgaatgtttcatcctaacattt

SEQ ID NO: 167843 - DNA, 283 bp, Glycine max
ctctctcttgcaaaacctaattttcatttcttcactcaaatttcaaaatgcgtgagatccttcacatccagggtggccaatgcggcaaccagatcggcgccaagttctgggaggtggtttgcgcggagacgggatcgaccctaccggaaggtacggtggggactcggagttgcagctcgagaggatcaatgtctactacaacgaggccagttgcggtcggttcgtgccgcgcgcggttctcatggacctcgaaccgggcaccatggacagcgtccggtccggg

SEQ ID NO: 167844 - DNA, 290 bp, Glycine max
cttggctcgctccctctcggatcagatctgcgctctccgttctcagatcgcgttttgtttcaattcgacactttcctcgcttcaaagattacgcgaacaatatggttgtccttgctgcatccattgtgagcaaatctggcaaagtgctagtttctagacagtttgtggatatgactcgcataagaattgagggtcttctagcagcatttcccaagttggtagggactggaaaacagcacacgtatgttgaaactgagaatgtgcgctatgtttaccagccaatagaagca

SEQ ID NO: 167845 - DNA, 289 bp, Glycine max
  unsure (1)..(289): unsure at all n locations
tgtctattccatcttccactctttcacactcagctatggctgccaatctcaaaactcattcctttcctattcttaacaacccttttagtttccctccaagttaatgccagagacagccaattcttcagcaaagtcacccctctcaacaacaacatcaaagagactgagactcccaaaaatgaaggccaagtaaacaagccagaacaacaaccaacattcattcctgaaaccgnaaacagttatggcctatatggtcatgagactggtctgcgacctcccaccactacaa

SEQ ID NO: 167846 - DNA, 285 bp, Glycine max; identical to SEQ ID NO: 102394

SEQ ID NO: 167847 - DNA, 279 bp, Glycine max
gctgtgtgttgtgcaagtactaccttctctagctagattgctagagctagaatttcaacctacctatgtgtactgataagatctgcttccctacttaaagagagcatcatcctgtgatcagtatgtcttaaaaaaaaaaaaaaaaaaaaaaaaaaaaaaaaaagggggggcccccgataaggaaccccctcacccgggaatttatttcgggccggatacccgaaggggaaaaatttccccaaaggggggccgaataaagctgggggaaaccggggccaa

SEQ ID NO: 167848 - DNA, 251 bp, Glycine max
cttctttctctcttctctctctgtccgaagatggcttcacgcaggttcgtatcttctctgattcgatcctcccttcgtagatctcaatcgaaaccctcgatttccgcatccgcatcgaccctcacgtcatccaaccgtgcctctccgcacggttacttgctgaaccgcgtcgccgaatacgctaccgcggcggcggctgctaccgctcctcccactgctccgccccgggccagaaggaggttagcggcggc

SEQ ID NO: 167849 - DNA, 279 bp, Glycine max
gtaaatcaggaaatactttcccattcatgctagatattctgagctaatattctaatgttggtatcaggactctggattcccctgcttcaaaggtggtccacggacaatacagaaccttagaaagcgcttccatctcaatttaacagaagaggtttcaatactaatattagttactccttaactgtaattttttttgcctgtttgctacatttttttctttcttggcagcaatgtgtatctttggtgctttccctcattagcagtagcctggatgcatgg

SEQ ID NO: 167850 - DNA, 287 bp, Glycine max
ctcatggcacccacgactatcaccaggaaaccctcaacaatctcaagactgccatgcacaacactggcatactctgtgccgtcatgcttgacactaagggacctgagattcggactggttttctgaaagatggaaaacctattcaacttaaagaagggcaagaagtcaccataactactgattatgacattaagggggatccggagatgatatccatgagttacaagaagctgcctgtccacttgaagcctggaaataccatactgtgctctgacgggacgattact

SEQ ID NO: 167851 - DNA, 286 bp, Glycine max
cgaggatggagatgtatcagatctggtgcaggagaatagcgttgggagcgctcggcatattctgactttcctatcggcctcagcagacgacgtcgttgtgctctctgaagataacttacgagaaggaagttggtcaggacagaggagctctcgttgagttctatgctccttggtgtggacactggaaaaagcttgctccagaatatgcacagcttggtagcagcttcaggtaagccatatctgttgtaatcggcaaagctgactgtgctgagcgacaagagtttgt

SEQ ID NO: 167852 - DNA, 278 bp, Glycine max
atcgaatccaatccaccaaatcggcgacgtcgccttccgctacagatccgcggcggaaccaccgtatctgactatctccgattgatcttccgataaaagtggaccggaaatgccggttgccgcttccgccatttactttctcaacctccgcggcgacgttctcatcaaccgcctctatcgcgacgatgtcgggggaaatatggtggatgcttttaggacgcatgttatgcaaacgaaggagcttggtacttgccctgtgaggcagattggtggatgct

SEQ ID NO: 167853 - DNA, 276 bp, Glycine max
gtcgggtgtactttcttgcgaaaccgagagagcgaaggggcaaacacaattttttttatcttcttttttattttttgtagagagagagagagagaaaatgttggggatcttcagcagttcagtggtgtcgccgccggaggagctggtggccgctggcagcagaacgccgtcgccgaagacgacggcggggaagctgctgaaccggttcgtggagagcaaggcgtcggcggtgtcgctgcaggtgggggaacagtgcagttggcttacacacaccac

SEQ ID NO: 167854 - DNA, 281 bp, Glycine max
tcgagcgaatcggctcgagttttattccttctttgtttcacgcactttcttccatacgcataaccatggcttctacagaccgttgtcctcaaagttggtatgtcatgtcaagggtgtgctggagctgtaaacagggttttggaaaaaatcgaaggtgttgagtcatttgacattgatctgaaggagcagaaggtgacagtgaaaggaaatgtgcagccggacgaagttctgcaagccgtttccaaatccggaaagaagacggcatctgggtggatgaagca

SEQ ID NO: 167855 - DNA, 277 bp, Glycine max
ctaaacctccttcaagcttcagcatcctttggagagaaggcaggctgaagcttctcgcattagagagaaatatcctgatagaatacctgtgattgtggagaaagctgaaagaagtgacattactgacattgataagaaaaaataccttgtccctgctgatttgactgttggccagtttgtttatgttgttcgcaaaaggattaagctcagtgcagagaaggctatttttgttttcatcatcaacactctacctccaactgctgcattgatgtctgct

SEQ ID NO: 167856 - DNA, 285 bp, Glycine max
  unsure (1)..(285): unsure at all n locations
aacactctctcttctcgctcttggcttttcgctcttcactcactctcattcattcatttccaccgttcatggatccctcaagcgtgtggggtaacacgnccttggcganggtggatcccgagattcatgacctcatcgagaaggagaagcgccgtcaatgccgcggaatcgagctcatcgcctccgagaacttcacctccttcgccgtcatcgaggccctcggcagcgctctcacgaacaaatactccgagggcatgccgggcaaccgctactacggcggcaatg

SEQ ID NO: 167857 - DNA, 112 bp, Glycine max
atctggaagcagatggctgatgctgggatcaagtacatccccagcaacactttctctcactatgaccaggttctcgacgccaccgccaccctcggtgccgttccaccaaggt

SEQ ID NO: 167858 - DNA, 284 bp, Glycine max
aacactctctcttctcgctcttggcttttcgctcttcactcactctcattcattcatttccaccgttcatggatccactaagcgtgtggggtaacacgcccttggcgacggtggatcccgagatccatgacctcatcgagaaggagaagcgccgtcaatgccgcggaatcgagctcatcgcctccgagaacttcacctccttcgccgtcatcgaggccctcggcagcgctctcacgaacaaatactccgagggcatgccgggcaaccgctactacggcggcaat

SEQ ID NO: 167859 - DNA, 286 bp, Glycine max
gatcgaagcgaaaagagagaaattcatcgtcgcagtaatcatgggtaaggttcatggatcacttgcacgtcgccggtaaggttagagggcaaaccccgaaggtggccaagcaggataagaagaagaagccacgtggccgcgcccacaagaggatgcagtacaatcgccgattcgtcaccgccgtggtgggattcggcaagaagaggggacccaactcgtctgagaagtgaggccgaggcttgaggaatatgttgctactctatttgatttatctttgttgtttttt

SEQ ID NO: 167860 - DNA, 279 bp, Glycine max
gttcgtatcttctctgattcgatcctcccttcgtagatctcaatcgaaaccctcgatttccgcatccgcatcgatgcccacgtcatccaaccgtgcctctccgcacggttacttgctgaaccgtctcgccgaatacgctaccgcggcggcggctgctaccgctcctccctctgctccgcctccgggcaagaaggaggttagcggcggcgggaagatcaccgatgagttcaccgggaagggctcgatcgggcaggtctgccaggtcatcggtgccgtcgt

SEQ ID NO: 167861 - DNA, 275 bp, Glycine max
tggagggtacgccgtgaattcaaggctaacaagatctccgaggaagagtatgtaaagtcaattaaggaggaaattcgcaaagttgttgagcttcaagaagagcttgatattgatgttcttgttcatggagaacagagagaaatgatatggttgagtactcggtgaacaattgtcaggctttgccttcaccgttaatgggtgggtgcaatcctatggttcccgttgcgtgaagccaccgatcatctatggtgatgtgagccgcccaaagccaatga

SEQ ID NO: 167862 - DNA, 281 bp, Glycine max
ttcacctgaaacttgcttttgttcccgattttctcaaattgctttcggttttcgttctgattctgcaaaatcatggagatggagcgcatcgttgaattccctcacacctacatggatcgacccccaagatagagagcgcgtttgggctgggacatcgctgaggcccccaagataagatccatagtaaaatgggcgaaggaacttttgggcaggtcttggagtgctgggacagagaaaggaaggaaatggttgccataaaaattgtccgtgggataaagaag

SEQ ID NO: 167863 - DNA, 284 bp, Glycine max
gcactatagaaaaaaaaggacattcattcatctatggctacccttattgctcccagcaaccactctccccaagaagatgctgaagctctcagaaaggcttttgaaggatggggaactgatgagaacactgtcatagtaattttgggtcatagaactgtgtatcagaggcagcaaatcagaagagtttatgaggaaatttaccaggaggatcttgtgaagcgcctagagtctgagatcaaaggagactttgagaaagccgtgtaccgatggatactggaacctgc

SEQ ID NO: 167864 - DNA, 283 bp, Glycine max
cactcattaattgcaagaatggcacttcgttgcttggtgatgtccctttctgttctcttcactcttggtcttgcgagagaaagccatgccagagacgaagatttttggcatgctgtttggccaaacactcccattccaagttcattgcgagatcttctaaagcctggccctgcaagtgttgaacccgatgctcaccctatgcaaattgaagaaacacagtacccgaaaaccttcttctatcgagaagaccttcatccaggcaaaacaatgaaagtacaattca

SEQ ID NO: 167865 - DNA, 282 bp, Glycine max
gcactggagctgctaaggctgtaggaaaagttcttccagcgctgaatggtaaattgactggaatgtccttccgagtccccactgttgatgtttcagttgttgacctaactgtcaggctagagaagccagcaacctatgagcaaatcaaagctgctatcaaggaggaatcagagggcaaactgaagggtattttgggatacaccgaagatgatgttgtgtctactgattttgttggtgataacaggtctagcatatttgacgccaaggccggaatttctttga

SEQ ID NO: 167866 - DNA, 276 bp, Glycine max
gcactggagctgctaaggctgtaggaaaagttcttccagcgctgaatggtaaattgactggaatgtccttccgagtccccactgttgatgtttcagttgttgacctaactgtcaggctagagaagccagcaacctatgagcaaatcaaagctgctatcaaggaggaatcagagggcaaactgaagggtattttgggatacaccgaagatgatgttgtgtctactgattttgttggtgataacaggtctagcatatttgacgccaaggccggaattt

SEQ ID NO: 167867 - DNA, 277 bp, Glycine max
gcacattggacgggtcgaccgtacagagtgtttagtcttgacactgggagactgaatccagaaacctacaaattttttgatgcggttgagaagcattatggaattcacattgagtacatgttccctgatgcggttgaggttcaggcattagtaagaactaaagggctcttctcattttacgaggatgggcatcaagagtgctgccgagtaaggacagtgaggcccttgaggagagccttaagggtctcaaagcatggatcactggacagagaaaaga

SEQ ID NO: 167868 - DNA, 273 bp, Glycine max
ttatctttagttcttcagtaatttattgtgggattctattctaagattttgagaatgtctagctgtgggtgtggaagcagctgcaactgtggcagcaactgcggttgcaacaagtactcttttgacttgagttacgttgagaagacaaccacagagactctagttttgggtgttgggcctgtgaaggccaattggagggtgctgaaatgggtgttgcatctgagaacggtggccgcaactgtggatcaagctgcactgtgacccatgcactgc

SEQ ID NO: 167869 - DNA, 280 bp, Glycine max
ctacagtgcctttgagccatcctccatgatggccaagtgtgaccctcgccacggcaagtacatggcgtgttgtttgatgtatcgcggcgatgtcgtgccgaaggacgtgaatgctgcagtggctaccattatgaccaagagaaccatccagtttgtggattggtgcccgactgggttcaagtgtggtataaactatcagcctccaaccgttgttcctggaggtgaccttgccagggtgcagagggctgtgtgcatgatttctaactccaccagtgtggct

SEQ ID NO: 167870 - DNA, 278 bp, Glycine max
  unsure (1)..(278): unsure at all n locations
ctcgagcgaatcggctncgaggattcagccccatagacatgacggtattttcattgcactgggtanagaagacgctactgttactaagaatcttgttcctggtgaagctgtttacaatgagaaaaggattactgttcagaacgaagatggttccaaagatgagtacagagtttggaatccttttcgatccaagttggctgctgccatccttggtggagttgacaacatatggattaaacctggagccagagtcctttacctaggagctgcttctggaa

SEQ ID NO: 167871 - DNA, 288 bp, Glycine max
  unsure (1)..(288): unsure at all n locations
ncgacccttcaagctgattcagcaccagtaccaccaccgtcaccggattccgcagccaccaacggcatctcccccaccgcagaggaagccccacaaccaccgtcaccaccaccgccgcatccaaccccacctccagaactgcgcgtcccaatatggtggccggaagacgggaacctcagcatggattgggtggacaacctgatgcggtgcttcgattggtcctctcggaacgtcgccannctcggagctcccttcggttctccccgtcggagtcttcgattcgctcat

SEQ ID NO: 167872 - DNA, 275 bp, Glycine max
tctttgcgcagttccctacctctcctttcaagatgcagatcttcgtcaagaccctcaccggaaagaccatcacccttgaggtggaaagctctgacaccatcgacaacgtcaaggcctagatccaggacaaggaaggaattcccccggatcagcaacgtctcatcttcgccggaaagcagctcgaggacggccgtaccctcgccgactacaacatccagaatcagtcaacccttcaccttgtccttcgtctccgtggtggcatgcagatctcgtca

SEQ ID NO: 167873 - DNA, 277 bp, Glycine max
tgcaaggttgctccaattccaggggaaacaaaagtatggcagtatataaccctaacaaagaggatctttctgattgattgtccaggtgttgtctaccacaacaatgattctgaaacagatgttgtgttgaagggtgtggtgcgtgtaactaatttgaaagatgctgcagaccatataggtgaggttttgaaacgtgtgaagaaagagcatttggagagagcatataaaataaaagagtgggatgatgagaatgactcttactgcagtttgcaaatca

SEQ ID NO: 167874 - DNA, 276 bp, Glycine max
ctgcatcgaacccgtcgtagcagaaaaacttgtcaccatggtttcttccgacaaggatccacgagaggatgtccttcaagcctggtacatggatgatagtgatgaagatcaaagactcccccaccacaaagaacccaaggagtttgtctcgttggaccaacttgctgaacttggagtccttagctggaaactagatgctgataaccatgaaaatgatccagagctgaagaagattcgtgaagagcgtggttacacctacatggatgtttgtgaggt

SEQ ID NO: 167875 - DNA, 273 bp, Glycine max
gatcttcatagccattgttccctcttgcttcttatgattggatctagatggcaaaaccaagttcagctgatggtaggactagaagccatgtgcaaatctttatagtagttggtctgtgctgcttcttctatatattgggagcatggcaaagaagtggttttggtaagggagatagtatagcattggaaattactaagaaagtgcagactgtaatgtagttcccaatttgagttttgactctcaccatggtggagagttagcaaattggtgatt

SEQ ID NO: 167876 - DNA, 276 bp, Glycine max
agatcgagcgaatcggctgaggccgcagcacgaggagcagccactaggaggagaaggaagtctcacaggaagttcgaacacccaaggcacggttcactgggatttcttcccaggaagcgtgtgctcgtcacaggggaaaagtgaaggcattccccaaggatgacccatccaaggcacccaagctcactgcattcttgggttacaaggccggtatgactcaattgttagagaggtcgagaagccaggatcaaagcttcacaagaaggaaacttgtga

SEQ ID NO: 167877 - DNA, 280 bp, Glycine max
ctgaaaggtaaaagggcttttattgctggtgttgctgatgacaatggatatggatgggcaattgcaaaagctcttgctgcagcaggagctgagatccttgttggcacatgggtacctgccctgaatatttttgagtccagcctacggcgtggaaagtttgacatatcacgcatattaccagatggctcgatgatggagattaccaaagtttatccattggatgcagtttttgacaatcccgatgatgtgcctgaagatataaaaacaaacaagcgctatg

SEQ ID NO: 167878 - DNA, 272 bp, Glycine max
caaacacttgtgaagtctgcgaacgtagccttcttgattctttccgcttctgttctcttggttgcaagattgttggaacatctaagaacttccagaagaggaagaaacagtcaatgttaatgtcatcagattctgaggactcatacagcagcaacagcgtccatggccttaagaaaaacttcaaagttcagagcttcacaccatccacaccacccccaacatcggttaattacagaacggccaagagaagaaagggaataccacaccgtgcg

SEQ ID NO: 167879 - DNA, 271 bp, Glycine max
aagaaaagcaaccaaaaatggttctcacatccactgccacacacccagatgaacaagaccagagcctaaactatacttttgcttccagatatgtgcgtgaacctattccaaagttcaagatgccggagaaatccataccaaaagatgctgcttatcagataataaacgatgagttgatgttggatggtgcaccaaggctcaacttggcctcgtttgtgaccacttggatggagcctgagtgtgacaagctcataatggcttcacttaacaa

SEQ ID NO: 167880 - DNA, 267 bp, Glycine max
atcacttccaattgctctcactagtcactactactactggagatggcttcaactgcctcttgcacttctatttccccttctagtgatggttgcctttgctggtgacttaaacaaagactttgacatcacttggggagatggccgcgccaagatactaaacaatggagagttactcactctttcattggacaaagcatctggttcaggttttcaatcaaagaatgagtatctctttgggaagattgacatgcagctcaagctcgtccc

SEQ ID NO: 167881 - DNA, 266 bp, Glycine max
caaatttctcagtctccggaactcgtttctaccttcacttcgcacatctcgaaccctctctttccggcaactaggttaaagttcatcaatggcaggtcgtggcaaaaccctaggatccagcgccgccaagaaggccacctcaaggagcagcaaagccggcctccaattccccgtcggccgtatcgcccgtttcctcaaggccggaaaatacgccgagcgcgtcggcgccggtgctcccgtttacctcgccgctgtcctcgaatatc

SEQ ID NO: 167882 - DNA, 264 bp, Glycine max
gaaaatagagcagaaaacggtgagtacgaatggaataaacatgcacgtggcatccattgggtcacgcccagtggtactgttcctccacggcttcccggagctctggtacacgtggcgccaccagcttctgtccctctccgctgcgggctaccgggccatcgcccctgacctccgcggctacggcgacactgacgctccgcccgacgcttcctcacactccatcctccacatcgtcgccgacctcgtcgggcttctcgacgcttt

SEQ ID NO: 167883 - DNA, 270 bp, Glycine max
  unsure (1)..(270): unsure at all n locations
atattctcggacaatcattcaacgaatcaaacaacggaagctactcttgttcgtcgccggagactggtagctcctctaacattccaaacacttttcactccgacgaggaagtgcacacactagcttcggcgcgtcctaanaaacgtgcggggcgtcgaatttttaaggagacaagacacccggtgtaccgaggagtacgaaggaggaacaacaacaagtgggtctgcgaggttcgtgttcccaacganaagtccaccaggatttggcttg

SEQ ID NO: 167884 - DNA, 264 bp, Glycine max
ctcaaagcaacacaagaacactctcttgaacattcatggatccagtgagcgtgtggggtaacacgcccttggcgacggtggatcccgagatccatgacctcatcgagaaggagaagcaccgccaatgccgcggcatcgagctcatcgcctccgagaacttcacctccttcgcagtcatcgaggccctcggcagcggcctcaccaacaaatactccgagggcatgcacggcaaccgctactacggcggcaacgaattcatcgacc

SEQ ID NO: 167885 - DNA, 262 bp, Glycine max
gtttgttgttgtaactcgttcttcttcttttgttgttctgtgtttgtgtttgtattttctctcacctgaaaatgtcttgctgcggtggtaactgtggttgcggaagctcctgcaagtgcggcaacggctgcggaggctgcaagatgtacccagacttgagctacactgagtcaaccaccaccgagaccttggtcatgggagtggcacctgttaaggctcaatttgagggtgctgaaatgggtgtgcccgctgagaacgatgg

SEQ ID NO: 167886 - DNA, 261 bp, Glycine max
ctcgagcgctccagtatggcttctactcacaatgagtttcatgcacttatgctagtggcggtggttggctccatggtggcttcctgtggtgctaacttcaaccaagagctttgatctaacatggggtgatcaccgtgctaagatattcaatggtggtcagcttctatctctttctctggacaaagtctctggctccggcttccaatccaagaaagagtacctatttgggaggatcgatatgcaactcaagctcgttgctgg

SEQ ID NO: 167887 - DNA, 263 bp, Glycine max
acacccccctctctattttgcgttcattctgttttacagttgaagtctttccatagccaatggccactgatcgtttgacccgggttcacagtctccgtgagaggcttgatgaaaccctcactgccaacaggaacgaaattttggcccttctgtcaaggatcgaagctaagggcaaggggatcctgcaacaccaccaggtcattgctgagtttgaggaaatcctgaggagaacaggcagagcttactgatggtgctatggagaa

SEQ ID NO: 167888 - DNA, 265 bp, Glycine max
agcagtagccgagattccgtgagttgcaaaaatgaagacgattctttccaccgagaccatgaacatcccggacggcgtgagcatcaaagttcatgccaaggtcatcgaagttgagggcccccgcggaaaattggtgcgagacttcaagcatttgaatctcgattttcagctcattactgacgaaaacggtaaaagaaagctgaaaatcgacgcgtggtttggttctcggaaaacatccgccgccattcgcaccgccttgagccac

SEQ ID NO: 167889 - DNA, 265 bp, Glycine max
tggatggtgatgaacatcatcaagatatgtagttaatggaaatagctttggatctaaagagtcttctgtacagtttccaatacccatcattgatgggcgtctcctctcatcagaagatgagctagagaagcttagatctgctctaagttcagctggatgcttccaggcaattggtcatggaatgtcaagttcatatcttgacaatatacgagacactgcaaaaccattttttgcactcccagaaggggaaaagcagaagtatgct

SEQ ID NO: 167890 - DNA, 263 bp, Glycine max
attggatctaagacgttgtttttgcttcatccaaactactcaatgggtgccgacgaagactacgactacttgttcaagctggtcctcatcggagactccggcgtcggcaagtccaacctcttgtcccgattcacccgaaacgagttcagcttggagaccaaatccaccatcggcgtcgaattcgccactcgaagtgtccccgttgatagcaagctcgtcaaggcacaaatctgggacactgcaggccaagaaagatatcgtgc

SEQ ID NO: 167891 - DNA, 258 bp, Glycine max
gttcggaagcttctatattttacaattctaccagttactgggatgagtatgtttggggaggcgcatggatgtactttgcaactggaaattcatcgtaccttaagcttgctactgctcctggcctggccaagcatgctggtgccttctgggctggccctgattatggggtactcagctgggataacaagcttgctggtgctcaggttcttctgagtcgtttgaggttgttcttgagtcctgggtatccatatgaagaaa

SEQ ID NO: 167892 - DNA, 263 bp, Glycine max
tgttcatgctggattaacgatggagccatcacttgaactgtttcaggaaaaatttccggataggttttttgatgtgggaatggctgagcaacatgcagtcacatttgcttctggtttggcatgtggtggcttgaagccattttgtgtcataccttcgtcctttctacaaagagcctatgaccaggtggtacatgatgttgatcaacagagaattccagtgcgttttgttattacaagtgcaggattggtaggttctgatggtc

SEQ ID NO: 167893 - DNA, 264 bp, Glycine max
gaaaaaagaaaaaaaaaaccctaacgcactcgagaccctgagatttttcatcttcgtttctcattctctttttgatcatggacgtcgaggtgcggcagatcttcaacaagttcgacaagaacggcgacggaaaaatctcggtaacggagctgaaggacatgctcgcggccctcggatccaaaacgacggacgaggagttgaaacgcatgatggaggagctcgaccagaacggcgacggtttcatcgacctcaaggagttcgcgg

SEQ ID NO: 167894 - DNA, 257 bp, Glycine max
agggagggagccgtagcagcggaagctctagcttgggtagcgaatcacaatggcgagaggattaaagaagcatctgaagaggcttaatgccccaaagcattggatgcttgacaaactgggtggtgcatttgctcctaagccctcatctggaccacacaaatcgagggaatgcctgccactcatactcattttgcgaaaccggctgaagtatgctctaacataccgtgaagtcattgctattctgatgcagcgacatg

SEQ ID NO: 167895 - DNA, 260 bp, Glycine max
ctttcaatgttattccagactctgttgcaattggtggcaccttccgagctttttcaaaagaaagcttcatgcaactgagacagaggattgaacaggttatcactgggcaagctgcagtgcagagatgcaatgcaacggtcaactttcttgacgacgagaaacctttcttccctcctacagtaaacaatggtgacttgcatgagtactttaaaagtgttgctgggagtttgcttggcgtcaataatgttaaggacatgcaa

SEQ ID NO: 167896 - DNA, 260 bp, Glycine max
caagaaagcaacaaaagggttcaaggataaagggctgcttggacaaggtgggtttggtagtgtttacaaaggaacattgccaaattccaatacccaagttgctgttaagagaatttcacatgactccaatcaaggccttagggaatttgtgtcagaaatagccagcataggccggcttcgccaccggaatttggttcagctgctggggtggtgtcgccgccgtggtgacctcctccttgtgtatgacttcatggaaaatg

SEQ ID NO: 167897 - DNA, 263 bp, Glycine max
gccatttgggagttaggttctgaacagtcagcgtccagcgagtgatctttcttcgtatcaacacctgaaattgcatcagctgcttcttcagcttgagaaatggcacaagaaacctttctattcacatctgaatctgtaaacgaaggtcaccccgacaagctgtgtgaccagatctctgatgcactgctcgatgcgtgccttgaacagggacctgacagcaaggttgcctgtgagacatgcaccatgaccaacatggtcatggt

SEQ ID NO: 167898 - DNA, 263 bp, Glycine max
acacgccgcgagggtgatgatcccttctgggcgtggcagcatagttgcaatggctagcatttgtggaagaattggtggcgtggcttcgcatgcctatacgagctcgaagcacggcatcgtgggactggtgcgaaacactgccgtggagcttggaaccttagggatcagagtgaatagtgtgtctccttatgcggtccctacgcccatgagtaaaactttcctcaacactgatgatgaggggattgctgcactgtattccaatc

SEQ ID NO: 167899 - DNA, 285 bp, Glycine max
gcgtagtagctcggaatacggtcgactgagccgcttctggaataccccaactctgtgttcgcataaatactttacaatggatcctgggtgaatttgatgttctggaaaaaagaataattaccctattacggaactctgagtctgctcatgtagaagatttttcaaatggattagcaaagaagtttgaactatctccagccgcatgtcttgaaggaatccagcaactctgtgaggctgcagcatatagaattgtcttccatgatctaagccaggttttatgggatg

SEQ ID NO: 167900 - DNA, 265 bp, Glycine max
ctcgagccgcttctggaataccccaactctgtgttcgcatatatactttacaatggatcctgggtgaatttgatgttctggaaaaaagaataattaccctattacggaactctgagtctgctcatgtagaagatttatcagatggattagcaaagaagtttgaactatctccagccgcatgtcttgaaggcatccagcaactctgtgaggctgcagcatatagaattgtcttccatgatctaagccaggttttatgggatgggtt

SEQ ID NO: 167901 - DNA, 265 bp, Glycine max
gacaggttcaaaccggagcaaaaaaacttgttacgatggtttcttccgacaaggatccacgagaggaagtccttcaagcatggtacatggatgatagtgatgaagatcaaagactcccccaccacaaagaacccaaggagtttgtctcgttggaccaacttgctgaacttggagtccttagctggaaattagatgctgataaccatgaaaatgatccagagctgaaaaagattcgtgaagagcgtggctacacctacatggatgt

SEQ ID NO: 167902 - DNA, 256 bp, Glycine max
ttgacaacttgtacgggtgccgtcactctctccctgatggtctgatgagggctactgatgtgatgattgctggaaaggtggctgttgtggctggatatggtgatgttggcaagggttgtgctgctgcattgaagcaggctggtgctcgtgtcatcgtgactgagattgaccccatttgtgcccttcaggctctcatggaaggccttcaggttctgaccttggaggatgttgtttctgaggctgatatctttgtcac

SEQ ID NO: 167903 - DNA, 254 bp, Glycine max
attccccttatctttctctcttctctctccccgcccaaaccctaactccctaccctattccgctttctctcatccatcatgaaaggaggaaagtccaagaccgaatctaagagagccgatgccaaacttgctgtgaataagaagggcgccgccaccaagactaggaaacccgccggaaaggggaaggcagcgaaagatcctaacaagccaaagaggcctccaagtgctttcttcgttttcatggaggaattcag

SEQ ID NO: 167904 - DNA, 263 bp, Glycine max
agctttccctgaattcaaatcttcttctcatctcacaccccactgtcacctgtattcacaaagctcaacaaaaattataacaatacacaaagaagggaaaagacgaatcagaagacagagatatctatcaggtcgacgacgagtgcctcaaatggcttaacaccaaggagtccaactcagtggtgtacatatgctttgggagcttggcccgtctcaacaaggagcaaaattttgagatagcacgtggaatcgaggcctctggg

SEQ ID NO: 167905 - DNA, 265 bp, Glycine max
gttctcgtcggaaaatggacgttcgccgaagacccattcctccctccggcgatcgccgacaaacccagaagctgaagaacaccgccaccaccgattcgcagactcttctgcctctctacctcaccaacgccctcttcttcgcggtgttcttctccgtggcctacttcctcctccaccgctggcgcgagaagatccgcaccgccactcccctccacgccgtcacccccgccgagaccgccggcatcgtctccctcgtcgcctccgc

SEQ ID NO: 167906 - DNA, 254 bp, Glycine max
cggctcgagcctaagtttattatggctaatggcaatttggtgcgggttctcatacatactgatgttactaagtatctctctttcaaagctgtggatgggagctttgtgtttaataaaggaaaggttcataaggtgcccgcaaatgacatggaggccttgaagtctccacttatggggctatttgaaaaacgccgagcacgcaagtttttcatttatgtgcaaaattacaatgagagtgatcccaagacccatga

SEQ ID NO: 167907 - DNA, 242 bp, Glycine max
ctctgctctttgccttctctgacacatttggtgccttgtagagcgtgttttggcaggaaggtggtatggcgaaggacgttgaggttgctgagcgtggctccttctctgggaaggactaccaggaccctccaccagcaccactcattgatgctgaggagctcacaaagtggtccttttacagggctctcattgctgaattcattgccactttgctcttcctctacattactgtgctcacagtc

SEQ ID NO: 167908 - DNA, 257 bp, Glycine max
  unsure (1)..(257): unsure at all n locations
attttgttcctcacccagtcagcctccccgttgtccggagccancattttgcgctccggcaatgttcttcccggtggccatcgtcccttaaacccaccacacttcaaagtcatgggtattccatgggacgacgtcgttgtgttccagcaagggaaggatcacaatgagccctgcatcgttaccgtcaattgccccgacaaggctggtctcggctgtgatctttgcagaatcatcctcgagttcggtctccgcattac

SEQ ID NO: 167909 - DNA, 260 bp, Glycine max
ctcacttacagccatgtccatggattctatggccacttccatcggagtctcggtccccgtgctccgcttcctcctctgcttcgccgccaccgtgcccctcagcttcctctgccgcttcctcccccgcggcctccccaagcacctctactcctccgtcgtcggcgtcgccctctcctacctctccttcggcttctcctccaacctccacttcctcgtccccatgttccttggctacgcctccatgctcctctatcgtcctc

SEQ ID NO: 167910 - DNA, 262 bp, Glycine max
agcaacttcaaaacaccatagtgagaaatgacttccaagggtgcaattctcttgtgtctcaatgttctcttcttcactgtggttagttccacatatgttccatgcaacccaccccccaaaactcccaaacacccacctgtcccaaagccaccttccccaaagcaagtttcttgccccaaggacactgttaagtttggtgtgtgtgctgatgtgttaggtttgattaacgtgcaactagggaagccaccaaaaaccccatgct

SEQ ID NO: 167911 - DNA, 284 bp, Glycine max
gcaaaccgaaaccttgcaaatcaaaaccttccagctccattcttcaacctatctcgacttaaagctgcctttgctgttcaaggtcttgacaccactgatctagttgcactctcaggtgctcatacattcggcagagctcactgcaatttcattcttgaccgattgtacaatttcagtggaactggcaaacctgatccaactcttgacacaacttacttacaacaattgcgccaaatatgccccaatggtggacctaacaaccttgtcaattttgcacctgtcac

SEQ ID NO: 167912 - DNA, 286 bp, Glycine max
ctttccagaatatgtactgcacgacattacaaaagctggctttactgaacctagacccattcaatctcaaggttggcccatggctttgaaggggcgtgatctgataggaattgcagaaacaggatcagggaagacacttgcttacttgttgcctgccattgtgcatgttaatgctcagccaatactaaatcctggagatggaccaattgtgctagttttaggcccccctcgtgaacttgccgtccaaatacaacaagagactagtagatttggtgcatcatctagg

SEQ ID NO: 167913 - DNA, 282 bp, Glycine max
gcgaaatccttgtgcaccgtaaggcttgtgaagcaggcagagaagaccatggtgcacgtttccttctaccgaaactatgggaaaaccttcaagaagcctcgtcgtccgtacgagaaggagcgtttggacgccgagttgaagctggtcggtgagtacggacttcgctgcaagagggagttgtggagggttcagtacgctctcagccgcatccgtaacaacgccagacatcttttgaccctcgacgagaagaacccgcgccgtatcttcgagggagaagccttc

SEQ ID NO: 167914 - DNA, 253 bp, Glycine max
tgcgaaatccttgtgcaccgtaagggttgtgaagcaagcagagaagagccatggtgcacgtttccttctaccgaaactatgggaaaaccttcaagaagcctcgtcgtccgtacgagaaggagcgtttagacgacgagttgaagctcgtcggtgagtacggacttcgctgcaagagggagttgtggagggttcagtacgctctcagccgcatccgtaacaacgccagaacatctttgaccctcgacgagaagaa

SEQ ID NO: 167915 - DNA, 284 bp, Glycine max
cgagaaaaaagtgagagatggagaactttcccgtgatcaacttggagaatctcaacggtgaggagaggaaggctacccttaaccagattgaagatgcttgccagaactggggattttttgagttggtgagtcatggaataccccatgaactattggatactgtggaaaggttaacaaaagagcattataggaaatgcatggagaagaggttcaaggaggcagtgtcaagcaaagggttagaagctgaagtgaaggacatggattgggaaagcacgttcttcttg

SEQ ID NO: 167916 - DNA, 289 bp, Glycine max
cgctagctattagttcgattttgtagtaagtgaggtgccaatatggtgaagatagctcttggtactttggatgactcttttagcgctgcctctcttaaggcttatttcgcagagttccacgcaactctgattttcgtgttcgctggtgttggatcagccatcgcttacaacgagcttacaaaagatgcagccttggatccaacggggctggtggcagtagctgtggcacatgcatttgcactgtttgtaggtgtctccgtcgccgccaacatctcaggtggccatttga

SEQ ID NO: 167917 - DNA, 290 bp, Glycine max
ctggtgttagatctgtacctgcctagccattgatttggaaaagtccaagcttcaaagatgagtaagcttcagagtgatgctcttagagaagctatctcaggaatcatgactgattccaaggaaaagaacaggaaatttgtggagaccattgaactccaaattgggctgaaaaactatgatccccagaaggacaagcgttttagtggctctgttaagttgcctcacattcctacgccccaagatgaagatttgtatgcttggagatgcccaacacgttgaagaggctgaga

SEQ ID NO: 167918 - DNA, 288 bp, Glycine max
cttggatcttgaaggtttgagagggtactgccatccaattaatgggttctaaaactaatgcatcgggctatagagcacgaaggccactgtcaatatttgctgtgcttggtctgtgctgtttcttttatcttttgggagcatggcaaagaagtggatctgggaaggcagataaacttgcattgaaagttaataacctgatgacaggctgcactgttttacccaatttgagttttgaatcccatcacagtgatgtagaaattgtcagacctgatgtgctaaaagctaaag

SEQ ID NO: 167919 - DNA, 261 bp, Glycine max
gtttggtgtttgactcgtgaaactgttcagacaccagtatgacacggacgtgacgacatggagcccggcggggaggctgttccaggtggagtacgcgatggacgcggtgaagcagggctcggctgcgatagggctccgatccaagacccacgtggtcctcgcatgcgtcaacaaggctaactccgaactttcatcgcaccagaagaagctcttcaaggtcgacacacacatcggcgtcgccatcgccggcctcaccgacga

SEQ ID NO: 167920 - DNA, 282 bp, Glycine max
ctcgagccgttgaggttgaaggatcagacactgttcagaacctatacgtcacacttgatgtgcatgttgggcaatcagttgcagtgttagtaaccttgaatcagactccaaaggactactacattgttgcctcaacaagattgaccgagacacctctcactacaactgcagtactacactatgcaaactctttttcctctgcattaggacccgtgcctgctccccccgttgataaatatgactttgattggtccatgaagcaagctagaacctacagatgga

SEQ ID NO: 167921 - DNA, 283 bp, Glycine max
cagtgatcttgcaagtcctgttccagcaagccatggcaatttcagggtcagagactcagagtcctttagtgaaaagcgtttctcaggtggaagttgagtgtgtgaaatgcgacttgtgcgggttcacagaggaatgcacccctgcgtacatcacgagggtgcgtcagaggtaccagggtcgctggctttgtgggctgtgcgtggaggctgtgaagcacgaggtggtgagatcagacagtgtcatcaccacggaagaagcgctggaccgtcacatcagcttctg

SEQ ID NO: 167922 - DNA, 290 bp, Glycine max
gctgctgcgtcgcaaggtaccggcggcgacggagaactatcttctcaattttcgatcactgcattggttctgttgtcaagggttttgttcttcctgacttgcatacttgatggcttcaaagttgcagaagttgcaggccacagcatctcaagcgtctcaatttgtatgcagtcgtggaactaactactacaagcaattgctggaacagaacaagcaacacattcaggagcctcctacagtagagaaatgcaacctgttggcaaagcaattgttttacactcgccttgcta

SEQ ID NO: 167923 - DNA, 286 bp, Glycine max
ctcacctcttcatcttcttcttccttacctttgaccagagacagagcagcactcacattcacaacgaaggtttcctattcatcagacatggtgaaggcaatcagagttcacgaactcggtggccctcaagttctgaagtgggaggatgtggaaattggagatccaaaagaaggcgaggtccgtgtgaggaacaaagccattggggttaatttcattgatgtctactttcgcaaaggagtttacaaagccccttcttttcccttcactccacgtatggaagctgttg

SEQ ID NO: 167924 - DNA, 287 bp, Glycine max
agcgaaatccttatgcaccgtacagcttgtgaagcaggcagactagacacatggtgcacgtttccttctaccgcaactatgggaaaaccttcaagaagcctcgtcgtccgtacgagaaggagcgtttggacaccgagttgaagctggtcggtgagtacggccttcgctgcaagagggagttgtggagggttcagtacgctctcagccggatccgtaagaacgcgagatatcttttgaccctcgacgagaagaagccgcgccgtatcttcgagggagaagcccttctc

SEQ ID NO: 167925 - DNA, 290 bp, Glycine max
ctcgagccgcaagattggagaacaggattggctgaagttcgaaggtctagaaggctgacagctgtctttatatgccctgtggctaactatgagtatggatttttctggcacttttatcaggatggaaaaatagaagcagagatcaagctcacaggaattctcagcttaggatcacttcaaccaggtgaaactcgaaaatatggcacaaccattgcacctggactatatgcgcctgtccaccaacatttttttgttgctcgtatggacatggcagtagattgccagcctgg

SEQ ID NO: 167926 - DNA, 285 bp, Glycine max
ctctcactcacaaacacacactgaactaaaaaacatcaaaagagacatggctgagcaaaccttcatcatgatcaagcctgatggcgtccaaagaggccttattggcgagatcattagcagatttgagaagaaaggtttctacttgaaaggtttgacacttgttactgtggaccgtccttttgctgagaagcactatgctgatttgtctgccaagcctttctttagtggtttggtggattacattatctctggccctgttgttgccatgatctgggagggcaagaa

SEQ ID NO: 167927 - DNA, 284 bp, Glycine max
ctgctctctgctctgcttagggttccaacttccaacccaacacttatccttctcatgcaacaagggaaaatgaggcctattttctgtggaaattttgaatatgatgcccggcagtcagagctggagcggctttttagacgatatgggaaggttgatagggtggatatgaagtctggttttgcttttatctatatggaagacgagagagatgctgaggctgctattcgtgctcttgatcgagtagaatttggtcggaagggacgcagactccgtgtggaatggac

SEQ ID NO: 167928 - DNA, 282 bp, Glycine max
ctctgctctttgccttctctgacacatttggtgccttgtagagcgtgttttggcaggaaggtggtatggcgaaggacgttgaggttgctgagcgtggctccttctctgggaaggactaccaggaccctccaccagcaccactcattgatgctgaggagctcacaaagtggtccttttacagggctctcattgctgaattccttgccactttgctcttcctctacattactgtgctcacagtcatagggtacaatcaccagactgacctctaggaaaatggtg

SEQ ID NO: 167929 - DNA, 283 bp, Glycine max
cttaattgcaagactggcacttcgttgcttggtgatgtccctttctgttctcttcactcttggtcttgcgagagaaagccatgccagagacgaagatttttggcatactgtttggccaaacactcccattccaagttcattgcgagatcttctaaagcctggccctgcaagtgttgaaatcgatgatcaccctatgcaaattgaagaaacacagtacccgaaaaccttcttctataaagaagaccttcatccaggcaaaacaatgaaagtacaattcagcaag

SEQ ID NO: 167930 - DNA, 283 bp, Glycine max
caaacattgtttgttgtaggaagaggaatcttgagaaatggcaggggacagcacgagcaagattctgttcatcggagggactggttacatcggaaaattcatcgtggaagccagcgccaaagctggccacccaactttccttttggtgagggagtccactctctccaaccccgcaaaatcacccctcatcgacaatttcaaaggcctcggtgtcaatcttgttttaggagatctatacgatcaccaaagtttggtgagtgctataaagcaggtcgatgtggta

SEQ ID NO: 167931 - DNA, 288 bp, Glycine max
gtggtttcagtgagtgatcggtgttcacttgatccttcataagtcgtcatcatcatcatcatcatcaccgttgattgaagaagatgccgatcagaaacatcgccatcggaaggcctgaagaggctactcaccccgacacgttgaaggcggggttggctgagttcatctccaccttgatcttcgtgttcgccggttcaggttccggcatcgcctacaacaagctcaccgacaacggcgccgccactcccgccggcctcatctccgcttccatcgcccatgctttcgccc

SEQ ID NO: 167932 - DNA, 279 bp, Glycine max
ccaagatggcgcggttgatcacagtggtgtggtgcgcggtggcggtgctactgtgcgccgcggcgggcgcgtcgtgggtggaggatgcggcgaacccgatacgaatggtggcgggggtggaggcggaggtggatcgggtgatagggcagtgccggcgcgcgctgaagtttgctaggttcatgagcaggttcgggaagagttaccgaagcgaggtagagatgagggagaggtacgagatattctcgcaaaacctcaggttcatccgctcccagaacaaga

SEQ ID NO: 167933 - DNA, 273 bp, Glycine max
cgcttagtggcagcagcagtggcggcgtgcaactccatccggaacgggactcgatttgaaggcaggaggtaagtctaagacgaccaagcgaaccgacaccaaatccgatgatatctacctcaagcttctcgtgaagctgtaccggtttcttgttcggaggactgggagtaacttccatgctgttgtcctcaagcgccttttcatcagcaaggtcaacaagcccccgctatacctctctagattgatccgttacacgaagggcaaggcagataa

SEQ ID NO: 167934 - DNA, 283 bp, Glycine max
caaaaaaatatggaaaagaaacaagattaagaattggggtttgaagaagccggtggtgtctccttgcttgttctcgatcgatcttgttattgtaaaatataataacttttttatatcgtgatcaagatgcgccgagggagagccaccgccgccgtcgtggatccgacggcggaccaggcgaaggagacgcggttccgcggcgtcaggaagcggccgtgggggcgattcgcggcggagattcgagatccgtggaagaagcagctcgtctggctagggacgttcg

SEQ ID NO: 167935 - DNA, 278 bp, Glycine max
cgacacatggcttccttaagctccttagtgctgctccttgcagctctaattctatcccctcaagttcttgcaaactatgagacacacccagtgtacaagcctcccactgagaaaccaccagtttataagcccccacttgagaagcctcctgtttacaagcctccagttgaaaagcctccaatttataagcctccagtagagaagccaccagtgtacaagcccccagttgagaaacctccagtttacaggccacctgttgagaaacctccagtgtacaa

SEQ ID NO: 167936 - DNA, 281 bp, Glycine max
cgacaaatgggcattctcttgatattcttgcccgaattcctttgtggaaggatggtcttgattatcgacatggtactggtcatggaattcggtcctatctgaatgttcatgaaggacctcacttaatcagtttcagacctcaggctcgaaatgtaccattgcaatcttcaatgactgttacagatgaacctggttactatgaggatggagagtttgggataagattggagaatgtgcttattgtcaaggaggctgatacaactttcaattttggtgataga

SEQ ID NO: 167937 - DNA, 279 bp, Glycine max
cgacaaatgggcattctcttcatattcttgcccgaattcctttgtggaaggatggtcttgattatcgacctggtactggtcatggaattcggccgtatctgaatgttcatgaaggacctcacttaatcagtttcagacctcaggctcgacatgtaccattgcaatcttcaatgactgttacagatgaacctggttactatgaggatggagagtttgggataagattggagaatgtgcttattgtcaaggaggctgatacaacgttcaattttggtgata

SEQ ID NO: 167938 - DNA, 273 bp, Glycine max
ctgcgtttgcggctgaggattccgaacgagcgaccttcctcgtttctcgcaaagtttaagtcatcatgggtaacgaaaagactcacatcaacattgtcgtcattggacatgtcgactctgggaagtcaactaccactggtcatttgatctacaagcttggaggtattgacaagcgtgtgattgagaggttcgcgaaggaggctgctgagatgaacaagaggtcattcaagtatgcctgggtgcttgacaagctcaaggctgagcgcgaaagag

SEQ ID NO: 167939 - DNA, 286 bp, Glycine max
cttggaaataacccaaggcaaatgagttatgtcgtacgttttggctaatcattaccaaaacacgtccaccatagaggagcatctgtaccgaagaacaagatcaagtatagctgtaaaggtggatggaaatggagggacacttctaagccaaaccccaatacaattgttggtgccatggttgccggtcctgacaagcatgatggcttccatgatgttcgtacaaactacaattacacagagccaacacttgctggaaatgccggtttagttgctgcactagtggcat

SEQ ID NO: 167940 - DNA, 282 bp, Glycine max
cagtgatcttgcaagttctgttccagcaagccatggcaatttcagggtcagagactcagagtcctttagtgaaaagcgtttctcaggtggaagttgagtgtgtgaaatgcgacttgtgcgggttcacagaggaatgcacccctgcgtacatcacgagggtgcgtcagaggtaccagggtcgctggctttgtgggctgtgcgtggaggctgtgaagcacgaggtggtgagatcagacagtgtcatcaccacggaagaagcgctggaccgtcacatcagcttct

SEQ ID NO: 167941 - DNA, 277 bp, Glycine max
gtgattgtttgttgttgtaactcgttcttcttcttttgttgttctgtgtttgtgtttgtcttttctctcacctgaaaatgtcttgctgcggtggtaactgtggttgcggaagctcctgcaagtgcggcaacggctgcggaggctgcaagatgtacccagacttgagctacactgagtcaaccaccaccgagaccttggtcatgggagtggcacctgttaaggctcaatttgagggtgctgaaatgggtgtgcccgctgagaacgatggctgcaaatg

SEQ ID NO: 167942 - DNA, 276 bp, Glycine max
gtttgcaacaatgataccatggcagagaatctccaaagacagctctttggtctgcctccacgatacagagattcagtaagaacactaactccaggcttgcccatttttctgtacaactactccactcaccaactccatggtatctttgaggctgcaagttttggcggatccaatattgatccaacggcttgggaggacaagaagtgccctggtgaatctcgtttccctgctcaggttcaagtgattactaggaaagtttgtgagccactagaggaa

SEQ ID NO: 167943 - DNA, 274 bp, Glycine max
ggttgcaagaatgataccatggcagagaatctccaaagacagctctttggtctgcctccacgatacagagattcagtaagaacaataactccagggttgcccatttttctgtacaactagtcgactcaccaactccatggtatctttgaggctgcaagtcttggcggatccaatattgatccaacggcttgggaggacaagaagtgccctggtgaatctcgcttccctgctcaggttcaagtgattactaggacagtttgtgagccactagagg

SEQ ID NO: 167944 - DNA, 281 bp, Glycine max
cgcaacttcaaaacaccatagtgagacatgacttccaagggtgcaattctcttgtgtctcaatgttctcttcttcactgtggttagttccacatatgttccatgcaacccaccccccaaaactcccaaacacccacctgtcccaaagccaccttccccaaagccagtttcttgccccaaggacactgttaagtttggtgtgtgtgctgatgtgttaggtttgattaacgtgcaactagggaagccaccaaaaaccccatgctgcagcctcattcagggtct

SEQ ID NO: 167945 - DNA, 194 bp, Glycine max
agaaacatcgccgtcggaaggcctgaagaggcgactcaccccgcacgttgaaggcggctttggctgagttcatctcaaccttcatcttcgtgctcgccggctcaggctccggcatcgcctacaacaagctcaccgacaacggcgctgccacccctgccggcctcatctccgcctccatcgcccatgcattcgcc

SEQ ID NO: 167946 - DNA, 267 bp, Glycine max
tttatgagtacatgcccatgggttcacttgaagacgatctattgcgtcctcagtctcacaaagaatcactaagttggagtactcgaatgaagattgctgttggagctgctcgtggcttgaatatctccattgtaaagcagatccacctgttatctacagggacttgaaatctgcaaacatcttgttagataatgaattcaacccaaaactgtcagattttgggcttgctaaacttggacctgttggagacaatacccatgtttcaac

SEQ ID NO: 167947 - DNA, 232 bp, Glycine max
ctgaaactgagcgtagggtaacagaattccactctgagatcgaagcgcttctttacagctcagtggagaatgaggaacacatatgcgtattgaaggaccggaacaaacgaatatcttcaccatggcaaggcttgaccgtgtgaagaacatcacggggcttgtcgagtggtacgggaagaacgcaagcctccgcgagttggtgaacctggtggtggtggctggagacaggagg

SEQ ID NO: 167948 - DNA, 265 bp, Glycine max
gtgatgccacagaactccattaataagagtccaagcaaggaggtcttgtctattttggaatcacttagtgaagaccccaaaaatgttgtcttcattgttagtggacgggggaggatagcttaagtgactggtttaattcctgtgaaaaacttggaattgctgcagaacatgggtacttcttgagatggtcccacaatcgagaatgggataattgtggtaagagctccgactttggatggatgcagattgctgaacctgtaatgaa

SEQ ID NO: 167949 - DNA, 259 bp, Glycine max
cagcaataatgggtgctgatgaatatgggtttggttcagtggcaatgattgctactggatgtgttatggcccgcatttgccacaccaataattgcccagttggtgttgccagcagagggaagagttgcgtgcacgctttcctggtgttcctggggaccttgtcaactactttttgtatgtagctgaggaggtaagaggcatattggcacagctggggtatgagaagtcggatgatgtgattggccggactgacttgttt

SEQ ID NO: 167950 - DNA, 259 bp, Glycine max
cgcagaacttgcgcctgctttgtctggtttgaatgttcttgttgagacctactttgctgacatccctgctgaggcatacaagaccctcacatctctgaatggcgtcactgcaatggatttgatttggtccgtggaaccaacactcttgatttgatcaagggtggatttcccagcggaaaatacctctttgctggagtggttgatggaaggaacatctgggccaatgaccttgctgcttctctcactaccttgcagggtc

SEQ ID NO: 167951 - DNA, 262 bp, Glycine max
cacatggacttgtctttctcttgctgggtcctccattaaaatcttcttctctcccttctctctctcaccattctcttcttcttcttcttcgattccttctctctctctctctccctccgccatggctcaggataaggagatgtctacctctgtcatcaatgggaatcattccctaactggacacatcatatctacaactattggaggcaaaaatggggaacccaaacagactattagttacatggcagaacgggttgtagga

SEQ ID NO: 167952 - DNA, 266 bp, Glycine max
atttcagtgagtgatcggtgttcacttgatctcatcataatcgtcagcgtcaattgaagaagatgccgatcagaaacatcgccgtcggaaggcctgaagaggcgactcaccccgacacgttgaaggcggctttggctgagttcatctcaaccttcatcttcgtgttcgccggctcaggctccggcatcgcctacaacaagctcaccgacaacggcgctgccacccctgccggcctcatctccgcctccatcgcccatgcattcgcc

SEQ ID NO: 167953 - DNA, 269 bp, Glycine max
tttatgagtacatgcccatgggttcacttgaagaccatctatttgatcctcacccagacaaagaaccactaagttggagtactcgaatgaagattgctgttggagctgctcgtggcctgaatatctccattgtaaagcagatccacctgttatctacagggacttgaaatctgcaaacatcttgttagataatgaattcaacccaaaactgtcagattttgggcttgctaaacttggacctgttggagacaatacccatgtttcaacca

SEQ ID NO: 167954 - DNA, 265 bp, Glycine max
gcagttgattttccgatcagaaaatctgaatcatgtcgtggcaagcgtacgtggatgatcacctgctgtgtgaaatcgaaggtaaccacctcactcacgccgctattatcggccagacggcagcgtttgggctcagagcgccaacttccctcagttcaaagctgaggaaataactgctatcatgaatgactttaacgagcctggatcacttgctccaactggattgtttctcgctgccaccaaatacatggtcatccagggcgag

SEQ ID NO: 167955 - DNA, 265 bp, Glycine max
attggatctaagacgttgtttttccttcatccaaactactcaatgggtgccgacgaagactacgactacttgttcaagctggtcctcatcggagactccggcgtcggcaagtcaacctcttgtcccgattcacccgaaacgagttcagcttggagaccaaatccaccatcggcgtcgaattcgccactcgaagtgtccccgttgatagcaagctcgtcaaggcacaaatctgggacactgcaggccaagaaagatatcgtgcaat

SEQ ID NO: 167956 - DNA, 263 bp, Glycine max
gccgagcagcgagagagagaaaccctagcaaaaatgccggctggtcacggtttgagatcccgcaccagagattccttctctcgtcccttcaggaagaagggtaccatcgcccgaccacatacctcagaacctaccacgtcggcgattatgtcgacgtcaaggttaacggcgccgtccacaagggaatgcctcacaagttctaccatggccgtaccggtcgcgtctggaatgtcaccaaacgtgctgttggggtcgaagtcaac

SEQ ID NO: 167957 - DNA, 257 bp, Glycine max
ctgaaactgagcgtaggttaacagaattccactctgacatcgaaacaattctttacagctcagtggagaatgaggaacacatatgcgtattgaaggaccgcaacaaaccaatatcttcaccatggcaaggcttgaccgtgtgaagaacatcacggggcttgtcgagtggtacgggaagaacgcacgcctccgcgagttggtgaacctggtggtggtggctggagacaggaggaaggagtcgaaggacttggaagaga

SEQ ID NO: 167958 - DNA, 261 bp, Glycine max
cctcgagcgctcgagccgattcggctcgagagaatattcagagaattccaaagacagagatgactagccttaaggaagagcaacaaccaaaccaaatagctggccacaaagacttggtcacaaaagtctccttcagagcgatgcactctatcagtatatacttgacaccagtgtgtacccaagagagcatgagagcttgaaggagctacgagagttgacggaaaaacacccttggaacctgatggctacaccacctgacga

SEQ ID NO: 167959 - DNA, 270 bp, Glycine max
cgcgtaaccacggcgccactcgaacaagtgcggcaattcccaacgcttctcttctcagggggagttcgaatcctgtgagctttcaatatgacgtcgttcttgaagcctgagaatgctctgtaagggcggaagaattaatcaatgttgggcagaagcaggatgctttgcagactcttcatgacctcatcacctcaaaacgatacagagcatggcagaagacacttgaaaggattatgttcaagtatgtggacctttgcgtcgacatgcgaa

SEQ ID NO: 167960 - DNA, 262 bp, Glycine max
gtgatttcagtgagtgatcggtgttcacttgatctcatcataatcgtcagcgtcaattgaagaagatgccgatcagaaacatcgccgtcggaaggcctgaagaggcgactcccccgacacgttgaaggcggctttggctgagttcatctcaaccttcatcttcgtgttcgccggctcaggctccggcatcgcctacaacaagctcaccgacaacggcgctgccacccctgccggcctcatctccgcctccatcgcccatgca

SEQ ID NO: 167961 - DNA, 253 bp, Glycine max
caaaggtcaaatcataatggatattgatttccgttggggtggtgatcctagtcttattttggctgttgaagctgcacttgttgcatcaatccctatacagttgaaggatcacaggttttcaccattgtccgtgtgatatttcaacttgctgaagagatcccctgcatttctgctgttgttgtagctctgcttgctgagccaaagcccaggattgattatactctgaaagctgttggtggaagtttaacggcta

SEQ ID NO: 167962 - DNA, 258 bp, Glycine max
tcttggcctagaatactacccaaaggaaagctcagtggtggtgtaaatcaagaaggaatcaattattacaacaacctcatcaatgagctattggctaatggtgtactgccaatgtgactctttttcattgggatcttccccaagctttggaagatgagtatggtggtttcttaagctcccatatagtagatgattttcaagactatgcggatctttgctttaaggaatttggagatagggtgaagttttggactactt

SEQ ID NO: 167963 - DNA, 259 bp, Glycine max
gtgatttcagtgagtgatcggtgttcacttgatctcatcataatcgtcagcgtcaattgaagaagatgccgatcagaaacatcgccgtcggaaggcctgaagaggcgactaccccgacacgttgaaggcggctttggctgagttcatctcaaccttcatcttcgtgttcgccggctcaggctccggcatcgcctacaacaagctcaccgacaacggcgctgccacccctgccggcctcatctccgcctccatcgcccat

SEQ ID NO: 167964 - DNA, 259 bp, Glycine max
cagtttcaccgcacgaatatcacgttgtttggagcgatccgagaaaaactctgtaaacatgttggtttaccaggacctccttacaggtgatgagcttctctctgactccttcgttacaaggaaattgagaatggaatgctgtgggaagttgaggggaagtgggttgttaaaggagcagttgatgtcgacattggtgcaaacccttctgctgagggtggaggagaagatgagggagttgatgatgcagctgttaaggttg

SEQ ID NO: 167965 - DNA, 260 bp, Glycine max
ttgtacttgagttcgatcaaatagctcccagtactttaattgatttctgaatatcatcacttaatttgaaggaaagatggtgagcgtagctgagatccgccaggcacaaaggcagaaggcccagcaaccatccttgccattggaactgcaaacccaccaaactgtgttgatcagagcacctatcctgactactacttcagaatcaccaacagtgagcacatgaccgagctcaaagagaaattccagcgcatgtgtgacaa

SEQ ID NO: 167966 - DNA, 268 bp, Glycine max
caagaacagccgacaaccctatgcagtcagccgccgcgctggccaccagacttccgccgagtcctggggaaccggtcgtgccgtctcccgtatcccccgtgttcccggcggcggaaccatcgcgccggccagggagccttcggaaacatgtgtcgtggaggacgcatgtttgccccgaccaagatctggcgccgctggcacaggaaaatcaatgtgaaccagaagcgctacgccgttgtctccgccatcgctgcctccgccatcccct

SEQ ID NO: 167967 - DNA, 259 bp, Glycine max
cactcagtagtcaacactaggcactctctattcccattcattgcagaagaagatggaggctcacccctacgtcccacgcgatttgcacttacccggctacgctccctgcttcctttcatgtccaacattctttccgtcttcgcctcctcctcattgctcatcgtcactctcgtctggatcttctctggacgctttaagaaaaccaaagttgatagagtgctgatgtgctggtgggccttcacaggtctcacacacatta

SEQ ID NO: 167968 - DNA, 265 bp, Glycine max
  unsure (1)..(265): unsure at all n locations
ctcgagccgctcgagccggtttgtataattcaataaaggaacacgcgacacacaacacaaatcccagatcatgcagaggattccgcattttcagaagatctggcagtagcctgggaacagaaaatgcggaatcctctgcatgatctggaatttgtgttttctttcgcttgtccgtttgtataattcaataaaggaaattaggcatgacnctcttgttgagtatgctctgcctatttgaaaatttccacacctctcataattgtcg

SEQ ID NO: 167969 - DNA, 262 bp, Glycine max
cccgtacagtgtcgtccactatgtggctataaaatggaagcattgaaggttgtttcctcaggccaagatcttggatagtaattaacctcactcaaactcgggatcacagaaccaacaacagttcttgcactgaggtttcacgatgttgctggaacttgcacttggtttgtcttcttagctttgtttctgcacttgcgtcccacaccaagtgcaaaatcaaaagcacttcgccacctcccaaaccctccaagcccaaagcctc

SEQ ID NO: 167970 - DNA, 260 bp, Glycine max
acccaatccaaggaaagcttggatcttctttctggctccagtcaagcaggaagtgggaattcacttaggagaagaagaaatgtacatggagtcctgaatgcactgagctggggattttgatgcccgttggtgccataatagcaaggtatttgaaggtgttcaaatctgcagaccctgcttggttttaccttcatgttacatgccaaacctctgcctacatagttggtgttgctgggtggggaactggtctcaaactcgga

SEQ ID NO: 167971 - DNA, 257 bp, Glycine max
ggcaaatcagaatgcatacttcaaaggattattttatgcatcttctactgcagctaccgctatgagtaatctgataccggcattaacgtttgtaattgcagcaattgcggatttgagaaagttgacataagcttaagaagcacggccaagatattagggacagtttgttgcgtggctggagccttaaccatggcattggtcaaaggacagaagctgttacacacggagttccttccttctatacatctcaccggcag

SEQ ID NO: 167972 - DNA, 268 bp, Glycine max
taggagttgggtgagagaatggaagcctcagagcagaacaattcaaaggtagtgttgattgattctttgcagtcatgggagttccacgtcaaccaagcctataatcagaatactctgttgttgttcacttcactgcttcatggtgcatgccatcggtggctatgactcctgtttttgaagaactggcttcaagctatccggaagttctgtttctcactgttgatgttgatgaagtcaaggaggtagccaccaaaatggatgtaaaggc

SEQ ID NO: 167973 - DNA, 293 bp, Glycine max
ttcggctcgagaattttctgtcttctctgcgtcttcttcctctatcaatcgttttccatggctcgtaccaagcaaaccgctcgcaaatccaccggtggaaaggctcctaggcagcaactcgccaccaaggctgcaaggaaatctgcaccgacaaccggtggagtcaagaagcctcatcgctatcgccctggaactgttgctcttcgtgagatccgaaaataccacaagagcacagagcttctgatccgcaagctccccttccagcgtctagatcgtgaaattgcgcaagactt

SEQ ID NO: 167974 - DNA, 282 bp, Glycine max
tttcccttttattttgctctcttctctgcacaacaattccttctcattccagatattccaaccatcgaccgatctcaattctcaaccttaacctctcagaatgtcttacgcttatctcttcaaatacatcatcatcggtgacaccggagttgggaagtcttgtcttctacttcaattcacagacaagcgctttcagcccgtccatgacttgaccatcggtgttgaatttggtgccaggatgatcacaattgataacaagccaatcaagttgcaaatatggga

SEQ ID NO: 167975 - DNA, 277 bp, Glycine max
caagattccttttgttcctatctctggttttgagggagacaacatgattgagaggtccacaaaccttgactggtacaagggtccaactctgcttgatgcacttgaccagattagtgagcccaagaggccctctgacaagcccctcaggcttccccttcaggatgtgtacaagattggaggtattggaactgtgccagtgggacgtgttgagaccggtgtcttgaagcctggaatggtggtgacttttgcaccaactggactgacaactgaagtcaag

SEQ ID NO: 167976 - DNA, 279 bp, Glycine max
acctaaaggctctcgcatgtctccacaacttcttgcagtgttgcaagcttttgaggcaacattggcagagaggctgaaaaatcttatgcctaaaagcaaggatgaaatcctcaccttgtcttggatgactttagctatgaagtcactttgtgaaagtcacaatgacatacggacccttatgactgcccttgagcttcctgtgagtgattgggaggacaaatggattgatgtgtacttggacatttgttcaaagttgctagacatttgcaatgcattcag

SEQ ID NO: 167977 - DNA, 279 bp, Glycine max
cagctctcctctcactttcatttctacatccctggctctgttccgtcgatgacgatggcgtttagggtgcgaaaccctgacctccgctttctcattcttctctctctcttgtccatcacttccgccaaggtcttcttcgaggagcgtttcgatgacggatggggaaatcgttgggttaaatcagattggaaaaacgatgagaacctggctggggagtggaaccacacctctggccaatggaatggagacgctaacgacaaaggtattcaaaccagtgag

SEQ ID NO: 167978 - DNA, 279 bp, Glycine max
caatagctcaacgccgcatctgttctccctccaaaagaattcaggtcatggatgtgttgttgttgttattattatgtgttctcttggttggtttgccaaacctggctatagtagagagtcgcagggctcccgttctggactactttgagtattgtgctatgagctgcagagcttacagtgcctcgttggaagaatttggaggggttggtgatggaacaactttgaacactaaagcctttcaggctgccatagagaatctgagtcagtatgcagcaagtg

SEQ ID NO: 167979 - DNA, 280 bp, Glycine max
ggaaaatcctggggagcatgaggccatgcgaaagatgaaaaatgaattcatggtgaactgggatggcttacgcacaaaggatactgagcgagttcttgtgcttgcagccactaataggccttttgacctagatgaggctgtcattcggaggctgcctcggagattaatggtaaatttgcccgatgctccaaatagagcaaaaatattaaaagttatactggcaaaagaggacttgtcttctgatattaatatggatgcaattgcaagtatgactgatgga

SEQ ID NO: 167980 - DNA, 303 bp, Glycine max
gcgcagaattcggctcaagctcaaacatggcctccaaatccttcaccctcattctcctcatcctcaccacattcctcatggcccaaacccaagcccaagctcccgcaccggccccctcaggcgcggtgaacctcaccgcgatcctcgaaaagggtggccagtacaccaccctaatcaaactcctaaaggacacacaacaactcactcagatcgagtcccagctcaaatcaaactcacaaggcttcactctcttcgcacccactgacaatgccttccagagcctcaaacccggtgccctaaacg

SEQ ID NO: 167981 - DNA, 281 bp, Glycine max
tttcaatggcaactcaaggtcaagtcattacctgcaaagctgcggtggcctgggaacccaacaagcccttaaccgtccaagacgttcaggttgctccgcctcaggccggcgaggtccgtgtccaaatcctcttcaccgctctctgccacaccgatgcttacacttggggcggcaaggatcccgaaggtctcttcccctgtattctcggccacgaagctgcagggattgtggagagtgttggagaaggtgttactaatgttcagcctggggatcatgtcatt

SEQ ID NO: 167982 - DNA, 279 bp, Glycine max
caaattctcctcctacaccaacaaaaatggcaccttctccacaagaaatcatcttccgatccccactccccgatattctcatccccacacatctcccattgtactcttactgcttccaaaacttgtcaaagttccatgaccgtccatgcctcatcgacggcgacaccggcgagaccctcacctacgccgacgtcgacctcgctgctcgccgcatcgtctccggcctccacaaaatcggcatccgccagggtgacgtcatcatgctcgtcctacgcaact

SEQ ID NO: 167983 - DNA, 273 bp, Glycine max
caatcatggaaattgatggtaggtttctgaacactggcctcctccttgtggccacaatccttgtagccaaactcatctcagctttcatagtgcccaagtccagaaagagggtacccccaattgtgaaggggtggcccttaattggagggctaatccgtttccttaaaggtccaatctttatgctccgtgaggagtaccctaagcttgggagtgtcttcaccctcaagctcttccacaagaacatcaccttcctcgttggccctgaggtctctg

SEQ ID NO: 167984 - DNA, 265 bp, Glycine max
gttggtacaggaccagtggattcggcatacaaggctgtggatctgattgtgaaggagccagtaacacttcttgagtactcaatgaatgcagtcacggaaggcatcgatgcaattgccactacccgggttgtgattcgtggggagagtgaaacaagtactagtactactcatgctttaactggagaagctgttcttcgaacatttagtgggactggagcgggaatggatgtcgttgtttccagtgtcaaggcctatattgctgcac

SEQ ID NO: 167985 - DNA, 276 bp, Glycine max
gcggataatgcgtaggctacgtcatccaaatattgttctttttatgggtgctgttactcgtcctcccaatctgtcaatcatttcagagtatctaccaagaggaagcttgtaccgaattcttcatcgccctaattgtcagattgatgagaaacgaagaataaaaatggctctggatgtggctaggggcatgaattgcttacacaccagcacacctacaattgttcatcgagatctaaagtctccaaatcttttggttgataagaactggaatgttaa

SEQ ID NO: 167986 - DNA, 281 bp, Glycine max
acttctcaaccagttggatggatttgaagcttcaaataagatcaaggttttgatggccaccaatcggattgatatcctggatcaagccctccttagaccaggacggatagaccggaaaattgaatttccaaaccctaatgaagagtctcggctggatattttgaaaatccattctagaagaatgaatttaatgcgtggcattgatttgaagaagattgccgagaagatgaatggagcatctggtgctgaacttaaggctgtttgcactgaagctggaatgt

SEQ ID NO: 167987 - DNA, 282 bp, Glycine max
ctcgcgagcggcggcctagagcaaggttcttgttgtgggtggaactgggtatgttgggaggagaatagtgaaggcaagtttagaacaaggccatgaaacctatgttcttcaacgtccagagattggtcttgacattgagaaggtgcagatgctgctttcattcaagaagcaaggtgctcaccttgtggaggcttctgtttctgatcaccagagcttagtggaagcagtgaagcttgtggatgttgtgatttgcaccatgtctggtgttcattttcgctctca

SEQ ID NO: 167988 - DNA, 209 bp, Glycine max
gtctgttttccttgtttcccctattattatctcgctctcacaaaatcatggcattctctagtgctttgattctgtggtcgttgctagcaatcaacatggccctgccaaccctcgcaaccgtctacaccgtgggagatactttcaggtttggcaatttgtactgattatagcacttggactggcgacaagatcttttcagtgggtgatag

SEQ ID NO: 167989 - DNA, 279 bp, Glycine max
tattcatataccactctccttatcttgtagtattagttaatttgcattcttttgtttctctatcgatcatgggtgtttttgcttacgatgaagaaaactcctccaccgtggctccggttactctctacaaagctctgacgaaagatgccgacaccatcatcccaaagattattggtgccatccaaagtattgaaattgttgaaggaaatggaggacccggaaccgtcaagaagataaccgctaatgaaggtgaccaaaccagcttcgtgcttcaaaaag

SEQ ID NO: 167990 - DNA, 276 bp, Glycine max
ctcgagccgctcgagccgcgagaagaaatatgaaccgaccattggtgtggaggttcatccgttggattttttcactaactgcggaaagattcgattctattgttgggatactgctgggcaagagaagtttggcggcctcagagatggatattatatccatgggcaatgtgcgattatcatgtttgatgttactgcccgtctaacatacaagaatgtccctacctggcaccgtgatctttgcagggtctgtgaaaacatcccaattgttctttgcgg

SEQ ID NO: 167991 - DNA, 269 bp, Glycine max
ggcacagagagaaaatggtttcggggtcaggaatctgcgcgaagagggtagttgtggacgcgcggcaccacagggtggggatgctggcatcgatcgtggcgaaggaacttctgaatgggcagaaggtggtggtggtgcgctgcgaggagatttgcatctccggtgggctcgtcaggcagaagatgaagtacttgcgtttcctccgcaagcgcatgaacaccaagccctctcacggccccatccatttccgtgcacccggcaagatcttc

SEQ ID NO: 167992 - DNA, 273 bp, Glycine max
accgattgctagaatggaatttcgatgctcagtcatctcttttaccattctcttctctcttgctcttgcaggagagagccatgtccatgcatcgctacctgaggaagattattgggaagctgtttggccaaacactcccattcccactgcactgcgagagcttctaaagcctctccctgcaggtgttgacatcgatgaactccctaagcaaattgatgatacacagtacccaaaaacattcttctataaagaagaccttcatccaggcaaaac

SEQ ID NO: 167993 - DNA, 267 bp, Glycine max
gtggtgatgaaaaattgatgcgtgaaaggacacacctgctgttggcttgttgttcaaggatggcaatttgtaagaaagatgtttggagagttgaatgtggaatcccttctggatttccgctcacagttatttgcaatagcatttttaatgagatgctcattagatatagctatgaaaaattactgcgccaggctaaagctccaagtatgtttttacaatccttcaaaaattttgtttctttgtgtgtgtatggtgatgataacttaa

SEQ ID NO: 167994 - DNA, 276 bp, Glycine max
gttggctcagatgtttggaattgaggggaagttagaagaccctcttagatcaggctggcagcttgtgttcgttgacagggagaatgatgttcttctccttggagatgatccgtgggaatcattcgtcaataatgtttggtatatcaaaatactttcacctgaagacattcagaaaatgggggaacaagcggtagaatcccatgcattaggttcaggacaaaggctaaatggcactggtgccgagtctcaggacatagtttttggaccaccatcaat

SEQ ID NO: 167995 - DNA, 268 bp, Glycine max
gagaaaaggaggagcaggaggcatcaccgttaccaaacatggtgaaagggcgacaaggagagcgtgttagactttacgtcaggggttcaatacttggatacaagaggtccaagtcaaatcagtacccaaacacctcattaatccagattgagaatgtaaacactaaggaagaagttgcgtggtactgtgggaagcgtatggcttacatttacaaagccaaggtacagaaggacggaagccactatcgctgcatttggggtcaagtcac

SEQ ID NO: 167996 - DNA, 271 bp, Glycine max
aagtattccaattctgatgccgttgtttatgtcggctgtggggaacgtggaaatgaaatggcagaggttctaatggactttccccaacttacaatgacattacctgatggtcgtgaagaatctgtcatgaagcgtacaacactagtggctaacacttcaaacatgccagtggctgctcgtgaagcttcaatttatacaggaatcacattagctgagtatttcagagatatgggttataatgtcagtatgatggcagattctacatctagat

SEQ ID NO: 167997 - DNA, 256 bp, Glycine max
gaatccacacaaactcagggtagggcagagagagagagagagagagagagagagagagagaatgggagtgtgggctatcgcggtgcatggtagcgctggtgtcgaccctaatctcacactcgagcgccaagaagaagcgaaacaagttctcacgcgctgtctcaatcttggaatctctgctctaaagtacaatcttcccgccatagatgacgtcgaacttgtggtgagggaattggaaacggatccgctgtacaat

SEQ ID NO: 167998 - DNA, 272 bp, Glycine max
tctcgagccgaatcggctcgagagaaaaatggcatctcacatcgttagatacccccgcatgggtcccaagagagagctcaagttcgctctcgagtctttctgggatggcaagagcagcgccgaggatttgcagaaggtggctgctgatctcaggtcatccatctggaagcagatggctggtgctgggatcaagtacatccccagcaacactttctcgttctatgaccagctgctcgacgccaccgccaccctcggtgccgtcccccccaggt

SEQ ID NO: 167999 - DNA, 263 bp, Glycine max
aaacagagcatggctcctctcacattctccttcttcttcatccttatctcttacatttcttcatcatcagttgtcaactttctgacgggctttgcagaagcgggatcaatcggaataaactatggaagaattgcgaacgacctacctacaccggcgaaagtggtggagcttcttaagagtcaggggctgaaccgtgtgaagctctacgacaccgacgccaccgtcttaaccgcgtttgccaactcaggaatgaaggtggtggt

SEQ ID NO: 168000 - DNA, 266 bp, Glycine max
acaggctgcgcagtgtttgaacgttgaaggagagcgtagaggcagtggttttctttttttgatttctctttgtagaatcgaatcgagttaatttttgatcgtgtgagtgtccgatcttgaaatccacaacaacaatggtgagaggattgctcaacaagctcgtctctcgctccctctcggtcgccggaaaatggcagcacaatcaactccgccgcctcaacatccacgagtaccagggtgctgaattgatgagcaaacacggagtc

SEQ ID NO: 168001 - DNA, 267 bp, Glycine max
cagaggcacatcctggtgacaatgtgggattcaatgttaagaatgttgctgttaaggatttgaagcgtggttatgttgcctcaaactcaaaggatgaccctgcaaaggaggctgctaacttcacagcccaagtcatcatcatgaaccaccctggtcagattggaaatggctatgcccctgtcctcgactgccacacttctcacattgctgtcaagtttgctgaactcatgaccaagattgacaggcgatccggcaaagagcttgaga

SEQ ID NO: 168002 - DNA, 272 bp, Glycine max
ggtgaatgcgtagaaaaggaaaataaagaaattagcgtgaaaaatgttgggtgtgttcagcagctccatagtgtcgccgccggaggagctcgttgccgccggcagccgtacaccgtcgccgaagatgacggcggcggcgctgcggaagtggttcgaggagaagaacccctccgcagtgtcggtggaggtcggagagcatgtccagctcgcttatacccaccagaacgagtcgccgtttcagcccagatcctttgctgtgaaggatgaggtat

SEQ ID NO: 168003 - DNA, 272 bp, Glycine max
cttggatcaggtttagggaatggctgcaatcttagctcgaaaatcactccttgctcttcgtgcgcgccaattggctgtaagcggtcaagggctgcacagctcccaatactatggccttcggttaagtgcacactccttctctaccaaaagagaggatgaggaaagggagcaactcgcaaaggacatttcaaaggattggagttctgtctttgaacgtagcattaacactctctttctcactgaaatggttcgaggactaatgctgactctga

SEQ ID NO: 168004 - DNA, 274 bp, Glycine max
cttgcatggttattgggggattttggtggatcgttatgaggagatgattgagaattatcacccggggcttggggatcataggtggcctctggtgacccattttgtggggtgcaagccttgtgggaagtttggggattaccctgtggagaggtgcttgaagcagatggatagggcctataactttggtgataaccagattttgcagatgtatgggttcactcataagtcccttgctagccgcaaggtgaagagggtgaggaatgatactagcaac

SEQ ID NO: 168005 - DNA, 271 bp, Glycine max
aaattgtgaccctcgtcacgccaacgctttcgttgttcccctttctctcgttttttctcagaaccttctgaggttaaagcaaaaaacaaagagagagagagagagaaaatgatgaagccatcgatgctcagatctctccactccgccgccacccgcggcgcctctcatctcttccgccgtgggtacgcctccgagccggtgccgcagcgcaaggtagccgttctcggcgccgccggcgggatcgggcagcctctctcccttctcatgaagc

SEQ ID NO: 168006 - DNA, 269 bp, Glycine max
gcacgcaggaggaggagattgatcgagagaagagaagatgactacacgcttcaagaagaacaggaagaagagaggccacgtgagtgccggccatggccgcatcgggaagcaccggaagcaccctggaggacgcggtaatgccggaggatgcaccaccaccggatcctctttgacaagtaccaccctgggttcttcggcaaggtcggaatgcgctattttcacaagctccgcaacaaattctactctccgatcctcaacatcgacaagct

SEQ ID NO: 168007 - DNA, 264 bp, Glycine max
caacattctcatcattcacccaacaaaatggctctgcttctgatagtagccatttcactggtaaccctctggctcggttacaccctataccagcggctacgcttcaagctccctcctggcccacggccctggccggtagtcggtaacctctacgacataaaacccgtccggttccggtgcttcgctgagtgggcgcagtcttacggccctatcatatcggtctggttcggttcgaccctaaacgtcatcgtttcaaactcggag

SEQ ID NO: 168008 - DNA, 263 bp, Glycine max
gtacttttttcagaaaggttggtggtgactggtgattgttgaagagaataatggcaacttcaactatggatattcttcatttccaccacactcctttttattgtgaggagaatgtatacttgctttgcaaaaagttgtgcaatgatggaatagcaaatgctgatggatctgatctttttgttgctttcatttccaacgaaaagaaacagatcccactttggaatcaaaaggctagcaaaagagctgatggggtgattctatgg

SEQ ID NO: 168009 - DNA, 265 bp, Glycine max
tctcgagccgattcggctcgagagcaattttccctcaccaaagaagaacgaagcaaacaatggccgatcaacttaccgatgaacagatctccgagttcaaggaagccttcagcttgttcgacaaggacggcgatggttgcatcacaaccaaggagcttggaactgttatgcgttcattggggcaaaacccaactgaggcagagctccaggacatgatcaatgaagtggatgctgatgggaatggtaccattgacttccctgagtt

SEQ ID NO: 168010 - DNA, 265 bp, Glycine max
caaagttggtccttataacaatccacaagaaacatacaactattacagcctcccattttgtcatccatctagtagtgctagtgctgcacacaaatggggtggtcttggtgaggtcctgggtggcaatgagctcatcgatagccaacttgaaattaagttccaaagaaatgtggataagactgtcttttgccagatagatctcgatgaagcaaatgtgaaacagttcaaggatgcaatagagaataattactggtttgaattcttc

SEQ ID NO: 168011 - DNA, 264 bp, Glycine max
gcctgccaagtccatctggagagtcagtgataagctgtaatagtctttccaagatgccaaacattacgttcacaattggaaataaaccttttgtcctcacaccagagcagtatattctaagaactggagaaggcattacagaagtctgccttagtgggtttattgcttttgatgttcctcctccaaagggtccattgtggattcttggcgatgttttcatgagggcatatcacaccgtctttgactatggaaatctccaagttg

SEQ ID NO: 168012 - DNA, 264 bp, Glycine max
catgcactgccacttggaggtacacacaacatggggactaaagatggcctttttggtggacaatggcaaaggtcctaagcaatcagtgatacccccaccaaaagatcttcccaaatgctaatgtgtcaatcatcaattaattatgcaatacacaaaagaaaggccttccaatgccaaaacaaaagaagctttggagggatacagagaagccaggcaaaagaagagtgagtgaagaagaaagggttatttaataagcgagtatcc

SEQ ID NO: 168013 - DNA, 192 bp, Glycine max
ctcggcccgaagcccgtcccaatgaagcacgtgggcgggcctccgaagcccacgaagctgtacaggggcgtaaggcagaggcattgggggaagtgggtggcggagatcaggctcccgaagaaccgaaccaggctctggctcggaaccttcgacacggcggaggaagctgctttggcttacgacaaagccgcg

SEQ ID NO: 168014 - DNA, 279 bp, Glycine max
cctgaaggaggtcagtgaggaggttgccaagtacaaggttggagctcctgctcgtgttggtttggttgccccaattgatgttgttgttcctcctggcaacacagggctcgatccctcccagacctctttcttccaggtgctcaacattcctaccaagattaacaagggtactgttgaaatcattacccctgtggagctcattaagaagggagacaaggttggatcttctgaagctgcattgcttgccaagctagggataaggcccttctcgtatgggct

SEQ ID NO: 168015 - DNA, 277 bp, Glycine max
aaataacaaatatttatataagattgtgttcttgcaagttccaagttccaagttccaagttcatgcacaaccgatcttttcctctgcgaagacgtgtcggtagctgaagcattttataagcctccactttcctgaactagttttaacatacaatctttcaagtacacctccccagcttccatttaagaatggagatcactagaataggccaatggttaagtcttctgatatgtgtactactattactgcagacagaaggggttcctgtgggaatcac

SEQ ID NO: 168016 - DNA, 278 bp, Glycine max
atctttctctcttctctctctgtccgaagatggcttcacgcaggttcgtatcttctctgattcgatcctcccttcgtagatctcaatcgaaaccctcgatttccgcatccgcatcgaggctcacgtcatccaaccgtgcctctccgcacggttacttgctgaaccgcgtcgccgaatacgctaccgcggcggcggctgctaccgctcctccctctgctccgcctccgggcaagaaggaggttagcggcggcgggaagatcaccgatgagttcaccggg

SEQ ID NO: 168017 - DNA, 277 bp, Glycine max
  unsure (1)..(277): unsure at all n locations
gagaccactgtggtatccatattcccttctcccatgcactatgctggacccacggaggtgcagtggcatgcaaaggctaggatcaatgcaggggctaacttctacatcgttggtcgtgaccccgcaggcatgagccatccagttgagaanagagatctgtatgatgctgaccatgggaagaaagtattgagcatggcaccgggactagagcgtctaaacattcttcctttcagggttgctgcatatgacaagactcagggtaaaatggcattctttg

SEQ ID NO: 168018 - DNA, 275 bp, Glycine max
atcttcccaaccactacgccactactactcactcactgcagatctcaattgcatcgctgtccatggctaccatcgttagcatcaaggcccgccagatcttcgacagtcgtggcaatccaactgtcgaggtggatttgacttgctccgatggtacttttgccagagctgctgttccaagtggtgcatccactgggatttatgaggcccttgaattgagagatggaggatctgactaccttggaaagggtgtatcaaaggctgttgacaatgtgaac

SEQ ID NO: 168019 - DNA, 275 bp, Glycine max
aaacggacgcttctcattctctctctactcgttcagaagatgtttctcacaaggactgagtatgaccgaggagtcaacaccttttctcccgaaggccgtttgtttcaggttgagtatgcaatcgaagccatcaagctgggatcaactgcgattgggttgaagaccaaagaaggagttgtccttgcagttgaaaagcgcatcacatcgccgctcctggagcctagtagtgttgagaaaattatggaaattgatgagcacatcggttgtgcaatgag

SEQ ID NO: 168020 - DNA, 249 bp, Glycine max
ctcgagccgtttcagtgtctgttccatttcctgtgaaacaatcggaggagacaaagctttaccacttggatattgttggtagacctgttgttgtgctggagaagaacaatgttgttcctgagcataatgagcattttcaggtctactataagttcaacagtctttctatgctcagggagcctttgatgttgatttctggctttttctttctgtttcttgcttgcattgtctacacgcgtgcagatatat

SEQ ID NO: 168021 - DNA, 272 bp, Glycine max
tgggactcttctcttccctgctattaatgtcaatgactctgtcaccaagagcaagtttgacaacttgtatgggtgccgtcactctctccctgatggtctcatgagggctaccgatgttatgattgctggaaaggtggctgttgtggctggatatggtgatgttggcaagggttgtgctgctgcaatgaagcaggctggtgctcgtgtcatcgtgaccgagattgatcccatctgtgcccttcaggctctcatggaaggccttcaggttctga

SEQ ID NO: 168022 - DNA, 257 bp, Glycine max
tgacgacttggatggagccagagtgtgataaactcatcatggctgccattaataagaactatgttgacatggacgagtaccctgtcaccactgagctacagaatcgatgtgttaacatgatagctcatcttttcaatgcaccactagaagagactgaggcagcagttggtgttggcacggttggctcatcagaggccattatgttggctggattggcattcaaaagaaagtggcaaaacggagggaaccaagaggga

SEQ ID NO: 168023 - DNA, 278 bp, Glycine max
atgctatgatgaggggaaacgtgtggctgaaactttgatgtttgattatcataggcagcatggaatagaaatacgtgttgcaagaatctttaacacatatgggccgcgcatgaatattgatgatggacgtgttgtcagcaacttcattgctcaagcaattcgtggtgaacccttgacagtccagtctccaggaacacaaactcgcagtttctgctatgtctctgatctggttgatggacttatccgtctcatggaaggatccgacactggaccaatca

SEQ ID NO: 168024 - DNA, 196 bp, Glycine max
gttgaaaagaaaccctagcaagtggagcaatggcagacgttgaagtcgatgtggcggcagcagcagcagcagggctgccgaagaagagaacgttcaagaagttcagttttcgaggcgtggatctcgatgcacttctcgacatgtccaccgatgaactcgtcaagatgttcagtgcccgcgctcgtagaaggttcca

SEQ ID NO: 168025 - DNA, 211 bp, Glycine max
gccatgcatgtgtaagtatgaactaattcagactgtgaaactgcgaatggctcattaaatcagttatagtttgtttgatggtatctactactcggataaccgtagtaattctagagctaatacgtgcaacaaaccccgacttctggaagggatgcatttattagataaaaggtcaacacaggctctgcctgttgctttgatgattcatgat

SEQ ID NO: 168026 - DNA, 272 bp, Glycine max
cacagatgactggaatttatgatttggttgctgtattaacccacaagggtagaagtgctgattcaggacattatgttggttgggtcaagcaagaaaatgggaaatggatagagtttgatgatgacaatcccaaaccaaaactagaagaagacatcactagactatctggaggaggtgattggcacatggcgtatataatcatgtacaaggctcgtgttgtatctgtgtaattgctaggaagagccgatttggtgttttacttcagagaatca

SEQ ID NO: 168027 - DNA, 272 bp, Glycine max
gagacatggaatgttcagttgtttagatctattgatggtggggctgcttttgggttcccagagactcctgaagatgctgccagagctggtcttattagtgggaaggataatatcattgatcgtagtattcaagatgcttatattaatgctattcgacgtgcaaagaacttcatctatattgaaaatcagtatttccttggaagctcttttgcctggagtgctggtgatattaagcctgaagacattggtgctttgcatctaatcccaaagga

SEQ ID NO: 168028 - DNA, 276 bp, Glycine max
ggttctagtaattcagtgctgctagaagatggaaactagtgaatggcatatcgagcgaagatctagcttcggctctgaatcccccttagcaagagaggcaggaaatgtgcctgaaactgggtcactctctattgtggtgcttggtgcttctggtgatcttgctaagaagaagacatttcctgcacttttccacctatacctgcagggattcttaccaccagatgaagttcatatttttggctatgcaaggacaaaaatctctgatgatgaattgag

SEQ ID NO: 168029 - DNA, 236 bp, Glycine max
aaacgactctatctctcttcgttttgttcttccttgcgctcctcctcgttcgttcgttctccctcgcgtagatcggcaatggcggagaccgagacgtttgctttccaggctgagatcaaccagctcctcagtctcatcatcaacaccttctactccaacaaggatttgattaagaagcattctgagttcattagctacccaatttctctttgggttgagaagactaccgagaggga

SEQ ID NO: 168030 - DNA, 273 bp, Glycine max
tacctttccgtgaaaggacctaagggacgtttcaagtaccaacctggcgaggttagggcttttgggatgcttgctggagggtctggaatcaccccaatgttccaagttgccagagctatattagaaaaccctaatgacaggaccaaagtacatcttatctatgccaatgttacgtatgaggacattcttttgaaggaagagctggacggtcttgcttctaactatccagatcgattcaaaatatactatgtgttaaatcagcctcctgaggta

SEQ ID NO: 168031 - DNA, 248 bp, Glycine max
tgcacatcaaggcttctgctgatcagttccataatgttttatgcaacaggacacaccatattgccaacattttccctggaaaagtacagtctgttgaaattcataaaggtgaatggggcactgagggatccgtcatctcctggaattatttacatgagggcaaagtttgtgtggctaaggagatggttgaaggcatagacatgctaaacaataaaatgacctttaaggtcatagagggagacctgctg

SEQ ID NO: 168032 - DNA, 275 bp, Glycine max
tgcacatcaaggcttctgctgatcagttccataatgttttatgcaacaggacacaccatattgccaacattttccctggaaaagtacagtctgttgaaattcataaaggtgaatggggcactgagggatccgtcatctcctggaattatttacatgagggcaaagtttgtgtggctaaggagatggttgaaggcatagacatgaaaaacaataaaatgacctttaaggtcatagagggagacctgctgggacattacaaaagcttcaagttttta

SEQ ID NO: 168033 - DNA, 276 bp, Glycine max
ggcgtgccagttctgatatttacaccatctgctctcaagactgtgaattatggaatcctgcttgcacaaaagcaatgaccatgtcatttaatccaaacccgtgttctgatgcatggagtttggaatttctgaagcgtaccggatttcattgtgatatcatatgtgtcactggatggactgctaccccaatgcaggatgttcaggttacaattgattggtttatttcctctcaggaatgtgttcccaggacctattgtgttttaaatccacaaaatc

SEQ ID NO: 168034 - DNA, 303 bp, Glycine max
cacgcgtacggaaactcggctccaccacctgcctcttcctcacccctttctccatctaacgagtaaggaaaaatggcgcgtaagaagatcagagagtatgactcaaagaggttgttgaaggagcactttaagagactttctggcaaggagttgccgatcaagtctgcacaaattactgcatcaactgatttcactgagctacaagagaaggaaccctggctttcatcttctaaattggttgtgaaacctgacatgttatttggaaagcgtggcaaaagtggtttggttgccttaaatttggat

SEQ ID NO: 168035 - DNA, 273 bp, Glycine max
attttatctggttcgagcaaggttgtcttctaaaacctaggtcttcagttgtggcgagtaccaacagagggtgcaaggccatctatgcttctggtggggccagcagtgtggttttgagggattgcatgtctagggcacctgttgttagattctccactgccaagagagctgcacagttgaagtttttcttggaggatcctctcaattttgataccttgtcacttgttttcaacaggtcgagtagatttgccaggctccaaggtattcagtgtg

SEQ ID NO: 168036 - DNA, 274 bp, Glycine max
cacataatgaatatgttgctctggctcccagcatacccaacattccaacctggctgggacctagatgatgaaatccatgccacattcttcaaatgcatcagttggcaagtggaggaaaccttggatacaatcaattgcccttaccattatttctgtgacaaaacatacccttcaaactaccctcttgttgttgatatcttggtccttctctttacagcagcttcttacttggtgactcttgtcatattggtaatggacatgagttcaggaagag

SEQ ID NO: 168037 - DNA, 266 bp, Glycine max
acacaattaagataattggggtcagcaacacggcctcccagcatctagcaactttgactggtcaccaaggacctgtatggcaagtggtgtgggctcaccctaagtttggttctcttcttgcgtcgtgttcctttgacggccgtgtcattgtttggaaggagggtaaccaaaatgaatggactcaagctcatgtgtttgatgaccacaagtcatctgtgaattcggttgcttgggcgcctcacgagttgggtctctgcttggcttgt

SEQ ID NO: 168038 - DNA, 231 bp, Glycine max
gaaaaaatgggttcttcttcttctatgtggacggtgtgtgtgattttggcatcactggcctctgcagcactctgtgccaacccacgcaggccagtggatgtacaatttggccgaaactacgtgcccacatgggcctttgatcacatcaaatatttcaatggtggttctgacattcagcttcatcttgacaagtacactggtacgggttcccagtccaaagggtcttacttg

SEQ ID NO: 168039 - DNA, 269 bp, Glycine max
gcaactttaaacgccgaagaaagttcatccaatctccgaagcccttcaccgcattgcaaccatgtcgagaagaaaggttagagagccaaaagaagaaaacgtgactctgggcccagctgttagagatggcgaacatgtctttggcgtcgctcgcatctttgcctccttcaatgataccttcattcatgtcactgatctgtccgggagggaaacacttgtacgcatcacaggtggaatgaaggttaaggctgacagggatgaatcgtctc

SEQ ID NO: 168040 - DNA, 271 bp, Glycine max
agaaatcccatattttccccccacattaactcacccaacccctctttctaaaaggcctcaaggatacactccggacttaattacgttattttgttagggtcaccgtttcgagatattctaaccttgtactgaaaaatatggagggaaaagaagaggacgtaagagttggagccaacaggtacggagagaggcagccaatagggaccgctgctcaggctaaagactacagagagccaccgtcggcgcctctcttcgaaccgggagagttgtc

SEQ ID NO: 168041 - DNA, 272 bp, Glycine max
agaatcaccggactcactcttcacactcactcacactgaatcgcttctgaaggcgaccatcattacgatcaccaccaccatcaagatcacgatcatcatcatcatgatcatgatcaccatcatcatcacgatggagagggagataccaactcatgggtaggtaaggatgggaaggtgtaccatagccacgatggtctggcgccgcattctcacgaacccatttactcccccggctacttcaccagaagagctccaccgcttctcaacagaaa

SEQ ID NO: 168042 - DNA, 268 bp, Glycine max
tgacatggacccttctgccaattccaacgccatgcgcttggtttcctcagaccctgacttgtccaagcgcatgttttttcacaccaacgacatattggaagtgtcgaccgctttgaaggagtacgaggttgtttacttggcagcacttgtggggatggacaaggaagggaagaaccgaatcattgatcacttggggaagcacatgaaccctggggcacttcttatgctgaggagtgctcatggggcaagggcttttctctaccctgtg

SEQ ID NO: 168043 - DNA, 253 bp, Glycine max
gctctacgcctctccctctctctcaaaaatcgttctcttcgattttagggttttgttttgctgctgcctccgttccccccttctcataaacaacgcgttttctcttctgcttcgtatctattctttgcttttggttttggttgattcaaggccttcacagcattcgttgcggcattttaatcgatttatccaagcaggactgaatgaactaatggagtctaaaggtgggaaaaagctgtctagtagtagtagt

SEQ ID NO: 168044 - DNA, 268 bp, Glycine max
caatctcgtttgttctcactaactattacttcatcatgtcgtcgagcacagttggtcaagtcatcaaatgcaaagctgcggtttcatgggaggcagggaagccacttgtgattgaagaagtagaggtggcaccaccacaagctggtgaagtgcgtttgaagatcctctacacctctctttgccacactgatgtttacttctgggaagccaagggccaaactccattggatcctcgtatatctggtcatgaagctggagggattgtgga

SEQ ID NO: 168045 - DNA, 269 bp, Glycine max
atgagaaacttcctcgtcgcaaaatttttgacaaacctaagacgcgctgcttcactattctccctatggagtttaatcttgtggttcgtcagaagtttttaaattttgtgaggttcattatgaagaaaagggacaagcttagttgtcaagttggaatcaacccatactccatggaatggactggtttggccaatagattactgagtaagggcaacgatattctgtgttgcgattatgctagttttgatggtttgattaccaagcaagtt

SEQ ID NO: 168046 - DNA, 270 bp, Glycine max
aataaacgctaacctctgtacccttcgctaaaatgagagagtgcatttccatccacattggccaggccggaattcaggtcggaaatgcttgctgggagctctattgcctcgagcatgccattcaggctgatgggcagatgccaagtgataagaccattggtggaggtgacgatgctttcaacaccttcttcagcgagaccggtgcaggaaagcacgtgcctcgtgcagttttcgtagatcttgagcccactgtcattgatgaagtcagaa

SEQ ID NO: 168047 - DNA, 291 bp, Glycine max
tcctcaatcggctctagttgcaacacaacaaaaaaagacaacacagagagaagcgtcttaataaactctcttctctgaaaaacctgatttcttctcttcttctcttctctttacgttcgatcttcgatctctgaaaatgagagagtgcatttcaatccacatcggtcaggccggtattcaggtcggaaacgcctgctgggagctctactgcctcgaacacggcattcagcctgatgggcagatgccaagtgataagactgttggtggaggtgatgatgctttcaacacctt

SEQ ID NO: 168048 - DNA, 176 bp, Glycine max
gaaagagaatccgaggcgaagagaagagacaaattaagatggaggggaaggagcaggatgtgtcgctgggagcgaacaagttcccggagagacagccgattgggacggcggcgcagagccaagacgacggcaaggactaccaggagccggcgccggcgccactggttgacccgacg

SEQ ID NO: 168049 - DNA, 264 bp, Glycine max
ggtgatgataacttaattagtgttcatgaatatgtcaagccttactttagtggttctaaattgaaaagctttctagctggtcataatatcaccattactgatggtattgacaaaactagtgcaactttgcaatttagaaagttagcagattgcgattttctcaagagaaactttaagcagatgtctaatgttttgtgggtggctcctgaggacaaggcgagtttatggtcacaacttcattatgtttcgtgtaataacctggaa

SEQ ID NO: 168050 - DNA, 270 bp, Glycine max
caaattagttcattctctttgcgcagttccctacctctcctttcaagatgcagatcttcgtcaagaccctcaccggaaagaccatcacccttgaggtggaaagctctgacaccatcgacaacgtcaaggccaagatccaggacaaggaaggaattcccccggatcagcaacgtctcatcttcgccggaaagcagctcgaggacggccgtaccctcgccgactacaacatccagaaggagtcaacccttcaccttgtccttcgtctccgtg

SEQ ID NO: 168051 - DNA, 270 bp, Glycine max
cctcagcctccaccacgctctcctctcccttccttcgactggaattaccctccagaacaaagaaacgatcttcatcaattattcctgttccctccatccgagcctctgtctccgagaaaccaccgctaccggctgtgtcggttacctcccctgagccaagcaagctccccatccgcaaaatccccggcgactgcgggttcccggtgatcggtcccttgaaggaccggcaagactatttctacaagcagggccgcgacgagttcttcaagt

SEQ ID NO: 168052 - DNA, 263 bp, Glycine max
gcccaaactggttccggtaagactggagcttttgctcttcccatattgcatgccttattagaagcaccacgcccaaaagatttctttgcttgtgtgttgtctcccacaagagaacttgctattcaaattgcggaacagtttgaagctctaggttctgaaattggtgtcaagtgtgccgtgcttgttggaggaattgacatggtacaacaatccatcaagatagcaaagcagcctcatattattgttgggactcctggacgagt

SEQ ID NO: 168053 - DNA, 266 bp, Glycine max
ctctagggttatcatttctccatttccattttctctctcacttttcaagaatcgtaagctatgggaaagtcttacccaactgtgagtgctgattaccagaaggccgttgagaaggcgaagaagaagctcagaggcttcatcgctgagaagagatgcgctcctctaatgctccgtttggcatggcactctgctggaacctttgacaagggcacgaagaccggtggacccttcggaaccatcaagcaccctgccgaactggctcacag

SEQ ID NO: 168054 - DNA, 267 bp, Glycine max
ctctccaaattcatcacaacttctctcgtacctctgcagagaagtaaacatataggagtgagagggagggagagagaaggaaagcttggtagcgatggggaaggagcaagttcaggtgctgaatgccctggacgtggcaagacacaatggtatcatttcacagcaatcatcattgctggaatgggcttcttcactgatgcttatgatctgttctgtatatcactagtcacaaagctacttggtcgcatttactaccacgttgatggg

SEQ ID NO: 168055 - DNA, 269 bp, Glycine max
ctcgagccgttccagccacacgcttcagaagacatggcctcattgggtgggttacaaaatgtgagcggcatcaattttcttatcaaagagggtccaaaagtcaatgcaaagttcgagctgaagccgccaccatatccactgaatggtttggagccggtgatgagccagcagacacttgagtttcactgggggaagcaccacaagacttatgtggaaaatctgaaaaaacaagttgttgggacagagcttgatgggaagtcactagaaga

SEQ ID NO: 168056 - DNA, 270 bp, Glycine max
cagaggtgaagaaggcagcagcaaaagcctcaaaaaaaggtcatgctcgcttcgccaaatctctttctgctgagctttctgcattgagagtggaaagagaaagggaatcaaaattattgaaaaaagagaaccagagcttgaagattcaacttcgagatactgctgaagctgttcaggctgctggagaactacttgttagactaagagaagctgaacacgcagcaactgctgcagaggagaactttgcaaatttgaaacaagataatgaaa

SEQ ID NO: 168057 - DNA, 285 bp, Glycine max
cgggatcatgcactcccactagccgaatcggctcgagcatttccctccccccactcccaccggcaacgccatacaaaccctaaatctctctcgtcgtctactgcttcttcctccttcaaccatgagagagatcctgcacgttcagggaggccaatgcggtaaccaaatcggttccaagttctgggaggtgatatgcgacgagcacggcatcgatcctaccggaaagtacaacgacgaaggcaacagcggcatccaactcgagaggatcaatgtctattacaatga

SEQ ID NO: 168058 - DNA, 268 bp, Glycine max
gtttcactgcataaatttgagagaaaactctgcaaacatgttggtttatcaggacctccttacaggtgatgagcttctctcggactccttccgttacaatgaaattgagaatggaatgctgtgggaagttgaggggaagtgggttgttaagggagcagttgatgttgacattggtgcaaacccttctgctgagggtggagaagatgagggagtcgatgacgcagctgttaaggttgttgacattgttgatacattcagacttcaggag

SEQ ID NO: 168059 - DNA, 267 bp, Glycine max
gaagaacttggcctcttaactgacctatcacttctccacataaactccaaccgtttctgtggttctcttcccactagcttcgacaaacttcacctcctccatgaacttgacatcagcaacaaccaattctcgggaccattccccgaagttgttctttgcatccctaacttaaaatacttggatatcagattcaacaacttccacggcaacgttccctcgcgcctcttcgatgtcaaactcgatgcacttttcatcaacaacaacaat

SEQ ID NO: 168060 - DNA, 258 bp, Glycine max
atccgagaaaaactctgtaaacatgttggtttaccaggacctccttacaggtgatgagcttctctctgactccttccgttacaaggaaattgagaatggaatgctgtgggaagttgaggggaagtgggttgttaaaggagcagttgatgtagacattggtgcaaacccttctgctgagggtggaggagaagatgagggagttgatgatgcagctgttaaggttgttgacattgttgacacattcagacttcaggagca

SEQ ID NO: 168061 - DNA, 264 bp, Glycine max
gcggaacggagaaccatcttgttttgtgggatctgagacctcttggattgactgggaataaggtggagaaactctgtgatctctgtaacattactgttaacaagaacgctgtttttggtgatagcagtgccttggcccctggtggagtgcgaattggtgcccctgccatgacttctaggggtttggttgaaaaagactttgagcagattggtgagttccttcaccgtgctgtgactctcacactggagatccagaaggagcatg

SEQ ID NO: 168062 - DNA, 265 bp, Glycine max
gttctccgcgtcaccatggccgatgacttcgacttcgcggataaagttcctccttcattcgatcgcgtgggaaatgtgatcaaggattctggatccaaagggttcaatccaggattaattgtcctcctggttgttggtgggttgttgttgacattcctcattggaaattatgtgctctacagttatgcacagaagaccctccctcctagaaaaaagaagcctgtttcaaagaagaagatgaaaaaggagagactgaagcaaggtg

SEQ ID NO: 168063 - DNA, 260 bp, Glycine max
gtcttcataaacgcctttcttctccgatgccgtttcctcggtcagattcgcttcttgatctgcgagaatgagagagtgcatctcgatccacattggtcatgctgcgatccaggtcggaaatgcgtgctgggagcttactgcctcgagcactgcatcgggcccgatgggcaaatgccaagtgacaagacagttggcggtggtgatgatgctttcaatacttgcttcagcgagacttgtgctggaaagcacgtgtcacgtgc

SEQ ID NO: 168064 - DNA, 264 bp, Glycine max
ggtaaacaaagatggctaggtctagtgcttatcctttgttcttgatttcttccattctgtttatttcacacatttatgcctcccaagtagaagccaagcccccagtagtgaagggactatcatattctttctattccaaaactgccccaagcttgagtccattgtgaggaaacatctcaagaaggtgttcaaggatgacaatggccaagctcctgccttactccgcattttcttccatgattgttttgttcagggatgtgatgg

SEQ ID NO: 168065 - DNA, 254 bp, Glycine max
tgtgaaatgaaaacggttcaatgtgcaggtatttgatggacatggagggaagagtgctgcacaatttgtccgtgataatctgccaagagttattgttgaggatgttaactttcctttggaccttgagaaggtggtaaaaggtcatttttggagacagatgcagcatttctaaaaacatactctcatgagccttccgtttcttctggtacaactgcaataactgcaattatatttggaaggtgagcacttgtctc

SEQ ID NO: 168066 - DNA, 249 bp, Glycine max
acaacattgagggaatgaggcttgtcatatcagctgtatgtgttattgtgctattttcttatgctgctgcgtatgatcctttggatccaaatggaaacataacgatcaaatgggatgttgtgtcatggacaccgatggctatgtagccgtggtaacaatgagcaatttccaaatgtttcggcacatcatgaatcctggatggaccttgggatggacatgggcaaagaaggaagttatatggtccatggt

SEQ ID NO: 168067 - DNA, 251 bp, Glycine max
aaacggacgcttctcattctctctctactcgttcagaagatgtttctcacaaggactgagtatgaccgaggagtcaacaccttttctcgcgaaggccgtttgtttcaggttgagtatgcaatcgaagccatcaagctggatcaactgcgattgggttgaagaccaaagaaggagttgtccttgcagttgaaaagcgcatcacatcgacgctcctggagcctagtagtgatgagaaaattatggaaattgat

SEQ ID NO: 168068 - DNA, 247 bp, Glycine max
ctcttcttcagtggtggaagctactagaacactagtttgttgagcactgcgatgaggaagtggacggttgcttccgctctccttcttctctctctcctctttctctttgcagatcaaggtcgaaagtttcaggcgatgccgagggagattccgacgagcttgtagatcctccgaaggtggaggacaagatcggtgctgtgcctcatggcctttccaccgattcagatgtcgtcaagagggagtcgga

SEQ ID NO: 168069 - DNA, 229 bp, Glycine max
gccgtgagagccgccgctatctcgagatgttctatgctctcaagtaccgcaaattggccgagtctgtgccccttgctgttgagtaaactgaggatgaagagttggataaagaaatggaggaaccggctttttgttctcatttggagtttgtcttacttgagttctataaataatatgtccctgatgattttaattttgtgattaagctttcgataagagacagagagag

SEQ ID NO: 168070 - DNA, 252 bp, Glycine max
  unsure (1)..(252): unsure at all n locations
ttcaaagaaggcgtcttcataaacgcctttcttctccgtttccgtttcctcgttcaaattcgctttttgatctgcgaaaatgagagagtgcatctcgatccacattggtcaggctggtatccaggtcggacatgcttgctggggctctactgcctcgagcacggcatcgggcccgatgggcaaatgccaagtgacaagacagttggcggtggtgatgatgctttcaatactntcttcagcgagactggtgct

SEQ ID NO: 168071 - DNA, 255 bp, Glycine max
ctaaaggctcgcgttgtagaatcaaatacagattttcctcacaagttcttctactgcttttggtggggtttgcgcagtgtaagttctgttgggcaaggtctcgagacaagtacttatgctggggagataatctttctatcttcattgctgtctttggattgattctatttgcatcacttattggaaacatgcagaaatatctacaatctaccactgtcagagttgaagagatgagaatcaaaaggagggatgcag

SEQ ID NO: 168072 - DNA, 252 bp, Glycine max
cacacgcttcagaagacatggcctcattgggtgggttacaaaatgtgagcggcatcaattttcttatcaaagagggtccaaaagtcaatgcaaagttcgagctgaagccgccaccatatccactgaatggtttgagccggtgatgagccagcagacacttgagtttcactgggggaagcaccacaagacttatgtggaaaatctgaaaaaacaagttgttgggacagagcttgatgggaagtcactagaaga

SEQ ID NO: 168073 - DNA, 243 bp, Glycine max
ctcgagccgctcgagccgattcggctcgaggtgaagggacaaatcaaatcaacatgctgagagtgggcgactagagggttttggaaacgacgttgtttggggttaggtttccggcgaggctgtaccacgagaggttgtggatcactacgacaacccccggaacgttggatcgtttgacaagaacgacccgagcgtggggacgggtttggtgggggccccggcgtgcggcgatgtgatgaagct

SEQ ID NO: 168074 - DNA, 244 bp, Glycine max
ctggggcaaacgttcaacaggtgtcctattctgttggtacagactcaaggattggacccaagtttctcaatgccagtgttggttttggtggatcctgcttccagaaggatatcttgaaccttgtttacatcgtgagtgcaatggccttccagaggtggctgagtattggaaacaagtgatcaagatcaatgattatcagaagagccgatttgtgaaccgtgttgttgcatcaatgttcaacaca

SEQ ID NO: 168075 - DNA, 248 bp, Glycine max
ctcgagccgtgaatctcagaattctctaaaagagatctttttctgctctttgaagaaagaagggtctttgcttgattttggagatgtctctgctctcagatctcatcaaccttaacctctccgataccaccgagaggtgatcgcagagtacatatggatcggtggatcaggaatggacctgaggagcaaagcaaggactctcccaggaccagttagcgacccttcagagcttcccaagtggaactatg

SEQ ID NO: 168076 - DNA, 247 bp, Glycine max
gtcgcatcctccaccttaccactatgtgagccctccaccaccttctccatctcctcctccaccataccattacacatcaccacctcctccttccccagctcccgctcccaagtacatttacaaatcacctccactccagtttacatatatgcttccccacctccacctatctacaagtaagttcgaattgcggaagcaccattcacgataaatcatgttctagtttttatcgaggaataaaggcaag

SEQ ID NO: 168077 - DNA, 243 bp, Glycine max
ccgacacagcagaaatgatatgatgggttgtggcggtgcattctcagtgtggctgccagtgtttgtgtcttgttttacagcaatagcattggctgggactgggtgcgataaggcaccggtggtgttcgtgttggcgattcgaactcggacacgggtggactcgcttccggtctgggtttccctatcaatcttcccaatggccgcaatttctttcacagatccactggccgcttgtccgatgga

SEQ ID NO: 168078 - DNA, 246 bp, Glycine max
tggaaaggggcatcagggttctcagcctcttccacagccgaacaagtcactcaagggattgatggaaccgccctcaccgccatcgtcacaggagcaacaagtggccttggtctggagaccacccgggttcttgcatgcgcggtgtccatgttgttatggcagtaaggagtctggacagtggtaagaatgtcaaagaaacaatacttaaggaaatcccctcggctaaaattgatgtcatggagttag

SEQ ID NO: 168079 - DNA, 261 bp, Glycine max
aacaaataaagcaaaaggcctttttattccaaagcaaggaaggaagaaataaaccgaatgagagcattaacctcttcttcttccactttcattccaaagcgttattccttcttcttcttcctctccattctcttcgctctcgatcctcgtccgggggctgctccgaataccaccaccaccacgcgccgatggccacgataggaggcttacgcgactcccaaggctctcagaacagcgtccaaaccgaggccctcgctcggt

SEQ ID NO: 168080 - DNA, 134 bp, Glycine max
gtggacagccataagtgttagaattttatctcttcctgatctgagtctcatcacaaaggaacaattatgacgggagatcatacctcgctctgtacttctctgtgcctatgaagggatatcgtacttgctattgc

SEQ ID NO: 168081 - DNA, 247 bp, Glycine max
gggagaatggcggggcaatttgcaaagcctcgttcggattcgtttgaggagaagaatggcgtgaagcttccgagttacagaggggataacattaacggagactctttcgacgagaagtcgaggattccggatccgcagaggatgattagggcttattgccaagccgcggccacgctgaatcttctcagagcttttgccaccggtggttatgctgctatgcagagggttactcagtggaatttggact

SEQ ID NO: 168082 - DNA, 245 bp, Glycine max
aacgccactagctatttcagctttctctctcattaatattaataatattattgtgttacattttttctacaacaatggagttgggaagcatactccattttcttcaggataagagcattttgatcactggagcaccggttttcttgccaaagttttgttggagaagatattgagggtccaaccaaatgttaagaagctttaccttcttttaagagctgaagatgccaaatctgctactcatcgct

SEQ ID NO: 168083 - DNA, 241 bp, Glycine max
gagggatgctaaaatggacaaaagaagtgttgatgatgttgttcttgttggtggttctaccagaattcccaaggttcaacaactgctgcaggacttctttaatggaaaggagctgtgcaagagcatcaatccgatgaagctgttgcatatggtgctgctgttcaggctgcaattttaagtggtgatggcaatgagaaggctcaggatcttctcctccttgatgtgactcctctatctcttg

SEQ ID NO: 168084 - DNA, 249 bp, Glycine max
gggcttctgaatgcaacatgtggaaatgcaaccgaaatgatcatagcattgttagcacttcaccagaacaaagttcatgttgtgaagttgtccctgctgggttccattctctcaaaccttctcttggttcttggagttcactcctctgtggtggtttagccaatcttaagagagaacaaagatatgacagaaaacaggctgatgtaaattcactgcttttgttgctggggttgttgtgccatttgctgc

SEQ ID NO: 168085 - DNA, 246 bp, Glycine max
gttagaactgataatcaagagagtgactactgatcggcgacagcgaactacttccgtgtaatggcgacctccgtcgcagtcgccggcgctttgacggcgcatgatcgccggattctgacagcggtgaacgcggagcgtcgagcctgtcgttggccggttccagcttcattgtagtgtgctacctcctcttcaaggagctccgcaagttctccttcaagctcgtcttctacctcgctctctctgata

SEQ ID NO: 168086 - DNA, 247 bp, Glycine max
cgtattgaatctcagaattctctaaaagagatctttttctgctctttgaagaaagaagggtctttgcttgattttggagatgtctctgctctcagatctcatcaaccttaacctctccgataccaccgagaggtgatcgcagagtacatatggatcggtggatcaggaatggacctgaggagcaaagcaaggactctcccaggaccagttagcgacccttcagagcttcccaagtggaactatgatg

SEQ ID NO: 168087 - DNA, 242 bp, Glycine max
ctttccgaagaatgagaaatatgtgcctttgtttaccggcggtgatgattcggagatagttgaccggagaaacgggctgcgcaaacagattgaagataggttggttgcagctgctgcaagtggcaaggattagaagagactggcagtgaggatgatggtcttttggatctgagtgatgatgatttttttcttgccgggagttctagtgacgaagcagatgcggatgatgaatggacagacaa

SEQ ID NO: 168088 - DNA, 242 bp, Glycine max
gtttgagagaaaggttgagctatagcctaaagggagagacacataaatagtttctactttctattcatagatagatggctggcccaattatgagacctcagattgtgctatttggctcctccataattcaatgagcttcgacaatggtggttggggtgctattctagctaacttgtacgctaggaaggcggacatcatcttaagaggatactctggttggaattcaaggcgggctttggagg

SEQ ID NO: 168089 - DNA, 256 bp, Glycine max
ctcacatttcattacttctagcaagctattacatcttttccttcctctgtctacattccatttcattcaaaacaatcatggcatctcttcattccacatgttcaacaaaaaccgtcctttatgcattggtattgtggcctcttccatggcaacttctaccaggattttgacataacatggggagatggtcgtgccaagatactcaacaacggcgatcttcttactctttcccttgacaaagcctccggatcagggt

SEQ ID NO: 168090 - DNA, 252 bp, Glycine max
gtgaaagcgaagatccaggataaggaaggtattccaccggatcagcaacgtcttatcttcgccggaaagcagttggaagacggcagaaccctcgccgattacaatattcaaaaggaatcgacgcttcatctggtgctcgtctccgcggagggatgcagatcttcgtgaagacgctcaccggaaaaacgattactctggaggtggagagttctgatacgatcgataacgtgaaggcaaagattcaggataagg

SEQ ID NO: 168091 - DNA, 248 bp, Glycine max
gtcgaagcgaggtcgcggaggatcggcgggaaacaagttccgcatgtcgctgggtctgccggtggcggcgacggtgaactgcgccgacaacaccggcgcgaagaacctctacatcatatcagtgaaggggatcagggtaggctgaaccggttgccgtcagcttgcgtcggagacatggttatggccaccgtcaagaagggaaagcccgatctccgtaagaaggtgctgcccgccgtcatcgtccgcca

SEQ ID NO: 168092 - DNA, 243 bp, Glycine max
tgcaagaatggcacttcgttgcttggtgatgtccctttctgttctcttcactcttggtcttgcgagagaaagccatgccagagacgaagatttttggcatgctgtttggccaaacactcccattccaagtcattgcgagatcttctaaagcctggccctgcaagtgttgaaatcgatgatcaccctatgcaaattgaagaaacacagtacccgaaaaccttcttctataaagaagaccttcat

SEQ ID NO: 168093 - DNA, 242 bp, Glycine max
ctttctctagtcctgttatttctcagcgcgtaaagcatggctttgttggtggagaaaaccacgagtggtcgcgagtacaaggtcaaggacctttcccaggccgacttcggccgcctcgagatcgagctgccgaggttgagatgcccggcctcatggcctgtcggaccgagttcggcccctcccagcccttcaagggggtccgcatcaccggctccctccacatgaccatccagaccgccgtt

SEQ ID NO: 168094 - DNA, 243 bp, Glycine max
tcgctgatcaaacttcaaaccctagctaggatttcaaggtacacttaacgatggcttcaaaacgcattactaaggagttgaaggatctgcagcaggaccctcctgtttcctgcagtgctggccctgttgggatgacatgtttcattggcaagctacaattatgggtccaactgacagtccttatgctggtggtgtattcctggtgaccattcacttcccaccagattatccatttaagccacc

SEQ ID NO: 168095 - DNA, 241 bp, Glycine max
cgtcgctccgcaccagtttcaccgcacgaatatcttgttgtttggagcgatccgagaaaaactctgtaaacatgttggtttaccaggacctccttacaggtgatgagcttctctctgactccttccgttaaaggaaattgagaatggaatgctgtgggaagttgaggggaagtgggttgttaaaggagcagttgatgtagacattggtgcaaacccttctgctgagggtggaggagaagat

SEQ ID NO: 168096 - DNA, 260 bp, Glycine max
tattgaaacgaagattatcaacgatcgtgagactggcagatccaggggttttggatttgtgaccttcgcctcggagcagtccatgaaagatgcgatcggagcgatgaatggacagaacttggacggccgtaacatcactgcaatgaagctcagtcccgcggtggcggcggcggcggcggaggaggaggatacaatcgtggtggcggtggatatggtggtcgtagtggcggtggcggtggtggataccgtagccgtgacgg

SEQ ID NO: 168097 - DNA, 254 bp, Glycine max
agaaagtgcgcgtggtgaaaaagcatggcttctcagctcctgagacgaaccttcggaagtcgtttccttgcaaaccctagggccttctcctccgctgcttccactccgatccgcgccactctcttccccggcgacggctcggccccgagatcgccgattccgtcaaacagatattccaagcagctgatgtcccaatagaatgggaagagcactatgtaggaactgaaattgaccctagaacgcagagctttctg

SEQ ID NO: 168098 - DNA, 252 bp, Glycine max
ggccaaaccacaaacgtgcttctcaaaaccaagccatattttcccaatgccacattccaaatgtctgctaggccttatttcacaggccgtggcacctttgacaactccacaactgcaggtaccctaatctacaagcacccttgaaaaattccagtgtcaaaaatctcacccttctcaaaccaactttgccaccaataaatgccacaagctttgtggcaaacttcacagcaaaattcagaagcttggctagtg

SEQ ID NO: 168099 - DNA, 252 bp, Glycine max
cttttagcaagttaacaacacttttgtcttcgttccattatctagttctcaattctcttcaccctttgcctctgaaagaaatgggtagtcttgaagcggaaagaacaacagtaggattggcagcaagagacccttcaggattctctccccatacacctacaatctaagaaacacaggccctgatgatgtttacattaaagttcactactgtggagtttgccattctgatctccaccagattaaaaatgatct

SEQ ID NO: 168100 - DNA, 240 bp, Glycine max
gtcggaggcgcagagtagagcagcagagaagagagaaaacggcactgcagccgtagaaggaaaaccgaccatggtgcacgtctccttttacaggaactatggtaagacgtttaagaagccccgccgtcgtacgagaaggagcgtctagacgcggagctgaagctggtgggggagtacgggctgcggtgcaagagggagctgtggagggtgcagtacgcgctcagccgcatccgcaacaac

SEQ ID NO: 168101 - DNA, 241 bp, Glycine max
tctcgagccgaatcggctcgagtttgaagagctatgcatcaagaaagaagccattgagggagaagagaagttttgtgcaaaatacttgggaacagtaattggttttgccatttcaaagctgggaaagacattcaagtactttcaagttcctttgtcaataagcaagaccaatacactgtggaaggagtgcagaatcttggagacaaagcagtgatgtgtcataggctaaatttcagaactg

SEQ ID NO: 168102 - DNA, 238 bp, Glycine max
aaaatagaatggacgcagatagtgattgagaattgggaattgcgatggatgggagaaacggaagcggaagcaggaggagtggggaagcaggaggaatggggaaggcgataatcgcgttggtaattggagtcttgtgtactatcactgtgcctaccgcaattctacccttgtctctcttttttccgatgtcttcatcgtccttctctgctccctcgccattctcggtcttctattccga

SEQ ID NO: 168103 - DNA, 214 bp, Glycine max
cacacgcacgcggacttcagctcgaactctttaccagttgccacactacaccgagataccccctaaacccgtttgcgttgttgtttgcgaagaaatggcgactaagaggagcgtgggaacgttgaaggagggtgatttgaaagggaagagggtgttcgtgagggtcgatctgaacgtgcctttggatgacaaccttaacatcaccgatgacact

SEQ ID NO: 168104 - DNA, 264 bp, Glycine max
  unsure (1)..(264): unsure at all n locations
acagaagcagaaggaggagaagcagaaagaggagacgaagcaatggcgccgaagaagcccagaaccacgtcgaggaaccctgatttggtcaggggaattggcaaatattcgaggtcgcagatgtaccacaagaggggcatctgggccatcaaggccaaaaacggcggtgttttgcccctccacgatcccaagcccanacccgaggctccggcccagaagccgcccaagttctacccggccgatgacgtgaagaaagccctcgtc

SEQ ID NO: 168105 - DNA, 261 bp, Glycine max
gctagctgaagagagaaaagcaaaatcgaattatcatagaaagaagtgaattgaatttcattgacagagtcagagtgaagtgttgcgcaaatctgaggtgcgcattgcattgtggttgatttgtaagaatggcgccagtgtcggctctcgcaaagtacaagctggtgttcttgggtgatcagtccgttgggaaaaccagcatcatcactcgcttcatgtacgacaaattcgacaacacttatcaggctacaatcggtatcg

SEQ ID NO: 168106 - DNA, 259 bp, Glycine max
gttctaactggatccgaggtgtacaatgaaggctactctgaagggaaagtacgatgtcgacaaaaacggagctgcctttgccaacatcgccgtcaacgccggcgacgtcaagttccgagcctccgtaacggaagccactttcattaacggtcccagcttcaccggcttggcgctcgccgtcgagaaacccggttccttcatcgtcgactacaacgttccaaaaaggactttcggtttcagtttatgaacacggttaggg

SEQ ID NO: 168107 - DNA, 258 bp, Glycine max
cgaagaccggtggacccttcggaaccatcaagcaccctgccgaactggctcacagcgctaacaacggtcttgacatcgctgttaggcttttggagccactcaaggcggagttccctattttgagctacgccgatttctaccagttggctggcgttgttgccgttgaggtcacgggtggacctgaagttccattccaccctggaagagaggacaagcctgagccaccaccagagggtcgcttgcccgatgccactaagg

SEQ ID NO: 168108 - DNA, 255 bp, Glycine max
ggcagagcgaagagaaggggcaaaagagaaagaagcgcttatcgaactcggacggaagcactgagttgactcggagggagtggaaagtgttgttgcgtaatgtctggtggtatcgctcgtggacgcctcaccgaggagcgcaagtcgtggcggaagaaccatccccatggttttgttgcgaaccggagacgctgcccgatggaaccgtgaatttgatggtgtggcattgcactattcccgggaagactgggactg

SEQ ID NO: 168109 - DNA, 253 bp, Glycine max
aacagaacttcccaacaaagaagcaccagaagtgaacaagccagagcaacaaccacctttcattccggagactgaaaacagctatggcctatatggtcatcatgatgagtataaccaagtcccttccaccaccaccaaccccacttcttaccacccctacaagaccgagtttgagaactccaacaacaagtattacaacaatgatgcctataacacaggttctccgaaaccggttacaacaacaacaaggatt

SEQ ID NO: 168110 - DNA, 255 bp, Glycine max
atccaattagggtttcgcttagagtaaccaattaccatgggagtcttcacctttgtcgttcgcaaatccggcgccgaatggagcgccaagcaacattccggcgacatcgaggcctccgccgactccacctacgatctccaaaggaagctcgtgcaagccgctctcgccgttgattcctccggtggagtccagtcctccttctctcccgtgtctcctacctccgctgtgttccaggtgatagtgggtggtgctgta

SEQ ID NO: 168111 - DNA, 255 bp, Glycine max
gtcgtgaatgtgttttctttttgggagtgaaccagcaacctcttattcttggtgataatcataaactgcaggtggctccctataatacattttactcccaattggaaaagcatatgaatgaagttggaattgtgcccacagttaaccgatgggatgagcctctagcattgggcatggttgatccccatgattcattatctcatccagcaggtgtctctgatgttcaagctgagtctgctacacgggtggaccctg

SEQ ID NO: 168112 - DNA, 257 bp, Glycine max
gccaaagagagtgagtgagtagggtttcaaattccaatcggaagaaatcggaatcggaaaaaatgggaggtggcggcggcgatcacggccatggacacggacacggcgatttcaggaacaaggtctggagtatgagcggtggcccttactgtcgcccaaagcactggaagcgcaacaccgccattgccatgttcggcgttgtcctcatctgcatccccatcgctatgaaatccgctgaactcgagcaacgaccacat

SEQ ID NO: 168113 - DNA, 265 bp, Glycine max
cttcttcccaagcactacgccactactactcactcactgcagatctcaattgcatcgctgtccatggctaccatcgttagcatcaaggcccgccagatcttcgacagtcgtggcaatccaactgtcgacgtggatttgacttgctccgatggtacttttgccagagctgctgttccaagtggtgcatccactgggatttatgaggcccttgaattgagagatggaggatctgactaacctgggaagggtgtaaccaaagctgttg

SEQ ID NO: 168114 - DNA, 261 bp, Glycine max
atctgtgagaagaaattatcaactcccattgggatgctttgcaagtcatatcctgcggagtttgctagttactttcactattgccaatctttaacatttgatcaacacccagattatggatacttgaagcgcttgttccgtgatttgttcaaaagagaaggatatgattctgactatatatttgactggaccatcctaaaatatcagcaggcgcaacagacaaagaaacaaaatcaatcatctccttcaactgcagtgcct

SEQ ID NO: 168115 - DNA, 257 bp, Glycine max
cggctcgagattcaaagaaggcgtcttcataaacgcctttattctccgtttccgtttccttcccggaattcgatttttcatctctgaaaatgagagagtgcatctcgatccacattggtcaggccggtatccaggtcggaaatgcttgctgggagctctactgtcttgagcacggcatcgggcccgatgggcaaatgccaagtgacaaaacagttggcggaggtgatgatgctttcaacactttcttcagtgagact

SEQ ID NO: 168116 - DNA, 257 bp, Glycine max
aaaattgctgcaatagagggtgcagaggacacaaaagttagtttaagcagcactgacagtggcaggagtgatggtgatgcagatgaatataatgatggtagtcctactatcatgcttgatgagatccttgatttgttgagccgcaggtgggatagaataaatggagctcaggcccttaaacttttaccaaaagagacaaaattacaggacctactttcatttcttggaccccttctgagaaaatctagtgaaatgta

SEQ ID NO: 168117 - DNA, 254 bp, Glycine max
attaattgcaagaatggcacttcgttgcttggtgatgtccctttctgttctcttcactcttggtcttgcgagagaaagccatgccagagacgaagatttttggcatgctgtttggccaaacactcccattccaagttcattgcgagatcttctaaagcctggccctgcaagtgttgaaatcgatgatcaccctatgcaaattgaagaaacacagtacccgaaaaccttcttctataaagaagaccttcatccag

SEQ ID NO: 168118 - DNA, 254 bp, Glycine max
gagctctccaacatctgcgacggtattctcaagctcctcgactctcgcctcattccctccgcttcctccggcgattccaaggtcttctacctcaagatgaagggagattaccacaggtacctcgccgagttcaagaccggcgccgagcgtaaggaggctgccgagagcactctctctgcatacaaagccgctcaggacattgcaaatgccgaactgcctccaactcatccaattaggcttggccttgcacttaa

SEQ ID NO: 168119 - DNA, 254 bp, Glycine max
atcgatctcaaggccggaggtaaaagcaaaaaaaccaaaagaacagcacccaagtccaatgatatctatcttaagctcttggtcaagctttatcgcttccttgttcggagaactggcagcaaattcaatgccgttatactcaagagattgttcatgagcaaggttaacaagcccccattgtctttgtcaaggttgattaagtataccaaggggaaggaagataagattgctgtggtggtgggcaatataaccga

SEQ ID NO: 168120 - DNA, 245 bp, Glycine max
gaagttaatttgcaagatggctaaggaaaaggctcagatcaacattgtggtggttggtcatgtggaccctgaggaggcaaccaccattaacgagctgaagaagcctgttgtggagaaagaagctccagggcatgccatatgagggcatgcacgtacggcctcggaggggaaccagaaaattatgttaacaaaataatctggaacccaatgtatcagtgtcatcatcagtgtgtagtttaagctag

SEQ ID NO: 168121 - DNA, 254 bp, Glycine max
ttgataaacagtgcaccagacgatattcgacctaaagtttttgttagtgctacagctgttggttattatggcaccagtgagacacaagtctttgatgaacaaagtccatcaggaaaggattacttggctgaggtttgtagggaatgggaatcgacagccctaaaggtaaacggaggtgttagagtggctctaattcgcattggtgttgttcttggtaaagatggtggagcattagctaaaatgatacctatgtt

SEQ ID NO: 168122 - DNA, 256 bp, Glycine max
gccgtgagagccgccgctatctcgagatgttctatgctctcaagtaccgcaaattggccgagtctgtgccccttgctgttgagtaaactgaggatgaagagttggataaagaaatggaggaaccggctttttgtttctcatttggagtttgtcttacttgagttctataaataatatgtccctgatgattttaattttgtgattaagctttcgataagagacagagagagaaaaaaaaaaaaaaaaaaaggggggg

SEQ ID NO: 168123 - DNA, 256 bp, Glycine max
ctgaattgggccctgatgtgaacttcacctatgcttctcacaaggctgttgatgaatacaaggaggccaaggcgcttggagtggataccattcccgtactcgttggccctgttacatacttgttgctctccaagcctgccaagggagtcgagaaatccttttctctcctctctctccttcccaaggttcttgctgtctacaaggaagttattgctgacctaaggcagctggtgcttcatggattcaatttgatgag

SEQ ID NO: 168124 - DNA, 257 bp, Glycine max
cgcaaattaaagcgcaaaaaccattctccttcggtgctcttgaaaacatgggaaaacagagcacagaattctctgccctcaactgcatcgacctctccaaccctgacatcaaccaatccgtcaatttactcaaacaggcatgtttggattccggttttttctacgttgtcaatcatggaataagccaggaattcatggaagaggtttttgcacagagcaagaaattcttctctcttcctcacaaggagaagatgaag

SEQ ID NO: 168125 - DNA, 254 bp, Glycine max
gtgagatttgcgaatctgagaaatggcggattcttctcgggaggagaacgtttacatggcgaaattggcggacaggccgagcgttacgaggagatggttgagttcatggagaaggttgcaaagactgtggaggttgaggagttgacggtggaggagaggaatctcctctctgtggcttacaagaacgtgattggtgcgaggagggcttcgtggaggatcatatcctccattgagcagaaggaggagagcagggg

SEQ ID NO: 168126 - DNA, 252 bp, Glycine max
ggcataacctaaacttacccttcttctctctgtgtgtgtgcgcatcaaacgcaaccagaagcagccatggccactgcaagaactgtgaaggacgtttctcctcatgagttcgtcaaagcttactcttctcacctcaagcgatctggcaagatggagctgccagagtggactgatattgtgaaaactgcaagatttaaggagttggctccttatgatcctgactggtactatgtcagagctgcttccatggca

SEQ ID NO: 168127 - DNA, 249 bp, Glycine max
gagtagttggagacttatttggtccagatttgttttagtaattaactgctttaattgttgcatgcagctaggaggtccccatatccctcttaagactggaagaagggatggtagaaggagcagagctgatgtggttgagcagttcctcccagaccacaatgagtccatttctgcagttcttgacaagtttggtgccatgggaattgacaccctggcgtcgttgcactgcttggagcacacagtgttggt

SEQ ID NO: 168128 - DNA, 251 bp, Glycine max
aattctgagcagccaccgtgaaccggtctcacctcgttgactcattctccgtccacttgcgaaagagaagagatctgaaaccctaacctaaccctaacagaggtaatggattcagtgcctcgaagaagcagaggaggaggcgttttcgaaagcctctacaaggtcctcatgcgccgcaactccgtctacgtcaccttcatcatcgccggcgcttcctcggagagcgggctgtggattacggagttcacaag

SEQ ID NO: 168129 - DNA, 251 bp, Glycine max
attcttattcttcccctctaagggtatctttctctctagctttttgttatgctttgctattctgtctttgggagctgaagctcgtagatcaccatcacccatctcttctctcattagcaaagagctttttgattccattttcatccacaaagataacaatgcatgccctgccagaaacttctacacctacgactccttcatcaatgcatccaaacgcttcccaagatttggcaccactggtagtccagcca

SEQ ID NO: 168130 - DNA, 251 bp, Glycine max
aagagctccagagtttttctgaaccaaaagaggtaatgatatttttcagtgcccatggtgtacctgtcagttacgttgaggaagctggggatccataccgagaccaaatggaggagtgcatcttcttgatcatgcaagagttgaaagctagaggaattagtaatgagcacactcttgcttatcagagtcgagtgggtcctgtacagtggctgaaaccatatactgatgaagttctcgttgagcttggccaa

SEQ ID NO: 168131 - DNA, 257 bp, Glycine max
aaaaaagttgtgctgtgccgcctcttccgtaggcagcagcaatggcctcaaatcccaaaactttgacctttgaggaggtagctaagcacaacaacaaaaaggattgctggattattatcaatggaaaggtgtatgatatcacaccatttttggatgagcatccaggaggtgatgaagttttgctgacgtcaacagggaaggatgccaccattgattttgaagatgtgggccacagtgattctgctatagaaatgatg

SEQ ID NO: 168132 - DNA, 255 bp, Glycine max
cttaaacctttctttcttgtaaactttattgattgattctgagaatagaactaagagggtatagacatggctagcgcaattgcagcttcttttttggttctgcttctggctttccccactgtatttggagctgaccatgaagttggtgacactagtggatgggccctcggagttaattacaacacctgggcctctgggaaaactttcacagttggtgacactttggtgttcaagtatgactccactcatcaagtt

SEQ ID NO: 168133 - DNA, 250 bp, Glycine max
gatcggtatctttcagggaatgctatgaataggcaaaggttacaactacttggtgtttcatgcatgatgattgcctctaaatatgaggagatttgtgctcctcaggtggaagaattttgttatataaccgacaatacttacttaaaagaagaggttttgcaaatggaatctgctgtcttgaattatcttaagttcgaaatgacagctccaacagttaaatgtttcttaagacgatttgttcgtgcagctg

SEQ ID NO: 168134 - DNA, 247 bp, Glycine max
gacagactgagagctctttcttgattctatgggtggtggtgcatggccgttcttagttggtggagcgatttgtctggttaattccgttaacgaacgagacctcagcctgctaaatagctatgtggaggtaaccctccacggccagcttcttagagggactatggccgcttaggccacggaagtttgaggcaataacaggtctgtgatgccttagatgttctgggccgcacgcgcgctacactgatgt

SEQ ID NO: 168135 - DNA, 250 bp, Glycine max
ttaaaaaatgttgatcttgagtatctattggatcggtacccgcctgaaaaagaggtaaactggggtgatgaactttcattgggtgagcaacaacgattgggcatggccagacttttttaccataagcctaaatttgccattcttgatgagtgcacaagtgctgtcacaactgatatggaagaacggttttgtgctaatgttctggctatgggaacatcatgtattaccatatcacatcgtccagcattag

SEQ ID NO: 168136 - DNA, 250 bp, Glycine max
cctcgagtcgaatcggctcaaacttgcctagccatggcctcatactccatagcaggcttgatcaccggttcgaatgctcacttctcgcgtgactccgatgagcatcagactcctcctatccgacaggcttcatcgaaaactacttgtcgagtttgtggcgatgagattggatacaaggaaaatggggagctgtttgtggcttgtcatgtgtgtggattgcctgtttgccgaccgtgttatgagtatgaga

SEQ ID NO: 168137 - DNA, 255 bp, Glycine max
cattccttcatttttaaacctagctccatctccctccactcaccataacatggcatcagaagcaaatgctgccaacaccaacttctgtgtaaatgttagcaacaatggctacattagtgctaatgaccccttgaactggggtgcggcggcggaggctatggctgggagccacctcgacgaggtcaagcgcatgctagaggagtaccggaggcccgtcgtcaagctcggtggagagaccctgaccatctcgcaggt

SEQ ID NO: 168138 - DNA, 247 bp, Glycine max
ggtgccttatcgctgtggttttcatcgtcttccttctcttatatttcttttttttttgtcttcgccgcacgccgaaacaatggccggaaaaggagagggtcctgctatcggaatcgatctcggaaccacctactcttgtgtcggtgtgtggcaacatgaccgagttgaaatcatcgccaacgaccaagggaacagaacgacgccgtcttacgtcggcttcactgataccgagcgtctcatcggtgat

SEQ ID NO: 168139 - DNA, 253 bp, Glycine max
gttggtgcaaagcatccttcgtttcaatttctctctctcagcgctttctgcaatcgaacctttcatctccaaagggatccacaggccgaaggagaaatggggctgacattcacaaagcttttcagtcggcttttcgcgaagaaggaaatgcgaattctgatggttggtcttgatgctgctggtaagaccactatcctgtacaagctcaagctcggagagatcgttaccacaattcctaccatcgggttcaatg

SEQ ID NO: 168140 - DNA, 251 bp, Glycine max
gcggtgacgaaaggaaagaagaagaagaagcgttctttcggagagttcgaagatgtcgggcgttaccaacaacaacgaggaagacaagaagccaaccgaacagggagcacacatcaaccttaaggttaaggggcaggatgggaatgaagtttttttcaggatcaagagaagcactcaattgaagaagcttatgaatgcttactgtgaccgacgtcggtggatttcaactccattgcttttctgtttgatgg

SEQ ID NO: 168141 - DNA, 253 bp, Glycine max
gtaaaaatgtcaaaggacaaagtttccggtgatccaagacgtgcagtgtgcacaggtatcaccatcttcctcctcttagccggcgtcactctcctcgtcctctggctggtctaccgtccccacaagccgcgcttcacggtcatcggcgccgccatctacggcctcaacaccagcacgccgccgctcatgtcaaccaccatgcagttctccgtcctcataaagaacccgaacaggcgtgtctccatttactacg

SEQ ID NO: 168142 - DNA, 248 bp, Glycine max
agaaagtgcatattgggaacttgtagtgaaggatatccaagatgcttgcagactatttgaaccaatctatgatcaaacagatggtggtgatgggtatgtttctgttgaagtatctcctaggctcgctgatgacactgagggaaccatagaagctgcaaaatggcttcataaagtggttgatcgccccaatgtgtatattaagattcctgctacagaggcatgtgtgccttcaattaaggaagttattg

SEQ ID NO: 168143 - DNA, 248 bp, Glycine max
gttttaaatccacaaaatccttttgtgttaaataggtggatggggaaattgactttcccccagggcacttcccgaagtgttaaaagaatgcctctttctatagggggaggagctggtgcaaagaatgctattctcatgaatatgccaaatgctgttctttcaatgtggagatattttgttggagatcttgtctttgaagtttctaagatgacttctccttatattaaatgtacagtctctttcttcat

SEQ ID NO: 168144 - DNA, 249 bp, Glycine max
aaaacacaggccatttggtcgtttgtggtgggatgaaattgtgtcaacagtggtgacaagggccgagcctcacaaccaggccattctccaccctacacaaaaccgagtacttaccattagagagaatgcgagactacaagggtttcctgattgctataaactttgtgggcctgtcaaagagaggtacatacaagttggaaatgctgttgctgttcctgttgctctagcattgggatacacatttggttt

SEQ ID NO: 168145 - DNA, 244 bp, Glycine max
ctcgagccggtgatcgcaatgatatttccctacttcaatcagattttgggggttctgggtaacatcattttttggccgttgaccatatattttccagtggaaatatacttgagtcagtccagtactgtatcatggacgactaagtgggtactgcttcggactttcagcttttttggctttttgtttggattgttcactctcattggatgtattaaaggaatagtaactgaaaaaataagctgag

SEQ ID NO: 168146 - DNA, 244 bp, Glycine max
ctctttctctagtcctgttatttctcagcgcgtaaagcatggctttgttggtggagaaaaccacgagtggtcgcgagtacaaggtcaaggacctttcccaggccgacttcggccgcctcgagatcgagctggccgaggttgagatgcccggcctcatggcctgtcggaccgagttcggcccctcccagcccttcaagggggcccgatcaccggctccctccacatgaccatccagaccgccgtt

SEQ ID NO: 168147 - DNA, 248 bp, Glycine max
gcaagtatgctggggttgacaccctcttgggagccacaccactacttggtgccgttgtgaagctccaatgcaacaacaccaagtacaagctggttcaaacaagtaaatctgacaagaacggctacttctacattgaagcaccaaagagcataaccacgtacggggcccacaagtgtaacgtggttttggttagtgcaccctatgggcttaaggcctcaaatctccatggtggtgtcactggtgctctt

SEQ ID NO: 168148 - DNA, 259 bp, Glycine max
cagcgtcctagatttcctcttctctgcttcggaagaaagagaaaacaaacaaaacaatggcgttcgcttctttcctaggcagagtcctcttcgcttctgtcttcatactctctgcttaccaacaatttaatgaatatgagttgatgggggacctgctacaaaagcactcagacctaagtttgatgcctttacacatcgggtgcattctcaagtgggctttcaaattccagagattaatctgaaatttttaattgctggg

SEQ ID NO: 168149 - DNA, 259 bp, Glycine max
attgtcacagcttcaaatggaaagactatagaggttaacaacactgatgctgaaggtagacttaccctggcagatgctctggtatatgcttgtaaccaaggtgttgaaaagattattgacttggcaaccttgatggggcttgtgttgttgctcttggaccctcaattgctggtgtgtttacaccctgtgatgacctagcaaaggaagtttttgaagcttctgatgtgagtggggagaaactatggcggctgccattaga

SEQ ID NO: 168150 - DNA, 258 bp, Glycine max
atagttagcactttgcagaagcattgcaattattttaagttgcaatagctagctgttagaaatgaaccactactgtgaaagatgttgaatcatacgtacgtgtgttctatcagagaagctgcttttgatcttggttactacggtagatgccaaatgagtggaagttgttcttgtttgagtttgctttagtaagaatccctttttcagtttgcaaaaaaaaaaaaaaaaaaaaaaaaaaatgaaaagaaaaagagcaaa

SEQ ID NO: 168151 - DNA, 262 bp, Glycine max
tgagattcactaagttatcctcataaatacactctaattaggtggcaagataagtgtctaaccttagtaacattgccacttattgtgttcattttggaattgtgccacttaaattctattcaattcatctatggtgcctcttcttatgctatgcaatcaatcctggcaaaccctttgatccgcatttccagcgggtctagggtgaaccaatttggcgttcctgctttgcacatgagaaggaatgttggcctgagagttaggt

SEQ ID NO: 168152 - DNA, 260 bp, Glycine max
atagctagttgtttaaagtgagagaaaaagaaagaagaaaatggcaaactttccagttgttgacatggggaaacttaacaccgaagagagagcagcagccatggagattataaaagatgcctgtgagaactgggtttctttgagttggtgaaccatgggatatccattgagttgatggacactgtggagaggctcacaaaagagcactacaagaagactatggagcaaaggttcaaagaaatggtggccagcaaagggct

SEQ ID NO: 168153 - DNA, 247 bp, Glycine max
ggggaactatattgtggcagacctatattacctggaaaaacagaggttgaacaattgcataggatatttaaactttgtggctcaccatctgaggattattggcgtaagccgcggacgccacattcaacagtatcaggcctccccaccattataggcagtgtgttgctgaaacatttaaagaatgcccatctgctgccacaaggcttattgaaaccctactttctttagatcccacacttcgaggaac

SEQ ID NO: 168154 - DNA, 243 bp, Glycine max
cggctcgagcttgaatatgatggtgaattgaaacttccaagtcattaccttgtttctccaccagagattgacaggacttctggtgaatatttagtgtataatggtattcggacttttgcttgcagtgagactgtaaatttggtcacgtcacattcttctggaatggaaaccgctctgggtattttaattcagaattggaggagtatgtggaaattcccagtgactctgggattacattcaatg

SEQ ID NO: 168155 - DNA, 264 bp, Glycine max
cggctcgagagaggaactactcagcttagcttgagtattttcaagaggggatcaaagggaagaagaagggaaggactcaaacttgcacacgcaacctttggttcctttcccaacactcaccatggtggcagattcaagtccaattccgacctctccttcggaaaaatctttgccagcagtgctttctctgcatgtttcgctgaggtgtgtactattcctttggatactgccaaagtgaggcttcagcttcaaaagcaagctgta

SEQ ID NO: 168156 - DNA, 262 bp, Glycine max
acccgctcagcacgcagaggagcagaagcctaagccttcaacatggcgagagggttgaagaaacacttgaagaggctcaatgctccaaaacactggatgcttgacaagcttggtggggcctttgcaccgaagcatcatctggaccccacaagtccagggagtgtcttcctttgatcctcatcctacggaacaggctaaagtatgctctaacatatagagaagttattgccatcttgatgcagcgccatgttcttgttgatgg

SEQ ID NO: 168157 - DNA, 252 bp, Glycine max
ctttctgttctcttcactcttggtcttgcgagagaaagccatgccagagacgaagatttttggcatgctgtttggccaaacactcccattccaagttcattgcgagatcttctaaagcctggccctgcaagtgtgaaatcgatgatcaccctatgcaaattgaagaaacacagtacccgaaaaccttcttctataaagaagaccttcatccaggcaaaacaatgaaagtacaattcagcaagcctccctttc

SEQ ID NO: 168158 - DNA, 252 bp, Glycine max
cgagagaggcgcacgttagcaaaagctcgtggaattgctagcaatggcgaggatcaaggtttacgagctgaggcagaagacgaaggctgatctgctgaatcaactgaaggacctgaaggcggagcttgccttgcttgtgttgctaaggtcaccggtggtgcccctaacaagctttccaagataaaggtggtgaggttgaacattgcccaggttttgacggtgatttctcagaagcagaaggctgcgttgagg

SEQ ID NO: 168159 - DNA, 245 bp, Glycine max
atctcactcttgttcgtcggtctcctcctattctccgctgccgtagccaccgtcgaacgaatcgatgatgaagacaaacttctgaaccgtcaaatggtgccggacgcggaggaccagcacctgccaaagcggagcaccacttctccgccttcaagacaaagttcgccaagacctacgccacgcagaggagcacgatcaccgcttccgtatcttcaagaacaacttgctccgcgccaagtcgcacc

SEQ ID NO: 168160 - DNA, 258 bp, Glycine max
gcggtgaatggtgttgctcagttacacagtgatatactaaagtcagaattatttgcaaattatgtttcaatatggccaacaaagttccaaaataaaaccaatgggattacacctagaagatggcttcaatttgcaaccctgagctaagcgggataatcaccaagtggttgaaaactgataagtgggtaaccaatcttgacttgttaacaggtctccgacagtttgctgacaatgaagatctgcaagcagaatggctgt

SEQ ID NO: 168161 - DNA, 266 bp, Glycine max
tgccgcagcagcctcaggaggagaataaggatgtctcacaggaagttcgagcacccaaggcacgggtcactgggatttctccccaggaagcgtgctgctcgtcacaggggaaaagtgaaggcattccccaaggatgcccatccaaggcacccaagctcactgcattcttgggttacaaggctggtatgactcacattgttagagaggtcgagaagccaggatcaaagcttcacaagaaggaaacatgtgagcctgttacaattatt

SEQ ID NO: 168162 - DNA, 264 bp, Glycine max
attaaaaatgcagatcttcgtgaaaaccctaacggggaagaccataaccctcgaggtcgaaagcagcgacaccattgacaatgtcaaggctaagattcaagacaaggaaggcatccctccggatcagcagcgttgattttcgccggaaagcaacttgaagatggaaggaccttggccgattacaacatccagaaggaatcaacccttcaccttgtcctcaggcttcgtggtggcatcatcgagccttccctcatggctttggct

SEQ ID NO: 168163 - DNA, 246 bp, Glycine max
atagataacaccgtactctctaatatcccatactatgaaaaacatggatatggggtggaggaatttaatgaaaccttatatgatgaatgggttaacaagggcgacgcaccggcattgccagagactcttaaaattacaacaagctgttgtctcttggcttcaagattgtattcttgtcaggaagatatcttgacacatggccgtaacagaagcaacctaaagaacgctggtttcacacatgggagc

SEQ ID NO: 168164 - DNA, 256 bp, Glycine max
aaacgctcataggttcattagtagtttgcagaagggttatgacacgttagtaggggaacgaggagttcaattatctgggggacagaagcagcgtgtggcaattgcacgagctatagtgaagaacccaaaatattactgctagatgaagccacaagtgcactggatgctgagtctgaaaaagtggttcaggatgcactagaccgtgtcatggtggaccgaaccacaatagtagtggctcataggttatccactatta

SEQ ID NO: 168165 - DNA, 256 bp, Glycine max
aatctcaacaactttcgtgtagtgcactgttttgctatagtaacccattaattaaaccgacctacgtagtagccatgaagagaggcagagaagagagtaagttagacatggctaattgcttgatgctattacgaaagttggagagagtgaaaccaattacccaatatcaaagggtagtgatattggtgatttcaagtgcaagacttgcaatagacggttctcttcttttcaagcccttggtggccatagagcaagc

SEQ ID NO: 168166 - DNA, 256 bp, Glycine max
cttcgtttgcgtttttatcacagaggaattaacatatatatagcaagcatggcagtcacactctacgaccttagctcttcctctgggttgaagaaacttgatgagtaccttctcccacgcagttacatcacgggtaccaagctacaaaggatgatcttactgtttatgcagctttgccaactgctccatcagatgaatatggaaatgtttccaggtggtacaagcacattgatgctttgttgagaatctcaggtgt

SEQ ID NO: 168167 - DNA, 241 bp, Glycine max
agagctccctattgaagaggttccacttttgcaggaagagataataagcatatgccgtagcatgggaaaggctgttattgtggcaacaaatatgctggaaagcatgattgttcacccaacaccaaccaggccgaggtatccgatattgcaattgctgttcgagaaggttctgatgcaataatgctttctggggaaactgctcacggaaagttcccggtaaaagccgtgaaagtaatgcata

SEQ ID NO: 168168 - DNA, 98 bp, Glycine max
cgaactgctgctgaatccacgggcaggcaagtcacaacctggtgaactgaaacatcttagtagccagaggaaaagccagcaaaagcgattcccgtagt

SEQ ID NO: 168169 - DNA, 262 bp, Glycine max
ttcgagccgctcaccgtgtgtgtgttgtgtgtgtgtgtgagagagagagagagagagagagagaaagagagagagagagaggttaggctatggctgatgagagcgtcgttgagtccccagtgaagaggcagaagatgatgatgaagaaaatgaggtctctgtttccatggatgtggagggtggcagagactctcttagtaacggtttatcatctgtgattcctgggtggctctctgaaattagttcaatgtggcctggagag

SEQ ID NO: 168170 - DNA, 257 bp, Glycine max
ctcgagccgattcaacgtttgtcgatccactcattctggtaaaacaatggctgtagctttgcaacctacccaagagatcacgacaataaaaaaaacctcccacgaagcaaaggcgagtggttgtgacagattgggtgtggttacaccacttgggcatgagccagatatcttctacaataatttgcttgatggtgctagtggcataagcgagattgaaacatttgattgtgcagaatatccaacaaggattgctggtg

SEQ ID NO: 168171 - DNA, 253 bp, Glycine max
gttgaagcttctttaaataacagtgaattacggaaagattcagccattctaataaatgagatgggggtcaatggagattgttatgatggtagaaacaaggaagttaacccagttcttggcgaaagctcgaatgggaaattcaatgggaggatcttgatattggtgagcgtattggtattggttcttatggtgaagtttatcgtgctgattgcaatggcactgaagttgctgtaaagaagtttctggaccaaga

SEQ ID NO: 168172 - DNA, 250 bp, Glycine max
cgaatatcttgttgtttggagcgatccgagaaaaactctgtaaacatgttggtttaccaggacctccttacaggtgatgagcttctctctgactccttccgttacaaggaaattgagaatggaatgcttgggaagttgaagggaagtgggctgttaaaggagcagttgatgtagagattggtgcaaacccttctgctgatggtcgatgagaatatgatggagctgatcatgcggctgtgaaagtgcttga

SEQ ID NO: 168173 - DNA, 250 bp, Glycine max
tctcactcttgttcttcggtctcctcctattctccgctgccgtagccaccgtcgaacgaatcgacgatgaagacaaccttctgatccgtcaagtggtgccggacgcggaggaccaccacctgccaacgcggagcaccacttctccgccttcaagacaaagttcgccaagacctacgccacgcaggaggagcacgaccaccgcttccgtatcttcaagaacaacttgctccgcgccaagtcgcaccagaaa

SEQ ID NO: 168174 - DNA, 117 bp, Glycine max
gtttggacagtctccagtatttgtggcctccacactcttggataatggtggagttccacagggcgtgagtcctgcatcacttttaaaagaagccatccaagtcatcagttgtggtta

SEQ ID NO: 168175 - DNA, 162 bp, Glycine max
ctcgtgtacgtcaagctctcagttcggtcccatatggtcgagcggctcgagagtgggtcatcgctttacatgactgctatagccttcctgtttatccttctaatcacttatacaggcacaacagatgcacaatccggggtatgttatggaagacttggcaac

SEQ ID NO: 168176 - DNA, 259 bp, Glycine max
gttccattccccaagaaccaggcaatgaggatatactcaagcctgtggaatgcagatgattgggccacaaggggaggtcttgttaagacagattggacacaggctcctttcacagcttcttacagaaacttcaatgccaatgcctgcactatgtcctccggaacttcatcttgcggttcaaacaacccttcctcttctaacaataatgttcggctctcagaagagttggattcaactgatcaggagaggctcaagtggg

SEQ ID NO: 168177 - DNA, 253 bp, Glycine max
tctctctctcccgaattattgttcgttcgacccttttacttagtattccctgtttccggtattcgctccctttttttctgcattctggttttacttagatctctgtcccgcaccagatctggtgcaggtgagagggttgggttcattaattttgtatcaatcttccttctgagcggtaggcgtggggataccagagtcttttcgggaagcaagagagggttctctccgttttcaatagatctctcactgtctt

SEQ ID NO: 168178 - DNA, 251 bp, Glycine max
gggtttcttttcgtttcgtttcaatggggagcgaagaggagaacggcgaattctacctgcgatactacgtcgggcacaagggcaagttcggtcacgagttcttggagttcgagttccgccccgacggaagctccgctacgccaacaactccaactacaaaaacgacaccatcatccgcaaggaggtttacctcacccccgccgttctccgcgagtgccgtcgcatcatctccgagagcgagattatgaagg

SEQ ID NO: 168179 - DNA, 233 bp, Glycine max
agagctccctattgcacaggttccacttttgcaggtagagataataagcatatgccgtagcatgggaaaggctgctattgaggcaccaaatatgctggatagcatgattgctcacccaacaccaaccagtccgaggtatccgatatcgcgattgctgttcgataaggttctgctgcaataatgctttctggggaaactgctcacggaagattcccgctaaaagccgtgaaagt

SEQ ID NO: 168180 - DNA, 251 bp, Glycine max
tgttggatgccaatgtcaaggaactggggtcagaactggcaaagcaacaactaccttaatggtcagagcctctccttcaaggtcacaacaagtgatggcagaactgtggcatccaacaatgttgcccatctggctggtcctttggtcaaacctacactggtgctcaattccgctagatcttgttgtcacacgcataccagtagtgctatatagtataatagatatatagtattatgttctaggagtattat

SEQ ID NO: 168181 - DNA, 257 bp, Glycine max
acttaccaacaccacttccaatggcttcatatcatgaagaagaagtgaggctattgggcaagtgggccagcccatttagcaacagagtagaccttgctctcaagctcaagggtgttccctacaaatatccgaggaagatcttgctaacaagagtgctgatcttctcaagtacaaccccgttcacaagaaggttccggttttggtccacaatgggaacccattgcccgagtcactcatcattgttgaatacatagatg

SEQ ID NO: 168182 - DNA, 255 bp, Glycine max
ctcgagccgtctacccgccgctcgatgggaattgcgcttcaaggcgtctcgtagggctaatacgcctcacgagggtcaccaacggcacgtgcctttggggggccgaggccccctactgctggtcggcaacggacggcgggcgcacgcgtcgcttctagcccggattctgacttagaggcgttcagtcataatccaacgcacggtagcttcgcgccactggcttttcaatcaacgcgatgaccaattgtgcgaatc

SEQ ID NO: 168183 - DNA, 180 bp, Glycine max
gaaccgctcgagccggacccaccaacgcacgaaagccgggatctttcagaaaatggaatcctattctaagggaccataaccgaatggttaacttcatcctaacccgtcaatttgggttccaattcggttcctaggaagtatcgggaaggaatttagaatgttaatgtatcgattcatgca

SEQ ID NO: 168184 - DNA, 252 bp, Glycine max
ggagcctcctcctccttctccttctgcttctcctcgacggcgtcctccgtacatcccgaaccgcattcctgacccttcctatgtccgcattttcgacaccactctccgcgacggcgagcagtcccgggcgcctccatgacctccaaggagaagctggatgtggcgcggcagcttgccaagctcggcgtcgacatcatcgaggccggcttccctgccgcctccaaggatgacttcgaggccgtcaaaatgatc

SEQ ID NO: 168185 - DNA, 249 bp, Glycine max
atcctatcgcacatctttctcagttctacgatggagttttggggtgccgaggttaaggttggagagtctgttaaggtagacccagccgaatttgaggcatgcatacacctttctcaggctgctttggtgaggcaaagaaagataagcctgaaccggtggttctctacatgaaagttggtgaacagaaatttgtcttgggaaccctttccagggagaaaatccctcaaatatctctggaattggttttgg

SEQ ID NO: 168186 - DNA, 247 bp, Glycine max
tctcactcttgttcttcggtctcctcctattctccgctgccgtagccaccgtcgaacgaatcgacgatgaagacaaccttctgatccgtcaagtggtgccggacgcggaggaccaccacctgctaacgcggagcaccacttctccgccttcaagacaaagttcgccaagacctacgccacgcaggaggagcacgaccaccgcttccgtatcttcaagaacaacttgctccgcgccaagtcgcaccag

SEQ ID NO: 168187 - DNA, 233 bp, Glycine max
acaatctcatatactgattcagttctatacatcaccatcgagatttactatcaaaccaaaaattctcaaaatctcttcacctctgtgatgaccatggcatacagtaccttagaactcaacatctatccgcaaaggacatcaagaacgttaccctcttctccaagatggacgtatacgccgtcgttacgctctccggcgaccctctcaaccctcagggcgcgactacccaggtc

SEQ ID NO: 168188 - DNA, 123 bp, Glycine max
gccagatgaacttgtttttcacatacattatcttggatctgatcagcccactttcacattgaatttctccaaaggatctagtcacattattgctcaatattagcaattgattcggctgggctt

SEQ ID NO: 168189 - DNA, 214 bp, Glycine max
aaagaacagcgccatagcataacccttcgaagtcgccgtttgttttcttttcgttcgcatcttctctctctctcagaaagatgaaggtggtcgccgcgtatttgctcgccgtcctcggtggcaacaacagcccctccgccgatgtcatcaaggaaatccttggctccgttggagtagaagcagatgaagataggattgaatcgtttttgtctga

SEQ ID NO: 168190 - DNA, 245 bp, Glycine max
gcgagcgctcccactccacgcgaagagttcgtgtacatggcgaactgtgcggagcaggccgagcgctacgaggagatggtggagttcatggagaaggtctccgcctccgccgagagcgaggagctgaccgtggaggagcgcaacctcctctccgtcgcctacaagaacgtaatcggcgctcgccgcgcctcctggcgcatcatctcctccattgagcagaaggaggagacccgcggaaacgagga

SEQ ID NO: 168191 - DNA, 253 bp, Glycine max
ggagccccgtctacctcgccgccgttctcgaatatctcgctgctgaggttttggaattggctggaaacgctgcgagatataacaagaagactcgaattgttccacgccacatccaattggcggtgaggaacgacgaagagttgagcaagcttctaggagatgttaccattgctaacggcggtgttatgcctaacattcacaaccttcttcttcccaagaaggctgggggctcatccaagggtgctgctgctga

SEQ ID NO: 168192 - DNA, 221 bp, Glycine max
cgttggattcaatttacgggtcttttgataagccctctgagaagaagaagggatacctgcttcccaggtccaagatggtgaattcggacctctccaggattattaattctgatgaggtgcaatctgttgtgaggtccattaagaaggatgtgaagagggccacttgcaagaagaaccctcttaagaatctcaactcgatgctgaagctgcaatcttatgcc

SEQ ID NO: 168193 - DNA, 261 bp, Glycine max
  unsure (1)..(261): unsure at all n locations
agacccttctcttcggtgacaagccagtcactatttttggacacagaaaccctgaagagatcccatgggggtcaactggagctgacatcattgttgagtccaccggagttttcaccgataaggacaaggccgccgcacatttgaagggtggtgcaaagaaggttattatttctgcccccagtaaggatgcccccatgtttgttgttggtgtcaacgagcacgnagtacaagccagnnttgatattatttcnaatgctanng

SEQ ID NO: 168194 - DNA, 255 bp, Glycine max
ctctcttctcaccatcgaggagggtattttcgaggtgaaggccaatgctggtgatactcacttgggaggtgaagattttgataacagaatggtgaaccattttgttcaggaattcaagaggaagaacaagaaggatattagtggaaatgccagagctctgaggaggttgagaacagcatgtgagcgggcaaagaggactctctcttccactgctcaaaccaccatagagattgattccttgtacgagggtattga

SEQ ID NO: 168195 - DNA, 260 bp, Glycine max
gcgatttcagtttattgtgatgaaccgtcgcaatactgaaaatttggtggagaatctcttgggcgatttcgagtatgaagttcaggttccatatttgctgtatagaaatgctgctcaagaagtgaatggtatctggttctataatgcacgtgaatgtgaagaggttgccaatctttttagcaggatccttaatgcgtatgctaaggttcctcccaagtcgaaggtttcttccacaaagagtgagtttgaggaactagaag

SEQ ID NO: 168196 - DNA, 260 bp, Glycine max
cttatggtggatacctaggcacccagagacgaggaagggcgtagtaagcgacgaaatgcttcggggagttgaaaataagcgtagatccggggattcccgatataggtcaacctttcgaactgctgctgaatccacgggcaggcaagagacaacctggtgaactgaaacatcttagtagccagaggaaaagaaagcaaaagcgattcccgtagtagcggcgagcgaaatgggagcagcctaaaccgtgaaaacggggttgt

SEQ ID NO: 168197 - DNA, 167 bp, Glycine max
aatgcagctgcggaattaaaaattgaagaaatggaattacgaattgaaaagcttgaagaggagcttagagaagttgctgctcttgaagtgtcactttattctattgcaccagatcatggcagctcaacacacaaggtgaacacacctgatcggcgcctttcgaggct

SEQ ID NO: 168198 - DNA, 250 bp, Glycine max
gaagacatttaccaaggaggtggttgaaaccatggcatccctgaatgaggttctttcttgttttctctaataatacttttgctacctcatgaaaattgagaagattctgtctctaacatttgtgatatttcttggcatgtagaaaccactcattcttgctctctccaacccaacttcacaatctgagtgcacggctgaagaagcttatacatggagcaaggtaaattttcattatatcataatgcttagc

SEQ ID NO: 168199 - DNA, 241 bp, Glycine max
tatcgtaccgaatcggctcgaggtgagtttctgattcctttcttcagaattccaagttttcaattcgttagggacaaaagatagtgagatagagtatggctggaaaaggcgaaggtcgtgctatcgggatcgatttcggaacgacgtactcttgagtcggcgtgtggcaacacatcgtgttgaaatcataaccaacgaccatggtagcgaaactaccccatcctagagggtttcaccgaca

SEQ ID NO: 168200 - DNA, 168 bp, Glycine max
ggagagttcgaagatgtcgggcgttaccaacaacaacgaggaagacaagaagccaaccgaacagggagcacacatcaaccttaaggttaaggggcaggatgggaatgaagtttttttcaggatcaagagaagcactcaattgaagaagctaatgaatgcttactgtga

SEQ ID NO: 168201 - DNA, 202 bp, Glycine max
atgatattgtgcactcttctcacaactgtgatgttcctcatgtgaatcgtactgattaccagctcattgatattgatgaggatggatttttgagtctgcttactgaaaatgggagcaccaaggatgacctcaagcttcccactgatgagagtctgctcactcagataaaggatggatttgctgagggcaaggatctggttgt

SEQ ID NO: 168202 - DNA, 186 bp, Glycine max
atggacacatcactagtgtttactgtgaggaggagtgaggcagagctgatagctccggcgaagccacccctcgtgaagtgaagctactctcagacatagatgaccaagatgggttacgtttccaaattccggtgatacagttctatcgccacgacccatcaatggcagggaaagaccctgtcgatg

SEQ ID NO: 168203 - DNA, 256 bp, Glycine max
atcgcaaccaaacttctctctctccttctctccctctctctctctcatgttcttgtagcggaaccgttcttgcttctcggagaacatggcctccatctcctccgccgaactcaattacctcgtttatcgctaccttcaagaatcaggtttcacgcatgctgcttttacttttggttatgaagctggtattaacaaatgctccattgatggaaatttggtgccgtcaggtgctcttgttacatttattcagaagggt

SEQ ID NO: 168204 - DNA, 266 bp, Glycine max
gaaaccctcttcatcttgttctatctgtgacgagcatcatggcctcaagagcagtgttattgttggctatgtgtgtgcttccggcgatggttgtggccattcgcccagcaaagaaccctttttgcgtgaagggtcgtgtctactgtgacccttgccgtgctggttttgagacctcagctaccacctacattgctggtgctgagattatgttgcaatgcaagagcagggttagcaacgaggttgtgtacacgaagaaggggtacacc

SEQ ID NO: 168205 - DNA, 186 bp, Glycine max
caggcgatttttgtggaggacaagctgaaaaactggcgcttgcaaagtatagacaggtgatttggcaaaggagggttctgactctcaattcactgatggagagttgaggagtcaaggtcgttgcgcaatgactcctgaagaggttggattgttactagcagctatgggatttgacagcaagcactc

SEQ ID NO: 168206 - DNA, 269 bp, Glycine max
ggcgtcgtcacaaccagagatggagcatccaaagaaggtttttggttgggctgctcgggactcatctgggcttctctccccattcaacttctccagaagagaaacgggggagaaagatttggtattcaaagtgcaatactgtggaatatgccactcagatctacatatgttaaagaacgagtggggcaacacaacctatcctctggttcctgggcacgagattgctggtgtggtaacagaagttggaagcaaggtgcaaaagttcaaag

SEQ ID NO: 168207 - DNA, 131 bp, Glycine max
atcagacaagccactcaggcttccattgcaggatgtctacaaaattggtggtattggtaccgtgccagtgggacgtgttgagactggtgtcgtcaagcccggtatggtggtgacttttggtcccactgggc

SEQ ID NO: 168208 - DNA, 138 bp, Glycine max
gaagacatttaccaaggaggtggttgaaaccatggcatccctgaatgaggttctttcttgttttctctaataatacttttgctacctcatgaaaattgagaagattctgtctctaacatttgtgatatttcttggcat

SEQ ID NO: 168209 - DNA, 143 bp, Glycine max
gagagaccatagatgtactgctttatgtggatcgcttggatgtgtatagagtggacaacttggataaggtagtcgccaaagctataacagatagttttggaaaaggaatatggagcaagactattctagcactcacacatgcc

SEQ ID NO: 168210 - DNA, 196 bp, Glycine max
gttgacaagatggcaactggtttaatcaaacttgcacaggaagacccttctttccacttctcccgtgatgaagagataaaccagacagtaattgaaggaatgggagaattacatcttgaaatcattgttgatcggctcaaaagagaatttaaggtggaagctaacgttggtgccccccaagtaaactacagggaaa

SEQ ID NO: 168211 - DNA, 250 bp, Glycine max
caggaatcgtttatatatagcttcgtggctcgggggacgatggtgttagccgagtacaccgagttcactgggaacttccctgcaattgcagctcagtgcctccagaaactaccctcttccaataacaagttcacctacaattgcgaccaccacaccttcaattttctcgtcgaagacggttacgcttactgtgttgttgccaaggaatctgttagcaaacaaatctctattgctttccttgaacgtgtaa

SEQ ID NO: 168212 - DNA, 128 bp, Glycine max
gagaaactaagcatattgcctaggtcaggaggggctttgggatttacttacactcctccaacaaatgaggacagatacttgcttttcattgatgagttgcgtggccgcctggttaccctacttggagg

SEQ ID NO: 168213 - DNA, 236 bp, Glycine max
gtccctttctgttctcttcactcttggtcttgcgagagaaagccatgccagagacgaagatttttggcatgctgtttggccaaacactcccattccaagttcattgcgagatcttctaaagcctggccctgcaagtgttgaaatcgatgatcaccctatgcaaattgaagaaacacagtacccgaaaaccttcttctataaagaagaccttcatccaggcaaaacaatgaaagtac

SEQ ID NO: 168214 - DNA, 239 bp, Glycine max
gttatgttgcctcaaactcaaaggatgaccctgcaaaggaggctgctaacttcacagcccaagtcatcatcatgaaccaccctggtcagattggaaatggctatgcccctgtcctcgactgccacacttctcacattgctgtcaagtttgctgaactcatgaccaagattgacaggcgatccggcaaagagcttgagaaggagcccgagtttttgaagaacggtgatgctggttttgtt

SEQ ID NO: 168215 - DNA, 253 bp, Glycine max
caccacgcgacgtgcggtgcgcccccggcggcccttgaaaatccggaggaccgagtgcctcccacgcccggtcgtactcataaccgcatcaggtctccaacgtgaacagcctctggtcgatggaacaatgtaggcaagggaagtcggcaaaatggatccgtaacctcgggaaaaggattggctctgagggctgggcacgggggtccagtcccgaacccgtcggctgtcggtggactgatcgagctgcttccgc

SEQ ID NO: 168216 - DNA, 222 bp, Glycine max
gacactgcttcacacccgataagaagcgagttatgtctgagtcagatttggaggtggaagtcttctttcgtttctcgatggtgaagtaagactagactcatgagcttattatcctaggtcggaacaagttgataggagctacttttttcgcccccatccatgtcgccacacgggggcgacatggatgggggtgaaaagagggaagagagggatggggtttct

SEQ ID NO: 168217 - DNA, 250 bp, Glycine max
ggggcgaacatactagttgatcctaatggtgaaatcaaactggcagactttggaatggctaaacatataaattcttctgcctcaatgctttcattcaaaggaagtccatactggatggcacctgaggttgtaatgaatacaaatggctatagtcttccagttgatatatggagcttgggatgcacaattattgaaatggcaacatcaaaacctccatggaatcagtatgaaggggtagctgccatattta

SEQ ID NO: 168218 - DNA, 261 bp, Glycine max
ggcagctcgtgtgggagatcgtcaagaaaaacaattccttcttggtcaagcagtttggaaggggcacccagagcgtcgaattcagcagagagagcaacaatctctacaacctcaattcgttcaagtactctggtttggcaaacaagaaaactgttactgttcagcctgagggcaaagatcaggctgtgttgttggctacaaccaagacaaagaagcaaaacaagcccgctgcattgctccacaaatctgtgatgaagaagg

SEQ ID NO: 168219 - DNA, 263 bp, Glycine max
gtctagtagctggttccctccgaagtttccctcaggatagctggagcccgcgggcgagttctatcgggtaaagccaatgattagaggcatcgggggcgcaacgccctcgacctattctcaaactttaaataggtaggacggtgcggctgctctgttgagccgcgccatggaatcgagagctccaagtgggccatttttggtaagcagaactggcgatgcgggatgaaccggaagctgggttacggtgcccaactgcgcgctaa

SEQ ID NO: 168220 - DNA, 264 bp, Glycine max
gcaagccccactcaaccaccacacctctcctcgttcacgctacccctttctgctcttcttctacctttcaagttttaaaagtataaagatggcagagacattcctatttacctcagagtcggtgaacgagggacaccctgacaagctctgcgaccaaatctccgatgctgtcctcgacgcttgcctcgagcaggacccagacagcaaagttgcctgcgaaacatgcaccaaaaccaacttggtcatggtcttcggagaaatcac

SEQ ID NO: 168221 - DNA, 264 bp, Glycine max
accttcaaagtcttctctctcgagaatcatcgaataaaactagggtttccgatcgtcgtcgaggagaatgccgaagaacaagggaaagggaggaaagaaccggaagcgcgggaagaacgaggcggacgacgagaagcgggagcttgtgttcaaggaggacggccaggagtacgcgcaggtgctccggatgctggggaacggccgctgcgaggcgatgtgcatcgacggcaccaagcgcctctgccacatccgcggcaagatgca

SEQ ID NO: 168222 - DNA, 262 bp, Glycine max
ctgagttaaggcttggactgcctggaaacggaggcactgaagaagtgctcatcaggaagaggggtttctctgagactgaaactggtcatgaagatgagtctgccaccactgtggatttgatgcttaatctttcttctaaggaggccgcaaccactgctgctgctgctgcagatccaactgataagcacaagactttgcctaaggagaagacccttctgccagcagatcctgctaagcctccagccaagacgcaggtggtggg

SEQ ID NO: 168223 - DNA, 260 bp, Glycine max
aaaactgggtgttcatggtcactgcacagacaccaaccaacattgccgttatcaagtattgggggaaaagagacgaaaccctcatcttaccggttaacgacagtatcagtgtcactctcgatcccagccacctctgcaccaccaccactgctgccgtcagtcccgctttccaccaagatcgcatgtggctcaatggaaaggagatttctctttctgggggcaggttccagagctgtttaagggagatccgtgctcgtgct

SEQ ID NO: 168224 - DNA, 248 bp, Glycine max
gccgcctcctacgttaaattcgtggagtccggtggtgctagagttattccccttatctacaatgagtcacctgagaaccttaacaagaagctcgatttggtcaatggagtgctcttcactggtgggtgggctgtttctggtccatatttggatactcttggaaacatttttaagaaagctttagagaaaaatgatgctggagaccatttcccagtaattgccttcaacttaagtggaaacctcgtaat

SEQ ID NO: 168225 - DNA, 258 bp, Glycine max
ttgattctatgggtggtggtgcatggccgttcttagttggtagattaattgacacgtatttgagagagatatcccctgaccacaacctcaagatctctaaatttcttggagtagcagaatgcttgccagacactgcaagggattgctatgatggggtctacaaagccattgacatctatcttgagtctcatccaactatcacatttgaggaaaggtcgagattgtgtagatgtcttaattacagcaaactcagctttg

SEQ ID NO: 168226 - DNA, 255 bp, Glycine max
ggaagctggaccctccggctcctccgatggaggggtaggagtgaattggctctgcatgagccctaagcgagatcacaaccccgaaaactatgacgaccttcaattcgagttcaatcctaatctcttcgcctctctcgagcactatttgcctcctcatatgctcaacctctcacgcgatgttaagcttcactacatcaggaacattcttcttcgctatttgcctgagaatgaccgcaactgggtgcccttttttta

SEQ ID NO: 168227 - DNA, 263 bp, Glycine max
aacccaccaaggttggcatagcctctcgcaacctcaaatctacacaatgcatttctaaggcttttggcttggaacctgctgcagctaaactcacttgctcccttcagcctgatctcaaagaatttgctcaaaaatgtgtcgacgctaccaaaattgcaggattcgcccttgccacctctgctctcgttgtttctggagcaagtgcagaaggtgttccaaaaaggctaaccttcgacgaaatccagagcaagacatacttggaa

SEQ ID NO: 168228 - DNA, 263 bp, Glycine max
cacaaagcgggttactgtctgttcaagctaccatctctctctctctttcttagtgcctccttgccagaagttaaaatggcccaagaaactttcctattcacatctgaatcagtgaacgaggggcaccctgacaagctctgtgaccagatctccgatgctgtgctcgatgcatgcttggagcaggaccctgacagcaaggttgcctgtgaaacctgcaccaagaccaacatggtgatggttttcggcgagatcacaaccaaggg

SEQ ID NO: 168229 - DNA, 264 bp, Glycine max
cctcgagccgattcggctcgagatcctcacccattttcttcgtaaccaaacactctgaaattctcagttatgtcgtggcaatcgtatgtggatgatcacctactgtgtgaaatcgaaggtaaccacctcactcacgccgctatcatcggccaagacggaagcgtttgggctcagagcaccaacttccctcagttcaaacctgaggaaataactgccatcaataatgactttaatgagcctggatcacttgctccaactggattg

SEQ ID NO: 168230 - DNA, 269 bp, Glycine max
aaaactttcatcttatttacaagtatttttttcagaaccttcacttctcaagtctcaacacatacaacaatgggttttcgtttacctggtatcagaaaggcatcattaaaccaagcatcatcaaaagccatggacgtgccaaagggataccttgcagtctatgttggagagaaaatgaagcggtttgtcatccccttatcatacttgaagcaaacgtcgtttcaagacttgctgagtctagccgaggaagaatttgggtataaacatcc

SEQ ID NO: 168231 - DNA, 264 bp, Glycine max
gtttgttgatccatctcttgtttcttgctttctttcttcaccatgtcacttgctgggaaaatcaccactgaaatcggggttcatgcaaccgctacaaagtggttcaacctcttcgcaacacaactccatcatgttcaaaacctaactgatagagtgcatggaaccaagctgcatcaaggtgaagactggcatcacaacgagacagtcaagcactggacttataccatagatggtaaggttacaacatgtctggagagtattgaa

SEQ ID NO: 168232 - DNA, 265 bp, Glycine max
gtagtcatatgcttgtctcaaagattaagccatgcatgtgtaagtatgaactaattcagactgtgaaactgcgaatggctcattaaatcagttatagtttgtttgatggtatctactactcggataaccgtagtaattctagagctaatacgtgcaacaaaccccgacttctggaagggatgcatttattagataaaaggtcaacacaggctctgcctgttgctttgatgattcatgataactcgtcggatcgcacggcctttgt

SEQ ID NO: 168233 - DNA, 264 bp, Glycine max
gtaggcatcatagacgatgggttgccgagaagttaggtcctgaagctagaaacaatgagctcgagttcaccaaaaagatactgtccgttgatgccaaacattatcatgcatggtctcatagacagtgggctcttcaaacactaggaggatgggaagatgaacttaattattgcacagaactacttaaagaagacatttttaacaattctgcttggaatcagagatattttgtcataacaaggtctcctttcttggggggcctaa

SEQ ID NO: 168234 - DNA, 262 bp, Glycine max
attctctcgcatctcaatacccttttgatttgtgaaaggaaagcaaacatgcttgatcaggtccaacaccctacaatcatggacaaggttgctggccagctccatctccgttctggtgtttctggtattaggagttatgaaggagcctactgccaccccacaatgtaccaaagaccctcttttgggaattactcgaatgctgcattgcagtatcctgtgatgccctcatgcaaagctactatggatttgtctgctgctgcaa

SEQ ID NO: 168235 - DNA, 261 bp, Glycine max
actgtattcacaacaatgcagttatggagttgatgagaggcgttagaaatcagttaactgaacttatatctggtctagctgttcaagacatggccccaatgagcttgggtttatctcacagcttatccagatacaaattgaagtttagtgcagagaaggtggataccatgattgtccaggctattggtttactagatgatcttgataaagagttgaatacctatgccatgagggttcgagaatggtatggttggcattttc

SEQ ID NO: 168236 - DNA, 258 bp, Glycine max
ctcgagccggagaatatgaagttgtttgttttctttgttgctgcagtagttttggtagcatggccatgccatggcgcaggctaccaaaggttccctctccgaatgaaaactggctatggtgagcgttcttcggaggtaaaatgcgcaagttttaggcttgctgtggaagcacacaacatccgagcctttaacaccattcctgaagagtgcgttgaaccaacaaaggactacattaatggcgaacaatttagatcagac

SEQ ID NO: 168237 - DNA, 260 bp, Glycine max
tggaaggtctcctcggtggtcttcaacagttccctcaacccaaggtcgagcttgaacagtacccaacaggaccccatatagcttctcgaatgcttttcactgcagagaattcttttgaggatgtgagcgacaaagtagtggctgactttggatgcggttgtggtacgttaggtgttgcagctgcactgttgagtgcagaacatgttcttggcattgacattgatccagaatctcttgaaatagcttccaataatgctgag

SEQ ID NO: 168238 - DNA, 258 bp, Glycine max
gcaatggcatgcaatgctcggttatcaactccaactgctcagctgggattgcctgaacttcagcttggaataattcctggatttggaggaacacagcgacttcctcgtcttgttggtttgacaaagggacttgagatgatactggcttcaaaaccagttaaagggaaggaagcttttagtttggggcttgttgatggtttggtgtcacctaatgatttggtgaacactgcacgccaatgggcactggatatgttgggc

SEQ ID NO: 168239 - DNA, 262 bp, Glycine max
aaccctggacacagcacatcatgatgactttcatcagcctaactttggtggttcttcaataaaaaaaggtggtccaagggaaccttggcacgacatccattctcgacttgaaggccctattgcttgggatgttttgttcaactttgagcagagatggaggaagcagggaggaaaggacttacttgttccactgagagaccttgaagatgtcattattcccccatccccggtaacttacattgatgatcatgagacatggaat

SEQ ID NO: 168240 - DNA, 260 bp, Glycine max
ataggcctcaggagaaaaaaagaagattgtaggggtgttctacaaagggaatgagtatgcttcgaatcccaattttgtgggatgtgttgaaagagcattgggtatacgtgagtggttggaatcacagggtcaccagtacatagtcactgatgacaaagaaggacccgattcagaactagagatacacattcctgatgccaatgtcatcatatctactccatttcaccctgcctatatcaccgcagaaagaattaagaaag

SEQ ID NO: 168241 - DNA, 264 bp, Glycine max
ttctcgagccgattcggctcgagcggactcgcacggcctttgtgccatcgacgcatcattcaaatttctgccctatcaactttacgatggtaggatagtggcctaccatggtggtgacgggtgacggagaattagggttcgattccggagagggagcctgagaaacggctaccacatccaaggaaggcagcaggcgcgcaaattacccaatcctgacacggggaggtagtgacaataaataacaataccgggctcattgagtct

SEQ ID NO: 168242 - DNA, 263 bp, Glycine max
caaacagtgagccatggccgtcggaaagaacaagcgcatctccaaagggaaaaagggtggcaagaagaaggcagctgatccctttgccaagaaggattggtatgacattaaggccccttctctttttcaagtgaaaaatgttggcaaaaccctcgtctctcgtacgcagggtaccaagattgcttctgaaggacttaaacatagagtgtttgaggtctccttggctgatcttcaaggggatgaggatcatgcattcaagaaga

SEQ ID NO: 168243 - DNA, 260 bp, Glycine max
ctcgagccgctcacacacactttctctctctctctctctcacccagatcttgtagcaatggcgagcgctcccactccacgcgaagagttcgtgtacatggcgaactggcggagaggccgagcgctacgaggagatggtggagttcatggagaaggtctccgcctccgccgagagcgaggagctgaccgtggaggagcgtaacctcctctccgtcgcctacaagaacgtgatcggcgctcgccgcgcctcctggcgcatca

SEQ ID NO: 168244 - DNA, 253 bp, Glycine max
atactctcaacttcaaaaggtggaagctaatgtgcacatcaaggcttctgctgatcagttccataatgttttatgcaacaggacacaccatattgccaacattttccctggaaaagtacagtctgttgaaattcataaaggtgaatggggcactgagggatccgtcatctcctggaattatttacatggtatgtgaatttcgacatcaaaattttaaccacaaatagcaatattcctttctcgtttgcattta

SEQ ID NO: 168245 - DNA, 258 bp, Glycine max
agctgaagagccatccgcaggtaagcaatggttaagcataataatgttatccccaatgggcacttccggaaacactggcaaaactatgtgaagacttggtttaatcaaccagcccgaaagaccagaagacggttggctcggcagaagaaggctgtcaagattttccccaggcctactgctggatctctcaggcctattgttcatggccagactctgaaatacaacatgaaagtcagagccgggagaggattttcactg

SEQ ID NO: 168246 - DNA, 253 bp, Glycine max
gtgagcaccaaaccaaaccacattgtttgcaaggcacaaaagcaggttgtccaagagggtgaggacactactaacattgtctctcgcaggttggccctcactgttctcattggtgctgctgctgttggctctaaggttgcacctgctgatgctgcctatggagaagctgcccatgtgtttggaacagcaaagacaaacactgacttccttccatacaatggggatggattcaaactctcaattccctcaaagt

SEQ ID NO: 168247 - DNA, 254 bp, Glycine max
taagccatgcatgtgtaagtatgaactaattcagactgtgaaactgcgaatggctcattaaatcagttatagtttgtttgatggtatctactactcggataaccgtagtaattctagagctaatacgtgcaacaaaccccgacttctggaagggatgcatttattagataaaaggtcaacacaggctctgcctgttgctttgatgattcatgataactcgtcggatcgcacggcctttgtgccggcgacgcatc

SEQ ID NO: 168248 - DNA, 256 bp, Glycine max
ccccaatatacttagccatatctttacttcccaaaacttgctctacaatgagtttccttcgttcttttgcaagaaacaaggatatatcaaaagtaggacgcagaggtatccattgcatgcagaaactatgtgcagaaaaaatatctcctgattcactagagaaggcccaaaatcgtgtgatagatgctgcactcacacttgttcgagaaaatacaaggcttaagaaagaactcgtgcatagtttgggaggtgctgt

SEQ ID NO: 168249 - DNA, 259 bp, Glycine max
attcgctctctttcaatcacaacaacatggccgaacgtggaggcggagaccgtgccggtttcggtcgcggctttggcggtcgtggacgcggcggcgacaggggacgagggcggcgcagggcaggagggcgccgcgacgaggaggagaagtgggtcccagtgacgaagctggggcgcctggtgaaggaggggaaaattcggagcctggagcagatctacctacactcgctcccaatcaaggagcaccaaatcattgacac

SEQ ID NO: 168250 - DNA, 273 bp, Glycine max
ctactcactcactgcagatctcaattgcatcgctgtccatggctaccatcgttagcatcaaggcccgccagatcttcgacagtcgtggcaatccaactgtcgaggtggatttgacttgctccgatggtacttttgccagagctgctgttccaagtggtgcatccactgggatttatgaggcccttgaattgagagatggaggatctgactaccttggatagggtgtatcaaaggctgttgacaatgtgaacaccgtcattggccctgctttga

SEQ ID NO: 168251 - DNA, 259 bp, Glycine max
gcaaggcgcattgtctccgacaatattcactccgggaatggcttccctaccctttccgttgatgaacaagtcgttgccatagagctgccactgaaatacggtccattcattgagtcagtgaacaagagagggctgaacctctctgaggtggtgtgttccacattcacaatggggtggtttggagaaaccaaggacagaaggacagtgagagtggaatgcttcatgaaagaaagcagccccaatatctgggtgaggccta

SEQ ID NO: 168252 - DNA, 266 bp, Glycine max
gaaacattggccatccctgcagtactccttgtaatactcattttgattctatcctctgtcttgttccatcttcaagatgacagaacaaatccaccaggtcctaaacccctcccaattattggtaaccttcacatgctggggaaactcccacatcgttcccttcaagcccttgccaaaaattatggacccataatgttcataaagttgggaccagtcccaaccgttgtagtttcctcccctgaaactgccgagctattcctcaaaac

SEQ ID NO: 168253 - DNA, 262 bp, Glycine max
tggcattacaaatacaaagggagaaggcaaaatccttaacaatggaagactatgaccttgtggatataagtgaagacaaagataacgaaaaattaactttgaaggatgtgtctgataaaggaaacgaagcaataaaatcactggatagagatataattttcactgttgatgaactgaatgctttgtcaaaggaggagcaaatgaatgctttatacaggtctgctccagaattagttgattggttgtcagaactaaatgaggt

SEQ ID NO: 168254 - DNA, 265 bp, Glycine max
tctcgagccgaatcggctcgaggttcttcttcgtcgttatcttcatcttttgttgtttgtgtcgcttgttttttctctcacctgaaaatgtcttgctgcggtggtaactgtggttgcggaagcgcctgcaagtgcggcaacggctgcggaggctgcaagatgtacccagacttgagctacaccgagtcaaccaccaccgagaccttggtcatgggagtggcaccagttaaggctcaattcgagagtgctgaaatgggtgctcccg

SEQ ID NO: 168255 - DNA, 259 bp, Glycine max
ctagaatggaatttcgatgctcagtcatctcttttaccattctcttctctcttgctcttgcaggagagagccatgtccatgcatcgctacctgaggaagattattgggaagctgtttggccaaacactcccattcccactgcactgcgagagcttctaaagcctctccctagcaggtgttgaaatcgatgaactccctaagcaaattgatgatacacagtacccaaaaacattcttctataaagaagaccttcatccag

SEQ ID NO: 168256 - DNA, 258 bp, Glycine max
gggtgagctaaagtcaattttccttcctttcctttccactagtcacataatcccgctagtggacatggccagactcttcgccttgcacgacgtcgacgtcaccatcatcaccaccgcacataacgccaccgttttccaaaagtccatcgatttagatgcgagtcgcggtcgccccatcagaacgcacgttgtcaacttccccgccgcacaagtgggtctccccgttgggatcgaagccttcaacgtcgatacgcctcg

SEQ ID NO: 168257 - DNA, 260 bp, Glycine max
cttcaaggaaggagagcttgttattctctatcaacaaggaaaatgtcaggtgaagaggttgttgttgcagctgagccagctgctgccatcccaggcgagcctatggatatcatgactgccttgcaacttgtgctcagaaaatctctggcttatggtggtcttgcacgaggccttcacgaaggggcaaaagtgattgagaagcatgctgcacaactctgtgttctagcagaagactgtgaccagcctgactatgttaaact

SEQ ID NO: 168258 - DNA, 259 bp, Glycine max
agttagtccgtacctggcagaattgttgcggttggaagaacaggctaaacaagaaggccttgggcggtggagcaaggttcccggtgctgcagaggcttcaatcagaaatttaccaccttctgcccttggtgaccctagtaactttgatgctatgacttttttaaatgcaaagaagggattgcccatggaggcagttgttgagcaggttcgtgatggcagtacactccgtatctatttgctcccggagtttcagtttgtc

SEQ ID NO: 168259 - DNA, 262 bp, Glycine max
cggctcgagtggcctttctgctggcatggctattggtattgtcggtgatgctggtgttagagcactatgcacagcagccaaaactttttgttggaatgattctcatcctcatttttgctgaagctcttgccctttatggtctaatcgttggtattatcctgtcttctcgtgctggccagtctagagctgactaagaaaggagttgtgctgcaaaatattctttgaccacccatctgttttaacctccttttagagggggtga

SEQ ID NO: 168260 - DNA, 255 bp, Glycine max
gtggttatgttcccattccttgcatttggccacattagtccatttgttcagctctccaacaagttgttctctcatggtgttcatgtcactttcttgtcagctgcatccaacattcccagaatcagatcaactcttaatctcaatccagccatcaatgttatctcactaaagttcccaaatggtataaccaacactgctgaattgccacctcacttagctggaaatctcatacacgcccttgacctcactcaagat

SEQ ID NO: 168261 - DNA, 256 bp, Glycine max
tcgaaatcggcggagatggttgccatgaggtttcaccagtaccaggtggtgggaagggctcttcctaccgaatccgatgagcatcctaagatctaccgcatgaaactctgggccaccaacgaggtccgtgccaaatccaagttctggtattttttgagaaaattgaagaaggttaagaaaagcaatggacaagtgctagccatcaatgagatttttgagaagaatcctaccaagattaagaattatggaatttggc

SEQ ID NO: 168262 - DNA, 258 bp, Glycine max
ctcgagccgttgtcacataaaagtcatctaagaagaattacaagatcatcatcacaataacaagatgagttcaggaattagagcatggagtgtggcagcaagtgttggaattgtggaggccttgaaagaccaaggcatatgcaggtggaatcatgccttaagatcagctcaacaccatctcaaaaaccatgttggctcattctctcaggctaacaagctttcttcttctgctatgatatccacaacactaaaacatga

SEQ ID NO: 168263 - DNA, 257 bp, Glycine max
aagccgcccaatggtttaatctttttggctgtgttatgcatctcagcactgtcactgactcgttgtcttgcggaggataatggacttgttatgaacttctacaaggaatcatgccctcaggctgaagacatcatcaaagaacaagtcaagcttctctacaagcgccacaagaacactgctttctcctggctcagaaacatcttccatgactgtgctgttcagagttgtgatgcttcactgttgctggactccacaag

SEQ ID NO: 168264 - DNA, 266 bp, Glycine max
tcttgctttgcttcctcttctatttgctttcttgttagctgccactacggaatcaagaaaagatccaggggaatattggaaaatgatcatgaaagatcaggaaatgccagaaggacttcaaggtcttgtttcatttcaatctgaaaataaccctaagactcaagagcagcttggtaaaggttccaaaaaccattgtgaagagtctctagttacaaatacacaagttaacagtgacttcgaacccataccaagtgttaccaaatatg

SEQ ID NO: 168265 - DNA, 265 bp, Glycine max
tctcgagccgaatcggctcgagttgatcgttctctctgaacaaccacagccatgggaggagacacatggacagaaggccaagatggctcgtgagagaaacatggagaaaaataaacctgccaaaggtagccagttagaggccaacaagaaggccatgaacatccagtgcaaggtgtgcatgcagacattcatatgtaccacatcggaagttaagtgtcgagaacatgctgaagccaagcatcccaaggctcatctctacacttgg

SEQ ID NO: 168266 - DNA, 259 bp, Glycine max
gttcctgcttctggcttttcttttagttctgagcatatatggaaagtcattaaggagaacaaagatctcgatcttcctgcacataaggttatggttgctactgtacgatgtgaaggaatagccaacgagaaatatgtttcttttgttgcaaatgaggattggtgtcaattggaagaggctgtgcaatctggccctattcctggatttgggaaaaagctcagttcacttcttgatatttgtttttcagagtatgatgctg

SEQ ID NO: 168267 - DNA, 258 bp, Glycine max
caacctcgttgtggttttccaatgctgcgaagtcgaagatctagctagaggcagagaacgttctccctaatcttctgccgatggcgatcttctacgctttggtggccagaggcaccgtcgtcctggcggagttcagcgccgtcaccggcaacaccggcgccgtctcccgccgcatcctcgagaagcttccggcggagtccgactccaggctctgcttctctcaggatcgctacatcttccacatactccgatcggatg

SEQ ID NO: 168268 - DNA, 258 bp, Glycine max
ggctacctccatggtgaagcttatgcttttctctgctctcatactcttgtccttgcaagcagttgtgtctgtaacaccactgcattttcaacatccactagaccctttaaccaaacaagagataagtcttgtccaaaccatagtccaaaacaagtacccaagctcaagtaacaggttgagcttccactacattggactcgacgaacctgaaaaggatgccatcctcaaatgggaatccatcaaaccaactgttataac

SEQ ID NO: 168269 - DNA, 255 bp, Glycine max
ctgaagagccatccgcagtaagcaatggttaagcataataatgttatccccaatgggcacttccggaaacactggcaaaactatgtgaagacttggtttaatcaaccagcccgaaagaccagaagacggttggctcggcagaagaaggctgtcaagattttccccaggcctactgctggatctctcaggcctattgttcatggccagactctgaaatacaacatgaaagtcagagccgggagaggattttcactg

SEQ ID NO: 168270 - DNA, 256 bp, Glycine max
cttcctcactctcattcgcaatggccgcagcagcacgtcctctcatcaccgtgcaggccctcgacagtgacatggccaccgacgcctccgccagcgtccctatccctgacgtcatggagtcctccattcggccggacatcgttaacttcgtacactccaacatctccaagaacagccgacaagcctatgcagtcagccgccgcgctggccaacagacttccgccgagtcctggggaacggtcgtgagtctcccgta

SEQ ID NO: 168271 - DNA, 258 bp, Glycine max
ggaagggcgtagtaagcgacgaaatgcttcggggagttgaaaataagcgtagatccggggattcccgatataggtcaacctttcgaactgctgctgaatccacgggcaggcaagagacaacctggtgaactgaaacatcttagtagccagaggaaaagaaagcataagcgattcccgtagtagcggcgagcgaaattggagcagcctaaaccgtgaaaacggggctgtgggagaactatacaagtgtcgtgctgctag

SEQ ID NO: 168272 - DNA, 250 bp, Glycine max
gttaggttctgcacgctctgcttccagcgagtgttctttcttcgtttcaacaccttaatttgcacacgctgcttcttcagcttgagaaatggcacaagaaacctttctattcacatctgaatctgtaaacgagggtcaccccgacaagctgtgcgaccagatctctgatgcagtgctcgatgcgtgccttgaacaggaccctgacagccaggttgcctgtgagacatgcaccaagaccaacatggtcatg

SEQ ID NO: 168273 - DNA, 103 bp, Glycine max
ctttagcgcattcttctagatttaaggaagatgggtaaggaaaaggttcacatcagtattgtggctattggccatgttgactctgggaagtccactaccactg

SEQ ID NO: 168274 - DNA, 271 bp, Glycine max
catatctttacttcccaaaacttgctctacaatgagtttccttcgttcttttgcaagaaacaaggatatatcaaaagtaggacgcagaggtatccattgcatgcagaaactatgtgcagaaaaaatatctcctgattcactagagaaggcccaaaatcgtgtgatagatgctgcactcacacttgttcgagaaaatacaaggcttaagaaagaactcgtgcatagtttgggaggtgctgtggcaacttcaactcttcttggagttcctttg

SEQ ID NO: 168275 - DNA, 248 bp, Glycine max
ctttctcatgggaggtgtttcagcagctgtctccaaaactgatgctgctcccattgaacgtgttaagcttttgatccagaaccaggatgagatgatcaaaactggtaggctttctgagccctacaaaggtattgctgcttgtttcaagagaacaatggcagatgcgggcgctatttctctatggcacacgacaatgctaatgttatccgttcatctcccagtcaggctctgaacttcgcattcaagga

SEQ ID NO: 168276 - DNA, 265 bp, Glycine max
ctgtgactctgtgcttagttaacgttaacagtgacttaagatggcggattctgcagatgtcacccacgatgttgtgtccctcctctcttctcctcaaagggactttcttcttcgaaacaacggcgatcaggttaaaattgacagcttgaagggtaagaaacttggtttgtatttttcggcatcctggtgtggtccatgtcaaacatttacgccaactttggtggatgtgtacaatgaggttgcaaaaaaaggtgacttccagatc

SEQ ID NO: 168277 - DNA, 262 bp, Glycine max
gtgacattcgggttgttcctaggacgcaaggtgtcgttgataagggcgttgttgtacatggtggcacagtgtgccggtgctatctgcggtactggattggccaaggggctccacaaagcatactacaacaggtatggaggtggtgccaactctgttgctgatggctacaacaatggtactgctttgggtgctgagattattggtaccttcgttcttgtctacactgtcttctctgccactgaccctaagaggaacgctaggg

SEQ ID NO: 168278 - DNA, 264 bp, Glycine max
agaatatgtattctagagattcatggggtggaccgttggagataaacgcgacggactcggcgacggaggacgagcggagcggaacctgcaggacgttgacagggcagcgctgtcgcgtcccttggatgagacgcagcagagctggctccttggccccggcgagcagaagaagaagaagtacgtcgatctcggctgcatcatcgtcagccgcaagatcttcaagtggaccctcggcacaatcctcttcgccgccttcctcgccgg

SEQ ID NO: 168279 - DNA, 149 bp, Glycine max
caacttccaacaccatagtgaaatggcttccaaggctgcacttctcttgtgtttcaatgttctcttcttcaccgtggttagctccacatatgtgccatgcaacccacaccccaaaactccaaaacacccacctgtcccaaagccacctt

SEQ ID NO: 168280 - DNA, 268 bp, Glycine max
caatcggcttctgcttcaaggaaggagagcttgttattctctatcaacaagtaaaatgtcaggtgaagagggtgtcattgcagttgagccagctgctgctgctgctgccatcccaggcgagccaatggatatcatgactgccttacaacttgtgctcagaaaatctctggcttatggtggtttgtcgcgtggccttcatgaaggtgcaaaagtgattgagaagcatgctgcacaactctgtgttcttgcagaagactgtgaccagcct

SEQ ID NO: 168281 - DNA, 268 bp, Glycine max
agggtctcagatgccatcaacaatggttatgattcatggggacctctctttggtagattgttctttgcattgtgggtgatcctccatctctaccccttcttgaaggggttgcttggaaaacaagatagaatgccaaccattatattggtttggtcaatccttctggcctccatcttgactctcatgtgggtcagaattaacccgtttgtgtcaagagacggccccgtgttagacatttgtggattgaattgtgacgagtcttgaataa

SEQ ID NO: 168282 - DNA, 272 bp, Glycine max
caataatcgcagaagcagtttccggtgcatctcatcgtcttccaaaatgaacgacgcagatgtctcgaagcaaatccagcagatggtgcgtttcatccgccaggaagctgaggagaaagccaacgagatctctgtatctgccgaagaggaattcaatatcgagaagctgcagttggttgaagccgaaaagaagaagatcaggcaagaatacgaacgcaaagagcgccaagtcgaaattcgcaagaagattgagtactcaatgcagctgaatg

SEQ ID NO: 168283 - DNA, 268 bp, Glycine max
  unsure (1)..(268): unsure at all n locations
acactttccacttgtctccgaattagttatcttgagaaacattattcccattgctatatattatggctagcatgaaggttacatgggtggttgtgatcatgtgcatggccgtggtgggtgcaccgatgatggcgcaagcantgacatgcaatgatgtgacggtgaacatggcacagtgcctatcctacctgatgcagggaggaacaccttcaacactttgctgcagcggagtcaagaacattcttggctctgctgtcaccaccgttga

SEQ ID NO: 168284 - DNA, 261 bp, Glycine max
tgcaacaatggcagccatggctgcgcttcagagctcaatggtcggtctctccctctcctccaactctttcttaggccaacgcctttctcccatcaccctcccctctcttcttccgggtaagtcaacagagaagcaatgtcctattgtaatgaggcttaaacgatgggaacggaaggagtgtaaaccaaacagccttcctatcttgcacaaaatgcatgttaaacttggagatacggtgcaagtcatatctggacgtgaaag

SEQ ID NO: 168285 - DNA, 214 bp, Glycine max
tcggcactgcagccgtagaaggaaaaccgaccatggtgcacgtctccttttacaggaactatggtaagacgtttaagaagccccgccgtccgtacgagaaggagcgtctagacgcggagctgaagctggtgggggagtacgggctgcggtgcaagagggagctgtggagggtgcagtacgcgctcagccgcatccgcaacaacgcgcggaatct

SEQ ID NO: 168286 - DNA, 251 bp, Glycine max
gacaagatcaaggagaatcaggagaagattaagctcaataagcagttgccctacctcgttgggaacatcgttgagatattggaaatgaacccagaagacgaagctgaagaagatggtgccaatattgatcttgactcacaaaggaagggaaagtgtgttgtgctaaagacttctactcgacagacaatctttctacctgttgttgggcttgttgaccctgacaagttaaaacctggtgatctggttggtgt

SEQ ID NO: 168287 - DNA, 267 bp, Glycine max
ggcaattgaacacgaagacgatctcaaagacgagaagaacccacgacccctcgacgaggatgacatcgccctcctcaaaacctacggtttgggaccttattccacaagcataaaaaagtgcggagaaggaaatcaaagatatggccaagaaagtgaatgacttatgtggtatcaaggagtctgatactggattagcagcaccaagccagtgggatcttgtttctgataagcaaatgatgcaggaagagcagcctcttcaggtggcac

SEQ ID NO: 168288 - DNA, 262 bp, Glycine max
gcggaattggactctgctgcgggtgctgctgtaactcagaagccgagctacatccaaatctcggtagagtcatattcccatctgactggttttgaggatcaagtggagacatatgaagaaaaagttcagacactggaggatgagatcaaggaattagatgataaactgtcagcagctaattcaggggtagataccaaggaaagcttggtagaacagcatgctaacgtcgcagaagaggctgtctcaggtttggagaaagctg

SEQ ID NO: 168289 - DNA, 223 bp, Glycine max
ggggattcccgatataggtcaacctttcgaactgctgctgaatccacgggcaggcaagagacaacctggtgaactgaaacatcttagtagccagaggaaaagaaagcaaaagcgattcccgtagtagcggcgagcgaaatgggagcagcctaaaccgtgaaaacggggttgtgggagactatacaagtgtcgtgctgctaggcgagcagcagagaatgctgca

SEQ ID NO: 168290 - DNA, 264 bp, Glycine max
cacagttcctgatccatggcatctcgccgccgcatgttgttgaaggtcataatcctcggagacagcggggttggtaaaacatcactgatgaatcagtatgtgaatcgtaaatttagtaatcagtataaggcaaccatcggcgcagattttcttaccaaggaagttcaatttgaagataggttgttcacattgcagatttgggatactgctggtcaagagcggtttcagagtcttggcgtggctttctaccgtggtgcagattgc

SEQ ID NO: 168291 - DNA, 263 bp, Glycine max
tgtggaaagtccctcttctcaacaatcggtttccgatcatcaaccccgctactgaagacatcatagggcatattccagccgctactaaggaagatgttgaccttgcggtggatgctgctaaaagagccttttcccataacaaaggcaaagattggtcttcagctcctggctctgttcgtgctcgctatcttcgagccatcgcttcaaagataacagagaaaaaggatgaactaggaaagcttgaagcaattgattgtggaaaa

SEQ ID NO: 168292 - DNA, 272 bp, Glycine max
atccagatcgaacacgcagtttccggcgcatctcatcgtgcaccaaaatgaacgacgcagatgcctcggagcaaatccagcagatggtgcgtttcatccgcaaggtggctgcgtagcctcccgacgagatctcggtctctgccgaagaggcattcgatatcgagcagctgccgttggttgacgccggacagaaggagctcaggcaagagtgcgaacgctaagagcgccaagtcgtcattcgccagatgattgagtactcaatgcaggtcaat

SEQ ID NO: 168293 - DNA, 264 bp, Glycine max
cgttccactcgtctccgcattagttatcttgagaaaccttatacccattgctatatattatggctagcatgatggttacatgggtggttgtgatcatgtgcatggccgtggtgggtgcaccgatgatggcgcaagccatgacatgcaatgatgtgacggtgaacatggcacagtgcctatcctacctgatgcagggatgaacaccttcaacactttgctgcagcggagtcaagaacattcttggctctgctgtcaccaccgttg

SEQ ID NO: 168294 - DNA, 260 bp, Glycine max
cgggaacccagatttccaccattctgagtaacttcacacaccatataacagaaaatgaggtggggcttgtggcaacttgggcaatcaatccctcgccgtcttgctcacggtaataataaagctgttgcttgtcgatattttgcctcagatgctgagctgaaaaagacagtcctttatgacttccatgttgctaatggagggaagatggtgccatttgctggatggagcatgccaatccaatacaaggactcaattatgga

SEQ ID NO: 168295 - DNA, 179 bp, Glycine max
gggttactgtctgttcaagctaccatctctctctctctttcttagtgcctccttgccagaagttaaaatggcccaagaaactttcctattcacatctgaatcagtgaacgaggggcaccctgacaagctctgtgaccagatctccgatgctgtgctcgatgcatgcttggagcaggacc

SEQ ID NO: 168296 - DNA, 243 bp, Glycine max
gttcttcacatcactaccaggaagtccccctgtggtgaaggtaccaacacatgggatagatttgaacttcgtgtccacaagagagtgattgacctctacagtgccccatatgacggtaaagtttggctttgtaaaattgattgtctagtgaactgatttgttttggatgacttttaccctgaaatttagggctataaaacttattgtaaatttcttaacacaataaactagttacgttttttt

SEQ ID NO: 168297 - DNA, 259 bp, Glycine max
ctgggagtctccattaggttgcctcatgttttcttttactatgcaaatggaggatggacgagtcgttcctttggttcagtatgtggtttcccttgctatgacagaggcaatcaaggatatctgtgacaaaaatgggttacccagcatagatgttaaaatcaagtggccaaatgatctttacttaaatggctctaaagttggaggcattctttgtacctcaacatataaatcaaagaagttcaatgtaagtgcaggaata

SEQ ID NO: 168298 - DNA, 266 bp, Glycine max
agcacatatactattggccctttccaatctacaaaaaatgaaaaagcaaaagttaaagtgaaagttcggttgaatgtgcatggaattatatctgtcgaatctgcaactctactggaagaggaagaagaaattgaggttccagtttacaaagaacctgcaggagaaaattccaagatggaaactgatgaagctcctgctgatgctgctgctgctgctgcaactcctagcaccaatgacaatgatgttagcatgcaagatgctaatac

SEQ ID NO: 168299 - DNA, 273 bp, Glycine max
caataatcgcagaagcagtttccggtgcatctcatcgtcttccaaaatgaacgacgcagatgtctcgaagcaaatccagcagatggtgcgtttcatccgccaggaagctgaggagaaagccaacgagatctctgtatctgccgaagaggaattcaatatcgagaagctgcagttggttgaagccgaaaagaagaagatcaggcaagaatacgaacgcaaagagcgccaagtcgaaattcgcaagaagattgagtactcaatgcagctgaatgc

SEQ ID NO: 168300 - DNA, 260 bp, Glycine max
cggctcgagaccaaagaagaagattgaccatggcttcatcaatgaggatctcaaggctgctctctcgttcttttctttctgcttccactactcctttgttctctagaggtggaagtggtgctcttggtgcagggctcagtaaattcagcactgctgctgctcttgaagaaccaatcaaaccaccagttaaagtagaacacacccagctcttaatcgatggaaaattcgttgatgctgctactggcaaaacttttccaacg

SEQ ID NO: 168301 - DNA, 221 bp, Glycine max
gacaagatcaaggagaatcaggagaagattaagctcaataagcagttgccctacctcgttgggaacatcgttgagatattggaaatgaacccagaagacgaagctgaagaagatggtgccaatattgatcttgactcacaaaggaagggaaagtgtgttgtgctaaagacttctactcgacagacaatctttctacctgttgtggggcttgttgaccctga

SEQ ID NO: 168302 - DNA, 261 bp, Glycine max
aagatcccaaacttgctctaaaataagactgcatcgtgcttttgcaggcaacaaggactatatccgaaagtacagacgcaggacgatatccattcgcatagcagaagactactgtgacacgacggcaatatctacctgattcactagagaaggcacaaagtcgtatgatagatgctgcactcacacttgttcacgaaactagcaggcttaagagagaactcgtgcatagtttgggaggtactgtggcaacttcaacacttc

SEQ ID NO: 168303 - DNA, 270 bp, Glycine max
actgtgactctgtgcttagttaacgttaacagtgacttaagatggcggattctgcagatgtcacccacgatgttgtgtccctcctctcttctcctcaaagggactttcttcttcgaaacaacggcgatcaggttaaaattgacagcttgaagggtaagaaacttggtttgtatttttcggcatcctggtgtggtccatgtcaaacatttacgccaactttggtggatgtgtacaatgaggttgcaaaaaaaggtgacttccagatcgttt

SEQ ID NO: 168304 - DNA, 253 bp, Glycine max
gatccttctttttctccttgaactcaaacatggcagatgaggtggttctgctagatttctggccaagtccatttgggatgagggtcaggattgcacttgctgaaaagggtatcaaatatgagtacaaagaagaggacttgaggaacaagagtcctcttctcctccaaatgaacccggttcacaagaagattccggttctcatccacaatggcaaacccatttgtgaatccctcattgctgttcagtacattga

SEQ ID NO: 168305 - DNA, 254 bp, Glycine max
ggctcgagcggacaatgaatgctagtgagtgtgttgccaggggttgtgcattgcagtgtgcaattctcagtccaacttttaaagtacgggagtttcaggtcaacgaaagctttcctttctcaatttctctctcgtggaaagctccaagttctgatgcacaggaaagtggaccagataataaacaaagtacccttgttttccccaagggaaatcccataccaagtgtcaaggcactgaccatctacaggtcagga

SEQ ID NO: 168306 - DNA, 267 bp, Glycine max
tacgtaacatcagcattgtgcaacatcatagtgcaatggcttccaaggctgcacttctcttgtgtttcaatgttctcttcttcaccgtggttagctccacatatgtgccatacaacccacaccccaaaactccaaaacacccacctgtcccaaagccaccgtccccaaagcaagcaagttgccccgaagacactattaagttgggtgtgtgtgctaatgtgttaggttgatcaacgtgcacttggggagcacaaagacccatgtgca

SEQ ID NO: 168307 - DNA, 263 bp, Glycine max
gagcctccagttcctccttcccccagagatgatgccatgcagctttaccgtgcttttaagggatttgggtgtgatacaagtgctgttatcaatatacttgctcatcgagatgctacacagcgtgcctacatccagcaagaatacaaagcaatgtattctgaggaactttccaagcgcttagcttcggagcttagtggaaagttagagactgcagttctgctctggtcgccatgacctgcaggacgtgatgcaacaatctttag

SEQ ID NO: 168308 - DNA, 258 bp, Glycine max
cgaaaatcaaccttctcaagcttgcacattttgctgttatagtttctcggcagtattctgaaaaagaagctgctgttggttatcttggaggggtcattcagaaacttcaagacactagggagcagcgcatagaagaacctattctttacattaagatgcaaatagcaatattcaagcttgagcaaggtgatcaaaaggaatgcaagatacttctagaagatgggaagagtacactcgacagcatgacagatattgatc

SEQ ID NO: 168309 - DNA, 296 bp, Glycine max
tgcctagccattgatttggaaaagtccaagcttcaaagatgagtaagcttcagagtgatgctcttagagaagctatctcacgaatcatgactgattccaaggaaaagaacaggaaatttgtggagaccattgaactccaaattgggctgaaaaactatgatccccagaaggacaagcgttttactggctctgttaagttgcctcacattcctcgccccaagatgaagatttgtatgcttggagatgcccaacacgttgaagaggctgagaagataggattggactacatggatgtc

SEQ ID NO: 168310 - DNA, 286 bp, Glycine max
tttttcttctatgaacacatggtggctgagttgaggggaagtacttagaaacagaaacacagagatgaaaccagaaacatctctgaactttactttgatgctgactttcttactttatctgaacttggttatgggagtgctgagcgttgatcattatcgcagagttgactttcctgatgaattcgtttttggttcaggcacctctgcttatcaggtggaaggagcttctaacgaagatgggagaactcctagcatctgggatacctttgcccatgcggtgtatgag

SEQ ID NO: 168311 - DNA, 289 bp, Glycine max
ggcactcaaacattgtttgttgtaggaagaggaatcttgagaaatggcaggggacagcaagagcaagattctgttcatcggagggactggttacatcggaaaattcatcgtggaagccagcgccaaagctggccacccaactttccttttggtgagggagtccactctctccaaccccgcaaaatcatccctcatcgacaatttcaaaggcctcggtgtcaatcttgttttcggagatctatacgatcaccaaagtttggtgagtgctataaagcaggtcgatgtggta

SEQ ID NO: 168312 - DNA, 288 bp, Glycine max
atcaaaccaaaaaacacaacaaaagacagacagaaagacacaaagagttccttgctttgtagtaagatatatcatcaaaaatggttttgtcttggactagaagaaacgttttccgccgtgcaaagaaggagaaggaacaaagtcaactattagaagttgaggttgtgattcccaaacactttcgctgtccggtgagtttggagctgatgacagatccggtgactttatcaaccggcattacctacgaccgtgtgagcatcgagaagtggatcgagggagataacagaa

SEQ ID NO: 168313 - DNA, 288 bp, Glycine max
ctcccgcatctcctcgtcgctccgccacgccttcgcgcacgccgaccgtggacggagctcatcgaccggagctccatgtcccgacccgacaccctcgccgaagcatactctcggatccgtaagaacttcgcctacttccgcgtcaattacctaaccctaatcgtgttggcgctcgcggtctcgctcatcacgcatccgttctcgctattcgtcctcttcggtctcctcgcgtcgtggtcgttcctttatctctttcgcccttcggatcagcctgtcgtcctcttcgga

SEQ ID NO: 168314 - DNA, 283 bp, Glycine max
cacttcttgaaccgtgccttaactaaactagagctagaattagagttagctaccttgcctaattcacaaacgcgtccctctacggctctacctattagctatcttctttgtgctgtgattgaacattaatttgtgatagctcaccatggccattgctacttgtgatcatgataagaacgcaaaggctttgcagttcattgaggatatgacccaaaacactgaaagtgtccaagagagggtccttgctgagattctcagccaaaactcccagaccgaatacctg

SEQ ID NO: 168315 - DNA, 291 bp, Glycine max
cggctcgagactgatcataaatcacatagctagttgtttaaagtgagagaaaaagaaagaagaacatggcaaactttccagttgttgacatggggaaacttaacaccgaagagagagcagcagccatggagattataaaagatgcctgtgagaactggggtttctttgagttggtgaaccatgggatatccattgagttgatggacactgtggagaggctcacaaaagagcactacaagaagactatggagcaaaggttcaaagaaatggtggccagcaaagggcttgagt

SEQ ID NO: 168316 - DNA, 292 bp, Glycine max
gtttccgatatccaaggggaaatggcattggtgttcaactaccaactggaaataaaggaactcctcttgagattgggaaaggtaggatattgattgaaggggaaagagtggctctcttgggctatggatcagctgttcagaactgtttggctgcagcttccttagtggaacatcatggtttgcgtgtaacagttgctgatgcacgtttctgcaaaccactggatcgttccctgattcgcagcctggcaaaatcacatgaggttttgattacagttgaagaaggatcaattgg

SEQ ID NO: 168317 - DNA, 295 bp, Glycine max
caaatcatcacacacacatactaagaagcaacaattcttctacaatggatctcctccttctggacaacaccctcataggtctcttcctcgctcgcggtggtcgccatcgccgtctccaccctccgcggccggaaattcaagctcccaccgggcccactccccgtcccaatcttcggcaactggctccaagtcggcgacgacctcaaccaccgcaacctcaccgatttggccaaaaaattcggtgacatcttcctcctccgcatggggcagcgcaacctcgtcgtggtttcttccc

SEQ ID NO: 168318 - DNA, 291 bp, Glycine max
ggcacacacagacacacacatttcgtcggaatgggaagggtgattcgcgcacagcgtaaggctgcggggtcggtgttcaagtcccacacccaccaccgcaagggtccggcgaggttccgcagcctcgacttcggcgagcgcaacggctacctcaaaggggtcgtcaccgatatcatccacgaccctggtcgcggtgctcctctagccaaggtggcgttccgccaccccttccgctacaagaagcagatggagctcttcgtcgccgccgaggtcctctacaccggccagttc

SEQ ID NO: 168319 - DNA, 289 bp, Glycine max
cctggttcctgcattgcgttgctctctctataccttctaattcccaaatttctagggtttggtacagagagaaaaaggaacataagatgtctcagaacgggaagctgatgccaaatctagaccagcatagcaccaagcttctcaatctcactgttcttcaacgaatcgacccttttgtcgaggaaattctcatcaccgctgcgcatgtcaccttctacgagttcaacatcgacctcagccaatggagccgcaaggacgttgaaggatctctcttcgttgtcaagaggaa

SEQ ID NO: 168320 - DNA, 290 bp, Glycine max
taataatgttttgaggacatttctctctccgaaccctcccatgcatggcctcttccgcattcctttccgtttatctcattatctccgtcatcgtccttttgtcgaacaggtgctgcacgtttcaatgcggggtttcctacgacacgatcaccgtcctcaacgcgttccctcacgacccacaagcctttactgagggtcttctttatcatggaaatgacaccttatttgagtcaactggcctttatggggagtcatccgtccgtaaagttgctcttcgtactgggaaggtt

SEQ ID NO: 168321 - DNA, 288 bp, Glycine max
agattttggagattgaagagatatcacaagatgctgcatattggattcgaagaattccacctcgcctctgggccactgcttattttgaggggcataggtttggtcatttgacagccaacatagttgaatctttaaacacttggatattggaggcatctggacttccaataattcaaatgatggaatgcattagaaggcagctaatgacttggtttaatgagcgccgggagaccagtatgcagtggacatcaatacttgtaccatctgccgagagacgtgtagccgagg

SEQ ID NO: 168322 - DNA, 284 bp, Glycine max
atcagttctctcatttctcgtcttcactgagaaaaatccttcttcgtgcatgctcctcgtttctatctaaaggggcgaaagagtagattataagggggtaagtgagaaagagagtaaaaacaaaattaaaacatgactatggaagagcggcagggtcgagaacgaggactacacacaagatggtactgtcaacattaaagggaaacctattcttagatccaaaagtggtggttggaaagcttgctcctttgttgttgtatatgaggtattcgaaagaatggctt

SEQ ID NO: 168323 - DNA, 288 bp, Glycine max
aatcaatcaatccctcatctcattgctgagatctgcaagctggctatggactacgaaccctacgacagtagcggaactgatgatgaccttccaccaacccatcaaaatagaatttccaggggaggaggaggacgtctcgctgggaatgggagatctgctgttggttcaattccttacccaaggatgtacggtgaaattgatatggagacccaaattcatcagcttgagcaagaagcatacagttcagttctaagagcctttaaagctcaagccgatgccattacttgg

SEQ ID NO: 168324 - DNA, 283 bp, Glycine max
cattttaatcctaattctgcacttcttgatcattcgattttactcctcaagatgcagatattcgtaaaaactttgaccggcaagaccatcacccttgaggtggaatcctccgacaccattgacaacgtaaaagctaagattcaagacaaggaagggatcccacctgaccagcagagacttatctttgcgggtaaacaacttgaggatggtcgcacccttgccgattacaacatccaaaaggaatcaaccctccatctcgtgcttcgcctcaggggtggcatgc

SEQ ID NO: 168325 - DNA, 283 bp, Glycine max
attttccctcactttctcgctcgccaaacgcccctctctctcctccaatggccgaccagctcaccgacgaccagatcgccgagttcaaggaggccttcagcctcttcgacaaggacggcgatggttgtattactactaaggaacttgggactgtgatgcggtcactagggcaaaacccaactgaggcagaactgcaggatatgattaatgaggttgatgctgatggcaatggaaccatcgacttcccagagttcctcaacctgatggctcgcaagatgaaaga

SEQ ID NO: 168326 - DNA, 289 bp, Glycine max
ctctctctctctctctcactttgtcctccaaactcaagtgtcggacagtttgcttcttttccactctgaatcaccctatttattttgggtctctcatctttcttcttccttccaagttgtttttggtgttggtgttggtgttgaattgagttgagaagaaaagaagaggtcatagacacacacacaagacatgtctgctgttgagtcagctgaacacaacaacatcagaggagtaccaactcatggtggacgctatgttcagtacaatatctatggcaatctcttcgaa

SEQ ID NO: 168327 - DNA, 287 bp, Glycine max
tggagatgaaaagtattgagatggagatcaagagaagaaatgccgatccaaaacttagaaacagatgtggcgttaacgttttaccatatgaactgcttataccaagttctgaacgtggggcaacaggacgaggagtgccaaatagtgttacagcctagtccaatatgtgtacaaaccagcaactgaatcaatgttctattattcttcaccttagctggactaaaatggatttaatatttgatctcctaaaaacaagaaagaaaataaaatgcaaaagggaataatgc

SEQ ID NO: 168328 - DNA, 283 bp, Glycine max
gtgacaccaatctctatgaggtgatggtagaaggtgagaatggagggagagttcaagctgcagctatttgccacatggacacctctaagtgggaccgagaccacgtgtcctttcgtgtgctcaaagttgagccgggaacctcacctgtgtgtcatttcttccctcctgataatctagtctgggtgcctttgcctctggctccataactatagtctatagtttcatgttcttcttcatcaaagtttgttatatatatatatatgtgccaggtataacataagtt

SEQ ID NO: 168329 - DNA, 284 bp, Glycine max
cggtttttgagtgcggcggtccaaacactcttctctgcagcttttgcctacaactcccttcaccatggctgaacaaaccgagaaagcttttctgaagcaaccaaaagtgtttctcagcacaaagaagactgggaagggaaagagacctggaaaaggtgggaaccgcttttggaagtccattgggctttcatttaagactcccagggaagccatcgaaggaacctatattgacaagaagtgccccttcactggcaatgtctccatccgtggccgtatcttggctg

SEQ ID NO: 168330 - DNA, 284 bp, Glycine max
actcgagccgaatcggctcgaggaagaaaacacgatcaaagagagactccaataaggggacaacggcaagcgtgacgacggtggatttatggactttgctaattcaatgtgcacaggctgtggctagctttgaccaaaggactgcaaatgaaacactgaagcagattaggcagcactcttcaccttttggcgatggacttcagcgtttggctcattacttcgccgatggcctcgagaaacggttagctgctgggacaccaaagttcatttcctttcagtcagca

SEQ ID NO: 168331 - DNA, 285 bp, Glycine max
aagatggagaagtatcagatctggagcaggagaatagcgttggcagcgtttgcgtttgctctgctgttccaatcggcctcagcagacgacgtcgttgtgctcactgaagataacttcgagaaggaagttggtcaggacagaggagctctcgttgagttctatgctccttggtgtggacactgcaaaaagcttgctccagaatatgaaaagcttggtagcagcttcaagaaagccaaatctgttttaattggcaaggttgactgtgatgagcataagagtttgtgc

SEQ ID NO: 168332 - DNA, 289 bp, Glycine max
cttcaaattctcagtgaaaccaattcagttcagtccaaatcccaaatccgaagtgagatttgcgatggagaggcttcagcgaatgttcgcaggtgcaggtggagctctagggcaccctcccccagattccccaactctcgattcctccgagcaggtctacatctcctcactcgctctcctcaagatgctgaagcacggaagggctggggttcccatggaagtgatgggtttgatgcttggagaattcgtggacgagtacaccgttcgtgtggttgatgtcttcgcaatg

SEQ ID NO: 168333 - DNA, 288 bp, Glycine max
cctctttgttcctaaacacggggcactggtttcgaaccctcgttgtggttaggtcttcttcacctttcgaattttggaatccatgggtcagggaactccgggcggcatgaaccggcagggcgaccggaagccggacggcggcgacaagaaggagaagaagttcgagccgtcggctccgccggcgcgcgtggggcggaaacagcggaagcagaaaggtccggaggccgcggcgcggttgccgacagtgactccggtgacgaagtgcaaactgcggcttctcaagctgga

SEQ ID NO: 168334 - DNA, 302 bp, Glycine max
gctgaattcattcatagcagcaaacccatctccaacaacatgagttcccaaacacgcaacctcaactttgttctgtttcctctgatgtcccagggccacatgatccccatgatggacatagcaaaaattctggcacagaacggtgttactgtcacagtggtcacaacccaccaaaacgcatcacgcttcacatcaactttttctaattcccaaatccgattactcgaagttcaattcccataccaagaagcagggttgccagaagggtgtgagaatctcgacatgttaccttcacttggcac

SEQ ID NO: 168335 - DNA, 288 bp, Glycine max
gtacttccttaatttgccaccctaacctactgcattattattctcttccccttaatttctatctccaatccctcagcaaaacgcagcaaatgggtcggcttaatctcctacttgtgtggtcactctcattaacactgtccctttattatctacacccaatctctgctcagctcagtccaaaccactatgctaaaacatgccccaatcttgaaagcatcgttagacaggccgttgccaagaagttccaacaaacctttgtcaccgtcccggccacccttcgtctcttct

SEQ ID NO: 168336 - DNA, 282 bp, Glycine max
gtttgttcattttgttgttcgaagccaaaaccctagcagccggcgagaatggcagacgttgaggttgatgcggcggcagcggcaggggcagcgcaccgaagaagagaacgttcaagaaattcagcttcaggggcgtggatctggacgcgcttctggacatgtccaccgacgaactggtgaagatgttcagtgcgcgtgcacgtagaaggttccagagaggtctgacgaggaagcccatggccttgattaagaagctccgcaaagctaaaagggaagcaccag

SEQ ID NO: 168337 - DNA, 289 bp, Glycine max
aaatttctccaacgctatcgagccaaacccaaacgttaactcagaagaagaccagcagaagaagaagaagaagaaacaaaaccgaaccactttcaactctccaacgtcgccacacgattcatcgcgtttcgcaggctgcaatggcgacgttcgaactgtaccgcaggtcgacgatcggaatgtgcctgacggagacgctggacgagatggttcagaacggcactctcagccccgagctcgcgattcaggttctggtccagttcgataagtccatgactgaggctctgga

SEQ ID NO: 168338 - DNA, 282 bp, Glycine max
ctcctactacctattcggctttgcattcgccttcacgggcccctccaacggcttcatcggccgccacttcttcggcctacgagattacccaatgggctcctctccctccggcgactacagcttcttcctctaccagtgggccttcgccatcgccgccgcacgaatcaccagcggctccatcgccgagagaacacagttcgtggcttaccttatctactcttctttcttaaccggtttcgtttaccccatcgtttcgcattggttctggtcctcggacggttg

SEQ ID NO: 168339 - DNA, 278 bp, Glycine max
caccagtgtacaagccaccagtatacaaaccacccgtttataagccaccagtttacaagccaccagtgtacaagccaccagttgagaagccaccagttgaggaaggaaacggcggtgatacgcgaaccgcctcacgcgccgtccaagacctgccggcgtcgctggacgtcggtgcgtcggtggcgcaggagtcgcttgagtccgtcggccaagccatcgatgacatggcagcaccgtttggaatcgacagcgagatactctcacggtaggatctctct

SEQ ID NO: 168340 - DNA, 290 bp, Glycine max
atacaaaccacccgtttataagccaccagtttacaagccaccagtgtacaagccaccagttgagaagccaccagtgtacaagcctccagtgtacaagccaccagtatacaaaccaccagtttataagcctccagttgagaaacctcctatttacaagccaccagtttacaagcctcctatagagaagccaccagtgtacaagccaccagtgtacaaaccaccagtgtacaaaccaccggtgtacaagccccctgttaagaaacctcctatttacaaaccaccttacccaa

SEQ ID NO: 168341 - DNA, 284 bp, Glycine max
ttcaggcattagtaagaactaaggggctcttctcattttacgaggatgggcatcaagagtgctgtagagtaagaaaggtgaggcccttgaggagagcccttaagggtctcaaagcatggattactggacagagaaaagaccagtctcctggtactaggtctgaaatccctattgtccaggttgatcccgtttttgagggactggatggtggaattggcagcctggtgaagtggaacccggttgcaaatgttaatggtctagacatatggaacttccttaggacc

SEQ ID NO: 168342 - DNA, 285 bp, Glycine max
gtgatttggagtttggagcgactgaactaatcattaatttgcactcgctgtttcagcttcatcacccttcttttgcatcatttatatctcttgagaaatggcacaagaaacctttctattcacatctgaatctgtaaacgagggtcaccccgacaagctgtgcgaccagatctctgatgcagtacttgatgcgtgccttgaacaggaccctgacagcaaggttgcctgtgagacatgcactaagaccaacatggtcatggtcttcggagagatcacaaccaaggc

SEQ ID NO: 168343 - DNA, 282 bp, Glycine max
gagattttgctgctctttgaagaagggtgtttgcttgattttggtgatgtcgctgctctcagatctcatcaaccttaacctctcagacactactgagaaggtgatcgcagagtacatatggatcggtggatcaggaatggacctgaggagcaaagcaaggactctcccaggaccagttagcgacccttcaaagcttcccaagtggaactatgatggttccagcacaggccaagctcctggagaagacagtgaagtgattatatacccacaagccattttcag

SEQ ID NO: 168344 - DNA, 281 bp, Glycine max
catattttagcacgccaaaccggtctctcgagaggacaggtttcgaattggtttattaatgcaagggtgagactatggaagccaatggtggaggaaatgtacttggaggaagtgaaggaccctgaaaacaacatagcttcctcagaaggggctactgatcaagacaatgatataaacccaaataatgttgaataccctccacctccttcttcatcacgatcagaggatcagaagccatctctggttcgaattgactccgagtgtgcatcctccatcatcaa

SEQ ID NO: 168345 - DNA, 279 bp, Glycine max
gtgactcgttcttcttcgtcgttatcttcttcttttgttgtttgtgtgtttgttttttctctcacctgaaaatgtcttgctgcggtggtaactgtggttgcggaagcgcctgcaagtgcggcaacggctgcggaggctgcaagatgtacccagacttgagctacaccgagtcaaccaccaccgagaccttggtcatgggagtggcaccagttaaggctcaattcgagagtgctgaaatgggtgttcccgctgagaacgatggctgcaaatgtggagcta

SEQ ID NO: 168346 - DNA, 287 bp, Glycine max
cacacaaacccgtccctcacactctccaaaccctagcggcactacacactagttctatcgctatctccccaagatgtcgagcgccgatcccgagcacagagaagaggaggaggcacccgccgttggcgacgacgaggacaccggagctcacgtcgctccaatcgtcaagctcgaggaggttgctgtcaccaccggcgaggaggacgaagatgcaatcctggatctcaaatcgaagctttaccggttcgacaaggacgggaaccagtggaaggagcgtggcgccggca

SEQ ID NO: 168347 - DNA, 281 bp, Glycine max
cacgaatgatatagcgttgccattctcatcctcttctttctctctctaccattgccatggatccctacaagcaccggccatccagcgccttcaattctcccttctggactacaaattctggtgctcctatttggaacaacaactcctctttaaccgttggagctagaggtccaattctgctggaggattatcatcttgtggagaagcttgcaaattttgatagggaacgtatcccagaacgtgttgtccatgccaggggcgctagtgcaaagggtttcttt

SEQ ID NO: 168348 - DNA, 279 bp, Glycine max
tgctctgtgattccagaccttaatttttccctcattcgcttcaaatttcaggaaatcaattatggctcaaccctcaacaagaataggccttgcacctctggctgttatgggccaaaatctagcactcaatattgctgagaaaggctttcccatttctgtttataaccgaaccacttccaaggttgatgagactgtagaacgagcaaaacaagaaggaaatcttccagtttatggctaccatgaccccgaagcttttgttcattccattcaaacgcctag

SEQ ID NO: 168349 - DNA, 279 bp, Glycine max
ctcagtgaaagagaatccgaggcgaagagaagagaaaaattaagatggaggggaaggagcaggatgtgtcgctgggagcgaacaagttcccggagagacagccgattgggacggcggcgcagagccaagacgacggcaaggactaccaggagccggcgccggcgccactggttgacccgacggagtttacgtcatggtccttttacagagcagggatagcagagtttgtggccacttttctgtttctatacatcactgtcttaaccgtcatgggagtcg

SEQ ID NO: 168350 - DNA, 273 bp, Glycine max
ggtctcttgtcaccatggattcagaagtacttaacttattagcccttatcttgccctttttactcttcgttattgtggcactgaaaataggaagaagacatctcaagaaatctgagtcaactccaaaaatacccccaggaccatggaagctacctatcatagggaatatactccatcttgtctaatctacaccacaccgaaaattaagagacttggccaaaatatatggacccttgatgcatctccaacttggggagctcttcataatcgttg

SEQ ID NO: 168351 - DNA, 280 bp, Glycine max
ctcttcctctctactaatctcagctatggccgacgaagctgtggttgttccagatcccacccagatcgatgtcaagctctttaaccgctggagcttcgacgatattgagattactgacatttctctggctgattatatcggagtggcgacatccaagcacgccacgtatgtgcctcacaccgccggcaggtactcggtgaagcggttcaggaaggcgcaatgccccattgttgagaggctgaccaactctctcatgatgcacggtagaaacaatggcaag

SEQ ID NO: 168352 - DNA, 286 bp, Glycine max
cccaaacaaaccatggacgtgggtcagatgcagagacagtggatcgagtacaccaaatccctcttcctcgagggcttcctggatggtcagtttctgcaacttcagcagcttcaggatgagaacaaccctgactttgtggtcgaagttgtctctctcttctttgaagattctgaaaggcttctcaaagatctcacctttgccctagatcagaatggcgttgacttcaaaaaagttgatgctcatgtgcaccagttaaagggtagcagttcaagcataggtgcacaaa

SEQ ID NO: 168353 - DNA, 264 bp, Glycine max
cacggagcttctcttcgccaggcatccgccacgtgtcaccttcaaccaccgcgagtacgaacaactcacagactccaacgatgccgtttcaacagacttcgagcagcgttccttcttcttcggccccaccgaaaccgcctccatccgcgccctcctcccccgtgacctcgaccaacgcgccacaacgttcgaggtgctgacgtcatacgtctggcgctgccgcacgacagcgcttcacatccctccaaatgaagatgtgagaat

SEQ ID NO: 168354 - DNA, 262 bp, Glycine max
caatgcataggaattggttgttagcactgagaacatcactttgaattggtactctgggaatgaccgatcgaagcttgtttccaattgtttgttccgtatgggaggggctgccattctgctttcaaacaaaggctctgataggcgaagatcaaaataccagctggttgacaccgttcgcactaataagggttctgatgacaagtgctttggctgcgttgtccaagaggaagattccaatggcaagattggtgtcactttgtca

SEQ ID NO: 168355 - DNA, 266 bp, Glycine max
tgttattctttcgatcagctatgaagtaaagagacgggcaaggagagatagatagggaagaaaaatgagtgtatcattgactgtgatgaccttcaatctccatgatgatgagccacaagacagtcctaattcgtgggcgaagagcgggatatgtgcataagcgttattaccagttactcacccatcatcctctgtacccaacaaggcgtgaaagcacaattggattttctccagcagggtttgccaggttatgatcaatttgggat

SEQ ID NO: 168356 - DNA, 264 bp, Glycine max
cttttgctttaccaaattccaatttccaattcaaaaccctaacaccgttcgaagcaccaaatcgtgatggcaccaaaggcagagaagaagccagcagagaagaagcccgcggaggagaagaaatcgacggtgggagacaaggctccggcggagaagaagccaaaggccggaaagaagcttccgaaggagggaggcgccggcggagaagggaagaagaagaagagaaacaagaagagcgtggagacatacaagatctacatcttc

SEQ ID NO: 168357 - DNA, 263 bp, Glycine max
cgggtacgaatacggtgggcccatgttctgttacgacgggtactatgcaaggcccgtatatgatagttacggtggaggcagaccctgttatgtgaaccgtggtgatcaatatttcagcgaagagaatccacaaggctgcataattatgtgacaattacgtccacggcgttgcattattgggttctgtaaatgatggtggccattcacaatttgtctcaattatcatcatgtttaatcacgtccaatccaatgtttttgttatt

SEQ ID NO: 168358 - DNA, 267 bp, Glycine max
ggtttgcagtcactgctctgtttcaccaagtttgggcgtttaaatcagaaccaaatcgtgttctcttccattggcaaacatggcaactcaaatgagcaagaagagaaagtttgttgcggacggagtgttctttgccgaactgaacgaggttctgacacgtgaattggcggcggacggttactccggcgtggaagttagggttacgccgatgcgcaccgagatcatcatcagagccaccagaacccaagccgttctaggtgagaaggg

SEQ ID NO: 168359 - DNA, 270 bp, Glycine max
atcagaaccatccctgatgttattggggtggtcattcaggcaaaagtcgcgtttgctcggattgtcaaattcctggaggcacctgaacttcagagtgtaaatatcacacaaaggtgtctcaatcagaataagaggggttcaattttaatcaagtctgctgacttttcatgggaagataatgtatcaaagccaacactgagacacatcaatttggaggttagaccagggcaaaaggtggctatctgtggagaggttggctcaggcaaatca

SEQ ID NO: 168360 - DNA, 266 bp, Glycine max
gtgctgtgcaggtcaaggcccttttacttgttcgtccggttgttcccatcttctctctcgtaccaatcaaatcacacttttgtgttgtgttgggaaaccctaaaccccgttttcggtgagatcgagatcgatcgaacatggatgaggagtacgatgtgatcgtgttgggcacgggtctcaaggagtgcattctcagcggtcttctctccgtcgatggcctcaaggttctgcatatggataggaacgactattacggaggagaatcc

SEQ ID NO: 168361 - DNA, 257 bp, Glycine max
cagcttcagagtgatgctttgcgtgaacgccatttcaggaatcatggccgattccaaggagaagaatcgcaaatttgtggagaccatcgaactccaaatcgggttgaaaaactacgatccacagaaggacaagcgtttcagtggctctgtcaagctgccccacatccctcgccccaagatgaaaatttgcatgcttggtgatgctcagcatgttgaagcggcggagaagataggactggactggatggctgtggaag

SEQ ID NO: 168362 - DNA, 260 bp, Glycine max
tataactcatttgaggctctgtgagaattgagaaatggctaaagatgttgcggttcaagagcaaggcggagagtactctgccaaagactaccatgaccctcctccagcacctttgttcgacccagaggagctcacacagtggtccttctatagagccctcatcgctgagttcatagcaacccttctcttcctttatgtcactgtgctcaccattattggctacaaaaggcagactgatacaacggtaggtggcaccgact

SEQ ID NO: 168363 - DNA, 254 bp, Glycine max
cacttggaggttataccttaacagtggatgacgccaaacctagagataatcagggttctggtggtagacgtgccggtggaaggagtggtggcggtcgatttggtggtaggagtggtggtggtggtggtggtcgatttggtggaagaggtggtggcggtcgatttggtggaagtggtggtggtggtcgatttggtggaagtggtggtggtggtcgatttggtggaagacgtggcggtggaaggggtcgtggaaat

SEQ ID NO: 168364 - DNA, 261 bp, Glycine max
ctgatgtagctcaagaaaacattgccgagtcccctccttcttccactgtgttcaacatcgatggcttagtcccatcccccaccccttcatcaaagagaaggcgggcaatacagaaaagggtggtgcaaatcccaatgaaggagacagacccgtgtaggctaaaaggagagagcaacaccccaccctcggattcatgggcttggagaaagtatggacagaaacccatcaagggttccccttatcccagagggtactacaggt

SEQ ID NO: 168365 - DNA, 262 bp, Glycine max
cttcaacaacccttgttttgttctgtgcaagtcatcttgaaaggcacaacaatggtgaagtctataaactttctcctgcttctgtctctactagcctttgttccctcctgtcactgcaaaaagaacataggaggttacctctaccctcaattttacgacggttcatgccccagagctcaagagattgtccaatccatcgttgccaaggctgtggcaaaagaaccccgcatggctgcttcgttgctcagactacatttccatg

SEQ ID NO: 168366 - DNA, 261 bp, Glycine max
cgtcgaccaaactcacgtcgtagaagtccaacccgtcggcaccgttgagagtgaattccgccaatgtcgccggacgtttggccccgccaacgcactgtactttgccggacccgcagtcggcggtggcgcaagagaattttccgtcagagtcttggccgcagagggtccgtgcccatatccgacccgaccaagacttcgggatttttacaatccttgatttgccgctctcgagggtgaatccagtggtgggaagcggcggtg

SEQ ID NO: 168367 - DNA, 257 bp, Glycine max
atttgtattattgagttcaaggctggctagggaaggcaatctcttccgattagagatagaaggttcatcatctcatctcaaaaaggcttttgtgattgataatcagttctcgatttgatttgatcggaacagaacagaggcatgggtcaagcttttcggaagctcttcgacaccttcttcggcaataccgagatgcgggttgtgatgcttggtctagatgctgctggcaaaacaactatactgtacaagctccacat

SEQ ID NO: 168368 - DNA, 258 bp, Glycine max
cgaaaatggcgggtggtggaaaggtttcgttcaaagtcacactcacctccgatccaaaattacccttcaaagtgtttagcgttccagacgctgcgccttttactgccgttctcaaattcgccgccgaagaattcaaagtcccgccccagaccagcgctatcatcaccaatgatggtgttggcataaatccccagcagagcgcaggcaatgtcttccttaaacatggttcagaattgcgcctgattccgcgcgataggg

SEQ ID NO: 168369 - DNA, 257 bp, Glycine max
acaccacacaccacacacatagtagctattatactctctagagtaattgcggaatctgctagaattttctaataatggcgaaagacgttgagcaggtcacagagcaaggtgaatactccgcgaaggactaccatgaccctcctccggcaccgttgatcgacccagatgagctcacaaagtggtccttgtacagagccgccatagctgagttcatagcaacactcctttttctttacatcaccgtgttgaccattatt

SEQ ID NO: 168370 - DNA, 257 bp, Glycine max
ggacggtggaacattcgctctttattcgctgctctgtaggcatgccaagtttaatttgctccccaatcaacaagcagctgatgaggagttatcatcctataaatatggtccctcttcacaggctatagcctcttctcctctaaagacgtttctggagaaacataacaggttaagaacagccctgcttgttgtggtattgtttggtgcttgcatggtcattggtgatggtgtgcttactccagcaatttcggttctag

SEQ ID NO: 168371 - DNA, 263 bp, Glycine max
accaaaaccaatcggatcgtttcctctgcggcgtcagaaatccatggatccctacaagaatcggccatcaagcgccttcaattctcccttctggactactaattccggtgctcccatctggaacaacaactcatcgctgactgttggatctcgaggtacggtatggtattcaatattattttctctacttcatgatcacattttttcatccagatgactctaacccaagactttacttaacaacttaagtcaggaccactcgg

SEQ ID NO: 168372 - DNA, 267 bp, Glycine max
acctgccattattgtaagtaagaattgggaaaggaaggaaggagatgaatctccctatcatagatctgtcctcacctgatcctctttccactgccatttccatccgtcaggcgtgcattgagtatggtttcttttaccttgtgaaccatggcgtggagaatgacttggtcaaagcctttgatgagagtcagaggttcttctcacttccaccaggagagaaaatgaagttggcccgcaaggaatttagaggttatactcctcaggatc

SEQ ID NO: 168373 - DNA, 258 bp, Glycine max
cagaatcaaggttaggtattgtgacggttcatcatttactggtgatgtggaagcagtgaatccagtgactaagttgcacttcagaggaggtaggattttcaatgctgtcatggaggatttactagcaaaaggaatgaaaaatgctcgaaatgctattatctcgggatgttcagctggaggattaacatcagtactgcattgtgatcgatttcgagctctattacctaggggagctagagtgacatgcctctcagatgc

SEQ ID NO: 168374 - DNA, 257 bp, Glycine max
tgggtattttcacatttgaggatgaaaccacctcccctgtggctcctgctaccctttacaaagctctagttacagatgccgacaacgtcatcccaaaggctgtcgaagccttcaggagtgttgaaaaccttgaggggaacggtggccctggaaccatcaagaagatcactttcgttgaggatggagaaagcaagtttgtgttgcacaaaatagaatcagttgatgaggcaaacttgggatatagctatagcgtagtt

SEQ ID NO: 168375 - DNA, 252 bp, Glycine max
gtgacaaacacaaacacaatcaatggcgaacgtcacagcggcacccccgcggtcgcaccgaagcccgcgtgggtcctcccgtaccgaaccgagaatctgcgcgaggtctacactctgtcccgaaaactagggcagggtcaattcggaaccacgttcctctgcacgcacaagggcacggggcgcacctacgcctgcacgtcaatcccgaagcggaagctgctctgcaaggaggactacgacgacgtgtggcgg

SEQ ID NO: 168376 - DNA, 247 bp, Glycine max
ggtttgtaagagacagacaaaagaggcgcaagatgagtggtagggtttctgggaaggtgaagtggttcaacgatcagaaggggtttggatgcataacccctgacgatggcagcgaggaactcttcgttcaccaatctcagatcagctctgacggtttccgaagcctagctgaaggagagtccgttgagttcgctattgaatctgaatctgacggacgcgccaaggctgttgatgtcactggccccga

SEQ ID NO: 168377 - DNA, 252 bp, Glycine max
ggcacccttgccaattgggttcgctgtgttcttggttcacttggcaaccatccccatcaccggaactggtgtcaaccctgctcgtagtcttggtgctgctatcatcttcaacaaggaccttggttgggatgaacatggatcttctgggtgggaccattcatcggtgcagctcttgcagcactctaccaccaggtcgtaatcagggccattcccttcaagtccaagtgattcaatcaaacggttcatgcttaa

SEQ ID NO: 168378 - DNA, 254 bp, Glycine max
gctagatctccgctccggcggccacctcacccacggctactacacctccggcggaaagaagatctccgccacctccatttacttcgagagtctcccttacaaggtaaactccaccaccggctacatcgactacgacgcttggaagaaaaagccctaggacttcaggccaaaactcataatctgcggtggcagcgcgtaccctcgcgattgggactacaaacgtttcagggaagtcgctgataagtgcggacatt

SEQ ID NO: 168379 - DNA, 264 bp, Glycine max
cgccttgctgagttctgagggaagaacctctcaaggctcactgttcctggaggaccaagtgttgcatgtagcacagcaaaagctgttgagtgggatgctgcttggtctaacaaccttgagccctcaggtagagcagcacttggagtgcatgcatcagcttatggaaaccaggtcaaagctgtagaaccagagaagatcatacccaagatggaagtttctccaccaggagttgccatatagagcttgtatgagccatagcaagga

SEQ ID NO: 168380 - DNA, 258 bp, Glycine max
tttcctttgtttctatggcttctgcagaagtagagttccgatgctttgttggtgggcttgcttgggccaccgaccacgatgctctcgagaaagccttctctcaatttggcgaaatcgtcgaatcgaaggtccgttagtcgagggattggatcggatttggattctctcatcccttctgatctgttttgcgttacttgatctatgatacttgtcttgcttgatctataatgattcttttattactcacaccaatcggta

SEQ ID NO: 168381 - DNA, 257 bp, Glycine max
cataaccatgtcagacgaggagcaccacttcgagtcaaaggctgatgctggagcatcaaagacatttccccagcaagctggaaccatccgcaaaaacggttacattgtcatcaagaacaggccatgcaaggttgtggaggtttcaacttccaaaactggcaagcatggacacgcaaagtgtcactttgttgcaattgacatcttcactgggaaaacgcttgaggatattgtcccatcttcccataactgtgatgttc

SEQ ID NO: 168382 - DNA, 255 bp, Glycine max
cgcacaaagcgggttactgtctgttcaagctaccatctctctctctctttcttagtgcctccttgccagaagttaaaatggcccaagaaactttcctattcacatctgaatcagtgaacgaggggcaccctgacaagctctgtgaccagatctccgatgctgtgctcgatgcatgcttggagcaggaccctgacagcaaggttgcctgtgaaacctgcaccaagaccaacatggtgatggttttcggcgagatca

SEQ ID NO: 168383 - DNA, 257 bp, Glycine max
gttcctctcgcccagaatccgagatcaaccccgacgaaggcaaggggtttttctcggcttcttcagatttctgaaatggcgcctgtttcagctttagccaagtacaagctcgtcttcctgggtgaccaatccgtgggcaacaccagcatcatcactcgcttcatgtatgataaattcgataacacctatcaggctacaattggtattgattttctatcaaaaactatgtatcttgaagatcgaactgttcgactgca

SEQ ID NO: 168384 - DNA, 253 bp, Glycine max
caaaacccagatgcactccaacatgttctgaggaaagctgaggagtatctgggcacagtgcctcctgaaactccctactcagaatttgaggacaagttccaggagattggtttggcgagagggcggggtgacaagcagagcgtgttcttgagtcaattcaacttctcttggatcttcttgaggcccctgacccttgcacccttgagactttccttggaagaattcctatggtcttcaatgttgtcattctttc

SEQ ID NO: 168385 - DNA, 253 bp, Glycine max
ctgaattctcttgttgcagagtaacacatggctctgttattcaaggatccgtcgaacatttcagcgtatcgagatagaaggttccccggaacgcaagaggcgtttgagcacgcgcttgtgacctcaaccaccgtttacgtggggaacatgtctttttacacgacggcggagcaagtttacgagctcttctcgcgtactggggaaataaaaacgatcatcatgggcttggacaagaacaccaaaacgccctgcg

SEQ ID NO: 168386 - DNA, 259 bp, Glycine max
cactagtaatattattcttcgaatccattttattattcataatgggtattttcacatttgaggatgaaaccacctcccctgtggctcctgctaccctttacaaagctctagttacagatgccgacaacgtcatcccaaaggctgtcgaagccttcaggagtgttgaaaaccttgaggggcacggtggccctggaaccatcaagaagatcactttcgttgaggatggagaaagcacgtttgtgttgcacaaaatagaatc

SEQ ID NO: 168387 - DNA, 289 bp, Glycine max
ccaatacggaacccaaaattagctcgattaaatccaaatctgagagaagcattgattggtacggtaatggcggaagggaaggaagagagtaaatctagcgaggaaagtgtgaagctgttcgtagggcaagtgccgaagcacatgaccgaacccgaactgcttgcaatgttcaaggagttcgcgctcgtcgacgagtcaacataatcaaagacaaagcgatcgtgcttcccgaggttgttgcttcgtaatttgtccgtcaagggaggaggcggataaggccgtcaatgcg

SEQ ID NO: 168388 - DNA, 284 bp, Glycine max
ggattttctaaggcctttgcaatgactggttggcggcttggatatattgctggtccaaaacattttgttgcagcatgtggaaagatccaaagtcagtttacttcaggggccagtagtatagctcagaaagctgcagttgctgcattaggactaggccatgctggtggggaggcagtttctaccatggtgaaagcatttagggagcgaagggatttcttagtacaaagttttagagaaatagatggcatcaagatatctgaaccccagggagcattttatctatt

SEQ ID NO: 168389 - DNA, 280 bp, Glycine max
tttttgaaataaatgaggcatttgcctcccagttcgtgtattgccgtaacaagctagggcttgatccagaaaagatcaatgttaatggaggtgcaatggcaattgggcatcctctgggttcaacaggtgctcgatgtgttgcaactctgttgcatgaaatgaagaaacgtggcagggactgtcgatttggagttatatctatgtgcataggtactggaatgggggcagctgctgtttttgagagtggtgattgtgctgatgagctatgcaatgcccggaa

SEQ ID NO: 168390 - DNA, 278 bp, Glycine max
gtccaccggagttttcaccgataaggacaaggccgccgcacatttgaagggtggtgcgaagaaggttattatttctgcccccagtaaggatgcccccatgtttgttgttggtgttaacgagcacgagtacaagccagagcttgatattatttccaatgctagctgcacaaccaactgccttgctccacttgctaaggttattaatgacaggtttggcattgttgagggtttgatgaccatgttcattccatcactgccacccagaagactgttgatgg

SEQ ID NO: 168391 - DNA, 280 bp, Glycine max
taagaaaagagctttaagggtgattgctgagcatttgacagtagaagaagctgctgggctaaaagagggattccagcttatggatacaaacaacagaggcaagattaacattgatgaattacgagtagggttgcataaacttggtcatcaagttcccgaatcagatgtccaagctcttatggaagctggtgatgtagatggggatgggcacctagattatggagagtttgtagccatttctgttcatctgagaaagatgggaaatgatgagcatcttcgc

SEQ ID NO: 168392 - DNA, 278 bp, Glycine max
gaaaacttgggagggttttataggggcatctgttaccaccatcatctctgcatttatgcttgctaacatcatgggtcgctctcagtggctaacgtgtccaaggaaggatttgtcaactggttggcttcactgtgatcctggtccactgtttaagccagaatcttatcccttacctggatgtatttctcactggttctcttggaaagagatatcaatcctaccaattcaatggcattctttatgtctaggcttgtttgcttcaattattgcaccttttg

SEQ ID NO: 168393 - DNA, 277 bp, Glycine max
ctgcagagtatgggttggatgctccaacattaaatgcaactggtccttatggcaccctactgaaaggggatgttctatctgcaattaagtcaggaaaattgtctccaaaacctgcttcatctaaagaaaaggcattgtcatctcaaagtcatcaacaagttgcagcttcccaagagtcaaaatctgacttaaaaaagtcagatgcttatgaagattttcctaatagtcaaattcgcaaggtgatcgccaagagattattggactcaaaacaaaatac

SEQ ID NO: 168394 - DNA, 275 bp, Glycine max
cctcgagccgaatcggctcgagaacagagcaaagagagagtgtgcgacaagtgaaacaaaaaacagaacaacaatggcgacacttaaggttcctcagcctcttccccccgttgcagatgattgtgagcagctccgaaaagccttctcaggttggggaactaacgaggagctgattgtatcgatcttggctcataggaatgctgctcagaggaagcttatcagagaaacttatgcccagacctatggagaagatctcctcaaggccttggacaaag

SEQ ID NO: 168395 - DNA, 279 bp, Glycine max
cattttccctcactttctcgctccccaaacgcccctctctctcctccaatggccgaccagctcaccgacgaccagatcgccgagttcaaggaggccttcagcctcttcgacaaggacggcgatggttgcattactaccaaggaacttgggactgttatgaggtcacttggtcaaaacccaactgaggcagaactgcaggatatgataaacgaggttgatgctgatggcaacggaaccatcgatttcccagagttcctcaacctgatggctcgcaagatg

SEQ ID NO: 168396 - DNA, 275 bp, Glycine max
ttccatttgactcttgttctgaacgacttttcaagagaatcaaaccatggcagtgaaagtatacggtccccactgtgcttccaccaagcgggtgctgctttgtctggttgagaaggaagtcgaatttgaggttgtccctgttgatgtcactaagggggagcagaaggatcctgagtacctcaaactacagccatttggagttgttcctgtcatcaaagatggagattataccttatatgaatctcgtgctataatgaggtattatgcagaaaaat

SEQ ID NO: 168397 - DNA, 263 bp, Glycine max
gactgagcgaatcggctcgagagagaaggttgatgagattcgtgcgcttcttgggaaagtacgagggtgatccattgagaatagttggtgtaggagctggtgcttggggtagtgtgtttattgctatgctgcaggaggcttatggtagtttaagagaaaaagttctgataaggatatggagaaggccgggaagaatggttgacagggccacggctgagcacttgttcgaggtgatcaattcaagggaggatgtactgaggaga

SEQ ID NO: 168398 - DNA, 276 bp, Glycine max
tttcaagaagcatctgagtgtttactattttgtactatatttatatatagtcactcaagcttctaggatttctgcctgctgcatcaaaatgggaagcaacttgaggtttttgagtctttgcctcttggcattgattgcatcaactcatgctcaacttcagcttggtttttatgctaacagttgcccaaaagcagagcaaattgttttgaaatttgttcatgaccatatccacaatgctccatcactagcagctgcattaataagaatgcactttca

SEQ ID NO: 168399 - DNA, 273 bp, Glycine max
ccggtaaccgtgtgtttggtgcccttaagggagctctggatggggggttggatattcctcacagtgataagaggtttgctgggtttgataaggaaaagaaggagcttgatgctgaggttcatcgcaaatatgtttttggtggacatgttgctgcctatatgaagatcttggctgaagatgaaccagagaaataccagtcacacttcagtgaatacatcaagcgtgggatagaagctgatggtattgaggcactgtataagaaggttcatgccg

SEQ ID NO: 168400 - DNA, 280 bp, Glycine max
gtcatctctaacttggtggaagccagaaataacattcctgctccatttgacaacatcactacgctacagacactctttgccaaccaaggacttgatttgaaggacttggtcctgctctctggtcgtcacacaattggtatcgctcattgttcatcattatcaaaccgcttgttcaatttcactggcaagggtgatcaagacccttcactagacagtgaatatgctgcaaatctgaaagccttcaagtgcaaggacctcagtaaattgaacaccacaaaaa

SEQ ID NO: 168401 - DNA, 274 bp, Glycine max
cacaactactccttataaccaaaaccaacaacaactatggcaagttatcagaagcactacgatgatcagggtcgcaaggtcgacgagtatggcaatgttgagaggcaaactgacgaatatggcaacccggttcatgccactagtgtcacttatgtagccaccaaaagtgttggtggctacaatgatgacgctaataagcaacatgatattactggtgtctatcccgaaaaagacaccggtagacatcattttggtcgtggttacgacggtgaca

SEQ ID NO: 168402 - DNA, 273 bp, Glycine max
cgagaggcgttctatatattattgaattgacaatgaggcctgctcttgctttgcttcctcttctatttgctttcttgttagctgccactacagaatcaagaaaagatacaggggaatattggaaaatgatcatgaaagatcaggaaatgccagaaggacttcaaggtcttgtttcatttcaatctgaaaataaccctaagactcaagagcagcttggtaaaggttccaaaaaccattgtgaagagtctctagttacaaatacacaagttaata

SEQ ID NO: 168403 - DNA, 269 bp, Glycine max
aggaagtctcttcctacttgaagaaggttggttacaacccagacaagattccatttgtgcccatctctggtttcgagggtgacaacatgattgagaggtccaccaaccttgactggtacaagggaccaactctccttgaggctcttgaccaaatcaatgagcccaagaggccctcagacaagccactcaggcttccattgcaggatgtctacaaaattggtggtattggtaccgtgccagtgggacgtgttgagactggtgtcgtgaag

SEQ ID NO: 168404 - DNA, 275 bp, Glycine max
ctctgtgaatttcctcatatttctataagacacagaatatttaagaatggagttcaccaaaacaagttccctcctaatattcttgctagtgtttgtctcaagcttgatccatgctaaggcataccaaaatctatactgtggcagaggaaccagatgctatggaaagtacatcacatgtcctgctgaatgccctaacagtgaaacaaacaatcctaagactaaggtttgccaaatcgagtgcaacaaacctacttgcaaggcagtctgcagaagtc

SEQ ID NO: 168405 - DNA, 271 bp, Glycine max
gctggtacaaaatccggtgccttatggagaattcaggctgcaaggtctcatgcatagacctcaaaagtgctggaattgatcaatctgatgctgattccgtgctatcttttgatgattacaataaaccacttatggatttcatgtctgatttgcctgagaacgaacaggttatattggtggggcacagcgctggagggttgagcattactcaggcctgtcacaagtttgcaaacaagattcgtttagctgtttatgtggcagcaactatgct

SEQ ID NO: 168406 - DNA, 268 bp, Glycine max
ggatgatatccggtcattggaacgtgaccgatgtctgcaacgcgctgttaggcggcttcgccgccataacagccggctgctccgtcgttgagccatggacagccatcgtgtgtggttttgtcgcttcagtggttctgatagcgtgcaacacattagcagagaaggttaaactcgatgatcctttggaagcggcgcagttacacggtgggtgtggcgcgtggggggtgatattcacggcgctgttcgcgaaaacggagtatgtgagcca

SEQ ID NO: 168407 - DNA, 272 bp, Glycine max
aattaacctcactcaaactcgggatcacagaaaccaacaacagttcttgcactgaggtttcacgatgttgctggaacttgcacttggtttgttctgtgttagctttgtttctgcacttgcgtcccacaccaagtgcaaaatcaaaagcacttcgccacctcccaaaccctccaagcccaaagcctcgtcttcccttcattggccaccttcacctcttaaaagataaacttctccactatgcactcatcgatctctccaaaaagcatggcccc

SEQ ID NO: 168408 - DNA, 273 bp, Glycine max
gttgtttggagcgatccgagaaaaactctgtaaacatgttggtttaccaggacctccttacaggtgatgagcttctctctgactccttccgttacaaggaaattgagaatggaatgctgtgggaagttgaggggaagtgggttgttaaaggagcagttgatgtagacattggtgcaaacccttctgctgagggtggaggagaagatgagggagttgatgatgcagctgttaaggttgttgacattgttgacacattcagacttcaggagcaac

SEQ ID NO: 168409 - DNA, 269 bp, Glycine max
cttctccctcttatccacctcagcagtggtctacaccgtggcctcaatctacacttcacgagaagtcactttctccaaagtcatgaacgttgttcccaaagtatggaaaagactcatggtaacttttttatgcacctttgtggcgtttttcgcgtacaacgttatgacactcgttgttttcgttatatgggcacttgcaataggactaaggaatggtggggttgtggttttggttgtgttggggatgttgtatttcgcggggtttgtgt

SEQ ID NO: 168410 - DNA, 269 bp, Glycine max
gttttacattttttttttgttcctgagttccaatggctcttcaggctgcttccttggtttctgcttctttttctattgctaaagagggaaagtctggtgtatctctcagggacaccacaatgtttggtgtttcattgtcggatactctcaaatctgacttcagctctccctcatcgacttgcaaaagggaattccaacaaaaatttggccctttgagggttcagtcagtggcaacaacaactccaggagtcaccaaggcttcaccagaa

SEQ ID NO: 168411 - DNA, 272 bp, Glycine max
ctctagctccaattcaaccatggcttcgagactcacggtaacagccttggtgctgatagctttggcaacagtttctctccaaacctcagcttcatcagtgggtaaattcatcgacgaaaccatcacttcccacaagatcgtcattttttccaagacctattgcccgtactgtagaagggcaaaagctgttttcaaagagttgaaccaagttccacatgttgttgagctcgacgagagagaggatggttcaaagattcaggatatcatgatta

SEQ ID NO: 168412 - DNA, 270 bp, Glycine max
attatcttgggcgatggaaatcctaaagcaattttcaacaaggaagaggacattggaacctacaccatcagggctgtggatgaccctaggacattgaacaagattctctacctcaggccccctaagaacatttactcgttcaacgagcttgtggccttgtgggagaacaagattggcaagaccctcgaaaaaatttatgtaccagaggagaaggttctcaaggacatcgaagaggcacctcttccaatcaatgtggtattagcaatcaac

SEQ ID NO: 168413 - DNA, 265 bp, Glycine max
aaaggataatagcttttgacctagctaatagcacacaataatgggaagatccccatgctgcgatgagaatggccttaagaaaggtccctggactcccgaagaagatcagaaactagtccaacacattcagaaacatggccatggaagttggagagccctccctaagttagctggtctcaatagatgtggaaaaagttgtaggctaaggtggactaactatttaaggcctgatatcaagagggggaattttctcaagaagaggagc

SEQ ID NO: 168414 - DNA, 266 bp, Glycine max
tgccgctgttgttgttgctgcaccaccgaacaacttcccctgtaaatcgcgtttcgtttgtgcaaggttttaaaagatggctgatgctgaggacattcaacctcttgttgttgataatggaactggaatggtcaaggctggttttgcaggtgatgatgctcctagggccgtgttccccagcattattgggagaccacgccatactggtgtaatggttgggatgggtcagaaggatgcttacgtgggtgatgaagcccaatcaaaaa

SEQ ID NO: 168415 - DNA, 267 bp, Glycine max
atggaatctgacctccatcaagtaatcaaggcaaatgacgatcttactcctgagcaccatcagtttttcttgtaccaacttcttaggggcctgaaatatatacatacagcaaatgtgtttcatcgtgatttgaagccaaaaaacattcttgctaacgctgattgcaaactaaaaatatgtgattttgggcttgctcgagtttcatttaatgatgctccatcagctatattctggactgactatgttgcaactcggtggtaccgtgca

SEQ ID NO: 168416 - DNA, 266 bp, Glycine max
tgctttaaaccgatttcttcaggagaaacatggttctaagatggcctttttggatggcaatccccctgaaagactttgtatgccgatagttgatcatattcagtccttgggtggtgaagttcatctaaattcgcgcattcaaaaaattgagctaaatgatgatggaacggtgaagagcttcttactaaataatgggaaagtgatggaaggagatgcttatgtgtttgcaacacctgtggatattctgaagcttcttctaccagaca

SEQ ID NO: 168417 - DNA, 262 bp, Glycine max
gcccgatcaaacaataaggttgttattggtccagccactgttggaggcattcaagcaggtgcttttaaaattggtgacacagctggaacaattgacaatataattcagtgcaagctctacaggcctggatctgttggatttgtttctaaatctggtgggatgtccaatgaactctacaacactattgcccgtgtaactgatgggatttatgaaggcattgctattggaggagatgttttccctggttccacactttctgacc

SEQ ID NO: 168418 - DNA, 261 bp, Glycine max
atttgaagttgcttcctgtatgagatactgtagccgattattgcggaatatacctatgacacctgagtctgcattgctttaccttgagcttccttctactgtcttaatggctgatgcagttcaaccattgactgatgcagcaaagcagtatcttgccagtcgatacaaagatataacaaagttccaggaagaggttatgggcttgcctctagctggaatagaagcaatattgtctagtgacgaacttcaggttgcatcaga

SEQ ID NO: 168419 - DNA, 271 bp, Glycine max
tcaatttctaattagggtttcgcttagagtaaccaataaccatgggagtcttcacctttgtcgtccgcaaatccggcagcgaatggagcgccaagcaacattccggcgacatcgaggcctccgccgattccaccttcgatctccaacggaagctcgtgcaagccgctctcgccgttgattcctccggtggagttcagtcctctttctctcccgtgtctcctacctccgctgtgttccaggcgatagtgggtggtgcagtattcgttggagg

SEQ ID NO: 168420 - DNA, 271 bp, Glycine max
gggagaaggaccccattgacaatgagggctactggggaagtggctcagatttgcccacaatgagcactgtggagaagatcctaagcaatttgagctcaaaagtttctgtcatcaacattactcaactatcagagtatagaaaggatggtcatccttccatttttcgcaaattttgggagccccttcgcccggaacaattgtcaaatcctccatcttactctgattgcatacattggtgcttgcctggggtacctgatgtgtggaatgagtt

SEQ ID NO: 168421 - DNA, 271 bp, Glycine max
ggttctactgtttgagcttgatgctattcgaaaggcatgtgcatccctggaacccaattatcagcctcctgtgacttttgtggtggttcaaaagcgtcaccacacaaggctctttgctagcaaccatcatgataagagttctgttgacaagagtggcaacatattgcctggcactgttgttgactccaaaatctgccatcccaccgaatttgacttttatctctgcagccatgctggaatacagggtacaagccgtcctgctcactaccat

SEQ ID NO: 168422 - DNA, 265 bp, Glycine max
  unsure (1)..(265): unsure at all n locations
gtggtttcagtgagtgatcggtgttcacttgatccttcataagtcgtcatcatcatcatcatcatcaccgttgattgaagaagatgccgatcagaaacatcgccatcggaaggcctgaagaggctactcaccccgacacgttgaaggcggggttggctgagttcatctccaccttgatcttcgtgttcgccggttcaggttccggcatcgcctacaacaagctcaccgacaacggcgccgccactcncgccggcctcatctccgc

SEQ ID NO: 168423 - DNA, 263 bp, Glycine max
cacgatctcaacggagcacctctcttcaggtcgccatctagactgcaatcatggctgatggaccacagcatccatcagttgttcagaagctagctggacagtcttacctggtgtccaggctaagccccaactttaactctgggaattattcctcgactggttcttacttcaatggaggactgcactcttctgggttggctgttgtgtcgcctggatctccagttactgtgcatgctccagcagagaaaggagtgagtggattt

SEQ ID NO: 168424 - DNA, 264 bp, Glycine max
cttgcggctagggttttagcgcacttcttctagatttaaggaagacgggtaaggaaaaggttcacatcagtattgtggtcattggccatgtcgactctgggaaatccactaccactggtcacctgatttacaagcttggaggcattgacaagcgtgttattgagaggtttgagaaggaagctgctgagatgaacaagaggtctttcaagtatgcctgggtgctggacaaacttaaggctgagcgtgaaagaggaatcaccattg

SEQ ID NO: 168425 - DNA, 263 bp, Glycine max
agcggcacattaaggagattctcgggacgtgcgtctccgtcggatgcaccgttgatggaaaggatcccaaggacttgcagcaggagattaccgatggtgatgttgaggtccctctcgattaaggaggaaggctttgttactctctttctctctttttcttttgtctttcttcagatcgtttcgtgttctttttaatataaatttgggggaactatcgaacgttttgtttaaggttattttaccgctttggataatttagatga

SEQ ID NO: 168426 - DNA, 263 bp, Glycine max
acaccaaattaacaaagccttctttttcttgtgtgatctcacaagcccctaaaggccaccatgtcttccttcaagagcaaattccaagatgagttgattgccaatgctagttacattggcaccccaggaaagggtatccttgcggctgacgagtcaacagggacaattgggaagcgtttggcgagcatcaacgtggagaatgttgaaacaaacaggcgcattcttcgtgagctcctattcactgcccctggttgtcttgagcg

SEQ ID NO: 168427 - DNA, 261 bp, Glycine max
catgcttcagagttgcagaagtgtgtgtgagtttgagatgattaagaaaataaacgaaggaacttatggtgttgtctacaaggctagggataagaagactggagaactagtagcattgaagaaggtgaagatgaacatagagagggatggatttccaatgtcatccttgagagaaataaacattctcttgtcttttaatcatccctccattgtgaatgttaaagaagtagttgttgatgattttgatggtacttttatggt

SEQ ID NO: 168428 - DNA, 262 bp, Glycine max
cttagcagcaggcccattcagcggcggttcaatgaacccagctcgctcattcggcccagctgtggtcagtggagacttggctgctaactggatctactgggttggcccattgattggaggaggtttggctggcttgatttatggagacgtcttcattggttcctatgcccctgtcccagcctctgaaacctacccttgagcttcaacttcacttgtgtgttccttcaagtttcatctctgttcaccgtttcatgtcatgagc

SEQ ID NO: 168429 - DNA, 263 bp, Glycine max
gggaaccaaaccgaaaccctaaccctaacggagagatggcggacacttggcatcgatattcgggacggagaaggacagggtgaactgtccgttctacttcaagatcggcgcgtgcaggcacggcgaccggtgctcccggcttcacaccaagccgacaattagcccaacattggttctgtcgaacatgtaccagaggcccgacatgaacatgaacattatcaccaaccccgatcagccacaaccccaatcccttgaccccgaca

SEQ ID NO: 168430 - DNA, 257 bp, Glycine max
tattactcgtcttctccctgatgcagtaggaactacctgtggccaacgtctagagagggtatatcatactgaatattgtgacattctccgagttcctttcagaaccgaaaacggaattgttcgcaaatggatctcaacattcgaagtctggccatacctagagacttacactgaggatgttgcccttgaacttgccaaggagttgcaagccaagccagatctgatcgttggaaactacagtgatggaaacattgttg

SEQ ID NO: 168431 - DNA, 282 bp, Glycine max
cgtttgtaagagaaagaaaaaagaggcgcaagatgagtggtagggtttctgggaaggtgaagtggttcaacgatcagaaggggtttggattcataacccctgacgatggcagcgaggacatcttcgttcaccaatctcagatcaaatctgacggtttccgaagcctagctgaaggagagtccgttgagttcgctattgaatctgaatctgacggacgcgccaaggctgttgatgtcactggccccgacggcgccaggctccagggaaccagacgcggcggtg

SEQ ID NO: 168432 - DNA, 280 bp, Glycine max
gattatcctaagtctttgggaatagtgctgcaatggcttcaagtcaggaggaggtgacccttttgggagctactggaagcccatttgtgtgcagggttcatattgccctcaagttgaagggagttgaatacaaatatgtcgaagaaaatttgaggaacaagagtgaactgcttctcaaatccaacccagttcacaagaaggttccagtgtttattcacaatgagaagcccatagcagagtctcttgtgattgttgaatacattgatgagacatggaagaa

SEQ ID NO: 168433 - DNA, 273 bp, Glycine max
ctcgagccgtggtaatattgcaagcttgtggcaacaagctggtagaggtgggaggagagatagaccatctcttgctgtctatgttgcatttggtgggcctcttgatcaatacttcatgacaaatcccaagaaactctttgaaagaccattgaatgttgccatgttgattcccaaaacaagcaggttcttgaacaacatttggtctgcgcagtcatgaacacctttgagtgtgaactatgatgagcatattttggtcttgcttgagagtgtcat

SEQ ID NO: 168434 - DNA, 278 bp, Glycine max
gttggaaagaaaccctagcaagcggaacaatggcagacgttgaggtcgatgtggcggctgcagcagcagcagggcagccgaagaagagaacgttcaagaagttcagtttcaggggcgtggatctcgatgcgcttctggacatgtccacgatgaactcgtgaagatgttcagtgctcgcgcacgtagaaggttccagagaggcctcaccagaaagcccatggcctcgatcaagaagcttcgcaaagcgaaaagagaagctccaccaggtgagaagccag

SEQ ID NO: 168435 - DNA, 270 bp, Glycine max
atggcttctctggcgttgctacgtcgaaccacgctctcccactcgtccgtgcgtaacagaggcttctctgaggggcagagcagcaacagacaccgtctcgaccagattctagtagccaaccgcggtgaaatcgcttgcaggatcatgcagaccgcgcggaggctcggcattcaaaccgtcgccgtttacagcgacgccgacaaggactcgctccacgttgcgtccgccgacaaggccatccgaatcggaccgccaccgggccggctcagt

SEQ ID NO: 168436 - DNA, 278 bp, Glycine max
taatcaaacatggctagggttagtgctttgtttcactctttgctcttgatttcttcccttgtattggcttctcaaatccatgtttcctctgggaaactagtccctggactatcatggaattactatttgttgacatgtcccaagcttgagaggattataaggaagcatcttgaggatgtcttcgagaaggacagtggagtagctcctggcatacttcgactcttcttccatgactgctttcctaatggatgcgatgcgtctatattgttgaatggaga

SEQ ID NO: 168437 - DNA, 280 bp, Glycine max
aacctctcaagtccaacctacccctttttcttctcccaccaacttcaccgtcttcttcctcgatcatgtctcacttcaagggcaagtaccatgatgagcttattgtcaatgctgcttacattggcactcctggaaagggtattcttgctgctgatgagtcaacagggacaattggcaagcgtttggccagcatcagtgtagagaatgttgaatccaacaggcgtgctcttagggagctgcttttcaccgctcccggtgctcttaaatatctcagtggtgt

SEQ ID NO: 168438 - DNA, 279 bp, Glycine max
ctcgagccgctgcaaggaatgccatcgaagctggttttgatggggttgagatccatggggctcatggctacctgcttgagcaatttatgaaagataaagtgaatgaccgaacagacgaatatggtggatccttgagaaccgctgccgtttgctttggaagttgttgaagctgttgttaatgagataggggcggacagagttggaattaggctatcgccattcgcagaatattcagagtctggagactctaatccaaaagaattggggctttacatgatg

SEQ ID NO: 168439 - DNA, 282 bp, Glycine max
attcaattcttgctgccaaagccaaaacaaaactgagtcatttctttgtttaggagtttggttctgcaaaaagccaaaaagaagaagaagaatacatggaagcagagacctcaaacggtggtggtattggaggcctttacgtcaaagtatgaccgacgaccaaatggaactgctcaggcaacagatttctgtctacgccaccatctgtgaacagctcgttgagatgcacaaggccgtaactacccaacaggacctcgcagggctgaggctgggtaatttgta

SEQ ID NO: 168440 - DNA, 280 bp, Glycine max
cttttcacaacctcactacccaactaacactctttggcaatgttgcgacttgatgcaaatgaccttgtcttgcttgttggtgctcacacaattggtattgcccattgttcatcaatttcaacccgtctatacaatttcacaggcaaggtgacacagacccaacaatagacaatggatatgcaaaaaatctcaagaccttcaagtgtaagaacattaatgataactcacttattgagatggaccctggaagtcgtgatacatttgatcttggatattacaa

SEQ ID NO: 168441 - DNA, 279 bp, Glycine max
aagagactcaggcgctgctgcccttcagtccttcagcaatggtttacgtgaagtcacagaaatcaaaagcctacttcaagaggtatcaagtcaagttcaagagaagaagagagggaaaaaccgattaccgtgccaggattcggttgataatcaggacaagaacaaatataacaccccgaaatatcgctttgttgttcgtttcagcaacaaagacattgttgcacaaataatatctgctagcattgctggcgatattgttcttgctgcagcatatgcaca

SEQ ID NO: 168442 - DNA, 278 bp, Glycine max
gctcgactatggcaagggtcagatgatggtaactacaactgcaggcacatcttaaaggatcatacagctgaggtgcaagctgtcactgtccatgcaaccaataattactttgtgactgcttcacttgacggctcttggtgcttttatgaactttcttcagggacatgtctgactcaggtttatgacacttcaggttcttctgaagggtacacttctgcagcttttcatcctgatggtcttattcttggaaccggcaccacagaatctcttgtcaagat

SEQ ID NO: 168443 - DNA, 279 bp, Glycine max
gctgaccacaaatatgagctgctgtgggtaatacttattggactggtgtttgcgcttataattcaatcattggctgcgaatctcggcgtaaccactggcaaacacctttcagaattatgtaaagctgaatacccattattggtcaagtactgcttatggttattagctgagctggctgtcatagctgcagacatacctgaagtgattggcacggcatttgctttgaacatactcttccacatccctgtatgggcaggagttctaataactggctgcagc

SEQ ID NO: 168444 - DNA, 272 bp, Glycine max
cacctttgttcactcttcttctcttgcggctagggttttagcgcagttcttctagatttaaggaagatgggtaaggaaaaggttcacatcagtattgtggtcattggccatgtcgactctgggaaatccactaccactggtcactgatttacaagcttggaggcattgacaagcgtgttattgagaggtttgagaaggaagctgctgagatgaacaagaggtctttcaagtatgcctgggtgctggacaaacttaaggctgagcgtgaaaga

SEQ ID NO: 168445 - DNA, 276 bp, Glycine max
caaaatccttgggaacagtaattggttttgccatttcaaagctgggaaagaacattcaagtactttcaagttcctttgtcaataagcaagagcaatacactgtggaaggagtgcagaatcttggagacaaagcagtgatgtgtctgggctaaatttcagaactgcagtattttactgccataaagtccgtgaaacaacagctttcatggttccattggtggctggtgatggaaccaaaactcaggcacttgctgtttgccactcagatacttctgg

SEQ ID NO: 168446 - DNA, 277 bp, Glycine max
atctcaaatgctaagagtgagggtgcaaccattttgactggtgggtctcgcccagagcatctaaagaagggattctttgttgaaccaactgtcataactgatgtaactacctccatgcaaatttggagagaagaagtatttggacagttctctgtgtaaaaacatttagcactgaggaagaagctattgatctagcaaatgacactgtatatggcttgggttctgctgtaatatcaaatgatctagaaagatgtgagcgcattactaaggcttttaa

SEQ ID NO: 168447 - DNA, 275 bp, Glycine max
aaaccctaacactcctcttcctcttcgatcatcacctctccacaatgccgccgaagttcgacccctcccagatagtcgacgtcttcgtccgcgttaccggcggcgaagtcggcgcggcgagttccctggccccgaagatcggtccctcggtctctcccccaagaagatcggagaagacatcgccaaagaaaccgccaaggactggaagggcctccgcgtcaccgtcaagctcaccgttcagaatcgtcaggcgaaggtcacggtggtcccctccg

SEQ ID NO: 168448 - DNA, 275 bp, Glycine max
gagacagggagacaagacagagtagtacagattactaccaatggctaccaaggtttacattgtttattattctacgtatggacatgttgagaagctagctagagagatagaaaaaggggctgcttctgtggagggagtagaagcaaactgtggcaggtacctgacacattgcctgaagaagtccttgctaagttgggagcacctccaaagagtgatgttccaattattactcccaatgagcttcctgaggctgatggctttttgtttggttttcc

SEQ ID NO: 168449 - DNA, 277 bp, Glycine max
attttggagaattggcaaaaacagggagagctcagctgacctgacaaaaataacagcagcatacatggctcctataatcattgtcaggtcagctgctgttatttttgttggaattaacaattgccaaactgttcaaccaattgtagccgttgaaagaacagtgttctatcgagaaagagctgccggaatgtatgctcctttgccttatgccttagcacaggtcttttgtgaagtaccatatgtgtttttccaaactgtttattactcactcatagtg

SEQ ID NO: 168450 - DNA, 286 bp, Glycine max
gcagttacatacatgaggcgtgtttacaccaggaagagtatggctgaatatgatccacgcttggtagctccaacatgcttgtacctggcatcaaaagcagaagaaagcacagtgcaggctcggcttcttgtattttacattaaaaaattatacagtgatgacaagtatagatatgaaatcaaggacatacttgaaatggaaatgaagattttagaagctcttaattattacctggttgtataccatccataccgttcactatctccgttgcttcaggatgcaggtc

SEQ ID NO: 168451 - DNA, 274 bp, Glycine max
gagagagagagagagaaccgacaagcaaacgaaaagtaaatcaatcaatcgttggaatctctcaacttatcgcttcttcctgttttagatttgggggtttccgtttcaatggacgacggcgagctggatttctcgaaccatgaagtgttttcgagtccgaacatgggggagcttccgagcagcggttcaatggacagtttcttcgacgagcttctcaaggacacgcacgcgtgcacccacacccacacgtgcaaccctcccggccccgatttct

SEQ ID NO: 168452 - DNA, 276 bp, Glycine max
gtcgactcctgctaggaagaggctgatgagagacttcaagaggctgcaacaagacccgcctgcagggatcagtggtgccccccaggataacaacataatgctgtggaatgctgtcatatttggtcctgatgatactccatgggatggaggcacgttcaagttgacactccaatttactgaggactatccaaataaaccaccgactgtacgatttgtgtctcgcatgtttcatccaaatatttatgctgatggaagtatttgtttggatatattaca

SEQ ID NO: 168453 - DNA, 274 bp, Glycine max
cagagaattagtccatagcaatggcagagcaagacaaggtgatcctacacgggatgtgggccagcccttatgccaagagggtggaattcgcccttaattttaagggcataccctatgagtatgttgaagaagacttgagaaataagagtgatttgcttctaaagtacaaccctgttcacaagaaggttcctgtacttgttcataatggaaaggccattgctgaatccatggtgatccttgagtatattgatgaaacatggaaagatggtcctaa

SEQ ID NO: 168454 - DNA, 262 bp, Glycine max
tgaagaagtagtggaagataacaagccaccacttccctcgtttcgaaggttgctcgcactgaacattcccgagtggaagcaagcatgtttagggtgtttgaatgcggtgttgtttggtgcaattcagcctgtgtatgcatttgcaatggggtcaatgatatctgtttacttcctcccagaccataatgcccccaagaggaaaactatgatctattcactttgtttcctagggttggctgcgttctccttagtggttatatcc

SEQ ID NO: 168455 - DNA, 272 bp, Glycine max
tcaacattttacactcttttcttcttctcgttgttgcttcgctgttgaatcatggatcagaaggtcgatttcagcgctccccattccatgggaaccactatcatcggcgttacttacaacggcggtgtcgttctcggagccgactctcgaaccagcaccggagtgtatgttgccaaccgagcatcggacaaaatcactcagctcactgataatgtatacgtgtgtcgctctggatcggctgctgattctcagattgtctctgattatgtgcg

SEQ ID NO: 168456 - DNA, 276 bp, Glycine max
agaaaaagaagaaaaaaacacagcgtcctagatttcctcttctctgcttcggaagaaagagaaaacaaacaaaacaatggcgttcgcttctttcctcggcagagtcctcttcgcttctgtcttcatactctctgcttaccaacaatttaatgaatatggagttgatgggggacctgctacaaaagcactcagacctaagtttgatgcctttacacatcgggtgcattctcaagtgggctttcaaattccagagattaatctgaaatttttaattgc

SEQ ID NO: 168457 - DNA, 279 bp, Glycine max
ggaaaaggttcacatcagtattgtggtcattggccatgtcgactctgggaaatccactaccactggtcacctgatttacaagcttggaggcattgacaagcgtgttattgagaggtttgagaaggaagctgctgagatgaacaagagtctttcaagtatgcctgggtgctggacaaacttaaggctgagcgtgaaagaggaatcaccattgatattgctttgtggaagtttgaaacaacaaagtattattgcacagttattgatgcgcctggacatagg

SEQ ID NO: 168458 - DNA, 284 bp, Glycine max
ctcatcttgttttcaacgatgatattcaggggactgcatctgttgttcttgctggggttgtggcagccttgaagctcattggaggtactctggctgaccacacattcttgtttcttggtgctggagaggcaggaactggaatagcagactaatagctcttgagatgtcaaagcagacaaagacacctatagaggagactcgcaagaagatatggcttgtagactcaaagggtttgattgttggttcaagaaaggcttcacttcaacacttcaagcagccttggg

SEQ ID NO: 168459 - DNA, 271 bp, Glycine max
cgtcggcgacgacctcaaccaccgcaacctcaccgatctcgccaaaaaattcggtgacatcttcctcctccgcatggggcagcgtaatctcgtcgtggtttcttccccggagctcgccaaggaggttctccacacgcagggcgtggagttcggctcccgcactcgcaacgtcgtcttcgacatcttcaccggcaagggccaggacatggtcttcaccgtctacggcgagcactggcgcaaaatgcgcgcatcatgaccgtcccttcttcac

SEQ ID NO: 168460 - DNA, 271 bp, Glycine max
cgattttcgattctcttctctgcaactatgcctaaccctaaggtcttcttcgacatgaccatcggcggtcaacctgccggccgcatcgtgatggagctctatgccgacgtgactcccagcaccgccgagaacttccgcgcgctctgcaccggcgagaagggcgccgggcggagcggcaagcccctccactacaaaggctcgtccttccaccgcgtgatcccgaacttcatgtgccagggcggcgacttcaccgccggaaacggcaccggag

SEQ ID NO: 168461 - DNA, 268 bp, Glycine max
gctaggcacaatttttgttattcctatcttatcttaacattgtttcttggagttgattgaactggcagtgcaacctgaaattgagcatcccaggaaggcctatggatgggcagctagggatacatctggtgttctctccctttttggttctctagaaggaaaacaggggagaaagacgtgacatttaaagtgttgtattgtggagtatgccactcggaccttcacaagttgaaaaatgaatggagtgattccatctatccccttgtcc

SEQ ID NO: 168462 - DNA, 269 bp, Glycine max
ctttctcctaaaacatctccagtgggttcttcttcttctattacaacaacgtcgtccaagaccatgaccatggccatggccacgatcctgctcctgttcacggtcttcgcggtttcatcggccctagacatgtcgataatctcgtacgacaacgcccacgccgccacgtcgcgcaggagagcgagctgatgtccatgtacgagcagtggctagtaaagcacggcaaggtgtacaacgcgctcggagagaaggagaagaggttccagatc

SEQ ID NO: 168463 - DNA, 272 bp, Glycine max
atcggcgccaagtacaagctaggtcgcaagatcggaagcggatccttcggcgaaatctacctcgccactcatattgataccttcgagatcgtcgccgtcaagattgaaaacggtaaaacgaagcatccgcaattgctttatgaggccaagctctacaatattcttcaaggaggaagtggaatcccgagcataaaatggtgtggtgtagacggggaggataatgtgcttgttatggacttgctgggacctagtcttgaggatctttttgtcta

SEQ ID NO: 168464 - DNA, 273 bp, Glycine max
ctcaaattagcatggctgtcatggttgcattcttgaatttgatcatcatcttttcagtagtctctacaacaggcaagtcactgagcttaaactactatgcaaaaacatgccctaatgtggagttcattgttgccaaggcagtaaaggatgccactgctagggacaaaactgttccagcagcaattctgcgaatgcacttccatgattgtttcgttcgggggtgtgatgcctctgtgctgctaaattcacaaggaaacaacaaagcagaaaaag

SEQ ID NO: 168465 - DNA, 270 bp, Glycine max
tgaaattgcctctttcaagaagcatctgagtgcttattatttgtaatatatatagtcactcaagcttctaggatttgtgccagctacatgaaaatgggaagcaacttcaggtttttgagtctttgcctcttggcattgattgcatcaacccatgctcaacttcagcttggttttcatgccaagagttgcccaaacgctgagcaaatcgttttgaaatttgtccatgaccatatccacaatgctccatcactagcagctgcattgataaga

SEQ ID NO: 168466 - DNA, 268 bp, Glycine max
ctttacacccccctctctattttgcgttcattctgttttccagttgaagtctttccctagccaatggccactgatcgtttgacccgggttcacagtctccgtgagaggcttgatgaaaccctcactgccaacaggacgaaattttggcccttctgtcaaggatcgaagctaagggcaaggggatcctgcaacaccaccaggtcattgctgagtttgaggaaatccctgaggagaacaggcagaagcttactgatggtgcctttggaga

SEQ ID NO: 168467 - DNA, 265 bp, Glycine max
tcgaaaccctaagcactcgctcgggttcgtgtagtgccaaaccctagggctcattttccagatctattcagtttttctctcctctcttttccgatccaccgttggagatcgaagatggtgtccgacgccagcacgaagaaggccgcacagaagacggccgccgccgccgccaagagaggtggcaaagctgccgccgctgccgttatggccgccacctcttccaaagccgccgacaaggtcgccaacggaatcgccgatattcaga

SEQ ID NO: 168468 - DNA, 267 bp, Glycine max
ggatgatggacaagggggtgttggatgatgtgataagaaggcttctggaagggaaaggagggaaacaggtgcaactctctgagtcggagatccgtcaactctgcgtcaacgccagacaaatcttcctctctcagccattcttctcgacctccgtgctcccatccgcatctgcggtgatatacatggtcagtaccaggacttgctgaggctttttgaatatggtggctaccctcctgcggcaaactacttgtttctgggggattatgt

SEQ ID NO: 168469 - DNA, 264 bp, Glycine max
caactatgttttcgtgggtgtcatcagtgctactgttttcttccaaatcataatagttgagtacttgggaacctttgcaaacacaacacctctcaccctggcacagtggttcttttgcttgttggttggatttttcggcatgccaattgctgctcgcctaaagaagatccctgtttgaagcacctgaatggataaaaagcagtagttggttaccgttagttgttgcattgcttcaaggtccattatgcctttacattcactaac

SEQ ID NO: 168470 - DNA, 269 bp, Glycine max
cggtcgaggcatctgttccttctagtggacctaatgccaatcctttagatctctttccccagggccttccaaatgttgggtctggtgctgctggtgctggctctttagactttcttcgcaacagtcaacagttccaagccttacgcgctatggtacaggctaatccacaaatattgcagcctatgctacaagagcttggcaaacaaaatcctcatcttatgcgattgattcaagagcatcaagttgacttccttcgcctaattaatgaa

SEQ ID NO: 168471 - DNA, 270 bp, Glycine max
ctcgagccgtcttgcattgggaaaggctaaagaagaaattgatatgcaaattggcaaagatgaatatatacgtgagtcagatataagcaaacttgtgtatcttcaagctatagttaaagagacactaagattgtatccaccagcccctttttcatcacctcgtgaattcacagagaattgcatcctaggtggataccacatcaaaaagggaactcgacttatccataacttgtggaagatccacagggaccctagtgtttggtcagaccc

SEQ ID NO: 168472 - DNA, 269 bp, Glycine max
cgttgctctgcttcaaccttgcggaagaagaagacgcgccatggtgaagtactccagagaacccgacaatcccaccaagtcctgcaaggccagaggcgctgaccttagagtgcatttcaagaacactagggagactgcctttgccatcaggaagttgcccctggttaaagctacaagatacctggaggatgttttggcccacaaacaggccatccctttccgacgcttctgtggtggtgttgggaggacagcccaggctaagagcagac

SEQ ID NO: 168473 - DNA, 278 bp, Glycine max
cttaactccaaacgaagaaaaaagactgagagcaattgcatcaacaacaaattgaaaggatgtcgatcttcgagtacaacggaagcgccgtcgtggctatggtcggcaagaactgcttcgccattgccagcgaccgaagactcgcgttcagctccaaaccatagccacggatttccaacgcatttccaagattcacgacaagctcttcatcgctctctctggcctcgccaccgatgctcaaacattgtatcagcgtcttgttttccggcacaaactgt

SEQ ID NO: 168474 - DNA, 270 bp, Glycine max
acacgcctcttcaacaagccttgattcgttctgtgcaagtgctcttgaaaggtacaagaatggtgaagtctataaactttctccagcttctgtctctactagcctttgttccctcctgtcactgctaaaagaaaataggcggctacctctaacctcaattgtacgacggttcatgcaccagcagtcaagagcttgtccaatccatcgatgccaaggctgtggcactagagacccgcatggctgcttcgttgctcagactacatttccatg

SEQ ID NO: 168475 - DNA, 292 bp, Glycine max
cctccgtaaattattcatagcatatttcaaaccacactcaaaaggcttccctccctgacttggatttgattgatttcattacattgctacactatattctttttattggtgaattgctatttgctacactatattttaaggacaattatacatagactatatggggttgatggctgcgaaccaaactcaattgttgtctaagatggccatcggagatggacatggtgaagcatccccatattttgatggatggcaggcttatgatgaaaacccctttcatccaaagagaatc

SEQ ID NO: 168476 - DNA, 280 bp, Glycine max
gtgtactactccatgtatgggcatgttgagaaactagcagaagaaataaagaaaggggcttcctctgtggaaggtgttgaggccaagttatggcaggtacctgagacactgctggatgaggtgcttggtaagatgagtgcaccacccaagagtgacgtaccagtcattacccccaatgaactatccgaggctgatggctttgtattcggcttcccaacaaggtttggcatgatggctgctcagtttaaagcctttctagatgctactggaggctttggag

SEQ ID NO: 168477 - DNA, 281 bp, Glycine max
cgcaacaaaaagaaagaatcccaggcgaggagaaagatggaggggaaggagcaggatgtgtcgttgggagcgaacacgttccccgagagacagccaattgggacggcggcgcagagccaagacgacggcaaggactaccaggagccggcgccggcgccgctggttgacccgacggagtttacgtcatggtcgttttacagagcagggatagcagagtttgtggccacttttctgtttctctacatcactgtcttaaccgttatgggagtcgccgggctaag

SEQ ID NO: 168478 - DNA, 281 bp, Glycine max
ctgacacggggaggtagtgacaataaataacaataccgggctcattgagtctggtaattggaatgagtacaatctaaatcccttaacgaggatccattggagggcaagtctggtgccagcagccgcggtaattccagctccaatagcgtatatttaagttgttgcagttaaaaagctcgtagttggaccttgggttgggtcgatcggtccgcctccggtgtgcaccggtcggctcgtcacttctgccggcgatgcgctcctgtccttaactgccgggtcgt

SEQ ID NO: 168479 - DNA, 264 bp, Glycine max
gcaaaattctcttccgtttcaggattagcgtttcaccgttacagtgaaacatggcaaaaccaaagcgaatctctctgcgtatctttgcgctgctcctcttgatttccacctcttcgtttcaccttctccgcgcttccgatgacgccgatgatgatgcgatcttctatgattcgttcgacgaggattttgaagaccgttgggttgtgtctcagaaagatgagtacagtggtgtctggcaacatgccaagagtgagggacatgatg

SEQ ID NO: 168480 - DNA, 270 bp, Glycine max
gcagacaccaagcttctctccacgcccttcttgggtaatctgaagtgcagcgatggcggatggattgcactcgcggcatccatcagtagttcagaagttatctggacagtcttatttgttgtctaggcttgcccctactcactcaagaaactattccacaactggtagttacttcaatggaggcttgcagtcttcgggtttggttccagtcatggcacatgcaccggctgagaaaggagtgtctggacttctgttcgatttcatgatggg

SEQ ID NO: 168481 - DNA, 278 bp, Glycine max
cgaagagaaggccacgaaaaacagaaaacccagaaaaactctgaagaagagttcgttgctttctgcttcactgcgaagatgaacggaggcccatctggtttcacaaatgctcccgtcacaagggctttcatcatcacttcggcgcttttcacaatcttctttgggatccaaggccgtttcagcactctggggttgtcctatcaggatatttttggaaagcttcgcctttggacattgatcatttccatattttccttctcgtcaacaccagattgatg

SEQ ID NO: 168482 - DNA, 268 bp, Glycine max
catcaccttccgaaataaggggttcattagtcagcacaaatgtcctcatgataaccggtggacagtttctttcctatcttgttaacctcgcttttactggtgttcctggtacttggcgatggatgcttggtgtttctggtgtgcctgctgttgttcagtctgttctcatgctcttcctccctgaatcgccaagatggctttttgtcaatcctaggataaatgaagccgttgatgtgctttctaagatctttgacgttgctcgcttaga

SEQ ID NO: 168483 - DNA, 286 bp, Glycine max
catggctgcagatgggaacaacaacgatgtacccttacacaaattcaaagacagcaatccaaaccctggagagttcgatgcaaagggttacagcctcagcggaaaaatcatgctttcagcaataatccttcttttcttcgtcgtcgttttgatgttgtgccttcatatctacgcgcgctggtacctccggcgtgctcgccgccgccagctccggcgccaacgcgagctccgccgcacccagcttgtcttttacaacgacgacgccacccccgcagccgtgtcagtg

SEQ ID NO: 168484 - DNA, 286 bp, Glycine max
gttcgtttcactctcacaatggactccctctctctcttctgcaccggagcccttctcgccggcggcctctactggttcgtctgtgctctgggccccgccgagcagaagggcaaacgcgccaccgatctatccggcggctccatctccgccgagaaagtccaagacaactacaagcagtactggtccttcttccgccgccccaaggagatcgagaccgccgacaaagttcccgacttcgtcgacaccttctacaatctagtcaccgacatctacgagtgggctgggg

SEQ ID NO: 168485 - DNA, 286 bp, Glycine max
caaggattctacccgccgctcgatgggaattgcgcttcaaggcgtctcgtagggctaatccgcctcacgagggtcaccaacggcacgtgcctttcgcgggccgaggccccctactgctggtcggcaaacggacggcgggcgcacgcgtcgcttctagcccggattctgacttagaggcgttcagtcataatccaacgcacggtagcttcgcgccactggcctttcaaccaagcgcgatgaccaattgtgcgaatcaacggttcctctcgtactagttgaattacta

SEQ ID NO: 168486 - DNA, 282 bp, Glycine max
agcgaaggtttaatgtgaggctttggaaagcctttaccgactgttttaactgccttcctgtggcagcccttatagatgaaaaaatattgtgcatgcatggtggtctttcccctgaactcacaaacttggatgacatcaggaatctacctcgtcctactgcaattcccgacactggcttgctttgtgatttgctttggtctgatcctggtagggatgtgaagggttggggtatgaatgacagaggagtgtcctacacctttggccctgatatgtcgctgaatt

SEQ ID NO: 168487 - DNA, 283 bp, Glycine max
tggggccagtgaagaaggctatggaagatgcaggattacagaagagtcagattgatgagattgttcttgttggtggaagcacaaggattccaaaggtacaacagcttttgaaggactactttgatggaaaggagccaaacaagggtgtcaaccctgatgaagcagttgcctatggtgctgcagtgcaaggaagcattttgagtggagagggtggtgaagaaaccaaagacatccttctcctggatgtggctcccctcactctcggaattgaactgttggtgga

SEQ ID NO: 168488 - DNA, 281 bp, Glycine max
caaagtacgatgggattgtttgtgttcatggagatgggatcttggtcgagtaggttgtaaatggactgcttcagaggcaggactgggacactgcaattaagatgccccttggagtagttcctgcaggtacgggaaatggcatggcaaagtctcttcttgattcagttggtgatccttgtacagtacccaatgctgttcttgccatcatacgaggccgtaagcgaaaacttgatgtggccaccatcacacaaggggagaccagatttttcaggtgttgatgc

SEQ ID NO: 168489 - DNA, 279 bp, Glycine max
ctcacactcactgcagatctcaatccatggctaccattgttagcatcaaggcccgccagatctttgacagtcgtggcaatccaaccgtcgaggtggatttgacatgctccgatggtacttttgctagagctgctgttccaagtggtgcatccactgggatttatgaggcccttgaattgagagatggaggatctgactaccttggaaagggtgtatcaaaggctgttgacaatgtgaacaccattattgcccctgctttggttggcaaggaccaactca

SEQ ID NO: 168490 - DNA, 270 bp, Glycine max
catttctctcatcaaagtttcaacctttgataagattgaatcatggggaacgccctgagattcctctacagccattgctgcaagcccacagcagctggtgattctgaatcacttggcccacacggtgtttcctctgccaccgttggtgtttcaacacttgcccatgatctctttcactttgacatcacctcccaggtcccggaaggactcagcaagcatgttgtgtcttctaagaaggctcaggctaattggtatagagagttagtagtg

SEQ ID NO: 168491 - DNA, 259 bp, Glycine max
cgaccgagggttctggatcaatttgaccttaaagcttgggtctatggctcacaagattttgatgttgctgctcttacaaaagcgattcttaaggcacttcggtccttagcagcagaagaaaaagacttgaatctgctccaacttgaattgaagcaaagactgatgggacagaactttttgcttgtcgtagatgatgtttggcacgaacactattggagttgggaggcactataaattcccttcatttatggatcttcag

SEQ ID NO: 168492 - DNA, 278 bp, Glycine max
tccgaacgaaacaatcatggcagcgaacccacccgcgccttcagaatccgacccgaaccaaaacccgggttcggagtcctttccgtacttcgaagacatgaacgaactcgagacagtcttcaaccgcttcgacgccaacggcgacggcaagatctccgccgacgaactcgacagcgtcctccggtcgctcggatccggcgtctctcccgaggaactccgccgcttcatggaagacctcgacaccgaccgtgacggcttcatcagcctcacgagttcgc

SEQ ID NO: 168493 - DNA, 286 bp, Glycine max
gccaacggactctccggtggatggggaaccttggaggaggggctacccagctcatcatgccccttgtgttctccctcatccgcgacattggcgctaccaaattcaccgcttggaggattgcattctttgtccctgccatgttccaaatgctcacagcattctcaattctgatatttggtcaggacatgcctgatgggaacttccgccgcttgaagaagtcaggggaaaaagccaaagatgatttttcaagagtcttatatcacggtgttacaaacataggggatgg

SEQ ID NO: 168494 - DNA, 284 bp, Glycine max
ctcactgcaacggcgccggagatccgtcgctctcctcctccaccaccaccgcgatgggcgccaattccatgctcgccgagttctctcacgatctcgacgaccagatctcccagctcatgcagtgcaagccactctccgagcaacaggtccgaggtttatgtgagaaggctaaggagattttaacggatgaaagtaatgttcagcctgttaaaagccctgtgacaatttgtggcgatattcatgggcagtttcatgatcttgctgaactgtttcgattggaggga

SEQ ID NO: 168495 - DNA, 280 bp, Glycine max
ctgacggttatccattcttacttttatctcaggaatcattggatgcactaaacgagcttctaaaggaacgcatacctattaatcgtttcagacccaatatccttgttgaaggttgtgatccatattctgaggacttgtggacagagatcaagataagcaggttttcatttcttggtgtcaaactgtgctcccgttgtaaggtacctacaatcaatcaagagactgggatagctggatctgagccaactgagactcttatgaaaactaggctggcaaagtc

SEQ ID NO: 168496 - DNA, 280 bp, Glycine max
cgcaacaaaaagaaagaatcccaggcgaggagaaagatggaggggaaggagcaggatgtgtcgttgggagcgaacaagttccccgagagacagccaattgggacggcggcgcagagccaagacgacggcaaggactaccaggagccggcgccggcgccgctggttgacccgacggagtttacgtcatggtcgttttacagagcagggatagcagagtttgtggccacttttctgtttctctacatcactgtcttaaccgttatgggagtcccggggctaa

SEQ ID NO: 168497 - DNA, 279 bp, Glycine max
cagaaacctgctctcaagttcttgatctatggcagaacaggttggattgggggtttgctggggaagttgtgtgaaaagcaaggaattccctatgaatatggaaaaggacgcctggaggaccgatcatcacttgtggctgatattcagaatgtgaagccaacacacatttttaatgcagctggagtaactggcagacccaatgtcgattggtgtgaatctcataagacggaaaccattcgcaccaacgttgctgggactttaacattggcgatgtcagca

SEQ ID NO: 168498 - DNA, 277 bp, Glycine max
tgatgatggagatggattccatgtgtatgtgggtggtccttgtggccattgctggtgctcttttagtcctaagatctatgctcaagaatgtaaattggtggctctatgaatccaaattgggtgtgaaacagtactctttgcccccaggtgacatgggatggcccttcattggcaacatgtggtccttcctcagagctttcaagtccaaggaccctgattccttcatctcctcctttgtctccagatatggaagaactggaatgtacagaccttgatg

SEQ ID NO: 168499 - DNA, 275 bp, Glycine max
ctttcttttttcccgcagtcatgggcaaggtcaagatcggaatacacggatttggaagaattggccgtttggtggccagggtggctctgcagagagacgatgttgaactcgttgccgttaacgatcctttcattaccaccgattacatgacatacatgtttaaatacgacagtgttcacgggcactggaagcatcacgatgtcaccgttaaggatgagaagacccttctcttcggtgacaagccagtcactgtttttggacacagaaccctgaag

SEQ ID NO: 168500 - DNA, 285 bp, Glycine max
cgaccttgaacgcttcccatcttggtgagtaacacgaatctgaggaaaaaaaatgtcgattatgcaactttacgggcgcagaagagcgtggtgaagcggtcgaagaagtacttggaagaagcagtttacatgaagctcttcaaagatggaagctcccagctcatcgttcgccagagcctcaacaacttcgtcaagagccgaaagcgcgtttaccaatgggaggtaggcgacacgctcaagaagcttcgcgatcgcaagctctatcaaaccgctcttaactatcag

SEQ ID NO: 168501 - DNA, 279 bp, Glycine max
gttggaaagaaaccctagcaagcggaacaatggcagacgttgaggtcgatgtggcggctgcagcagcagcagggcagccgaagaagagaacgttcaagaagttcagtttcaggggcgtggatctcgatgcgcttctggacatgtccaccgatgaactcgtgaagatgttcagtgctcgcgcacgtagacaggttccagagaggcctcaccagaaagcccatggcctcgatcaagaagcttcgcaaagcgaaaagagaagctccaccaggtgagaaccag

SEQ ID NO: 168502 - DNA, 279 bp, Glycine max
gaagggtgattaccacaggtaccttgccgagttcaagactggggcagagaggaaagaggcagcagagagtactttgcttgcttacaaatctgctcaggatattgctcttgctgacttggcccccactcaccccattaggctgggacttgctctcaacttttctgtcttctattatgaaatccttaactcgccagatcgggcttgtaatcttgccaaacaggcatttgatgaggcaatttccgagcttgacacattgggtgaagagtcatcaaggatagt

SEQ ID NO: 168503 - DNA, 273 bp, Glycine max
tagaaactgaggacttagctagtagttagagatgcctgagttttgcgtgacaggtggtactgggttcatcgcatcttacctggtcaaggccttactagagaagggtcacacagtgaggaccaccgtgagaaacccaggggatgtggagaaggttggttttctgactgaactaagtggagccaaagagagactgaagattttgaaagcagatctattagtggaaggcagctttgatgacgcagtgagaggagttgatggtgtctttcattggcg

SEQ ID NO: 168504 - DNA, 277 bp, Glycine max
tcagtgagtgatcggtgttcacttgatccttcataagtcgtcatcatcatcatcatcatcaccgttgattgaagaagatgccgatcagaaacatcgccatcggaaggcctgaagaggctactcaccccgacacgttgaaggcggggttggctgagttcatctccaccttgatcttcgtgttcgccggttcaggttccggcatcgcctacaacaagctcaccgacaacggcgccgccactcccgccggcctcatctccgcttccatcgccatgctttc

SEQ ID NO: 168505 - DNA, 273 bp, Glycine max
gtgttagtggcagtagcactactcccttattgtgctctttgttctttatttcttccttactttttgcttcctgcacccatgcctcctcccaggcacctcctccaattgtggatggactttcatgggatttctataggacgagctgtcccatgcttgaagggatagtgagcaagcatctccagaaggtgttcaagaaggacaatggtcaagctcctgccttactcaggatcttcttccatgactgctttgttcagggttgcgatggtcgatatt

SEQ ID NO: 168506 - DNA, 276 bp, Glycine max
ctttctctctctcattctcttctccatcgcgcgtaagaaacacatacttagttgctactaatgggaactgttgaagctgcaaacaaggatgcaaatggaagtctcctagagaaaaatccttcagttgtttttgtgttaggtggcccaggaagtggaaagggtacccaatgtgcaaatattgtccaaaattttgggtatactcatctcagcgctggtgatcttctgcgagcagaaatcaaatctggttctgaaaatggtacaatgatcagaatatga

SEQ ID NO: 168507 - DNA, 276 bp, Glycine max
gaatggcacttcgttgcttggtgatgtccctttctgttctcttcactcttggtcttgcgagagaaagccatgccagagacgaagatttttggcatgctgtttggccaaacactcccattccaagttcattgcgagatcttctaaagcctggccctgcaagtgttgaaatcgatgatcaccctatgcaaattgaagaaacacagtacccgaaaaccttcctctataaagaagaccttcatccaggcaaaacaatgatagtacaattagcaagcctcc

SEQ ID NO: 168508 - DNA, 271 bp, Glycine max
ctcacacactcattcggtgctccgaatctcagattctagggttagggttcccaatttctccaccgatcagaaaatgagttcaactggtggttctaccaagggcggaaggggcaagcccaaagcctccaaatccgtttcaagatcgcagaaagctggtctccaattccccgttggaagaatcgctcgattccttaaggctgggaaatacgccgagcgtgttggtgctggtgctcctgtgtacctctctgcagtgctcgaatactcgctgctg

SEQ ID NO: 168509 - DNA, 259 bp, Glycine max
gttttgaacatgctcattctctgctggcaaatctatccttgttttgggaggagctggtggagttggaaactatgttattcagctagctaaacaagtttataaggcgtctaagatagcagcaactgctagcaccggcaaacttgaacttttaagggagttgggcgttgacttgcctattgattacacaaaggagaacgtcgaagaccttccagaaaaatacgatctagtgtatgatgtagtagggcaaggtgatagagca

SEQ ID NO: 168510 - DNA, 274 bp, Glycine max
gaaaaagcaaaaacactgaatacaccaaaaatggccaaaagcaaaaactgtcatgctttgcctcttctccttgccctgatcctcttcttcactcttcttggaacctctcacgcaggtggcatagccatctactgggggcaaaatggtaacgagggcaccctctcagaagcatgtgcaacaggcaaatacacccacataaacatagcctttctcaacaaattcggcaatggccaaaccccagaaatgaacctggctggtcactgaaccccgcaac

SEQ ID NO: 168511 - DNA, 258 bp, Glycine max
gcgaaatttgcctcttgcaggagagaaatgattatagactaaagaggatgagaatttttgggggctatgatccttgttattccaattatgcagaagaatacttcaatagaaaagatgttcagtcatcttttcatgcagatactaaaagagacactaacgtagcatggaaggtgtgcaagtggccttaagatttggatttacagtggagatgcagatggaagaataccggtgatagggacacgatattgcgttgaggct

SEQ ID NO: 168512 - DNA, 162 bp, Glycine max
cgtttcttcctcttactcagtagtgcgattttcgattcgcttctctgcaactatgcctaagcctaaggacttcttcgacatgaccatcgcgggtcaacctgccggccgcatcgtgatcgagctctatgtcgacgtgactcccatcaccgctgagaacttccg

SEQ ID NO: 168513 - DNA, 275 bp, Glycine max
ctgcactaacactatagtgcttaccgagtcaactctgatccccatgatatcatggcggaagtttacaagaatgggccagttgaagttgcatttaccgtttatgaggattttgcttactacaaatcaggagtttacaaacacatcactggttatgaactaggtggtcatgcagtaaagctaattgggtggggaacaactgatgatggggaggactattggcttcttgcaaatcagtggaacagagaatggggagatgatggttactcaagatccga

SEQ ID NO: 168514 - DNA, 269 bp, Glycine max
ggcctaactggtgcaggtggagactttggttctggtttgacccaattgatcttcttttcaacctcaaggttttctacttccactggtctctcccttatgggtgtcatgattgtgtgttgcactcttcctgtgactcttgttcacttccctcagtggggtagcatgttcctccctccttcaaaggatgtcaacaagtccactgaggaatactattacaccgctgagtggaacgaggaagagaagctaaaagggttgcaccgaatagtctc

SEQ ID NO: 168515 - DNA, 268 bp, Glycine max
cctttgttcactcttcttctcttgcggctagggttttagcgcagttcttctagatttaaggaagatgggtaaggaaaaggttcacatcagtattgtggtcattggccatgtcgactctgggaaatccactaccactggtcacctgacttacaagcttggaggcattgacaagcgtgttattgagaggtttgagaaggaagctgctgagatgaacaagaggtctttcaagtatgcctgggtgctggacaaacttaaggcgagcgtgaaa

SEQ ID NO: 168516 - DNA, 262 bp, Glycine max
ggccgcgtcagaaggtatattttgagtccgaggatgtgtatgcttgtattgtcacatgtggaggtctttgtcctggtgtcaatacagtgatcacggaaatagtttgtgggttataccatatgtatggggtgcacaaagtactgggaatagagggagggtatagaggtttttattcttgcaatactattccattgacgccaaaggttgtgaatgacatccacaaacgtggtggaaccatccttggtcactctcaaggagagga

SEQ ID NO: 168517 - DNA, 158 bp, Glycine max
gcagatggtattatagagaaaacattcttgtggggtaggtactctatggaaatgtccgctgtcatttacaaggactgggttttcactgatcaagcattacctaatgatcttgtaaagagaggagttgctgttaaggacccatctgctccccatggagt

SEQ ID NO: 168518 - DNA, 179 bp, Glycine max
gcaaagaaagaaagaaagaaaaccctagcttaccttttcaactttcaagatgcaaatcttcgttaagacactcactggtaagacaatcacccttgaggtggagagttcagataccatagataatgtaaagtccaagattcaagacaaggaagggatcccaccagaccagcaacgtctca

SEQ ID NO: 168519 - DNA, 206 bp, Glycine max
attccctgcaattaacataagcataacccctttccaacctttctcctcttcagatcggatcagatcagatccaccgccatggatttcatgaaggtcttcgatcaaaccgttcgagaaataaagagagaggtgaatctgaaggtgctcaagattccggaaatcgaacagaaggtgctggatgctactgataatgaaccttggggtcc

SEQ ID NO: 168520 - DNA, 196 bp, Glycine max
taggaggaccctcagtatttgagacagcccacggaacaagcgcttggggacttcttgagaaaaatcctgaatattttagtctcttcaatgaggctatggcaagtgattcccgaatagtagacttggcactcaaaaattgcacttcagtttttgaggggctagattccatggtggatgttggtggtggaactggaac

SEQ ID NO: 168521 - DNA, 290 bp, Glycine max
gcttcttcgagtttcacagccaagtcgtaaaagggtttcaagggatggaaaacatgcagagcttctcgcaattgggtgatgaactccgtgggcactcaaaagcatcggaggatcacaagtggttaatggttgcctcgaaactggccgaacagacaagattgaagggggagcgtgtgaacaaccttgatctttcaaagggacccattgaaacaaggtcaagggataaatttgggttccaggaagagaacaaatttgattctcttaacttgagcatgttgaacctggactct

SEQ ID NO: 168522 - DNA, 156 bp, Glycine max
tgaaattatacggtgaattgagaagagttgaacatgttgatcattctcgcaaatcagctgaacaggctgtgaaggccatcaaagcagctgaggaaggaagaacagttgaggagtatgattaccttccatacttctattcccgttcatttgatctgt

SEQ ID NO: 168523 - DNA, 154 bp, Glycine max
cacttcgtccaggacgtcgtcctctcatccgacggtcagttcgcactctccggctcctgggacggcgagctccgcctctgggacctcgcggctggcacctctgaccgccgcttcgttggccacaccaaggacgtgctctccgtggcgttctcca

SEQ ID NO: 168524 - DNA, 181 bp, Glycine max
gccgcagcagcaagtgatcgaagcgaaaagagagtaatcagcagagaaattcatcgtcgtagttatgggtaaagttcacggatcacttgcacgtgccggtaaggttagaggccaaaccccaaaagtggccaagcaggataagaagaagaagccacgtggccgcgctcacaagaggatgcag

SEQ ID NO: 168525 - DNA, 288 bp, Glycine max
aaacgcctcttcaacaacccttgttttgttctgtgcaagtgatcttgaaaggaacaacaatggtgaagtctataaactttctcctgcttctgtctctactagcctttgttccctcctgtcactgcaaaaagaaaataggaggttacctctaccctcaattttacgacggttcatgccccagagctcaagagattgtccaatccatcgttgccaaggctgtggcaaaagaaccccgcatggctgcttcgttgctcagactacatttccatgattgtcttgtcaagggct

SEQ ID NO: 168526 - DNA, 206 bp, Glycine max
tcgacgcccttccttcgtcaacacccctttttgctgatggcgcaaattctgctccatgggactcttcatgccactatctatgaagtcgataagctcaaaattggtggaggcaactttttaaccaagatcgtacaaaacatcgaggagactgttggtattggaaaaggtgtcactaaactatatgcaaccattgatctagagaaggc

SEQ ID NO: 168527 - DNA, 177 bp, Glycine max
ttgttcgtttcactctcacaatggactccctctctctcttctgcaccggagcccttctcgccggcggcctctactggttcgtctgtgttctgggccccgccgagcagaagggcaaacgcgccaccgatctatccggcggctccatctccgccgagaaagtccaagacaactacaagc

SEQ ID NO: 168528 - DNA, 201 bp, Glycine max
cagttgaaagaaagaaaggaaggatgggagtgacaccgaaaattgctccttcgatgctctcttccgacttcgccaatttggcttccgaggctcagcgcatgctccacttcggcgccgattggctccacatggacatcatggatgggcattttgtccccaatttaactattggcgctccagttattgaaagtttgagaaagc

SEQ ID NO: 168529 - DNA, 175 bp, Glycine max
ctcagcttgaattgtggaaagagaagggttctgggaagtatgagaagaaggtgtatgtgttgcccaagcaccttgacgagaaagtggcttctctccaccttggccagcttggagctaggctcaccaagctttccaaagaccaagctgattacatcagtgtgcctgttgagggtcc

SEQ ID NO: 168530 - DNA, 152 bp, Glycine max
aaacaagatacttgttggcaacaaggctgatatggatgaaagtaaaagcggtgtacctacctccaaagggcacagcattgctgatgtctctggtatcaagttctttgaaactagtgcaaaaaccaacatgaatgtggaagaggttttctttt

SEQ ID NO: 168531 - DNA, 154 bp, Glycine max
tcgagtttcacagcgaagtcgtaggagggtttcaaaagatggagaacatgcagagcttctggcaattgggcgatgaactccgtggacactcaaaagcatcggaggatcacaaatggttaatggttgcttcgaaattggcggaacagacaagatt

SEQ ID NO: 168532 - DNA, 153 bp, Glycine max
  unsure (1)..(153): unsure at all n locations
atattttgttgcgacctatggcctcagagncagaagctgctcttgctgccactccctctgatggtcccaccgtatttgacaagatcatcaataaggaaattccttctactgtggtctatgaggatgataaggtccttgcctttagggacatag

SEQ ID NO: 168533 - DNA, 281 bp, Glycine max
gttgtttcccttcatctattttttcttcgcccccttttgtgtttctttttttggttgtttgttctttcttctcgttcgtcgctttgtgatctctctctgcaaccatgtccgccgagaaagagagagagacccaggtttacttggccaagcttgccgagcaggccgagagatacgaagaaatggttgagtgtatgaagaaagtagcaaaacttgatcttgatctaactgtggaagaaaggaacctcctctcagtgggatacaaaaatgtgattggtgcacga

SEQ ID NO: 168534 - DNA, 288 bp, Glycine max
agcagcttgaactcatttcaaatcgcagcctcttatggaccaactatggattacgttcacttggcaaaacaagttccttgtacatgaagcacaacacagagcatgaccctccatactggagaggtcctgtttggataaacatgaattacagaattctttcagcactccaccattactccaaagagaatgggccatatcaggagaaagctaaagccatctacaaagaattgagaagcaatttaattagaaatatagtgcgcaattatcgacagacgggatttttgtggg

SEQ ID NO: 168535 - DNA, 286 bp, Glycine max
aaagaaagaaagaaacaaagatcgttcattgctttgtagtcagatcagatcatcaaaaatggttttgtcttggtcaagaaggaacgttttccgccgtgccaagaaggagaagtcacaaactcaattggaagtggaggttgtgattcccaaccactttcactgcccggtgagtctggagctgatgacagacccagtgactttatcaaccggcatcacctacgaccgtgtgagcattgagaagtggatcgagggagggaacagaacctgccccgtcaccaaccaggtg

SEQ ID NO: 168536 - DNA, 197 bp, Glycine max
cttgtatgtcacaattggttagacgaagactgtgtaaagtttttaaggaattgccacaaagctttgccacaacatgggaaggtgattgttatagactatataattccagaagttccggattcaagcaaaatttctatgcaaacttgtgttgctgatagtctcatgtttttagtaacaagtggaaaggaaagaactga

SEQ ID NO: 168537 - DNA, 173 bp, Glycine max
atcaagagggaaatcaaaatattacagaatctttgtggagggcctaatattgtacagttgcttgacattgttagagaccaacagtcgaagaccccaagtcttatatttgaatatgtcaataacactgattttaaagtgctctatcctacattgtcagactacgaaatacgata

SEQ ID NO: 168538 - DNA, 198 bp, Glycine max
cttgtgtcaatgggtcaccaagcttgtggggcattagagctttggacatacccagagtggctcagagacctcgtaccacaaaacatagatggcacagataggcctgatcatgtggatctagctgctcttgaaatttatagagatagagagaggagtgtggctagatacaaccaattcaggagggcattactgttgata

SEQ ID NO: 168539 - DNA, 161 bp, Glycine max
atttgcttcttcgagtttcacagccaagtcgtaaaagggtttcaagggatggaaaacatgcagagcttctggcaattgggtgatgaactccgtgggcactcaaaagcatcggaggatcacaagtggttaatggttgcctcgaaactggccgaacagacaag

SEQ ID NO: 168540 - DNA, 288 bp, Glycine max
ccgaaccctacttaggcatcttcaacacatggtcgggcaacgactgtcgccggagctggtacggcgttgcctgcgaccccaccaccggccacgtcaccgacgtcaacctccgcggcgagtcccaagacccaatgttccagaagcttggccgctccggctacatgaccgggaaaatatcgccggagatttgcaaccttagcaacctcacaaccctcatcgtcgccgactggaaggccgtctccggcgagatccccgcttgcgttgcctcactctacactctccaaatcc

SEQ ID NO: 168541 - DNA, 152 bp, Glycine max
gctaaagatgttgaggttcaagagcaaggaggagagtactctgccaaagactaccatgaccctcctccagcacctttgttcgacccagaggagctcacacagtggtccttctatagagccctcatcgctgagttcatagcaacccttctctt

SEQ ID NO: 168542 - DNA, 192 bp, Glycine max
ctttgcacgtcaagcgtttttgacagtttcaggtcagcttcaagtcgagtcttatgcttgtgctctgagtagtgtgtatacctttggccccacatttcgcgcagagaattctcacacttccaggcatttggccgagttttggatggttgaacctgagattgcttttgcagagttgaaggatgatatgaactg

SEQ ID NO: 168543 - DNA, 200 bp, Glycine max
cagcgactccgtctcctcctctccactctccgaccacttccacgacgcgccgccccctgtccgcttcatgtgcagcttcggcggcaagatcctctcccgcccccacgacaaccagctccgctacgtcggcggcgacacccgcatcgtcgccgtctcccgctctatcactttctccgcccttattcttaaactctccaaac

SEQ ID NO: 168544 - DNA, 269 bp, Glycine max
gaagaaaccaacacttgggggtgtctcagatgagaggaaatcagaatcaacttctagtgtagttaatgcatcagaacttccacctcatctccttcttgaaatgccagctttgtcaccgacaatgaaccaaggaaacattgctaaatggaggaaacaagagggagacaagattgaagtgggtgatatattatgtgagatagagacagacaaagctacacttgaatttgagagtcttgaagaggggtacctggctaagatacttgctccag

SEQ ID NO: 168545 - DNA, 268 bp, Glycine max
ccgaaagcgccttcttgagatgggctataagaatcctgtcctcttgcttcatccacttggaggctacaccaaagctgatgatgtcccacttgattggcgaatgaagcaacatgagaaggtacttgaggatggtgttcttgatccagagacaactgtggtatccatattcccatctcccatgcactatgctggacccacggaggtgcagtggcatgcaaaggctaggatcaatgcaggggctaacttctatatcgttggtcgtgacccc

SEQ ID NO: 168546 - DNA, 213 bp, Glycine max
ctcgagctcgagcgtgcgtgggagggtccgaagttggagatagtgattctggttctgttctgtacttctttctactcacaacaacatcagaatcagaaacaacaatggccaacactaacttggaagatgttccctctctggatctcatgactgagctccttcgtcgtctcaagtgctcttccaaacctgacaagcgtcttattctcattggcc

SEQ ID NO: 168547 - DNA, 269 bp, Glycine max
cttgttcgtccggttgttcccatcttctctctcgtaccaatcaaatcacacttttgtgttgtgttgggaaaccctaaaccccgttttcggtgagatcgagatcgatcgaacatggatgaggagtacgatgtgatcgtgttgggcacgggtctcaaggagtgcattctcagcggtcttctctccgtcgatggcctcaaggttctgcatatggataggaacgactattacggaggagaatccacttcgctcaatcttattcagctttggaa

SEQ ID NO: 168548 - DNA, 269 bp, Glycine max
cgagattcccccaaaacccgtttgcgttgttgtttgcgaagaaatggcgactaagaggagcgtgggaacgttgaaggagggtgatttgaaagggaagagggtgttcgtgagggtcgatctgaacgtgcctttggatgacaaccttaacatcaccgatgacactagagtccgtgctgctgttcccaccatcaagtacttaactggtcatggagccaaagtgatcctttctagccacttgggacgtcctaaaggtgtaacacctaaataca

SEQ ID NO: 168549 - DNA, 173 bp, Glycine max
gaaaaatgtccgaaaacggagaagagaaattactcgctgtggcgcggcacatagccaaaacgctgggccacaacaacaccatgtctgatgacatattccaaatactatcgaacttcgatggaagattctcgagagagaatctttctgagaagggcgcagatgtggatcccaga

SEQ ID NO: 168550 - DNA, 267 bp, Glycine max
gaagcattacaaccataaggtggatgcctatagctttgctatagtgttgtgggaactcgtccataataagttaccttttgaaggcatgtctaatttacaggctgcatatgcagcggcatttaagaatacaaggccaagtgctgatgagcttcctgaagatttagctctgattgtgacctcttgttggaaagaggatccaaatgatcgacccaattttagtcagataatagagatgctgcttcgatatctaaccaccatttcaccgtc

SEQ ID NO: 168551 - DNA, 244 bp, Glycine max
gtttcagtgagtgatcggtgttcacttgatccttcataagtcgtcatcatcatcatcatcatcaccgttgattgaagaagatgccgatcagaaacatcgccatcggaaggcctgaagaggctactcaccccgacacgttgaaggcggggttggctgagttcatctccaccttgatcttcgtgttcgccggttcaggttccggcatcgcctacaacaagctcaccgacaacggcgcgccactccc

SEQ ID NO: 168552 - DNA, 268 bp, Glycine max
tcaaagctgcttgaccggactgttttgtccttgtgtattattcgggcgcaatgtagaaagattgaaggaagacactccttggactggaccatgcatttgtcatgccatttgtattgaaggtggcatttctctggcaatagcaactgcagctgcaacttccatctttcctgctattaacctggggactgtatgtctcattgttgagggtttattgtttacatggtggatgtgtggcattcacactggtcaagtgcgccaatccttacag

SEQ ID NO: 168553 - DNA, 172 bp, Glycine max
tctccatctaatagtgttaatttgtctttctctatctctatcggtcatgggtgcttttgcttttgatgaggaaaactcctccaccgtggctccggcaacactctacaaagctctgacaaaagatgctgacactatcatcccaaagattattggggccatccaaactattgaa

SEQ ID NO: 168554 - DNA, 263 bp, Glycine max
atagtgttaatctgtctttctctatctctatcggtcatgggtgcttttgcttttgatgaggaaaactcctccaccgtggctccggcaacactctacaaagctctgacaaaagatgctgacactatcatcccaaagattattggggccatccaaactattgaaatcgttgaaggaaatggaggacccggaaccgtcaagaagataacagctagtgaaggtgaccaaaccagtttcgtgctgcaaaaagtggatgcaattgacga

SEQ ID NO: 168555 - DNA, 260 bp, Glycine max
cacaacaccaccattcttccattctctctctttcttctacactattcattcaccccatgccggtcaacgtgaggtgctgaaggtcaatcgtggtctttcgaaatggggaacgggagcagaagctactcggcgaaccggagcgactacaagcttctagaagaagtcggttacagcgccacggcaccgtctaccgtgcaatctacctcccctacaacgaggaggtcgccgtcaagtgcatggatctggatcgctgcaatata

SEQ ID NO: 168556 - DNA, 239 bp, Glycine max
gcaccttcgtaggacccttatctctctctctctcccgaattattgttcgttcgacccttttacttagtattccctgtttccggtattcgctccctttttttctgcattctggttttacttagatctctgtcccgcaccagatctggtgcagggtgagagggttgggttcattaattgtgtatcaatcttccttctgagcggtaggcgtggggataccagagtcttttcgggaagcaaga

SEQ ID NO: 168557 - DNA, 259 bp, Glycine max
ccataatctctcttctcttcttctctttctatctgcaatacaaaaatgtctcacttcttgacgttcgggtcccccagacatttccgacacttactctcttctcgttctcaacatcaccttccgtaccaccgcctacgacctattccctctcttcgacaagtacgggaaggtcgtcgacatcttcatccccaaggatcgaacaacgggtgagtcaaggggttttccattcgtgcgttacaagtatgctgatgaggctcag

SEQ ID NO: 168558 - DNA, 267 bp, Glycine max
ctcattaattgcaagaatggcacttcgttgcttggtgatgtccctttctgttctcttcactcttggtcttgcgagagaaagccatgccagagacgaagatttttggcatgctgtttggccaaacactcccattccaagttcattgcgagatcttctaaagcctggccctgcaagtgttgaaatcgatgatcaccctatgcaaattgaagaaacacagtacccgaaaaccttcttctataaagaagaccttcatccaggcaaaacaat

SEQ ID NO: 168559 - DNA, 266 bp, Glycine max
agaatatgagcagcagtgcagggaagttggtgtgtgtcaccggtgctgccggttatattgcttcatggattgtcaagttcctacttgaacgtggttacactgtcagggccagtgttcgaaacccaaatgatcacacgaaggtagaacatttgctcaaaacttgaaggtgcaaaggagagactgcacctttttaaggcagatcttttgggtgaaaattcttttgactccattgttgagggctgtgatggcgtctttcatactgcttc

SEQ ID NO: 168560 - DNA, 261 bp, Glycine max
ctccaacgtttggaactctcacccaaaaaactacggtcctggttctcgcacttgccgtgtgtgtgggaatccacatcgactgatcaggaagtatggccttatgtgctgcaggcagtgcttccgtagcaatgccaaggaaattggcttcatcaagtatcgctaaaagagcagttgtcaactacggaccaatattgtgttctggcactaggatgttttgaggatgttatgtttgaagaaacttgagactttcttttttcatct

SEQ ID NO: 168561 - DNA, 265 bp, Glycine max
atttcttcagcacttatagtgtggtgagagagaaattaaggaagagctagcttaattgagtgctgctaattctatggctacccttgttgctccaaaccaaaaatctccggttgaagacgttgaggctctacataaggctttcaaaggatgggggaccgatgagaaaaccgttattgcaatactgggtcatagaaatgttcatcagaggcaacaaatcagaaaggtttatgaggaaatttaccaagaggacctcattaaacgcctg

SEQ ID NO: 168562 - DNA, 261 bp, Glycine max
ctcggagccgctattatccccagacgccaccgccgcagcaccagaagaagaagaagagtgatgcctgagtacgacctaactccgcggatggcgccgaatctcgacaggcaccttgtgttccctctcctggagttcctgcaggagcggcagctctacgacgacgaccacatcctgaaggcgaagatcgaccttctcaacaacaccaacatggttgactacgctatggacatccacaagagcctctaccacaccgaggacgtc

SEQ ID NO: 168563 - DNA, 262 bp, Glycine max
ccataacgaggatgtttttcagccgcagaaaggtaatgttatattcgcatgcactttagatggttggcgatttgggattcgtgagttcgcggagatttatgcttctaagcttggggcgagtgtgaatgccttgctgagggcgttgtggggacagacgtattataaccctaagacgagagatgattgttgggaagaaaggggttggggggaataagaagcctatgtttgttcagtttgtgttggagcccttgtggcaggtgta

SEQ ID NO: 168564 - DNA, 144 bp, Glycine max
gttgattttgtttcatagcttgttggttatgctgttgtggagttacttctctgttgtttttaccgatccgggcagtgtccctccaaactggaagcctatgattgatgaggaaagaggagaggctgatccgttggttgggacaga

SEQ ID NO: 168565 - DNA, 143 bp, Glycine max
ttcatgttttgccttcaacaaattgcatgtatattctctattgttgccatgattgtgggaagcagtgaaattcaagaggcttctcagctgctgtcttgtttggctgactttgtgtactgcacggtctgtgcatgcatgcaggt

SEQ ID NO: 168566 - DNA, 263 bp, Glycine max
ctcattcacacattcacagttatactctctctctctttgtcgctaggatcactgatctcatctcaattttcagatatgtcgacatctgataagccagaagtggtggaaaggggtagcaaggatgaaaaacacaaggaagatgatcaagaggaggggaagggtggattcattgagaaggtgaaggatttcattcatgacattggtgagaagattgaggaagctattgggtttgggacgccaactgctgacgttactgcgattca

SEQ ID NO: 168567 - DNA, 264 bp, Glycine max
cttggtgctgtcatcttcatctcagtcgctctcaccacttatttcatctcgaaaaagaagaagaagaagaagaaggaatccaggaagaagaagaagggactggtggacgccataggcaacactcctttgattcggatcaacagcctctccgccgccactggttgccaaattctcggcaagtgcgagttcttaaaccccggaggcagcgtcaaagaccgcgttgctgttcaaattattcaagaggctctagaatctggccagcta

SEQ ID NO: 168568 - DNA, 187 bp, Glycine max
ggcgtaccaccaccgcgtcgctgcggcggtgcactcggtggggaaggtgccgttgggaattaagaggaaggggctccggatcgtggtgaccggcggcgcggggttcgttgggtcgcacctggtggatcggttgattgcgagaggggacagcgtgatcgtggtggacaatttcttcacgggaagaaaa

SEQ ID NO: 168569 - DNA, 162 bp, Glycine max
tgctcttcgatgtatcaaagttgaagtaacacatcgtggaaacatgagaaggaaatatcgtatctctgggctgacttcacaggcaaccagagaattgacattcccagtagatgaaaggggaaccatgaaatctgttgtggagtacttctatgagacatatgg

SEQ ID NO: 168570 - DNA, 141 bp, Glycine max
ctttctttctctctctctctctctctctctgaagatggcttcacgcaggctcgtatcttctctgattcgatcctcccttcgtagatctcaatcgaagccctcaatttccgcatcgccatcgattcctacgtcatccaaccg

SEQ ID NO: 168571 - DNA, 114 bp, Glycine max
cagggttcgataagtctgatctgaagctggatgttttcatggttcagcacgacatggaaaacatgtacatgtgggttttcaaggagaggccggagaacgcgctgggtaagatgc

SEQ ID NO: 168572 - DNA, 101 bp, Glycine max
caatatattccagtctctctgtgtatttccctacctctcccttcaagatgcagatcttcgtcaagaccctcaccggcaagaccatcatccttgaggtggga

SEQ ID NO: 168573 - DNA, 80 bp, Glycine max
ctcagtcgcttcaaatttcaggaaatcaattatggctcaaccctcaacaagaataggccttgctggactggctgttatgg

SEQ ID NO: 168574 - DNA, 109 bp, Glycine max
tcaggatcgacaatcaggtgatgatgaagcaatggccttcgatgaaacattttgtacggctctagagtatggtttgccacctactggtggttgggcgttgggaattgat

SEQ ID NO: 168575 - DNA, 102 bp, Glycine max
ggttcaacaggtgagactcagattactccaacccatgtatctgatgaagaggcaaaccttttcgccatgcaactagccagtgcctcagtactccctatggtt

SEQ ID NO: 168576 - DNA, 103 bp, Glycine max
caaaaaatgggttcttcttcttctatgtggacggtgtgtgtgattttggcatcactggcctctgcagcactctgtgccaacccacggaggccagtggatgtac

SEQ ID NO: 168577 - DNA, 101 bp, Glycine max
ccgaacttctgatccgaaaactcccattccagaggctcgtcagagaaatcgctcaggatttcaaaaccgatctccgctttcagagcagcgccgtttcggct

SEQ ID NO: 168578 - DNA, 117 bp, Glycine max
accttcaaagcaggtggaccgttcaaattttacactggattccctgtctattgtgttaggattgctcctcacgtcatgatgacatggattttcctcaaccaggttcagaaattgcag

SEQ ID NO: 168579 - DNA, 94 bp, Glycine max
atgaatttcactacactgttcaggatggcatagatgccattgaggatgtgatctatcacattgaaacatatgatgtgaccacaattagagcaag

SEQ ID NO: 168580 - DNA, 264 bp, Glycine max
ctttcgtcagtttcgggggaagagatccagcagcaatggtgtacgtcaaggctcagaaatcaaaagcctacttcaagagatatcaagtcaagttcaagagaagaagagaggggaaaaaccgattaccgtgcaaggattcggttgattaatcaggacaagaacaattataacactccgaaataccgatttgtggttcgctttagcaacaaggacattgttgcacaaataatatctgctagcattgccggcgatttagtccttgct

SEQ ID NO: 168581 - DNA, 281 bp, Glycine max
gtcgaacctcggagatcttcaacgcgaattggagaacaaagccaatgatctcagcaagcttcaaaaggaaattgcgaagaatcaccaaatgagaaagatatacacggtccagcttggcgagaacgagctcgtccttaaggaactggatttattgaaagacgacgcaaatgtttataagctgattgggccagtacttgttaagcaagatttggccgaggccaatgcaaatgtccgcaagagaatcgaatacatctcagctgaattgaagcgtctggatgcca

SEQ ID NO: 168582 - DNA, 281 bp, Glycine max
acgcgtgccgtgccggggccatcctgtggagatgttcttcgagtgatgcagcaccagcccgagctcatgttcgagacactcaagcaccgcgcgcaggagtatgtcagccacgacaacgcagcagcgcttctggctgctggccttgctcgcacctttgacagaatgccttatctgctgtctctgtcttcctttgtggctgacgatgttgccgctgctgttcctgctgctcaagatctgggggagcagtggtcttattaatggatgtgcttcaattcaaatag

SEQ ID NO: 168583 - DNA, 280 bp, Glycine max
cacggcctttgtgccggcgacgcatcattcaaatttctgccctatcaactttcgatgctaggatagtggcctaccatggtggtgacgggtgacggagaattagggttcgattccggagagggagcctgagaaacggctaccacatccaaggaaggcagcaggcgcgcaaattacccaatcctgacacggggaggtagtgacaataaataacaataccgggctcattgagtctggtaattggaatgagtacgatctaaatcccttaacgaggatccattgg

SEQ ID NO: 168584 - DNA, 281 bp, Glycine max
gtgcagggaagttggtgtgtgtcaccggtgctgccggttatattgcttcatggattgtcgagttcctacttgaacgtggttacactgtcaggaccactgttcgacacccaaatgatcacacgaaggtagaacatttgctaaaacttgaaggtgcaaaggagagactgcaccttgttaaggcagatcttttgggtgaaaattcttttgactccattgctgacggctgtgatggcgtctttcatactgcttctccttttattatcaacgtcaaagacccacag

SEQ ID NO: 168585 - DNA, 279 bp, Glycine max
tggcaaatggaaactttgctggttcaggctacaagatcgtatgggtaggttgtgatggagaatatgaagtatacgactcagtcagaaattcttggagtcgtccaggaaacatgcctgtgggcatgaagctgccattgtcgctcaactttaggtctcaagctgtctctattggcagcacactttatttcatgcgttcagacccagacgggattgtttcctatgatatggcaactggggtttggaaacaatatataatcccagcgccactgcatctgactg

SEQ ID NO: 168586 - DNA, 276 bp, Glycine max
cttgacggtttctagagagagaaagtgatggccggagttaatccaaacggcgtcgccgattttgcggcggttccgacgcatggcggacagttcattcagtacaacatatttggccacctcttcgaggttacgacgaagtaccgtcctccgatcatgcctatcggacgcggcgcgtacggaatcgtttgctcactgttgaataccgagacgaacgagctggtggctgtgaagaagatagcgaacgctttcgacaatcacatggacgctaagcgtacg

SEQ ID NO: 168587 - DNA, 276 bp, Glycine max
tgaaagctgcttataaacaagctgatggtaggaaaattgatggtagaagggtgcttgtggatgttgagcgtgggaggactgttccaaattggagaccccgtcgcttaggtggtggacttggtaccactagagttggaggtgaagaagttaatcagcgacattctgggagggagcaacaacagtctcgttctgaagaaccgagagtgcgagacgaccgacacgctgatagagacagggaaatatcacgtgaaagacgtagggacaaagacagagaac

SEQ ID NO: 168588 - DNA, 281 bp, Glycine max
tcaattcacacatccaccgttcagttaaaaaccacccaaatccgatggcggcgtcgcggcgtctccgggacctccaatcccaaccggcgaacaagatctgcgtggactgttcccagaagaacccgcaatgggcctccgtatcgtacggcgtcttcatgtgcctagagtgctcaggcaagcaccgcggcctgggcgtgcacatctccttcgtgcgatccgtgacgatggattcgtggtccgaaatccagatcaagaaaatggaagccggaggcgacgacaaa

SEQ ID NO: 168589 - DNA, 278 bp, Glycine max
cttctcttgcggctagggtttagcgcagttcttctagatttaaggaagatgggtaaggaaaaggttcacatcagtattgtggtcattggccatgtcgactctgggaaatccactaccactggtcacctgatttacaagcttggaggcattgacaagcgtgttattgagaggtttgagaaggaagctgctgagatgaacaagaggtctttcaagtatgcctgggtgctggacaaacttaaggctgagcgtgaaagaggaatcaccattgatattgcttt

SEQ ID NO: 168590 - DNA, 277 bp, Glycine max
atccaaacaacaatggacccccgtgaatcgataagcaaccaaaccgacgtcgctctgagcatcacaaagctcctgttgtcgaaaaacgctcgggacagtaacctcgtgtactcgccgctgtcgttgcacgttgttctgagcatcatcgcttctggctccaagggccccacactcgatcagcttctctccttcctccgatccaagtccaccgaccatctcaactccttcgcctctcagctcgtcgccgtcgtgctctccgacgccgctcccgccggcg

SEQ ID NO: 168591 - DNA, 274 bp, Glycine max
aaaaccctcttttttctctctcttgcaaaacctaattttcatttcttccctcaaatttcaaaatgcgtgagatccttcacatccagggtggccaatgcggcaaccagatcggcgccaagttctgggaggtggtttgcgcggagcacgggatcgaccctaccggaaggtacggtggggactcggagttgcagctcgagaggatcaatgtctactacaacgaggccagttgcggtcggttcgtgccgcgcgcggttctcatggacctcgaaccggg

SEQ ID NO: 168592 - DNA, 276 bp, Glycine max
cgaattgagactaataatggatggtatagttcagctggagaggcaacttgttgattatactgcttctctatttcatgagggctttctagatgaccaatttaaccagcttcagcaacttcaagatgaaagtaacccagattttgtggttgaagtggtgactctcttttttgaagacgcggataggcttcttaatgagctcacaaaagcactaggccagccaagcattgattttaaaaggttggatgctcatgttcaccagttgaagggtagcagctc

SEQ ID NO: 168593 - DNA, 279 bp, Glycine max
gccctggaactggtcagagtttccaacaaaggttgctgtacagttgaatgatacacacccaacacttgcaataccagagttgatgcgattactaatggatgatgaagggcttggatgggatgaagcatgggatgtgacatcaaagactattgcgtacactaatcatactgtcctccctgaagcactggagaaatggtctcaacctgtaatgtggaaactacttccacgccatatggacatcatacaagacatagacaagagattcactgcaatgataaa

SEQ ID NO: 168594 - DNA, 274 bp, Glycine max
gttcttccatttgactcttgttctgaacgacttttcaagagaatcaaaccatggcagtgaaagtatacggtcaccactgtgcttccaccaagcgggtgctggtttgtctggttgagcaggaagtcgaatttgaagttgtccctgttgatgtcactaacggggaccagaaggatcctgagtacctcaaactacagccatttggagttgttcctgtcatcaaagatggagactatacctcatatgaatctcgagctataatgaggtattatgcaga

SEQ ID NO: 168595 - DNA, 278 bp, Glycine max
atcgaagaagaagatggctttaggtgttcctgctcttccgttgacatacgtggctcacgttctggcagttgttgccagcgtcttggtcgtggtctgggtcgtcaatttcaggggtggcttggcttgggattctgataacaagtccctcatcttcaacattcatccagttcttattgttattggcttactagttcatgggggtgaagctattataagttacaaagctctttcccctaaagaaggaagtgaagaaattgatacaccttgttttccatgcc

SEQ ID NO: 168596 - DNA, 276 bp, Glycine max
caagagcgaccttcttcggtgctcgcaaagtataagtcctcatgggtaaggccaagactcacatcaacactgacgtcattggacatgctcgactctggtgaagtcgactatcactggtcatttgatctacaagctttgaggtattgacaagcgtgtgattgagaggttcgagaatgaggctgctgagatgaacgagagcgtcattcaagtatgcctgggctgctgacaagctcgaggctgagcgcgacacaggaattaccattgatattgctttgt

SEQ ID NO: 168597 - DNA, 273 bp, Glycine max
cgaagatctggcctataagaatactgttgagtctataacaggaattatatctaaaaccatctcaactaagggcatgctagctgtatacaatgctttatctgaagatgagaaaagggaatttgagaaggcttatagtgcttctttttatccttgcatggaaattctgtatgagtgctacgaggatgtagccagtggtagtgagattcgcagtgttgttttggctgggcgtcgcttttatgagaaagagggtctacctgcttttcccatgggtaa

SEQ ID NO: 168598 - DNA, 273 bp, Glycine max
ctaagtactataaagaaggatttaagactttaaagctgaaagagggcaagaatctgaatgcagatatagaagtgcttcaagctatacgtgttgcacaccctgagtgtcagtttattcttgatgctaatgaggggtataactctgaggaagcagttgaagttcttgagaaactacatgatatgaggttgactcctgttctatttgagcaaccagttcatagagatgattgggatggtcttcggtatgtcggtaatatagcaagagagagatatg

SEQ ID NO: 168599 - DNA, 270 bp, Glycine max
cacactcattaattgcaagaatggcacttcgttgcttggtgatgtcctttctgttctcttcactcttggtcttgcgagagaaagccatgccagacacgcagatttttggcatgctgtttggccaaacactcccattccaagttcattgcgagatcttctaaagcctggccctgcaagtgttgaaatcgatgctcaccctatgcaaattgaagaaacacagtacccgaaaaccttcttctataaagaagaccttcatccaggcaaaacaat

SEQ ID NO: 168600 - DNA, 274 bp, Glycine max
caacgttagtgctttgtttaggtgaactaattcggagaccttgcaagacttcatcaatggctgtcaaagtttatattgtgtactactccatgtatgggcatgttgagaaactagcagaagaaataaagaaaggggcttcctctgtggaaggtgttgaggccaagttatggcaggtacctgagacactgctggatgaggtgcttggtaagatgagtgcaccacccaagagtgacgtaccagtcattacccccaatgaactatccgaggctgatgg

SEQ ID NO: 168601 - DNA, 277 bp, Glycine max
attttccaccattctgagtaacttcacacaccatataacagaaaatgaggtggggcttgtggaaacttgggcaatcaatccctcgccgtcttgctcacggtaataataaagctgttgcttgtcgatattttgcctcagatgctgagctgaaaaagacagtcctttatgacttccatgttgctaatggagggaagatggtgccatttgctggatggagcatgccaatccaatacaaggactcaattatggactcaacccttaactgtagggagaatgg

SEQ ID NO: 168602 - DNA, 279 bp, Glycine max
agacaaccccttctccaccccccaaaaaaccacccagcccatctccttctcgctcctccaaaaagaaaactcctgaaacccctccgcttctctctgatgcctctctcgacaacccggatctcggcccattcctccttaagtcggcccgtgacaccattgcctcgggcgatgggcactccaatgccctcgacttcgccatccgggactccaagtccttcgagcgctgcgccgtcgatggcgagtccagcctcgacctcgccatgagcctctacgtcctcg

SEQ ID NO: 168603 - DNA, 279 bp, Glycine max
cgcgtgccctcgagcgaatcggctcgagggctcgagcttccttactctactcttcctttctctcactcctcggtgtccttctttacccacttccactcctccgcatgccccttcttcttcctcccttccccttctctggataaggaaagacggagcaaagcgtaagaacggcaggatgagtaaaaaacaaagagagcaaaatcactttgtcctggtgcatggtataggccatggtgcctggtgttggtacaagcttaagccactgttggaatccgccgg

SEQ ID NO: 168604 - DNA, 272 bp, Glycine max
cacgtctcagatttcccagatccaagcccaagcccaagcccagaactcgctctctcttaatttcttgggccccaagcccgttcctatgaagcacgttggtgggccggcgaagccacgaagctgtaccggggcgtgaggcagaggcattgggggaagtgggtggcggagataaggctaccgaagaaccgaaccaggctttggctcggaaccttcgacacagccgaggaagccgctttggcttacgacaaagccgcgtacacgctccgaggcga

SEQ ID NO: 168605 - DNA, 273 bp, Glycine max
ccaaactcaagttcaccaaaagcaaccacaacaagcacttctcttatttcctatcacaccctattacagattcacaagcgcagacacttcaaatggctctggaagctcttcaatcacccagaactgccactccatcgtttagtccctttgaagaaaccaacctcagttacttggagacaccgtggaccaaaggaaagcgttctaagcgtagcgcatggagcagcaactgcaacactcttcatgcaccgaggaagagtacctcgctctctgtct

SEQ ID NO: 168606 - DNA, 270 bp, Glycine max
ccaattttcaataattcacgactccttccgagatctctctctctcgcccacaatccaaccatggcgaatacggggaatttagacgcggcgatagagcaattgctgaacgtggagaagcagatgaggctcgccggtgacgtggcgggtaccagaaaagcagccaccgatattttgcagctctgcttcgatgcacgagcctggaaaacactcaatgaccagattgtcgttttgtcaaaacgacgtggccagctcaagcaggctgtaacagct

SEQ ID NO: 168607 - DNA, 271 bp, Glycine max
cgaaagtcgcggctttgaactcttctacgacgacggcaccggttccggcctccgacccctgccaccaagcatgtcagagtttcttctcggatctggcttcgataggcctttggaacaactctctcagattgagatcaacggtattggaaggtacgagcaccctcctgcttcaaaagcagccattgattcattaccaaccatcgaaatcgatgacacccatttagccatggaatcacactgcgcggtctgcaaggaagcttttgaaacaagc

SEQ ID NO: 168608 - DNA, 270 bp, Glycine max
ctgcttcaacttgctccctcagaagcgaataacaatccacagagcactagtctcctactctcatccgcaagaaaaaaatggcatctcacatcgttggatacccccgtattggtcccaatagagagctcaagttcgctctcgagtctatctgggatggcaagagtactgcgacgatttgcacaaggtgtcttctgatctcacggcatccatctggactcagatggctcatcgtgggatcatgtacatccccagcaacactttctctcacta

SEQ ID NO: 168609 - DNA, 277 bp, Glycine max
ctttcattttccctcactttctcgctcgccaaacgcccctctctctcctccaatggccgaccagctcaccgacgaccagatcgccgagttcaaggaggccttcagcctcttcgacaaggacggcgatggttgtattactactaaggaacttgggactgtgatgcggtcactagggcaaaacccaactgaggcagaactgcaggatatgattaatgaggttgatgctgatggcaatggaaccatcgacttcccagagttcctcaacctgatggctcga

SEQ ID NO: 168610 - DNA, 275 bp, Glycine max
gcacatttgcagagctacattcagacacattatgcggctcctaggatggtgatagctgcatctggagctgtcaagcatgaagacattgttgaacaagtgaaaaagttgtttaccaagttgtcaacggatcccactaccacatctcaatcagttgctaaagagccagctatttttactggttctgaggttagaatgcttgatgatgatattcccctagcacaatatgctgtggcttttgaaggggcatcttggaaggatcccgattcgattcctct

SEQ ID NO: 168611 - DNA, 275 bp, Glycine max
catggaaccattaacaaaaggagagtatcctaaaaacatgcgagcactggtgggaagtagattgcctaagttcaccaaatggcaagccaagctagtgaatggatcatttgattttattggcttaaactattactcctctggttatattaatggtgtccctccaagcaacgacaaacccaattttctaacagattctcgcaccaacacttcatttgaacgcaatggaagacccctaggtctaagggccgcttcagtttggatatacttttatccaa

SEQ ID NO: 168612 - DNA, 271 bp, Glycine max
cggggtcagagtgagaaagagaaagagagaattcgtaaaccctaatttcggaaagatcggcgatgactgcctccaaggatcgcgagaacttcgtctacatcgccaaactcgccgagcaggccgagcgttacgaagagatggtggaatcaatgaagaacgttgcgaatctcgacgttgaactgacggtggaggagcggaatttgctttctgttgggtacaagaatgtgattggtgctcgcaaacgtccctggaggatcctgtcttccattga

SEQ ID NO: 168613 - DNA, 272 bp, Glycine max
ggctactctgaagggaaagtacgatgtcgacaaaaacggcgctgcctttgccaacatcgccgtcaacgccggcgacgtcaagttccgagcctccgtaacggaagccactttcattaacggtcccagcttcaccggctatcgcgctcgacgtcgagaaacccggttccttcatcgtcgactacaacgttcccaaaaaggactttcggtttcagtttatgaacacggttagggttcgggagacgccgttgaatttgacctacgcgcacagcagg

SEQ ID NO: 168614 - DNA, 266 bp, Glycine max
  unsure (1)..(266): unsure at all n locations
cttcttcccaagcactactactcactcactgcagatctcaattgccatcgtgtccatggctaccatcgttagcatcaaggcccgccagatcttcgacagtcgtggcaatccaactgtcgaggtggatttgacttgctccgatggtacttttgccagagctgctgttccaagtggtgcatccactgggatttatgaggcccttgaattgagagatggaggatctgactaccttgganagggtgtatcaaaggctgttgacaatgtga

SEQ ID NO: 168615 - DNA, 275 bp, Glycine max
tgcggaatcagctagaattttctaataatggccaaagacgttgagcaggttacagagcaaggtgaatactccccgaaggattaccatgacccacctccggcgccgttgatcgacccagatgagctcactaagtggtccttgtacagagccgccatagctgagttcatagcaacactccttttcctttacatcaccgtgttgaccattattggctacaagagacagagtgacaccaagatccccggtaacaccgagtgcgacggcgttggcatttt

SEQ ID NO: 168616 - DNA, 275 bp, Glycine max
caaagctcaatattcattcgtccatggcactctcttctcgtctcttttccaaatccaaatcgatctatggctgtcaaatacttctgcacaaggagcatgctattccagttcgtcactttgctaaagagtctgcacctcctgcccttaagggagatcagatgctgaagaacatttttgtggaggtgaagaacaaatttgagactgccataggaatattagagaaggagaagatcaccattgacccagaagatccagctgctgtttctcattatgca

SEQ ID NO: 168617 - DNA, 275 bp, Glycine max
ggtcaagagagaggagtggcggaatctgtttctgaaaaatcgccgcaaagcgaagtcaatctcatattaactgcaactgcaactacgaactacgaacatcagggtagtgattaagaaaaaccctagcaatggggaagaagcagcacagcaaagacagaatgttcatcaccaaaacggagtgcgcaacggagtggggaggcgctaaatccaaagaaaatcgcactcccttcaaacgtcttcccttctattgctgctcgcttacgtttacgccgttt

SEQ ID NO: 168618 - DNA, 275 bp, Glycine max
ctcttaataccaattttctagggtttatacaattctcgatggcctcttcagatgtcgagtaccgttgctttgtcggtgggctcgcttggcccactgacgaccaagctctcgagagagccttctctcagtacggcgaaatcgttgaaacgaagattatcaacgatcgtgagactggaagatccaggggttttggatttgtgaccttcgcctcggagcagtccatgacagacgccatcgaacggatgaacggccaaaaccttgacggccgtaacatc

SEQ ID NO: 168619 - DNA, 272 bp, Glycine max
  unsure (1)..(272): unsure at all n locations
aanagaaagaatcccaggcgatgagagagatggaggggaaggagcaggatgtgtcgttgggagcgaacaagttccccgagagacagccaattgggacggcggcgcagagccaagacgacggcaaggactaccaggagccggcgccggcgccgctggttgacccgacggagtttacgtcatggtcgttttacagagcagggatagcagagtttgtggccacttttctgtttctctacatcactgtcttaaccgttatgggagtcgcggggcta

SEQ ID NO: 168620 - DNA, 269 bp, Glycine max
ccactattggcgggatggtcaaaccgctttgattttattgtcacggtgacaattgccattggagaaactgtaacttttgctgtacctgatgatgatcttcctttcatctcaaatggagaatggattcgttaccttcttcttgcaagaatgttgagattaataaggatcctaatgtatgtcaagcgataccgagcctttgtggcaactttattgactctcataccaagtttgatgccatacctagggatcatattttgtaccttgtgtat

SEQ ID NO: 168621 - DNA, 267 bp, Glycine max
cagcagtgcagggaagttggtgtgtgtcaccggtgctgccggttatattgcttcatggattgtcaagttcctacttgaacgtggttacactgtcagggccactgatccaaacccaaatgatcacacgaaggtagaacatttgctaaaacttgaaggtgcaaaggagagactgcacctttttaaggcagatcttttgggtgaaaattcttttgactccattgttgagggctgtgatggcgtctttcatactgcttctccttttattat

SEQ ID NO: 168622 - DNA, 268 bp, Glycine max
gtaagcgataagcaatagaattcagagagagagagaaagagagtctcttgctctgtatctttgatttgatcattccaatcttcaatttttctatatatccatcaatccgctgagtgcaaagttctaatctttcgcctattgggttctactcctttctctcttcgtttccgatcgatccaattttcttcccatggctacgatcggacacaacaatctcaatgccaaattggttcttctcggggacatgggtgctgggaaatccagcctc

SEQ ID NO: 168623 - DNA, 268 bp, Glycine max
attccctctctcactccttcatctacttcacatattatatcatcacatatcatagtgatatcatatcacaatgtgtggcatacttgctgtgcttgcttgctctgattcatctcaagccaaaagggtccgcgtccttgagctttctcgcagattgaagcaccgtggtcctgactggagtgggctccactctcatggtgataactatttggctcatcaacggttagccatagttgatccagcttctggtgatcaacccctcttcaatgaa

SEQ ID NO: 168624 - DNA, 282 bp, Glycine max
gttgttcgcaagaaaccggagcgttgattttcttctatttctcgatcgtcttcacgaggaagaatggcaaagagttacttcaaacaagagcatgatcttgagaacagaagagctgaggctgctaggattagagagaaatacccagaccgtatcccggtgattgtggagaaggcagaaagaagtgatatcccaagtattgacaagaagaagtaccttgtccctgctgatctgacagttggacagtttgtctatgttatccgcaaaaggattaaattaagtgca

SEQ ID NO: 168625 - DNA, 275 bp, Glycine max
gattgctagaatggaatttcgatgctcagtcatctcttttaccattctcttctctcttgctcttgcaggagagagccatgtccatgcatcgctacctgaggaagattattgggaagctgtttggccaaacactcccattcccactgcactgcgagagactctaaagcctctccctacaggtgttgaaatcgatgaactccctaagcaaattgatgatacacagtacccaaaaacattcttctataaagaagaccttcatccaggcaaaacaatga

SEQ ID NO: 168626 - DNA, 276 bp, Glycine max
cccttgttcgtttcactctcacaatggactccctctctctcttctgcaccggaccccttctcgccggcggcctctactggttcgtctgtgttctgggccccgccgagcagaagggcaaacgcgccaccgatctatccggcggctccatctccgccgagaaagtccaagacaactacaagccgtactggtccttcttccgccgccccaaggagatcgagaccgccgacaaagttcccgacttcgtcgacaccttctacaatctagtcaccgacatct

SEQ ID NO: 168627 - DNA, 271 bp, Glycine max
gtatgcaggtactgaggtggatttcgatggtacaaagcatcttattgtgaaggatgatgacattgttggtatccttgaaactgatgacatcaaggatcttaaacccttgaatgatagagtcctcataaaggttgctgaagctgaggaaaaaacctctggcggtttgttgcttacagaggcaaccaaggacaaaccttcgattggaacagtgatagccgttgggccggggcatctggacgaggaaggcaacagaaaacctttgtccgtgact

SEQ ID NO: 168628 - DNA, 270 bp, Glycine max
atttggtttggttacttgctcgaatttcctcgaatcgcttaatttgtatttgattagttaaaccgcaacgcggaatctcttttctcgaactggctaactctcaggcaagtggttcggacgctgattccagcaacaagcggctggtgctcgcactgtatgacgccctaaactccggcgactccgacgccgtcgtcaagatcgtcgccgccgacctcgagtggtggttccatggtccgccctcacaccagtctttgatgcgcatgctcaccg

SEQ ID NO: 168629 - DNA, 274 bp, Glycine max
ttcttctcttgcggctagggttttagcgcacttcttctagatttaaggaagatgggtaaggaaaaggttcacatcagtattgtggtcattggccatgtcgactctgggaaatccactaccactggtcacctgatttacaagcttggaggcattgacaagcgtgttattgagaggtttgagaaggaagctgctgagatgaacaagaggtctttcaagtatgcctgggtgctggacaaacttaaggctgagcgtgaaagaggaatcaccattgata

SEQ ID NO: 168630 - DNA, 295 bp, Glycine max
gcacgaatatctcgttgtttggagcgatccgagaaaaactctgtaaacatgttggtttaccaggacctccttacaggtgatgagcttctctctgactccttccgttacaaggaaattgagaatggaatgctgtgggaagttgaggcgaagtgggttgttaaaggagcagttgatgtagacattggtgcaaacccttctgctgagggtggaggagaagatgagggagttgatgatgcagctgttaaggttgttgacattgttgacacattcagacttcaggagcaacccgcattcg

SEQ ID NO: 168631 - DNA, 275 bp, Glycine max
caattggaaagcatctgcaatccaatcattgccaagatgtaccaaggtggtgctggtccagacgtgggtggtgctggtgcagcagacgatgagtatgctgctcctccttctggtggaagtggtgctggccccaagattgaggaagtggactaaatgtagttgctttcctccagatacctgttttaaaaacttattttactttatgcttttttaattggattttaatcgcatgatttttcttggatgggattcaaactatttttcccttctgatat

SEQ ID NO: 168632 - DNA, 271 bp, Glycine max
cgaatgagagcatcaaactcttcttcttcgatttccattgcgaacgttactttttcttcttctttctcttcattttcttcgctcttcgatcttcgtccggggactgctccgaataccaccaccaccactcgccgatggccacgatcggaggcttacacgactcccaaggctctcaaaacagcgtcgaaaccgaagcccttgctcgattcgccgtagacgaacacaacaagaagcagaattcgcttctggagtttgctagggtggttagggc

SEQ ID NO: 168633 - DNA, 271 bp, Glycine max
agcggcttcttcttccgttttcctgaatcggtgtgaacaatggcgacgtacgctgcgatgaaacccaccaagccagggttggaggagtcccaggaacagatccataagataaggatcaccctttcttccaagcacgtcaaaaacctcgagaaggtttgtgcggacttggttcgtggtgcaaaggacaagcgcctcagggttaagggacctgttaggatgcccactaaggttcttcacatcactaccaggaagtccccctgtggtgaaggta

SEQ ID NO: 168634 - DNA, 272 bp, Glycine max
ttcctgcaagcggtgactcttgctttggtgttagccaccgtctctgcatcagatcctgatcctcttcaagacctctgtgtcgcagaccttgcttcagcggttaaagtgaatggattcacatgcaaagatgctgccaaggtaaatgcgagtgatttcttctcagacatactagccaaaccaggtgccacaaacaacacctatggctccctagtgactggagccaacgttcagaacatcccaggactcaacacccttggcgtgtctttatcacg

SEQ ID NO: 168635 - DNA, 268 bp, Glycine max
  unsure (1)..(268): unsure at all n locations
cttaacaacagcacaaagcgggttactgtctgttcaagctaccatctctctctctctttcttagtgcctccttgccagaagttaaaatggcncaagaaactttcctattcacatctgaatcagtgaacgaggggcaccctgacaagctctgtgaccagatctccgatgctgtgctcgatgcatgcttggagcaggaccctgacagcaaggttgcctgtgaaacctgcaccaagaccaacatggtgatggttttcggagagatcacaac

SEQ ID NO: 168636 - DNA, 270 bp, Glycine max
aaaaaaccacaatggttgaatctcagcccaagttcttcatccccgactcgatcaatggagtgaatttcgacgtggcggcgcagattaagatggtgtgggaagtgatcaaggcgccattgatcgtgccactgctgaacctcgcagtgtacatttccctagcgatggcactcatgctcttcatggagagggtgtacatgggcattgtcatcatcctcgttaagctcttctggaagaagctccaccagcgctacaagttcgagccactccaag

SEQ ID NO: 168637 - DNA, 257 bp, Glycine max
gttttgctgacagaaattctagggacaaccatcgattgagttgtccttatagaggcagtgcttcaacagattatggaggttcaaattttcatgttaatgaggcaaagccggtcatattcccccaacagtcctttgttcaaccaaaacctactactactccgtctgttgttaacttggttccatctgttattgatctaaccggactcggagttccagaagatggcaagaaaatgatcactgactttatgtcaactatg

SEQ ID NO: 168638 - DNA, 275 bp, Glycine max
aggagacagggtaatattacaggaatggtttgaccgcgttgactcggagaaaagtggaagcataacagcggtacagctgaagactgctcttgctgtgggcaacctggaatttccgctctcagttgttcagcaaatgatcaggatgtacgatttcgacaggaatggtactatgagctttcaagaatttgttgcactcaacaacttccttcttaaggttcaacatgcattttctgatctagagaggggtcgtggttttcttgtacctgatgatgtat

SEQ ID NO: 168639 - DNA, 271 bp, Glycine max
aaagaatcccaggcgaggagaaagatggaggggaaggagcaggatgtgtcgttgggagcgaacaagttccccgagagacagccaattgggacggcggcgcagagccaagacgactgacaggactaccaggagccggcgccggcgccgctggttgacccgacggagtttacgtcatggtcgttttacagagcagggatagcagagtttgtggccacttttctgtttctctacatcactgtcttaaccgttatgggagtcgccggggctaagt

SEQ ID NO: 168640 - DNA, 270 bp, Glycine max
atcaaatctgagtcccttgatttctctcctgtagaaaatgcaatcggaatgattgaaacacgaaccgctgccttaagaaatgagcttgaagagcctcgaagttcagagggggatcaacttccaagactccagagtctacaaagaatcctacaaggcagtgttgcagtacaagtgaatagtggagtcttgagtgtctgcactgccttcttgtccggggagcctgcgaccaggttacgatcacaggaactgcagcaacttatagctgccctt

SEQ ID NO: 168641 - DNA, 270 bp, Glycine max
gaaaaaccctaagcaaagcaaagcggtaaggatggggaacacggagaagctgatgaaccagatcatggaattgaaattcacttcgaaatcgctgcagcgtcaatcgcgtaagtgcgagaaggaggagaaatcggagaagctgaaggtgaagaaggcgatcgagaaaggcaacatggacggcgctcgaatctacgcggagaacgcgatccgtaagcgcacggagcagatgaactacctccgcctggcctcgcgcctcgacgccgtggtcgc

SEQ ID NO: 168642 - DNA, 267 bp, Glycine max
agaaaagttagggttcacaacttttccttttccttttgcttgcgaatctgaatcaaataatcaatcatccattcattattcatcatactcgtcggcgaagaaaatcacgctgaagagttcggacggcgaggctttcgaggtggaggaggcggtggcgctggagtcgcagacgataaagcacatgatcgaggacgactgcgccgacagcggcatccctctgccgaacgtgacgagcaagatcctggcgaaggttatcgagtactgcaa

SEQ ID NO: 168643 - DNA, 266 bp, Glycine max
gcgaaatcatttaagataagagtgcattactactaagaggagaaaaaatgaaagttgtatacttccttgttgctatcttggctttgacatccactgtggtctctgcctatgaccctagtcctctgcaagatttttgtgtggcggccaaagaaaaagatggtgtatttgtgaatggaaaattctgcaaagatcccaagcttgtgaaagctgaagatttcttcaaacatgtggaacctgcgaatactgcgaatccactaggttcacaa

SEQ ID NO: 168644 - DNA, 267 bp, Glycine max
gcaagctagctaggttgaaaatagtttggttttgtagtaagtgaggtgaggtgccaaaatggtgaagataactcttggtactttcgatgactcttttggtgttgcctctcttaaggcttatttggcagagttccatgcaactctgattttcgtgttcgctggtgttggttcagccatcgcttacaacgagcttacaaaagatgcagccttggatccaacggcgctggtggcagtagctgtggcccatgcatttgcactgtttgtagg

SEQ ID NO: 168645 - DNA, 270 bp, Glycine max
ggagaaagtgttggctcacaaaccctccaatttaagctttattgaagcagctagccttcctgcagccatcatcactgcttatcaaggatttgataaaattgagttttctgctggcaaatctatacttgttctaggaggtgctggtggagttggatcccttgttattcagctcgccaagcacgtttttggcgcatctaaggttgcagccactgctagtactccgaaacaggatttgttgaggagcttaggagcagacttggctattgatta

SEQ ID NO: 168646 - DNA, 274 bp, Glycine max
cacacacacacacaaattctcaaacccaaatcccaagtctcctaaaaccctaattcgcagtgaaaatgagagaaatcttgcacatccagggagggcaatgcggtaaccagatcggagcgaagttctgggaggtgatatgcgacgaccacggcatcgaccacaccggaaagtacagcggcgactccgagctccaattggagcgcatcaatgtttattacaatgaagccagcggcggaaggtacgttccacgcgccgtcctcatggatctggagcc

SEQ ID NO: 168647 - DNA, 278 bp, Glycine max
tctaactcgctaccctattccgctttctctcatccatcatgaaaaccggaaagtccaagaccgaatctaagacagccgatgccaaacttgctgtgaataagaagggcgccgccaccaagactaggaaacccgccggaaaggggaaggcagcgaaagatcctaacaagccaaagaggcctccaagtgctttcttcgttttcatggaggaattcaggaaggtgttcaacaaggaacatcccgacaacaaagcagtgtctgctgtgggcaaagctgctgga

SEQ ID NO: 168648 - DNA, 278 bp, Glycine max
ctgcactttcaaattgctgagaggaacatactggaggagatgatcaaaatcgtaaggcagaaggcagatatgcaagtcagggataaaattttgatactcctggactcttggcaagacgcatttgggggaccaggtggtaaacatcctcagtactattgggcatatgaggagttaaagcgatctggagtagttttcccaaagcgttcaccagatgcagctccaatatttactcctcctcctacccatccaaatttaagaaatatgcaagctggatatgg

SEQ ID NO: 168649 - DNA, 278 bp, Glycine max
cccacaagcccctgggcctgcacccacgcaaccaccatcaacaaccccatcaccgtccacgtcagcacccgccccatcaccaaccgcaaacacccctcctcctgcggctgcacctgcacccgcaacacccacacccacacccgctccttcatctccaactccaacaacagctccatcccaggccccaggcccaaccacctcctcccctcccgcgccaggcccatcaggcccagcaccaggcccatcaggcccggctccagaccaaccagcctccgagc

SEQ ID NO: 168650 - DNA, 271 bp, Glycine max
atttgcccaaaatgcaagcaacaattctgcctcgattgtgacatctacgttcatgagagcttacataactgcccaggctgtgagagttccaggcactctaagtctgtaactgcttcccaatgattgccaatcttctgcctgtgacttaaaatttccataaaaatggcgttctacattgtctccttcatattgctatactgcatccacccactggacccatgaataagttccggtgccaagtgactgactaacattatcatctgctcattga

SEQ ID NO: 168651 - DNA, 270 bp, Glycine max
tgcaatcaaattagttcattctctttgcgcagttccctcacctctcctttcaagatgcagatcttcgtcaagaccctcaccggaaagaccatcacccttgaggtggaaagctctgacaccatcgacaacgtcaaggccaagatccaggacaaggaaggaattcccccggatcagcaacgtctcatcttcgccggaaagcagctcgaggacggccgtaccctcgccgactacaacatccagaaggagtcaacccttcaccttgtccttcgt

SEQ ID NO: 168652 - DNA, 268 bp, Glycine max
caaacattaccgacaaagtagtttcatccttggccaatctgcatggttggactcttgagaatctaaaccttgatggttgcaaaaatatcagtgatgctagcttgatggcaattgctgaaaactgtgcattgctatgtgatcttgatgtctccaagtgcacaatcactgatgctgggattgcagtcctggcacatgccgaacagattaatctgcaaatcctttctttgtcaggttgcactttggtctcagacaggagcttgcccgctct

SEQ ID NO: 168653 - DNA, 268 bp, Glycine max
ggtcaaccgcgtagacacttgctgcaaagtggttggagtgtttttgttagctccaagaggctagttgctggggatgcgtttatatttttaaggggtgagaatggggaacttcgagttggtgttaggcgtgcaatgagacaacagggtaatgttccatcatcggttatctcaagccacagtatgcatctcggtgttcttgcaactgcttggcatgccatattgactgggaccatgttcactgtgtattacaagcctaggactagtccag

SEQ ID NO: 168654 - DNA, 267 bp, Glycine max
gttcttcagagcatcttcatcaatcaagatatccacatgtattatgaagaaactgacaaaccagctctagcccgtacttcaaacttgaatgaggaacttggccaagttgacacaatactttctgataaaactggaactctgaccatgaactcaatggagttcatcaaatgttctgttgctggggtagcatatggccgcggtgtgacagaagttgagcaagccatgggtaaaagtaatggtttacctatttttcatgagcatattaat

SEQ ID NO: 168655 - DNA, 265 bp, Glycine max
gtcactccttgctcttagccctcctcctcttcgccgccgtcgccaccgccgcgatggggtggcgcgtccgacgccgacgacatcctgatccgtcaggtggtgccagatgttggcgaagcgaagaggaggacaacctgctgaaagccgagcaccaatccgcgagcttcaaggccaagttcgccaagacctacgccaccaaggaggagcacgatcatcgcttcggcgtcttcaagtccaacctccgcagagccaggctgcacgccaa

SEQ ID NO: 168656 - DNA, 268 bp, Glycine max
ctctctttctctttctctccgacctagcgagaccgagcgatccgctcctaaccccgcgatgctccgccgcgcaaccacctccctcatctccggcgcctcccgccgccgcctctccaccgacgtgccggcgacgccggggcggattccgtcttcgcggaggcgtggaagaaagtgagccccaacatcgacccgccgaagacgccgctggcgtacatgaagccccgaccacccactccttcgactctcccctccaaactcaccgtcaact

SEQ ID NO: 168657 - DNA, 266 bp, Glycine max
cttcaccttgtcctccgtctccgtggggggttttaagctcgttgtgtaatgttggatgtgttcccaaaacatttgaagaactttgatgtttaatgggtctgtaataatgtcccttgaaaataagttcggtttgtgttgaactcaattgtgtcccattaataatagtactctaatatcccacctacgtttgttatgaatgtgtgaaatatgaaatgattaattgtcaaaaaaaaaaaaaaaaaaaagggggggccgccgattattga

SEQ ID NO: 168658 - DNA, 274 bp, Glycine max
cctcgagccgaatcggctcgagtgaagtctttccatctcacagtgaccagctttgtgctgtacagtggttgtgcttggactgcttccactctccctagatgcacaactagatccctccttttacagagacacttgtcccagggttcactccattgttcgtgaagtcgtcaggaacgtttcaaagaaagatccccgtatgcttgctagtctcattagacttcactttcatgactgctttgttcaaggatgtgatgcatcagttttgttgaacaac

SEQ ID NO: 168659 - DNA, 228 bp, Glycine max
cccgatgccagaagtactatgaagccggtgcccgttttgccaaatggcgtgctgtgctcaagatcggcccaaacgaaccatccgagctggctatccatgaaaatgcctacggtcttgcccgatatgccgtcatatgccaggagaatggtctggtacctattgtagagccagagatcctggtggatggacctcatgacatcaacaagtgtgctgaggtgaccgagcgcg

SEQ ID NO: 168660 - DNA, 273 bp, Glycine max
aatggctgttaggcttgatgatgctcaccaagaactttcaaatgctattgtggttgctcaagacacatccaaccagatgtccaggcgtgatcctctgagatgttacatggatgtaattgatgatatgctaactcaaatgggaagatccatccttcaaaccacaaggtggccgattaggagaaagcgacattgattatgatactgacgagaagtcaatggcaacactaagacgtcatcttcgaggagctactgaggagtactacaggtataaaa

SEQ ID NO: 168661 - DNA, 267 bp, Glycine max
agacattggttcaaggctgtgtctccaatggggttaggtttcacaaggcaaaggtgtggcaagttcagcaccaagagtttgagtccaaagttttgtgtgatgatggggtggaattgaaggggagtttggttgttgatgctagtggattcgcaagtaattttgtagcatatgacaaggtgagacaccatggttttcagattgctcatggtgttttggctgacgtggatgatcacccttttgatttggacaagatggttttaatggact

SEQ ID NO: 168662 - DNA, 267 bp, Glycine max
gcaggtttggcaggcacaccccttctggtccagattcgtggagcatgatgattatggcaatggtgttgagatgggaaagggagctattaaagaagtgtagttagtcctcgtcttggtttatttttctcaatgactagcgttttagcttttgttggtaaatcatactattggtttcaatgtattgaattgttcctaaaaattaaaaagggttatttttcttatgtatcccctgcttcttcatatgaagcaagtttacaggatactttt

SEQ ID NO: 168663 - DNA, 267 bp, Glycine max
gaggcggtgatgtcttcaattagattcctatggatcctgatggtgtctttgacggcatcatgcgcgttaagccaaccgcagaagctatcggcgtacgatgttctgatggagtacgggttcccggtgggtcttcttcccaagggagccatagggtattcgctcaacagagacagcggcgagttcgcagtgtatttccaaggagcgtgcagcttcgacatagagtcctacacgctcaagtacaaatccaccatcacgggtgttatctcc

SEQ ID NO: 168664 - DNA, 262 bp, Glycine max
gttcaaaacaaggtttccatcaactggctactcgaccaaggtcccagcttaggtattgtccgagtgcatggggttgggcttttacacaccgagctagtgtctggaatccctgtaattttcttccagtttgtagccaacctcccagccttccatcaggtcctagttttcctatgcatcaaacatgtgccggttccacatgttaaagctaaggaacggtttctagttggtcgtattggtccaaaagagttcagaatctaccggt

SEQ ID NO: 168665 - DNA, 262 bp, Glycine max
agatggctttaggtgttcctgctcttccgttgacatacgtggctcacgttctggcagttgttgccagcgtcttggtcgtggtctgggtcgtcaatttcaggggtggcttggcttgggattctgataacaagtccctcatcttcaacattcatccagttcttattgttattggcttactagttcatgggggtgaagctattataagttacaaagcttttcccctaaagaaggaagtgaagaaattgatacaccttgttttcca

SEQ ID NO: 168666 - DNA, 263 bp, Glycine max
aagctctcaaggattgaccttgagtgggtccatgtcctcagcgaaggatgggccacacccctgaaaggcttcatgagagaagccgagttcctccaaacgcttcatttcaactcgctccgactcgatgatgggtcggtcgtgaacatgtcagtgcccatcgtgctggctattgatgatgcgcagaagcatcggatcggggataacaaaaaggttgctctttttgattccaagggagaccccgttgcaattctcaataatattga

SEQ ID NO: 168667 - DNA, 265 bp, Glycine max
caaaccgtggagcttcagttagggttgggagggacacagagaaagcagggaagggatattttgaggacagaaggccagcttctaacatggacccatatgtggttacttccatgattgcagacacaaccattctgtggaagccatgagcaaaacttgcatgttgtctccctttggatggaacaaggaacaaggaacaaggaacaaggaacagttatgcttttctaagtagggtttggtcctttttattttttaccttttgattttt

SEQ ID NO: 168668 - DNA, 269 bp, Glycine max
cagctccaaacactcgtttcaggcattcttgccttgttagtaggtgccttgctttataagtcaaagacaacacatggtcctaatgcaaagatctgcactgcgccacaagcaggaggagcatggcctattgttggtcatttgcacctcttcggggctcatcaacttacacacaaaacactaggcacgatggctgacaaacatgggccaattttcacgataaaacttggttcatacaaagttctggtgttgagtagctgggagatggccga

SEQ ID NO: 168669 - DNA, 277 bp, Glycine max
cttctttttactctctctctgtctctctctacgctttctcgttcacagatccctcaagggatccactaactgaaggagaaatggggttgacattcaccaagcttttcagccggcttttcgccaagaaggaaatgcgaattctgatggtgggtctcgatgcagctggtaagaccaccatcctgtacaagctcaaacttggagagatcgttaccacaattcccaccattgggttcaatgtggagactgtggaatacaagaacattagtttcactgtctg

SEQ ID NO: 168670 - DNA, 265 bp, Glycine max
ggccttggagttaaaagccgatcttcttgtttccttgagtgatgtagaaggtctttataacggacctccaagtgcccacccattaaagcttattcatacgtatattaaggagaagcatcagaatgaaattacttttggtgacgaatctagagtgggaagaggtggaatgactgtcaaagtaaaagctgctgttcatgcagctgatgccggcattcctgttgttattaccagtggttttgcagctgagaatattatcaatgttctc

SEQ ID NO: 168671 - DNA, 261 bp, Glycine max
aaacaatttgcccaattgtttgagatgttcaatatgagatttgtatctcaagattgggtggtttcatgtgcactaatacttctggtgtcatgcacaacatactcatcagcttctttggggaaacctgagaacaacataaaaacatctgtttttaaatcacccaagattgagctaggtccagggttagtttcaaacaaattttattttgatgttgactttccaagaggccatattgcactcaagagtttcaatgctgaattg

SEQ ID NO: 168672 - DNA, 266 bp, Glycine max
cagccttgtctacactgcatgaaaatcagaccatagatgatgaaactttggcagaaccaatggatgttgatgatgcggacaatcgaagtagctggagaagtccacgtgaacagcttcaacattggcagatgaacaggaggaagttggcattttcaacagtggggacaccagactacattgctcctgaagtacttttgaaaaaaggatatgggatggaatgtgattggtggtcactgggagcaataatgtatgacatgctggttggt

SEQ ID NO: 168673 - DNA, 257 bp, Glycine max
ctcagaattctctaaaagagatctttttctgctctttgaagaaagaagggtctttgcttgattttggagatgtctctgctctcagatctcatcaaccttaacctctccgataccaccgagaaggtgatcgcagagtacatatggatcggtggatcaggaatggacctgaggagcaaagcaaggactctcccaggaccagttagcgacccttcagagcttcccaagtggaactatgatggttccagcacaggtcaagc

SEQ ID NO: 168674 - DNA, 262 bp, Glycine max
accgcggcggcggctgccgcctcctccgacgagatcaggaccgtctggctcggcgacctccaccattggatggacgagacctacctccacaactgctttgctcacaccggcgaggttgtgtcggccaaggtcattcgaaataagcaaactggtcagtctgagggatatggattcgtggagttctattcacgagcgacggctgagaaagtcttgcagaactataatggcacgatgatgcccaatacagatcaggcattccgtc

SEQ ID NO: 168675 - DNA, 267 bp, Glycine max
cctagctagtagtctcagttcgtttgagagagaaaaaatggcagagggtctcgttctccgcggaaccatgcgcgcccacaccgacgtcgtgacggcgattgccactcccatcgacaactccgacatgatcgtgacggcgtcgcgcgacaaatccatcattctctggcacctcaccaaggaggacaagacctacggtgtcccccgccgccgcctcaccggacattctcacttcgtccaggacgtcgtcctctcatccgacggtcagtt

SEQ ID NO: 168676 - DNA, 292 bp, Glycine max
gcttcttgcaaagttgagggaatacaaatctgatctaaccaatttgaaaaaggaatttaaaaggctaacatcacctaatgctgacgaggttgcccgtgaagaattgttggagactggaatggcaaatacacatttggcttctgctgatcagagagaacgattaacaatgtctgtggagagaataaaccagtcgggtgagagaattagggagagccatagaaccttgctggagactgaagaactaggtgtcaacatcctccaagatttgcacagtcagagagagactctactg

SEQ ID NO: 168677 - DNA, 286 bp, Glycine max
caaaccaaggacgagaacacgatgttgcttgaacttgcacttggtttattggttttggctctgtttctgcacttgcgtcccacacccactgcaaaacccaaagcacttcgccatctcccaaacccaccaagcccaaagcctcgtcttcccttcataggacaccttcatctcttaaaagacaaacttctccactacgcactcatcgccctctccaaaaaacatggtcccctattctctctctactttggctccatgccaaccgttgttgcctccacaccagaattgt

SEQ ID NO: 168678 - DNA, 284 bp, Glycine max
ctcaattacaggaattcgtagagatcgaaaatatgcagtgcaaccacggagtttgtatgcaacaggggtgcacatgtcaatggatctatcaggaaagacaacacacaaaactgaaggtaggatcaaatacttccactatcatggaaccatctcagacaggagagaaacatgtaaaatactcgtcaacacaacacaagtcacacagaacaaaattccttatgtgatggacaccacaatgagggacactgctggggtaatcaagacatttgagctcaagatgattg

SEQ ID NO: 168679 - DNA, 289 bp, Glycine max
ctccaatccattcccccttttgacttccccatatggctcgctactccttcctcttggccctcctcctcctcctcttcgccgccgtgtccagcgccgccgacgacatcctgatccgtcaggtggtgccggatgccgtcggcgaacggcggagaaggaggaggaccacctgctgaacgcggagaccacttcgcgagcttcaaggcgaagttcgggaagaagtacgcgaccaaggaggagcacgaccgtcgcttcggcgtcttcaagtccaacctccgcagagcgaggctgc

SEQ ID NO: 168680 - DNA, 286 bp, Glycine max
cgaacaactacatagcatttatttttcgctcttctctcttctattcagccactgctcacaccatgagtgccgataagaagaaactgattggcagattacgcctatttttcactaatgcaaaaccatacctcttaatgattggcttgcaatttggcatggctggaaattacatcttcggcaaggatgttcttaaccatggcatgagtcgttttgtgttcattgtttaccgaaatgctatggccaccattgctcttgcccctatttgcttctttattgaaaggcaaag

SEQ ID NO: 168681 - DNA, 301 bp, Glycine max
aattgcaggcatgtctagcattgaacttaacgtaaagcagcaaggagaaccaacccgggttcagcctgcacaggaaacagaaaagggactctacttcctttcaaacctagaccagaacattgctgttccagtgcgcacggtttattgcttcaaatccggttctagaggaaacgaggatgctgcacaagttatcaaggaagccttgtcgaaaattcttgtcccttattaccccatggctggcacgttgatgataagcttggaagggaagttaatagtggataaccctggggagggtgcggtg

SEQ ID NO: 168682 - DNA, 287 bp, Glycine max
gtgagagaagagatgatacaaatgcttaggattgcattgctttgcaccagtagaaacccagcggataggccttctatgagggatgttgtgttgatgctgcaagaggccaagccaaagaggaaattgcttgatagtgttattgtgggtcgatgtgctggggacaatgtggttggtggtggtgggggtgacattcctttgccacaaaagccaaccgcggatcaatgctaatgtgtttatatgattgacatgttttttcttcttcttcttcttcttttttatattttgga

SEQ ID NO: 168683 - DNA, 287 bp, Glycine max
gcggcatatgaaacattgaatgaagtagtaaggtgttcaacagatgaaacagctactttggtggtacaactagtttctgtcatcatgatggagctgcacaaatgtcttgaagcacaaaatctttcatcggatgagagagaaaagcggagtgaattgataggccttctttgtgggtgcatgcaagtaattattcagaaactagggtctttggattctaccaaatatgtgttggtgcagtattctgatcagataatgagactattcttcagggtctttgcttgtagaaa

SEQ ID NO: 168684 - DNA, 288 bp, Glycine max
cacttctcttctgtgtttcttagcagaattaagatggctaccttgactgtacctccagttcctccttcccccagagatgatgccatgcagctttaccgtgcttttaagggatttgggtgtgatacaagtgctgttatcaatatacttgctcatcgagatgctacacagcgtgcctacatccagcaagaatacaaagcaatgtattctgaggaactttccaagcgcttagcttcggagcttagtggaaagttagagactgcagttctgctctggttgcatgaccctgca

SEQ ID NO: 168685 - DNA, 286 bp, Glycine max
gaaaacgcgtcttcataaacgccgcccaaaacttctcatacccttttattcattccattcctttctaagggttttcttttctttgccgagaaaatgagagagtgcatttcgatccacattggccaggccggtatccaggttggaaacgcctgctgggaactctattgccttgaacacggcattcagcccgatggacagatgccgagtgacaagaccgttggcggaggagacgacgccttcaacacatttttcagcgagaccggcgccggacagcacgtgccccgcg

SEQ ID NO: 168686 - DNA, 290 bp, Glycine max
cattttccgagaggccaaaatatccattgcacctttctctttctccgatggctaatccctcactcttgttcttcagtctcctcctattatccgccaccgtagccgccgccgaacggatcgacgatgaagacgaccttctgatccgtcaagtggtgccggatgcggaggaccaccacctgctcaacgcggagctccacttctccgccttcaagacaaagttcggcaagacctacgccacgcaggaggagcacgaccaccgcttccgtatcttcaagaacaacttgctccgc

SEQ ID NO: 168687 - DNA, 287 bp, Glycine max
caaagtctcagatcgagcaagtggtgggttcttccacttctgttcgcttctctggctatgcttgtagatattttggcttcctaatttcacggaaaaagtatgttgtctgcattgatgatgattgtgttcctgcaaaagataattcagggattttggtggatgctgtggctcagcatattgtgaacctgcagactcctgccacccccttcttctttaatacactgtatgatccattctgtaagggtgcagattttgttcgtgggtacccattcagcctgcgaagtggg

SEQ ID NO: 168688 - DNA, 293 bp, Glycine max
cgctaacactcattaattgcaagaatggcacttcgttgcttggtgatgtccctttctgttctcttcactcttggtcttgcgagagaaagccatgccagagacgaagatttttggcatgctgtttggccaaacactcccattccaagttcattgcgagatcttctaaagcctggccctgcaagtgttgaaatcgatgatcaccctatgcaaattgaagaaacacagtacccgaaaaccttcttctataaagaagaccttcatccaggcaaaacaatgaaagtacaattcagcaa

SEQ ID NO: 168689 - DNA, 300 bp, Glycine max
cttcaacgtcctcttacgagcagatcccaattctccttcccagtttcaaaccctaattccctcattcccatggcctcagaagagcccactgtcgcggtggaacccgctcccgaacctgccaccgccgagcctcccccggaggagaaggaggagcccaaacctgaagccaaggctaagaaaaccaaggaacccaaacctaaaaaggtttccagaccacgcaaccctcccactcatccttcctacgaggagatgattaaagacgcaattacctcgctgaaggagaaaaccggttcgagccaa

SEQ ID NO: 168690 - DNA, 293 bp, Glycine max
ggagaacagggtaatattacaggaatggtttgaccgcgttgactcggagaaaagtggaagcataacagcggtacagctgaagactgctcttgctgtgggcaacctggaatttccgctctcagttgttcagcaaatgatcaggatgtacgatttcgacaggaatggtactatgagctttcaagaatttgttgcactcaacaacttccttcttaaggttcaacatgcattttctgatctagagaggggtcgtggttttcttgtacctgatgatgtatttgaggctttgggaaaaa

SEQ ID NO: 168691 - DNA, 284 bp, Glycine max
cattactactgaaacttaatctcaaagaaagaagctgctgagatgaataagaggtctttcaagtatgcctgggtgcttgacaagctcaaggctgagcgtgaaagaggaatcaccattgatattgctctgtggaagtttgagaccacaaagtactactgcacagtcattgatgcccctggacatagggatttcatcaagaacatgatcactggaacatctcaagctgactgtgctgttcttattattgattccaccactggtggttttgaagctggtatttccaa

SEQ ID NO: 168692 - DNA, 285 bp, Glycine max
cagatctgtcttccgaagcaggaactaaatatggctgacttgttggaatggtcaaagcaagataagaaacgaatgcttcatgtcgtctaccgtgttggtgaccttgatcgcaccatcaaattttacacagaatgtttaggaatgaagcttttgaggcaaagagatatcccagaggagaaatatgctaatgcttttcttggatttggccctgaagaatcccattttgttgttgaattaacatataattatggggttacctcgtatgacattggcgatggctttgga

SEQ ID NO: 168693 - DNA, 280 bp, Glycine max
cttcgtctcaaacttcttcgttccttcgattcattccatttcctccaaaatggccaaagacccagttcgcgttctcgtcactggagccgcaggcaaattggatatgctcttgtccctatgattgctaggggagtgatgctgggtcctgaccagcccgtgatcctccacatgcttgacattcctccagcagcagagtcgttgaatggggttaaaatggaattggtggatgctgcattccctcttcttaaaggtgttgttgctacaaccgatgtggttgagg

SEQ ID NO: 168694 - DNA, 285 bp, Glycine max
ggcacgcattctatcgctgtttctctcgaatcaacaaaacgccaccgtttcattgatctacttcctccaaggccaggtctccaagaattggtaccaattcaagctgcaaatatacttgaacttcaacttatcccacattctccactctcaatggcttcaactctcaaatctggcggaattcatacaggggcaatcaatgatgatttatacaaggaattgtggcatgcatgtgctggtccccttgtcactctccctcgtgaaggggaacgagtctattactttcca

SEQ ID NO: 168695 - DNA, 285 bp, Glycine max
cgcggttgcaattgcatagcatagagaaagtgcagagagagcacagcgtaacgactcagtcaaacactctgtaactctttattttattttctttctttctttctccgatcgcatagctcgctcgcaaccaccatgccttcccgaagaagaactctcttgaaggtcatcattctcggtgacagtggggtggggaagacatctttgatgaaccaatatgtgaataagaagtttagtaatcagtacaaggcaaccattggagcggattttttaaccaaagaagtgcaa

SEQ ID NO: 168696 - DNA, 284 bp, Glycine max
gtgaaagagaatccgaggcgaagagaagagaaaaattaagatggaggggaaggagcaggatgtgtcgctgggagcgaacaagttcccggagagacagccgattgggacggcggcgcagagccaagacgacggcaaggactaccaggagccggcgccggcgccactggttgacccgacggagtttacgtcatggtccttttacagagcagggatagcagagtttgtggccacttttctgtttctatacatcactgtcttaaccgtcatgggagtcgccggggcta

SEQ ID NO: 168697 - DNA, 285 bp, Glycine max
gcaagctagctaggttgaaaatagtttggttttgtagtaagtgaggtgaggtgccaaaatggtgaagataactcttggtactttcgatgactcttttggtgttgcctctcttaaggcttatttggcagagttccatgcaactctgattttcgtgttcgctggtgttggttcagccatcgcttacaacgagcttacaaaagatgcagccttggatccaacggggctggtggcagtagctgtggcccatgcatttgcactgtttgtaggtgtctccgtcgcagccaa

SEQ ID NO: 168698 - DNA, 288 bp, Glycine max
cgaaaacccccaactccaacctctgttcatcgtctaccgcgctttcttttcaaccagaactatgattaagctttttaaagtaaaggaaaagcagagagaacttgcagaaaatgcaagtggcggaccacctgttaagaagcaaagtgctggagagttgcgtcttcacaaagatataagtgagctgaatctaccaaaatcatgtaccatgcaattccccaatggcaaagatgatctgatgaactttgaagtttcaattcgacctgatgatggatattacttaggtggcac

SEQ ID NO: 168699 - DNA, 295 bp, Glycine max
attagggtttgccgattgagagagacagagaaatgggagaacgaaaaggaatcccaatggctttggggctcttggcgatgatcctcttcttcattgcttcctcttcctctcacctcgttcgcgcttccggtgacgccgacgacgcgatcttctacgagtcgttcgacgaggattttgatggacggtggattgtatccgacaaggaggattacaatggtgtctggacgcatgccaagagtgatgggcatgatgattatggacttcttgttagtgaacaagccaggcaatatgctat

SEQ ID NO: 168700 - DNA, 283 bp, Glycine max
cggctcgagactttggaaaggcttattctccgctctcgtctgaaacctgaaaccctttgttcttcgtcggcggaagcatgtcatcgtcatcatcaagcaacgcctacgacgtgccatgggtagaaaagtaccgtcccagcaaggtcgccgacatcgtcggcaacgaggacgccgtctccaggctccaagtcatcgctcgcgacggcaacatgcccaatctcattttatccggtcctcccggaaccggcaaaaccactagcattctcgccctcgcgcacgagct

SEQ ID NO: 168701 - DNA, 282 bp, Glycine max
cagaaagaagatgagcagcaactcaggaaaagtggtgtgtgtgactggtgcttctggtttcattgcttcatggatcatcaaactgcttctccaacgtggttacactgtcagggccactgttcgcgacccatctaaacccgaaaaggttgatcacttgctcaaacttgatggtgcaaaggagaggctacatctctttaaggcagatctgctggaagaaggttcctttgactctgcttttgagggttgtgatggtgtctttcatactgcttcacccgttcattt

SEQ ID NO: 168702 - DNA, 281 bp, Glycine max
ggttaagaagcatccctttagcatgagtgaaattaaatccttggtacggcaacttcttgaaggtgtcaagtatctccatgataattggcttatccatagggacttcatctcatcaaacatcctgctgatccatgatggggagcttaaaatatgcgactttgggttgtcaaggcagtatggaagcccgctgaagccatatactcctgttgtggttacactatcgtacagagcacctgtccttttgctgggtgctaaagaatactcaactgcaattgacatgt

SEQ ID NO: 168703 - DNA, 285 bp, Glycine max
gagcgagcgagcgagcagtttcaaagagaggatttgggattgggaaggcgagggattgcgctgcgtctcttcctcttctctttcgattcatccctcattcataatcttccaatccaacaacctcagcctcacactcacacatacacacatctgaacgcgtatcgtccctcccatggcttcaaagcgcatcctcaaggagctcaaggacttgcagaaagacccaccaacttcttgcagcgctggtccagtagctgaggacatgttccattggcaagcaacgattat

SEQ ID NO: 168704 - DNA, 282 bp, Glycine max
tctcgacccgaaaacaaaggtcaagattaaccgtggtgttgccatctgtcacttggacacctccgattggagcccgacccatggagcattcatctcgttagggtcgggtccaggtcggattgaggtgtgccactggatcttcgagaatgacgtggcgtggaccattgtgaagtgagaaaagcgaacatcagaataaggaaggaagaagagttacctctataggaaactacagttaaattttttaaaaaaagcacttctgttctgctaagaaaatttagcagt

SEQ ID NO: 168705 - DNA, 283 bp, Glycine max
ctttttattttttccaatcaaaccaaacaaaacataagcaccgctcttttctctccgaaatccccatctcccttcacttctgagctctggacgagatcccagatctcaccatctttcacgcactcttccatcagattcaccctttcgtttaacgcaaactcataacttgaaggttaatggctgctccaccggcaagggctcgtgccgattacgattatctcataaagcttctcttgatcggtgacagcggtgttgggaaaagttgcctccttctgcgtttctc

SEQ ID NO: 168706 - DNA, 282 bp, Glycine max
caggactacttcaagaggctttttaactttaagaaggatagggatggctactggaaatggtttgctggcaccttggcctctggtggtgctgctggtgcttcatcccttttgtttgtttactctcttgactatgcccgtacccgtcttgccaatgatgctaaggctgcaaagaagggaggagagagacagttcaatggccttgttgatgtctacaggaagacattggcatctgatggtgttgctgggctctaccgtggtttcaacatctcatgtgttggaatc

SEQ ID NO: 168707 - DNA, 285 bp, Glycine max
ctagacactcatctcactcgcgccatcgtagggtttctccttttgtttcgcaacatggttgccgctaagaaaactacgaagacccatgagagcatcaacaacaggctcgctcttgtcatgaagagtggcaaattcaccctcggttacaagaccgttctcaaatctcttaggaactccaaagggaaattgattatcattgctaacaactgcccccctttgagaaagtcagagattgaatactatgctatgttggcaaaggttggagttcatcattacaatgggaac

SEQ ID NO: 168708 - DNA, 289 bp, Glycine max
aagaaagagaaaatcatgtcaacagcagaagctcctccttctttccaagaagcagcgcgatgcgttgtctgcaattgcagtttcaacactttcagaagaaggcaccactgtcgatcctgtgggagaacattgtgtaatgaacattcatcaaatcaaatggctttaccacaatttggcctttactcaaatgtccgagtatgtgctgattgtttcaacaacttgcggtctgggaaggatgaaccacagccttcttcagacggagtaaacagtgtgacagatacaatttcta

SEQ ID NO: 168709 - DNA, 280 bp, Glycine max
ctttttccttcaagtcactaagataatggcaagcatttataacattccatcacacataaaagcctgggtctattatgaatatggaaacatagaagagattctcaaatttgaatctaacatacccataccagacatcaaggaagaccaagtgctcatcaaggttgtggctgcagcgcttaatcctgcagattatatgagggctcttgggtttttcaaggacactgatgcacccttacctattgttccagggtttgatgctgctggtgtggtggtgagagtg

SEQ ID NO: 168710 - DNA, 279 bp, Glycine max
ggtgagtgtgagtgagtgtatcaatcggccacacagaaatgggcagtgcttctctgattccagtttcctggttgccttggcggccactttctcctttcaagggaacggtgaaaaccttggtcgcaaaaccatggctgaagaagattcagcaagcaagacccctcatttccgtggttaacaaggctgcctctctatcttcccccgtgacagcacccagcgtcggcgttcggtttcggctggacaatttggggccgcaaccgggttcgaggaagagggcta

SEQ ID NO: 168711 - DNA, 280 bp, Glycine max
gggagaaagggtgtgagaatggagagcaaagaggaagatgtaagggttggagcaactaagttctcagaaaggcaaccaattggtacagcagctcagggtgacaaggactacaaagaaccacccccagcacctttgtttgagcctggtgagctaaagtcatggtccttctacagagctggaattgctgagtttgtggccactttcttgttcctctacattaccatcttaactgtcatgggtgtcaacaggtcaccctccaagtgtgcctctgttggcattc

SEQ ID NO: 168712 - DNA, 283 bp, Glycine max
agccggtggttcgtgtggcttttggcggtactaggcatcatcggagccacactcttcatagtgagcttgatccaaacctcggagaacaacttcctatgttccataacaagaacgatgcagcagcagcagcagcagttcaccgatggccccacatcgatgcaactcaaagccatcctccactacgcgacctctcagattgtccctcaacaatctctttccgagattacaataaccttcgacgtgctccaaagcctccaccgccccgccaacttcctcgtgtttg

SEQ ID NO: 168713 - DNA, 286 bp, Glycine max
gaaaagagtagcgggcagtgacaaagcaatagcgtggagtgggtcttgcgttgtgttggaatcccaaattcatttctgtttctcattctcaattcttcttctattctcattctgatttgccacacacgcagaaaggttgaaaatagtgggacttgattcactggaggtggagaaagatggctaacaacgcagctgcttgtgctgagagagcaactagtgatatgctcattggtccagactgggcaatcaacatagacttgtgtgatatcattaatatggaccctgg

SEQ ID NO: 168714 - DNA, 271 bp, Glycine max
gacaaaaaggccactagctctggggagaagaatgttctcatttttgatctcggtggtgggacttttgatgtctctcttctcaccatcgaggagggtattttcgaggtgaaggccactgctggtgatactcacttgggaggtgaagattttgataacagaatggtgaaccattttgttcaggaattcaagaggaagaacaagaacgatattagtggaaatgccagagctctgaggaggttgagaacagcatgtgagcgggcaaagaggactc

SEQ ID NO: 168715 - DNA, 268 bp, Glycine max
cgtccgcgagcttatagctgatgatgcctggttgaatggtgacttcattactactgttcaacaacgtggtgctgcaattatcaaagctagaaagctttcaagtgcactatcagctgctagtgctgcttgtgaccatattagagattgggttcttggaactcctcagggcacctgggtgtcaatgggagtatattctgatggttcctacaatgttccagctggactgatctattcattccctgtcacttgtgccaatggggaatggaca

SEQ ID NO: 168716 - DNA, 277 bp, Glycine max
ggaacagtataagcttttctgaatgtggagggattgaaattgaggagaattgggataaggtcaagactgtatttatgccaacaggagtgtctcttacatcagagagtattgccccacttgttgcaacacttcccttagagatcaagggagaaattgaggaatttctcaaggtgattttcactctatttcaagacctggattttactttcttggagatgaatcctttcactttggtcaatggaaagccttatcctctggacatgaggggcgaacttga

SEQ ID NO: 168717 - DNA, 276 bp, Glycine max
gtcttttttcactcttcagttctcgttgttgttcttcgctttcctgaaactagggttttcaatttcgattcattcgttaataattaaagatgtttgggagggcaccgaagaagagcgataatacgaggtactacgaaatcctcggcgtctcgaagaacgcttcgcaggatgatctgaagaaggcttacaagaaagccgccatcaagaatcaccctgacaagggcggtgatcccgagaagtttaaagagctggcacaagcatatgaggttctgagtg

SEQ ID NO: 168718 - DNA, 153 bp, Glycine max
ggctcccaagggtttaacctttctggctgtgttaatatgcgtttcagcactgtcactgagtccttctgttgcgggggaagggcaaaataatggccttgttatgaacttctacaaggaatcatgccctcaggctgaagacatcgtcacagaaca

SEQ ID NO: 168719 - DNA, 282 bp, Glycine max
tggggacatactttttgttaaatgctgagaactaccactggcaatggacttctttcttttcagctgcctcaacagctgtttatgtttatttgtactcaatatactacttctatgtgaagacgaagatgtcaggcttcttccagaccagcttttattctggatacactttgatgttttctcttggactaggaattctatgtggagctgtgggttttcttggttcaaatttgttcgtgaggaggatctacagaaatatcaagtgcgattaaggttttgagtcag

SEQ ID NO: 168720 - DNA, 159 bp, Glycine max
ctctttctctagtcctgttatttctcagcgcgtaaagcatggctttgttggtggagaaaaccacgagtggtcgcgagtacaaggtcaaggacctttcccaggccgacttcggccgcctcgagatcgagctggccgaggttgagatgcccggcctcatgg

SEQ ID NO: 168721 - DNA, 247 bp, Glycine max
ccgattgctagaatggaatttcgatgctcagtcatctcttttaccattctcttctctcttgctcttgcaggagagagccatgtccatgcatcgctacctgaggaagattattgggaagctgtttggccaaacactcccattcccactgcactgcgagagcttctaaagcctctccctgcagtctgaatcgtgactcctaagaattgatgataccagtaccaaacatctctaaagagacttctcagca

SEQ ID NO: 168722 - DNA, 283 bp, Glycine max
cgctggagcttcgaggatattgaggttactgacatttcactggctgattacattggagttgcggcatccaagcacgccacatatgttcctcacaccgccggaaggctactccgtgaagcggttcaggaaggcgcagtgccccattggtgagatgctcaccaactctctcatgatgcacggtagaaacaatggcaagacactcttggctgttaggatcatcaagcatgctatggagattattcatttgttgactgaccagaaccccattcaggttattgttgat

SEQ ID NO: 168723 - DNA, 282 bp, Glycine max
gatggcttctcctcttcttactccttacaagatgggcaccttcaatctgtcccatagagttgttttggcaccgctgaccagacagacgtcttacgacaacgtcccacaaccccatgccatcctctactactcccagagaacttccaaggaggccttctcattactgaagccactggcgtctctgacacggctcaaggctatccgcaaacccctggcatatggactaaagaccatgttcaagcttggaaacccattgtcgatgccgtccacgccaaaggcggt

SEQ ID NO: 168724 - DNA, 280 bp, Glycine max
atcaacgctgggaaggcttcaaaggggagagaacggagggtcataaacccattttcagcgtcaagagatcgtcgatcatcggacggtcgaggaccagcgtggcggtggaggtgtacgatagccccggtgtggagtacctcatcgaagttgcttcccgcagcgctgctgcaaggttttcaatgccgctaaggaacttgtggctgagattcgtcgcaaagtggaccccaccaccagcgttatgctcgggaaggaagtcttttggctctgcgtgaagcctggt

SEQ ID NO: 168725 - DNA, 277 bp, Glycine max
aaaccctaattttttcttcttcaccgcgcaccacactgagaggaagagggagtgagagtgttcttcgtttgctaccttctctcagaaatggttacgttcaggtttcaccagtaccaggtggtcgggagggctctcccaacggagcagatcagcatccgaagatctaccgaatgaagctctgggccaccaacgaggttcgcgccaagtctaagttctggtattttttgaggaagctgaagaaggtaaagaagagcaatggtcaagttcttgctatcaa

SEQ ID NO: 168726 - DNA, 293 bp, Glycine max
cggcattcggctcgactcgaccgaatcggctcgaggaccggaaatacccaaacggaccgaggccgaaccgggcggctggcaccggttactggaaggcaaccggggcggataagcccattggtcagcccaaaccggttgggattaaaaaagctttggtgttttacgcagggaaagctcctaaaggggacaaaagcaattggatcatgcacgagtatcgtctcgcagacgtagatcgctccgttcgcaaaaagaacaccctaagggtatatacactccgtacttctttctagttc

SEQ ID NO: 168727 - DNA, 278 bp, Glycine max
catccgtctacaagaattgggttttcactgaccaagcattaccagctgatctcgtcaagagaggattggcaattgaagatccctctgcaccccatggccttcgccttgtgatagaggactacccttatgctgttgatggacttgaatatgggatgctattaagacatgggttcatgaatatgtctccttgtattacccaacagatgcagcagttcaacaagatactgaactacaagcatggtggaaggaagctgtggagaagggtcatggtgacttaa

SEQ ID NO: 168728 - DNA, 276 bp, Glycine max
cgtttgttcttgtgatcgaagctaagcgaagaaaatgggtggatcagtgagggacgtgaagtcgaagggcgaggtcgacgaggtggtggcgagtggctctccggttatcctccacttctgggcgtcctggtgcgaacttccagcacatggaccaactcttctctcacctttccactgatttccccaacgcccgcttcttaagggtcgaggccgaagagcaacccgagatttctgaggcttactccgtctccgctgttcctttctttgccttctgca

SEQ ID NO: 168729 - DNA, 277 bp, Glycine max
caacaaaacacacttacataaaaaatcatccttatctatgccacttccacttggacttccacctcacccactttctctgcgccatggaaacagtacgttgtctggcatgtgtacttgttcaaggtgacatatgacctaaacaatattagaacttaatctgatcacaaggcagtttttttgagctgatctggatgggaaccggtgaagaaagcacagctaaagttcctaaaccatcttctacttcttcaattcagataccactggcaccttcatatcc

SEQ ID NO: 168730 - DNA, 280 bp, Glycine max
tgtggtatgtgggttgctgcggcaacaaaaccattcatcaaattccaattccacagacacactacttctcttccgcttcttctgatggcaaaccaagcttcactctccttttcttcttccgtgtctcctgttcacgcgcctctcagcgcgtgggcacgcacaacggaagctttcattgcgacgaggccctcggctgcttcatgattcgcctcacgaacaaattcaacagcgccgaaatcgttcgctcccgagaccctcaggtgttggaggttctcgatgc

SEQ ID NO: 168731 - DNA, 280 bp, Glycine max
caattttgtgaacaagagaaattcgggaccagaagttcgatgagaaggaaaacattgtgttcatcacagtggtgtgttgtagccccgagaagatacagagacaagctttgctacaaaggtggaggctctatcaagagcattgaatactggaactgcccaagcccaaggccgagaagcctaaagcagaccctcccaaagctgagaagcccaaggccgagcccgagaaaaagaaggacggtggcggcgagaagcccaaggccgagcccgagaaaaagaagga

SEQ ID NO: 168732 - DNA, 273 bp, Glycine max
gcgaaaagcaatagaattcaaagagagagtttcttgttctgtattttttgatttgatcatttcaatcttcaattttcttttatatatccaccaatccgcaaagtgcaaatttctaatctttcacgtattgggttcttctctttccctcttcgtctccgatcgatccaattctcttcccatggctacgatcggacacaacaatctcaatgccaaattggttcttctcggggacatgggtgctgggaaatccagcctcgttttgcgctttgtcaa

SEQ ID NO: 168733 - DNA, 275 bp, Glycine max
gcactatagaaaaaaaaggacattcattcatctatggctacccttattgctcccagcaaccactctccccaagaagatgctgaagctctcagaaaggcttttgaaggatggggaactgatgagaacactgtcatagtaatttgggtcatagaactgtgtatcagaggcagcaaatcagaagagtttatgaggaaatttaccaggaggatcttgtgaagcgcctagagtctgagatcaaaggagactttgagaaagccgtgtaccgatggatactg

SEQ ID NO: 168734 - DNA, 271 bp, Glycine max
cgtccgcgagcttatagctgatgatgcctggttgaatggtgaattcattactactgttcaacaacgtggtgctgcaattatcaaagctagaaagctttcaagtgcactatcagctgctagtgctgcttgtgaccatattaagattgggttcttggaactcctcagggcacctgggtgtcaatgggagtatattctgatggttcctacaatgttccagctggactgatctattcattccctgtcacttgtgccaatggggaatggacaatag

SEQ ID NO: 168735 - DNA, 275 bp, Glycine max
gttgcatttcacacaccaacttcccctagaagagagaagagagaagagactcttccttccatcctgcaactcaaatcatcatgcaagactccagctcaatgaagatctcccctctggatctcatgtccgccatcttcaagggaagctcgacccctccaacgtctcctcctccaccaacgccgccgccgccgccgccttcctcctcgagaaccgcgacttcctcatgctcctcaccacctccgtcgccgtcctcatcggctgcgtcgtcgtcttca

SEQ ID NO: 168736 - DNA, 277 bp, Glycine max
ctttttgatccatttttcattcgttgtgatcttcctcttcctcgtacacaggtgagcgactgaaaggtagcaatggcgaccaggaacttggaaaagatggcatccattgatgcacagcttaggcaattggctcctgccaaagtgagtgaggatgacaaactgattgagtatgatgctcttctgctggatcggttccttgatatccttcaagatttacatggggaggatctgaaggcaacagttcaagaagtgtatgaactttcagctgagtatgaag

SEQ ID NO: 168737 - DNA, 277 bp, Glycine max
agagtgcagccccttcgccttgctgaatgggatactgaagacaaagtcacattttttatgagtggaagaacttatacatttcgagattttgagaaaatggccaacaaggtatttgcacgaagatattgcagtgctggatgtctcctgccacatacttggaaaaagagttttggcatgaaattggttgtggaaaaatggaaactgttgaatatgcatgtgatgttgatggcagtgccttttcatcatctcccactgaccagcttggtaacagcaaatg

SEQ ID NO: 168738 - DNA, 273 bp, Glycine max
ctcgccgtcctccactccctccaccaaaatccgagtgttcgagcgcaacggccgcgtcgggggacgcatcgccaccgtgacggtggcgcccgagaccttcgaggccggagcgtccattctccatccaaagaacctgcacacatggattacgttaagatcctgaagctgaaggtcaaagagccgaccgcgtcggaggattccctctctctcggcatttgggatgggaacaagttcgttttcaaaacggtgtcgccgcttagttccactgttccc

SEQ ID NO: 168739 - DNA, 274 bp, Glycine max
ctcaggcgctgctgcccttcagtccttcagcaatggtttacgtgaagtcacagaaatcaaaagcctacttcaagaggtatcaagtcaagttcaagagaagaagagagggaaaaaccgattaccgtgccaggattcggttattaatcaggacaagaacaaatataacaccccgaaatatcgctttgttgttcgtttcagcaacaaagacattgttgcacaaataatatctgctagcattgctggcgatattgttcttgctgcagcatatgcacat

SEQ ID NO: 168740 - DNA, 274 bp, Glycine max
ttatgattgggacaacaagagattgaatataggaactacaaatgatcagcatcaaatatatacaagtttagagcaagtggtagggacaggtgcagatccaaaacctggactcttcccctcttatcccagcatgaactcaatacagctccaagtttgccattggccacatggcttccacctcaagcttctgcacctgccctccttggaaaaggagcaaggcaatggcgaagtggagattggatgtgctcaaattgcaacaatcataattatgctt

SEQ ID NO: 168741 - DNA, 275 bp, Glycine max
ctcactcttgttcttcggtctcctcctattctccgctgccgtagccagcgtcgaacgaatcgacgatggagacaaccttctgatccgtcaagtggtgccggacgcggaggaccaccacgtgctcaacgcggagcatcactactccgccttcaagacaaagttcgacacgacctacgccacgcacgaggagcacgaccaccgcttccggatcttcaagtaccacttgctccgggccaagtcgcgccagacattggacccctccgtcgtccacggcg

SEQ ID NO: 168742 - DNA, 274 bp, Glycine max
tgagtttccacacccaagtgaagaagcaagagctcgaattctacagatccattcgaggaagatgaatgttcacccagatgtcaactttgaagaacttgctcggtccacagatgatttcaatggagctcaactgaaggctgttgtgttgaggctggcatgttggctctacgccgtgatgcaactgaggtgaaccatgaggactttaatgaaggtattattcaagtccaagcaaagaagaaagcaagcctcaattattatgcataggctggatttt

SEQ ID NO: 168743 - DNA, 275 bp, Glycine max
ctcaaactcactctttctaagttttttctatctctttctctctctctctgtctgccatggttctctccaaaaccacctccgaatccgacgtctctgtccactcaaccttcgcttctcgatatgtcagaacttcgcttcccagtttaagatgccggaggagtcgataccaaaggcggcagcgtatcacataataaacgatgagttgatgttggatgggaacccaaggttgaacttggcatcatttgtgacaacctggatggagccagagtgtgata

SEQ ID NO: 168744 - DNA, 273 bp, Glycine max
  unsure (1)..(273): unsure at all n locations
ctactgatgcctttttgggcacccagatttccaccattctgnataacttcacacactatataacagaaaatgagggggggcttatggcaactcgggcaatcaatcactcgccgtcttgcccagggtgataagaaggctttgctcgtaggtattttgcctcagatgctgagctgaaaaagacagtcgtttatgacttccatgttgctaatggagggaagatggtgccatttgctggatggagcatgccaattcaatataaggactcaattatgg

SEQ ID NO: 168745 - DNA, 273 bp, Glycine max
tgagaatgagctgaaggacaagaagttttttggaggagaggaaattgggttggtagatattgctgctgtcttcatagcattttggatccctataattcaagaagtattgggtttgaagttattcacaagtgagaaattcctaagctctacaaatggagccaagagttcatcaaccaccctgttgtcaaacaagtccttcctcctagagatcaactttttgccttctacaaagcctgccatgaaagtctttctgcttcaaaatagacttattta

SEQ ID NO: 168746 - DNA, 273 bp, Glycine max
ctaactccctaccctattccgctttctctcatccatcatgaaacgaggaaagtccaagaccgaatctaagagagccgatgccaaacttgctgtgaataagaagggcgccgccaccaagactaggaaacccgccggaaagggaaggcagcgaaagatcctaacaagccaaagaggcctccaagtgctttcttcgttttcatggaggaattcaggaaggtgttcaacaaggaacatcccgacaacaaagcagtgtctgctgtgggcaaagctgct

SEQ ID NO: 168747 - DNA, 270 bp, Glycine max
ccctcttcattgccaatggaaggaagggcgtgatatatggtggcaggatgtcattcctcaatatccaactacttgtccgttggagtgggctgatgcagaggatccactttttctactctatacaagtgggagcacagaaaacctaagggtgtcctccatacaactggtggttacatggtgtacactgcaacaacatttaagtatgcatttgactacaagccgtctgacatctactggtgtacagctgattgtggttggattactgggcac

SEQ ID NO: 168748 - DNA, 273 bp, Glycine max
gcgaagactagatctgatctgagagaatggctcctcggtctagcagcaaggacgcccaagaccttttccgcgctctttggtctgcttatgctgcaacccccactaatctcaagatcattgatctctatgtcatctatgcgtattcaccgctttcatccaggttgtttacatggctttggttggatcatttccatttaactccttcctatcaggagtactttcttgtgtaggaactgctgttcttgctgtttgtctcaggatccaagtgaataa

SEQ ID NO: 168749 - DNA, 271 bp, Glycine max
ctcactcttgttcttcggtctcctcctattctccgctgccgtagccaccgtcgaacgaatcgacgatgaagacaaccttctgatccgtcaagtggtgccggacgcggaggaccaccacctgctcaacgcggacaccactctccgccttcaagacaaagttcgccaagacctacgccacgcaggaggagcacgaccaccgcttccgtatcttcaagaacaacttgctccgcgccaagtcgcaccagaaattggacccctccgccgtccacgg

SEQ ID NO: 168750 - DNA, 272 bp, Glycine max
gtgagttcaaatcaattttaggcagaaaaatgaggtgttttggtcttgtagtgataggtctagtggttgtgcttggagggttacccttctcttcaaatgcaggattagatcccttcttttacaagaagagttgtccccggtgcatttcattgtatttagagtcgtagagaaagtttcaagaaccgatacacgtatgcctgccagcctcgtcaggcttttctttcatgactgctttgttcaaggctgtgacgcatcaattttgttgaacaaca

SEQ ID NO: 168751 - DNA, 275 bp, Glycine max
gtgatttcagtgagtgatcggtgttcacttgatctcatcataatcgtcagcgtcaattgaagaagatgccgatcagaaacatcgccgtcggaaggcctgaagaggcgactcaccccgacacgttgaaggcggctttggcgagttcatctcaaccttcatcttcgtgttcgccggctcaggctccggcatcgcctacaacaagctcaccgacaacggcgctgccacccctgccggcctcatctccgcctccatcgcccatgcattcgccctcttcg

SEQ ID NO: 168752 - DNA, 269 bp, Glycine max
attcaccttctgttctattggatcctctttgagaatgtgatgtctttgcaccgtaccaaggcaacatttataggtctcttagagtatgggagggctaatgaatgggttgtgactgaaaaacttggtgactctgtcataataataagaataaatcaggagatgctgccaagaagaataatgccatcaaggccacccccaaaaagactcgatccaaatttgttgaaagacttaatttactggagttgggatttgctgccttcctcttcgta

SEQ ID NO: 168753 - DNA, 268 bp, Glycine max
cagacgccgtagagtcagagagagagattcactgaaacagagcgcagaagaaaatacataaactaatccagaaaatgagcagcggcgctggaaaggtggtgtgtgtcaccggcgcttccggttacattgcttcctggatagtcaaattcctcctcaatcgcggctacaccgttaaggccaccgttcgcgacacaagtgatccgaaaaaaataaaccacttggttggcctcgacggtgctaaggagaggctgcacctctacaaggcgaa

SEQ ID NO: 168754 - DNA, 271 bp, Glycine max
cttgttctgattatggaacagctgaagccaagtgctgctaactcttcccctctcactcccctcggcttcttggacagagcagccaccgtccacggcgacgtcccttccgttgtttataacaacaccaccttcacgtgtcccagacgcgccgccgatgcctccagctggcctccgccctctcctcccttggtatccgccgcggcagcgtcgtctccgtcgtggcccccaacatccccgccatgtacgagctccacttcgccgtccccttcgc

SEQ ID NO: 168755 - DNA, 270 bp, Glycine max
ctcggctgaaggcgaggcaaggggtgagaacggttgcaatggcggaagtcgacgtggtgggtcccaccggggagagcgtgaagcgtgacggggttagcatcggagaagttgtgatgaaaggagggtgtgtgatgttggctacctaaaagacccttcgggaacagcaagttgtttcaagaacggttggttctacaccggagatgttggtgtgatgcatgaagatgggtacttggagatcaaagataggtcaaaggatgttataatcagtgg

SEQ ID NO: 168756 - DNA, 273 bp, Glycine max
cctagaaaacaagactgccttcaccaccaagaaagactatggtaaagaggagagggaagctcaatgggctcttgctcagaggaccctgcatggacttcaaccaccagaaacttctaatatcttcaatgaaaagagcagtatagagaactcactgagattgctgagcaggccaagaggagagctgaagttgcaaggcttcgtgagcttcacacacttaagggacatgttgagtctgtggtgaagctgaagggtctggacattgacacaatccag

SEQ ID NO: 168757 - DNA, 270 bp, Glycine max
aatcaatctctctctctctctctctcaatgacgctcaacatagcggctttggctgtgttgtgtatttctgtctttggcatcgctgtggtggctgaagatccatataggttcttcacctggaatgttacatacggagcatttatccacttggtgttcgccaacagggaatacttatcaacggtcaattcccaggtccagacattcattctgttaccaacgacaacctcatcatcaatgtcttcaacagcttggaccagccatttctcctct

SEQ ID NO: 168758 - DNA, 271 bp, Glycine max
cagggatgcaatgaaggaatttgcacagaaattggagaaactggcagaggagttgctagacctgttatgtgaaaatcttggattagaaaaagggtacttgaaaaatgcattttatggatcaagaggtccaaattttcggacaaaggtagcaaactaccctgcatgcccaaagccagagttggtgaagggtcttcgtgcacatacggatgcgggtgggattatccttctcttgcaagatgacaaggtcagtggccttcagcttctcaaaaat

SEQ ID NO: 168759 - DNA, 265 bp, Glycine max
ctttccttctgtaaactggcttatttcttattcaaaatactcaacggcacttgaaaccttttatgagcaatttgatccagattttatcaacattaggacaaaggctcgtgaagttctgcaaagggaagatgacctgatgaaattgttcagcttgtgggcaaggatgctttagctgaaggagataagatcaccttagaaactgcaaagcttttgagagaggattatcttgctcaaaatgcctttacaccatatgacaaattctgcc

SEQ ID NO: 168760 - DNA, 270 bp, Glycine max
gggaattatggtaattgatatcgaggttttgactcatggattctgatcgccccagaaaaccttccaaaaatttagttcactctcgcttcttccttttcggcttctattgctgggattgggagttcttaaccgctctctcctttttagttgttccccttaatcttgttccttcatattttttttttttcttattagatcagattgaacaaaagggttgctctttattttttaatcttgggggaataatagtattagaactaagaaaagatt

SEQ ID NO: 168761 - DNA, 284 bp, Glycine max
tgaactcgattggaaaaagattgtggaacctgtcatgcagttgtatacagaggcaactgatggatctaatattgaaactaaggaaagtgctttcgtctggcatcatcaagatgcagaccctgattttggctcatgccaagccaaagaattgttaaatcatctggaaagtgtccttgctaatgaacctgcagttgttatcaggggccagcatattgttgaagtcaagccacagggattaaacaagggattggtggctgaaaaggttctttccactatggttaatg

SEQ ID NO: 168762 - DNA, 291 bp, Glycine max
cattggtgtgcctgagcccttgtctgtgtttgttgacacttatggcactgggaagatccctgacaaggaaatcctcagcattgtgaaggagagttttgacttcaggcctggcatgatctccatcaaccttgatctcaagaggggtggaaatggcaggttcttgaagactgctgcatatggacactttggcagagatgaccctgacttcacatgggaagtggtgaagccactcaagggggagaaggtactgcttaactaaaggggttccaacactcttggccaaggactttt

SEQ ID NO: 168763 - DNA, 295 bp, Glycine max
cttcattaaacaatggccgtaaagcaagtgagatttttcaaggtcaagctctcttgtacaaacatttgcttggcttcatagattctaagtgtctaaaatggatggttgagcttgacatacccgacataatccacagccatagccatggccaacccattactttttcagagttggtgtcaattctacaagtcccaccaactaaaactcgtcaggtgcagagcctcatgcgttatctagcacacaatggattctttgagatagtaagaatccatgacaacatagaagcatatgctct

SEQ ID NO: 168764 - DNA, 294 bp, Glycine max
cttttagcgcagcttcttctagatttaaggaagatgggtaaggcaaaggttcacatcagtattgtggtcattggccatgtcgactctgggaaatccactaccactggtcacctgatttacaagcttggaggcattgacaagcgtgttattgagaggtttgagaaggaagctgctgagatgaacaagaggtctttcaagtatgcctgggtgctggacaaacttaaggctgagcgtgaaagaggaatcaccattgatattgctttgtggaagtttgacacaacaaagtattattgc

SEQ ID NO: 168765 - DNA, 286 bp, Glycine max
  unsure (1)..(286): unsure at all n locations
gctctcctgcggcaccgccgattgccgctccgggaaagtagagtgcgtcggcggagcaaaccgccggcgacattggcggagttcactctcaacgcgcgcgacggtttggacttctacgacgtgagtccggtcgacggttacaaccttccgatgctgatcgtcgccaaggcaggcatcaggggacggtgnagcgccaccggttgcctccgtcgactcacaggcgggtgtccagcggagctgacggtggcgcgatcacacggcagccgcggcgacctcgcgtgccgga

SEQ ID NO: 168766 - DNA, 301 bp, Glycine max
ctcgagcgctttgaagatgtacttgatatttatgagggaagtattaagcttccaagtggacctttagcgagtaaactcagagaacttgttccctatgagctgctgagagaacttattaggaatgatggtgagagattcctcaaattcccggtgcctgatgtgatcaaagtgagtaagactgcatggaggacagatgaggaatttgcaagggaaatgcttgcaggggttaaccctgttattatccgccgtcttcaggaatttcccccggccagcaagctagattcaagagtctatggagacc

SEQ ID NO: 168767 - DNA, 290 bp, Glycine max
  unsure (1)..(290): unsure at all n locations
ggaaagggtgggaagggtttaggaaagggaggagcaaagaggcatcgcaaggtgctccgcgacaatatccagggaatcacgaagcccgcgattcggagactggcgagaagaggtggcgtgaagagaatcagtggtttgatctacgaagagaccaggggcgtgctcaagatctttctccagaacgtgagccacgatgncgtgangtaaacggagcaagctaggagaaagacagtgacggccatggatgtcgtttacgctctcaagaggcagggaaggactctctatggttt

SEQ ID NO: 168768 - DNA, 297 bp, Glycine max
tgcatttctatttctaactaattattgtgcttatcattattgttgacacagacaagaatggcaaagttaataaaattctttgagttgaacacaggggccaagattccttctgttgggttaggcacttggcaagctgagcctggtgttgtagccaaagctgtcaccacagccattctggttggatacaggcatattgattgtgctcaagcgtataacaatcaagcagagattggttctgctcttaagaagctttttgatgatggtgtggtgaagcgtgaggacctatggatcacctcc

SEQ ID NO: 168769 - DNA, 273 bp, Glycine max; identical to SEQ ID NO: 167621

SEQ ID NO: 168770 - DNA, 293 bp, Glycine max
attttgggatccctggtgctgttaccgtggttaacggctttgacaatgagttcttcttggacagcataaccatggcacaaaatgttcattttgcttgcaaatcttgggttcaaccatacaagcttgacccagagaagagaattttcttcgttaacaaggtgtatctaccctgtgaaacaccaattggggtgaaagaactaagagaaaaggaactgaaacagctaaggggtgatggatggggacttagggtatcttctgatagaatctatgactatgatgtatacaatgatttg

SEQ ID NO: 168771 - DNA, 291 bp, Glycine max
atcgcagtttcaccaccgcgtcatgtccgaaccagaagccgcttcggtgatgtggcaactcatgcaagccgtggcgcactgccaccgcctcggcgtcgcgcaccgagacgtgaaacccgataacattctcttcgatgaggagaatcggctcaaattagccgatttcggctcggctgacacttttaaggagggcgagccgatgagcggggtggctgggcagccgcattacgtggcgccggaagtcctcgccggaagggattacaacgagaaggtcgacgtgtggagcgccgg

SEQ ID NO: 168772 - DNA, 292 bp, Glycine max
ctggctttaggtgttcctgctcttccgttgacatacgtggctcacgttctggcagttgttgccagcgtcttggtcgtggtctgggtcgtcaatttcaggggtggcttggcttgggattctgataacaagtccctcatcttcaacattcatccagttcttattgttattggcttactagttcatgggggtgaagctattataagttacaaagcttttcccctaaagaaggaagtgaagaaattgatacaccttgttttccatgccatcgcattaatacttggaatagttggaa

SEQ ID NO: 168773 - DNA, 290 bp, Glycine max
catatcatgggttcagaaaattgtatagataagacgcactttgtgctggtgcatggggcatgccatggagcatggtgttggtataagctcaagccacgcttggcatctgctggccacaaggtcacagtgcttgaccttgcagcttctggagccaacatgaagaaaattgaagatgttgacactttttcacagtatactgagcctttgttgtttctattggacacaattccctcaaatgaaaaggtagttctagttggtcacagctttggagggctgaacatagcacttgc

SEQ ID NO: 168774 - DNA, 287 bp, Glycine max
cactcttcttctcttgcggctagggttttagcgcacttcttctagatttaaggaagatgggtaaggcaaaggttcacatcagtattgtggtcattggccatgtcgactctgggaaatccactaccactggtcacctgatttacaagcttggaggcattgacaagcgtgttattgagaggtttgagaaggaagctgctgagatgaacaagaggtctttcaagtatgcctgggtgctggacaaacttaaggctgagcgtgaaagaggaatcaccattgatattgctttg

SEQ ID NO: 168775 - DNA, 296 bp, Glycine max
caggaatctctggaacagacaagtgggttgcatgggctatcaatcccagcaacaacctcaattcagctatgacgggagcacaagctctggtggctatcataccatctagcggtgccccaaatgcatatacttcttccatccaaaatcccggacccacactggcagagggagccatctcttataatcctctcaggattgacggctacccatcagagcactgaggtcaccatctatgctaccctcactcttcccagtggtaccacactttggtccacctttggaacgatggtctgtgt

SEQ ID NO: 168776 - DNA, 289 bp, Glycine max
ccgagttgttgccggaagggtttttggagaggaccaaggagaagggaatggtggtgagggactgggccccacaggcggcgatactgagtcatgactcggtgggagggttcgtgactcactgcgggtggaactcggtgttggaggcggtttgtgaagctgtgccaatggtggcgtggcctctctacgcggagcagaagatgaataaggtgatcttggtggaggaaatgaaggtgggtttggcggtgaagcaaaacaaagacggcttagtgagttctaccgagttgaggga

SEQ ID NO: 168777 - DNA, 290 bp, Glycine max
ccactcagtagtcaacactaggcactctctattcccattcattgcagaagaagatggaggctcacccctacgtcccacgcgatttgcacttacccggctacgctccctgcttcctttccatgtccaacattctctccgtcttcgcctcctcctcattgctcatcgtcactctcgtctggatcttctctggacgctttaagaaaaccaaagttgatagagtgctgatgtgctggtgggccttcacaggtctcacacacattattcttgagggttattttgttttctctcct

SEQ ID NO: 168778 - DNA, 265 bp, Glycine max
gagaaacatggcttccttaagctccttagtgctgctccttgcagctctaattctatcccctcaagttcttgcacactatgagaatcccccagtgtacaagcctcccactgagaaaccaccagtttataagcacccagttgagaagcctccagtttacaagaccccagttgaaaagcccccaatttataagcctccagttgagaagccaccagtgtacaagccaccagttgaggacgcccccgtgtacaagccaccagttgagaaa

SEQ ID NO: 168779 - DNA, 291 bp, Glycine max
gggagagctcattcactcatcactgccaatgacaaaacaaagttctaggttggagggtaaggtggctcttatcactggagcagcaagtgggattggtgaagagacagtgagattgttcgctgaacatggagcacttattgttgcaacagatattcaagatgaacaaggtcaccgagttgctgcttcaatagggtcagagagagtgacttaccatcattgtgatgtgagagatgaaaaccaagttgaagaaacaatcaatttcactttggaaaaacatggtcgcatagatgt

SEQ ID NO: 168780 - DNA, 293 bp, Glycine max
gtcaacaacagctaaaaaaatctaaggtggtgaaaattgactcaagaaaatcatgggaacaccacataactaatgcaaccaataaaggctaccctgttatggttcatttctctgcttattggtgcatgccttcaatagctatgaatcatttctttcaacaactggcctccacctatcaaaatgttctctttctgaatgttgatgttgatgaggtcaaggaagttgcttccaagttggaaattaaagcaattcctaccttttgtttgcatgaatggaggagctccagtggataa

SEQ ID NO: 168781 - DNA, 299 bp, Glycine max
ctcttatatcttaaaaaatacgtaattattattaggagccaggcgtacacttgaagtatgaataaaaagacacaccaaagataccattgttaaaagtttgggcagccctaggcacaaaagaaagtggtgattgatggctactcctccggtgaattcgttgccaatagcataccaagcatggacaagcctgggagtcccagattggttgaacaaaggagacaacgcatggccaatggtgtcagccaccttggttgggattcaaagcatgccgggcctcgtcatcctctacggaagcatcg

SEQ ID NO: 168782 - DNA, 281 bp, Glycine max
tctcgatccgctcgagccggagctctggagttactcttctttatggtgatgtaaatgatcatgacagccacgttaaggcaatcaagcaagttgatgttgtaatatctacactaggtggacagcagatagatgatcaagtgaaggtcatagcagcaataaaagaagctggaaacatcaagaggttcctcccatccgaatttggattagatgtggatcatcacaatgcagttgagccagcagcaagctttttcaacaaaaaagtgaaaatcagaagggcaatt

SEQ ID NO: 168783 - DNA, 300 bp, Glycine max
tatatatatagggcattcaagtgagagtgaagtaaaagggttgaaaattttgaatatgaagatcagtattttgctatgtgtggtgcttttgggtttccttggggtttgtcaaggaggcagcctaaggaaaaagttctaccgggattcctgccctcaagccgaggacattattaagaccaaaacccagcagcatgtgtctgctaatcccgatttgccagccaagttgcttagaatgcattttcatgattgttttgtcaggggttgtgatgcctcagttttgttgaactctactgccagtaa

SEQ ID NO: 168784 - DNA, 289 bp, Glycine max
cctactggaatttcttcaacacatggtctcagatctttcaatctcaagctcaaggccatgaatacaatgttcccatttcacacccacccattctcaaccgttggtttcccagtgattgtgatccgtctgttaatcttcctttcaaacatcatgacgagctcatttgcaactttgaagcaccttttctgagggagagagtcttccacttttctgcagagtccatagcaaaactgaaagcaaaagccaactcagagtccaataccacaaaaatctcttcattccagtcatt

SEQ ID NO: 168785 - DNA, 289 bp, Glycine max
ggcttccattgcaggatgtctacaagattggtggtattggtactgtgccagtgggacgtgtagagactggggttgtgaagcctggtatggtggtgacttttggtcccactgggctgacaactgaggttaagtctgttgagatgcaccatgaggctctcacagaggctcttccaggtgacaatgttggatttaatgtgaagaatgttgcagtcaaggatctcaagcgtggttttgttgcatccaactccaaggacgactctgccaaggaagctgccaacttcacatccca

SEQ ID NO: 168786 - DNA, 290 bp, Glycine max
gagactctcgaacagcgtgaagctggtacaacaacggctgttgtttctgagcaaacaaaagcaattgcagctaaaatatcaaattgggacaatgtcgttttggcctacgagccagtttgggccattggaacacgaaaggttgctactcctgctcaggctcaagaggtccatgctgatttgaggaaatgggttcatgacaatgtgagtgctgaagttgctgcatctgtaagaattatctatggaggttctgtaaatggaggaaactgcaaagaattggccgcacagcccga

SEQ ID NO: 168787 - DNA, 296 bp, Glycine max
  unsure (1)..(296): unsure at all n locations
cctcgagacgctcgagccgctcgagcggctcgangggaaaattaaaccgtgcataacttttcctcaaatgcaccatatgattcctttcatgactccgacgggtgatattccgccactttacatgctttatgctgttgttgtgcacctggacacactaaatgcgtctttctctggacactatgtttcatatgtgaaagatctgcaaggcaattggttcagaatagatgatattgaggttcagccagtactagttaatcaggtcatgtcagaaggagcatatatcttattctacatga

SEQ ID NO: 168788 - DNA, 285 bp, Glycine max
cgcttagccacatggagcatcatcacctaagacttattctcctactcttgttcctgttcctacccaacacctgcttctctttctcatttcaaactccttcaagcaatgaattctcgaatcaaagttcttcctctctgaagcagcagattctggagctagctaatagtcccagcacggtgaaatggatgaagagaataaggagggaaatccacgagcacccagaacttgcatatgaagagttcagaacaagtgctgtcataaggcgtgagcttgacttgttgggtg

SEQ ID NO: 168789 - DNA, 287 bp, Glycine max
ctgtgttcctgtttttgttcttcgatggcggcaacctcaacatcactggcttctcaactctacattggcctgcgccgcccctgcctcaagctcgattctttcaattctcaatctttctctctcttcgaccctaatcttcgcctatccctctctccacccaaaccctcacgcgccgtcatcgccatggccggcaccgggaagttctttgttggtggcaactggaagtgtaacggaacaaaagactcaatcagcaagcttgttgctgacttgaacaatgcaaaattgga

SEQ ID NO: 168790 - DNA, 284 bp, Glycine max
caaccttaaaagactctcttttctctctctgaactctgaagcaaaacaacattaccagagtggttctagtaattcagtgctgctagaagatggaaactagtgaatggcatatcgagcgaagatctagcttcggctctgaatcccccttagcaagagaggcaggaaatgtgcctgaaactgggtcactctctattgtggtgcttggtgcttctggtgatcttgctaagaagaagacatttcctgcacttttccacctatacctgcagggattcttaccaccagat

SEQ ID NO: 168791 - DNA, 281 bp, Glycine max
accagttactatactctctctttctgaaacaatttgcccaattgtttgagatgttcaatatgagatttgtatctcaagattgggcggtttcatgtgcactaatacttctggtgtcatgcacaacatactcattagcttctttggggaaacctgagaacaacatataaacatctgtttttaaatcacccaagattgagctaggtccagggttagtttcaaacaaattttattttgatgttgactttccaagaggccatattgcactcaagagtttcaatgct

SEQ ID NO: 168792 - DNA, 281 bp, Glycine max
cgagaaccggccatccggagagcaatgccttgttgaatgggcaaagccttacctttctaacaaacgcagagtttttcgcgtgatggatagtcgtcttgaaggccagtattcccttacacaagctcaaagggcagccacccttgcttttcaatgtcttgctgtagagcccaaatacaggccaaatatggatgaggtggtgagagcattggagcagctacgcgaatcaaataatgatcaggtgaaaaatggtgatcataaaaagcgtagtagagttagtggat

SEQ ID NO: 168793 - DNA, 283 bp, Glycine max
ccggtctcctagtcccatacttttcatggaaatacagccatcgccgtcaccactccaacactggttctcttgagcgggatgaagtatttgtgccaaagcagaagtcctgtatcaagtggtactctaaataccttaacaatcctccaggcagagtcctcactcttgctgtcaccctcacacttggttggcccttgtacttggctttaaatgtttctggaaggccttatgatagatttgcttgccactatgacccatatggtcccatttactctgatcgtgaacg

SEQ ID NO: 168794 - DNA, 284 bp, Glycine max
cggataggtcaaacatcatcatgtcggacgaagagcaccatttcgagtccaaggcagacgccggtgcctccaaaacctaccctcagcaagccggtaccattcgcaagaacggctacatcgtcatcaaaggacgcccctgcaaggttgtggaagtttcgacttccaaaactggaaagcacggtcacgccaagtgccactttgttggaattgatattttcactgccaagaaacttgaggatattgtgccctcttctcacaactgtgatgttcctcatgtgaatcgt

SEQ ID NO: 168795 - DNA, 283 bp, Glycine max
ccctctctctctctctctctttctctctcatccagatcttgcaaaaaaaaaaaacacaatggcagcgagcgctcccattccacgcgaagagttcgtgtacatggcgaagctggcggagcaggccgagcgctacgaggagatggtggagttcatggagaaggtctccgcctccgccgagagctaggagctgaccgtggaggagcgaaacctcctctccgtcgcctacaagaccgtaatcggcgctcgccgcgcctcctggcgcatcatctcctccattgagcag

SEQ ID NO: 168796 - DNA, 277 bp, Glycine max
tctcgagccgattcggctcgagggaggagcttgaggagaaagtgagactcattgaattccatcactgctgatattagtagtaacatgtcgtatgtggtggctgagaatgctacacttagacagcaagtcggtgctgctggtgtcatgtgtcctcctcctccagcacctgctcctgggatgtaccctcatcatcctccaatggcacctatgccttatccgtggatgccttgtgctccttatgttgttaagcctcaagggtctcaggttcctttggttc

SEQ ID NO: 168797 - DNA, 283 bp, Glycine max
ccattactcacttttcatccttcgatcatacacttagttgcttccaattaagatggttctgctagagaagctctgggatgatgttgtggctggccctcaacctgagcgtggccttggcaagctcagaaaactcaccaccctcaaaactattgatgaaggagaaagtagcaagctgcagaagacgttgtcgatgccgtcgacaccaacaaccccgatgactccgacgactccaacgacaccgggatcggcccgtaaagctgacaacgtttggaggagcgtcttc

SEQ ID NO: 168798 - DNA, 281 bp, Glycine max
cgcaacaaaaagaaagaatcccaggcgaggagaaagatggaggggaaggagcaggatgtgtcgttgggagcgaacaagttccccgagagacagccaattgggacggcggcgcagagccaagacgacggcaaggactaccaggagccggcgccggcgccgctggttgacccgacggagtttacgtcatggtcgttttacagagcagggatagcagagtttgtggccacttttctgtttctctacatcactgtcttaaccgttatgggagtcgccggggctaa

SEQ ID NO: 168799 - DNA, 279 bp, Glycine max
cttttccttctctctggctttcctttgacgcttctgacactgctcactttctttctctccgtgtcctaatggctctccccgactcttcttcctgccgcaactccctgatcccctccttcatctactcctcttcctccaaaacgctccctctacaccacatgctcaactccgcctccgccgccgccccctcccagccgccggaaaacctccacgccggatcgcgcggcctcatgattccctctcccagcgagtcacgcaagatcgagatgtactcccctg

SEQ ID NO: 168800 - DNA, 284 bp, Glycine max
ctaacctacctctttttcttctctctcaacaacttcaccttcttcctcctcgatcatgtctcacttcaagggcaagtaccatgatgagcttatcgccaatgctgcgtacattggcactcctggaaagggtattcttgctgctgatgagtcaacagggacaattggcaagcgtttggccagcatcagtgtagagaacattgaatccaacaggcgagctcttagggagctgcttttcactgctcctggtgttcttcaatatctcagtggtgtcatcctctttgagg

SEQ ID NO: 168801 - DNA, 276 bp, Glycine max
ccctcgagccgaatcggctcgagcaacattagtgctgagttctttgaactgcaacctaaggaaggccttgcccttgtgaatggcaccgctgttggttctggcttggcttcaattggcctttttgaagccaacatcattgctgtcttgtctgaggttatttcagcaatttttgctgaagtgatgcaagggaagccagagttcactgaccatttgactcataaactaaagcaccaccctggacagattgaagctgctgctatcatggaacacattttg

SEQ ID NO: 168802 - DNA, 300 bp, Glycine max
cggcgggtagggtttcgacgtgcttcttcttcgtgtttgctctttctctccttcttccttttcagatatccgctgaggaatcatcggagaaagagttcgtactcacattggatcactctaactttcacgacactgtcagcaagcacgatttcatcgtcgtcgagttctacgctccatggtgtgcccactgtaagaagcttgctcccgagtatgagaaagctgcttctatcttgagtagtcatgatcctccggttgttttggctaaaattgatgccaatgaggagaagaacaaagaccttg

SEQ ID NO: 168803 - DNA, 297 bp, Glycine max
  unsure (1)..(297): unsure at all n locations
cggaatggcttccctaccctttccgttgatgaacaagtcgttgccatagagctgccactgnaatacggtcccttcattgagtcagtgaacaagagagggctgaacctctctgaggtggtgtgttccacattcacaatggggcggtttggagaaaccaaggacagaaggacagtgagagtggaatgcttcatgaaagaaagcagccccaatatctgggtgaggcctatcagtggactcacaatggtggttgaccttgaactcatgaagatcgttcagtatcacgacggtggcattata

SEQ ID NO: 168804 - DNA, 291 bp, Glycine max
cattgttcaacttgagatgatggcatcatttgcagggactactcagaagtgcaaagcatgtgagaagactgtgtatttggtggatcagctcactgctgacaacaagatctatcacaaatcatgtttcagatgctaccactgcaagggtacccttaagttgagtaattattgttcctttgagggtgttttatactgtaagcctcattttgatcaactctttaagaagactggcagcttggacaaaagttttgaaggtattccaagaactgcaagacttgaaagatctgccga

SEQ ID NO: 168805 - DNA, 290 bp, Glycine max
tctgcatagtaatcattactttggaaatgattccggcattattgaaaatgaagctgtttctaagtcaaatgtggtcaagtttgaagtgcagctttacaaaactcgtgaggagaaatatctgcttgatcttcaaagggtccagggcccacagtttcttttcttggatctgtgcgctgctttcctttcacagctacgtgttctctagtgaagctcacaagtcgcaaaggagaccttgaggtgtcttgtgtggcatgtgaataagcttacgttgtacatatcaatgccctttc

SEQ ID NO: 168806 - DNA, 286 bp, Glycine max
cgggttacaagcttgactggggagtcaagggaatctggttaggaatgatatcagggactatcctccaaacatgtgttcttttggtgctgatttacaaaactaattggaacgaagaggcctcccttgccgaagataggatacggacttggggtggacataaaaaagcgactgtgaatgacacagaaaacacacaagaaacatgaaattgcagtaggagaattggtacgatatgaagtatgatacttgaattgttgacagaaaagctttagttgctttagaatattct

SEQ ID NO: 168807 - DNA, 287 bp, Glycine max
ctcacccttgaggtggaaagctctgacaccatcgacaacgtcaaggccaagatccaggacaaggaaggaattcccccggatcagcaacgtctcatcttcgccggaaagcagctcgaggacggccgtaccctcgccgactacaacatccagaaggagtcaacccttcaccttgtccttcgtctccgtggtggcatgcagatcttcgtcaagactctcactggcaaaaccataaccctagaggtcgaaagctctgacaccattgacaacgtcaaggccaagatccagga

SEQ ID NO: 168808 - DNA, 283 bp, Glycine max
cattttcttcgtagccaaacactctgaaattctcagttatgtcgtggcaagcgtatgtggatgatcacctactgtgtgaaatcgaaggtaaccacctcactcacgccgctatcatcggccaagacggaagcgtttgggctcagagcaccaacttccctcagttcaaacctgaggaaataactgccatcaataatgactttaatgagcctggatcacttgctccaactggattgtatatcggtggcaccaaatacatggtcatccagggtgaagctggtgctgt

SEQ ID NO: 168809 - DNA, 284 bp, Glycine max
acctctcgcccagaatccgagatcaaccccgacgaaggcaaggggtttttctcggcttcttcacatttctgaaatggcgcctgtttcagctttagccaagtacaagctcgtcttcctgggtgaacacatccgtgggcaaaaccagcatcatcactcgcttcatgtatgataaattcgataccacctatcaggctacaattggtattgattttctatcaaaaactatgtatcttgaagatcgaactgttcgactgcagttgtgggatacagctgggcaggaaaga

SEQ ID NO: 168810 - DNA, 289 bp, Glycine max
ctaacactcattaattgcaagaatggcacttcgttgcttggcgatgtccctttctgttctcttcactcttggtcttgcgagagaaagccatgccagagacgaagatttttggcatgctgtttggccaaacactcccattccaagttcattgcgagatcttctaaagcctggccctgcaagtgttgaaatcgatgaccaccctatgcaaattgaagaaacacagtacccgaaaaccttcttctataaagaagaccttcatccaggcaaaacaatgaaagtacaattcagc

SEQ ID NO: 168811 - DNA, 308 bp, Glycine max
ttcgggtcgagcatttttcagtttctcagtttcttattcgttagatctcatcttacactcgccgtcaagttcgtctcgcgccaccgtcgacgcagctccgaccacctcctttggttccctcactttctcgctcttcttcttctcagaaatatgccttctcagaaggttgaaacgggtcatcaagacacggtccatgatgtcgcgatggattactatggtaagaggctggccacggcttcatcagatcacacaattaagataattggggtcagcaacacggcctcccagcatctagcaactttgactgg

SEQ ID NO: 168812 - DNA, 286 bp, Glycine max
tcgttgttcaagtaaatggccttcgtcaccactgctgaagtgtgtgatgcgaacccccagttaattttgagtggggagcatcgtgcccttcagccagtttttcagatttacggtcgtcgacaggtcttctctggacctatagttaccttgaaggtgtttgaagacaatgttttggttcgcgagttccttgaagagaaaggcaatggaagagtgcttgttgttgatggaggcgcgagtttacgctgtgctatattgggtggcaacctgtggtacaagctcaaaacaa

SEQ ID NO: 168813 - DNA, 283 bp, Glycine max
ctttgaaggaattggttatgcttcctttacagaggcccgagctattttgcaaagggcaattaaccaagccgtgcaagggtatcctattatttggtccccctggaacaggtaagacaatgcttgcaaaggcagttgctaccgaagctggtgcaaatttcatcaacatttccatgtcaagtatcacatctaagtggtttggtgagggtgaaaagtatgtcaaagctgttttttccctggctagtaaaattgctcctagcgtgatatttgttgacgaagtgatagc

SEQ ID NO: 168814 - DNA, 286 bp, Glycine max
cttgtgtttgcgtgtctctccgtaaattgccttcgactgtgacaacacgcaccgatcgccatgaacatcttcaccaagaaacccaccgccaaagaggctcttcgtgagagtaaacgtgaaatgacaaacgccagtagaggtatagagaaggaaattggagctctacaatcggaagaaaaaaagcttgttgctgagataaagagaactgctaagacgggaaatgaggcagcaactaaaattctagctcgccagttgatcaggcttaggcaacaaattgctaatcttc

SEQ ID NO: 168815 - DNA, 283 bp, Glycine max
tcttcaacttcacccattcatacgtgctgttgttactgctgctcttttctcttttcttttctctttagttctctcttcccctttctttttctttttcttcttcttctgagcttgtttaagcttttcttccattaacatattatcaccatgtgtggtattcttgctgttcttggttgttctgatgactctcgagccaaaagggtccgcgtgcttgagctctctcgcagattgaagcaccgtggccctgactggagtgggctccatcaacatggtgactgctttt

SEQ ID NO: 168816 - DNA, 282 bp, Glycine max
cctcctcgactacttcgacaacacaaagctccaccagatcaccaacgggaccactctttccaccactctctaccaaaccacaggtaatgccaacggcaacgtcggctccgtcaacatcaccgacctcaaaggcggcaaggtcggcttcggctccgcggctcccggctccaaactcgactcctcctacatcaaatccgtcaaaagtatcccctacaacatctccgtcatcgaaatcagcgcgccgataatggcgccggggatcctcgcggctcctcctccgtc

SEQ ID NO: 168817 - DNA, 281 bp, Glycine max
agacaactcccaacttctctcagtactctcatcaggatccgtgtgagcagtcgagcagagagatgatcatcaacgtgaaggaatcgacggtggtgcggccggcggaggaggtggcgcggcgggtggtgtggaactccaacgtggacctggtggtccccaatttccacacgcccagtgtatacttctataggtccaacggcacctccaactttttcgacggcaaggttctgaaggaggcactgagcaaggtgctggtgccgttctacccaatggctgggcgg

SEQ ID NO: 168818 - DNA, 253 bp, Glycine max
cgcaacatcttagaaagaatcccacgcgaggagcaagatggaggggaaggagcaggatgtgtcgttgggagcgaacaagttccccgtgagacagccaattgggacagcggcgcagtgccaagacgacggcaaggactaccaggagccagcgccggcgccgctggttgacccgacggagtttcaggcatggtcagtttacagagctcggatagcagagcttgtggccactcatctgtatctctacatcactgtc

SEQ ID NO: 168819 - DNA, 272 bp, Glycine max
aattaataacaagctagctattagttcgattttgtagtaagtgaggtgccaatatggtgaagatagctcttggtactttggatgactcttttagcgctgcctctcttaaggcttatttcgcagagttccacgcaactctgatttacgtgttcgctggtgttggatcagccatcgcttacaacgagcttacaaaagatgcagccttggatccaacggggctggtggcagtagctgtggcacatgcatttgcactgtttgtaggtgtcatcgtc

SEQ ID NO: 168820 - DNA, 291 bp, Glycine max
cgagcttgataagcaataagcaactactccctcgtatctcacagttgttgaaaagcaaggtacatgagttgggtgaaggggttcgtggggcacagatgggtggtgtttgtgtgcgcgatgtgggacatgtcgtttgcggggacatcttacatgttcgggagcatatcgccggtgataaagagcagcatgggtttcaaccagaagcaggtggcgttcttgagcgtggctaaggatttgggtgacaacgttggtcttcttgctggaaaaatcagccaggcttcccctgtttgg

SEQ ID NO: 168821 - DNA, 289 bp, Glycine max
caggagcattgaggaccaaggtggacagcgatggcgcgaatgtcatggttgcattatacgaaaacggtttggtcaccgattgtccaagaggggagaacaaagggcgtgtcctatccaacgactatgttgttagaaagctcgaaaagctctgcactgtcaaagacatctctgccaagaaaacagtatcaggaatggttaactttcccttatgggaaggattcaaaagcagcaaatgtggtttggctgtctttgttcagagcaaatctcaccagatttttggttcacagag

SEQ ID NO: 168822 - DNA, 279 bp, Glycine max
catttggggtgtgtgagtgcgtgtgtgtggttggttgtatgtatgtatgtttgttcatcaacaatgaagatatctgatgagaacagttctaaaccaatcaaccccacaagttttcaaggagggatagaatgtgtggggaacagaaagatggggcagaacagaagggctttgagcgtgatcaatcaggatctggtggcggaagggagaccttacccttgtgttgttaacaaaagggcattggcagacaaacacgatgtatgtgagaagaagcaggcggat

SEQ ID NO: 168823 - DNA, 281 bp, Glycine max
cttcaactctgcttcccctggcaaccttcttcttagttctctccgcttcttatctccagattgctggggcgaaagcacaaccgttgactagtctcaagcttaactctccgatccttcaggagtctattgctaaagagatcaatgaaaatcctgaggcaggatgggaggctgctataaatcctcatttctccaattatacagttgaacaatttaagcgccttcttggagtcaaaccaacgcctaagaaggaactgagaagtacacctgctatatctcaccca

SEQ ID NO: 168824 - DNA, 277 bp, Glycine max
cttcgctctctctgcttcactttctcgcttttgcattttcttgtgaaaaaaaaaatcctcagaacaaaaataggtcttcttcttctctgatctaccaaagcttcaaattctccttagtttggtttgtctgtgagtttggagtgtaatgtcgccgccgacgctggtaacggaggaggaggggcggacaccgtggcgtccgattcttcgcaatccttggactgtttctctcagaatggtgctggattgaaagaacggaattacttagggttgtctgatt

SEQ ID NO: 168825 - DNA, 113 bp, Glycine max
ctccctctttctcgtcactagctctgtgcattcttctctcgctctctgccttccatcacactcggcatttcctttcccaagatagtagaagatggcagacactgaggatattc

SEQ ID NO: 168826 - DNA, 287 bp, Glycine max
gcaaagatgtttcctttcgggcaaaagggtcaaaagataaaggggactatggtggttatgcagaagaatgtgttggatatcaacagcatcaccagtgttggagggatcgttgaccaaggcttaggcttcataggcagtgcagtcgatgcacttacttttgcagccaccaaaatctccatccagttgattagtgctaccaaggctgatggtgggaaaggaaaaattggaaagagtacaaatttaagaggaaagataacattaccaaccttgggagctggcgaacaagc

SEQ ID NO: 168827 - DNA, 277 bp, Glycine max
ctgctcgtgcctctagggttatcatatctccatttccatttcctctctctcagtttccaagaatcttaagctatgggaaagtcttacccaaccgtgagcgctgattaccagaaggccgttgagaaggcgaagaagaagctcagaggcttcatcgctgagaagagatgcgctcctctaatgctccgtttggcatggcactctgctggaacttacgacgtgagctcgaagaccggtggtcccttcggaaccataaagcacccctccgaactcgctcacg

SEQ ID NO: 168828 - DNA, 277 bp, Glycine max
atccagtatggggttgggatcttacatgctacccagaatgagtcaaaaatcctgaagaagtctcttaaggatgttgtaacagaaaacgagtttgaaaagaggcttttggctgatgttattccacctaatgacattggtgttactttcgatgatattggagctcttgaaaatgtcaaggatacattgaaggaattggttatgcttcctttacaaaggccagagctattttgcaaagggcaattaaccaagccgtgcaagggtatcctattatttggtc

SEQ ID NO: 168829 - DNA, 274 bp, Glycine max
ccaactctggcttcaacatctgctggtcgtgagaactggggagagaccaacttggctgatgctagccctaggactgatacttcaacagatgatacagaagacaaaaatcaaaggcctgaaaggggtgaatccagtggatcaaaagataaatcagatcaaaagacattaagacggcttgctcaaaatcgtgaggctgccaggaaaagccgactgaggaaaaaggcatatgtgcaacaattagagagcagtaggttgaaactgacccaacttgagc

SEQ ID NO: 168830 - DNA, 273 bp, Glycine max
cgcatcgcagcctgttccagcattcgggctttccgctggagtcggagttggcaacgctttggtgttggagatcgtgatgaccttcggtttggtgtacacagtctacgccactgccgttgaccccaagaagggcaatttgggaattattgctcccatcgccattggtttcattgttggcgctaacattttgttgggtggggccttctccggagcagccatgaaccctgctgtgacatttgggcctgctgtcgtgagctggacctggaccaacca

SEQ ID NO: 168831 - DNA, 285 bp, Glycine max
atctgcttcccctagcaaccttcttcttacttctctccgcttcttatctccagattgctggggcggaagcacaaccgttgactagtctcaaacttaactctcatattcttcaggagtctactgctaaagagattaatgaaaatcccgaggcaggatgggaggctgctataaatcctcgtttctccaattatacagttgaacaatttaagcgccttcttggagtcaaaccaatgcctaagaagggacttagaagtacacctgctatatctcacccaaagacgttga

SEQ ID NO: 168832 - DNA, 283 bp, Glycine max
cgcaaagaaatggaagggttgtcgtcttcatcggcgatcgcgcagaaaacatgggaactcgagaacaacatcatcccgatggacactccgggcggcgccgctacctcctccaccgctaccaccacgaccaacgccgacgactcgatcttctactacgacgaggcggggcagaacgagttccagcgcgacaagccctgggccaacgacccccactacttcaagcgcgtgaagatctccgcactcgcgctcctcaagatggtcgtccacgcgcgctccggcggca

SEQ ID NO: 168833 - DNA, 283 bp, Glycine max
gctttctgtccaagctcatgttcctcagttgaagccacccccatgcaatatcaacgatttaggagaacagtgctcagaagcaaagggcatgaaggccatgatattcttcgtagccctgtacttggtggcattaggtagtggttgtgtcaagccaaacatggttgcttacggaggcgaccaattcgaccaagacaaccccaagcaattaaagaagctctctacctacttcaacgctgcatattttgcattctctttgggagaacttgtgagcctgaccattctt

SEQ ID NO: 168834 - DNA, 274 bp, Glycine max
ctatgagtcgtcatcccgaggttaagtgggctcagagacttgacaaggtctatatcacggtgcaattggctgattcaaaaaatgccaaggtggatcttacaccagatggtatttttaccttctctggtagtgctggtgctgaagaccatcagtatgagctaaaactggagctctttgacaaggttaatgtagaggagagcaaaattactgtaggagtgcgaacatattctgtgtagtgcagaacgcagaggatggatggtggaaaaggttactg

SEQ ID NO: 168835 - DNA, 284 bp, Glycine max
gaagagaagaggacttgtattttctgccagtttcccagtatggtggccacaagcacaaatcaatccgagttagaaacaagtaagaaggattccacttatgacagaatagctgaagtcaaagcctttgatgaaacaaaacttggtgtgaaaggcctcttcgattctgggatcacaaagataccacgcatgttccatcatgccaaggtagaggaccacactgaaaccatgccaaatgactcaaacttcagtgtccccatcatagatctccaagatatagacacaaa

SEQ ID NO: 168836 - DNA, 278 bp, Glycine max
ctttcgcttctgaatcttcaacaatggtgctcgaggcgacgatgctctgtatcgacaattctgaatggatgcgtaacggtgattactctccttctcgatttcaagctcaagcagacgctgtgaatctcatttgcggtgctaaaacgcagtctaatccagaaaatacagtgggagttctcacaatggcagggaaaggcgttcgtgttttggtcacccctaccagtgatctgggcaagatcttagcctgcatgcatgggctagatataggtggtgagatg

SEQ ID NO: 168837 - DNA, 276 bp, Glycine max
ctcaggtactgcgtttcggaagcagacacagatggctcgtacgaagcaaaccgctcgtaagtccacaggaggaaaggctcctaggaagcagcttgcaaccaaggctgcacgtaagtctgcaccaactactggtggtgtgaagaagccccaccgtctcatcgtcctggtaccgttgctcttcgtgaaattaggaaataccagaagagtaccgagcttttgatccggaagctccccttccagaggctggttcgtgaaattgctcaggacttcaagact

SEQ ID NO: 168838 - DNA, 276 bp, Glycine max
ctaaaccctatggccgacgaagccaaagccaaaggcaacgcagccttctcctccggggactatcctgccgccatccaccacttctccgatgccatcgccctggctccctccaaccatgtcctctattccaaccgatccgccgcatacgcctccctcaaaaactacgcagatgcattagcggatgccaaaaagacagttgaactcaagcccgactggtccaagggttacagccgtctcggtgccgcgcatcttggcctttcccaatacgatgatgct

SEQ ID NO: 168839 - DNA, 281 bp, Glycine max
gacgcttctcaggaaatccttccagcttcctcgcaacaacatcggtcacattatggagattggctctccaacgaacgtgcgccatgttgcgcatgtcacctttgataggttcaatggtttcttgggcttgcctgttgagtttgaacctgaggtccccagaaggcctcctagtgctagtgcatctgtttttggagtttcaacagaatccatgcagttgtcgtatgactcaagagggaacagtgtgccaacaatactgctgtcgatgcaaaggcatctgtatg

SEQ ID NO: 168840 - DNA, 283 bp, Glycine max
actcgagccgaatcggctcgagcccgcactctccaagtgcgggtactgatggggtcaaagtcgatgtcatccacttgctagacatggtgtgtgagaaatatggagggcgagtggatatggcgaaagcatattacaaagctctcactgcttccgtgagaaaacattttaagggcaacggcgtcattgccagcatggagcattgcaacgatttcatgttgctgggaactgaagcaatatcccttggtcgtgttggggatgatttctggtgcactgacccttatgg

SEQ ID NO: 168841 - DNA, 283 bp, Glycine max
gcaaaaagaaagaatcccaggcgaggagaaagatggaggggaaggagcaggatgtgtcgttgggagcgaacaagttccccgagagacagccaattgggacggcggcgcagagccaagacgacggcaaggactaccaggagccggcgccggcgccgctggttgacccgacggagtttacgtcatggtcgttttacagagcagggatagcagagtttgtggccacttttctgtttctctacatcactgtcttaaccgttatgggagtcgccggggctaagtctaa

SEQ ID NO: 168842 - DNA, 282 bp, Glycine max
cgaaggaagatgagtttgagggcatcagagatagcgaagaagttgaatctgcaacctcacccagaaggtgggttttacgtggagacattccgagaccattccgtccagctttcgacctctcagctcccccccgaatacaaagtggatcgccctgtatcgacctccatctattttctcgttccttctgggagtgtgtctcgcctccatcgcataccctgcgccgaaacctggcatcattacatcggcgaccctctcaccgtagtggaattgaatgagaaagat

SEQ ID NO: 168843 - DNA, 271 bp, Glycine max
cggtgaacagctgtctccggaggtggagcgccggcctttcacggcggaggaagacgaggcgatcctgaaggctcacgccaggttcgggaacaagtgggccaccatcgcgcgcttcctcaatggccgcaccgacaacgccatcaagaaccattggaattccaccctcaagaggaagcgctccgagcctctctccgagcctcggcctctgaagagatccgccaccgtttcgggtagtcaatccggatccgatttgagcgattcgggtttaccc

SEQ ID NO: 168844 - DNA, 269 bp, Glycine max
ctagaatggaatttcgatgctcagtcatctcttttaccattctcctctctcttgctcttgcaggagagagccatgtccatgcatcgctacctgaggaagattattgggaagctgtttggccaaacactcccattcccactgcactgcgagagcttctaaagcctctccctacaggtgttgaaatcgatgaactccctaagcaaattgatgatacacagtacccaaaaacattcttctataaagaagaccttcatccaggcaaaacaatg

SEQ ID NO: 168845 - DNA, 271 bp, Glycine max
cacttgtccatctatcccacaactaatttttgattttccttgtttatttatcttcttcctcccttgtttgtctgtctctttgtttctttggcttgacaagaagaagatgatgatgatgacaatggaggggatgatggacaagggggtgttggatgatgtgataagaaggcttctggaagggaaaggagggaaacaggtgcagctctctgagtccgagatccgtcaactctgcgtcaacgccagacaaatcttcctctctcagccaattctt

SEQ ID NO: 168846 - DNA, 274 bp, Glycine max
caacaaaggaacttgttatgccagttccagctttcaatgttataaatgggggaagtcatgctgggaataatctggctatgcaagactttatgatactaccagttggagccacttcatttgctgaggcattccgcatgggcagtgaagtttatcatgtattatagggaataatcaaggcaaaatatggacaagatgcatgtactgttggagatgaaggaggatttgctcccaatgttcaagatatcagggaggggcttgtcttactcatggatgc

SEQ ID NO: 168847 - DNA, 138 bp, Glycine max
gctaacactcattaattgcaagaatggcacttcgttgcttggcgatgtcactttcagttctcttcactcttggtcttgcgagagcaagccatgccagagcacgaagatttttggcatgctagttgggcaaacactccc

SEQ ID NO: 168848 - DNA, 146 bp, Glycine max
cttctctctgtgtatttccctacctctcccttcaagatgcagatcttcgtcaagaccctcaccggcaagaccatcacccttgaggtggaaagctctgacaccatcgacaacgtcaaggccaagatccaggacaaggaaggaatccc

SEQ ID NO: 168849 - DNA, 147 bp, Glycine max
ctcaacactcattaattgcaagaatggcacttcgttgcttggacatgtccctttctgttctcttcactcttggtcttgcgagagaaagccatgccagagacgaagatttttggcatgctgtttggcaaacactcccattccaagttc

SEQ ID NO: 168850 - DNA, 144 bp, Glycine max
cgaatggagatgcatgtaggggctgtacaacctggagaacgagccttaatcatagatgatcttattgccactgggggaacgttaggtgcagcaattaagcttctagaacgtgttggggtgcatgttgtggagtgtgcttgtgtg

SEQ ID NO: 168851 - DNA, 145 bp, Glycine max
cgtttggccagcatcagtgtagagaatgttgaatccaacaggcgtgctcttagggagctgcttttcaccgctcccggtgctcttaaatatctcagtggtgtcatcctctttgaggaaactctctaccagagcacagctgcaggca

SEQ ID NO: 168852 - DNA, 143 bp, Glycine max
ctttgaaggaattggttatgcttcgtttacggaggcacgagctattttgcaaagggcaattaaccaagccgtgcaagggtatcctattatttggtccccctggaacaggtaagacaatgcttgcaaaggcagttgctaccgaa

SEQ ID NO: 168853 - DNA, 140 bp, Glycine max
ctgggatgatatggagaagatttggcatcacacattttacaatcgagttcgtgttgcccctgaagaacaccctgtacttcttaccgaggcacccctcaatcccaaggccaacagagagaagatgacccagattatgtctg

SEQ ID NO: 168854 - DNA, 140 bp, Glycine max
cagccagccagccatggtgctcatcaatgtttcacgcgttgagaccactcccttcgatggacagaagcctggaacctctggtctccgcaagaaggtgaaagtattcgtgcaacctcattacctccataactttgttcagt

SEQ ID NO: 168855 - DNA, 141 bp, Glycine max
cgcatcgcagcctgttccagcattcgggctttccgctggagtcggacttggcaacgctttcgtgttggagatcgtgatgaccttcggtttggtgtacacagtctacgccactgccgttgactccaagaacggcaatttggg

SEQ ID NO: 168856 - DNA, 136 bp, Glycine max
ctcgagttcttggtgtcttggcgatgtcaaggtccataggtgatagatacctgaaaccatggataattccagaacctgaagtcaatattgtgcgtcgagaaaaaaatgatcagtgtcttattctagcaagtgatgg

SEQ ID NO: 168857 - DNA, 135 bp, Glycine max
cgaatatgagcagcagtgcagggaagttggtgtgtgtcaccggtgctgccggttatattgcttcatggattgtcaagttcctacttgaacgtggttacactgtcagggccactgttcgaaacccaaatgatcaca

SEQ ID NO: 168858 - DNA, 133 bp, Glycine max
caggcgaggagaaagatggaggggaaggagcaggatgtgtcgttgggagcgaacaagttccccgagagacagccaattgggacggcggcgcagagccaagacgacggcaaggactaccaggagccggcgccgg

SEQ ID NO: 168859 - DNA, 134 bp, Glycine max
ggtcctagattcattttaatcgtaattctgcacttcttgatcattcgatttttctcctcaagatgcagatattcgtaaaaactttgaccggcaagaccatcacccttgaggtggaatcctccgacaccattgac

SEQ ID NO: 168860 - DNA, 104 bp, Glycine max
ctgaaatctgtggtggggttggcattcttggcattgcatgggactttggtggcatgatcttcatccttgtctactgcactgctgggatctcagggggtcacatt

SEQ ID NO: 168861 - DNA, 227 bp, Glycine max
caaacaaaccaaggacgagaacacgatgttgcttgaacttgcacttggtttattggttttggctctgtttctgcacttgcgtcccacacccactgcaaacccaaaagcacttcgccatctcccaaacccaccaagcccaaagcctcgtcttcccttcataggacaccttcatctcttaaaagacaaacttctccactacgcactcatcgccctctccaaaaaacatg

SEQ ID NO: 168862 - DNA, 258 bp, Glycine max
ataagcaaactggtcagtctgagggatatggattcgtggagttctattcacgagcgacggctgagaaagtcttgcagaactataatggcacgatgatgcccaatacagatcaggcattccgtctgaattgggccacattacgctgcgggggaaaggcgttcttccgatgctacttctgatctctctatatttgtgggggacttggccattgatgttactgatgctatgctgcaagacacttttgctggccgatattcg

SEQ ID NO: 168863 - DNA, 186 bp, Glycine max
aaacataattaacatgtcttcaagttccggtactagtgccacgccttaccccatcaaaacgattgtcgttttggttcaagaaaaccgttcctttgaccacatgttgggatggatgaagtccctcaacccggaaattgacggggtcaccggtttggagtcaaaccaggtttccacattagctccaaa

SEQ ID NO: 168864 - DNA, 224 bp, Glycine max
aaccctttgagagttagaatggctgctgctacggaaatccccacaatagtgtttccaaactcctctgcccaacagaggatgccagtggttggaatgggatctgcccctgacttcacatgcaagacagacacaaaggaggctatcattgaggccgtgaaacagggttacagacacttcgacactgctgctgcttaacgctctgaacaggctctcggtgaagctct

SEQ ID NO: 168865 - DNA, 258 bp, Glycine max
cttggtgcaaagcatcctccgtttcaatttctctctctcagcgctttctgcaatcgaacctttcatctccaaagggatccacaggccgaaggagaaatggggctgacattcacaaagcttttcagtcggcttttcgcgaagaaggaaatgcgaattctgatggttggtcttgatgctgctggtaagaccactatcctgtacaagctcaagctcggagagatcgttaccacaattcctaccatcgggttcaatgttgag

SEQ ID NO: 168866 - DNA, 248 bp, Glycine max
ccaaggtgctgtgaaggatattgctgcttcggttaactggcttaaagcaaatggctcaaagaaggctggtgtaactggattttgtatgggaggtgctctctctattgccagttctgtcttggttcaagaggttgacgcttctgtagcattctatggagttcctgcttctcaacttgctgaccctgcacaagccaatgctcctgatgatgctcattttggagagctggacacttttgttggcttttcag

SEQ ID NO: 168867 - DNA, 193 bp, Glycine max
  unsure (1)..(193): unsure at all n locations
ctcggttctgccttcacaaaaaaattatcgagatcccctttttctcctaagacaagccatggctaagggtcncggtctctactctgacatcggcaagacagccagggatctgctgttcaaggactaccacagtgaccagaagttcaccatcaccacctactcacccactggagttgctataacagcatcagga

SEQ ID NO: 168868 - DNA, 203 bp, Glycine max
gaattatttaatgcgcgaaaatgggcagtgaggagaatagtgtgtgatccacttctttcatcgcttcggatcttcaatctcatctccgatctcaaaatgcccgctgtttatggagctccgcttgaccaccttcgaagactccgagaaggagagtgaatacggttacgttcgcaaggtttcaggacccgtcgtcgttgcggatg

SEQ ID NO: 168869 - DNA, 250 bp, Glycine max
cctctatcgagtaaattaactatgaagcctaccctactattatccctttccttcctgcctctctctgctttcctggctctttcagaagatgttgaacaagttgtggacataagtggcaaccccattttcccaggtggcacatattacattatgccatcaacttggggcgctgccggtggtggattgaaactaggccggacaggaaactcaaactgcccagttactgttttgcaagattactcagaaatct

SEQ ID NO: 168870 - DNA, 245 bp, Glycine max
cgcgtgatcgggtacgacaacaccctatggaacggatctgtggtggcaccccctgatgctcctcttaggaagtatgttaggtactacagggcattcgtgctggagctcaacaaagccctcgctgtggaccccaggatcgagatttgcatgctcccggttggtgatggaatcactatctgccgtcggatcaagtgatttctgatcatcataatcgtggaccaccgttgcttcttctgcacacccta

SEQ ID NO: 168871 - DNA, 190 bp, Glycine max
ctcgaagaagccctaactacgcacgcactcattcttgagaaagctcaatattcattcgtccatggcactctcttctcgtctcttttccaaatccacattgatctatggctgtcaaatacttctgcaaaaggagcatgctattccagttcgtcactttgctaaagagtctgcccctcctgcccttaaggga

SEQ ID NO: 168872 - DNA, 239 bp, Glycine max
cacccatctacaagtaagcttggaattaagaagcagcaacaataataagtcatgttctagtattcattgtggaataaatttccgttccatttggagcagagttaagcatataatttgttatacaagttctttgaataagagtctgagtgtatcacctctaagctacgatcttcatgactcatatgaggttgcttctatttatttggtggccatttttcaagtgttgttcttactaagtt

SEQ ID NO: 168873 - DNA, 234 bp, Glycine max
cggatgccagacacgagccagttcgtggaggccgtggaggtggacgaggtgggggacgtggatttggacgtggtcgtgggtttagtcgtgactcctcgaatgatgagaactcattccctaccagcagagctccttataatcagggtccttttgaagaaggagatgctgggaagtcttctgaaagacgcagttatggtggaccacgagttccttaccgtggtggtcgtcgtggag

SEQ ID NO: 168874 - DNA, 244 bp, Glycine max
caggaaaaccctagctagtagtctcagttcgtttgagagagaaaaaatggcagagggtctcgttctccgcggaaccatgcgcgcccacaccgacgtcgtgacggcgattgccactcccatcgacaactccgacatgatcgtgacggcgtcgcgcgacaaatccatcattctctggcacctcaccaaggaggacaagacctacggtgtcccccgccgccgcctcaccggacattctcacttcgtc

SEQ ID NO: 168875 - DNA, 237 bp, Glycine max
atctgagatcggaaaattcagctctcgaatccccaatcccatcgttgcaaatgatccgattcattctgttgcagaacaggcagggcaagacccgtcttgccaaatactacgttcctctcgaggattccgagaagcacaaggtggaatacgaggttcaccgcctcgtcgtaaacagagaccctaaatacacaaatttcgtcgagtttcgtacgcacaagataatatacaggcgatatg

SEQ ID NO: 168876 - DNA, 236 bp, Glycine max
tatttaatgcgcgacaatgggcagtgaggagaatagtgtgtgatccacttctttcatcgcttcggatcttcaatctcatctccgatctcaaaatgcccgctgtttatggagctcgcttgaccaccttcgaagactccgagaaggagagtgaatacggttacgttcgcaaggtttcaggacccgtcgtcgttgcggatggcatggctggtgctgctatgtatgaactcgtgcgtgtt

SEQ ID NO: 168877 - DNA, 242 bp, Glycine max
  unsure (1)..(242): unsure at all n locations
cgagtgtgtttttgcaagacggtatggcgaaggacgttgaggttgctgagcgtggctccttctctgggaaggactaccaggancctccaccagcaccactcattgatgctgaggagctcacaaagtggtccttttacagggctcttattgctgagttcattgccactttgctcttcctctacatacactgtgctcacagttatagggtacaagcaccagacggatcatgctgatgcgtgtgg

SEQ ID NO: 168878 - DNA, 235 bp, Glycine max
ctttgttcactcttcttctcttgcggtctggtttagcgcagttcttctagatttaaggcagatgggtaaggcaaaggttcacatcagtattgtggtcattggtcatgtcgactctgggaaatccactaccactggtcacctgatttacaagcttggaggcattgacaagcgtgttattgagaggtttgagaaggaagctgctgagatgaacaagaggtctttcaagtatgcctgg

SEQ ID NO: 168879 - DNA, 130 bp, Glycine max
acatgcgtttggtgatcactatcgggcgactgacacagtaattacaggagctcggaaagctggaagctggtgtttgttccagcaggccagggtgatgagactgaattcgaggtgttgaacttcactggtg

SEQ ID NO: 168880 - DNA, 179 bp, Glycine max
cgtcaatagcattccgcaaaatggctgccaccaccttagtctctgaagtcactctcccctcctcctccggccagcggaagatgccgctgatgggcctcggcaccgcgccggaagcaaccagcgcggttaccacaaaagatgctgttcttgaggccatcaagcagggctacaggcacttt

SEQ ID NO: 168881 - DNA, 282 bp, Glycine max
gatctccgcaaccatgagtggtgttacatgctgtcttcgtttccctggtcaactcaactctgatctgaggtaactcgccgtgaatctcatccctttccctcgtctgcacttcttcatggttggatttgcgcctctaacctctcgtggctctcagcagtaccgtgcattgacagttccagagctgacacagcaaatgtgggatgccaagaatatgatgtgtgccgctgatcccaggcacgggcgttacctcacggcatcagccatgttccgtggcaagatgag

SEQ ID NO: 168882 - DNA, 283 bp, Glycine max
actctccttctcgctctttcagctttgacttttgttggaaactaaggcctaatcaaaatggtgaagttcacagctgaagagctacgtcgtattatggactataagcttaatatccgtaatatgtctgtcattgttcatgttgatcacgcaaaatcaaccctcactgattctcttgtggctgctgctggtattattgctcaagaagttgccggtgatgtccgtatgactgatacccgtgcatatgaagctgagcgtggtattaccatcaagtctacaggtatct

SEQ ID NO: 168883 - DNA, 284 bp, Glycine max
acgtttgtagtgtagcaggaacaagcagcaatggcgccgaagtaacacgcaaggttagcagaaaccccgaattgataaggggaattggaaagtactcgaggtcgcagatgtaccacaagacgggcatttgggctatcaaggccaaaaatggtggcgttttacctcgccacgaccctaaacccaaacctgaaacacccgctgaaaaaccacccaaattttaccctgctgatgatatcaagaagccccttgtcaacaagcacaaacccaaacccgctaagctcagg

SEQ ID NO: 168884 - DNA, 285 bp, Glycine max
ttcaaaaaacaatcccttgagatcaccgttgacttgtccaaacgttccattgtctccaccaatgtctacattggccatggcttccccatgctcacgttcgatgagcaagactttgtggccgagcttccttttaagtataaacccttcattgaatcagtgaacaaacgaggccttaatatatctgaagttgtgtgttctactgcctcggttgggtggtatggggagataaagagcaaaaggacactgaagcttcagtgctttcacacacaagggtctataaatttg

SEQ ID NO: 168885 - DNA, 260 bp, Glycine max
catctccgcaaccatgagtggtgttacatgctgacttcgtctccctggtcaactcaactctgatctgaggcaactggccgtgaatctcatccctctccctcgtctgcacatcttcatggttggattcgcgcctctaacctctcgtggctctcagtagcaccgtgcattgacagttccagagctgacacagcaaatgtcggatgccaagattatgatgtgtgccgctgatcccaggcacgggcgttacttcacggcatcag

SEQ ID NO: 168886 - DNA, 283 bp, Glycine max
gcagacaccaaatctaaaatgtggttcagattcctttaccccatcagatcttcgagactttgccaaatctcaggctgattacgtattgggcaagaatcctatgcatatgagttttctggtgggctatggagataaataccctcaatttgtgcatcataggggtgcttcaattcctgctgatgcatcaactggctgcaaggatggcttccagtggcttgagtcatctgatcctaatcccaatgtagctactggagcacttgttggtggacccttcttaaatgag

SEQ ID NO: 168887 - DNA, 282 bp, Glycine max
ctcttctcttgcggctagggttttagcgcacttcttctagatttaaggaagatgggtaaggaaaaggttcacatcagtattgtggtcattggccatgtcgactctgggaaatccactaccactggtcacctgatttacaagcttggaggcattgacaagcgtgttattgagaggtttgacaaggaagctgctgagatgaacaagaggtctttcaagtatgcctgggtgctggacaaacttaaggctgagcgtgaaagaggaatcaccattgatattgctttg

SEQ ID NO: 168888 - DNA, 284 bp, Glycine max
ccctcgccgctttgtgctgctgctgctgcaaaacctagggttgagccttttgctcaggttttcagcgcttctttcttacaatggttctacagaacgatattgatttgctgaatcctccagctgagttggagaagagaaagcacaagctcaagcgtcttgtgcagtcaccaaactctttcttcatggatgttaagtgccagggctgcttcaacataacaactgtgtttagccactctcagactgttgtggtttgcggaaactgccagactgtgttgtgccaacca

SEQ ID NO: 168889 - DNA, 275 bp, Glycine max
tgtttgttgttgtaactcgttcttcttcttttgttgttctgtgtttgtgtttgttttttctctcacctgaaaatgtcttgctgcggtggtaactgtggttgcggaagctgcctgcaagtgcggcaacggctgcggaggctgcaagatgtacccagacttgagctacactgagtcaaccaccaccgagaccttggtcatgggagtggcacctgttaaggctcaatttgagggtgctgaaatgggtgtgcccgctgagaacgatggctgcaaatgtg

SEQ ID NO: 168890 - DNA, 280 bp, Glycine max
accggggcagaggaaggggcagagttttggagtttgaaagagaaaatattgattgcagttgagttctaatgagtaacgaatacgattacctgttcaagcttctcctaatcggagactcttccgttggaaaatcctgcttgcttctcagattcgctgatgactcctatgtcgacagctacataagtaccattggagttgatttcaaaatcagaacggtggagctggaagggaaaaccgtcaagctgcagatttgggatacagctggacatgagcgattcag

SEQ ID NO: 168891 - DNA, 283 bp, Glycine max
ctaaatcggagtttcagtttcacccctcttttctcatctctaacatcatagtcctcagaggctagtcttcctattatcacaaacaatgtctgacagtcaagaatctgacaagaacattgagatatggaagatcaagaaattgatcaaggctctggaagctgctcgaggtaatggtaccagcatgatttctctgataatgcctccacgcgatcaaatttcccgggtcactaagatgttgggagatgaatttggaactgcttcaaacatcaaaagtagggtgaac

SEQ ID NO: 168892 - DNA, 285 bp, Glycine max
ccgattgctagaatggaatttcgatgctcagtcatctcttttaccattctcttctctcttgctcttgcaggagagagccatgtccatgcatcgctacctgaggaagattattgggaagctgtttggccaaacactcccattcccactgcactgcgagagcttctaaagcctctccctcgcaggtgttgaaatcgatgaactccctaagcaaattgatgatacacagtacccaaaaacattcttctataaagaagaccttcatccaggcaaaacactgaaagtaca

SEQ ID NO: 168893 - DNA, 271 bp, Glycine max
caagattacggaatactttgaggcaattccaggagtcccatcaattcaagagatgtacaacccagcaacatggatgctagaagtgagttctgtagcagctgaagttcgtcttggaatggactttgctgaatactacaagacatcatctttattccagcgaaacaaagctcttgtataggagttaagcacacccccgcctggagctactgatttgtatttccccaccaagtattctccctccacattggggcaatttaaatcctgtttttgg

SEQ ID NO: 168894 - DNA, 279 bp, Glycine max
ctgaataaagcagagaagaataagaaaatgggtgtgttcagtacagtgctgctgtgccttatgtccctaatgtggatggtggatgctcgaattccaggcgtatactctggcggcgcttggcaaaatgctcacgctacgttctacggaggatccgatgcttccggcaccatgggtggagcatgtgggtacgggaacctgtacagccaagggtacggagtgaacactgcagcgttgagcacggcactcttcaacagcgggctgagctgcggacgtgcttcg

SEQ ID NO: 168895 - DNA, 281 bp, Glycine max
caagaatcagggttatggttgctggaggtgatggtacagttggttggttattaggatgtctaacagaacttcgtgcacagggtcgagagccagttcctccagtagggatcgtaccactggggacgggcaatgacctgtctaggagttttcgttggggtgggtcatttccgtttgcatggaggtctgcaattaagagaactctacaaagggctagtaatgggacagttaatcgtttggatagttggcgagtttcactttcaatgctcgaaggtacacctgtg

SEQ ID NO: 168896 - DNA, 285 bp, Glycine max
cgataggttctttgcttggagtgagtgcgagtcaattcttgctggtttctttcgttagccttggaacaaacaaacataccagtcaaaaatcaaaatctcagagttgtttgaacgagaaattgaaatgtctcagaccaagaaattgacgccgaatctggatcagcagagcacgaaggtgctgaatctcaccgtgctccagcgaatcgatccgtacatcgacgagattctcttcactgccgcgcatgtctccttctacgacttcaacatcgaaagcaaccagtggag

SEQ ID NO: 168897 - DNA, 285 bp, Glycine max
cgaggcgcagagtagagcagcagagaagagagaaaacggcactgcagccgtagaaggaaaaccgaccatggtgcacgtctccttttacaggaactatggtaagacgtttaagacgccccgccgtccgtacgagaaggagcgtctagacgcggagctgaagctggtgggggagtacgggctgcggtgcaagagggagctgttgagggtgcagtacgcgctcagccgcatccgctacaacgcgcggaatctccttaccctcgacgataagaacccgcgccggatctt

SEQ ID NO: 168898 - DNA, 294 bp, Glycine max
tcggaatcggctgacacctcgagtcgagcgttttctcaaaaagttgcaagagtcacagcaaaaaccaaagtgcgagacacaatgatgaagccatcgatgctcagatctcttcactctgccgccacccgcggcgcctcccacctctcccgccgtggctacgcctccgagccggtgccggagcgcaaggtggccgttctaggtgccgccggcgggatcgggcaacccctctcccttctcatgaagctcaaccccctcgtttccagcctctccctctacgatatcgccggaactccc

SEQ ID NO: 168899 - DNA, 276 bp, Glycine max
catcatctttagttcttcagtaatttattgtgggattctattctaagattttgagaatgtctagctgtgggtgtggaagcagctgcaactgtggcagcaactgcggttgcaacaagtactcttttgacttgagttacgttgagaagacaaccacagagactctagttttgggtgttgggcctgtgaaggccaatctggagggtgctgaaatgggtgttgcatctgagaacggtggctgcaactgtggatcaagctgcacctgtgacccatgcaact

SEQ ID NO: 168900 - DNA, 283 bp, Glycine max
ctttccaatttgaattgttccattttcatttctttcgcaaaatttgcaactacttcctcagataaaaagtatctaagttaaggaaatccagagagatcacaatagccggtcaacgtccagctacatgcatagacatcctccttgacatcatttctcctcctcttggtgttctcctcaaatattgctgctaggtggagttctggatttgtttggtgctgaccctttttggttatatacctggacatatctatgctgtctatgctatcaccaagtgatcaccctt

SEQ ID NO: 168901 - DNA, 279 bp, Glycine max
aaaagaacacatggaagtctgtgatcttgatcctaagttgttacaaggttaagtgttccttggaggaatcagagaaacaggttttgaaacaaggttctttccagaggttatgtctatcagatgtgagcaattcaagctccactcaggccattgaagacatttcaatttcatttgctggctcaaagctctatgcattcacacttgaggagctaagggaagcaacaaacagtttctcatggagtaacatgctaggtgaaggagggtttggacctgtctaca

SEQ ID NO: 168902 - DNA, 278 bp, Glycine max
aatcatctttagttcttcagtaatttattgtgggattctattctaagattttgagaatgtctagctgtgggtgtggaagcagctgcaactgtggcagcaactgcggttgcaacaagtactcttttgacttgagttacgttgagaagacaaccacagagactctagttttgggtgttgggcctgtgaaggccaatgtcgagggtgctgaaatgggtgttgcatctgagaacggtggctgcaactgtggatcaagctgcacctgtgacccatgcaactgc

SEQ ID NO: 168903 - DNA, 281 bp, Glycine max
ccaacatctcatacacttgtgtgtcatagggtggtctcctttggtgagaattgagaagacactcaattcatcaccttttccctctctccttttccaaagaaaaagaaaaaaagaagatcaattccaatggaggtttcatgcaaaattttgagaagatcaatccacagttttcttcaaaactaccattattttacctcaactgcagcttttctagcccttcctttctccgcatcaatactcctatcagaagcttttgtgccagcctcttcatccctcttgcc

SEQ ID NO: 168904 - DNA, 277 bp, Glycine max
gcactatagaaaaaacgacattcattcatctatggctacccttattgctcccagcaaccactctccccaagaagacgctgaggctctcagaaaggcttttgaaggatgggggactgatgagaaaactgtcatagtaatattgggtcatagaactgtttatcagaggcagcaaatcagaagagtctatgaggaaattttccaggaggatcttgtgaaacgcctagagtctgagatcaaaggagactttgagaaagccgtgtaccgatggatactagaa

SEQ ID NO: 168905 - DNA, 280 bp, Glycine max
caaatagggttagggttagggtttatgcaatcgaattcctgagacggtgcatttgtacgtaatcgatggcgaatcgcacggatccagcagctaagagcataaggggcacgaaccctcagaacctggtggagaagattctccgatcgaagatataccagaacacctactggaaggagcaatgtttcgggttaacggcggagacgttggtggacaaggccatggagctcgaccacctcggcggcacctacggcggaaaccgcaaacccacgccgttcatgtg

SEQ ID NO: 168906 - DNA, 274 bp, Glycine max
gcatattcacatgagctgccacgatatggtcttgaagtaggacttacaaattatgcagcagcttattgcactggtctcctgttggcccgaagagtcctcaaaacacttgaaatggatgaggagtatgaaggaaatgttgaggctactggagaggattattcagtggaacctgccgagagcaggaggccattccgtgcactccttgatgttggtcttgttaggactacaacaggaaatcgcgtctttggtgcccttaagggagctctggatgggg

SEQ ID NO: 168907 - DNA, 282 bp, Glycine max
ctagggttaacatttctccatttccattttctctctcacttttcaagaatcgtaagctatgggaaagtcttacccaactgtgagtgctgattaccagaaggccgttgagaaggcgaagaagaagctcagaggcttcatcgctgagaagagatgcgctcctctaatgctccgtttggcatggcactctgctggaacctttgacaagggcacgaagaccggtggacccttcggaaccatcaagcaccctgccgaactggctcacagcgctaacaacggtcttga

SEQ ID NO: 168908 - DNA, 281 bp, Glycine max
ctcgtttattctcagaaccttctgaggttaaagcaaaaaacaaagagagagagagagagaacatgatgaagccatcgatgctcagatctctccactccgccgccacccgcggcgcctctcatctcttccgccgtgggtacgcctccgagccggtgccggagcgcaaggtagccgttctcggcgccgccggcgggtatcgggcagcctctctcccttctcatgaagctcaatcccctcgtttcgagcctctccctttacgatatcgccggaactcccggcgt

SEQ ID NO: 168909 - DNA, 278 bp, Glycine max
gtggtttcagtgagtgatcggtgttcacttgatccttcataagtcgtcatcatcatcatcatcatcaccgttgattgaagaagatgccgatcagaaacatcgccatcggaaggcctgaagaggctactcaccccgacacgttgaaggcggggttggctgagttcatctccaccttgatcttcgtgttcgccggttcaggttccggcatcgcctacaacaagctcaccgacaacggcgccgccactcacgccggcctcatctccggttccatcgcccat

SEQ ID NO: 168910 - DNA, 279 bp, Glycine max
acgacacccgcatcaaaagtcactccattcccatcacaatacaatatccagcatttcgcttagcgtaggaaatggaagtcacactttcatcctgcaagtccattagctcgccgtctgttcccgtcgcaggtttgtttgcggggaatggaggaattaagagctcgcaatgcagtttcttagcgggatcgagcaaagtcaggtttcctaggcaagtaggtcaagttagccaccttcgcaaacagcgccaaacgcgtcactgcggtgctctccacgcgactt

SEQ ID NO: 168911 - DNA, 277 bp, Glycine max
agcgcaccggaagcgcccacggttgggatatcatcttttacattttcagcttcctcaagggcatctcgctcttcactctcattgtcttgattggcactggctggtccttcctcaaacccttccttcaggataaggaaaaaaaggttctcatcgttgtcatcccccttcaagtcattgccaacattgctcaggtcgttattgacgagaatgggccctacggccatgactgggctacctggaaacaggtcttcctccttgttgatgtcgtctgttgctg

SEQ ID NO: 168912 - DNA, 267 bp, Glycine max
tagtgttagttatagcaatctgaagaacggcatgatagcattcttagtccctctaccctccatcctattctacctctcattccaatcggccattagtactccttcttcttggtcttctctgtggacatggtgctatcaccagcctctgctattggccaatgtccttttcttcttcaatgtcaatttcctcttctggctcatcggcctaatccaatccagccactggatgattgacccgtattggacagtgatacctgtgatgcttgt

SEQ ID NO: 168913 - DNA, 277 bp, Glycine max
cgcaacaaaaagaaagaatcccaggcgaggagaaagatggaggggaaggagcaggatgtgtcgttgggagcgaacaagttccccgagagacagccaattgggacggcggcgcagagccaagacgacggcaaggactaccaggagccggcgccggcgccgctggttgacccgacggagtttacgtcatggtcgttttacagagcagggatagcagagtttgtggccacttttctgtttctctacatcactgtcttaaccgttatgggagtcgccgggg

SEQ ID NO: 168914 - DNA, 277 bp, Glycine max
ctcttctcttctttgatctccgttaccctttttgttttctcaacagagagagagagagagaatctttcgaagttcgtttgcgtgtgttgtgtggtcagtcaccgatggcagcaccacctgcgagggcacgtgccgattacgattacctcatcaagcttcttcttattggcgatagcggtgtgggaaagagttgtctgcttttgcgattttctgatggttccttcacaaccagttttatcaccaccattggcattgattttaagataagaaccattga

SEQ ID NO: 168915 - DNA, 276 bp, Glycine max
ctttggttgaaagtagcaaagatgtttcctttcgggcaaaagggtcaaaagataaaggggactatggtggttatgcagaagaatgtgttggatatcaacagcatcaccagtgttggagggatcgttgaccaaggcttaggcttcataggcagtgcagtcgatgcacttacttttgcagccaccaaaatctccatccagttgattagtgctaccaaggctgatggtgggaaaggaaaaattggaaagagtacaaatttaagaggcaagataacatta

SEQ ID NO: 168916 - DNA, 278 bp, Glycine max
gtcatctcaatgagtttgacagtggttacttctcttcttgagaagtatgggattgatcctaaacaaatcggtcgtctggaagttggaagcgagaccgtgatagacaaaagcaaatccatcaagaccttcctgatgcagatcttcgagaaatatggaaatactgacattgagggtgttgattcaactaatgcatgctatggaggaactgctgctctgtttaattgtgtcaattgggtggagagcaattcatgggatggacgctatggacttgttgtctg

SEQ ID NO: 168917 - DNA, 277 bp, Glycine max
  unsure (1)..(277): unsure at all n locations
aaaacatctcaatgggttcttcttctattacaacatcgntacaaaccatgacctcggctgcgatcgtgctcctgttcacggtctttgccgtttcctccgccctagacatgtcgataatctcgtacgacagcgcccacgcggacaaggccgccaacttgcgcaccgaggaggagctgatgtccatgtacgagcagtggctcgtgaagcacgggaaggtgtacaacgcgctcggcgagaaggagatccgcttccagatcttcaaggacaacctgcgatt

SEQ ID NO: 168918 - DNA, 276 bp, Glycine max
aacttgttggccaacaagggtctcttaagttctgacgaaattctcttgacaaagaatcaagtatcagcggatttagtgaagcagtatgcagaaaacaacgatcttttctttgaacaatttgccaagtccatggttaagatgggaaacattactcctttaacagggtcaaggggagagatcagaaagaactgcagaggaattaacaagtgatgtagtgatatcattgtcatgtgacacgtgtgaaagttgcacctacattttacttttcttcctctt

SEQ ID NO: 168919 - DNA, 264 bp, Glycine max
cacactacaccgatatttccaccaaacccgtttgcgttgttgtttgcgaataaatggcgactaagaggagcgtgggaacgttgaaggagggtgatttgaaggggaagagggtattcgtgagggtcgatctgaacgtgcctttggatgacaaccttaacatcaccgatgacactagagtccgtgctgctgttcccaccatcaagtacttgactggttatggtgctaaagtgatcctttctagccatttgggacgtccaaaggtgt

SEQ ID NO: 168920 - DNA, 275 bp, Glycine max
ggggaacacggagaagctgatgaaccagatcatggaattgaagttcacgtcgaaatcgctgcagcggcaatcgcgtaagtgcgagaaggaggagaaatcggagaagctgaaggtgaagaaggcgattgagaaaggcaacatggacggagcgcggatctacgcggagaacgcgatccgtaagcgcacggagcagatgaactacctccggcttgcctcgcgcctggacgccgtcgtggcccgcctcgacacgcaggcgaagatgacgacgatcagca

SEQ ID NO: 168921 - DNA, 278 bp, Glycine max
aattaacctcactcaaactcgggatcacagaaaccaacaacagttcttgcactgaggtttcacgatgttgctggaacttgcacttggtttgtttgtgttagctttgtttctgcacttgcgtcccacaccaagtgcaaaatcaaaagcacttcgccacctcccaaaccctccaagcccaaagcctcgtcttcccttcattggccaccttcacctcttaaaagataaacttctccactatgcactcatcgatctctccaaaaagcatggccccttattct

SEQ ID NO: 168922 - DNA, 273 bp, Glycine max
cttagttctgccacacaggatccagggccctctaacactcttgctcttccaggtccaggagattccaaggattctcagaaaggaggaccccaaaatgccttggttgttggtccaactatgccatccacaacaccgaatgatactggctttcagagcaaaagtacagcggttgtttcagcctctggttcatctgaaagaaatttatcaacatctgctttgatggaaagaatgccaagtaaatggccacgtcctgtatggcatgcaccatggaag

SEQ ID NO: 168923 - DNA, 277 bp, Glycine max
attggggtcacttccttgtacattggttggggtctagatggctctgtctggatttcatcagaattgaaggggttgaatgatgattgcgaacattttgagtcttttccacctggtcacttgtactctagcaaagagagagcgtttcgcagatggtacaatcctccatggttctctgaggctattccctcagcaccttatgatcctcttgctttgaggcatgcctttgagaaggctgtggtaaaaaggttgatgactgatgttccctttggtgttttgc

SEQ ID NO: 168924 - DNA, 278 bp, Glycine max
tccaaatacagaaatatcattttccgagacaatcccatcttccatttccatcttcaatatttcttctcatcgagaagcttcgcgaacgaaaacaaagaaccctagacagatccattccatagccatgtcaggtgttggccctctatctcaggattgggaacccgtcgtcctccgcaagaaggctcccaccgccgccgccaagaaggacgagaaagccgtcaacgccgcccggcgctccggcgcggaaattgaaaccctaaaaaagtataatgctggga

SEQ ID NO: 168925 - DNA, 275 bp, Glycine max
gcgttcatgatttacccgacaagggaactcgacaatactatgttgctatggcccacagagaccgaatattccggggccggagactcgccgccggttaccactcgcctctcacttttatcccctccaacgagacttatcagattgaagcctttggattcttgcattttgccaatgtttctgttgggactccaccattatcgtttctggtggcattggatactggcagtgacttgttctggttaccttgcaattgtaccagatgtgtgcatggtata

SEQ ID NO: 168926 - DNA, 277 bp, Glycine max
ccaaataggagtctgtgtaagggaagaagatggtgtcaggttctggaatctgcgcaaagcgagtcgtggtggacgcccgccaccacatgttgggtcggctagcgtccatcgtggcgaaagagcttctgaatgggcagaaggttgcggtggtgcgctgcgaagagatttgcatctccggcggtctggtgaggcagaccatgaaatacttgagattcctccgcaaacgcatgaacaccaaaccctcccatggccctatccacttccgcgccccagccaa

SEQ ID NO: 168927 - DNA, 266 bp, Glycine max; identical to SEQ ID NO: 138927

SEQ ID NO: 168928 - DNA, 221 bp, Glycine max
cggcaccagcgaaacgctcttcgttatcttttctcagactccgcggcgtagatccgaggagttcgggaaatcctaactcatcatctcaactcaagtcatggctggacttgcacctgagggatcacagttcgatgctcgtcaatatgattctaaaatgagtgacttactttcatctgatggacaggacttcttcacatcttatgaggaggtttatgatagtt

SEQ ID NO: 168929 - DNA, 253 bp, Glycine max
cacgcatttcctcgttttcttcttcttcccttttctctcttctctctctttctccggcgacgatctcagattccggtcactcctctcgccggcgatcccttattcctccgtcctccgtcgagtcctttccgattcgaatcgttcccagccttgtgccaccatgaatcccgaatacgattatttgttcaagcttttgctgattggagattctggtgtaggcaagtcatgtcttctcctgaggtttgctgatgat

SEQ ID NO: 168930 - DNA, 232 bp, Glycine max
aacacaacaacactctctcttctcgctcttggcttttcgctcttcactcactctcattcattcatttccaccgttcatggatccactaagcgtgtggggtaacacgcccttggcgacggtggatcccgagatccatgacctcatcgagaaggagaagcgccgtcaatgccgcggaatcgagctcatcgcctccgagaacttcacctccttcgccgtcatcgaggccctcgga

SEQ ID NO: 168931 - DNA, 252 bp, Glycine max
ctcacaaggattgagtgttggatctagtcatctagatttaaaaaaaaaatgaagatcattgagaaaattcgcgcagttactgctgatccaaacagggtggtgttctcatttgagttcttcccccccaagactgaggatggtgtggacaatctgtttgagaggatggaccgcatggtggctcacaactcctctatttgcgacatcacttggggcgctggagggacaacggctgatcttacatcggaaattgcc

SEQ ID NO: 168932 - DNA, 253 bp, Glycine max
ggcttccaaggagttctctggtctttgctccttggctccttcactatctgagagcattttgtgcactactgggttgaaaatgtatatgctggagagcaaaggaggtgccatagcatgcatgttcttgcctcttttcttcttggggacatggcctgctcttttgactatgttagagaggcgtggtcgtcttcctcagcatacctaccttgattactcaatcaccaatttcttggctgctttactcattgctttt

SEQ ID NO: 168933 - DNA, 253 bp, Glycine max
atcaattctaattctgatttggttcggaaagaagtggtcgtaagtcatttctctcttgtaaatatggcagccgatacggaacctaagaagatcataattgataccgaccctggcattgatgatgctatggcaatattccttgctctacaatcacccgaagttgaagttattggactcacaaccatctttggaaatgtgtacaccactctggcaaccagaaatgccttgcatttgttggaggttgctgggagaa

SEQ ID NO: 168934 - DNA, 250 bp, Glycine max
acacactctcatagctgtagacggcgacactaagatcggagaaagaatggcgaaaacgacgtcgttgctgctctttacactgctcctcttcggaaccctagctctcatccaggcgaagaaatcgaaggaggatttgaaggaggtgacccacaaggtttactttgatgttgagattaatggaaaagaagcaggtcgtattgtaatgggtctttatgggaaggctgtccaaaaactgcagaaaacttccggc

SEQ ID NO: 168935 - DNA, 253 bp, Glycine max
tgttgccgtgcagaaatacttcagacatggtccttggtaccacgaagctgatatgaggacaggaagagcaacttattggcagcttacaagccttcaagcattttggcctggcctacaggttcttattggggatgttatcgctgccaattcatctcaccgggagtttttccatgtgtggaagaactatggagtgctaccagagaggtatttgctggattatcagatgcttcaccctactgagaaatattaccct

SEQ ID NO: 168936 - DNA, 250 bp, Glycine max
cgaatagccactttgcgcaccacgatgaggtgatgcttctgggacacgacgataagtatttgccagataggggcatgcaggttacaatcgcgtttaatcacttcggtgagggtctggtgcagcgtatgccacgatgcaggctcggttacatccacgtcgttaataatgacttcacgcagtggaagatgtatgctatcggcggtacgctaaccccaccatcaacagccagggtaaccgttacaccgctccc

SEQ ID NO: 168937 - DNA, 252 bp, Glycine max
gtcgagttcaacgctgctccacccagtccacttttccatgatgtgaaaagcgaggatgaatacaatgaagaagaggaagaagaagaagaagaagaagaagaagaagaagaagaattggacagtgatgatgatgatgaggatgcagacgaagatgatgatgtttcgagcaaccatgtttcaacgccgttcatgaatccagggtcaaaagggcatggctgccaatcgaaccagtttgcgatattggatattttg

SEQ ID NO: 168938 - DNA, 250 bp, Glycine max
aacttgcagtaatggcttcaatgaataaccaaaaagaaattgagctctttgagggccaatctcttctgtacatgcagctatatgggcacctaagacctatgtgtcttaagtgggctgttcaactaggtattccagacataatacagaatcatgccaaacccatttctctttctgacttggtctctactcttcaaattccaccagctaacgctgcttttgtgcagcggttcatgcgcatcttggcacacaa

SEQ ID NO: 168939 - DNA, 252 bp, Glycine max
caaaagattgcaatgtttgacaagaatggtggtttacaggctctgattcaatatccagatatccaaacagctgttgtggccaaggaagccttggaaggacactgcatatatgatggaggtttttgcaagcttcacatctcgtattcgcgtcattctgatcttagtataaaggtgaataatgatagaagtagagactatactattcctaatgtaccaccacctgtagtgaatgctcagccctcaattttaggg

SEQ ID NO: 168940 - DNA, 249 bp, Glycine max
ctcgagcgattcggctcaggtgttgacgttttctttgttcttcactgtgtatgcgaccatggtggatcccaagaagggagcacttgctgggcttgggccaacgctggttgggtttgtggttggggccaacatcctcgcaggtggggcttactctgctgcttctatgaacccagcaaggtcttttgggcctgccttggtcgctggaaactggaccgatcattgggtttactgggttgggcctctcattgg

SEQ ID NO: 168941 - DNA, 254 bp, Glycine max
caatgttgttagaaagccagtccaaaccctcatagagacatttgaaaatttttggtcttgtctggtgatttcctgctgagtatggcggttcttggagaaagatgcttatcctttcttgtcaatgttgtaatagcagaatgcttgctagaagtattctcttcttttgtgtaacttgggtttgtatgattgcttaaattagctaatacttttagctataattggaactcttggatcctcttgtgcgtgccttgttt

SEQ ID NO: 168942 - DNA, 252 bp, Glycine max
tctctctcacactttctctcagcgttgaaacttgaaattcttcttctccgaaacctctttgaaccgggtcaagaaataaacctcgctgggaaccgttgattgggtttgtacgaataatttgaaatgaagattcagtgcaacgcgtgcgaggccgcggaggccaaggttctgtgctgcgcggacgaggcagcactgtgctgggaatgcgacgagaaggttcacgcagcaaacaagctcgccagcaagcaccag

SEQ ID NO: 168943 - DNA, 248 bp, Glycine max
cggctcgagcggctcgagacttgatcaccttttttgagaaaagatatatatcaatggcaactccgagtgtgttagaagtccgccctcctgctttaacttccatctctgaaccacttccattttttgatggaaccacaaggttatacatttgctatctgtgcccttttgcacaacgcgcatggataactaggaactgtaagggattgcacgacaagatcaatttggttcctattgatcttaaaaacagg

SEQ ID NO: 168944 - DNA, 253 bp, Glycine max
accaaaccaaagcaagaatagtgttctaagagtgagcaacaacttcaaacaccattgtgagaaatggcttccaagggtgcacttctcttgtgtctcaacattctcttcttcactgtggtaagctccacatatgtcccatgcaacccaccccctaaaactcctaaacacacacctgtcccaaagccaccttccccaaagcaaccaagttgccccaaagacaccattaagtttggtgtgtgtgctgatgtgttag

SEQ ID NO: 168945 - DNA, 249 bp, Glycine max
gttcatttctacacatccctagctctgtcgttccgtcgttgacgatggcgtttcgggtgcgaagccctgacctccgctctctctttcttctctctctcttgtccatcgcttccgccaatgtcttcttcgaagagcgtttcgatgacgggtgggaaaatcgatgggttaaatcagattggaaaaaagatgagaacgtggctggggagtggaaccacacctctggtcaatggaatggagacgctaatgaca

SEQ ID NO: 168946 - DNA, 251 bp, Glycine max
gccaaattaaatatttggtatactgcatggagaatgctattctaaatcttccaccagaacaggaacagatggtctggttgattgatttccagggtttcaatatgtcacacatatcaataaaggtgacacgtgaaacagcccatgtattacaagaacattatcctgaacgtcttggtctggcaatactgtacaatgcacctaagttctttgaaccatttttcacgatggtaaagcccttattagagactaag

SEQ ID NO: 168947 - DNA, 256 bp, Glycine max
gacgttaccaaccttgggagataggagagatgcatacggtattcattttgaatgggatgctaactttggaattccaggagcaatttacatcagaaactatacgtatgatgagttcttccttgtcagtgtcactcttgaggacattccaaatcaaggaaccattcactttgtttgtaactcatgggtttacaactttaaagactacgacaaaaaggatcgcattttctttgccaataagacatatcttccaagtgca

SEQ ID NO: 168948 - DNA, 248 bp, Glycine max
caaagaatatgaatcagggccaatcatacttcatttggattctttgggtcttcactctagtaaatcagtttttgataatattaaaagctatttgattgaagaaaagaactatatggatcgagaagatgtgtctttagatgtttcaattgcggatagaatatggaagtgccttcctcgtagaattgaatctcaaatcatccaggttccccaacagaagaatgaatatgactgtggtctttttgtattgt

SEQ ID NO: 168949 - DNA, 123 bp, Glycine max
ctaaaacgtccacacattctccgtcgccacaacaacaatggctccgaagaaaggtgtaaaaggttccgttgtagcagcgaagaagaaggttcaggagaaggtgacgaatcctttgttcgagaa

SEQ ID NO: 168950 - DNA, 253 bp, Glycine max
gtaaaacctcagtctctcactcgcagatctttcactcacccaaaaccaagctagtccgaggaagtcctctattcagaaccagatatggagacaaaacccaccgagatcagcagcggcaagatgttcggaggctacaacaagaggttcagacatttcagccctaccctcggctgctccatgaacttccacatctacttcactccatctccttctccctctcacaaattcccagtcttgtactttctctctggcc

SEQ ID NO: 168951 - DNA, 248 bp, Glycine max
cgagaagcaccagcgcgtgtggctgggaacgttcaacgaggaagacgaggcggcgcgtgcgtacgacgtcgccgtgcagcgattccgcggcaatgacgccgtcacaaacttcaagccgctctccggcaccgacgacgacgacggggaatcggagtttctcaactcgcattcgaaatccgagatcgtcgacatgctgcgtaacatacgtacaatgacgagctggaacaaagcaagcgcaccgcggcttc

SEQ ID NO: 168952 - DNA, 193 bp, Glycine max
tgaaaatcttccaccaaatgtaattaaacaacttgccaaggagttgaaaagtcttgatgaatcccctcctgagggcattaaggttgtggtaaatgatgatgatttttcgacaatattttctgacattgaaggcccaggtaagtagctttcatgtggtatgttgcatgattgagaactcccattgggtagggcc

SEQ ID NO: 168953 - DNA, 248 bp, Glycine max
gaaacattatctgctgttaagtctcagcaaataaaggataataaccctcactttggcattgattgtaatgatgttggcactaatgacatgcgtgagcaaaatgtctttgaaactttgatcggaaagcagcaacagctcctactcgctactcaagttgtcaagatgatactgaaaattgatgatgtcatctccccatctgagtactgatatttttaaactcagtcatggtctacgtcaagatgctgaat

SEQ ID NO: 168954 - DNA, 249 bp, Glycine max
gaaaatcctcacccattttcttcgtagccaaacactctgaaattctcagttatgtcgtggcaagcgtatgtggatgatcacctactgtgtgaaatcgaaggtaaccacctcactcacgccgctatcatcggccaagacggaagcgtttgggctcagagcaccaacttccctcagttcaaacctgaggaaataactgccatcaataatgactttaatgagcctggatcacttgctccaactggattgtat

SEQ ID NO: 168955 - DNA, 247 bp, Glycine max
gttgacatgaagtccatgtttcagttacttgaggaaagagcagatattagggataaagaaaatgcaaagcctctgaaatttaacgggggaagaatccaatttgagaatgtacattttagttacctcacagaaagaaagatactagatggaatatcatttgttgtgccagctggtaaaagtgttgcaattgttgggactagtggaagtggaaaatcaaccattcttagattgctattcagattctttg

SEQ ID NO: 168956 - DNA, 245 bp, Glycine max
caggctctggttttgcggttagggtagctctttctactcaaaacaaaacaaaacatcaatttctgtttcagttcgcggagatcaatatttgtcgctgaggtcgatcgtcgataaaaggcaatgtttttgtgggattggttttatgggattctagcgtcgcttggcctgtggcagaaggaggccaagatcttattcttgggcctcgataacgctggcaaaaccaccttgcttcacatgctcaaaga

SEQ ID NO: 168957 - DNA, 248 bp, Glycine max
aactattatgaaatcgacaatacacctactggaacttgtgctgtttgtgtggttggcggtgaaaggtcccttgttgccaacttatcagctgcaaattgctataagtctgagcatttgacgagaccggaaaattgggcattagttgaaaaggccaagtatttctacatttctggctttttcctcactgtatctcctgattccatacaattagttgctgaacatgcagctgcaaataacaagttcttcat

SEQ ID NO: 168958 - DNA, 247 bp, Glycine max
acgttttccgatcctctttctcgtcgccaccctcatcaccctcgcctccggtgcacgccacgatattctccggttaccctccgaagcttccaggttcttcaaagcacctgctaatgccgatcaaaacgatgagggcaccaggtgggccgttttagttgccggttccaatggctactggaattacaggcaccagtctgatgtttgccatgcatatcaactactgaggaaaggtggtgtgaaagaggaa

SEQ ID NO: 168959 - DNA, 244 bp, Glycine max
tagcaagctagctaggttgaaaatagtttggttttgtagtaagtgaggtgaggtgccaaaatggtgaagataactcttggtactttcgatgactcttttggtgttgcctctcttaaggcttatttggcagagttccatgcaactctgattttcgtgttcgctggtgttggttcagccatcgcttacaacgagcttacaaaagatgcagccttggatccaacggggctggtggcagtagctgtgg

SEQ ID NO: 168960 - DNA, 243 bp, Glycine max
caaagtcccaccacttggttttcataacccattctccatctcagaatggagaatgcgagaataagccagtggttgatccttctggtgtgtgcgctgctgttgctgatatcagaagcttcttatgtgccaatcactattgttcagaacgcggtagcaaaaggagctgtttgtttggatgggagtccaccagcttatcattttgataggggatttggatcagggattaacaattggttggttgca

SEQ ID NO: 168961 - DNA, 244 bp, Glycine max
gttccctggaaacggagttcaagtctcacctgttactccatctgctgatgttactgcttacttcagctctgagcattcgagcaactcgtttgattattctgaccttggatggggtgaacaagtccccaagacccccgagatctcatccttgctttctgctgctcctttggagggtgctgctgatcaggttcagaagaccaacaactcgcaggatgtggtggctgcacaagatgattctgcaaaa

SEQ ID NO: 168962 - DNA, 248 bp, Glycine max
aagtaatcgagcttcagcaatggtgtacgtcaaggctcagaaatcaaaagcctacttcaagagatatcaagtcaagttcaagagaagaagagagggaaaaaccgattaccgtgccaggattcggttgattaatcaggacaagaacaaatataacactccgaaataccgatttgtggttcgctttagcaacaaggacattgttgcacaaataatatctgctagcattgccggcgatttagttcttgcta

SEQ ID NO: 168963 - DNA, 243 bp, Glycine max
gtgtggctgaagtgttctccaggattgatcataagtttgacctcatgtatgcgaagagggccttcgtgcactggtatgtgggtgaaggtatggaagagggtgagttctcagaggctcgtgaggaccttgctgctcttgagaaggattatgaggaggttggtgccgagtctggtgatggagatgatgatggtgaaggagatgatgattattagagtgtctgaaatatcgtgtgtttgatgtcta

SEQ ID NO: 168964 - DNA, 182 bp, Glycine max
tggaatctacagtgttcttaaccagaagcgtggacacgtgttcgaggaaatgcagaggccaggtaccccactatacaacatcaaggcatacctccctgtcatcgagtcctttggtttctcgagcacattgaaggctgcaacatcaggccaggccttcccacaatgtgtgtttgatcactggg

SEQ ID NO: 168965 - DNA, 245 bp, Glycine max
agaaaaagaagcgaaactaaagtcagcattcgaaaaagatgagtagcatcggtacaggttacgatctatcggtcaccactttctcccctgatggccgcgttttccagatcgagtatgccgctaaagccgtcgacaacagcgggactgttattgggatcaagtgcaaagatggggttgtgttgggcgttgagaagcttattccgtcgaaaatgatgcttccgggttccaatagaagaatacactcc

SEQ ID NO: 168966 - DNA, 241 bp, Glycine max
cgtgcctctagggttatcatatctccatttccatttcctctctctcagtttccaagaatcttaagctatgggaaagtcttacccaaccgtgagcgctgattaccagaaggccgttgagaaggcgaagaagaagctcagaggcttcatcgctgagaagagatgcgctcctctaatgctccgtttggcatggcactctgctggaacttacgacgtgagctcgaagaccggtggtcccttcgga

SEQ ID NO: 168967 - DNA, 244 bp, Glycine max
ctcagatctatataattcagttcttcttattctccactaatagcttcttcttcggctacttgagaccttgctgcaaaggttctctcttagcttagtaacaatgggtttgaaagcactttttgtttggtgcattatatggttaggtttagcacatttgtcccttggaggaagagtgaggcactacaagtttgatgtggagtacatgatcagaaagccagattgcttggaacacgttgtgatggga

SEQ ID NO: 168968 - DNA, 242 bp, Glycine max
agcaaattaatcaaacatggctagggttagtgctttgtttcactctttgctcttgatttcttcccttgtattggcttctcaaagccatgtttcctctgggaaactagtccctggactatcatggaattactatttgttgacatgtcccaagcttgagaggattataaggaagcatcttgaggatgtcttcgagaaggacagtggagtagctcctggcatacttcgactcttcttccatgact

SEQ ID NO: 168969 - DNA, 245 bp, Glycine max
catcaccatccctttccttattcttcttctgtttcatccctctccccattttctcgctctcgtttcttgtcctctactcctttctccatggcttctgattcccctttccctgtcaccgctcaaaacatcaaccccaaggttctgaaatgtgagtatgctgttagaggagaggttgtcacacttgcccagaatttgcaaaaggatttacaggccaatccaggttctcacccatttgatgagatact

SEQ ID NO: 168970 - DNA, 232 bp, Glycine max
gttcggttgggacaaggatcttgccaagaaaatctggtgctttggccctgagacccttggtcccaacatggtggttgatttcattcaaatactggactcccttgcacatatcaaccaccatgttgggtccaagggagtccagtatttgaatgaaatcaaggattctgtggttgctggattccagtgggcatcaaaagaaggtgctttggctgaagaaaacatgagagccatc

SEQ ID NO: 168971 - DNA, 239 bp, Glycine max
cggaaccgcacgcgagggtctcggtcgaaccggcctcggaggtttccaaggtcgcactcgaccgggcactcgctggtccaaccgggagaaaacactgaccggttcactttgaggttgcctttggaggtgaggaagcaattaataaaccgccaattgcaacgtgcgagtagcttgatcgtgttacccagggaaggtagtttgcggcagggttaccgaaccggaggagaagggagtagtag

SEQ ID NO: 168972 - DNA, 239 bp, Glycine max
ctcaaagtctggggcttcaatgacctgtgctggttgccagggtactggcatgaaggtgtctattaggcaccttggtccttctatgattcagcaaatgcagcatccttgcaatgagtgtaagggtactggagagacaatcaatgacagagacaggtgccaacagtgcaagggagagaaggttgttcaggagaagaaagtacttgaagttgttgtggagaagggaatgcagaatggacaga

SEQ ID NO: 168973 - DNA, 236 bp, Glycine max
ggtatacggtgatattggtacatcaccactttatgtgtatgcaagcaccttcactaaaaaaattaacaacaatgatgacattcttggcgtcttgtctctcatcatctataccattgtgctcataccttttcttacatatgtcttcatcgtattgtgggccaacgacaacggcaacggtggagcgtttgcactctattcgctaatctgtaggcatataaagatgagtttgattccaa

SEQ ID NO: 168974 - DNA, 238 bp, Glycine max
gagagacctagtttgaaacatcaaaggaaatggaactccgaccccaattacaccaaatcatggtatgatagaggtgctaaaatctttcaggcagacaagtatcggaaaggtgcatgtgagaattgtggagctatgacacatgattctaagtcatgcatggaaagacctcggagagtgggagcaaaatggacaaacaaacacattgctcctgatgaaaagatagaaacttttgagcttg

SEQ ID NO: 168975 - DNA, 238 bp, Glycine max
ctggccttgggtttttggaacgtacggtgtcgttttggggttgggaaaacaaattctgagagatggcaaccacgaacccttttgatttgttgggtgacgacgctgaggacccttctcagctcatcgccgccgagcaactcaaggcggcggctgcggcctcggcggccaccgcggctcccaagaaggcgccggctcagcagaacaagccggctcagctccctaccaagccgcctcctcc

SEQ ID NO: 168976 - DNA, 239 bp, Glycine max
ctaacgcgtgcatagcagagtcagagacagagacgcagccatcgggcggagacctgcgaggtgttataggcaaattaagaacaagccataccccaagtcacgtttctgccgtggtgttcctgatcccaagatcaggatttatgatgttggtatgaagaagaagggtgttgatgagtttcctttctgtgtccatctggttagttgggagaaggaaaatgtttcaagtgaggccctggaag

SEQ ID NO: 168977 - DNA, 245 bp, Glycine max
gccatgttcaaggtactgcacaaatccccggatatacctgaaagtttgtcttcagagggacaggatttccttcagcagtgtttcaaaaggaatccagcagaacgaccatcagcagcagtgcttcttacacacgcctttgtacaaaatttgcatgagcaagatgttcaagttcattcacaagggcaaagctgtcccagaggagacgctggaccaggagatgattcacgtaggcatagtcccagtaa

SEQ ID NO: 168978 - DNA, 195 bp, Glycine max
caagattctaagagagattttactgctctttgaagaagggtgtttgcttgattttcgtgatgtcgctgctctcagatctcatgaaccttaacctctcagacactactgagaaggtgatcgcagagtacatatggatcggtggatcaggaatggacctgaggagcaaagcaggactcttccaggaccaagtagcga

SEQ ID NO: 168979 - DNA, 236 bp, Glycine max
caaacatcacaacaatgtctccattttctctcttcctcttcaccacattgctattctttctcggcgccgccgacgcgcgactcaccttggacttctacaaggacacgtgtccgcagttcagccagatcataagggacaccgtcacaagcaagcagatcgccagccccagcaccgccgccgccacgctccgcctcttcctccacgactgcctcctccccaacggctgtgacgcctcc

SEQ ID NO: 168980 - DNA, 238 bp, Glycine max
acctcgagcgaatcggctcgagggaccattattaaggcctcagcttgttatgttcggtacttccattgttcagtatggtctttatgatgaaggttggatggctgatctttctcacttgtatgctcgcaaggttgatatagttttgcgaggatatgctggttggaattcaaggcgtgctctgcaggttctggataaaatctttcctaaggatgcccctgtacaaccttcattggtcatt

SEQ ID NO: 168981 - DNA, 236 bp, Glycine max
cttcaacctcaccaaaggaactaagaatttcattgaggctagagaaagtggtgatcaatatgtcaaagaatccaaaagttttctttgatattctaattggaaagatgaaagctggacgagtagtgatggagttgtttgccgatgcaaccccaaaaacagctgaaaacttcagggctctctgcactggggaaaaggggattggacgatctgggaaacctttacactacaaaggttct

SEQ ID NO: 168982 - DNA, 238 bp, Glycine max
gtgagaaagaaaaatggagggaaaagaggaagatgtttccttgggagctaacaaattctcagagaggcaaccgattggaactgcggctcagagccaagacgatggaaaggactacacagagccacccccggctccacttttcgagccctccgaactcacttcttggtccttctaccgagccggaatagccgagtttgtagccacttttctctttctctacataaccatcttaaccgtc

SEQ ID NO: 168983 - DNA, 236 bp, Glycine max
aacaaccacttatcccctttctccttctaacgagtgaggaaaaatggcgcgtaagaagatcagagagtatgactcacagaggttgttgaaggagcactttaagagactctctggcaaggagttgccgatcaagtctgcacaaattaccgcatcaactgatttcactgagctacaagagaaggaaccctggctttcatcttctaaattggttgttaaacctgacatgttatttggaa

SEQ ID NO: 168984 - DNA, 237 bp, Glycine max
ggaaaccctacacgattaccaagtccagggagagctggactgagcaggagcacgacaagtttctagaagctctccaattatttgatcgggactggaaaaagattgaagcatttgttggttcaaaaacagttatccagatacgaagtcatgcacagaagtattttcttaaagttcagaagaagggaacaagtgaacatgtacctcctccccggccaaagagaaaagctgctcgcccat

SEQ ID NO: 168985 - DNA, 245 bp, Glycine max
gagcaatgaatttgtaaatagggcaaaagtaatggataaggaattaatttctctggatatattagaaaaccgaattcgattgtctaatgatgaaactagaacaaaatatttaactaaaatatatgatcctttcctgaacggacgctttcgtggacaaatcgaaaatgttttttcaacctcaatccaatatgaaaaaaatgaaaaaaaaaataccattttgataaataaaattcatggtatcctta

SEQ ID NO: 168986 - DNA, 237 bp, Glycine max
gataatgttatatctatgcacgatatcatacaagaaatggcttgggagattgtgcgccaagaatcaattgaggatcctggaaaccgtagccgattgatcgatcctaatgacgtttatgaagtattaaaatataacaaggggactgaggccataagaagcataagagcaaacttgccagcaattcagaatctgcagttaagccctcacgtgtttaacaagatgagcaaactacagttt

SEQ ID NO: 168987 - DNA, 236 bp, Glycine max
acggcgcaggcgccgaatccggagatttgaagggagagacggcgccggtggacggcctcttgaactggcagaatgcgagattgaaggcggagattttaacgcatcctctgtacgaacagcttctgtcggcacacgtggcgtgcttgcggatcgccacgccggtcgaccagttgcccaggatcgacgctcagctcgcacagtcccagaatgtcgtcgccaagtactctgccttcgga

SEQ ID NO: 168988 - DNA, 235 bp, Glycine max
gggagatgcagtgtatgagattgaccctgccaaagaccttgaggcttctgaggcttatcctcacgtggaatacagcactgtttctgaatatttggatcagtttgtctgatttccgaaatcttaggaaccaaagcacttatatgattttatcactctgcaaaatgcttaataaaacaaatgcagttcttccttctgtttttctttcagaaaaggcctatgcaggcttttttgcagc

SEQ ID NO: 168989 - DNA, 243 bp, Glycine max
ctagaatggaatttcgatgctcagtcatctcttttaccattctcttctctcttgctcttgcaggagagagccatgtccatgcatcgctacctgaggaagattattgggaagctgtttggccaaacactcccattcccactgcactgcgagagcttctaaagcctctaccctgcaggtgttgaaatcgatgaactccctaagcaaattgatgatacacagtacccaaaaacattcttctataaa

SEQ ID NO: 168990 - DNA, 229 bp, Glycine max
gtcgtagatgtttctgcatgaaagtatttatacagacgtactagaccaacttgttgaagtctacaaacaagtcaaaattgggaaccccttggagaaggggactctagttgggcccttgcatactcgtacttcagtagaaaactttcagaagggtatttcagtcataaaatctcagggagggaaaatcctaaccggtggatctgtattagagtcgggaggaaattttgta

SEQ ID NO: 168991 - DNA, 230 bp, Glycine max
catccaccttggcctagccagctagcgcttcttctctcgcattccgtggagatctagtgctgccaaacctcgctgaaaattagggtttcgtttcggaggtagacgaagatgttcggaagggcaccgaagaaaagcgacagcaccaggtactacgaaatcctcggcgtttcgaagaacgcttcgccggatgatttaaagaaggcttacaagaaagccgccattaagaacca

SEQ ID NO: 168992 - DNA, 237 bp, Glycine max
gaatcagggaggacccattttgctctagcatttgaacttcctggtggctggcataagttgaaggatgctatgattttgactgttcttcagatgctattgggaggtggtggatcattctcagctggtggacctggtaaagggatgtattcacggctatatctcaatgttctgaatgaatatccacaagttcattcaatttcagcattcaacaatatttacaatggcactggcattttt

SEQ ID NO: 168993 - DNA, 238 bp, Glycine max
atcagtggcttgtaagacctgttttagaaactcacggatgggatcatgatgtgggttatgaagggttgaatgtagagagattgttcgttctcaaggaaaagatacctttatctttctctggtcaggttactaaagataaacaggatgctaatgttcagatggaaatatccagttcagttaagcatgggaaagggagagcaacttcattaggttttgatttgcaaactgtggggaagga

SEQ ID NO: 168994 - DNA, 236 bp, Glycine max
ggcgcagagcgtgatccattgacgaagatggtgcagcgtctcacctaccgcaagaggcacagctatgccaccaaatccaaccaacacagggtcgtcaaaacccctggtgggaagctcgtttatcagaccaccaagaagagggccagctggcccaagtgccccgtcactggcaagaggattcaggggattccacacttgatgcctgcagagtacaagagatcaaggttacccagaaa

SEQ ID NO: 168995 - DNA, 231 bp, Glycine max
gttttgtagtaagtgaggtgaggtgccaaaatggtgaagataactcttggtactttcgatgactcttttggtgttgcctctcttaaggcttagttggcagagttccatgcaactctgattttcgtgttcgctggtgttggttcagccatcgcttacaacgagcttacaaaagatgcagccttggatccaacggggctggtggcagtagctgtggcccatgcatttgcactg

SEQ ID NO: 168996 - DNA, 233 bp, Glycine max
ctcagattgcaattgcctcttctcttctcccagaatcggtcactaatccgatatcatgaagctcgatacgactagtctcgaatcgtttcccacactgattgcacctcaaaacgacgtcgccggagaactctccgccgctccgttctttgaccttccgaattccaatgacttcgatgggttcttgaaagacgctattcagatggtgaagcccgcgaagggtactacaactcttg

SEQ ID NO: 168997 - DNA, 231 bp, Glycine max
aagtactataatagctatctatcgaaaccagcgagcaagatcgattcgggtcaaacatggatgggcaatcgtcggagaaactgatactggtgaagcgcgagtcaaacggcgtcgcactggtgatgattaatcgtcccggttcccttaactcgctgacccggcccatgatggtggacctggcccaggctttcaagagactcgaccgggacgagtcggtgcgggtcgtcatat

SEQ ID NO: 168998 - DNA, 227 bp, Glycine max
ggaaaagcactggcgcactaccccgaggcttctcttctcttctcttctctgacgtgagtcaccatggcgagggttagtgtgctgaacgatgctctgaagagcatgtacaatgctgagaaaaggggaaagcgccaagtcatgattaggccatcctccaaagtcattatcaaattccttttggtgatgcaaaagcacggatacatcggagagtttgagtatgttgatga

SEQ ID NO: 168999 - DNA, 231 bp, Glycine max
ctcgagcgttgtgccatttcttctctcaataaacttctattgatgccccgctccacgttccattcttcagtatcctttgtagtttgaaccttcctcacactcccacttccgaaaccaatcaaagagagagagagagagagatgggtagagctccttgttgtgacaaggcaaatgtaaagaaaggaccatggtcaccagaagaagatgaaacgctaaaggattacatagagc

SEQ ID NO: 169000 - DNA, 238 bp, Glycine max
gtgaaagagaatccgaggcgaagagaagagaaaaattaagatggaggggaaggagcaggatgtgtcgctgggagcgaacaagttcccggagagacagccgattgggacggcggcgcagagccaagacgacggcaaggactaccaggagccggcgccggcgccactggttgacccgacggagtttacgtcatggtccttttacagagcagggatagcagagtttgtggccacttttctg

SEQ ID NO: 169001 - DNA, 208 bp, Glycine max
tagtgctgagttctttgagttgcaacctaaggacaggccttgcccttgtgaatggcactgctgttggttctggcttggcttcaattgttctttttgaagccaacatcattgctgtcttgtctgaggttatttcagcaatttttgctgaagtgatgcaagggaagccagagttcactgaccatttgactcataaactaaagcaccaccc

SEQ ID NO: 169002 - DNA, 212 bp, Glycine max
tcaaacccaaaaccccttgtgcacctttctcttcttctcctggtcctcttttcttcctcaaccgaatccctgagatttgaaatccaatccgggcacaccaaatgcatctccgaggatatcaagagcaattccatgaccgttggcaagtaccaaatcgttagccccaacgagggtcaacctctgccagatgcccacagattcaccgtcagggt

SEQ ID NO: 169003 - DNA, 207 bp, Glycine max
agccgattcggctcgagctttttgatatcacttgtatgcaccttggtggtcgggccgctgagcaggttcttatacggagaatctcaacaggagcacaaaatgacttggaaaaagtgaccaagatgacgtatgcccaagtagcagtttatggttttagcgacaaagtaggcctcctctccttccctccaactgagggctcatatgagt

SEQ ID NO: 169004 - DNA, 109 bp, Glycine max
gatcttcgttaagacactcaccggcaagaccataaccctagaggttgaaagctccgacaccatcgataacgtcaaggccaagatccaggacaaggagggtatccccccg

SEQ ID NO: 169005 - DNA, 211 bp, Glycine max
tcaatccctaaaacaaatgagaacttccgcctgctgtatgacaccaaaggccgattccgtcttcactcagtcagagatgacgaggctaagttcaagctttgcaaagttcgctcagtgcagtttgggcaaaaaggtatcccatacttgaacacctacgatggtcgcactatccgctacccagaccctctcatcagagctaatgacaccatta

SEQ ID NO: 169006 - DNA, 209 bp, Glycine max
ctgaattatacaaaacagcacgtatatctccaattacacttacttatttccataattgcatggaaaatgggaactatactgtaaacctccattttgctgagatacagtttacaaatgataaaacatttagaagtcttgggaagcgcatatttgatatctatgttcagggaaaactgattcgcaaaaattttgatatagagaatgagaca

SEQ ID NO: 169007 - DNA, 212 bp, Glycine max
tttgggagatcaaatcatatctatctatcagcggcaaggcaataccaagttgtgaaatggagaccctctgctctgcattggtgttcccatctttcagaatcagaacttcagctttctccaaatgtggcatcagggcttccattgccgttgagcaacaaacttcccagactaaggttgctctcctcagaattggtaccagaggaagtccacta

SEQ ID NO: 169008 - DNA, 210 bp, Glycine max
ttcttcctcttcctcagtagtgcgattttcgattctcttctctgcaactatgcctaaccctaaggtcttcttcgacatgaccatcggcggtcaacctgccggccgcatcgtgatggagctctatgccgacgtgactcccagcaccgccgagaacttccgcgcgctctgcaccggcgagaagggcgccgggcggagcggcaagcccctcca

SEQ ID NO: 169009 - DNA, 209 bp, Glycine max
ctcgagctacactatacttgtcaaccctttgagagttagaatggctgctgctattgaaatccccacaatagtgtttccaaactcctctgcccaacagaggatgccagtggttggaatgggatctgcccctgacttcacatgcaagaaagacacaaaggaggctatcattgaggccgtgaaacagggttacagacacttcgacactgctg

SEQ ID NO: 169010 - DNA, 209 bp, Glycine max
cgagcaaaagattgcaatgtttgacaagaatggtggtttacaggctctgattcaatatccagatatccaaacagctgttgtggccaaggaagccttggaaggacactgcatatatgatggaggtttttgcaagcttcacatctcgtattcgcgtcattctgatcttagtataaaggtgaataatgatagacgtagagactatactattc

SEQ ID NO: 169011 - DNA, 214 bp, Glycine max
cggctcgaggttcccaatactgtacctatcagcagggacatgcaccacattgatcatcataggaggatccacagcaaggacattttaccaagtggtgtgtggtgaaacatgcactgccaaacctatgaccactgtggaatggtacttggtgttcacctgtgtagctgtggtgctatcacagttgccaaactcgaattccattgctggggtgtca

SEQ ID NO: 169012 - DNA, 199 bp, Glycine max
cactcttcttctcttgcggctagggttttagcgcagcttcttctagatttaaggaagatgggtaaggaaaaggttcacatcagtattgtggtcattggccatgtcgactctgggaaatccactaccactggtcacctgatttacaagcttggaggcattgacaagcgtgttattgagaggtttgagaaggaagctgctg

SEQ ID NO: 169013 - DNA, 196 bp, Glycine max
cagatatgaaccggtcaatgaacccactttggacaactgctttgtatcaacaagttatgatgctactactcactttgagtcgaccgtggatgacgttctcaacatgtatacattgataactggaaaggtaagtgttatgccttggttaccacttgtttccacttcttgaattaatttttgagccacagatagtgac

SEQ ID NO: 169014 - DNA, 198 bp, Glycine max
tgagaaaagcatgaggatggtattaatggctttgttggctttcacgatgcttttatctaagggtgaaggccaattagtagagaatttctacagtttatcttgtccaaacgtggaatccatcgtgaaagaagcagtgactaacaagtttacacagaccattacaactggacaagcaactctgcgtctctttttccatga

SEQ ID NO: 169015 - DNA, 196 bp, Glycine max
cttgatttgaaggacttggtcctgctctctggtgctcacacaattggtatcgctcattgttcatcattatcaaaccgcttgttcaatttcactggcaagggtgatcaagacccttcactagacagtgaatatgctgcaaatctgaaagccttcaagtgcaaggacctcagtaaattgaacaccacaaaaattgaga

SEQ ID NO: 169016 - DNA, 197 bp, Glycine max
caatcttctgagagtgtttggtctgacagtagcaaagatgtttcctttcgggcaaaagggtcaaaagataaaggggactatggtggttatgcagaagaatgtgttggatatcaacagcatcaccagtgttggagggatcgttgaccaaggcttaggcttcataggcagtgcagtcgatgcacttacttttgcagcca

SEQ ID NO: 169017 - DNA, 197 bp, Glycine max
cagagacagagacgcagccatggggcggagacctgcgaggtgttataggcaaattaagaacaagccataccccaagtcacgtttctgccgtggtgttcctgatcccaagatcaggatttatgatgttggtatgaagaagaagggtgttgatgagtttcctttctgtgtccatctggttagttgggagaaggaaaatg

SEQ ID NO: 169018 - DNA, 195 bp, Glycine max
ctttatctttgtgacaataagtttcatactgaagctttgaatgaactcctagagtctgatgacaagtttggatttattgtcatggatggcaatggtactttgtttgggaccttgagtggtaatacgagagaagtgcttcataaattcagtgtggatctcccaaagaaacatggatgaggaaggcaatcagctctg

SEQ ID NO: 169019 - DNA, 196 bp, Glycine max
aatcaatcttctgagagtgtttggctgaaagtagcaaagatgtttcctttcgggcaaaagggtcaaaagatagaggggactatggtggttatgcagaagaatgtgttggatatcaacagcatcaccagtgttggagggatcgttgaccaaggcttaggcttcataggcagtgcagtcgatgcacttacttttgcag

SEQ ID NO: 169020 - DNA, 190 bp, Glycine max
gggaagatgcatctgcagcttgcagatccacaaagaagtataaatgtttgattattatttagagggctctatctagttaaaattaaatagttattgtgcttttgttttattagacagttgtaaggcactgtgttctacatgtgtttgcagttgtctgcatgcattgtaattttcaaagtccgctttatca

SEQ ID NO: 169021 - DNA, 190 bp, Glycine max
acctacctctttttcttctctctcaacaacttcaccttcttcctcctcgatcatgtctcacttcaagggcaagtaccatgatgagcttatcgccaatgctgcgtacattggcactcctggaaagggtattcttgctgctgatgagtcaacagggacaattggcaagcgtttggccagcatcagtgtagag

SEQ ID NO: 169022 - DNA, 189 bp, Glycine max
ggacacatttcatgtcatagcagaactaccaccagacaactttggagcctatatcatatcaatggcaactgcaccatctgatgtgcttgcagttgagcttctacaacgtgaatgccacatcaagcatcccttaagagttgtgccattgtttgagaagctagctgatctagaggctgctcctgctgcttt

SEQ ID NO: 169023 - DNA, 186 bp, Glycine max
attaattgcaagaatggcacttcgttgcttggtgatgtccctttctgttctcttcactcttggtcttgcgagagaaagccatgccagagacgaagatttttggcatgctgtttggccaaacactcccattccaagttcattgcgagatcttctaaagcctggccctgcaagtgttgaaatcgatga

SEQ ID NO: 169024 - DNA, 181 bp, Glycine max
ctcaatgaagctcagtcccgcggtggcggcggcggcggcggaggaggaggatacaatcgtggtggcggtggatatggtggtcgtagtggcggtggcggtggcggtggtggataccgtagccgtgacggtggttatggcggtggctatggtggtggtggtggtggtggttatggcggtggca

SEQ ID NO: 169025 - DNA, 183 bp, Glycine max
gttccatttattggacttgttatgggtgatagggggttgatttctcgtatactttctgcaaaattttgtggatatctcacttttggtacccttgagtcaggagttgtttcagctcctggtcaacctactcttaaggatctattgtatctatacaatttaagacaactggctcctgatacaaaa

SEQ ID NO: 169026 - DNA, 185 bp, Glycine max
aaaaaaatggaccttctcctaaattgcctaaaccttaacaccattgctattgcatcaatcctttctctaatcttcttatgtttgtctctatatcgtaaaaattctcgtgggaaagatgctccagtagtgtctggtgcatggccaatacttggtcacctctcattgctgaatggttcacaaacacc

SEQ ID NO: 169027 - DNA, 277 bp, Glycine max
cagagacagggagacaagacagagtagtacagattactaccaatggctaccaaggtttacattgtttattattctacgtatggacatgttgagaagctagctagagagatagaaaaaggggctgcttctgtggagggagtagaagcaaaactgtggcaggtacctgaaacattgcctgaagaagtccttgctaagttgggagcacctccaaagagtgatgttccaatattactcccaatgagcttcctgaggctgatggctttttgtttggttttcc

SEQ ID NO: 169028 - DNA, 259 bp, Glycine max
gattttctctgcagggggaacttggagccaatgctatattagctgtgtccattgccgcttgtaaagctggtgctgcagaaaaggaggttccactttacaagcacattgctgacctgtctggaaaaaccagcccaacacttcctgttcctgcctttactgtcataagtggtggaaaacatgctgggagtaacctggccattcaggaaatcatttctcccaatcggagcaagcaaatttgaggaagcattgcgaatgggca

SEQ ID NO: 169029 - DNA, 266 bp, Glycine max
tggcaggcatgcgtttggtgatcaatatcgggctactgacactgtaattaaaggagctggaaagctgaagctggtgtttgttccagaaggccaaggtgaggaaactgaattcgaggtttttaacttcactggtgaagggggtgtttcattggctatgtacaatactgatgagtctattcgttcttttgccgaggcttctatggcaactgctttagagaaagtggccactttatcttagcaccaaaaatacaattctcaagaaatat

SEQ ID NO: 169030 - DNA, 266 bp, Glycine max
gcgaccaggttacgatcacaggaactgcagcaacttatagctgcccttcttgagttcatggctgtttgtaaacgtgccatccgtgtacatttcagattgattggtgaggaagatcaggatttccacacacaacttgtaaatggtttccagtcactgacagcagagttatcacattacattcctgccattctctcagagctatgacaagtgtttgcctctatattttgcttcgatttgttcatattgtagtctcctcattccctttc

SEQ ID NO: 169031 - DNA, 270 bp, Glycine max
cttcagcacaatgggtgcctacaagtatgtttcggagctatggcgcaagaagcagtctgatgttatgagattcttgcagcgggtgacgtgctgggagtatcgccagcaaccttctattgtccgtttgacaaggtctactcgcccagataaggctcgtcgcttgggtttcaaggctaagcagggttacgtgatttaccgtgttcgcgtacgaaggggtggccgtgagaccagttccaaagggtattgtttatggtaagcccaccaaccaag

SEQ ID NO: 169032 - DNA, 269 bp, Glycine max
cttcttcttccttccttcactcgtatatcacttccttcctcgttacgttaaccttctaattcaatccattcctcacttccttttcaaccgaagcttttctccgataatcgcagagagaaagaataatggattggggaaacgtaaccgcggaggatctgatcgacgcgctccgcgaggtcgattggtcgtcgccgccgcgcccgctgtcggaattcttctcgattcactgttcccagatcttcctctaaatggaacagccgcctcaaatg

SEQ ID NO: 169033 - DNA, 265 bp, Glycine max
gagagctggaatcacatggacttgtctttctctttctgggtctccattaaatttttcttctctcccttctttctctctctctctctctgaccattctcttcttcttctttttcttctcctctctctctctcccctccgccatggctgaggataaggagatgtctacctctgtcatcaatgggaatgattccctaactggtcacatcatatctacaacttggaggcaaaaatggggaacccaaacagactattagctacatggcag

SEQ ID NO: 169034 - DNA, 265 bp, Glycine max
cttcaagaacttcaagaaatggggagacattgaatttccactgccatttggaagggttatgagtgccaccgagtctttcattcatggattagatgaaaagacaagtgcatccttaaaattcacagtgttgaacccaaagggccgaatttggacaatggtagctgggggaggtgctagtgtcatttatgctgatacggtaggagatcttggctttgcatgagcttggaaactatgctgaatacagtggtgcacccaaagaagagga

SEQ ID NO: 169035 - DNA, 267 bp, Glycine max
ggagtctgtaaagaaaaagtatggaggaatgctgcccaaaaagccaccactcatatctaaggaccatgaacgtgcttacttcgattctgcggattgggcacttggaaagcaaggcggagagaagcctaagggaccacttgaggctcttcggcctaaattacagccaacgcagcagcaaacacgttaccggaaatctccttatgctccttcaggagaaggggggaagtgttccagccgaggatgcaccttccaaccagtaagcagcaa

SEQ ID NO: 169036 - DNA, 266 bp, Glycine max
tagcactttgatcatgcaactgctacgtgataacctcaccctctggacctctgacatgcaggacgatggtgcagatgaaattaaagaagccgcacccaaaggtgacggggaacaaaattaaacataccatactctctgcttattagtcattgaacttcccttctgtaatgttttcaaagggagaaggtgttgaatgctaatctcaatgttactgagattgggcattcgtgttcttcgttatgaattgtggatgtactgggctattt

SEQ ID NO: 169037 - DNA, 264 bp, Glycine max
tgaagctctcaaggaagctatccatcttggcctcgtctcccgccaagacctctttgtcacttccaagctttgggtcaccgaaaatcatcctcatcttgtccttcctgctttgcgcaaatcacttaaaactcttcaactagagtacttggacctgtatctcatccactggcccctgagttctcagccagggaagttctcatttccaattgaagtagaatctcttgccttttgacgtgaagggtgtgtgggaatccatggaagagt

SEQ ID NO: 169038 - DNA, 264 bp, Glycine max
gagaatacctcaccggagtttctgcgcgacgttgtgataagttttattctggcggggcgtgatacgacgtcgtctgctctgagctggtttttctggattctgtcctccagacccgacgtgcaaagaaaaattcgggacgaaatcgaaacggttagatcggaaaaatcaaagggcgcgtttggatacgaggaggtgaaggagatgcgctacctgcaaggcgatttcggagacgatgaggttgtacccgccagtgccggttgacac

SEQ ID NO: 169039 - DNA, 265 bp, Glycine max
cacaaggtcaatgaaactgtcaatgttgtctctcagaagacaacagagattggacaaaggacatggggtatgatgaaaggggtcatggcattggcttcacagaaggttgaggaattcgctagagataacccgaattggacgtctgataactggcaacgaaatgaaagtgatagaacatggtttctaccaggagttcaatcgagagaataatggccggttcttctaccagagaaggacaacattcttcaggtggacaaactaatac

SEQ ID NO: 169040 - DNA, 268 bp, Glycine max
gaaagataccagtttttttgttgttttttttcctcaatctcaaccatggaaaagcagaagacactgatgagtttgattctgttgctgttgttatttacttcggatgtgagtgcttggaccggtgaaatccatggaagagttgtttgtgacgtttgtggggattcttctcttggacctgaagaccatattcttgaaggtgctgaggttgctgttctttgccaccaagtctggggaagttctaaattatcaggcattcactgatgctaag

SEQ ID NO: 169041 - DNA, 270 bp, Glycine max
ctttggacgttccaagctccaaccttagattctttcttgtcagacgaagcccttatataactgcctctgtcacaaagccaacacctctttccatcaggacagtgcaccccgtagtttccttgtcttcagatgattacgacaccaaacacacccttaagcttaacaacactcaggcgtggatcatatacacctcctctccaatctacttgaaccatgttccttgaggttacatccaagccattttctggcatcattcgtatagcggctttg

SEQ ID NO: 169042 - DNA, 264 bp, Glycine max
tcacaaaactagttaactatctctctctctgtctctacaaaacttagctctgtttttgaattattccttgcattctcttgagttcagatggaagcaactaatggccaccaaaatggttcgttttgcttgtccagtactaagggaagtgatccgttaaactggggagcggcggcggaggcgatgaatgggagccacctggacgaggtgaagcgcatggtccgagtaccggaacccggtggtccggctcggcggcgagacgctcac

SEQ ID NO: 169043 - DNA, 262 bp, Glycine max
gtgaatgcgtataaaaggaaaataaagaaattagcgccaaaatgttgggtgtgttcagcagctccatagtgtcgccgccggacgagctcgtggccgccggcagccgtactccgtcgccgaagatgacggcggcggcgctgcggaagcggttcgaggagaagaacccctccgccgtgtcggtggaggtcggagagcatgtccagctcgcttataccccacaacgagtcgccgtttcagcccagatcctttgctgtcaaggatg

SEQ ID NO: 169044 - DNA, 259 bp, Glycine max
ctgatttgatggaaaacgggagtctttatgatcatttattcggtactgctaagaagaatctcacttggccaattcgtcaaaagattgctctagggaccgctagggggttggcttatttgcactatggagctcaaccttccatcatccatagggatattaaggctagtaacattcttctggaccacaattttgaagccaaggttgcggatttcggtggcaaagttcaaccctgaggggatgactcacatgagtactagag

SEQ ID NO: 169045 - DNA, 260 bp, Glycine max
gacacacgctcatggaggttgtatccgacgcggttgccgtcatcaccatcgtcaaccctctcgttaattcactttcctttgatgtattgcgcagtttaaaggagagttttgatcaggcgatacatagagatgatgtcaatgcaattgttgttacaggtgcgaagggaaaattttctggaggttttgatatttctgcatttggtggtattcaaggcgtgagagcgtccaaaacctggttggatatcagtaggagtcatcac

SEQ ID NO: 169046 - DNA, 263 bp, Glycine max
ctccttcaaaactcatctcgaaaccctaagcactcgctcgggttcgtgtagtgccaaaccctagggctcattttccagatctattcagtttttctctcctctcttttccgatccaccgttggagatcgaagatggtgtccgacgccagcaagaagaaggccgcacagaagaaggccgccgccgccgccaagataggtggcaaagctgccgccgctcgttatggccgccacctcttccaaagccgccgacaaggtcgccaacgg

SEQ ID NO: 169047 - DNA, 261 bp, Glycine max
gcggagatgatgagatagaccttgagttcttggggaacagaacaggacaaccttacattctgcaaacaaatgtgttcaccggaggcaagggtgatagagagcaaagaatctatctctggtttgatcccacgaaagagtaccacagatactccattctctggaacttgtatcagattgtgttctttgtggacgaggtgccaatcagggtgttcaaacagcaaggacttgggagtgaaattcccattcgaccagccaatgaag

SEQ ID NO: 169048 - DNA, 264 bp, Glycine max
agcatgtccaattctcagagagaacatgcattggctatagaacaactggtacctgaattcatcgcactaaggctgaatctttgcagttacatgaatgtggaaaagttttggatgatctattttttgttaatacttccaagactaaatcagcatgattttgagcgcctatcaactcccaagattgttgaagcaagagatgtgcttcttcagaaactgagagaggaaaaatttgcaagccggagaacctgaaaaaccaaggactgt

SEQ ID NO: 169049 - DNA, 266 bp, Glycine max
taattgcaagaatggcacttcgttgcttggtgatgtccctttctgttctcttcactcttggtcttgcgagagaaagccatgccagagacgaagatttttggcatgctgtttggccaaacactcccattccaagttcattgcgagatcttctaaagcctggccctgcaagtgttgaaatcgatgatcaccctatgcaaattgaagaaacacagtaccaaaaccttcttctataaagcagaccttcatccaggcaaaacaatgagagt

SEQ ID NO: 169050 - DNA, 260 bp, Glycine max
catgggctctgacaaaatactcccttctcatgtggtcgcaaatggccacgccccacttgattccggccacgcccgtctcaaagaactcggttacaaacaagaactcaagcgtgatctttcggttatttcgaattttgcgttttcgttttctattatatcggtgttgactggagtgaccactctttacaacactgggttgaattatggcggccgtttcgctggtgtatgggtggtttttagcttctgctttcaccatgatc

SEQ ID NO: 169051 - DNA, 262 bp, Glycine max
ccgctcgaggtcctcttccacctcgccttcttctcccaatgccttccctccgcctgggcccactaggcgatcctcctcccgggtcaactcgcccgtgactcaccgcagagctgccccgcccctgaccccaacctctactacaagccagtcatcggaatcgtcagccatcccggcgacggcgcctccggccgcctcagcaacgccaccggcgccttacatcgccgcctcctatgtcaaattcgttgaggccgccggcgcccgt

SEQ ID NO: 169052 - DNA, 256 bp, Glycine max
tcaagtttcaagtttgagccccctttctgtaatccataaccatagctttggttgagttgagggatttgattatggataagtatgaggctgtcaaggatttgggagctgggaattttggggtggctaggctcatgaggaacaaggagaccaaggagcttgttgccatgaaatacatcgagcgtggccaaaagattgatgagaatgtggccagagattatcaaccacagatcccttcggcaccccaatataattcgct

SEQ ID NO: 169053 - DNA, 258 bp, Glycine max
gttcgattttgtagtaagtgaggtgccaatatggtgaagatagctcttggtactttggatgactcttttagcgctgcctctcttaaggcttatttcgcagagttccacgcaactctgattttcgtgttcgctggtgttggatcagccatcgcttacaacgagcttacaaaagatgcagccttggatccaacggggctggtggcagtagctggcacatgcatttgcactgtttgtaggtgtctccgtcgccgccaacat

SEQ ID NO: 169054 - DNA, 260 bp, Glycine max
cacaaagcaagcgcgtgctgtgaactcttctcccactaacagttccataaccattgttgaagaagaggctagcagtaacagctgcaagaccaagctttttggtgtgtctctccaatccaagaaaagggtgcaccctgatgagtacggatctaactatattcttcaaagctccgaaacgaataataaggcgcgtttggttttggaaaatgatgctattaggcttgaatcttatgcccccttcaacttgttaattagttagt

SEQ ID NO: 169055 - DNA, 256 bp, Glycine max
accaaatggggggccaaggattcttctatttgtagggtagtggcactttcaaagaaggccaaggattctatttgtagggtagtggcactttcaaagagtttctttctcttttaaaaactcgttaatcttttatgtttactgttaacagctcgagattacgaatttctgatttctgaaaaaaaaaaaaaaaaaaaaaaaaaaaaaaaaaaaaaaaaaaaaaacaaaaaaaaaaaaaaaaaggggggccccccctttt

SEQ ID NO: 169056 - DNA, 260 bp, Glycine max
cgagggtcttgcatgcccctttgagtttcaagtttcaagtttgagccccctttctgtaatccataaccatagctttggttgagttgagggatttgattatggataagtatgaggctgtcaaggatttgggagctgggaattttggggtggctaggctcatgaggaacaaggagaccaaggagcttgttgccatgaaatacatcgagcgtggaaaagattgatgagaatgtggcaagagagattatcaaccacagatccct

SEQ ID NO: 169057 - DNA, 258 bp, Glycine max
ggcgttctatatattattgaattgacaatgaggcctgctcttgctttgcttcctcttctatttgccttcttgaagttagctgccactacagaatcaagaaaagatacaggggaatattggaaaatgatcatgaaagatcaggaaatgccagaaggacttcaaggtcttgtttcatttcaatctgaaaataaccctaagactcaagagcagtggtaaaggttccaaaaaccattgtgaagagtctctagttacaaatac

SEQ ID NO: 169058 - DNA, 256 bp, Glycine max
cagatacaatgcgttgatcagaagggcttgtgttatgacattatgaggatttctaaagactctgatattaaggttgcttttggtcgattttcttcaagtgtgaaaggctttcggaatattgacttgtttgtccagcacaacgatgggaaaaagatcatagatcctgaaagccagaaaaccttgtgttcatgcttaaaagaagagatgctatccgttgcgggtgacgatagtgaaccggggtccagacacagaactt

SEQ ID NO: 169059 - DNA, 254 bp, Glycine max
cggagcatggcagatctcaagtccacattcttgaacgtctattctgttctcaaatctgaactcctccacgaccctgcttttgagttctccgatgatgctcgtaattgggtcgaccggatgctggactacaatgtgccgggaggaaagttgaaccggggactgtcagtaattgatagctacagattgttaaaagaaggacaggcattaagatgacgaaatttttcatgccagtgctcttggttggtgtattgaat

SEQ ID NO: 169060 - DNA, 258 bp, Glycine max
gaagggtgagctaaagtcaattttccttcctttcctttccactagtcacataatcccgctagtggacatggccagactcttcgccttgcacgacgtcgacgtcaccatcatcaccaccgcacataacgccaccgttttccaaaagtccatcgatttagatgcgactcgcggtcgccccatcagaacgcacgttgtcaacttccccgccgcaagtgggtctccccgttgggatcgaagccttcaacgtcgatacgcctc

SEQ ID NO: 169061 - DNA, 261 bp, Glycine max
ctcaaaccgatggtaccagaatgtccatagcttctttctacaaccctggtgatgatgctgtcatttctcctgcaccagccttggtgaaggaattagatgagacaagccaagtgtacccaaaatttgtgtttgatgattacatgaagctctatgctggtctcaagtttcaggctaaagagccaaggtttgaagctatgaaggccaatgcaagcagttgatgtgggggccatagccacagtttgagtctcagggctctcagca

SEQ ID NO: 169062 - DNA, 262 bp, Glycine max
ctttgttttctgatctatggcttccaaggagttctctggtctttgctccttggctccttcactatctgagagcattttgtgcactactgggttgaaaatgtatatgctggagagcaaaggaggtgccatagcatgcacgttcttgtctcttttcttcttggggacatggcctgctcttttgactatgttagagaggcgtggtcgtcttcctcaatacctaccttgattactcaatcaccaatttcttggctgctttactcat

SEQ ID NO: 169063 - DNA, 254 bp, Glycine max
tttggttcttctttgtcagcttcttctctttcttgtacttcacatattatggaatgatgactgtgtccatcacaccaaaccaccaagtggcatcaatctttgcagcagcattctatggactctttaatctcttctctggtttctttatcccaagaccggtgagtaccattctagtttcgttattatattgaaacaaacatatcttacaatctttactaacataactcttctaccaactttggcttttcagaaaa

SEQ ID NO: 169064 - DNA, 257 bp, Glycine max
atgaattaaggtggtgttggcatacgctgaatctgagttagaaaagcaggtggacgcgtttactgagtcagcattcaaggggaaccctgcatctgtgtgtttcttagaggaagagagagatgaggagtggctgcaagcagtagccgctgaattcaatatctctgagacttgttacttatcacgcatcacccactcgctccatggaatctaatccccgttttcgtctcagatggtttactcctgttgctgaggttaaa

SEQ ID NO: 169065 - DNA, 256 bp, Glycine max
tctcaagccaaccatgtcttccttcaagagcaagtaccaagatgaactcattgccaatgctgcttacattggcaccccagggaagggtatccttgctgctgatgagtcaactggtacaattggcaagcgattggccagcattaatgtcgagaatgttgaagcaaataggcgtgctcttcgtgaactcctattcaccacacctggtgcttgagtgcctcagtggtgtgatcttgtttgaggaaaccctataccaaaa

SEQ ID NO: 169066 - DNA, 256 bp, Glycine max
gaaggattttgctgtggaactggaggaactggcagagctagttcttgacttgctgtgtgagaatcttgggctagagaaagggtatctgaagaaggtgttctatggatcaaagggcccaaattttggtaccacagttagcaactaccctccttgtccgaagccagagctgataaaggggctcagagctcacacagatgctggtggcatctctactcttccaagatcacaaggtcagtggattacagctcctcaaaga

SEQ ID NO: 169067 - DNA, 256 bp, Glycine max
cactaagaccctacgcgcacatcttgcaactccaatcgacatagcagcaatgtctacgctcgaaattgaagctcgagatgtcatcaagattgtgcttcagttttgcaaagaaaattcgttgcatcagacttttcagatgctgcagaacgaatgccaggtttctctgaacaccgttgacagcattgagacctttgttgctgatattaattggaaggtgggatgcaatattgcctcaagtttctcaactcaagcttcc

SEQ ID NO: 169068 - DNA, 257 bp, Glycine max
gcagcagccatccgttttgaggttgtaagaattgccggtgagtgattacaatggctcctgctaaggcggacaatgccaaaaaggctgatcccaaagctcaggctttgaagacagcaaaggctgtcaaatcaggtggccaagtgtttaagaagaaagctaaaaagatcaggacatctgttacatttcacaggccaaggacattgaagaaaaaggaaccctaagtaccctcgtattagtgctccacccagaaacaagtt

SEQ ID NO: 169069 - DNA, 277 bp, Glycine max
  unsure (1)..(277): unsure at all n locations
agaaaggccctttgacnccccgtttccggggtgaacatgcactccgacgatatccaacaggagaggaacgctgcattgcttgcaaactttgtgaagctatatgtcctgcacaagcaatcacaattgaggctgaggagcgagaagatggaagccgcaggacaactcggtatgatattgacatgaccaagtgcatttattgtggattttgtcaagaggcatgccctgttgatgcgattgttgaagggccaaactttgaatttgctacagagactcatga

SEQ ID NO: 169070 - DNA, 268 bp, Glycine max
atggaaaggcgttttagagtggaaaatggcaggaagcagcattaacagaggagaaagatggtctctcaatggaatgactgctcttgtcaccggcggcactcgtgggatcgggcactccatagtgagtgacttggctgcgtttggcgctgcagtgcacacctgttccaggacccaaacagagctcaacaaatgcttacaagagtggcagagtcaggggtttcaggtaactgggtcgctctgtgacgtgtcctcaccaccccagagagag

SEQ ID NO: 169071 - DNA, 266 bp, Glycine max
attttgttattcctatcttatcttaacattgtttcttggagttgattgaaatggcagtgcaacctgaaattgagcatcccaggaaggcctatggatgggcagctagggatacatctggtgttctctcccctttttggttctctagaaggaaaacaggggagaaagacgtgacatttaaagtgttgtattgtggagtatgccactcggaccttcacaagttgaaaaatgaatggagtgattccatctatccccttgtccctggccgt

SEQ ID NO: 169072 - DNA, 268 bp, Glycine max
acagctgtctgctgttagatctgtacccgcctagccattgatttggaaaagtccaacttcaaggatgagtaagcttcagagtgatgctctaagagaagctatctcaggaatcatggctgattccaaggaaaagaacaggaaatttgtggagaccattgaactccaaattgggttgaaaaattatgatccccagaaggacaagcgtttcagtggctctgttaagttgcctcatattcctcgccccaagatgaagatttgtatgcttgga

SEQ ID NO: 169073 - DNA, 262 bp, Glycine max
agggtgcagaagcaaatggcggcgagaagcaattgaaatttctgatctacggtcgcagcggttggattggtggtctactgggtaagctctgcgaagagcgcgggatccaatatgagtacggcaccggcagattggagaaccggtcgtcgttggaggcggacatagcggctgtgaagcccagccacgtgttcaacgccgcgggtgtcacgggtagacccaatgtggactggtgcgaatctcacaaagttgaaaccatccgaac

SEQ ID NO: 169074 - DNA, 264 bp, Glycine max
ccctaaccaagttttaagtttttctcaacagaatggaagcaaccaacagaagctcttcctccacttcctcttcctctgattgctgctcttccgagtccaaccccaacaagcccgacagaatcaaaggcccatggagcgccgaagaggatcggatcctgaccggactcgtcgaacgatacggcccacgaaattggtccctcatcagccgctacattaagggaaggtccggcaagtcatgccggctccgatggtgcaatcagctta

SEQ ID NO: 169075 - DNA, 266 bp, Glycine max
gtgattcatcacagcatattgtctctgaaattcagaaatgacatctgcaatgccaaggtgttggtggtgatgcattgccatcttacatgcgtggagctgtgtattgggaacccaacaagcctctcaccatcgaggaatttaacatgcctcgccccaaggccggtgaagttctcatcaaaaccaaagcctgtggagtatgccactctgatctacatgttatgaaaggtgaaattccgttttccagtccttgtgttgtggggcatgag

SEQ ID NO: 169076 - DNA, 278 bp, Glycine max
  unsure (1)..(278): unsure at all n locations
ttctctctctgtctttcgcactttcattctctcttaaaaatctaaatccctttccgtcttcatctccccctctgctccagctatggcntctatatgcatcctgaaggtgctcaaggatttgcagaaggatcctcctacgtcatgcagcgcaggtcctgtggctgaagacatgtttcactggcaagccacaatcatgggacctgctgatagcccatatgcaggtggtgttttcttagtttcaattcattttcctcctgactatcccttcaagccaccaa

SEQ ID NO: 169077 - DNA, 263 bp, Glycine max
acttcctcaccgattgccagactggaatttcgatgctcagtcatctcttttaccattctcttctctcttgctcttgcaggagagagccatgtccatgcatcgctacctgaggaagattattgggaagctgtttggccaaacactcccattcccactgcactgcgagaccttctaaagcctctccctgcaggtcttgaaatcgatgaactccctaagcaaattgatgatacacagtacccaaaaacattcttctataaagaaga

SEQ ID NO: 169078 - DNA, 260 bp, Glycine max
agcaaagttactcacaggtcaagttgttgctgttaaaaggctcaacatattagactctgacgacattcccgctgtgaaccgccagagctttcagaatgagataagatctcttacaggagtgaggcaccgcaatataatcaagctttttgggttctgtacttggaggggacaaatgttcttggtttatgaacatgtagacagaggaagtttggcaaaagtattgtatggagaggaagggaaattgaagctaagttgggcta

SEQ ID NO: 169079 - DNA, 261 bp, Glycine max
tggagattttggtttagctaaacttatggattataaagatactcatgtcactactgctgtacgtggaacaattggacatatagcaccagagtacctctcaactggaaagtcttcagagaagactgatgtttttggatatggtgtgatgcttcttgaactaataactggacaaagggcttttgatctagctcgacttgccaatgatgatgatgtcatgttgctcgattgggttaaaggacttctcaaagacaggaaattgga

SEQ ID NO: 169080 - DNA, 265 bp, Glycine max
gtctccggtgagggaaaagtagtagaagagaagatgtcgaccgtaccaggacagctcatctgggagatcgtgaagaagaacaactcctttttggtgaaagagttcggaaggggcactcagagcgtgcagttcagcagagagcccaacaatctctacaacctcaacactttcaagtactccggtttggcgaaccagaaaactgtcactgttcaacctgctggtaaagaccagtccgtgttgctcgcaacaaccaagacaaagaagc

SEQ ID NO: 169081 - DNA, 265 bp, Glycine max
cttcgacgaagctgagacccttttggttgaagctcttaacaacgatgccagggatccagaaactctagccaatctagttgtatgctgtcttcatctcggcaaaccatctaacaaatcattcagccagctgaaactttctcacccagagcatgtattggtcaaacgggtatcatcagctgaagaaagttttgatagagcgctacaatcattttcctcatgagtgtcgatgattgaatttctttcaagagttgaatggtgtgaggtc

SEQ ID NO: 169082 - DNA, 263 bp, Glycine max
gccgattgagagagaaagagaaatgggagaacgaaaaggaatcccaatggctttggggctcttagcgatgatcctcttcttcattgcttcctcttcctctcacctcgttcgcgcttccggtgacgccgacgacgcgatcttctacgagtcgttcgacgaggattttgatggacggtggattgtatccgacaaggaggattacaatggtgtctggcagcatgccaagagtgatgggcatgatgattatggacttcttgttagtg

SEQ ID NO: 169083 - DNA, 262 bp, Glycine max
attccccaagcattagaagatgagtatggtggctttttaagtaccgcgcatagtgaaagatttccgagactatgcggaactttgcttcagggaatttggtgatagggtaaagtattgggttacattgaatgagccatggagttacagccaaaatggctatgcaaatgggcgaatggcacctggtcgttgttctgcttggatgaatctgaattgcactggaggtgattcttcaacggagccttatttggttacacatcaccaa

SEQ ID NO: 169084 - DNA, 263 bp, Glycine max
gtgaaatcgaaaagggctcttcgttgaatttggactcaaggaatacaacatcctgatatttggaggacagattaaagagaaacatcgtggaggaaacaatggcagcaaggtattggtgtcacatgtgctctcaaatggtcaatcccatcatggatatggaaatcagatgcccgttttgccaaagtggatttgttgaagaaatgggtaacacccccagtagcagcagcattcccaatacatcagaatctgattttgaatctgat

SEQ ID NO: 169085 - DNA, 261 bp, Glycine max
aaaaaaaattgttttcgtgtggaaacaaaaaaacaattcaaaaacaaacatatgatggtgaagccgagtagcgaaaagccagaggagcatagggattccaactactacaaaggggtccgaaagagaaaatggggcaaatgggtatccgaaataagactacccaacagccgtcagaggatttggttgggatccttcgacacccccgagaaggccgcgcgtgccttcgacgccgcaatgttctgcttacgtggccgcaacgcc

SEQ ID NO: 169086 - DNA, 264 bp, Glycine max
aagccgcagtgaaccaaaccatcatcatcgcgttaccggaataatcgacccatcatcaattagatcgaaatgaaggatgaggacgggcttccgacgacgaccgcggttacaaagaaggaaaacttggattcgagtctgtttggaaaaggcaggtacaaattctgggcgttagcggccatcttgcttctggcgttctggtccatgttcaccggtaccgtctcgctccgctggtccggcactctcaattccctttccaacgacatc

SEQ ID NO: 169087 - DNA, 263 bp, Glycine max
aaaagggaggagccaagaggcacaggaaggtgcttcgtgacaacatccagggtatcaccaaacccgcaattcggcgtttggctcgcagaggtggtgttaagagaatcagtggtctcatctacgaggagacacgtggcgtcctcaagatcttcctcgagaacgttattcgcgacgctgttacctacaccgagcacgctagaagaaagaccgttaccgctatggatgttgtttatgctctcaagaggcagggcaggactctctac

SEQ ID NO: 169088 - DNA, 260 bp, Glycine max
aaacactcttcttcatattcttcttcttcttcttgttcttgttctatctgtgacgagcatcatggcctcgagagcagtgctattgttggctatgtgtgtgcttccggccatggttgtggccattcgcccagcaaagaaccctttttgcgtgaagggtcgcgtctactgtgacccttgccgtgctggttttgagacctcagcaaccacctacattgccggtgctgagattatgttgcaatgcaagagcagggttagcaacg

SEQ ID NO: 169089 - DNA, 261 bp, Glycine max
cccaatcgtagccgtcgcactttgcgttttctgcgtcatctccgattccccgacaatggccagccaaatgagcaatcagagaaagttcgtagctgatggagtgttcttcgctgaactgaacgaggttctgacaagggagttagccgaggacggatactccggcgtggaagttagggttacgccgatgcgcaccgaaatcatcatcagagccaccagaacccaagccgttctcggtgagaagggaaggagaatcagggaact

SEQ ID NO: 169090 - DNA, 261 bp, Glycine max
tggagtcgtaggagcccttacaccttgcagagtcatctcaacattcccaagggctcctactacgcaataacgccaagctcgatctcaaattaatatatcatttattcctcttaatcaaatattaaataagaaaagatgggagagatgtcaaacttccaattgggtgtgattggtgcactatttctctcggtggcttcttctgtctccattgtcatctgcaacaaagccttgatgagcaatcttggcttccctttcgccaca

SEQ ID NO: 169091 - DNA, 257 bp, Glycine max
gttgctccttcgccacaactccctgccaacatgggtatctccagagattctatgcacaagaggcgtgccactggtggcaagaagaaggcatggaggaagaagagaaagtatgagcttggtcgccagcctgctaacactaagctgtcaagcaacaagacagtcaggaggatccgggttagaggtggaaatgtgaagtggagggcactgagattggatactggaaattactcctggggaagtgaagctgtaactcgcaa

SEQ ID NO: 169092 - DNA, 257 bp, Glycine max
ctgggtcctgaccagcccgtgatcctccacatgcttgacattcctccagcagcagagtcgttgaatggggttaacatggaattggtggatgctgcattccctcttcttaaaggtgttgttgctacaaccgatgtggttgaggcatgcactggggtcaatattgcagtgatggttggtggattccctagaaaagaaggtatggagaggaaggatgtgatgactaagaacgtctccatttacaagtcccaggcttctgc

SEQ ID NO: 169093 - DNA, 260 bp, Glycine max
atttttatgaatatctcttccttgaagtcagcttatattgagcttcaagctgctcatactccctacgaccctgataaaattcacactgctgataaacttgttattagtgagctgaaaaatctgtctgaactcaagcatttctacagggagaacaacccaaaaccagtgtgtgtttctccccaagactcacgtttagctgcagaaattcaagaacaacagagccttctgaaaacttatgaggtcatggtgaagaagttcca

SEQ ID NO: 169094 - DNA, 259 bp, Glycine max
ctccccttgctgcggttgctccaccacctaatcacttcccctgtaaatcaagtttagttcgcacaaggttttaaaaaatggctgatgctgaggacattcaacctcttgttgttgataatggaactggaatggtcaaggctggttttgcaggtgatgacgctcctagggccgtgttccccagtattattgggcgaccacgccataccggtgtaatggttgggatgggtcagaaggatgcttacgtgggtgatgaagctca

SEQ ID NO: 169095 - DNA, 260 bp, Glycine max
atttcgtataacatttcatttcacttcacttagggtggtgcatttgcaaccctttaatttcctcacaaaaatggaggcacgtagtttgtactcactagtgtttcttgtgcttgctttggctattgtgaacaaagtgcatgggcaagggacgcgtgtagggttctattcgagtacatgcccacgcgctgagtccattgttaagtccacagttacaacccatgttaattctgatagtactttggctgctgggttgcttcgga

SEQ ID NO: 169096 - DNA, 257 bp, Glycine max
ctttctcttcgagggtttgggtttctcttcctcccttggagaacaagaagagccaccgctgcgacgccgttcgtgcatttttgaggtgccgctgtcatgtttgggcgtggtggaccaaggaggagtgataactccaaatattatgatattctcgggatttccaaaaatgccagtgaagatgaaatcaagaaggcctatagaaaggcggctatgaagaaccatccagataagggaggagatcctgaaaagtttaagga

SEQ ID NO: 169097 - DNA, 255 bp, Glycine max
cgagcatcgaagctcacgaattgaattgaattgagtttctttgtctccagagatgaagaagggcgtccatccacagaagcaatggatatcctacgttacacaaacgggtaggttgatgcatgtgatgatgacaaagatacaccctgttgggaaagtttaccacttccgagctaagcgccaaatggccgagagtttaggacagattgctaagttcagacgtcgctttgggctagaaaatccagagggcaatgaaaa

SEQ ID NO: 169098 - DNA, 254 bp, Glycine max
gcggaatcagctagaattttctaataatggccaaagacgttgagcaggttacagagcaaggtgaatactccgcgaaggattaccatgacccacctccggcgccgttgatcgacccagatgagctcactaagtggtccttgtacagagccgccatagctgagttcatagcaacactccttttcctttacatcaccgtgttgaccattattggctacaagagacagagtgacaccaaaatccccggtaacaccgag

SEQ ID NO: 169099 - DNA, 258 bp, Glycine max
aaacaaatggctatatattcatccatgctgaaggtggtctaaatcagcaaagaattgcgatatgcaatgcagtggctgtggcaaaaatattaaatgccactcttattttgcctgttttgaagcaggaccagatttggaaagaccaaacgaaatttgaagacatttttgatgtggatcacttcattgactacctgaagtatgatgttcgtattgtccgtgatatcccagaatggtttaccgataaatcagagctattta

SEQ ID NO: 169100 - DNA, 257 bp, Glycine max
gcaaaatgcaacaaattcagaggcctcaaaccgagagaatacgctgccttgaaggactgcgctgaagaaatcagtgacagcgtcgaccggctcagccgtcgctgaaggaactcaaattgtgtaaggtgaagggtgaggacttcacgtggcacatcagcaacgttgagacgtgggtgagttcggctttgaccgatgagagcacttgcggcgatgggttcgccgggaaggcgccgaatgggaagattaaggaggcgatt

SEQ ID NO: 169101 - DNA, 260 bp, Glycine max
ctcaatttacgtctatttatttttttgttagttttgagaaggccccttgaacaagcaaaattaagcacaaaagcccaaccctctctctcgctgttggtctctcctatttggcattcgcagatcgattacgaagtaatttcactgaatcttattgaagatgtttctcacaaggactgagtatgaccgaggagtcaacaccttttctcctgaaggccgtttatttcaggttgaatatgcaatcgaagccatcaagctgggat

SEQ ID NO: 169102 - DNA, 259 bp, Glycine max
ctcttccctctgccgccgcaccctgcaaattcaatggcttcagagaagaaactatcgaacccaatgagggaaataaaggtgcagaaactcgtcctcaatatctccgttggtgagagtggagatcgtctcaccagagccgccaaggtgttggaacagcttagtggccaaaccccagtgttttccaaagcaaggtacactgttcggtcctttgggattagaagaaatgagaagattgcatgctatgtcactgttagaggtg

SEQ ID NO: 169103 - DNA, 258 bp, Glycine max
gcaggagccattactctcccccaccgccatgacggttgcaagccccgcctcttcacgcaccaagaggctcgtcaagctaacgctctcgctcctccgcctcggcttcaactcctccaaatgcaaaacggcagcgaagatggcggtggcgaggatcaagctgctgcggaacaagagagaggtggtcgtgaggcagatgcgacgcgacattgcccttcttctccagtctggtcaagacgccaccgctcgcatcagggttga

SEQ ID NO: 169104 - DNA, 256 bp, Glycine max
aattaataacaagctagctattagttcgattttgtagtaagtgaggtgccaatatggtgaagatagctcttggtactttggatgactcttttagcgctgcctctcttaaggcttatttcgcagagttccacgcaactctgattttcgtgttcgctggtgttggatcagccatcgcttacaacgagcttacaaaagatgcagccttggatccaacggggctggtggcagtagctgtggcacatgcatttgcactgtt

SEQ ID NO: 169105 - DNA, 254 bp, Glycine max
cccctttactcgtgatagccacaaactcgctgcttattttgatttgaactttgaagttttgttattttgtgcaatggcagccaagagcaaaatcctagtccttggaggaacaggatacattggaaaattcatagttaaggcaagcgcagaagcaggacaccccacttttgccttagttagagagagcaccctttctcatcctgaaaaatctaaacttattgagagcttcaagacctccggagttactcttcttt

SEQ ID NO: 169106 - DNA, 248 bp, Glycine max
ctttccggcaacaagcgacccctgccgtcgaattccgcgacggatttaaaacgatcgcattcggaagttgtgagcttgatgaagggttgctcgcaggtttggcagaagcttatgaaacacaaacatgggtggatcttcaacgctcccgttgatgttgttgggttgcaacttaccgattactacgatgtaattaagcaacccatggatctgggaacggtgaagtccaatctttccatgaacaagtacac

SEQ ID NO: 169107 - DNA, 280 bp, Glycine max
cttgctggcactaatggagaaaccaccactcagggtctagatcgccttggtcagcgttgcgccaagtactatgaagccggtgcacgttttgccaagtggcgtgctgtgctgaagattggtcccaacgagccatctgagctggctatccatgagaatgcctatggcttggccagatacgctgtcatatgccaggagaatggcctggttcccattgttgagcctgagatccttgttgatggatctcatgacattcacaagtgtgctgccgtcaccgagcgtg

SEQ ID NO: 169108 - DNA, 279 bp, Glycine max
cagtttgaaaatggtacttgtgctatggtcaagagggactaagaacatggacttcctaaccctcttcactcttctactcttgttattcattcatacagcactctcttctacccaatatcatgatcggaacatcttactcactcatcgtaagatcttccccaaacaggaagctatcacctcgtacgctgtcatctttgatgctggtagcactggtagccgtgtgcatgtcttccatttcgaccagaacttggatctccttcgtattggcaacgaactcga

SEQ ID NO: 169109 - DNA, 274 bp, Glycine max
ctggtggaggagtagagattggaggaccaggaaaaagggctcatctttacgagcacaagttcagttggtatttcgtctatacatgcttcgttggggcccttggcggttctctctttggctatgatctcggtgtttcaggtggggtgacttcaatggatgatttcctgaaggaattcttcccaaaggtttacagaaggaagcagatgcatctgcatgaaacagactattgtaaatatgacgaccaagtgctgacactgtttacatcatctcttta

SEQ ID NO: 169110 - DNA, 273 bp, Glycine max
ctccgctcaacaactataagattatcttcttcttcttcttctcttcaattcttctccaatcccaaccgcaccctcttccgtccctttcttcacacttccttcaaaccacttccttcgtctttctctttccgaacagatcacactatggccacctcaaacgccaaatcagtccatgatttcaccgttaaagatgccaagggaaatgatattaaccttggtgactacaaaggaaaggtccttatcattgtcaatgttgcctcacaatgtggcttg

SEQ ID NO: 169111 - DNA, 267 bp, Glycine max
cgaaaactcctccaccgtggctccggcaacactctacaaagctctgacaaaagatgctgacactatcatcccaaagattattggggccatccaaactattgaaatcgttgaaggaaatggaggacccggaaccgtcaagaagataacagctagtgaaggtgaccaaaccagtttcgtgctgcaaaaagtggatgcaattgacgaggctaacttggtatacgactacagcatagtgggagggacggggttgcatgaaagtttggagaa

SEQ ID NO: 169112 - DNA, 266 bp, Glycine max
gatatatagaaaaacaaaggagaaaagatagaaatggagaagtttccagttgttgacatggggaaccttaataatgaagagagatcagcaaccatggagataatcaaagatgcctgtgagaactggggtttctttgagttggtgaaccatgggatatccatagagttgatggacaccgtggagaggatgacaaaagagcactacaaaaagtgtatggagcaaaggttcaaagaaatggtagcaagcaaaggtttggagtctgctca

SEQ ID NO: 169113 - DNA, 252 bp, Glycine max
ggctaatctctcactcttgttcttcggtctcctcctattctccgctgccgtagccaccgtcgaacgaatcgacgatgaagacaaccttctgatccgtcaagtggtgccggacgcggaggaccaccacctgctcaacgcggagcaccacttctccgccttcaagacaaagttcgccaagacctacgccacgcaggaggagcacgaccaccgcttccgtatcttcaagaacaacttgctccgcgccaagtcgca

SEQ ID NO: 169114 - DNA, 260 bp, Glycine max
ctctctcgttttttctcaaaaagttgcaagagttaaagcaaaaaccaaagtgagagagaaaatgatgaagccatcgatgctcagatctcttcactctgccgccacccgcggcgcctcccacctctcccgccgtggctacgcctccgagccggtgccggagcgcaaggtggccgttctaggtgccgccggcgggatcgggcaacccctctcccttctcatgaagctcaaccccctcgtttccagcctctccctctacgata

SEQ ID NO: 169115 - DNA, 270 bp, Glycine max
ctgcaactttgaacttctgttctctattattattatctttctctttttcttcatctcttatcttccttcacctttttattgcaagaaaaaaaaaatgagcaccataagcatggtagaggcaaagctgccaccaggattcaggtttcatccaagagatgaagagcttgtgtgtgattacttgatgaagaaggtgcaacacaatgattcccttctcttgatagatgtggaccttaacaagtgtgagccatgggatattcctgaaacagcatg

SEQ ID NO: 169116 - DNA, 279 bp, Glycine max
ggaaatgttgcagccttcatatctgaagccatacagggagtggggggtatcattgaattggctcctggttacttgccagttgtgtacaatgccattaaaaaagcaggaggactttttattgctgatgaggttcaggctggctttggtcgcactggtagccatttctggggatttgaggcccacaaatccgttcctgacatagtcacaatagctaagggcattggaaatggcattccccttggtgctgttgtaactactccagagattgcagaggtctta

SEQ ID NO: 169117 - DNA, 280 bp, Glycine max
ctcgagcgaatcggctcgagcagaagacagagtgagacgctactcacgatggagggaacagtatcctacgcgcgcatgcctcgggtcaaaatccgcgagctgaaggacgactacgccaagttcgagctccgcgacaccgacgcgagcatcgccaacgcgctgcggcgcgtgatcgatcgcggaggtgccgacggtcgccatcgacctcgtggagatcgaggtcaactcctcggtgctcaatgacgagtttatcgctcacaggctgggcctcatccccctc

SEQ ID NO: 169118 - DNA, 275 bp, Glycine max
gttaagtgtaccaagttaataggtctttatatttagttgttgacatcaacaaagtcatggaggaagttaatgtggttcaaaccaagaatggaactgttgcagtagcttctgcgtttgctggacataaggaagctatacagcaaagggaccacaaatttttaagaattgctgttgaagaagcctataaaggggtagactgtgaagatgggggtccctttggtgctattatagtatgtaatgatgacatagttgctcgatgtcacaacatggttctg

SEQ ID NO: 169119 - DNA, 272 bp, Glycine max
gcggaaaacgttgttgagttcacagacttacccgtcaagaggccaagagaagaagaagaaggaaccaatggcgtctccaacgacgccgtttcagcgctccccaatgaccctcaataccctggcatctctgcggttattcccggttggttctccgaaatcagcccaatgtggcccggggaggcacattccttgaagatggaaaagattttgtttcaagggaagtctgactatcagaatgtcatggtcttccagtcatcaacatatggcaaagt

SEQ ID NO: 169120 - DNA, 272 bp, Glycine max
aagtggtgtcctaaagaaagaccatctttctcttttctgtatcaccgttggaagagactgagatgggttcaaaaaccaagacttttacctttgaagaggtggctaaacacaatcacaggaaggattgttggattatagtcaaagggaaggtgtatgatgtcaccccatttttggatgatcatccaggaggtgatgaagttttagtgactgcaacagagaaggatgccaccactgattttgaagatattggccacagtgattcagcaacacag

SEQ ID NO: 169121 - DNA, 273 bp, Glycine max
caacactctcaccaggcgtgggtacgcagcagcgacacaaagcgcaacaagaggaggagctgcctccatcagcagcaagatagctcccaagtcaggggaagacaaggtaggaggaggtgctgaaaaggtttcgtgggtcccagaccctgtcactggttactacaaaccggagaacatcaaagagattgatgttgctgagctgagagccacggttttgggcaaaaaattcaaccactagctcgctagctagttaatttcaataacctttttggt

SEQ ID NO: 169122 - DNA, 270 bp, Glycine max
gcatcgcagtatgtttattgcctcaagaaattgggacttgatcccagaaaggtcaatgtcaatggtggtgccattgctcttggacatcctttgggcgttacaggtgcacgttgtgttgcaactttgttgaatgagatgaaacgcggtggcaaggattgtcgctttggtgtaatctcaatgtgcatagggtcaggtatgggagctgctgctgtatttgaacggggggacttttaaagatttgtgcaagtttagaatagttcataaaaataa

SEQ ID NO: 169123 - DNA, 270 bp, Glycine max
ctgataccaaatatagaagccaaaattgtgaacccagaaacaggggaagccatgtttcccggtgaacaaggagaactctggatcagaggaccttatgttatgaaaggttattctggtgacccaaaagcaacttcagcaactttggtggacgggtggttaaggactggggacctctgttattttgatagcaaaggtttcttgtatgttgtagataggttgaaagagttgattaaatacaagggctaccaggttgctccggcagagctagaa

SEQ ID NO: 169124 - DNA, 254 bp, Glycine max
gttaaggctttccaaaagtcttacttcaacaagtatggtggtggggctaattccctcgctgctgggtacagcacaggtactggattgggtgctgagattattggaacctttgttttggtctacactgtcttctctgccactgaccccaagaggaatgccagagattcccatgtgccggttttggctccacttcccattggatttgctgtgttcatggttcacttggccaccatcccagtcactggtactggtat

SEQ ID NO: 169125 - DNA, 268 bp, Glycine max
ctcttctgtgtttcttagcagaattaagatggctaccttgactgtacctccagttcctccttcccccagagatgatgccatgcagctttaccgtgcttttaagggatttgggtgtgatacaagtgctgttatcaatatacttgctcatcgagatgctacacagcgtgcctacatccagcaagaatacaaagcaatgtattctgaggaactttccaagcgcttagcttcggagcttagtggaaagttagagactgcagttctgctctgg

SEQ ID NO: 169126 - DNA, 268 bp, Glycine max
cagaagagagcattacaagaagactatggagcaaaggttcaaagaaatggtgaccagcaaaggtcttgagtcagttcagtcagaaatcaatgacttggactgggaaagcacctttttcctgcgccatcttccactctccaacgtttcagacaacgcagatcttgatcaagattacaggaagacaatgaagaaatttgctctggaactggagaaacttgcagagcagcttctagacttgccatgcgagaatctgggcctggagaaaggg

SEQ ID NO: 169127 - DNA, 280 bp, Glycine max
caatcattgaagggtaattcacgagctcttgcaactgtcacagcaatcattgacggaaccggttctataggggctgcagttggacctttactaacaggttacatatctgcaaagagctggagtgctgttttcacaatgttgatggcagcagctttaattgcagggctgcttttgaccaggctagtcgtgtctgaggtggccacaaagattgaagagtcaaggtataatagagcacaagactgttcattcaatgtataagaataaacctaaagggtcacag

SEQ ID NO: 169128 - DNA, 276 bp, Glycine max
cttctttctttcttactttctctcactcaccaaatagttttctcacaaaggaggaagaatggcatctttcatttcactctctttgttgcttctctttctcaattaccccttcctttccctctcaaccaaccctgaagggaacgctctgcatgctttgagaagcaggatttctgatcccaacaatgtgttgcagagttgggacccaacactggttaatccctgtacttggttccatgttacttgtgactccaacaatcatgtgattcgcttagactt

SEQ ID NO: 169129 - DNA, 276 bp, Glycine max
aaaacatctcaatgggttcttcttctattacaacatcgcccgcaaccatgaccatggctgcgatcgtgctcctgttcacggtctttgccgtttcctccgccctagacatgtcgataatctcgtacgacagcgcccacgcggacaaggccgccacgttaccgcaccgaggaggagctgatgtccatgtacgagcagtggctcgtgaagcacgggaaggtgtacaacgcgctcggcgagaaggagaagcgcttccagatcttcaaggacaacctgcga

SEQ ID NO: 169130 - DNA, 271 bp, Glycine max
ctacaactagtaacaaagatccaacaagcagatcaatctctctctctgtctcccaatcaaaacagacatgggtttgaaggaggattttgagcagtatgctgagaaagcaaagactttgccaccgactcaatcaaacgaagacttgcttatcctttatggattgtacaagcaggccaccgttggacctgtcaacaccagccgtccgggaatgttcaacatgagggacagagctaaatgggatgcatggaaggctgttgaagggaaatccaag

SEQ ID NO: 169131 - DNA, 270 bp, Glycine max
gcgcaagtgaggaacaagcaagtgcttctaaaggactatgttaccggttttcccaaagaatccgacatgaatattgtcgaaagtaccataacattgaagcttccacaaggttccaatgatgtcttgctcaaaaatttgtacttgtcttgtgatccgtatatgaggaatctcatgaacaagcccgaaggccctcccaatagtcgtgcttacactcctggctctccattaataggatatggtgtgtctaaagtcctggaatctgggcaccca

SEQ ID NO: 169132 - DNA, 270 bp, Glycine max
cagtgaaagagaatccgaggcgaagagaagagaaaaattaagatggaggggaaggagcaggatgtgtcgctgggagcgaacaagttcccggagagacagccgattgggacggcggcgcagagccaagacgacggcaaggactaccaggagccggcgccggcgccactggttgacccgacggagtttacgtcatggtccttttacagagcagggatagcagagtttgtggccacttttctgtttctatacatcactgtcttaaccgtcatg

SEQ ID NO: 169133 - DNA, 265 bp, Glycine max
ggggattgcttttgctcagaagcaaactgttgctgcttaaatttccttgtcagcaggtggtttcttgggttatggatttatttgagcataaatactacttagaggacttaggttgcagatttgttgtagcatctttactgcttccagaacttaggattcagactttctatgtatcaattctacttccagttttgttagtagaacgggaggacgcttccatttctgttctctaaaccgagcttaggttttggtcagaatcttcaaa

SEQ ID NO: 169134 - DNA, 264 bp, Glycine max
ataatatggcatttaaaggctatttcgttttgggcctcatagctcttgttgtcgttggcacttccaaagttacatgcgaaatagaagcagataaagtttcacctattattgacttttccctcaatcggaacagtttccctgaaggcttcatctttggggcggcatcatcctcctaccagttcgaaggtgcagcacaggaaggtggtagaggaccaagtgtatgggataccttcaccataaatatccagataagatcaaggatgg

SEQ ID NO: 169135 - DNA, 260 bp, Glycine max
atggaatttcgatgctcagtcatctcttttaccattctcttctctcttgctcttgcaggagagagccatgtccatgcatcgctacctgaggaagattattgggaagctgtttggccaaacactcccattcccactgcactgcgagagcttctaaagccactccctgcaggtgttgaaatcgatgaactccctaagcaaattgatgatacacagtacccaaaaacattcttctataaagaagaccttcatccaggcaaaac

SEQ ID NO: 169136 - DNA, 265 bp, Glycine max
caaagaggaagaagacacagaaggagaggttcaacatcttcttcatctatggcgacgccggattctgacgctaccactcagcctcaagattccgacactgctcccaattccagtcctcccaacgccctcgtccccgccgctcccgccgtttgcctccttcgcttcgccaccgactccgccggcggcgctctcatgggctccgtctttggatacggtgctggattgtttaagaagaaaggttttaaaggatcctttgtagaagcag

SEQ ID NO: 169137 - DNA, 259 bp, Glycine max
cacaagtcttccttcccacttgcaccctctctctctcgccggtcgccgaatctttctccgcatccgcaacctccgccgtatccgcctttgattcttcaaccgatggatcggccggcgaccggacctggcgtggacatgccgatcatgcacgatagcgaccgctacgatttcgttcgcgatatcggctccgggaatttcggcgtcgcaaggcttatgaggcgataaccgacgcaagagcttgttgctcgtaagtatattg

SEQ ID NO: 169138 - DNA, 262 bp, Glycine max
cctgaatcaaagagctttagtgagcaaggtttgggaccaattccatcaaagtggagaggaatctgtgataacggaattgatcatacttttcactgcaacaggaagctaataggggcaaggtacttcaacaagggctacgcctcagtgctcggcccactgaactcctcctttgactcgccacgtgacaacgagggccacgggacccacaccctatccacagctggcgggaacatggtcgcacgtgtcagcctcttccgccaag

SEQ ID NO: 169139 - DNA, 276 bp, Glycine max
gtgagtgctttctttctgtaactaaccccaatcatcaactcagtcagcgaatgaatctgtggacggacgagaactcctcggtgatggaggccttcatgccatcctccgatctctcctccatctggccccctcccgctcctccgcagccgcaatccacggcggtcttcaatcaggacaccctccagcaccgcctccaggccttaatcgagggcgcccgagagacctggacctacgccatcttctggcagtcctcttacgactattccggctccactc

SEQ ID NO: 169140 - DNA, 271 bp, Glycine max
aaagagttttccaagtttatggttgtgttgtgactgcacaagacatggttgaacccagagatcccgtgaaagtgtttgacaaagcagactactatgcacatcctgagcattacaatcccactttccatgaaaaaatagcaccatatgcatctgttattgtcaattgcatgtattgggagaagagatttcctcaattgctgagctataagcagatgcaagacttaatgggccgggggagcccccgtgttggaatagctgacataacgtgtga

SEQ ID NO: 169141 - DNA, 271 bp, Glycine max
gagatttcttcgttgaactgtgggatgtctcaggacatgaacggtacaaagattgtcggcctctgttttattcgcagattaatggtgtaatttttgttcatgatctttcacaaagaagaacaaagactagcttgcagaagtgggcagctgagattgctgcaactgggacattttcagctcctttgggatctggtggtcctggtggccttcctgttccatatatttttattggtaataaagctgatattgctgcgaaagagggtacaagagg

SEQ ID NO: 169142 - DNA, 269 bp, Glycine max
accgcgtgaggctctgtttctagggtttgttgggtctaaaaaatcgaagcgatttcgatggcggaagagcgattcacgggcgtggtgcagtggttcaacaatggcaagggcttcggcttcatcaagcccgacgacggcggcgaggatctcttcgttcaccagtcctccatcagatccgacaagtcccgcggccccttctggaacctcctccgcctcgtcttcggcggaatcgtgaaacccatccaaaccctcggtcagttcctcggccc

SEQ ID NO: 169143 - DNA, 259 bp, Glycine max
ttcttctcttgcggctagggttttagcgcagttcttctagatttaaggaagatgggtaaggaaaaggttcacatcagtattgtggtcattggccatgtcgactctgggaaatccactaccaactggtcacctgatttacaagcttggaggcattgacaagcgtgttattgagaggtttgagaaggaagctgctgagatgaacaagaggtctttcaagtatgcctgggtgctggacagacttaaggctgagcgtgaaaga

SEQ ID NO: 169144 - DNA, 257 bp, Glycine max
ccctcgagccgaatcggctcgagcacaaagcgggatactgtctgcaccagctaccatctctccctctctttcttagtgcctacctgccagaagtcaaaatcgcccaagaaactgtcctattcacatctgcatcagtgaacgaggggcaccctgacaatctctttgaccagatctccgatgctgtgctcgatgcatgcttggagcaggaccctgacagcaaggttgcctgtgaaacctgcaccaagaccaacatggtg

SEQ ID NO: 169145 - DNA, 260 bp, Glycine max
cgccgccgtcgtcgaggacgtcaagaaaaaccccgacgccgccgtctccggcaccgtcatccgccgccgccttcagctcatgatgtacaacaacatgtaccgcataatgttcgaccggaggttcgagagcgaggaggatcccatcttccagaggctaagagccttgaacggagagaggagtcgcttggcgcagagctttgagtataactatggtgattttattcccatcttgagacgcttcttgaagggttacttgaaga

SEQ ID NO: 169146 - DNA, 262 bp, Glycine max
gtgtcatttacgcttctcttctctgcagcaactatgcctaaccctaaggtcttcttcgacatgaccatcggcggtcaatctgctggccgcatcgtgatggagctctacgccgacgtcactccccgcaccgccgagaacttccgcgcgctttgcaccggcgagaagggcgtagggcggagcggcaagcccctccactacaagggctcgtccttccaccgcgtgatcccgagtttcatgtgtcagggtggcgacttcaccgccg

SEQ ID NO: 169147 - DNA, 274 bp, Glycine max
  unsure (1)..(274): unsure at all n locations
ctaacctcccactgaagagtaattggtggattccagcaatggccgtggttcatggcagttgggtcaagcttgatcaaagaggagaagggcaaggagcgagaagctcacatgctatagccatagtagcacagaaggtgtatgcatttggtggcgaattcgtgccacgtgtcnccgttgataacaaacttcacgtgttcgacctagagactttgacctgggtcgtggctgatgcatcaggggatgccccancgccacgtgtcggtgtcacaatggc

SEQ ID NO: 169148 - DNA, 258 bp, Glycine max
tcgagccacactgagaggaagagggagtgagagtgttcttcgtttgctaccttctctcacaaatggttacgttcaggtttcaccagtaccaggtggtcgggagggctctcccaacggaagcagatcagcatccgaagatctaccgaatgaagctctgggccaccaacgaggttcgcgccaagtctaagttctggtattttttgaggaagctgaagaaggtaaagaagagcaatggtcaagttcttgctatcaacgaga

SEQ ID NO: 169149 - DNA, 269 bp, Glycine max
tgaagatgagctttttcacccatccaaaccttccaagaaaaacaacaacatcaacaaaaagcatgggggcaacaccaataacgatgataacagcaaggattccaaggctgctggcgacaagagattcaaaacgctgcccccagcagagtctcttcctaggaatgaaaccattggaggctacatctttgtttgcaacaatgataccatggctgagaatctcaagagacaactctttggtctgcctccacgatacagagattctgttcggg

SEQ ID NO: 169150 - DNA, 271 bp, Glycine max
atgaccactacagttgctgccctgcagactatcccatctgcaacacttacgctggaacttgtctcaggagcaagaacaacccctttggagtgaaggcattaaggcgtactccagcgaaaccccattggaccttcggacgtaagaacaaggtcagcagtgcttaagcagtttaaggaaatgtgaacgtgcagaaggagccaatgatgaagtaaaagggaagacgaaggactcaagcaccagctggatgcacttcccccttcttcacataatg

SEQ ID NO: 169151 - DNA, 267 bp, Glycine max
cctcgagccgaatcggctcgagtgaaaatgggttcttctttgtggcctttgtgtctaatttcggcttcactagcctcttcaccattctgtgcctttccacggaggccagtggatgttccattcggcagaaactacgttcccacttgggcttttgatcacatcaaatacttcaatggaggttctgagattcaacttcatcttgacaagtacactggtactggcttccagtccaaagggtcatacttgtttggtcacttcagcatgaac

SEQ ID NO: 169152 - DNA, 265 bp, Glycine max
atctgtcctcatacctaactcctatgtttggtaaagacaaaacctcagaggaaaggagaattgccatttgtatatttgatgatgttgctgagcatggtcgtgaagctgctcttaaatattatgattctcttcttccattcttacttgaagcttgcaatgatgaatatccagatgttcgacaggctgctgtttatggtgttggtgtttgtgctgagtttggtggatctgttttcaaaccccttgttggagaggcactttcaaggtt

SEQ ID NO: 169153 - DNA, 266 bp, Glycine max
ctctctctcaccaaagccttcctagaacgaaaaaaaaaagaagagcaattttccctcaccaaagaagaagaagcaaacaatggccgatcaacttaccgatgaacagatctccgagttcaaggaagccttcagcttgttcgacaaggacggcgatggttgcatcacaaccaaggagcttggaactgttatgcgttcattggggcaaaacccaactgaggcagagctccaggacatgatcaatgaagtggatgctgatgggaatggta

SEQ ID NO: 169154 - DNA, 261 bp, Glycine max
ggagacatcagctcttccaaggagggggatatagttaaatcaaaagatctcgagagcggaagtagttctgcagacaatgtcgaagcaggaactgcagtttttctcgtggagcttgaggaaaaaagagctattaaggtttttgggaagagcactttgattggattggctctaacattctttgctggactttgcttctctatgttctcaccagcattcaacatagcaacaaatgaccaatggaatactttgaaaaaaggggtt

SEQ ID NO: 169155 - DNA, 261 bp, Glycine max
ctagtctctaatttgcgttttgattcattgattccttcatttccttgctgagagtgcgtgtgatttctctcgtctcctttagaattccgattggtatttctaacactgtgaaagacagagagatatggcaggaggtggtggagctccagcacctaagatcgatgagccacagccacatccaccgaaggatcagctaccgaatgtttcttactgcattacgagtcctcctccatggcctgaggccatacttcttggttttca

SEQ ID NO: 169156 - DNA, 246 bp, Glycine max
gggttttaacaatggttctgtaccagcctcagcacaagctactttcccatatttatttgcagtcagtaagttcttgcaggcaggaacttttgaccttgtgggcactattatatacgagatagatgaccatccatatcatatttccttttgtaatggcactgttgaggttgtgaatctggtgctttcttagcatggaatccgtttttcctttactttggggttgatcctgtctctggggtaggatct

SEQ ID NO: 169157 - DNA, 267 bp, Glycine max
cttgtctgagaaggaaacagatagaagctttgggttgagaaatttcaggtacattgagaccatcaaagaagctttggaaagagaatgccctggagttgtttcatgtgctgatatcctcgttctctctgccagagatggcattgtttcgctaggaggtccccatatccctcttaagactggaagaagggatggtagaaggagcagagctgatgtggttgagcagttcctcccagaccacaatgagtccatttctgcagttcttgacaa

SEQ ID NO: 169158 - DNA, 263 bp, Glycine max
caagaagcgaaactaaagtcagcattcgaaaaagatgagtagcatcggtacaggttacgatctatcggtcaccactttctcccctgatggccgcgttttccagatcgagtatgccgctaaagccgtcgacaacagcgggactgttattgggatcaagtgcaaagatggggttgtgttgggcgttgagaagcttattccgtcgaaaatgatgcttccgggttccaatagaagaatacactccgttcatcgtcactctgggatgg

SEQ ID NO: 169159 - DNA, 261 bp, Glycine max
gcctcgaacacggcattcagcctgatgggcagatgccaagtgataagactgttggtggaggtgatgatgctttcaacaccttcttcagtgaaactggggctggaaagcacgtgcctcgtgcgatttttgtagatctcgagcctactgtgattgatgaagttaggactgggacataccgccaactatttcatcctgagcagctcattagcggaaaggaggatgctgcaaacaactttgcccgtggccactataccattggaa

SEQ ID NO: 169160 - DNA, 177 bp, Glycine max
cgccgcctccggcgactccaaggtcttctacctcaagatgcagggagactaccacaggtacctcgctgagttcaagaccggcgccgaccgcaaggcagccgccgagagcacgctctccgcctacaaagccgctcaggacattgctaacaccgagctgcctccaactcaccctatcag

SEQ ID NO: 169161 - DNA, 281 bp, Glycine max
caagggtccaaattttgggacaaaagtgagcaactaccctccttgtctcacccctgatctgatcaagggactaagagctcacactgatgctggtggcataattctactcttccaagatgacaaggtgagtggcttgcagctcctcaaggataccagtggatcgatgtcccaccaatgcgtcactccattgtaatcaaccttggtgaccaacttgaggtcataaccaatggcaagtacaagagtgtgatgcaccgagtgattgctcaaaccgatggtaccag

SEQ ID NO: 169162 - DNA, 280 bp, Glycine max
cgcggccctctctggaggccacaccatagggtttgcaaggtgcaccaccttcagaaacagaatctacaacgtaagcaacaacataatagaccccacgtttgcagcatctgtgaggaagacatgtccgaaaagcggaggagacaacaacttgatccacttgatgctacacccacaagagttgacaccacatactacacggatttgctgcacaaaaagggtcttctccattctgatcaagagctgttcaagggaaaaggcacagaaagtgacaaattggtgc

SEQ ID NO: 169163 - DNA, 278 bp, Glycine max
ctccttttctcttctctgtctaatcggtgccctgagatcacattgaacaatggtgaaggctgtggccgttcttggcagcagtgagggtgtcactggaactattcacttcgttcaggagggaagtggtccaaccaccgtaactggatccttgctggtcttaagcctggtctccatggtttccatgtccatgccttgggggacactaccaatggttgcctctcaactggatcacatttcaatcctaataacaaggagcatggtgcccctgacgatgagaa

SEQ ID NO: 169164 - DNA, 278 bp, Glycine max
caaaattcaggaaaaaaaaaaaaaaacatgggggtaaaggtgtatggtccaacccatggatccccaaagagggtcctggggtgtctgattgagaaggaaattgagtttgaaacagtgcatgttgatctcttcaggggggagaataaggacctgagtccctaaagctgcagccattgggaccccttccggttattaaagagggggattatactctctatgaatcccgggcaataatcagatacttagctgagaagtataaagcccaggggactgacttt

SEQ ID NO: 169165 - DNA, 280 bp, Glycine max
attgaactcaagttttttctcttctctcggtttcatcgccatggatgaagaagtgcgcaagatcttcagcaagttcgacaagaacggcgacggcaagatctcgtgcgccgagctgaaggagatgatggtggcgctgggatccaaaacgagtcgcaggaggtgaagcgcatgatggcggagcttgatcggaacggcgacggctacattgacctgaaggagttcggcgagttccattgcggcggcggcgacgggagggagctccgggaggcgttcgagctgt

SEQ ID NO: 169166 - DNA, 277 bp, Glycine max
gtcggagctgtgtctggggaaatttgcgttgtttttcgcggtacagctcacacacactgaacggtaagtatggcggacaaggctgttacaatccgaacccgaaagttcatgaccaacaggcttctttccaggaagcagtttgtcgttgagttcttcatccagggagggcaaatgtttccaaggctgaacttaaggagaagctagctaggatgtatgatgtgaaagaccctaatactgtatttgtcttcaaattccgaacacattttggaggtggcaa

SEQ ID NO: 169167 - DNA, 283 bp, Glycine max
caacctcttctttctcttcttcttcctcttcttagcctccgccgccgccagcgtccccgcccacaacatcacccgcatgcttgccaaacaccccggcttctccaccttcaaccactacctctccctcacccacctcgccgaagagatcaacgccgccagaccatcaccgtcctggccctcgacaatgccgccatgtcctccctcctcgacaagcacctctccctccccaccatcaaaaacgtcctctccctccacgtcctcgtcgactacttcggcgccaaaa

SEQ ID NO: 169168 - DNA, 279 bp, Glycine max
cgcaacaaaaagaaagaatcccaggcgaggagaaagatggaggggaaggagcaggatgtgtcgttgggagcgaacaagttccccgagagacagccaattgggacggcggcgcagagccaagacgacggcaaggactaccaggagccgcgccggcgccgctggttgacccgacggagtttacgtcatggtcgttttacagagcagggatagcagagtttgtggccacttttctgtttctctacatcactgtcttaaccgttatgggagtcgccggggcta

SEQ ID NO: 169169 - DNA, 274 bp, Glycine max
ggtggtcgagtagttctctttgaacggacagatacaaaagatcattgcggatcaagaagggacttggagaggatggactattctattagtagacatcctgagttccgttataaaacagagtttcagagtcatgagcctgagtttgatatcttaagagtttggaaatagaagagaaaattaacaaaatcaaatggtgccaaacagccaatggtgctttgttccttctatccacaaatgataacaccatcaaattttggaaggttcaagaaaagaa

SEQ ID NO: 169170 - DNA, 275 bp, Glycine max
gtggtgccttatcgctgtggttatcatcttcttcttcctctttcttagatctcttctttctctacgccgcacgccgaaaccatggccggaaaaggagagggtcctgctatcggaatcgatctcggaaccacctactcttgcgtcgtgtgtggcaacatgaccgcgttgaaatcatcgccaacgaccaagggaacagaaccacgccgtcttacgtcggattcactgacaccgagcgtctcatcggtgatgcggccaagaatcaagtcgccatgaac

SEQ ID NO: 169171 - DNA, 276 bp, Glycine max
ttctatttcccataaagccatggaacattctcaactgtccattgtcattaccttctttgttttcttgctcttgcttaggctagttaaaaatcactagccaaaatcgagtcacaagttgccccctggtccatggaagttacctatcatggtaaccttcatcaggtagcactagcagcttcacttccacatcatgctctccaaaaacttgcccgtaaatatggacctctcatgcacctccaacttggtgaaatttcaacactggttgtgtcctccccc

SEQ ID NO: 169172 - DNA, 278 bp, Glycine max
ggaccccgtgaccgtttccacgggcataacctacgaccgcgacagcatcgagaagtggatcgagtccgggaaccgcacgtgcccggtcaccaaaacggagttgacaaccttcgacatgatcccgaaccacgccatccgtaggatgatccaggactggtgcgtggagcaccgttcccacggcatcgaacggatccccactcctcgtatccccgtcaccccgtacgaggttgctgacacgtgtacgaggatcttgtcggcggcgcaacacggggacgaga

SEQ ID NO: 169173 - DNA, 279 bp, Glycine max
attcattcaagattcagcaagtgcgttttggaagcagagaccgaaatacttcgagatggcccgtacaaagcaaactgctcgtaagtcaactggaggaaaagctcccaggaagcagcttgcaaccaaggctgcacgtaagtctgcaccacaactggtggtgtgaagaagcctcatcgttatcgccctggaactgttgctcttcgtgagattaggaaataccagaagagcactgagctcctaatcaggaagcttcctacccagaggttggttcgtgaaatt

SEQ ID NO: 169174 - DNA, 278 bp, Glycine max
taacaagatggcttcttttcatatcccatattcattccttgtgcttgtgcttgctatggtgatcacattgatgaacccgaccaatgcaaccctctctccccatttctatgataaagtttgccctcaggcattgccagttataaagtagtggttcaacgagcaattatccgtgagcgacgcatcggagcatctcttctgcgcttgcatttccatgattgtctcgtaaatgggtgtgatggatcaatattgctagatgacacccgaaacttcactggcga

SEQ ID NO: 169175 - DNA, 277 bp, Glycine max
cttgcaggaaaaatggtttcgctgaaactgcagaagcggctcgccgcgagcctgctcaagtgtggcagaggaaaggtttggcttgaccccaatgaagtcaacgaaatctccatggccaattctcgccaaaacataaggaagctggtaaggatgggtttatcatcaggaagcccaccaagattcactctcgctcacgtgctcgtcgaatgaaggaagccaagaggaaaggacgtcactctggatacggtaagcgtaagggtacaagggaggcaaggct

SEQ ID NO: 169176 - DNA, 274 bp, Glycine max
tcaaaaccagagtggttctagtaatccggtgctgctagaggatgggaactagtgaatggcatatcgagcgaagatctagcttcggcactgaatcccccttagcaagagaggcaggaaatgtgcctgaaactgggtcactctctatgttgtgcttggcgcttctggggatcttgctaagaagaagacatttcctgcacttttccatctataccggcagggattcttaccagcagatgaagttcacatttttggctatgcaaggacaaaaatatct

SEQ ID NO: 169177 - DNA, 277 bp, Glycine max
ggggaacacggagaagctgatgaaccagatcatggaattgaagttcacgtcgaaatcgctgcagcggcaatcgcgtaagtgcgagaaggaggagaaatcggagaagctgaaggtgaagaaggcgattgagaaaggcaacatggacgagcgcggatctacgcggagaacgcgatccgtaagcgcacggagcagatgaactacctccggcttgcctcgcgcctggacgccgtcgtggctcgcctcgacacgcaggcgaagatgacgacgatcagcaagt

SEQ ID NO: 169178 - DNA, 273 bp, Glycine max
gttaaggatgttcctaacaatttgttgaggcacattaccttggacaacaatgagaacaaacctgtcactaacagtagggatacacaagaggttatgttggagcctgggctgaaattaattaaaattttcaaggaatataccagcagacatgcattttggatgattttggcttctatgaggctcgtcagaaaactattttggagaagaaagcaaagcaacaattcccaaagcaggtatgggaagggaaacctgctgatgagaagattgagataa

SEQ ID NO: 169179 - DNA, 272 bp, Glycine max
tatacttgtcaaccctttgagagttagaatggctgctgctattgaaatccccacaatagtgtttccaaactcctctgcccaacagaggatgccagtggttggaatgggatctgcccctgacttcacatgcaagaaagacacaaggaggctatcattgaggccgtgaaacagggttacagacacttcgacactgctgctgcttatggctctgaacaggctctcggtgaagctctcaaggaagctatccatcttggcctcgtctcccgccaaga

SEQ ID NO: 169180 - DNA, 272 bp, Glycine max
cactgtttccttcatcttcttcttcttcttctatctctctacaacacacttttttaagtgattcgttcgcagaaacatggcttcttcgtttctatccgcagcttcgcacgctgtctcaccctcttgttctctgtccaccacgacaagggaaagcccatgcttggaggcaacactttgagatttcacaaaggacccaattccttctctagttcaaggtctagaggtcggatctctatggctgttgcagttaatgtatctcggtttgaaggcat

SEQ ID NO: 169181 - DNA, 271 bp, Glycine max
gccagcccttcctccatttcctcctcatataaactcttctcaataaccagatatttcattgcatgaatattcaaaaaacaatggccatgctcaatatcatctccattctctctctcttactcactcaatcccacgccaaaataccggcgtctattccggtgggccatggcaaagcgctcacgccactttctacggtggcagcgacgcctcaggaactatgggaggagcgtgtgggtacgggaacctatattcccaaggctacggtgtgaac

SEQ ID NO: 169182 - DNA, 272 bp, Glycine max
cgaggctcctgtttattctgtctgcccacattataaagaaaacattcagttcatcttttcaacagcgttagatgggaaaataaaagcatggttgtatgacaatttgggatctcgtgttgattatgaagctcctggtcgttgggcacaaccatggcttatagtgctgatggtacaaggctcttttcctgtgggacaagcaaagatggggaatcatccattgttgagtggaatgaaagtgaaggagctgttaaaaggacttaccaaggatttcg

SEQ ID NO: 169183 - DNA, 272 bp, Glycine max
agcaacttcaggtttttaagtctttgcctcttggcattgattgcatcatctcatgctcaacttcagcttggcttttatgccaagagttgcccaaaagctgagcaaatcattttgaaatttgttcatgaacatatccacaatgtccatcactagcagctgcattgataagaatgcactcccatgactgttttgtaaggggaagtgatggatcggtgcttctgaactcaacaaccaatcaggctgaaaagaatgctcctccaaatctcacagtt

SEQ ID NO: 169184 - DNA, 270 bp, Glycine max
aacaaacacaaaccgaaaaggcgaaaggggttttccgagtgagatctagggtttccatcgattcggagagaggatattgatcgaacgacctcagcgagcaaggacaggaggtggagtactagatcatggattcggtgccttgaattcgcatggaaacctcgatgagcagatttctcagctcatgcagtgcaaacccttgtccgagcaagaggtaagggtcttgtgtgataaggcaaaagagattttgatggaagagagcaatgtacagcc

SEQ ID NO: 169185 - DNA, 271 bp, Glycine max
ctaccgtttctcctgcaaaacagagcttgattctcaatacaccattctttcttctcctttcgaagcactgccaaataaaaatggagtggcctgcgtgtacggacgaatacgaaaagctcataattcggatgaacactcccaggttgtcattgacaattccgttttctcctcagctacgctagtcaaggttgacagcgccagaaggcatggtattctattggatgctgtagaagtgctagctgacctgaacctttcaattaagaaagcgtat

SEQ ID NO: 169186 - DNA, 271 bp, Glycine max
cagatatcttgctagggttttaggaaaagacactgtctcgcgagtcaacacaggttacagcaatggctttctttggtagaattgggaatttattaagacagacagcaagcaggcaggttagttcagaattgcgatcatcccttccctttttcaggctatacgcagtatgtcatctgctccaagcacaaagctgtttatcggaggtgtttcatattctactgacgagcaaagtttgagggaagctttttcaaaatatggtgaagttgttgat

SEQ ID NO: 169187 - DNA, 270 bp, Glycine max
ggaaaattagccaaacaaaagcaaagatcaaacaaaccaaggacgagaacacgatgttgcttgaacttgcacttggtttattggttttggctctgtttctgcacttgcgtcccacacccactgcaaaatcaaaagcacttgccatctcccaaacccaccaagcccaaagcctcgtctccccttcataggacaccttcatctcttaaaagacaaacttctccactacgcactcatcgacctctccaaaaaacatggtcccttattctctct

SEQ ID NO: 169188 - DNA, 271 bp, Glycine max
gtttatgtagctattggtcaaaaagcatcttctgtggctcaagtggtgaataccttacaagaaagaggagcaatggaatacactattgtagtagctgaaacagcggattctccagctacattacaatacctcgccccttaacaggagcagctctggctgaatattttatgtaccgtgaacgtcacactttaatcatttatgacgatctctccaaacaagcacaggcttatcgccaaatgtctcttctattacgaagaccacctggtcgcga

SEQ ID NO: 169189 - DNA, 268 bp, Glycine max
gcaacccacaaaagcagcacaagaacactcatcagatcccagtgatcaattcaatttgcgttcatcactggtaaggcaaacatgaggggcattctttccgtaaggacagccttggttcaacatcatagtgagaaattgtccttggtttcagagtatttagcactcagggtgcttccactgctagtaccccacagccgccaccaccacctcctccgccggagaaaacccattttggcggccttaaggatgaggacaggatatttactaa

SEQ ID NO: 169190 - DNA, 267 bp, Glycine max
ctatcaacgaacccactgccgctgccattgcctatggattggacaagaaaggtggcgagaagaacattctagtctttgatcttggtggtgggacctttgatgtcagtatcttgacaattgataacggtgtttttgaattcttgctacaaatggagatactcatcttggaggtgaggattttgatcaaagaataatggagtacttcattaaattgatcaagaaaaagcatggaaaggatattagcaaggacaacagagcacttggaaa

SEQ ID NO: 169191 - DNA, 267 bp, Glycine max
ctcctttgtttctatggcttctgcagaagtagagttccgatgctttgttggtgggcttgcttgggccaccgaccacgatgctctcgagaaagccttctctcaatttggcgaaatcgtcgaatcgaaggtcatcaacgtcgtgaaactggaagatccagagggtttggatttgtgaccttcgccacagagcaggcgatgagagacgcaattgcaaggaatgaacggccagaacctcgacggtcgtaatataaccgtgaacgaggctca

SEQ ID NO: 169192 - DNA, 264 bp, Glycine max
aaaaaatttctagagcgagaaagtgagaggagagagaaagtagctgatcctccatggcctccaccaaggaacgcgaaaacttcgtctacaccgccaagctcgccgaacaagccgaacgctatgaagaaatggtggaagaatgaagaatgtggcgaactgaacgtggaatacacggtcgaggagcggaaccttctgtcggtagggtacaagaacgtggtgggtgctcgtagggcttcgtggaggattctatcgtcgattgaacag

SEQ ID NO: 169193 - DNA, 266 bp, Glycine max
ccacgtcagagtggtgatcttaccattatgtatgatgtgatcagaacttatgattcaaattactgggctgaggttaccgttgcaaaccataacccacttgggaggcttgataactggaggttgagctgggactggataatgatgagtttatatattcaatgaaaggggcttatccttcggttgtggatgcttctgattgtctctttggtaagcaaggaactttctatagggatcttgactttgcccttgtgttgaattgtgagaga

SEQ ID NO: 169194 - DNA, 238 bp, Glycine max
  unsure (1)..(238): unsure at all n locations
cgtgctgttgaatgtactggcagcatccaagccatgatctcagcattcgaatgcgtccacgatggttggggtgttgctgtacttgttggagtgccaaacaaagatgatgcattcaaaactcatccagtgaatttcttgaagagaggactctaaagggtaccgtctatgganactacaaaccccgcactgaccttccttctgttgtggagaagtacatgaatggggaattggactggag

SEQ ID NO: 169195 - DNA, 244 bp, Glycine max
ggcatttcaattatcgtgtcttcttggctctctgtttaggatcgacatggatttcttttttccattggcaatacttgtgatgatattaggcacaccatactctagtgcttctggaaagagtgaaagtaatgtgcaacagctgtttttctgtctcctaagtttgaacttggaccgggatcggttgaaaataaatatgattatgctattgattttccaagaggtcatatagcacttaagagtttca

SEQ ID NO: 169196 - DNA, 241 bp, Glycine max
agaatcccaggcgaggagaaagatggaggggaaggagcaggatgtgtcgttgggagcgaacaagttccccgagagacagccaattgggacggcggcgcagagccaagacgacggcaaggactaccaggagccgacgccggcgccgctggttgacccgacggagtttacgtcatggtcgttttacagagcagggatagcagagtttgtggccacttttctgtttctctacatcactgtctta

SEQ ID NO: 169197 - DNA, 239 bp, Glycine max
atttgttttgatactatataggaagaaagaaaaactcttgaccgggagttagctcgtgccaaggtaacagcaaacagagtagctgtagtggttgcaaatgaatggaaagatgctaatgacaaagtgatgcctgtgaaacaatggcttgaagaacgacgattcttgcagggagagatgcagcaacttcgggacaagcttgctataactgagcgaactgcaaagtctgaagcacagttaaa

SEQ ID NO: 169198 - DNA, 237 bp, Glycine max
ctcaaattaaaattaatttaagcaagccaaacactatatcaaggggaaaatggcagaggctaatgtagtgctgttggatttctggccaagctcttatggaatgagagtgaaaatcgctttggcagagaagggaatctcatatgagtgcaagcaagaagacttggaagctagaagctctctgcttttagagatgaacccggttcacaaaatgataccagttttgattcataatggaaa

SEQ ID NO: 169199 - DNA, 238 bp, Glycine max
aagagaatggctcgcaagggtttaatcttcttggctgtgttatgcttctcagcactgtcactgagtcgttgtcttgcggaggataatggacttgttatgaacttctacaaggaatcatgccctcaggctgaagacatcatcaaagaacaagtcaagcttctctacaagcgccacaagaacactgcttgctcctggctcagaaacatcgtccatgactgtgctgttccgcgttgtgatg

SEQ ID NO: 169200 - DNA, 240 bp, Glycine max
gagaaaaacagatagtgtgggagagagaagagcggaagagaaaatgacgaccaggttcaagaagaacaggaagaagagaggtcacgtcagcgccggacacggccgtatcggaaagcaccgcaagcatcccggaggtcgcggtaacgccggtggcatgcatcaccaccgtatcctcttcgacaagtaccatcctggtttcttcgggaaggtaggcatgcgctacttccacaaacttcgcaa

SEQ ID NO: 169201 - DNA, 240 bp, Glycine max
gctcactcgagcgaatcggctcagtcggtggttgccagacagttacctctgtcaccacaacttgcggctgtcgggtcatcgctgtcttgttggtgttatttgtaatggaaccctttacatagcaaaccttggggattcccgggcagttttgggaagagcagtcaaggcaactggcgaggttttatccatgcaattatcagcagagcacaatgcatcgatagagactgtacgacaggagct

SEQ ID NO: 169202 - DNA, 268 bp, Glycine max
cgcgtacgtcaccgcatactgctcgactagcagctctcgttgtttcggagttagggaccttacgcagccatggccactgctacgaatgccgccgccgccccaccacgccagctctcccagaaggaagctgacatccagatgatgttggccgccgacgtccacctcggcaccaagaactgcgacttccaaatggaacgttacatcttcaagcgccgcaacgacgggatttacattattaaccttgggaagacgtgggagaagcttcagc

SEQ ID NO: 169203 - DNA, 237 bp, Glycine max
tctctctcccttagtcaaagggactcattgttcttctcccaggttatttagaaaagcaaaatggtgaagatttgctgcattggtgctggatatgtggggggtcctactatggcagtcattgcacttaagtgcccatccattgaagttgctgttgttgatatctctaaatcccgcattgcagcctggaacagtgaccagcttcctatctatgaacctggccttgatggtgttgtgaag

SEQ ID NO: 169204 - DNA, 236 bp, Glycine max
ctagcagcggaactctagcttgggcagcgaatcacaatggcgagaggattgaagaagcatttgaagaggcttaatgccccaaagcattggatgcttgacaaactgggtggtgcatttgctcctaagccctcatctggaccacacaaatcccgcggaatgcctgccactcatactcattttgcgaaaccggctgaagtatgctctgacataccgtgaagtcattgctattctgatgc

SEQ ID NO: 169205 - DNA, 238 bp, Glycine max
ctccaattagggtttttgtgatctgcagctacgatgggtaagggaacggggagtttcggtaagaggaggaacaagacccacaccctctgtgtgaggtgtggccgccgcagcttccacctccagaagagtcgttgctctgcgtgcgcttaccccgctgcgcgcaccaggaaatataactggagcgtgaaggccattaggcgaaagaccaccggaactggaaggatgaggtacttgcgta

SEQ ID NO: 169206 - DNA, 235 bp, Glycine max
accgcgcggtgggggctttcgtgagtcactgcgggtggaactcggtggtggaagggttgatttcgggggtggcgatgctgacgtggccgatgggtgcggatcagtatacaaacgcttctcctccccgaacctcagttcccgaacccgaagcaaaacgacaacccggaagacccaaacggcgttgtttcgttcccaaatctcccaaattccccattctacccctggtggcagatca

SEQ ID NO: 169207 - DNA, 240 bp, Glycine max
ctcgcaagcaaaaagaaagaatcccaggcgaggagaaagatggaggggaaggagcaggatgtgtcgttgggagcgaacaagttccccgagagacagccaattgggacggcggcgcagagccaagacgacggcaaggactaccaggagccggcgccggcgccgctggttgacccgacggagtttacgtcatggtcgttttacagagcagggatagcagagtttgtggccacttttctgttt

SEQ ID NO: 169208 - DNA, 236 bp, Glycine max
caaatgttgatttacgaatttatgcccaatggaacacttagggagagtttgtcagggagatctgagattcatcttgactggcagaggagactccgcattgctcttggttccgccagaggacttgcatacttacatgagcttgccaaccctcccataatccacagagacgtgaagtcgactgctatattgttggatgaaaatttgacagcaaaggttgcagattttggcttgtccaa

SEQ ID NO: 169209 - DNA, 236 bp, Glycine max
gcaatatgtattggaaggcatgcgtttggtgatcaatatcgggctactgacactgtaattaaaggagctggaaagctgaagctggtgtttgttccagaaggccaaggtgaggaaactgaattcgaggtttttaacttcactggtgaagggggtgtttcattggctatgtacaatactgatgagtctattcgttcttttgccgaggcttctatggcaactgctttagagaaaaagtg

SEQ ID NO: 169210 - DNA, 237 bp, Glycine max
gagggatttatggatgaacaagtttgattgggaccaccctattcacttgcagccaactagtcctacaactgagaagaaagttagtgtggtttgggatgcatacgaggcaacaaaggatgcagatggtgtctgcattctcactgagtgggatgggttcaagactcttgattatcagaaggtgtatgacaacatgagaaaaccagcatttgtttttgatggaaggaacattgtggatgt

SEQ ID NO: 169211 - DNA, 235 bp, Glycine max
cttttccattccaacctctttcacacttcagatctgtttcttcatcggttgttcaagtaaatggcctttgtcaccactgctgaagtgtgtgatgcgaacccacagttaattttgagtggggagcttcgtgcccttcagccagtttttcagatttatggccgtcgacaggttttctctggacctatagttaccttgaaggtgtttgaagacaatgttttggttcgtgagttccttg

SEQ ID NO: 169212 - DNA, 239 bp, Glycine max
ctcaagttggatcttccgtatgcaatcctcctgttagtgtgtacaagggatactcgttgtcaaaggacaccgaggaatatcttgtctcacatggactgaagaatgctttatacacaattagagctactgatttgaaagaggatttgtttggcatgcttgttccttgccctttccaggaaccttctaccaaagagggcacatcaaataaggacgtatctaaacagagatctttgggagtg

SEQ ID NO: 169213 - DNA, 259 bp, Glycine max
tcagaactcggctcgagcgcgctgcggttagaagagattcaatctgaatctgaatggcagctatcagacagccagcctccaaacttcgagaacaggtcgctcgtcaacaacaggctgtgcttaaacagtttgggcctgggggatatggacgttcagataatatggttactgatgaggtagagcttcagcaacatcagaaacttgagaagctttacatatcaacacgtgctggacagcattatcaaagggatattgtccg

SEQ ID NO: 169214 - DNA, 238 bp, Glycine max
cgcgtcgctgctccgtaccagtttcactgcataaatttgagagaaaactctgcaaacatgttggtttatcaggacctccttacaggtgatgagcttctctcggactccttccgttacaatgaaattgagaatggaatgctgtgggaagttgaggggaagtgggttgttaagggagcagtcgatgttgacattggtgcaaacccttctgctgagggtggagaagatgagggagtcgatg

SEQ ID NO: 169215 - DNA, 237 bp, Glycine max
cccaaattctcctgcaaactctgaagcagctcgaatgtttagtgagaacaagcgtgagtacaatcgaagagtgagggaaattgtggagcagagttggacagcagattaagttcatccttatatgcatgggaagctttgaaggcatgaatttggttgcagtgatggcaactataagaatgattgtgcaaactcatcacatttatattctctgctgatatgcatgatagcatcatctta

SEQ ID NO: 169216 - DNA, 236 bp, Glycine max
ggccaggcaagccccactcaaccaccacacctctcctcgttcacgctacccctttctgctcttcttctacctttcaagttttaaaagtataaagatggcagagacattcctatttacctcagagtcggtgaacgagggacaccctgacaagctctgcgaccaaatctccgatgctgtcctcgacgcttgcctcgagcaggacccagacagcaaagttgcctgcgaaacatgcacca

SEQ ID NO: 169217 - DNA, 234 bp, Glycine max
gtcggtggatcgaaggtgtcttccaagattggagttattgaatccttgttggagaaagttaatgttctcttgcttggtggaggaatgatctttaccttttacaaggctcagggttattcagttgggtctctcttgtggaggaagacaagcttagccttgcaactacacttcttgaaatggccaaggctaaaggggtttctttgttgcttccaactgatgttgtcatagcagaca

SEQ ID NO: 169218 - DNA, 240 bp, Glycine max
ctttgcgcagttccctacctctcctttcaagatgcatatcttcgtcaagaccctcaccggaaagaccatcacccttgaggtggaaagctctgacaccatcgacaacgtcaaggccaagatccaggacaaggacggaattcccccggatcagcaacgtctcatcttcgccggaaagcagctcgaggacggccgtaccctcgccgactacaacatccagaaggagtcaacccttcaccttgt

SEQ ID NO: 169219 - DNA, 235 bp, Glycine max
cggcctaccacgagcagttgtcggtgccggagatcaccaatgccgtgttcgagcccgccagcatgatggccaagtgtgatccaaggcacggcaagtacatggcttgctgcttgatgtaccgtggtgatgttgtccctaaggatgtcaatgctgctgttgccaccatcaagactaagaggactgttcagtttgttgattggtgtccaactggattcaagtgtggtatcaactacca

SEQ ID NO: 169220 - DNA, 234 bp, Glycine max
ccatttgcaggcgttcaattatatggtggaccaagagccagtaacttattaaatatttctgacacacactctttccatctggagtatagctcactggcttgtacagttgaaattgtagatgatgtatttgctgccattgaccacatacatcaccatggaagtgctcatactgaatgcattgttgcagaagactctgaagtcgccgaagctttcttaagtcaggttgacagtgct

SEQ ID NO: 169221 - DNA, 236 bp, Glycine max
ctctttcttcctcttcctcagtagtgcgattttcgattctcttctctgcaactatgcctaaccctaaggtcttcttcgacatgaccatcggcggtcaacctgccggccgcatcgtgatggagctctatgccgacgtgactcccagcaccgccgagaacttccgcgcgctctgcaccggcgagaagggcgccgggcggagcggcaagcccctccactacaaaggctcgtccttccac

SEQ ID NO: 169222 - DNA, 233 bp, Glycine max
atcactagaagtgttggatgcatttctatttctaactaattattgtgcttattattattgttgagaaagaaaagaatggcaaagttcataacattctttgagttgaacacaggggccaagattccttctgttgggttaggcacttggcaagctgagcctggtgttgtagccaaagctgtcaccacagccattctggttggatacaggcatattgattgtgctcaagcgtataa

SEQ ID NO: 169223 - DNA, 237 bp, Glycine max
gtttttgagtgcggtgcggcgatcctagcactctcttctgcagctttcgccgacagcttcattcaccatggctgagcaaaccgagaaggcttttttgcaacaaccaaaagtgtttctcagctcgaagaaaactgggaagggaaagagacccggaaagggtgggaaccgcttttggaaatccattgggcttggatttaagactcccagggaagccatcgaaggaacctacattgacaa

SEQ ID NO: 169224 - DNA, 238 bp, Glycine max
cgacaaatgaagtctttccatctcacagtgacagctttgtgctgtgtagtcgttgtgcttggagtgcttccactctccctagatgcacaactagatccctccttttacagagacacttgtcccagggttcactccattgttcgtgaagtcgtcaggaacgtttcaaagaaagatccccgtatgcttgctcagtctcattagacttcactttcatgactgctttgttcaaggatgtgat

SEQ ID NO: 169225 - DNA, 123 bp, Glycine max
gtaatctcttttttcagtgtgtagcatctcaccctgatacaaggctgctattcctcaatgctcagatacctctatatctgtatcccttccttaatagaacaagcaagtcaagaccatttgagt

SEQ ID NO: 169226 - DNA, 236 bp, Glycine max
gttctcttcaattttagcaacaacaacttcgacatgggttcttcttggcccgccaccagcgccgatcaaggcgaaaacgacccttcctcgctctggctcagcgatcccgaagttagggattccgttaacactgctgctgctaccccttcggtcatggttcctgcacagactcaggggatttcgatttcaaagacgatgcagttagagagttctattcaaacccctggttcgagtat

SEQ ID NO: 169227 - DNA, 232 bp, Glycine max
gttgagaccaagacacactcgttcatatatctctctgctcttctcttctcttctacctctcaagtttttgaagtataaagatggcagagacattcctattcacctcggagtcagtgaacgagggacaccctgataagctctgcgaccaaatctccgatgctgtcctcgacgcttgcctcgaacaggacccagacagcaaggttgcctgcgaaacatgcaccaagaccaactt

SEQ ID NO: 169228 - DNA, 234 bp, Glycine max
atcaaacatgaaacccttgagactctctgtttctgaccttccaatgttgtcgtgtcactacatccaaaagggcgtgttactaaccgctccgccctcgtctttcgaggatatgatactctcttttaaacactctctttctatcgcgctctctcactttccggctcttgcgggaaggttagagacagattctcatggttatgttaatattgtctgtaacgacgctggcgtggattt

SEQ ID NO: 169229 - DNA, 236 bp, Glycine max
gcccgattctgatgaaaggtcatgagaggccattgacgttcctgaaatacaacagggacggcgatctcctcttctcctgcgccaaggaccacaaccctaccgtctggtttgccgacaacggcgaacgcttgggcacttatcgcggccacaacggcgccgtttggacctgcgacgtctcaagagattcggctcgactcatcacgggaagtgccgatcagaccgcccagctatgggac

SEQ ID NO: 169230 - DNA, 235 bp, Glycine max
ctaatagtttggttttgtagtaagtgaggtgaggtgccaaaatggtgaagataactcttggtactttcgatgactcttttggtgttgcctctcttaaggcttatttggcagagctccatgcaactctgattttcgtgttcgctggtgttggttcagccatcgcttacaacgagcttacaaaagatgcagccttggatccaacggggctggtggcagtagctgtggcccatgcatt

SEQ ID NO: 169231 - DNA, 291 bp, Glycine max
gccatggctttctccttctccaaagcacttgtccttgcctgctccttctgcttatttgcgtctttggcttttggacgcgatttctccattgtgggctattcatcggaggacttaaagtccatggataagctcattgaactctttgaatcatggatgtcaaaacatggcaagatttaccaaagcattgaggagaagcttcttaggttcgagattttcaaggataacctaaagcacattgatgagagaaacaaggtggtcagcaactactggcttggcttgaatgagtttgct

SEQ ID NO: 169232 - DNA, 274 bp, Glycine max
ggaatctgaatatggaggtggtcagtctgttcctgttggtggcattgcatactatatcactgcaccatccagcttagctgatatggcagccaatcctttccatgctctgttctatcttgtgtttatgctttcagcctgtgccttgttctctaaaacatggattgaagtctctggttcatctgctaaagatgttgccaagcagcttaaggaacaacaaatggtaatgcctggacaccgtgagtcaaacttgcagaaagagctgaaccgatacatt

SEQ ID NO: 169233 - DNA, 272 bp, Glycine max
cttgaactcaaggagatggctctgggaagaggcagtgcagtggttctactactttgcttcttgctgcttcactctcagatggctcgtgctgccacctacacagttggagattctgggggttggacctttaacactgttgcctggcccaaaggaaagctctttcgggctggtgacacacttgctttcaattatagccctgggactcacaatgtggtggccgtgaacaaggctggatatgatagctgcaagactccaagaggagccaaagtgta

SEQ ID NO: 169234 - DNA, 268 bp, Glycine max
ttcactcccattaacagcaaccatggtgcagaggctcacttatcgcaagccgcatagttatgctaccaaatccaaccagcaccgggttgttaagacccctggagggaagttggtgtaccagaccatcaagaagagagcaagtggacctaagtgccctgtcactggcaagaggatccaagggattccacacttgagacctgctgaatacaagaggtctagattgcctcggaaccgcagaccgtaaaccggcctacggaggtgttttatc

SEQ ID NO: 169235 - DNA, 178 bp, Glycine max
aagatggagaagtatcagatctggagcaggagaatagcgttggcagcgtttgcgtttgctctgctgttccaatcggcctcagcagacgacgtcgttgtgctctctgaagataacttcgagaaggaagttggtcaggacagaggagctctcgttgagttctatgctccttggtgtggac

SEQ ID NO: 169236 - DNA, 267 bp, Glycine max
  unsure (1)..(267): unsure at all n locations
cacgagtacaagccagagcttgacattatttccaatgctagctgcacaaccaactgccttgccccgctcgccaaggttatcaatgacaggtttggcattgttgagggtttgatgaccactgttcattccatcactgntacccagaagactgttgatgggccatcagccaaagactggagaggtggaagagctgcttcatttaacatcattcctagcagcactggagctgccnnngctgttggaaaagtcctccctgctttgaatgga

SEQ ID NO: 169237 - DNA, 260 bp, Glycine max
taacaagattaattgagtctacgttcatccgagcttcatatctgatatccattcttcaccgtaccaatgtctaattcttccatggccagcttgacttttgctgttggcattattggcactgtattatcccttttggtgtttgcctctcccatcaagactttttgtagagtggtaaagaagaaatcaacagagaattacaagggagctccatatataacgacgttcttgtgcacaagtttgtggacttcttatggagttct

SEQ ID NO: 169238 - DNA, 262 bp, Glycine max
cttacaatgtcactcctaatcaaccaactccaaaggatcctacatggctatccgatagtgaccaaatcggtgtcctaggtcatgtagccattgtctacatatacgaagcaaatcccaacagcaacaccattgagagattgaggaactctcttagcaagcttttggtgtactactatccattcgctggcagattcagcttgacaaaaagtggtcgcatagaagtggattgtaacgcaaagggagtgacattgattgaagctaa

SEQ ID NO: 169239 - DNA, 264 bp, Glycine max
gcagaatttgtccaaggaggaattcgtacatatactgcgtcgccaaagtactggtttctcaagaggaagctctaaataccgaggagtaacactccacaagtgtggccggtgggaagctcgaatgggacaatttcttggcaaaaaggcttatgacaaggcagctatcaaatgcaacggaagggaagcagtgaccaactttgagccaagtacttatgaaggagagctgaaatctgcagccattaatgaaggaggcagtcagaatct

SEQ ID NO: 169240 - DNA, 267 bp, Glycine max
ctcgagcgatgctgggaagtcttctgaaagacgcggttatggtggaccacgaggtcattaccgtggtgcgtggtggtcgtcgtggaggtttcagcaatggtgaaactggtgaagctgaagaaggacgacctcgaagagcatttgatcgtcgcagtgggactggacgaggaaatgaattcaaacgtgaaggttcaggacgtggtaactggggagcccaaactgatgaacttgctcaggtaactgatgaggttgcgaatgaaactgaaa

SEQ ID NO: 169241 - DNA, 268 bp, Glycine max
ctttgtctctcttccaaaacctaattttcattttttctcttcaaacaaattttcaaaatgcgtgagctccttcacatccagggtggccaatgcggcaaccagatcggcgccaagttctgggaggtggtttgcgcggacacgggatcgaccccactggaaggtacggtggggactcagagcttcagctcgagaggatcaatgtctactacaacgaagccagctgcggccggttcgtgccgcgcgccgttctcatggacctcgaaccggg

SEQ ID NO: 169242 - DNA, 271 bp, Glycine max
caaattttcaagctctgccctcccgagcagctggtaactcattacaagattggaaccttcaaatttggtgatgttgatgactttctactgaagatagctacagttaggggcaagctcaagaagggtggaatagttgacattaatgctgctgcaagaatcgttcttcatgattggaatgaaggtaaaattatatattataccattcccccaaatagggatcaaggggaacctgcagaggttaagatagtttctgagttttcaaaggagttta

SEQ ID NO: 169243 - DNA, 269 bp, Glycine max
tcgaaatttttggattcgtcgattccgggatgcatgggattcatgcactcacaagaaagccgtggctcttggcatcttcgggcttgtatggaatttatcatcagttgttgctcgcatttgggcagtgttcgtactatttgcagccttcagatattatcaacaacattatttggtgagagatgaatggggggaagatgaagcaggatgtgatgaaacatggcaagaccctgttggagttagaccgaaacaaggacctgcaaccaacttta

SEQ ID NO: 169244 - DNA, 265 bp, Glycine max
ctttcttctctctgttttccttcttcctcgcatcaatggagttggacggcgttctcctcggcatgtgcaaccctctcctcgagatctctgccgtcgtcgacgacgctttcttggaaaaatacggtatcaagttgaacgatgcgattctcgccgaggataaacacaaacctatgtatgaagaattggctaacaatcctaatgtggagtacattgctggaggtgctactcagaattcaatcagggttgctcagtggatgcttcaagc

SEQ ID NO: 169245 - DNA, 259 bp, Glycine max
aacgctgctaattaattattagtttcacttcaatgactcaaagggatcgtcgcaccctatcattcccggcggttcacccatgcgaaccattatctccgccgacacttgtcacgtctctaatcagtctctcccaatccatatgcagtttccaaccccaatcattccccacccaacgaaggacgtccagggaaacaatacgccaaataagcattgtcttaatgttccttcaagagattcgagtaatccccaactccagtat

SEQ ID NO: 169246 - DNA, 263 bp, Glycine max
cgcagtttccattgctaaggaggaagccacaaaattggggacggtcatcgggattgatcttggaacgacctattcatgtgttggtgtttacaagaacggccatgttgaaatcatagccaatgatcaaggtaaccgtatcaccccatcgtgggttgctttcaccgacagtcagagactaattggagacgctgccaataatctggcagctgtcaacccagaaaggaccatcattgatgtcaagagacttattggaagaaagttcg

SEQ ID NO: 169247 - DNA, 268 bp, Glycine max
aagatggagaagtatcagatctggagcaggagaatagcgttggcagcgtttgcctttggtctgctgttccaatcggcctcagcagacgacgtcgttgtgctctctgaagataacttcgagaaggaagttggtcaggacagaggagctctcgttgagttctatgctccttggtgtggacactgcaaaaagcttgctccagaatatgaaaagcttggtagcagcttcaagaaagccagatctgttttaattggcaaggttgactgtgatg

SEQ ID NO: 169248 - DNA, 266 bp, Glycine max
gcttccattgtgctcactcatctcttacaacgaaaccctcttcatcttgttctatctgtgacgagcatcatggcctcaagagcagtgttattgttggctatgtgtgtgcttccggcgatggttgtggccattcgcccagcaaagaaccctttttgcgtgaagggtcgtgtctactgtgacccttgccgtgctggttttgagacctcagctaccacctacattgctggtgctgagattatgttgcaatgcaagagcagggttagcaa

SEQ ID NO: 169249 - DNA, 261 bp, Glycine max
cagagaggtgttggtgccctaatcgtgagaagaaaggacacggaaaagaggaaaatggtgtgcataaggaaggcgacggtgaaggaccttctggcgatgcaggcgtgcaacctgttctgcctccctgagaactaccagatgaagtactacctctatcacatcctctcctggccccagctcctctacgtcgccgaagactacaacggccgcatcgtcggctacgtcctcgccaagatggaggaagaaaccaccgactgccac

SEQ ID NO: 169250 - DNA, 277 bp, Glycine max
gagacagggagacaagacagagtagtacagattactaccaatggctaccaaggtttacattgtttattattctacgtatggacatgttgagaagctagctagagagatagaaaaaggggctgcttctgtggagggagtagaagcaaaactgtggcaggtacctgaaacattgcctgaagaagtccttgctaagttgggagcacctccaaagagtgatgttccaattattactcccaatgagcttcctgaggctgatggctttttgtttggttttccc

SEQ ID NO: 169251 - DNA, 272 bp, Glycine max
cacattggtttattttgaaaccctaaagtttgcccccttacacgttttttgtcttcttttttctcccatctttgtttcgagaagcatttgacgaagagaagagacagtgaatcgcggtttcaattcaacccacttcatctcaggtgtttgaagttgagataaaaatgagcggaacagagaaagcaggatcaggaaccaccaaaacccccgccgatttcctcaaatccattcgtgggaggccggttgtcgtcaagctcaattctggtgttgat

SEQ ID NO: 169252 - DNA, 263 bp, Glycine max
ctggccttttgttctcgtgtcaatttctaaatccaccaccacaccctctcttctattctctattattattatgtccacacccttcactctgtctcactcttctctcgaatcttccaccgcaatggccacccctgccgagaaactctccgctctcaaatccgccgtcgccggattgaacgaaatcagtgagaatgagaagaacggattcatcagcctcgtcggccgctatctcagtggcgaacgcagcatgtggaatggagcaa

SEQ ID NO: 169253 - DNA, 266 bp, Glycine max
cggctcgagggagattcatctctgcaggttgttttagaaaagaaaaaatggtgaagatttgctgcattggtgctggatatgtggggggtccaacaatggcagtcattgctctgaagtgcccctccattgaagtggctgttgttgacatctccaaatcccggattgcagcatggaacagtgaccagcttcctatctatgagccaggccttgatggtgtggtgaagcaatgtcgtggcaagaaccttttcttcagcactgatgttgag

SEQ ID NO: 169254 - DNA, 260 bp, Glycine max
cttgcatcggctggaggaggctaaaaagtatgatcacaggattttgggtgtgaaacaggagcttattcttcatcatgaatggagcccgggaagctggttttttcttccgcaaggcactcggatctacaacaaactcatggacttcattcggaatcagtacagagacaggggctatcaagaggtcatatctcccaatgtatttaacatggaactgtgggtgcaatctggtcatgctgcaaattatagggaggatatgttta

SEQ ID NO: 169255 - DNA, 277 bp, Glycine max
ctcttgaggaactgcacaagagtttggtctcaaacgggaagcatctagcaattgccaatcctcgttggcaagtgatttatacgctaaaggcgaccaactttgtcacaagaattggaggaagggtcttcttgactattggagaagtattgactgcaagctggatttctgaattgctacggattgaaccgagtgttgtacctctgtctttgttaatagaactcgtgtgtggaaataagatcttagcttttcatggctggtttgaattggaatgttgtaa

SEQ ID NO: 169256 - DNA, 263 bp, Glycine max
gtttgggaacctagtttggcaaacatttcaagaatcagagtcttttaccactctcaggtttagcattattatctgaaatggcatcggtgtctagtcagcaacagttccgttacacgcagccaccgtcaaaggttcttcatttgagaaatttgccgtgggagtgtacagaggaggaactagttgagcttgggaagccattgggaaattgtgaacacaaagtgcacgttggagcaaatcgtaatcagctttatggtttgcagttt

SEQ ID NO: 169257 - DNA, 272 bp, Glycine max
cggttttccaattcgcagagcaactcaacacaacgaaccaaaccaacaatgtcgcagccgcagcctcagtcgcagccgcaacacgggcaagctgcgctggagcaggtgcagtgcttcggtcgcaagaagacggcggtggccgtgacctactgcaagctcgggcgcggcctcatcaagatcaacggctgccccatcgagctcgtcgagccggagatcgtccgctttaaggccttcgagcccatcctcctgttgggaaacagccgcttcgccgg

SEQ ID NO: 169258 - DNA, 266 bp, Glycine max
ctcaccgattgctagaatggaatttcgatgctcagtcatctcttttaccattctcttctctcttgctcttgcaggagagagccatgtccatgcatcgctacctgaggaagattattgggaagctgtttggccaaacactcccattcccactgcactgcgagagcttctaaagcctctccctgcaggtgttgaaatcgatgaactccctaagcaaattgatgatacacagtacccaaaaacattcttctataaagaagaccttcatc

SEQ ID NO: 169259 - DNA, 263 bp, Glycine max
ctttcatcattcatcgcctttcaccacgcacgcagatcctttatctcctataatccttccttcgctctctccaaatttcgactctttcgatcagatccgcgacacccaccccaccaaaaccttgcgcaacccatccatgacgcttggctcaggaggatccagtgtcgttgttcctaggaacttcagattgctggaggagcttgaacgtggtgaaaaaggaattggagatggcacagttagctatggaatggatgatggtgatg

SEQ ID NO: 169260 - DNA, 256 bp, Glycine max
cgacgggcaatacgacgcgtacgcaggggacatatggagctttggggttagcatactggagttctacatgggaaggttccccttcgcggttgggaggcagggcgattgggccagtctcatgtgcgccatttgtatgtctcagcctcccgaggctcctccttctggttcccctcacttcaaggacttcatcttgcgctgtcttcagcgcgatccctctcgccgctggtctgcttccaggttgctcgaacaccccttc

SEQ ID NO: 169261 - DNA, 260 bp, Glycine max
gttttctggcacacaagaaaagtgtgccacatgtggcaaaactgcttatccattagagaaggtaacagtggaagggcaggcctatcacaaatcatgtttcaagtgttcacatggtggatgtcccataacgccatcgaattatgcagcccttgagggcattttgtattgcaagcaccacttctcccagctttttaaggagaaagggagctataatcatcttactaagtctgcatcagtcaaacgggcagccgcagccacag

SEQ ID NO: 169262 - DNA, 259 bp, Glycine max
gcttcatcttgagatctgtttgaaggacttgcaggacgatttcatgggtggagctgagattatcaaatctgaccctgttgtgtcattcagggagactgttttggagagatcatgtcgcaccgtgatgagcaaatcacccaacaagcacaaccgtctgtacatggaagcaagaccattggaggaaggtcttgctgaggccattgatgatggcaagattggaccaagggatgaccccaaggttcgttccaagatcttgtct

SEQ ID NO: 169263 - DNA, 266 bp, Glycine max
cctcactctctcactctctcaggagtatataatctgagcgatgtcagatctcgaggctcccttgcgccctaagaggaagaaggtttgggtggactattttgttcagtttcgatggatccttgttatttttgtcgtccttcccatctccttcaccatttatttccttacataccttggggatgtaagatccgagtggaagtcctataagacgcgtcagaaggaacatgatgagaatgtgaagaaggttatcaaacgtctcaaacaga

SEQ ID NO: 169264 - DNA, 266 bp, Glycine max
cgacaagaagcgccacgtcataaccacgcaaacggagcacaagtgcgtcctcgattcctgccgccacctccagcaggagggtttcgatgtcacttatcttcccgttgagtccgacgggttgattgatttggatgagcttcgggcttcgattaggcctgacaccgggctcgtttcggttatggcggtgaacaatgaaattggagtggttcagcccatggaggaaattgggaggatttgcaaggagtttaatgtgcctttccacactg

SEQ ID NO: 169265 - DNA, 260 bp, Glycine max
tcgcaacacaacaaaaaaagacaacccagagagcgcgtcttaataaacgctcttctctgaaaacccccatttcttttcttctttcttcttctctttcgcttcttcgatcttcgatcttcgtcgctgaaaatgagagagtgcatttcaatccacatcggccaggccgggattcaggttggaaacgcctgctgggagctttactgcctcgaacacggcattcagcctgatgggcagatgccaagtgacaagaccgttggtgg

SEQ ID NO: 169266 - DNA, 301 bp, Glycine max
taccaatcatctttagttcttcagtaatttattgtgggattctattctaagattttgagaatgtctagctgtgggtgtggaagcagctgcaactgtggcagcaactgcggttgcaacaagtactcttttgacttgagttacgttgagaagacaaccacagagactctagttttgggtgttgggcctgtgaaggccaattggagggtgctgaaatgggtgttgcatctgagaacggtggctgcaactgtggatcaagctgcacctgtgacccatgcaactgcaagtaaggtcaagatgtata

SEQ ID NO: 169267 - DNA, 290 bp, Glycine max
actcgagccgaatcggctcgagtgtaactcgttcttcttcttttgactcttctgtgtttgtgcttgttttttctctcacctcgaaaatgtcttgctgcggtggtaactgtggttgcggaagctcctgcaagtgcggcaacggctgcggaggctgcaagatgtacccagacttgagctacactgagtcaaccaccaccgagaccttggtcatgggagtggcacctgttaaggctcaatttgagggtgctgaaatgggtgtgcccgctgagaacgatggctgcaaatccccc

SEQ ID NO: 169268 - DNA, 298 bp, Glycine max
gacacatttggtgccttgtagagcgtgttttggcaggaaggtggtatggcgaaggacgttgaggttgctgagcgtggctccttctctgggaaggactaccaggaccctccaccagcaccactcattgatgctgaggagctcacaaagtggtccttttacagggctctcattgctgaattcattgccactttgctcttcctctacattactgtgctcacagtcatagggtacaagcaccagactgacctcaaggaaaatggtgaaatctgtggtggggttggcattcttggcattgcat

SEQ ID NO: 169269 - DNA, 300 bp, Glycine max
tgcgcatccaatcccttcactgttgttttcccccaattcccagtcccacatagcttagaacttacgatctacaattttacaaatacaaatacccttctccctcgctcaaaacacaaacaagctcgcttcttgcttctctcatcaacaacatgcagatcttcgtcaagactttgaccggcaagaccatcaccctcgatgtcgagagcagcgacaccatcgacaacgtcaaggccaagatccaggacaaggaaggtatccctcctgaccagcagaggttgatttttgctggtaagcagctgg

SEQ ID NO: 169270 - DNA, 293 bp, Glycine max
caggaattgcgtttctgcacgacaaggttaagccacaagttgtgcatcgagatatacgtgctagcaatgttctgctggatgaggagtttggagcacagcttatgggtgttggtctgtccaagtttgtgccatatgaggtaatgcacgagaggactgtgatggcaggtggaacttatggatatcttgccccggagtttgtgtacagaaatgagctcacaacaaagagtgatgtgtatagttttggtgtgctactacttgaaattgtaagtggacgtagacctgcacaggcagtg

SEQ ID NO: 169271 - DNA, 249 bp, Glycine max
ggattatgggacctaattatgtccctggggagaaaaaggatttgtatgttaaaagtgtgcaacgaactgtcatttggatgggaaagaggcaagaaactgtagaggatgtcccctgtggtaatacagtggctatggttggtcttgaccagttcatcacaaagaatgcaacattgacaaatgagaaggaagtcgatgcccaccctatccgagctatgaagttttctgtctcacctgttgttcgtgttgctg

SEQ ID NO: 169272 - DNA, 197 bp, Glycine max
atcttttccaaaacaccaaaaatgcctgcgacaacagagaacaacaaccaaggctcattcctgggtcgaataagcatccgcagaaaccaagtgatgtccatggacggaagccacgaccaagagatggaagacctggagcttttccagaagcacatcggagaccgcttctcggagctcttatcctccacctccgaaga

SEQ ID NO: 169273 - DNA, 295 bp, Glycine max
gaaaagaaaaacttcacttcacttgcatgccaaatgagaacaacctcttcttagaataatttcctcggtgtttaagccttgtcgatttccgaacaccaatccgagttaattaaacaatgagagtttcgacagaaaagttagagacagagccggagagcaaaaagataaaacgcattcgtggcggcggcggcggggactcgagcaataagcaccctttgtaccgcggcgtgcggatgcggaactgggggaaatgggtgtcggaaatccgcgagccgcggaagaagtcgcggatatg

SEQ ID NO: 169274 - DNA, 284 bp, Glycine max
atcattttatcgcgtccttgagagatgaagtgcggatattgaaagacttgcctcccagactcaagatgaaagtggaacgcggctttctttacaccatgccacctattagttggtctgatatatcttactataaggaccagattctacccttgatacaaaagtacaaagttgttcacttaaatagaactgatgctcggttggccaataatggtcaaccgatagagattcagaagctgcgttgccgggtcaattttagtggtctgagatttacttcccagatagag

SEQ ID NO: 169275 - DNA, 283 bp, Glycine max
gtttcctctctacatggcagtgcccagaaaacaaacttagaatagagagaacatcaagcaagaacagtgttagcataactctccaagaagttgctgatatatctatcaatgttgtgcctgtgactaaggaagatagtagaatccataattaccaaattcctgatgatgattgctttgctcacttggaggtgcagttcaaattccatggtttgtctaacaaagttgaaggggttcttggaaagacttatcagcgagattttcagaaccctgcaaatttgggagt

SEQ ID NO: 169276 - DNA, 278 bp, Glycine max
ctcggatgttgttgttgtcgtcgtcgtgttcttaggttttgttctgagacgcagtttttcattcttctaatggcccagtccttcggtcagaccgagatcaactgggacaagctagataaaactagattctatgtcgtaggagctggactctttacaggtgtttcggtggcactttatcccgtttctgttgtgaaaactaggctgcaggttgccacaaaggatgctgtagagagaaatgtgttttctgttgcaaaaggactacttaaaacagacggcat

SEQ ID NO: 169277 - DNA, 293 bp, Glycine max
gaaatgcaatgggaccactgaggaggtaaagaagattgttactactttgaatgaggctaaagtccctggagaagatgtcgtagaagttgttgtgagccctccttttgtgttccttcctgttgtaaaaagtttgctgcgccctgatttccatgtttcggcacaaaactgttgggttcgcaaaggtggtgcttataccggtgaggttagtgctgaaatgcttgttaatttgggaattccttgggttattattggtcactctgaacggaggcagcttttaaatgaatcaaatgagt

SEQ ID NO: 169278 - DNA, 291 bp, Glycine max
ccgagctttagacagcgtcgttgaggccatgaaggaggatgagaagagtgttttatctgttcttggtcggagcaatattgctgctttggttcaattgcttacagctacctctcccaggataagggagaaaacagttactgttataagctcgcttgcagaatccggtagctgcgaaaattggctagtttctgaaggagttctgccacctcttataaggcttgttgaatctggcagcacggtggggaaggaaaaggccacaatatcccttcagaggttgtcgatgtcagccga

SEQ ID NO: 169279 - DNA, 287 bp, Glycine max
ctaatgttcagcaagggcctcaggttgacaaaagcaatttgaaaaaattctttcctacatcgagcatggaaaaagagaaggggccacccttttgacagggggcaaaagagtgggtaacaagggttactacattgagccaacaattttctctaatgttaaggaggacatgcttatagcacaagatgaaatattcggtcccgtgatagcactgatgaagtttaagacaattgaggaagcaattagaagtgctaccaacagcagatatggcctagtagcaggtgttgtga

SEQ ID NO: 169280 - DNA, 287 bp, Glycine max
ggaagacactggttttctatcagggaagagctcctaggggatgcaagaccgattgggtcatgaatgagtaccgtttacctgacaattgcaaactacctaaggaaatcgtgttatgcaagatatatcgaaaggcaacttcgttgaaagtgctggagcaaagggcagcactagaggaagagagagagatgaagcaaatggttggttcccctgcttctccttcctccacggacaccatgtcctttagcagcccacaggaagagcaaaacatgcccttgccattgttgcaa

SEQ ID NO: 169281 - DNA, 284 bp, Glycine max
  unsure (1)..(284): unsure at all n locations
gaacctggttactatgatcccggagagtctnggataagattggagaatgtgcttattgtcaaagagcgtggtacaaatcccaattttggtgatagaggttacttatcttttgaacacattacctgggcaccatatcagaccaagttgattgacctgaaccttctatgtcctgaggagatagattggctgaactcgtatcactccacatgcagagatattctagcgccatatttgaatgaagttgaaaatgcatggctgaaaaaagccactgaacccgtaggtgc

SEQ ID NO: 169282 - DNA, 281 bp, Glycine max
agtctatcatagtcagaattgagaacaatcgttggtgtggaacgtgacaatggtggcgacgaacgtgaaggcagaaaccatgtctctgatggacaagcgcaggcacttggaggctgagatgaactccatcatcgcccgcctctcgcagccaggcgctcctggcctctccggaaatctcgtcgattccgaggattctcgccattccgatatcgacgtccccgttgttcgagccgaacgacgtcgcctggcagagctgcgcagcgaccacaacgaagtaactg

SEQ ID NO: 169283 - DNA, 288 bp, Glycine max
accgaataaggattttctggttttgttgttggtgggtttcagcgttccgcttcaacttcaaattctcagtgaaaccaattcagttcagtccaaatcccaaatccgaagtgagatttgcgatggagaggcttcagcgaatgttcgcaggtgcaggtggagctctagggcaccctcccccagattccccaactctcgattcctccgagcaggtctacatctcctcactcgctctcctcaagatgctgaagcacggaagggctggggttcgcatggaagtgatgggtttga

SEQ ID NO: 169284 - DNA, 284 bp, Glycine max
  unsure (1)..(284): unsure at all n locations
gcttccctgcattgccaagaagattccacattggtttctgccacattcttcaacacagctacgaatacacncaatctggtcatcctccattaagatggctgcagaagactacacttttgggccttacaagatacaccacactgaagtgttctactccaccaatctctcttacgccatggttaacctgcgtcctcttcttcctggtcatgtgctcatctgtccaaagcgtgaagttaagcgtttcggtgatctcactgctgatgagacttctgatttatggctca

SEQ ID NO: 169285 - DNA, 278 bp, Glycine max
ccgattccttcgtgcgtgcgattcttctgatattccaaggcgacgcaccgacaccggacccatctccggcgacatctcaccgatctccggcgaatccccggtccccactttcttccctcgaaatgaatcccgagtatgattatctgttcaagctccttcttattggagactctggtgttggtaaatcatgccttcttctgagatttgctgatgattcgtacatcgagagctacataagcaccattggagttgattttaaaatacgtactgttgagcag

SEQ ID NO: 169286 - DNA, 276 bp, Glycine max
gaagaagaagatggctttaggtgttcctgctcttccgttgacatacgtggctcacgttctggcagttgttgccagcgtcttggtcgtggtctgggtcgtcaatttcaggggtggcttggcttgggattctgataacaagtccctcatcttcaacattcatccagttcttattgttattggcttactagttcatgggggtgaagctattataagttacaaagcttttcccctaaagaaggaagtgaagaaattgataccccttgttttccatgccac

SEQ ID NO: 169287 - DNA, 270 bp, Glycine max
gttccatacatagcaagaaaaacacactcacacacagtgcttgtttagactagtgatcttccatggctgtgaaggatagaatcctggtcttgggacccacaggagccattggaaggcacatagtttgggcaagtttaaaggcagggaatcccacttttatattggttagggacacccctgcctctgttaacaagccaaggcttgtcactgctgctaatcctgagaccagggaagaactcattcagagcttccaaaattctggagttactc

SEQ ID NO: 169288 - DNA, 139 bp, Glycine max
ctcggctcttgcatcgatgaagaacgtagcgaaatgcgatacttggtgtgaattgcagaatcccgtgaaccatcgagtctttgaacgcaagttgcgcccgaagccattaggccgagggcacgcctgcctgggtgtcaca

SEQ ID NO: 169289 - DNA, 142 bp, Glycine max
ctcagtagtgcgattttcgattctcttctctgcaactatgcctaaccctaaggtcttcttcgacatgaccatcgcgcggtcaacctgccggccgcatcgtgatggagctctatgccgacgtgactcccagcaccgccgagaa

SEQ ID NO: 169290 - DNA, 242 bp, Glycine max
cggctcgaggacttttggcagcaagataaatggagtgggagcttccctgtaaagtggtacatcataaaagatgtgtcaaatgcaaattttaggcacattatactagagaacaatgagaacaaacctgttactaatagcagagacacacaagagataatgtatagtaaaggtttggaaatgcttaaaatattcaaaaaccatccgttgaagacatctttgcttgatgactttatatattatga

SEQ ID NO: 169291 - DNA, 285 bp, Glycine max
gctccatagctgcagcattagggtttttcatctgcttcaatggggaagggaacagggagttttggtaagagaaggaacaagactcacactctctgtgtgaggtgtggccgccgcagcttccatctccagaagagtcgttgcgccgcttgtgctttccccgccgcacgcactaggaaatataactggagcgtcaaggcaatccgcagaaagaccaccggaactggcaggatgaggtacttgacgtaacgtgcctcgccgattcaagagtggcttcagagaaggtac

SEQ ID NO: 169292 - DNA, 280 bp, Glycine max
atcaaatcttctttctttttcttccgcagtcccaaccttcctggattctcactcacacatcattgcttggggctctggtgaagatggtcagctaggaatcggaagcaacgaagagaaagaatgggtctgcctcgtcaaatccctccagccccaccgtattcgctccgtcgtcgccggcagcagaaactccctcgccatcgctgacgacggcaaattgttcacttggggttggaaccaaagggccacacttgggcaccctgctgagaccaagtctgagaac

SEQ ID NO: 169293 - DNA, 275 bp, Glycine max
ttcaacaacccttcttttgatctgtgcaagtgatcttgaaaggagggaacaacaatggtgaagtctataaactttctcctacttctgtctctactagcctttgctcccttatgtcactgtaaaaagcaaataggaggttacctctaccctcaattctacgacggttcatgccccagagctcaagagattgtccaatccatcgttgccaaggcagtggcaaaagaaccccgcatggctgcttcgttgctcagactacatttccatgattgttttgt

SEQ ID NO: 169294 - DNA, 259 bp, Glycine max
tgatttcttgcttctatatattacttgcttcttttcttgatcatgtcccttgctggtaaaatcagctctgaaattggtgttcaggcaaccgctgcaaagtggttcaacctcttcacaacacaacttcatcacgttcaaaatcttactgatagaattcatggaaccgagctgcatcatggtgaagactggcatcacaatgagtcggtcaagcactggacttataccatagatggcaaggttacaacttgcaaggagagta

SEQ ID NO: 169295 - DNA, 234 bp, Glycine max; identical to SEQ ID NO: 137179

SEQ ID NO: 169296 - DNA, 152 bp, Glycine max
ctggactctaccgcgttgtgcatggtattgatgtctttgatccaaaattcaacattgtctcccctggagctgatcaaaccatttacttcccccacactgaaaccagccgtaggttgacatccttccaccctgaaatcgaagaactcctttac

SEQ ID NO: 169297 - DNA, 289 bp, Glycine max
ctatggacttgccattcctaaatgcctatcttgattcgttaggtttgccaaattttaggaagggatgcaactttgccgcagcagctgcaactatacttccagccactgcatcatccctctgccccttctcctttggggttcaggtgtctcagttcctccgattcaaagctcgggcccttgaattgatcgctaaaggcaggaaatttgataagtacgtccctgatgaaaatgtttttgagaagggattgtacatgtttgatattggccagaatgatcttgctggagcatt

SEQ ID NO: 169298 - DNA, 159 bp, Glycine max
cctcgagccgaatcggctcgaggtgcccaaccgtgattgcccatcacatgctcagttcctagcatacatatgttcacgctgatgatggtactccgttactcatcaagaacgcaatctgtgtctttgaacaatatggcagcatcatgtggcgtcacaccg

SEQ ID NO: 169299 - DNA, 223 bp, Glycine max
tagtaattaacctcactcaaactcgggatcacagaaaccaacaacagttcttgcactgaggtttcacgatgttgctggaacttgcacttggtttgtttgtgttagctttgtttctgcacttgcgtcccacaccaagtgcaaaaccaaaagcacttcgccacctcccaaaccctccaagcccaaagcctcgtcttcccttaatgggcaaccttaacctctaaaa

SEQ ID NO: 169300 - DNA, 247 bp, Glycine max
gttttccgcacaactctttcacctcttgttttccccaatccttttcgcctttgtctgcgaatggcgtcgttcgatcaggcacctcccggcgatgtcaaatccggtgacaaaatcttcaggaccaagtgcgctcagtgccacaccgtcgaaaaaggtgccggtcacaagcaaggacccaatctgaatggtttgtttggaaggcaatctggcacaactcccggatattcctactcttcagctaacaaga

SEQ ID NO: 169301 - DNA, 187 bp, Glycine max
  unsure (1)..(187): unsure at all n locations
gtgatctgcagctacgatgggtaagggaacggggcgtttcggtaagaggaggaacaagacccacaccctctgtgtgaggtgtggccgccgcagcttccacctccagaagagtcgttgctctgcgtgcgcttaccccgctgcgcgcaccaggaaatataactggagcgtgaaggccattnagagaaac

SEQ ID NO: 169302 - DNA, 154 bp, Glycine max
caacaaccatggggtgttggtacatggttaaaggaaattaaagacactactaaagaaggatatagttttgaagagctatgcatcaagaaagaagccattgagggagaagagaagttttgtgcaaaatccttgggaacagtaattggttttgcca

SEQ ID NO: 169303 - DNA, 207 bp, Glycine max
ctctcacccagatcttgtagcaatggcgagcgctcccactccacgcgaagagttcgtgtacatggcgaactggcggacaggccgagcgctacgaggagatggtggagttcatggagaaggtctccgcctccgccgagagcgaggagctgaccgtggaggagcgtaacctcctctccgtcgcctacaagaacgtgatcggcgctcgcc

SEQ ID NO: 169304 - DNA, 215 bp, Glycine max
aatgggcctaggacgtaaagcaaaccaggtgtacatcattgactatggccttgcaaaaaaatatagggatcttcagactcataggcacataccatacagggaaaacaagaaccttacaggcacagcccggtatgcaagtgtcaacacccatcttggaattgaacaaagcagaagggatgatctggaatctcttggttatgtgctcatgtacttct

SEQ ID NO: 169305 - DNA, 245 bp, Glycine max
cacaaactcgctgcttattttgatttgaactttgaagttttgttattttgtgcaatggcagccaagagcaaaatcctagtccttggaggaacaggatacattggaaaattcatagttaaggcaagcgcagaagcaggacaccccacttttgtcttagttagagagagcaccctttctcatcctgaaaaatctaaacttattgagagcttcaagacctccggagttactcttctttatggtgatct

SEQ ID NO: 169306 - DNA, 281 bp, Glycine max
ttatgaagtcatacaaattgtcagagctgagtgatgctgagcttcgcagcctcatcgctcgccctcgcattgatttctcttcggttttcgctctggtcaaccctatcgttgaccacgttcgcgaaacacgcgatgctgctgtcaaagaatacacattgagattcgacaaagctgaattggataacatcgttgaacttgtctccgaccttcctgatccacaactcgatgcgcatgttaaggaagcttttgatgtcgcctacaacaatatatatgcctttcat

SEQ ID NO: 169307 - DNA, 277 bp, Glycine max
ctcgagccgctcgtagcatttcggcatccaaactaactctctcatcttctacagcattcttctgcaattcaaatcaaattttcaaaccatggcttcctccaccaacgctcttcctcccaccggcaacggcctcatcgtgagcttcggcgagatgctcatcgatttcgtccccaccgtctccggcgtgtcccttgcggaggctccgggcttcctcaaggcccccggcggcgcccccgccaacgtcgccatcgccgtcgcgaggctcggcggaaaggcg

SEQ ID NO: 169308 - DNA, 121 bp, Glycine max
gtgatctgcagctacgatgggtaagggaacggggagtttcggtaagaggaggaacaagacccacaccctctgtgtgaggtgtggccgccgcagcttccacctccagaagagtcgttgctct

SEQ ID NO: 169309 - DNA, 147 bp, Glycine max
cagagttggaaaaagcttgccctggcgtagtttcttgcgctgatattcttacccttgcagctgaagtatcttctgttctggctcatggtccttatttgacatttcccttgggaaggagggatagtttaacagcaaatagaacccttg

SEQ ID NO: 169310 - DNA, 148 bp, Glycine max
  unsure (1)..(148): unsure at all n locations
agacaaatgaagtctttccatctcacagtgacagctttgtgctgtgtagtcgttgtgcttggacgtgttccactctccctagatgcacaactagatccctccttttacagagacacttgtcncagggttcactccattgttcgtgaag

SEQ ID NO: 169311 - DNA, 231 bp, Glycine max
ggaaagtctgaataccagaatgtcatggtcttccagtcatcaacatatgccaaggctcttgttttagatggagtaattcagctaacagaaagggatgaatgtgcctaccaagaaatgatcactcatcttcctctctgctctattccaaaccccaaaaaggttttggttatcggtggaggtgatggaggggtcatacgagaagtagcacaccattcttcagttgaaaagata

SEQ ID NO: 169312 - DNA, 140 bp, Glycine max
gtttgcataataagaggaatgattgtgttgttcttatccttgttgaataatatatatatctccccttctctctgggacaatattgtaattctgacagggtgaagacaacttaatgggagtgtgggacggttctgattaac

SEQ ID NO: 169313 - DNA, 145 bp, Glycine max
cgttgctaaacattgccttgcagatgtggaacaaattttgatgggccagggtgccactaataatctgaagcaggtatgttcaattcgttcttcaaatctcactgaggcatcttgcccagtaaaaaatgtgaatgattttcatgac

SEQ ID NO: 169314 - DNA, 143 bp, Glycine max
aagaaggcgtcttcataaacgcctttcttctccgtgtccgtttcctcgttagaattcgctttctgatctgcgaaaatgagagagtgcatctcgatccacattggtcaggctggtatccaggtcggaaatgcttgctgggagct

SEQ ID NO: 169315 - DNA, 222 bp, Glycine max
ctgaaacatggagccaatgctggacttgtaaatgcattgaaacttcttcagccgatcaaagacaaatattctggtgtgacatatgcagacttatttcagttggctggtgctacagctgtggaggaagctggaggcccaaaaatccctatgaaatatggaagagtggatgtatctggacctgaacaatgccctgaagaagggagacttccagatgctggtccc

SEQ ID NO: 169316 - DNA, 249 bp, Glycine max
cacccttttccaaacccgagaaatctgattcgttcattgccattgccagggttggaaagacctcgttgatgaatcaatacgtgcacaagaagtttagtcagcaatataaggctaccattggggctgattctgtcaccaaagagcttcagattgatgacagacttgtcactctacaaatatgggacactgctgggcaagagagattccagagtctcggggttgcattttacagaggtgccgattgctgtg

SEQ ID NO: 169317 - DNA, 215 bp, Glycine max
cacacccccacatggatgcatacagaaagtgtgaaaatgaaagtcatggagtgggaagatgcatctgcagcttgcagatccacaaagaagtataaatgtttgattattatttagagggctctatctagttaaaattaaatagttattgtgcttttgttttattagacagttgtaaggcactgtgttctacatgtgtttgcagttgtctgcatgca

SEQ ID NO: 169318 - DNA, 240 bp, Glycine max
gcgataagcaatagaattcagagagagagagaaagagagtctcttgctctgtatctttgatttgatcattccaatcttcaatttttctatatatccatcaatccgctgagtgcaaagttctaatctttcgcctattgggttctactcctttctctcttcgtttccgatcgatccaattttcttcccatggctacgatcggacacaacaatctcaatgccaaattggttcttctcggggac

SEQ ID NO: 169319 - DNA, 111 bp, Glycine max
cttgctgaccctgcacaagccaaggctcctgttcaggctcattttggagagctggacaattttgttggcttttcagatgttacagcggccaaggcattggaagagaagctg

SEQ ID NO: 169320 - DNA, 144 bp, Glycine max
gatcttgccaaggttcagagggctgtgtgcatgatctccaattccaccagtgttgttgaggtcttctctcgcatcgaccacaaatttgacctcatgtatgccaagagggcttttgttcattggtatgttggtgagggtatggaa

SEQ ID NO: 169321 - DNA, 291 bp, Glycine max
aaaaataagacattgtttggtttggttacttgctcgaatttcctcgaatcgcttaatttggtatttgattagttaaaccgcaacgcggaatctcttttctcgaactggctaactctcaggcaagtggttcggacgctgattccagcaacaagcggctggtgctcgcactgtatgacgccctaaactccggcgactccgacgccgtcgtcaagatcgtcgccgccgacctcgagtggtggttccatggtccgccctcacaccagtttttgatgcgcatgctcaccggcgact

SEQ ID NO: 169322 - DNA, 284 bp, Glycine max
caggggcaatgaccaaaatggactggtttgagctggattttcccaaggctgaagtcgttgtccttaaatttcacatccagtgattactttttacctcccttcatcaataaaatgccaaatttgagggcattgataataataaactacagcacctcatatgcccgccttcaaaatgtttcagtttttaggaatttgaccaacttgagaagtctctggcttgaaaaggtttccatccctcagttatcaggcagtgtcttgcaaaacttgggcaaattatttgtagt

SEQ ID NO: 169323 - DNA, 290 bp, Glycine max
cggctcgagcagctattgaatttcacttcacttcacttgcatgccaaatgaaaacaacctcttcccagaatcctgtcggtatttaactccctcgatttcacaacaccaataacaatgagagtttcaacagagacagagccggagactaaaaagataaaacgcattcgccgcggcggggactcgagcaagcaccctttgtaccgcggcgtgcggatgcggaactgggggaagtgggtgtcggaaatccgcgagccgaggaagaaatcgcggatatggctaggcacattccc

SEQ ID NO: 169324 - DNA, 281 bp, Glycine max
cggtgatgcagatgctgagggacagaaattttctggttggtgacttcgagatcaacattgtcaaagcacgagtccaagtccaagtacggcgaacacatgaagcgcgaggacctcgtcatcaacaaatccaagaaggacaactccggcgaccagatctacgttttcttccccgacgaacccaaggtcggcgtcaagaccatgaagacctacaccaaccgcatgaactccgaaaacgtctacagagccatcctcgtcacccagaccaacctacacccccttcg

SEQ ID NO: 169325 - DNA, 280 bp, Glycine max
caaaggcccctttgagaagttaattcgagggtcaaagttaagaacattggatggtcgtgaatacgtaagggcaggtatcagagaactgtgtggcacatatgcaatctgttgggacttacagtgatgaggaggaaaaagctattgaggaatttagaaatgctttcaaggatcaaaatttcccaccaggctccactgttttctacaaacaatcacccactggaacattggggcttagtttctcgaaagatgagacaataccagaacatgagcatgcagtgat

SEQ ID NO: 169326 - DNA, 285 bp, Glycine max
taaacataatggtagtagcacaactatttctccattagctggtaagctgtttgttcgttattggggctggtggtgctgggaaggcacttgcttatggtgcaaaagcaaaaggagctagggttgtgattgcaaaccgtacctatgaccatgccagaaaacttgcttatgcaattggaggagatgctttagcccttgctgatttagataattaccatccggaggatggtatgattcttgcaaacacaacatcaattggactgcaacctaaagttgatgagacgcctg

SEQ ID NO: 169327 - DNA, 294 bp, Glycine max
caactcatctgcttcccctagcaaccttcttcttacttctctccgcttcttatctccaaatttgctggggcggaagcacaaccgttgactagtctcaaacttaactctcatattcttcaggagtctactgctaaagagattaatgaaaatcccgaggcaggatgggaggctgctataaatcctcgtttctccaattatacagttgaacaatttaagcgccttcttggagtcaaaccaatgcctaagaaggaacttagaagtacacctgctatatctcacccaaagacgttgaaa

SEQ ID NO: 169328 - DNA, 287 bp, Glycine max
cgcggcacttcattgaacactaagaggctggatgatgatactgagagtctagctcatgagaaggtggcaactgaacttaagaaggctataatgcaagctaggatggacaaaaagcttactcagtctcagcttgctcaactgatcaatgagaagcctcaagtgatccaggagtatgagtcagggaaggccattccaaaccagcagataattagcaagttggaaagagctcttggagctaaactgcgtggcaaggactaagttgtaactaatgtcatggttgtgcatgt

SEQ ID NO: 169329 - DNA, 278 bp, Glycine max
caggcgttctatatattattgcattgacaatgaggcctgctcttgctttgcttcctcttctatttgcctcctcgttagctgccactacagaatcaagaaaagatacaggggaatattggaaaatgatcatgaaagatcaggaaatgccagaaggacttcaaggtcttgtttcatttcaatctgaaaataaccctaagactcaagagcagcttggtaaaggttccaaaaaccactgtgaagagtctctagttacaaatacacaagttaatagtgacttc

SEQ ID NO: 169330 - DNA, 275 bp, Glycine max
cttgaattcacatttcaacaaccatagccatggctttctccttctccaaagcacttgtccttgcctgctccttctgcttatttgcgtctttggcttttggacgcgatttctccattgtgggctattcatcggaggacttaaagtccatggataagctcattgaactctttgaatcatggatgtcaaaacatggcaagatttaccaaagcattgaggagaagcttcttaggttcgagattttcaaggataacctaaagcacattgatgagagacac

SEQ ID NO: 169331 - DNA, 289 bp, Glycine max
tcggctcgacatattcattctctttgcgcattcctactctcctttcaagatgcagatctcgtcaagaccctcaccggaaagaccatcacccttgaggtggaaagctctgacaccatcgacaacgtcaaggccaagatccaggacaaggaaggaattcccccggatcagcaacgtctcatcttcgccggaaagcagctcgaggacggccgtaccctcgccgactacaacatccagaaggagtcaacccttcaccttgtccttcgtctccgtggtggcatgcagatcttcg

SEQ ID NO: 169332 - DNA, 282 bp, Glycine max
gttctcttctacatcttccagtttatccgcgtcgttttgctctttactgtcatcgttttgataagggccaggatggtcttttctcaaaccgtttttgcaggacagggagaagaaggtgttgatgattgtcatcccgcttcaggttctcgccaatttggcttccgttgtgatcggggaaacaggtcctttcatctaagactgggttacttggaatcaggttttcttgcttgtggatattatctgctgctgtgccattattttccctattgtgtggtccataag

SEQ ID NO: 169333 - DNA, 274 bp, Glycine max
gttcgattttgtagtaagtgaggtgccaatatggtgaagatagctcttggtactttggctgacccttttaagggtgcctctcttaaggcttatttcgcagagttccacgcaactctgatttccgtgttcgctggtgttggatcagccatcgcttacaacgagcttacaaaagatgcagccttggatccaacggggctggtggcagtagctgtggcacatgcatttgcactgtttgtaggtgtctccgtcgccgccaacatctcaggtggccatt

SEQ ID NO: 169334 - DNA, 277 bp, Glycine max
gcaagaccagcgagttctgcgcccccttaacctccttcgactggcacgatatcgaccccaaccggatcgcgacctccagcatcgacaccacctgcaccatctgggacatcgaacgcaccctcgtcgaaacccaactcatcgcgcacgacaaagaggtctacgacatcgcatggggagaggtcagagtcttcgcctccgtctccgccgacggctccgttagaatcttcgacctacgcgacaaggagcactccaccatcatctacgagagcccccaccc

SEQ ID NO: 169335 - DNA, 283 bp, Glycine max
catgtggggattctcgctatcgacatctacttccctcccacctgtattcagcaggaattgctggaaggtcatgatgggtgccattaaagggaaatatactattggacttggtcaagattgcatggcgttttgtacagaagtagaagatgtcatctcgatgagtttgacagtagtttcttcccttcttgaaaagtatgcgattgatcctaaacaaattggtcgtctggaagtaggcagtgagactgtgattgacaaaagcaaatccatcaaaactttcatcatg

SEQ ID NO: 169336 - DNA, 265 bp, Glycine max
ttctcagtctctgtgtttgcggctgaggattccgaacgagtgaccttcttcgtttctcgccaagtttaaagtaatcatgggtaaggaaaaggttcacatcaacattgtcgtcattggacatgtcgactctgggaagtcaactaccactggtcacttgatctacaagcttggaggtattgacaagcgtgtgattgagaggttcgagaaggaggctgccgagatgaacaagaggtcattcaagtatgcctgggtgctcgacaagctc

SEQ ID NO: 169337 - DNA, 266 bp, Glycine max
gtcttcataaacgcctttcttctccgtttccgtttcctcgttcgaattcgcttcttgatctgcgaaaatgagagagtgcatctcgatccacattggtcaggctgctatccaggtcggaaatgcttgctgggagctctactgcctcgagcacggcatcgggcccgatgggcaaatgccaagtgacaagacagttggcggtggtgatgatgctttcaatactttcttcagcgagactggtgctggaaagcacgtgccacgtgcagtgt

SEQ ID NO: 169338 - DNA, 273 bp, Glycine max
cttggaacccttctacgtgttctccattccctctctcactcctccatctacgtttcttcaatccattcccttctttctctctttctttatcttctcattttcctcattacactctttttattctctcaacttttctcttattaaccatagttcacatattatatcatcacatatcatagtgatatattatatcatatcacaatttgtggcatacttgctgtgcttggttgctctgattcatctcaagccaaaagggttcgcgtccttgagctt

SEQ ID NO: 169339 - DNA, 275 bp, Glycine max
ctctggatcagtacatatctagaatgaaaactgggcagaaggatatcctttacataactggaaaccagcaaagaacaactggaaaactctcccttccttgagcggcttaagaagaaaaattttgaggttattttcttcacggatccagttgatgagtacttgatgcaatacctgatggattatgaagacaagaagttccaaaatgtgtccaaggagggtttgaaacttgggaaagattcaaaagacaaggaactgaaggaatcttttaaggatct

SEQ ID NO: 169340 - DNA, 270 bp, Glycine max
caagactaacaatacactgaccattgttgacagtggtattggcatgaccaaagctgatttgggtgaacaacttgggtacaattgctagatctggtaccaaggaattcatggaagccttggctgctggtgctgatgttagtatgattggacagtttggtgtggggttctactctgcatatcttgttgctgagaaggtcattgttacaaccaaacacaatgatgatgaacagtatgcttgggagtctcaagctggaggttctttcactgtca

SEQ ID NO: 169341 - DNA, 264 bp, Glycine max
tggatcactcaatcctaatattttatattccaattaaaatagtgagagtactagaaggtagtggagttcgcatagggaatcatggaaacagaagtggttgaagatattgtgattgtgggagctggaattgctggccttacaacatccttaggacttcacaagttgggtatcagaagtttggtgttagaatcttcagacactttgagggtcactgggtttgctttgtcaatatgggaaaatgcttggcaggcattggatactgtt

SEQ ID NO: 169342 - DNA, 264 bp, Glycine max
ctcaggcaataccctcttctccatctaccgctatcataatgggtcttcgaaatgctatcagggaaatagtgaggagaacaaggagctggtgtttagtgtgcagaggaccctcaaaacaattactagagttgagttagaggtacttttcgaggctgagaggtccaatgatgaatgttgtgatttgaaagtgaagggttcccctttcaagagatcatgttgcatatataaacatgttgatttggtggcacagagtagcctgatgta

SEQ ID NO: 169343 - DNA, 263 bp, Glycine max
caggggcaatgaccaaaatggactggtttgagctggattttcccaaggctgaagtgttgatcattaatttcacatccagtgattactttttacctcccttcatcaataaaatgccaaatttgagggcattgataataataaactacagcacctcatatgcccgcctccaaaatgtttcagtttttaggaatttgaccaacttgagaagtctctggcttgaaaaggtttccatccctcagttatcaggcagtgtcttgcaaaac

SEQ ID NO: 169344 - DNA, 262 bp, Glycine max
ctttctcccttctccccatttgctcattctcctccccattctgctcagacaccgcacagcgaacaaatccaccattcattttcctttttcgcaacagcgcaatggctcgaagatccctcccgctcctgaagcacctcctctcgcggcggatcccggcccgatccgtgacgtacatgcaccggccgggcgatgggtcgccgcggccggtgacactgatcccgggcgacgggatcgggccgatggtgactggcgcggtggagca

SEQ ID NO: 169345 - DNA, 262 bp, Glycine max
cttggctgttacaatcagtgatgaaaaacttaaggaaatgtttgccgactatggtacaataacttcttgcacggttatgcgagacccgactggaatcagcagaggatcaggatttgttgcatgttcaactcctgaggaagcaactcgagctcttggtgagatgaatggtaaaatgtttgctggaaaacctctgtatgttgcccttgcacagagaaaagaagagagaagagcaaggttacaggcacaattttcacagatgagg

SEQ ID NO: 169346 - DNA, 290 bp, Glycine max
caagaatgtctgcaatggacagctctagcaggaatgctggggatatgcttgatcgtctcaccctcacctataacagaactcgtcaagcatcaatcaccactgaattgatagagattatctctggagcttcagcactggaaggttaattacggagagcaatctgtgtaatatattcaacagtggcgcgatattaagataatatcgttggattcttttgaaatttgttggtgtcatttttttaatcttacttgacttctgtaataagtgttccaaggtcaaacccattgtgg

SEQ ID NO: 169347 - DNA, 288 bp, Glycine max
ccttctttctttttctgtgagcctttctttcaggttcttaacttgatcagtgtgcagtgtccatatcataagggtagttgcaaattgcaatggctaagcatgatgttgagggtggttccttctctgcaaaggactaccatgatcctcctcagcaccgttgattgatgctgaggcactcacacagtggtccttctacagggctttgattgctgagttcattgccacaatgctcttcctttacatcacagtgctcactgtgattggttacaagagccagagtgatgtaaa

SEQ ID NO: 169348 - DNA, 286 bp, Glycine max
tcgccgtctgtcgccgtgaagcgatcggcggcggccaagctgaggctgttggcgaagaaccgagccgacaaccgcgctctgatcggcgagtccagcgcggtggctgctctggttccgctgctccggtgcagcgatccgtggacgcaaaacacgcggtgacggcgttgctgaacctgtctcttctggaagagaacaaggcgcttataacgaatgccggtgcggtgaaggcgctgatttacgtgctgaaaacaggcacagagacttcaaagcagaacgcggcgtgcgc

SEQ ID NO: 169349 - DNA, 286 bp, Glycine max
caaaaagctacatatcaaggacaataggatgggatcaatacccacacgggcgttggggtgattcctgtaatccatcatatggtgcattatctgattatcagttcatgcggccacgtgcacgggacaagaagcttgttgaagaatgggcgttcccttgaaaagcattgaagatatatatgagaggtttagactgtattgtcttggaaagttgagaagcaatccttggtcagaactagatggtcttcagccagagacaaagataataaatgagctgctggaaaagatt

SEQ ID NO: 169350 - DNA, 134 bp, Glycine max
caacgctgttgacagaggaagagaactaagatcagattttaagatgatagcaagagctttgacaaggaaaggaaatgccttggtgaaattggcgaagtgctcaaaggattatgagcctgccattgagacatacc

SEQ ID NO: 169351 - DNA, 285 bp, Glycine max
cggctcgaggcaaaagagcgtcgtagtcgcaaccctaatcagaagaagcgcagttacaagcgagtgacagccaccagccatgggtcgtatgcacagccgcggtaagggtatatcctcttctgctttgccctacaaaaggacacctccagctggctcaagatctcttcgcaagatgtcgaagaaaatatctgcaagtttgcgaagaaaggtttgaccccgtctcagattggtgtcattctcagagattctcacggtattgctcaggtcaatagcgtcactggcagc

SEQ ID NO: 169352 - DNA, 284 bp, Glycine max
cggctcgagctcgagccgattcggctcgagatccctagctctgtcgttccgtcgtcgacgatgaccttacgggtgcgaaccctgacctccgctctctctttcttctctctctcttgtccatcgcttccgccaatgtcttcttcgagagcgtttcgatgacgggtgggaaaatcgatgggttaactcagattggacaacagatgagaacgtggctggggagtggaaccacacctctggtcaatggaatggagacgctaatgacaacggtattcaaaccagtgagg

SEQ ID NO: 169353 - DNA, 284 bp, Glycine max
ctataggctaaggactttaggttgggatttgggaattagggttgttcgcgtggcgaagatgattgaggtggttttgaacgatcgattggggaagaaggtgcgcgtgaagtgcaacaccgatgataccatcggcgacctgaagaacttgtggcggctcagactggcacaagagccgacaagatccgcatccagaagtggtacaccatctacaaggatcacatcactctcaaggattacgagatccatgacggcatgggtctcgaactctactacaactaaacaca

SEQ ID NO: 169354 - DNA, 272 bp, Glycine max
tttttccttcaagtcactaagataatggcaagcatttataacattccatcacacataaaagctcgggtctattatgaatatggaaacatagaagagattctcaaatttgaatctaacatacccataccagacatcaaggaaaccaagtgctcatcaaggttgtggctgcagcgcttaatcctgcagattatatgagggctcttgggtttttcaaggacactgatgcacccttacctattgttccagggtttgatgctgctggtgtggtggtg

SEQ ID NO: 169355 - DNA, 279 bp, Glycine max
attaatcaaacatggctagggttagtgctttgtttcactctttgctcttgatttcttcccttgtattggcttctcaaatccatgtttcctctgggaaactagtccctggactatcatggaattactatttgttgacatgtccaagcttgagaggattataaggaagcatcttgaggatgtcttcgagaaggacagtggagtagctcctggcatacttcgactcttcttccatgactgctttcctaatggatgcgatgcgtctatattgttgaatggaga

SEQ ID NO: 169356 - DNA, 280 bp, Glycine max
acaagacagcatcagatgctgtctttttaggcttcttcgaagcttaaaacgtatgtggttttatcttctcttggaactccacactacgatcccactgcagctgtatgcgcttctaatttctgaactaattatcctgaaggccattagtgacattgtctatgtaaataaattagttctctttcgctcttctggttacggttgcttcaagactgcagcataacttaaaaactcgtatcatacacaaactaatggttgtttaagtgaaaccatcctatttcat

SEQ ID NO: 169357 - DNA, 281 bp, Glycine max
tctggctcccgtggttggtactgtggaaacattccttgggaggccatggaaggagtactcaaggactgtttatatgcagtctttcatggatagtttgatagctccggctggttggcatgaatggactgggaatttttcactgacaccttgtactacgcagagtatgataacacaggtcctggttcaaacactgccaaccgagtcaactggcctggctatcatgttattgatgctactgatgcagctaattttactgtctctaacttcttggttgggaatga

SEQ ID NO: 169358 - DNA, 277 bp, Glycine max
gtttctacttgcttggcttggacaacacatcccctacctttgcatcagccatccagaactctgtcccagccattacatttctcatggcagtcatactcaggatcgaccaagtgcggctgatccgaaaggatgggatatcgaggtggcgggatcgatattctgtgtggctggggcaacggtgattacactatacaagggtccaacaatatatagccccactccacctctacacagtgagagacccatcatagttgactttggaacactctcactggga

SEQ ID NO: 169359 - DNA, 277 bp, Glycine max
cgcattttccctcttctttctctctcacgttttccgcttcagttttctcgggaaaatcatggtgaaaggtccaggcctctactctgacattggcaagagagctcgcgatcttctgttcaaggattatcagaatgaccacagttcaccatcaccacttacacttccaccggagtggaaatcccttcaactggagtcaggaaaggtgagatcatatttggccgatgtcagcactaaggtgaagaacaagaacatcacaactgatgtcaaagtggacact

SEQ ID NO: 169360 - DNA, 276 bp, Glycine max
ctttaccagtcgacaacagatggaaataaatttgtggattgcctccgcgatcagaacattgtgcccggcatcaaagttgataagggtctggtccctctgccagggtcaaacaatgagtcttggtgccaagggctggatggttggcttctaggtctgctgaatactacaagcaaggtgctcgatttgccaagtggaggacagttgttagcattccatgtggtccttctgcattagctgtcccggaagcagcgtgggggcttgcacgttatgctgcta

SEQ ID NO: 169361 - DNA, 270 bp, Glycine max
gtgggttttgcgaagatactgtttcaactctattggctaaattgaaagatggtgatcataagctacagataattgggacatcactgaaggggtgcaattcagtggagaagtatgctaagtgcaagagaatggtttcgagtatggacccttggtttttgacaatgcagagaaattcctggagagcacagatatatgcactgccatatatgccatgcaaatcttcaacagtggctgggcagcaaacctttctttcagattcttatggaaaca

SEQ ID NO: 169362 - DNA, 273 bp, Glycine max
ggagagagaagagcggaagagaaaatgacgcccaggttcaagaagaacaggaagaagagaggtcacgtcagcgccggacacggccgtatcggaaagcaacgcaagcatcccggaggtcgcggtaacgccggtggcatcatcaccaccgtatcctcttcgacaagtaccatcctggtttcttcgggaaggtaggcatgcgctacttccacaaacttcgcaacaacttctacaatccgatcatcaacatcgacaagctgtggtccctcctccccc

SEQ ID NO: 169363 - DNA, 244 bp, Glycine max
ctgaattgcactggtggtgattcttcaacggagccttacttggttacacatcaccaacttcttgctcatgcagctgctgttcgtgtgtacaagaccaagtaccaggcatctcaaaatggtgtgataggcataaccttgtagctaattggtttttgccgctcagagataccaaatctgatcaaaaggctacagacagagcatctgacttcatgtatgggtggtttatggatccattaacatctgg

SEQ ID NO: 169364 - DNA, 269 bp, Glycine max
tctcactctctcaggagtatataatctgagcgatgtcagatctcgaggctcccttgcgccctaagaggaagaaggtttgggtggactattttgttcagtttcgatggatccttgttatttttgtgcgtccttcccatcccttcaccatttatttccttacataccttggggctgtaagatctgagtggaagtcctataagacgcgtcagaaggaacatgatgagaatgtgaagaaggttatcaaacgtctcacacagaggaatccatca

SEQ ID NO: 169365 - DNA, 265 bp, Glycine max
tcattgctaccctgttggtggataacaaaacttcagcaacccctttgcatctgatctaagaatcccaacttcaagtacccatttttcgtcatttcatgatctaggtgatagatcgtgaaaatgacaaggatgaccatgattttggggatactatgcagacagatgcagtgccggtggtgtcggccgatgtaatatttgcttctcttcggtttcctaattaccaaatcggagttaataatcagatcatggagacaaaggatgatcc

SEQ ID NO: 169366 - DNA, 272 bp, Glycine max
tgcagatcaagagtggttcctgttcctccacttagtttctccatagtatccaaaatagttcttcttggggtgataggaagttcatctcaggtactgggttatgcaggcattagctacagttctccagcacttgctcatcaattggcaatctggtacctgctttcaccttcatccttgccgtaatttgcaggatggaaaagttagctgccaaaagtagaagtagtcacgctaaggtgattggcagcataatatcaatagcaggtgcatttgta

SEQ ID NO: 169367 - DNA, 264 bp, Glycine max
cggaacgtggaactgcggaaaccggaatatctcacttctcagatcagatcaatccgacgtcgttgcagttataatggctccattcagcggcgatgagacggcaccgtttttcggcttccttggagccgcagctgcctcgtcttctcctgtatgggagctgcctatggcacagcgaagagtggcgtgggcgtggcttcgatgggtgtgatgagaccggagctggtgatgaagtctattgtccctgttgttatggctggagttttg

SEQ ID NO: 169368 - DNA, 273 bp, Glycine max
cagctgtctgctgttagatctgtacccgcctagccattgatttggaaaagtccaacttcaaggatgagtaagcttcagagtgatgctctaagagaagctatctcaggaatcatggctgattccaaggaaaagacaggaaatttgtggagaccattgaactccaaattgggttgaaaaattatgatccccagaaggacaagcgtttcagtggctctgttaagttgcctcatattcctcgccccaagatgaagatttgtatgcttggagatgccc

SEQ ID NO: 169369 - DNA, 267 bp, Glycine max
caaagatattgggaaaggaaggtgcactttttgttccatcaggcactatggccaaccttatatcagtgcttgtgcattgtgacataaggggaagtgaagttattctgggagacaattcccacatacacatttagagaatggcggcattgcaacccttggaggggtgcatccaagaacagttagaaacaatgaagatggaaccatggacattcatttgattgaggctgccatcagagatccaaagggggagctagtatatccaaccac

SEQ ID NO: 169370 - DNA, 271 bp, Glycine max
cctcgagccgattcggctcgaggagaaagtagcagatcctccatggcactccaccaaggaacgtgccaacttcgtctacgtcgccaagctcgccgaacaagccgaacgctatgaagaaatggtggaagcaatgagaatgtggcgaactaaacgtggacttgacggtagaggagcggaaccttctgtcggttgggtacaagaacgtggtgggtgctcgtagggcttcgtggaggattctttcctcgattgaacagaaagaagaagctaaagg

SEQ ID NO: 169371 - DNA, 269 bp, Glycine max
gctttcctttccagttcatacttcatcctattattactttccctctttgcattccaaatggccactgttgaggttgcacagcaaacaccaacaactgtgacagagaatgaaacaacgactgacgtaaccaagttgaggaaactaccccagaacagccagccaccgaggttactgccccagaaacagtcaacgaagaagcaaaagaggaagcagcagttgcgactaatgaggcaactcacgttacagaggacgggaaggctgagaaaaca

SEQ ID NO: 169372 - DNA, 268 bp, Glycine max
ctttcattttccctcactttctcgctcgccaaacgcccctctctctcctccaatggccgaccagctcaccgacgaccagatcgccgagttcaaggaggccttcagcctcttcgacaaggacggcgatggtttattactactaaggaacttgggactgtgatgcggtcactagggcaaaacccaactgaggcagaactgcaggatatgattaatgaggttgatgctgatggcaatggaaccatcgacttcccagagttcctcaacctga

SEQ ID NO: 169373 - DNA, 299 bp, Glycine max
ttgcgtttccctttcattttccctcactttctcgctcgccaaacgcccctctctctcctccaatggccgaccagctcaccgacgaccagatcgccgagttcaaggaggccttcagcctcttcgacaaggacggcgatggttgtattactaactaaggaacttgggactgtgatgcggtcactagggcaaaacccaactgaggcagaactgcaggatatgattaatgaggttgatgctgatggcaatggaaccatcgacttcccagagttcctcaacctgatggctcgcaagatgaaaga

SEQ ID NO: 169374 - DNA, 293 bp, Glycine max
aagaaaaacgacatgacgctattgaaggttgccacatctaatctgaaccaatgtgcgatggacttcgattgcaccgccaagcaagtcacagagtccatagcgaaggccaaataagccggcgctgccattaggctcggacccgaactcgagattcctggttatggctgcgaagaccacttcttagagctcgacacagttaaccattacatgggagtgcctgaaagatttactgcttggagattggactgatggcattgtgtgtagctttggcatgcccgttatcaaaggctccg

SEQ ID NO: 169375 - DNA, 294 bp, Glycine max
gttcatcaacggagagtccagcctgccgcttcatgagatggaaggaggaagaacttactatctgggaatgtttttgggtggggcttacgaggaggcgctcggtggagtccacaacttgttcggcggccccagcgtggtcagggtgtcgcagagcgatggccctcacagctttgcggtcacgcgtgccgtgccggggccatcctgtggagatgttcttcgagtgatgcagcaccagcccgagctcatgttcgagacactcaagcaccgcgcgcaggagtatgtcagccacgacaa

SEQ ID NO: 169376 - DNA, 285 bp, Glycine max
atgaatttgagaaaaaacttcttgctgatgttattccgccaaccgatattggcgtcacatttgatgatattggagctttagaaaatgtgaaggacaccttgaaggaattggttatgcttcctcttcagaggcctgacttcttttgcaaaggacagctgaccaagccttgcaagggaatattgctttttgggccccctggcacaggaaaaacaatgcttgcaaaggctgtagcaactgaagctggagcaaatctgcataacatttcaatgtccagcattacttcaa

SEQ ID NO: 169377 - DNA, 286 bp, Glycine max
aacaaaaaaaaatctttccttattgttttccgtgtttcctttgtttcatagcttctggggtttggttttcagacccacaatacaaagttcacaagtgtgtgtaaagattgaagaagaaaatgaccgtagagaagaaaatgaatgattccggcgacgagtttcccgtcggaatgcgtgttctcgccgtcgacgatgatcccacttgcttattggttctggaaactctcctccgaagatgtcaatatcatgcaaccacgactaatcaagcaataaaggcgttggcgct

SEQ ID NO: 169378 - DNA, 294 bp, Glycine max
gaaaaggttcgttcagagacaaaaccccaacgatccaaacggtcattgagcatttcatggtgcgagtcactgagttgaatcggataggaatctgagtttgtgatcgtttgacacggtcatgggtgctgcgggctccaagctcgagaaggctctcggagaccaattccccgaaggagaacgttactttggcctcgagaatttcggcaacacttgttactgcaacagcgtcttgcaggcactatacttctgtgttccgtttcgcgaacaattactagagtattatggaaataacaa

SEQ ID NO: 169379 - DNA, 292 bp, Glycine max
cagcaaaggagtgatttggagtttggagcgactgaactaatcattaatttgcactcgctgtttcagcttcatcacccttctttcgcatcatttatatctcttgagaaatggcacaagaaacctttctattcacatctgaatctgtaaacgagggtcaccccgacaagctgtgcgaccagatctctgatgcagtacttgatgcgtgccttgatcaggaccctgacagcaaggttgcctgtgagacatgcaccaagaccaacatggtcatggtcttcggagagatcacaaccaa

SEQ ID NO: 169380 - DNA, 303 bp, Glycine max
  unsure (1)..(303): unsure at all n locations
cggaatcggctcgaatcgagcgattcggctcagagnagaatacacagggacaatcacatagatttgtattcttatccaaatggaggatcttacatagattgcatgacaggaatgagactctatattacagagttcttattgataacatcaaagagtttgctccaataatctatactcctacagttgggttagtgtgtgaaaattattccgggttatttagacgcccgcgtggaatgtattttagtgcgaaagataaaggagagatgatgtcaatgatctataactggccatctgatcaggtag

SEQ ID NO: 169381 - DNA, 289 bp, Glycine max
acgtgttctcctacacgttgccattgttcaggcagctcttccccaaggaattgtcccatttgtccttgctaaggaatataatgtacatcctgatattctcagcacagctgttatttttgggatgctgattgctttgcccataactctagtgtactacatcttgttggggttgtgaatgaaagacatgatggatgatacagaagattcacgtgtggcatccatgcaaagcttggttgaggttgttgagaatgagagaaaaaaaaggtcataaagcaacaatagaaaagaa

SEQ ID NO: 169382 - DNA, 289 bp, Glycine max
agacactactaaagaaggatatagttttgaagagctatgcatcaagaaagaagccattgagggagaagagaagttttgtgcaaaatccttgggaacagtaattggttttgccatttcaaagctgggaaagaacattcaagtactttcaagttcctttgtcaataagcaagaccaatacactgtggaaggagtgcagaatcttggagacaaagcagtgatgtgtcataggctaaatttcagaactgcagtattttactgccatgaagtccgtgaaacaacagctttcatg

SEQ ID NO: 169383 - DNA, 284 bp, Glycine max
agacagagtagtacagattactaccaatggctaccaaggtttacattgtttattattctacgtatggacatgttgagaagctagctagagagatagaaaaaggggctgcttctgtggagggagtagaagcaaaactgtggcaggtacctgaaacattgcctgaagaagtccttgctaagttgggagcacctccaaagagtgatgttccaattattactcccaatgagcttcctgaggctgatggctttttgtttggttttcccacaagatttggatctatggcc

SEQ ID NO: 169384 - DNA, 284 bp, Glycine max
ggaattttcgtcattcttactttaccttccttcctcaccttctaattctaaaacaagttccaaactttcaaatctcaccgtcccaaaaattcttttttggttacccatttgactttagcctctgcaacagagtctcagatctctgcattccaattcccatggctggtcgctatgacagtaaccccttcgatgaggaagaagttaaccctttctctaatcctggaagtgttcccgctgccactaattcaaggcttccacctcttaagccagaacctgttgattat

SEQ ID NO: 169385 - DNA, 290 bp, Glycine max
catcgcagagagagagagatccatcgatcaattaatttacaatggccgatcaggctcacgacgaacagatctctgagctcaaggacagctttagcctcttcgacaaggacggcgatggttgtattaccaccaaggaacttcggactgtgatgcggtcgcttgggcagaacccaactgaggctgagctgcaggacatgataaatgaggttgatgctgatgggaatggtaccattgatttcccagaattcctcaatctcatggcgcgcaagacgaaagacactgattcagag

SEQ ID NO: 169386 - DNA, 284 bp, Glycine max
ccctaacgcgtgcatagcagagtcagagacagagacgcagccatagggcggagacctgcgaggtgttataggcaaattaagaacaagccataccccaagtcacgtttctgccgtggtgttcctgatcccaagatcaggatttatgatgttggtatgaagaagaagggtgttgatgagtttcctttctgtgtccatctggttagttgggagaaggaaaatgtttcaagtgaggccctggaagctgctcgcattgcttgcaacaagtacatggccaaatttgctgg

SEQ ID NO: 169387 - DNA, 278 bp, Glycine max
cagaatcaaagcattttgtgttgataaattcagtaaagttgtggaatggactcaaccactatccaccattccatgcactgtcagagatggcaattcccactgttgctcactggtcagagaagtacaaccatgtgatcaaggccatgactcaaaagggttacagtttcgttgggtatctacctttgattcccattgaagagatagccaaggcattcaagcagggagaggctaacttgaaaggagataatgcagcctctgaggaacagagatcagaatca

SEQ ID NO: 169388 - DNA, 283 bp, Glycine max
gcaaaaaagcggagaactttaagaagaatttacacgagaaagggattcttcctgcagagaccattcaagatcgactgaagaatttgattgcctcgtcccctgtgatgctgttcatgaagggtatcccagatgcaccaagatgtggttttagttccagagttgctgatgcccttcgacaagagggcttgaattttgggtcctttgatatattgactgatgaggaagtgagacagggattgaaggtatactcaaattggccaacctatcctcaactctactacaa

SEQ ID NO: 169389 - DNA, 198 bp, Glycine max
gtgccattgttgcaggcagctctcccccaaggaattgtcccatttgtcttttcgaaggactatgatgtacatcctgatattctcagcacagctgttatttttgggatgctgattgctttgcccataactctagtgtactacatcttgttggggttgtgaatgaaagaaatgatggatgatacagaagattcacgtgtg

SEQ ID NO: 169390 - DNA, 280 bp, Glycine max
gtttggttttgtagtaagtgaggtgaggtgccaaaatggtgaagataactcttggtactttcgatgactcttttggtgttgcctctcttaaggcttatttggcagagttccatgcaactctgattttcgtgttcgctggtgttggttcagccatcgcttacaacgagcttacaaaagatgcagccttggatccaacggggctggtggcagtagctgtggcccatgcatttgcactgtttgtaggtgtctccgtcgcagccaacatctcgggtggccattt

SEQ ID NO: 169391 - DNA, 281 bp, Glycine max
gtttcttcggctgcgtgctgatgctcttgtactctcacagtcacacaacagcaatggaagcaatcacagagggagtgaacaacatcaacatctctgattcttacaagaagaatcgcattcaggtctccaacaccaaaaagcctctcttcttctacgtcaatctcgccaagaggtatatgcaacagcataatgaggttgagctctcagcactaggaatggctattgctacagtggttactgttgctgaaatcttgaaaaacaatgagcttgccattgaaaag

SEQ ID NO: 169392 - DNA, 273 bp, Glycine max
gtttttatcttcccttttctctttctccggcgacgatctcagattccggccactcctctcgccggcgagcccttactcttccctcctccgtcgagccctctccgattcgaatcgttcccagcctcgcaccaccatgaatcccgaatacgattatttcttcaagcttttgctgattggagattctggtgtaggcaagtcatgtcttctcctgaggtttgctgatgattcataccttgacagctatatcagtaccattggagtggactttaaaat

SEQ ID NO: 169393 - DNA, 290 bp, Glycine max
atttcctctctctcagtttccaagaatcttaagctatgggaaagtcttacccaaccgtgagcgctgattaccagaaggccgttgagaaggcgaagaagaagctcagaggcttcatcgctgagaagagatgcgctcctctaatgctccgtttggcatggcactctgctggaacttacgacgtgagctcgaagaccggtggtcccttcggaaccataaagcacccctccgaactcgctcacggcgctaacaacggtcttgacatcgctgttaggcttttggagccactcaaa

SEQ ID NO: 169394 - DNA, 285 bp, Glycine max
gcaaaaagaaagaatcccaggcgaggagaaagatggaggggaaggagcaggatgtgtcgttgggagcgaacaagtttcccgagagacagccaattgggacggcggcgcagagccaagacgacggcaaggactaccaggagccggcgccggcgccgctggttgacccgacggagtttacgtcatggtcgttttacagagcagggatagcagagtttgtggccacttttctgtttctctacatcactgtcttaaccgttatgggagtcgccggggctaagtctaagt

SEQ ID NO: 169395 - DNA, 280 bp, Glycine max
gcaagcaaaaagaaagaatcccaggcgaggagaaagatggaggggaaggagcaggatgtgtcgttgggagcgaacaagttccccgagagacagccaattgggacggcggcgcagagccaagacgacggcaaggactaccaggagccggcgccggcgccgctggttgacccgacggagtttacgtcatggtcgttttacagagcagggatagcagagtttgtggccacttttctgtttctctacatcactgtcttaaccgttatgggagtcgccggggcta

SEQ ID NO: 169396 - DNA, 276 bp, Glycine max
tcccccaacaccgttaatttggacgtgagaacccccgtgaagttcgacaacatgtattacatcaacctcttgaaccgccaaggagtgttcacttctgaccaggacatcgcgggcagccccaaaaccaaggaaatcgtgaaccagttcgcttcagaccagaaactgttttttaagaaattttccgatgcttttgtgaaggtgagccagctagatgtgataacggatcgtattgggaaaggggagattcgtgataagtgctttgttgcaaataagaga

SEQ ID NO: 169397 - DNA, 288 bp, Glycine max
cttaaacctttctttcttgtaaactttattgattgattctgagaatagaactaagagggtatagacatggctagcgcaattgcagcttcttttttggttctgcttctggctttccccactgtatttggagctgaccatgaagttggtgacactagtggatgggccctcggagttaattacaacacctgggcctctgggaaaactttcacagttggtgacactttggtgttcaagtatgactccactcatcaagttgatgaggttgatgagagtggatacaacagctgc

SEQ ID NO: 169398 - DNA, 273 bp, Glycine max
gaagatggagatgtatcagatctggagcaggagaatagcgttgggagcgttcgcgtttgttactgttttcctatcggcctcagcagacgacgtcgttgtgctctctgaagataacttcgagaaggaagttggtcaggacagaggagctctcgttgagttctatgctccttggtgtggacactgcaaaaagcttgctccagaatatgaaaagcttggtagcagcttcaagaaagccaaatctgttttaatcggcaaggttgactgtgatgagca

SEQ ID NO: 169399 - DNA, 276 bp, Glycine max
gctacccgctgagtttaagcatatcaataagcggaggaaaagaaactaacaaggattcccttagtaacggcgacatcaacacccgccagaccatcaccgtcctcgtcctcaacaacgccgccttctccgccgtcgccgcgaaacaccccctctccgtcgtcaagaacctcctcagcctccatatcctcctcgactacttcgacaacacaaagctccaccagatcaccaacgggaccactctttccaccactctctaccaaagcacaggtaatgcca

SEQ ID NO: 169400 - DNA, 284 bp, Glycine max
ctcaccatgactttcaagcgcaggaatggaggtcgcaacaaacacggccgcggccacgtcaagttcattcgatgctccaactgcggcaaatgctgccctaaggacaaggctatcaagaggtttctggtgaggaacattgttgaacaggctgcagtcagagatgtgcaggaggcttgtgtctacgaacaatacacgcttccgaagctgtatgtgaagatgcagtattgtgtttcctgtgctatccactctcatgttgtgagggttcgatcccgcactgataggag

SEQ ID NO: 169401 - DNA, 271 bp, Glycine max
atgagtcgtagatctgtacctgcctatgcattgatttggaaaagtccaagcttcaaagtatgaactaagacttcaatagtggatgctcttagagaagcgatctcagtaatcatgactgattccaaggaaaagaacaggaattttgtggagaccattgaactccaaattgggctgtaaaactatgatccccagaaggacaagcgatttagtggctctgttaagttgcctcacattccgcgcaccaagatgaagagcagtatgcttggtgatg

SEQ ID NO: 169402 - DNA, 276 bp, Glycine max
ctcaccgattgctagaatggaatttcgatgctcagtcatctcttttaccattctcttctctcttgctcttgcaggagagagccatgtccatgcatcgctacctgaggaagattattgggaagctgtttggccaaacactcccattcccactgcactgcgagaccttctaaagcctctccctgcaggtgttgaaatcgatgaactccctaagcaaattgatgatacacagtacccaaaaacattcttctataaagaagaccttcatccaggcaaaac

SEQ ID NO: 169403 - DNA, 310 bp, Glycine max
ttgcaacaccgcgatatgaacgatgcaaaatagtttcagatacgtcgcgttgattgattgatatgaagtggttgactttctggaactgcatatctatcctcgtgttgtcttttgctttcttcttcttctattgtcacacatacacatctactccttccctcatggctgagcaatcttccaagtccatttacgatttcacagtcaaggacatcagtggaaatgatgtgagtctgaataattacagcgggaaggttctactgattgtgaatgtcgcctcacaatgtggtttgacacagacaaattacaaaga

SEQ ID NO: 169404 - DNA, 254 bp, Glycine max
cttattatatgatggttaagtctttggttgtattatggagggtatacctacgtgtgaccagaacacttggctcaacatcagcgtgcttaccacgtggtgacatgagaacttctaggagttgtgtattgaagtgagcaagctgctgctggtgctggagtttagggatgagggtttattttattggcagggttacatgagtttgtgatgatgtgttactgtgtttactttaggtttgaataaatgatatttacttt

SEQ ID NO: 169405 - DNA, 302 bp, Glycine max
cgagattactctcctcgatggaaaatcattattagcttgtattgttcgcactattccagctggtggccgaattcgaattagttcaacgctccctaataggctgggcaagacgcttgcacctcgacattggcacgactacaaaaggaagtatgggaagctggatgattttgtggctagccattctgaattattcttgattgagggtgactatattcagctccgtgaaggtgcacagaaaatcgttgctgcaactgcagcagttgccaaagttgctgctgctgctgctgctgcatcaactcctt

SEQ ID NO: 169406 - DNA, 291 bp, Glycine max
ccgatgagagggccggcccagtagatccagtggaattgctgggcttatctacgaggttgtcttcatcagccacacccacgagcagcttcccagcactgactactagaggggacaaatgaaataataaaaaaaaaaaatgtgtattattgaatttctccggaatcttcttctgtgtatggttttccttcctttgtgttttctttcctgttgaatcggtggccgttgatctttggttggatggttgatgatcctgaagttttcttttaagttaatttaattatcattttgtgc

SEQ ID NO: 169407 - DNA, 278 bp, Glycine max
caaaaacgaacagtgtgattcttcttgccgtagatctattccattttgccattcatccatggccgacgaattcaaattcgccgacaaagtccctccttccttcgatcacgtggctacattaattttggattgccatttcaagagcatcatattcaaactggttgtggtattatgtctatcatagtctatgacgatcctgacaaactagctctgatcacttatccagatttggctctaaattatatatcatggtttcaaggactatttatgtccagaag

SEQ ID NO: 169408 - DNA, 303 bp, Glycine max
gcgttggggtgattcctgtaatccatcatatggtgcattatctgattatcagttcatgcggccacgtgcacgggacaagaagcttgttgaagaatgggcagttcccttgaaaagcattgaagatatatatgagaggcttagactgtattgtcttggaaagttgagaagcaatccttggtcagaactagatggtcttcagccagagacaaagataataaatgagctgctggaaaagattaacacaaagggcttcctcaccatcaatagcccgccagctgtcaatggggaaaagtcagattctcc

SEQ ID NO: 169409 - DNA, 302 bp, Glycine max
caaaaagagagagtggaaaagatggcgcggttgatcacagtggtgtggtgcgcggtggcggtgctattatgcgccgcggccggtgcgtcgtgggtggaggaggcggcgaacccgatacgaatggtgtctggcgtggaggcggaggtggttcgggtgatcggggagtgccggcgtgcgtcgaagtttgctaggttcgtgagcaggttcgggaagagttaccaaagcgaggaagagatgaaggagaggtacgagatattctcgcagaatctcaggttcatccgctcccacaacaagaagcgttt

SEQ ID NO: 169410 - DNA, 300 bp, Glycine max
ctagaatggaatttcgatgctcagtcatctcttttaccattctcttctctcttgctcttgcaggagagagccatgtccatgcatcgctacctgaggaagattattgggaagctgtttggccaaacactcccattcccactgcactgcgagagcttctaaagcctctccctgcaggtgttgaaatcgatgaactccctaagcaaattgatgatacacagtacccaaaaacattcttctataaagaagaccttcatccaggcaaaacaatgaacgtacaattcaccaagcgtccctatgcac

SEQ ID NO: 169411 - DNA, 285 bp, Glycine max
atgttgttgtatttgttggtgttaatggtgttggaaaatctactaatctagctaaggttgcttactggcttttgcagcacaaggtcagtgttatgatggctgcttgtgacacatttcgatcaggggctgttgagcagctgcggacccatgctcgaagacttcagatccctatatttgagaagggctatgagaaagatcctgccgttgtggcaaaagaagcaagtcaagaagcttcacgcaatggttcggatgtggttctcgttgatacagctggtcgtatgcagg

SEQ ID NO: 169412 - DNA, 300 bp, Glycine max
ctcgagccgctagtatccgatcctctgtcctctcgaagctttcatcgttcaacatattctcaccatctcagtcatgggcctgctatcttgtcttaggtctaccgacctgagaacaagtgccagaggaagcgctggcacgacaagactcctggatacgaacaattttcaacgaaacttgatttcgtctggtggcaatgaatcgtattatgggtattttaacaggagatcatacacttcactttatatgggaactggaactgtgggtgggattacaagtgctagaatcagggtgccaaatgt

SEQ ID NO: 169413 - DNA, 248 bp, Glycine max
gtttgaaaagaagccggtgctgtctccttgttctccatcgtaagatataactaattatctttatatcttcatcaagatgcgccgagggagaaccgccgccgccgctgccgccgttgtggatcccacgccggaccaggccaaggagacgacgcggttccgtggcgtgaggcagcggccgtgggggcgattcgcggcggagattcgagatccgtggacgaagcagcgcgtttggctggggaccttcgatt

SEQ ID NO: 169414 - DNA, 299 bp, Glycine max
caggcctgagcacagtcgggatgagaaagtgaaggttcttgaatcagtgctccctattaatgatgatgaggttgttcttggacaatatgacggctataaagatgacccaaccgtacctgatgagtctaacaccccaacatttgcaactgttgttctgcgaatacacaatgaaagatgggaaggtgttcctttcatactaaaagcagggaaggcactaaattctagaaaggcagagataagggttcaattcaaggatgtccctggtgatattttcaagtgtaaaaagcaggggagaaatg

SEQ ID NO: 169415 - DNA, 298 bp, Glycine max
cccttttctatttgagcatcatcatgtccaccgcagcgcagccctcggccaagaaaacggcgtcgtccaagaagcccctctcccatcctaccttcgccgtgatgatagcggaggcgatagcgagtctgaaggagagaaccggttcgagccaatacgcgataaccaaattcatcgaaggcaagcacaaggagttgcctccaacctacaagaagcttgttctcgttcatctcaagaagtctgttgctgctggcaagctcgttaaggtcaaacactctttcaagctcgcaccgactaagtc

SEQ ID NO: 169416 - DNA, 270 bp, Glycine max
gttgccgattctagttacgacatgattagtggtttagaccaggaaattaaggaaataaaagagggcattgaatttaccaatccaacatcctgagctgtttggaagtcttggaattgcacaaccaaagggtgtcctggtctatgggccacctggtacaggaacaacattgttggctaggggagtgcgtcatcatactgactgtacattcatcagggtgtctggttctgaattagttcagaaatacattggagaaggttctagaatggtcag

SEQ ID NO: 169417 - DNA, 248 bp, Glycine max
caacctcatatgagtcatgaagatcgtagcttagaggttgcttctatttatttggtggccatttttcaagtgttgttcttactaagttcaaggaagcgacaaatcaaaaagattcaagacaaggaagcaagattagaaatgttgatatcaattcaggctgcttttagagctttcttatttgtttctttgtagattaatatggttgattgtgtatgatttcattcaaattattgtgaaattcttttaat

SEQ ID NO: 169418 - DNA, 299 bp, Glycine max
attcaatgccgttatactcaagagattgttcatgagcaaggttaacaagcccccattgtctttgtcaaggttgattaagtataccaaggggaaggaagataagattgctgtggtggtgggcaatataaccgatgatattcgtgtttatgaagttccagccttaaaggtcacagcactcaggtttacagagactgctcgggcaagaattgagaaggcaggtggtgaatgcttgacgtttgatcagttggctctcagggctcctctgggacagaacacggtccttcttagaggcccaaaga

SEQ ID NO: 169419 - DNA, 283 bp, Glycine max
cgaggatccattggagggcaagtctggtgccagcagccgctgtaattccagctccaatagcgtatatttaagttgttgcagttaaaaagctcgtagttggaccttgggttgggtcgatcggtccgcctccggtgtccaccggtcggctcgtcccttctgccggcgatgcgctcctgtccttaactggccgggtcgtgcctccggtgctgttactttgaagaaattagagtgctcaaagcaagcctacgctctgtatcattagcatgggataacaccacaggat

SEQ ID NO: 169420 - DNA, 298 bp, Glycine max
cttttctctctcgttttttctcaaaaagttgcaagagttaaagcaaaaaccaaagtgagagagaaaatgatgaagccatcgatactcagatctcttcacactgccgccacccgaggcgcctcccaacactcccgccgcggctacgcctccgagccggtgccggagcgcaaggtggccgttctaggtgccgccggcgggatcgggcaacccctctcccttctcatgaagctcaaccccctcgtttccagcctctccctctacgatatcgccggaactcccggtgtcgccgccgatgtca

SEQ ID NO: 169421 - DNA, 270 bp, Glycine max
ctcactttcatttctacatccctggctctgttccgtcgatgacgatggcgtttagggtgcgaaaccctgacctccgctttctcattcttctctctctcttgtccatcacttccgccaaggtcttcttcgaggagcgtttcgatgacggatggggaaatcgttgggttaaatcagattggaaaacagatgagaacctggctggggagtggaaccacacctctggccaatggaatggagacgctaacgacaaaggtattcaaaccatggagg

SEQ ID NO: 169422 - DNA, 300 bp, Glycine max
cttttctcttctctgtctcaggggtgccctgagatcacattgaacaatggtgaaggctgtggccgttcttggcagcagtgagggtgtcactggaactattcacttcgttcaggagggaagtggtccaaccaccgtaactggatctcttgctggtcttaagcctggtctccatggtttccatgtccatgccttgggggacactaccaatggttgcctctcaactggatcacatttcaatcctaataacaaggagcatggtgcccctgaggatgagaatcgtcatgctggtgatcttgggaa

SEQ ID NO: 169423 - DNA, 273 bp, Glycine max
agcgaagaggcgcacgtcagcagtaactcgtggaattgctagcaatggcgaggatcaaggtttacgagctgaggcagaagacgaaggctgatctgttgaatcagctgaaggacctcaaggccgagcttgccttgcttcgtgttgctaaggtcaccggcggtgcacctaacaagctctctaagatcaaggtggtgaggttgaacattgcccaggttttgacggtgatttctcagaagcagaaggccgcgttgacggatgcctacaggaagaagt

SEQ ID NO: 169424 - DNA, 296 bp, Glycine max
cttagccgaggtcacgaggagcagtcagtagtttcacaatttccaaatggctaggggattgacgaagcatctcaagaggctcaatgctcctaagcattggatgcttgacaaactgggtggtgcatttgcgcccaaaccctcatctggaccacacaaatctagggactgccttcccctcatactcatcctacgaaaccggctaaagtatgctctgacttaccgtgaagtcatcggtattctgatgcagagacatgttcttgttgatggacaagtcaggcctgacaagacttaccctg

SEQ ID NO: 169425 - DNA, 292 bp, Glycine max
gtaacgcgttgcgttgtcggaaaatcaccctcacctggggttttagtataccaatttgaaggtttttacatgagtgcagtggaaacttctgcttgaatcatggaaatttaagagcactgtggaagtctctaggcgatggccggttcagaacctgttagggcagagggagagactatggctgtggatgctgccccaaggaagccccggattctacttgctgcgagtgggagtgttgctgctgtcaaatttgcaaatctttgtcactgtttctctgaatgggcagatgtaagag

SEQ ID NO: 169426 - DNA, 295 bp, Glycine max
tgtgggagtcatcaagaacgtggagaagaaggatcctactggagccaaggtcaccaaggctgcccagaagacgaagtgaatcgtgcggtttggttcatcaggggatgacgattcttatggatacaataaaagtcggcttcttgcccatgtgatcttcgtttctaggtagcttgtttttcggacatagtttgaagtctccaccatcatctcgcaacttttgttcccagaattgggttcttgatcgacggtggcaagactccttttatcattctgttttaatgtgttgtgtttgtga

SEQ ID NO: 169427 - DNA, 284 bp, Glycine max
aaatttcttatcttgaaattttgcgcagtttcagatttagaattgttgatcagaaaaggttgagggtgaaaacaagagactcagtgaaaagcaagtatggggatggactactatgggattttggaggttgacaggaatgcctcagatgaagagttgaagagagcctacagaaagcttgcaatgaaatggcaccctgacaagaacccaaccaataagaaagaggctgagattcaattcaaacagatatctgaatcctacgaggttcttagtgatccccagaagag

SEQ ID NO: 169428 - DNA, 117 bp, Glycine max
gcctcataaaagcaaagatcaaacaaaccaaggacgagaacacgatgttgcttgaacttgcacttggtatattggttttggctctgtttctgcacttgcgtcccacacccactgcaa

SEQ ID NO: 169429 - DNA, 298 bp, Glycine max
ctacaatctatgccccatgatgcacataccatgggtgtgcttgttaatgccatgagtgctctttctgtttttcatcctgatgcaaatcccgctctcagaggtcttgatatttatgactcaaagcaaataagagacaaacagataacacgggttattggaaagataacaacaattgctgctgcagtttatcttagaatggcaggaaggccacccgtgcttccatccaacctcctttctctacacagagaacttcctatacatgctagattcttttggcaatcggtcatataaacccaat

SEQ ID NO: 169430 - DNA, 292 bp, Glycine max
gaaatccactgaaggtttccagtcacttccttatgttgtcgcactgttcagtgcaatgctttggatttactatgctttcgtgaaaagggaaactgccctccttctcattaccattaacacatttggaattgttgtggagtcaatttacctttctatcttcctaatttatgccccaaggaagccaaggcttacaaccatcaagcttcttctcttactgaatgtgtttggattcggggccatgcttctatcaactctctacctgtcaaagggagcaaagcgtcttgctatcata

SEQ ID NO: 169431 - DNA, 268 bp, Glycine max
gcaagtgtagctggcaatgcatatgagctaggcttggctactcgtctccctcgtcctcagaatcctgtcaagtatgctgagagctgcaagtattctcctgtctacagaaactataggtgaattatggggcaagtcacttgactttggctgtaataaacacatgtcttggtggcatgtgtgagttgttttatgtaacttatgcataagtgagtggttttatgctatttattatgaaatcaccaaaactgcaggtgaagtatgctttttg

SEQ ID NO: 169432 - DNA, 291 bp, Glycine max
atctgtcactttttcactgctatcgtgggtgctaagtggtgggttcagcaatttcgggaagtctttgccatttttaaattgagcttccttatctcacaggaaacccaacattcaaagccagaaagtgcacaaagaaaacccttggagatacaccaacagtcacatgcaatgttagtaatgtttataaagttgtgaaggctaagaacggaagcatgccacttgccttagcaatgctttaaccatttgttgtactcgtgggatgcgtgcttgtctgggattatttgtcgccat

SEQ ID NO: 169433 - DNA, 255 bp, Glycine max
ctttagcaaagcttgatcctgaatatggactctatacgagtgtgcgtgcaactcttatctatgctttaatgggaacttcaagagacatagcaattggacccgtggccgtggtatcgcttcttttgtcatcaatgattcagaaattaatagaccctgccattgatccaaatgggtatagaaagcttgttttcactaccactttctttgctggcatatttcaagctgcttttggactcttcaggttggggttccttg

SEQ ID NO: 169434 - DNA, 218 bp, Glycine max
ggatcatggggcttcaccaagtttagccgttctgattatctcaagttccctggtcgtcagaagattattgttagcaggaaatggaggcttcacaagtttagccgttctgattatctcaagttcaagtcagagaatagaattgtgcccgatggtgtgaatgctaagcttcttggttgccatggaccattggccaaccgtgaacccggaagggccttttt

SEQ ID NO: 169435 - DNA, 263 bp, Glycine max
cggggactgggaagaattaccttctgtgctgtctattgcgataagtgatggatatgtagtgatgcctggaatgagtttgaagttttctgaggaagattttatggatgggtgtagtagtcaagatggtagcatcattggacacgaatctcactcaaggcggtctaggaagctctcaggaagtcgagcatgggaaagaggtagtgaggcagatcaaggagagggtggctatgatattattttgatgacagagattccatactctg

SEQ ID NO: 169436 - DNA, 265 bp, Glycine max
cttctaatcacactaatggctgtcaccttctcagatcttcacaccgtagagggcatcaaatccctcgatcaattcctttctgggaaaacctatatctctggggatcaattgacaaaggatgatatcaaagtgtatgcagctgttgtggaaaagccaggagactcttttcctaatgctgctaagtggtacgatgccgtctcttctcaacttgctccaagcttccctgggcacgctcaaggggtaagattcagtggcgctgctgctc

SEQ ID NO: 169437 - DNA, 261 bp, Glycine max
cgaagtttcacatcagccttatccagtttagggtttcggttccttaccctacctttgacgtatcgaaaccttaaatttgggattaggtctgagcaatctggttggtagaacctttggtcttagagagtcaagttttatgtctggattagacgatcaaattcctactgccttcgatccttttgctgatgcaaatgctgatgactcgggtgctgggtcaaaggagtatgtgcatattcgcgttcagcagcgaaatggtaggaa

SEQ ID NO: 169438 - DNA, 260 bp, Glycine max
ctgctgttcctgcgcgtgaacaagcctcaggtaagccaaagccatcgttaagcataacaatgttatccccaacggacacttccgtaagcactggcagaactatgtgaagacctggttcaatcagccagcacggaagacaagaagacggttggctcgtcagaagaaagctgtgaagattttccccagacctacagctggacctcttagacccattgtacatggtcaaactttgaaatacaacatgaaagtgagagctggaa

SEQ ID NO: 169439 - DNA, 261 bp, Glycine max
ctcacgcgaacagaaacacgaactaagaatccatggcgacaccaacgacgacgaagagaaaaccggtgttcgtgaaggtggatcagctaaaacctggcaccaacggccacacgctgacggtgaaggtggtcagctccaagccggtgaagacggtgaccactcgcggcggtcgatcgtcggtgctcgcggcgcgcccgtcgcgcatcgccgagtgcctcgtcggagacgaaaccggaaccataatcttcacagcacgcaacg

SEQ ID NO: 169440 - DNA, 254 bp, Glycine max
tcttgcttcttgcttctattacttgcttctttcttcaccatgtcacttgctgggaaaatcaccactgaaattggggttcatgcaaccgctgcaaagtggttcaacctctttgcaacacaacttcatcatgttcaaaaccttactgatagagtacatggaaccaagctgcatcaaggtgaagactggcatcacaacgagacagtcaaacactggacttataccatagatggtaaggctacaacatgtctggagag

SEQ ID NO: 169441 - DNA, 263 bp, Glycine max
gcttcagatggtggtgttggagctgattaggaaggtttgtaggagcaataagggggagaacgggaagtacattaagatcattatatcccttttgaatgctccttccactgctgttatttatcaatgtgctagcacccttgtgtcactctcttctgcacccactgccattagggctgctgctagtacttactgtcagcttttactttctcagagtgataacaatgttaaactcattgtgcttgatcgtttgaatgagctcaaga

SEQ ID NO: 169442 - DNA, 260 bp, Glycine max
gaaatctcagtcgaagcaagcaatgggcaacgttcagtcacctcccaacaatgatcctcgatatgtttcagcaaccagagcttttactcaaaaggaacttgaagacttgaggtctctgttcatcaatctggcaaatcaatcccagagcaacgggaaatacatctctccctccgtttttcagtcatattttggacttcatggccctcttggggagaggatgtttgatttagttactcaggagcgcaaggatcagaggctaa

SEQ ID NO: 169443 - DNA, 262 bp, Glycine max
ctaacactcattaattgcaagaatggcacttcgttgcttggtgatgtccctttctgttctcttcactcttggtcttgcgagagaaagccatgccagagacgaagatttttggcatgctgtttggccaaacactcccattccaagttcattgcgagatcttctaaagcctggccctgcaagtgttgaaatcgatgatcaccctatgcaaattgaagaaacacagtacccgaaaaccttcttctataaagaagaccttcatcca

SEQ ID NO: 169444 - DNA, 263 bp, Glycine max
agaatatcaaattggtctcttgtcttcctcctcatctctacactactccacatagagcccagcctctcaagcccaagcccaagcccaagcccaagcccgttcataaaatcctcctgcagcagcacccagtacccagccctctgcgtctcatccctctccgtctacgcctccagcatccaacaggaccctcaccaactggttcagacagcactctccctctccctgaaccgcacccaagccaccaaaaccttcgtggctaactg

SEQ ID NO: 169445 - DNA, 262 bp, Glycine max
cactgcgagagcttctaaagcctctccctgcaggtgttgaaatcgatgaactcccctaagcaaattgatgatacacagtacccaaaaccattcttctataaagaagaccttcatccaggcaaaacaatgaaagtacaattcaccaagcgtccctatgcacaaccttatggtgtatatacatggttaacggatattaaagacacctctaaagaaggatatagttttgaagagatatgcatcaagaaagaagcgtttgagggag

SEQ ID NO: 169446 - DNA, 260 bp, Glycine max
caaactcactctttctaagttttttctatctctttctctctctctctgtctgccatggttctctccaaaaccacctccgaatccgacgtctctgtccactcaaccttcgcttctcgatatgtcagaacttcgcttcccaggtttaagatgccggaggagtcgataccaaaggaggcagcgtatcaaataataaacgatgagttgatgttggatgggaacccaaggttgaacttggcatcatttgtgacaacctggatgga

SEQ ID NO: 169447 - DNA, 257 bp, Glycine max
caagggtttctctgtctgcttcttcactttctctcgtttcaatcgaaaccaaaacaaaatcatgggcagaaaattcttcgttggtggcaactggaaatgcaatgggaccactgaggaggtaaagaagattgttactactttgaatgaggctaaagtccctggagaagatgtcgtagaagttgttgtgagccctccttttgtgttccttcctgttgtaaaaagtttgctgcgccctgatttccatgtttcggcacaaa

SEQ ID NO: 169448 - DNA, 262 bp, Glycine max
gcgagagaaagccatgccagagacgaagatttttggcatgctgtttggccaaacactcccattccaagttcattgcgagatcttctaaagcctggccctgcaagtgttgaaatcgatgatcaccctatgcaaattgaagaaacacagtacccgaaaaccttcttctataaagaagaccttcatccaggcaaaacaatgaaagtacaattcagcaagcctccctttcaacaaccatggggtgttggtacatggttaaaggaaa

SEQ ID NO: 169449 - DNA, 259 bp, Glycine max
aaacctgagaagatgaaggccactagagatgtgcttagtgaatatgggaacatgtcaagtgcttgtgttcttttcatcttggatgagatgaggaggaaatctgctgaaaatggacttaaaaccacaggtgaaggacttgaatggggtgtgttgttcggttttggacctggacttaccattgaaactgttgttctgcgcagtgtggccatctgagatgcctaatatattatttcattattgtgtaccacttttcaaactt

SEQ ID NO: 169450 - DNA, 259 bp, Glycine max
gctatggcggcgatgcagaggccactcaagagaaccattgcaatcgccaagctacgcgcgtgcttttcctctctccgacccgccgccgccgccgacatcgtcgcgtctcctccgccgcagctcccgccgttcgatcaccagccgcacccttacaacggtcccttcgccgatgaagtcctcgccaagcgcaaaacgttcctcggtccttccgtcttccactactataagacacctctgaatatcgtggaagggaagatgc

SEQ ID NO: 169451 - DNA, 252 bp, Glycine max
gaacgtgtgagtctctagcgttcctattttggctccacttcccatcggatttgctgtgttcttggtccacttggctaccattcccatcacaggaactggcattaacccagctaggagtctcggagctgccatcatctacaacagagaccatgcatgggatgaccaatggattttctgggttggacctttcattggagctgcccttgctgctgtgtatcaccagatagtcatccgagccatccctttcaagac

SEQ ID NO: 169452 - DNA, 259 bp, Glycine max
acactcttctatattcctagtactttgaagagatattgaaataaacaacaatggccaattccatgagctttttcctgcttctttcttttctagcttttgctcccttgtgcctctgtcactataaccaagagggttacctctaccctcagttttatgactattcatgcccacaagctcaacatattgtcaagtctgtccttgctaagtatgttgcagagcaacctcgattggcggcttcgattctcaggcttcatttcca

SEQ ID NO: 169453 - DNA, 260 bp, Glycine max
gctttacagtgtttctcttccttcttcttcttcttcttcttcttcttcgttgaatcgcgattgttctgtgcgagagaaagaagagagagatcgaaaatggcgttggctttcgacgagttcggaaggccgttcataatcctgaaggagcaggagcagaagagcagactccgaggattggacgctcagaaagccaacatctccgccggcaaagccgtggctcgcatcctccgaacctccctcggccccaaaggcatggacaa

SEQ ID NO: 169454 - DNA, 257 bp, Glycine max
cacatttccaaacccctaaaccctattctctcctcaatgggaagcaaccaagccgccatttccttcctcaccaacgtcgcccccgcggccttcggccttggcgcggcggccaccgccctctcctcctccctctacaccgtggacggcgggcagcgcgccgtcctcttcgaccggttccgcggtctcctggactccaccgtcggcgaggggacccacttcctggtcccatgggtccagaaaccctacatcttcgacat

SEQ ID NO: 169455 - DNA, 255 bp, Glycine max
cttccacaaggtatggggacttttttgatggaaaaactgccagcttgtgtgtgcgtcgtgctgtttattatgatcctgagacaggaaaggaagatccttccaagaatggcatttgtagcaattttttgtgtaactcaaagccaggagacaaaattcagatcacaggcccttcggggaagataatgcttttgcccgaggatgacccaaatgctacccatataatgattgccacaggcactggtgttgctccattca

SEQ ID NO: 169456 - DNA, 256 bp, Glycine max
atgggttcttcttctattacaacatcgcccgcaaccatgaccatggctgcgatcgtgctcctgttcacggtctttgccgtttcctccgccctagacatgtcgataatctcgtacgacagcgcccacgcggacaaggccgccccgtttcgcaccgaggaggagctgatgtccatgtacgagcagtggctcgtgaagcacgggaaggtgtacaacgcgctcggcgagaaggagaagcgcttccagatcttcaaggaca

SEQ ID NO: 169457 - DNA, 256 bp, Glycine max
ctttgagctcttgcctccccctggccagtcacagattgacactagtgagaaaggagggcaatttagcttgcacatactcaagcattccaccattgtggcaaagccaaggtcattttagactccaccacatgatcatgatcatatgatcaatccccttaattttttcttttttcttttcccttttctttactctgtattgtatcaatgcttgaaaatggggttgttccaaaaatgtcatatatatttggcctgctaa

SEQ ID NO: 169458 - DNA, 258 bp, Glycine max
gttttagcgcacttcttctagatttaaggaagatgggtaaggaaaaggttcacatcagtattgtggttattggccatgttgactctgggaagtccactaccactggccacctgatctacaagcttggaggcattgacaagcgtgttattgagagatttgagaaggaagctgctgagatgaacaagaggtctttcaagtatgcctgggtgcttgataagcttaaggctgagcgtgaaagaggaatcacaattgatattg

SEQ ID NO: 169459 - DNA, 255 bp, Glycine max
tagaaaccatggatcagaaggatttttatggtcgaacaatcggcgtggaaattgcaagactgggttgggatgattttggtgcatccccaagggcctcaggacccccaaagaagtgggatttgccagagcaaggggaagtggtagattgctggtactgatcaaaattcatgattgagtaaagctgtagaagagaaaatgatggaacaacagatatcaagttatacaagaatggccatactataggattgatggaac

SEQ ID NO: 169460 - DNA, 259 bp, Glycine max
caagattcaggtactgcgtttcggaagcagacacagatggctcgtacgaagcaaaccgctcgtaagtccacaggaggaaaggctcctaggaagcagcttgcaaccaaggctgcacgtaagtctgcaccaactactggtggtgtgaagaagccccaccgttatcgtcctcggtaccgttgctcttcgtgaaattaggaaataccagaagagtaccgagcttttgatccggaagctccccttccagaggctggttcgtgaa

SEQ ID NO: 169461 - DNA, 259 bp, Glycine max
ggttatgtaaacttgaattgaagtgaagaaggagatggctgcaacctcttccttgtgctcatcgaccctccaatcccagatcaatggattcttccttcacaaaacctctctttcccatactccttccctcactttctccaggaggaaaatttcaaccacagtgaaggctacatctcgagtcgacaagttttcaaaaagcgatatcattgtctctccgtccattctttctgcaaacttttcaaaattgggagagcaggtg

SEQ ID NO: 169462 - DNA, 259 bp, Glycine max
atctaatagtgttaatttgtctttctctatctctatcggtcatgggtgcttttgcctactgatgaggaaaactcctccaccgtggctccggcaacactctacaaagctctgacaaaagatgctgacactatcatcccaaagattattggggccatccaaactattgaaatcgttgaaggaaatggaggacccggaaccgtcaagaagataacagctagtgaaggtgaccaaaccagtttcgtgctgcaaaaagtggatg

SEQ ID NO: 169463 - DNA, 252 bp, Glycine max
attccgtccaaggctaaatactggcgagagaccgatagcgaacaagtaccgcgacggaaagatgaaaaggacattgtggtggcatgcacactcaggagttttacgtgccacggttcatggtgcttttatcattcaccctcgttcgggtctgtttccttttcctaaaccctacaagcaagtaccaataatattaggtgattggtatgacggtaatgttgtggatatttatcagcaagtactgcttctcgggga

SEQ ID NO: 169464 - DNA, 254 bp, Glycine max
ctcattaattgcaagaatggcacttcgttgcttggtgatgtccctttctgttctcttcactcttggtcttgcgagagaaagccatgccagagacgaagatttttggcatgctgtttggccaaacactcccattccaagttcattgcgagatcttctaaagcctggccctgcaagtgttgaaatcgatgatcaccctatgcaaattgaagaaacacagtacccgaaaaccttcttctataaagaagaccttcatc

SEQ ID NO: 169465 - DNA, 256 bp, Glycine max
gaaaaagtatggaggggtgttgccaaagaagcctccactaatatccaaggatcatgaacgtgcttactttgactctgctgattgggctttggggaagcaaggagcacaaaagcctaaaggaccacttgaagcactccgcccaaagttgcagccaacacaacaacatgctcgttcaagacgctcagcttatgctccagcagatgataatgaagttgatggctgcagcagtgattcatcagcagagcatcagagtgcc

SEQ ID NO: 169466 - DNA, 258 bp, Glycine max
ggagcatacgtggtggtgacagattatggcgagggagacagaacagacttcataatgagtccacgtgcctactcaagattgggaagtaacgcagatgcatctgcagaactattcaaatacggtgtagtggatgtagaatacagaagggtcccctgtagatacggtggctataacctcttggttaaggttcatgaacagagcagaaaccctcactacttagccattgtcattctctatcttggtggaacctacgacgta

SEQ ID NO: 169467 - DNA, 255 bp, Glycine max
gaaaatcgtactatagattctgttgcataggcgttgtctgtggcggttgtcatacaaacgtggtcggggtggaggaagaaactaaaacatgatattaactaaggaatttcactcttcgtctctctcatagtacttcttctggtgccaagaagacggcagtttgcctgcactcgctcagttcttagagcatgaattcagcatccccgcagtttgtttcctcaagaaggatgagtgtgtacgatccgatccaccaga

SEQ ID NO: 169468 - DNA, 257 bp, Glycine max
gggagccgtagcagcggaagctctagcttgggtagcgaatcacaatggcgagaggattaaagaagcatctgaagaggcttaatgccccaaagcattggatgcttgacaaactgggtggtgcatttgctcctaagccctcatctggaccacacaaatcgagggaatgcctgccactcatactcattttgcgaaaccggctgaagtatgctctaacataccgtgaagtcattgctattctgatgcagcgacatgtcctt

SEQ ID NO: 169469 - DNA, 254 bp, Glycine max
cggctcgagatcaaaaccagagtggttctagtaatccggtgctgctagaggatgggaactagtgaatggcatatcgagcgaagatctagcttcggcactgaatcccccttagcaagagatgcaggaaatgtgcctgacactgggtcactctctattgttgtgcttggcgcttctggggatcttgctaagaagaagacatttcctgcacttttccatctataccggcagggattcttaccagcagatgaagttca

SEQ ID NO: 169470 - DNA, 257 bp, Glycine max
cctatctctcctttcaagatgcagatcttcgtcaagaccctcaccggaaagaccatcacccttgaggtggaaagctctgacaccatcgacaacgtcaaggccaagatccaggacaaggaaggaattcccccggatcagcaacgtctcatcttcgccggaaagcagctcgaggacggccgtaccctcgccgactacaacatccagaaggagtcaacccttcaccttgtccttcgtctccgtggtggcatgcagatctt

SEQ ID NO: 169471 - DNA, 250 bp, Glycine max
cctttgttcactcttcttctcttgcggctagggttttagcgcagcttcttctagatttaaggaagatgggtaaggaaaaggttcacatcagtattgtggtcattggccatgtcgactctgggaaatccactaccactggtcacctgatttacaagcttggaggcattgacaagcgtgttattgagaggtttgagaaggaagctgctgagatgaacaagaggtctttcaagtatgcctgggtgctggacaa

SEQ ID NO: 169472 - DNA, 255 bp, Glycine max
cttcttaatttcctcactcacaaggaaccccaatgacaaagctattcgatttcctccctttcctcttcctcaacatcttcatccaaacaatttcagcccaagtagcaccggcaccagcgggacccaccaacatcacccaagtgcttgagaaagcaggacaattcacaaccttcatcaaactcctcaaagcctcacaaatagctgatagaatcaattcacagctaaacaactcaaaccaaggcctaaccgtgtttg

SEQ ID NO: 169473 - DNA, 298 bp, Glycine max
tggtcatcctcggcacacaatacgccggggaaatgaagaagggtcttttcggtgtcatgcattatctcatgcctaagcgccaaatcctctccctacactctggatgcaatatgggcaaagatggggatgtggcactcttctttggactctcaggtaccggaaagaccactctttcgaccgatcacaataggtatctaatcggagatgatgaacactgttggggtgacaatggtgtctccaacattgaaggtggttgctatgccaaatgcattgacctctcacgggagaaagagccaga

SEQ ID NO: 169474 - DNA, 300 bp, Glycine max
gtcgggtgtactttcttgcgaaaccgagagagcgaaggggcaaacacaattttttttatcttcttttttattttttgtagagagagagagagagaaaatgttggggatcttcagcagttcagtggtgtcgccgccggaggagctggtggccgctggcagcagaacgccgtcgccgaagacgacggcggggaagctgctgaaccggttcgtggagagcaaggcgtcggcggtgtcgctgcaggtgggggaacacgtgcagttggcttacacacaccacaacgaatcaccgtggcatcccag

SEQ ID NO: 169475 - DNA, 299 bp, Glycine max
ctaaagtctaagcaaagaaaaaaatgatccttccctcttcttcacttttattcactctcacaatcctcttgtgttctttcctttcttttgtttgtgccaaccgtctcatccaacaaacatgcaagaattgctcaaaaaatgaccccaacataagctacaaattttgcgttacatcattccaatcagaccataggagccactacgccaaaaacctccaagaactaggactaatctccatcaagataacaaggcacaacgtgacggatactaatgctcatatcaatgagcttttgaagaaa

SEQ ID NO: 169476 - DNA, 297 bp, Glycine max
gtcagttcctcggccccaaacgcccctcctcctccccccccacgtccccttcctcctgcacctcctcctcccccctcgccgtcggcaccgacgacgactccgacgccggcgtcacccaccactccccgacgcaagtcctcaaaaacttcaacgagattcgcctcctccggatcgagctccccagcggcgagctaggcatcgaagacggcgtgctcctcaaatggcgcgccgatttcggatcaactctcgacaattgcgtcatcctcggcgcctcctccgtcttccaccccaaagaca

SEQ ID NO: 169477 - DNA, 301 bp, Glycine max
gggcaatgcggtaaccagatcggagcgaagttctgggaggtgatatgcgacgagcacggcatcgaccacaccggaaagtacagcggcgactccgagctccaattggagcgcatcaatgtttattacaatgaagccagcggcggaaggtacgttccacgcgccgtcctcatcgatctggagcccggcaccatggactccgtcagatccggcccctacggccagatcttccgccccgacaacttcgtctttggccagtccggcgccggcaacaactgggccaaaggtcactacaccgaaggcg

SEQ ID NO: 169478 - DNA, 297 bp, Glycine max
ctttgacggtttctagagagagaaagtgatggccggagttaatccaaacggcgtcgcgattttgcggcggttccgacgcatggcggacagttcattcagtacaacatatttggcaacctcttcgaggttacgacgaagtaccgtcctccgatcatgcctatcggacgcggcgcgtacggaatcgtttgctcactgttgaataccgagacgaacgagctggtggctgtgaagaagatagcgaacgctttcgacaatcacatggacgctaagcgtacgcttcgtgagattaagcttctt

SEQ ID NO: 169479 - DNA, 300 bp, Glycine max
atcgagccgctcgagccgctcgagccaattcggctcgagtttcagctgtctgctgttagacctgtacccccctagccactgaactggaaaagtccaacttcaaggatgagtaagcttcagagtgatgctctaagagaagctatctcaggaatcatggctgattccaaggaaaagaacaggaaatttgtggagaccattgaactccaaattgggttgaaaaattatgatccccagaaggacaagcgtttcagtggctctgttaagttgcctcatattcctcgccccaagatgaagatttgt

SEQ ID NO: 169480 - DNA, 299 bp, Glycine max
ggcaaaataagaatgatgagttgcaaagaaaatgaggaggatgacacttacctctcagctttgacactatgtttcagccgaatttttccggcaatcttgaacgctgctgttgatctgaatttgtttgatatcatagacaaggcagagagttcaactttgtcagcctctgagattgcttctttgcttccaaatccacaccctcaattggctaataggcttgaacgcatattgccggtgttggcaagttactctcttctcaattgctccattcgcaccactgaagatggtgtgagagagag

SEQ ID NO: 169481 - DNA, 300 bp, Glycine max
aattgatttaatctttcctcatcatgaaaatgagattgcacagagctgggctgcagaccatgatagccatgtcagttattggatgcataatgggcatgtcactaataacaatgaaaagatgtcaaaatccttaggcaactttttcactattcgccagatcactgagcgttaccattcacttgctttgaggcactttttgatcagtgcccattacagatctccactaaattactcaatttcacagctggagaactcatcagatgctatttactatatatttcagactcttcaagattgtaa

SEQ ID NO: 169482 - DNA, 310 bp, Glycine max
caacacaggcgcagagcgtgatccattgacgaagatggtgcagcgtctcacctaccgcaagaggcacagctatgccaccaaatccaaccaacacagggtcgtcaaaacccctggtgggaagctcgtttatcagaccaccaagaagagggccagctggcccaagtgccccgtcactggcaagaggattcaggggattccacacttgaggcctgcagagtacaagagatcaaggttacccagaaaccgtaggactgtcaaccgtgcatatggcggagttttgtctcgacatgctgtcagggagaggattatc

SEQ ID NO: 169483 - DNA, 291 bp, Glycine max
gtgctgcaatggcttcaagtcaggaagaggtgactcttttgggagtaattggaagcccatttgcttgcagggtgaagattgcccttaagttgaagggagttgaatacaaatatgtggaagaaaatttggccaacaagagtgatttgcttctcaaatccaatccagttcacaagaaagttccagtttttattcacaatgagaagcccatagcagagtctcttgtgattgttgagtacattgatgagacatggaagaacaaccccatcttgccttctgatccttaccaaagag

SEQ ID NO: 169484 - DNA, 289 bp, Glycine max
ccagaggaggctaaacaacaagaggaggaggaagctccggcggttgattatgccatcacggatttcaatgcaggtgctattgctgctgatggccagtggcctggtacaattgatcaatcatggagtgatgcagttcctcaacctattccagcagtacctggtgtcaactggggggcacctgcagaagcacctgctgctgcaggaggagattggggggaagctgttccaccaccacaacaaatccctgtacctccctctggaattgatactgtccaccatctggctggga

SEQ ID NO: 169485 - DNA, 298 bp, Glycine max
aaaatgcccactttttttcttccaacgctcctcctccttctcatagccttcgccacctctgtctccggccgccgtgacctcgtcggagactttctccggctgccctccgaaactgataacgacgacaacttcaagggcacccggtgggccgtcctcctcgccggttccaatggttactggaattacagacatcaggctgatgtttgtcacgcctatcaaatattgaggaaaggtggtctgaaagaagaaaatattattgtttttatgtatgatgacattgcattcaatggggaaaacc

SEQ ID NO: 169486 - DNA, 296 bp, Glycine max
tccctcctggggttctgctttgagaatggcaaacttcttctcgtttatgatttcttatcaagaggaagccttgaagagaaccttcatgaataggtaataagaaaaattcacttgtgtttggttggtccgagagatataaggtagcagtaggtgttgctgaggctttagattatctgcattctaaagatgatcaacctgtgatccatcgggatgtgaagtcatcaaatgtattattatctgagaattttgaaccccagctctctgattttggactggcaaaatgggcatcaaccttg

SEQ ID NO: 169487 - DNA, 292 bp, Glycine max
gaaagggttggattataaacttcaagtagggattggacacttttatcatatattctacgagggatgtttagcaaattttgaaattggagaggaaggagaagaagcatccaagctttaccctgaagtgaattacacacgcatggacgagtacctaaaaatttatgtgtaaaaggaactcattcagtaggagttcagtgattcaaacaggaacacggtttttagctacaataaccttaatttaaggagatgattttgtgcttataattcgatggggaaactggatttttcggat

SEQ ID NO: 169488 - DNA, 295 bp, Glycine max
gttgtttacaatgaaggctactctgaagggaaagtacgatgtcgacaaaaacggcgctgcctttgccaacatcgccgtcaacgccggcgacgtcaagttccgtccctccgtaacggaagccactttcattaacggtcccagcttcaccggcttggcgctcgccgtcgagaaacccggttccttcatcgtcgactacaacgttcccaaaaaggactttcggtttcagtttatgaacacggttagggttggggagaggccgttgaatttgccctacgcgcacagcaggggcgacaac

SEQ ID NO: 169489 - DNA, 295 bp, Glycine max
ataagctttacttaattagcaaatccaaatatggcactttcttcttcatcatcttcaacatccatatttgctttagctttgttcactcttttgcttataggaagttcttcagctcaactctctgagaacttctatgatagtaaatgtcccaaggttttctatgccgtaaaatccgttcttcaatctgctttggctaaagaacctcgccagggagcatctatcgttcgcctcttctttcatgactgctttgtcaatggttgtgatggatcagtactacttgatggcccttcctcag

SEQ ID NO: 169490 - DNA, 297 bp, Glycine max
gccccactcaaccaccacacctctcctcgttcacgctacccctttctgctcttcttctacctttcaagttttaaaagtataaagatggcagagacattcctatttacctcagagtcggtgaacgagggacaccctgacaagctctgcgaccaaatctccgatgctgtcctcgacgcttgcctcgagcaggacccagacagcaaagttgcctgcgaaacatgcaccaaaaccaacttggtcatggtcttcggagaaatcacgaccaaggccaacgttgactacgagaagatagtgcgt

SEQ ID NO: 169491 - DNA, 296 bp, Glycine max
tgcaattccttcttctcccagaatcggtcactaaatccgcaatcatgaagctcgataccaccggtctcgaatcgtttcccacactgcttgcgcctcaaaacgacgtcgttggagaactctccgccgctccatccttcgaccttccgaattccaacgatttcgatgggtttgtgaaagaagctattcagatggtgaagcccgcgaagggtactacgactcttgcttttatatttaaggagggtgttatggtagctgctgattctcgagctagcatgggaggatatatatcatcgcag

SEQ ID NO: 169492 - DNA, 296 bp, Glycine max
  unsure (1)..(296): unsure at all n locations
aacgctctctcactcacaaacacacactgaactaaaaaacatcaaaagagacatggctgagcaaaccttcatcatgatcaagcctgatggcgtccaaagaggccttattggcgagatcattagcagatttgagaagaaaggtttctacttgaaaggtttgaaacttgttactgtggaccgtccttttgctgagaagcactatgctgatttgtctgccaagcctttctttagtggtttggtggattacattatctctggccctgttgttgccatgatctggganggcaagaatgttg

SEQ ID NO: 169493 - DNA, 292 bp, Glycine max
gcttctcttcctccctggaagaacaagaagagtcaccgctacgacgccgttcgtgcttttttgaggtgccacagtcatgtttgggcgtggtggaccaaggaggagtgacaactccaaatattatgatattctcggggtttccaaaaatgccagtgaagatgaaatcaagaaggcctatagaaaggctgctatgaagaaccatccagataagggaggagatcctgaaaagttcaaggagttaggtcaagcatatgaagttttaagtgatcctgagaagaaagacctgtatgac

SEQ ID NO: 169494 - DNA, 293 bp, Glycine max
cggatactgaaagacttgcctcccagactcaagctgaaagtggagcgcgggtttctttacaccatgccgcctattagttggtctgatatatcttactataaggatcagattctacccttgatacaaaagtacaaagttgttcatttaaatagaactgatgctcggttagccaataatggtcaaccgctggagattcagaagctgcgttgccgagttaattttagtggtctgagatttacttctcagatagaggagttgggcagaaaggtgatcaggcttcttaggcaaaaggg

SEQ ID NO: 169495 - DNA, 296 bp, Glycine max
cacaaacataatcatcaagcacacacaatctcactactcgaaacagatcgaatagaaatatatatagttagagagagagaatattatacagagagataagtgcaataatggagtgttgtaagagggtatatgagtggttatgcaattcaaaatcatacttgataatattgagcttgcaatttggctccgccggcatgtaccttatcaccatggatgctctcaataagggcatgagtcattatgtgtttgtcgtttaccgcaatgtcatcgccactattgctcttggccctttcgca

SEQ ID NO: 169496 - DNA, 291 bp, Glycine max
caagatttgaagggaaggttgactgttcacttccaaggggaggagggtattgatgcaggtgggcttacaagggaatggtatcaattattgtccagagttatttttgataaaggagcactgctttttactacagtgggcaatgaatcaacatttcagcctaaccctaactctgtttatcaaacagagcatttatcttatttcaaatttgttggtagagtggttggcaaagcattatttgatggtcaactctggatgttcattttactcggtcattctacaagcacattcttg

SEQ ID NO: 169497 - DNA, 289 bp, Glycine max
catccatcggcagttagagacagagagagagagaaacaaaaccctaattggtgagtggcgaaaatggcgcagctggcggcggcagcagcagcaacaggagcagcagtaatcgagcaagtgcagtgcttcgggcggaagaagacagcgagagcagtgacctactgcaagcgtggtcgaggcctcatcaagatcaatggctgcccgatcgagctggtggagccggagatcctccgtttcaaggccttcgagccaatcctcctcctcagccgccaccgcttcgccggcgtgg

SEQ ID NO: 169498 - DNA, 292 bp, Glycine max
gaaaacttgggagggttttataggggcatctgttaccaccatcatctctgcatttatgcttgctaacatcatgggtcgctctcagtggctaacgtgtccaaggaaggatttgtcaactggttggcttcactgtgatcctggtccactgtttaagccagaatcttatcccttacctggatgtatttctcactggttttcttggaaagagatatcaatcctaccaattcaatggcattctttatgtctaggcttgtttgcttcaattattgcaccttttggaggcttctttgca

SEQ ID NO: 169499 - DNA, 294 bp, Glycine max
aatgcaaataccacaaagacttatgctacaagaaccatatttttcttgaaagatgatggaactttgacaccattggccattgagttaagtaagccacatcctcagggtgaagaatatggtcctgttagcgaagtctacgtgcctgccagcgaaggagtggaagcttatatttggttactggcaaaggcttatgttgttgtgaatgatgcatgctaccatcaaatcattagccattggctaagcactcatgcaattgttgagccatttgtcatagcaacaaacaggcaactgagt

SEQ ID NO: 169500 - DNA, 293 bp, Glycine max
ctgcttcttcctctttttttcatttctcttcaacttcctcttctttcaattctcttcagtctctctccgccttcccaaaatggtgaaccctagatgcttcctcgacgtcagcatcggcggcgagttagaaggccggatcgttgtggagctcttccacgacgtcgttcccaaaactgccgagaatttccgcgccctctgcaccggcgaaaagggcatcggtcccaacaccggcgtccccctccactacaaagtcattcattaattctacaagctggttttgtagggttgagtta

SEQ ID NO: 169501 - DNA, 294 bp, Glycine max
ctggaattggccctggtgtctatgacatccactccccaagaataccaccaactgaagaaatcgctgacagaatcaataagatgcttgcagtgctcgagaagaacatcttgtgggtcaaccctgactgtggtctcaagacccgcaagtacactgaagtgaagccagccctcacaaacatggttgccgcagcaaaactcatccgtaacgaacttgccaagtgaatggtataagaaagtagaatctacaagttcattggttctgcttttataatacaccaaagaaaaattttctata

SEQ ID NO: 169502 - DNA, 291 bp, Glycine max
caagcaaaaagaaagaatcccaggcgaggagaaagatggaggggaaggagcaggatgtgtcgttgggagcgaacaagttccccgagagacagccaattgggacggcggcgcagagccaagacgacggcaaggactaccaggagccggcgccggcgccgctggttgacccgacggagtttacgtcatggtcgttttacagagcagggatagcagagtttgtggccacttttctgtttctctacatcactgtcttaaccgttatgggagtcgccggggctaagtctaagtgta

SEQ ID NO: 169503 - DNA, 297 bp, Glycine max
ctaaactccagtggatccgaagccaccttcagctctgagtgtagaatccaaatcctgaacctcaacaacctccggcatcacgatctgctggatcatcatctgtgcaaccctgtcaccaacttttacttcaaaatcagtgtcttaatggttgaacagtatcacccctacgggacccctgcaatccgcgtcgatcacgcccgctcccacatcgatcgagtgcttccatgataatccagatcgcggtgctgaaaaacaaaacaaaacggggagatttaaagttagcccctcggctgggaa

SEQ ID NO: 169504 - DNA, 292 bp, Glycine max
atatattccattctctctgtgtatttccctacctctcccttcaagatgcagatcttcgtcaagaccctcaccggcaagaccatcacccttgaggtggaaagctctgacaccatcgacaacgtcaaggccaagatccaggacaaggaaggaatccccccggaccagcaacgtctcattttcgccggaaagcaacttgaggacggccgtacccttgctgactacaacattcagaaggagagtactcttcacctcgtcctccgtctccgtggtggcatgcagatcttcgttaaga

SEQ ID NO: 169505 - DNA, 285 bp, Glycine max
ggtgcattgtgcatacaacagcttgtggatgggcaatttcatccacccagattgggatcatgttccaatctactcatccttgtgctgccttccatgctgcctcaagagccatatctggtggccccatttacatcagtgacacagttgggaaccacaactttgagctgcttaagaccttggccttgccagatgggtccatcctcagatgtgagcactatgcactcccaaccagggactgtctctttgctgaccctctccaggatggcaaaacaatgctcaagatat

SEQ ID NO: 169506 - DNA, 280 bp, Glycine max
cttattcctctttcctcttcattctcttcccaaataaaactatactcagtcttcagtgatcgtcaacacttaagacccaagtgtaaatgaagaaagtggtggtgaagttgaatttgcacgatgacaaagcaaagcaaaaggccatgaagtcggactctagcctagcaggcatcgattctatctccatggacatgaaggagaagaaactgactgtcgtgggtgaaatagaccctgtcgatgtggtgagcaaattgagaaaaacttggcacccagaaattgt

SEQ ID NO: 169507 - DNA, 282 bp, Glycine max
ctctctctcaccaaagccttcctagaacgacaaacaaaaagaagagcaattttccctcaccaacgaagcagaagcaaacaatggccgatcaacttaccgatgaacagatctccgagttcaaggaagccttcagcttgttcgacaaggacggcgatggttgcatcccaaccaaggagcttggaactgttatgcgttcattggggcaaaacccacatgcggcagacctccagggcttgctcaatgaagtggatgctgatgggaatggtgccatatgacttccct

SEQ ID NO: 169508 - DNA, 277 bp, Glycine max
tctggctaaccaaccctgacactccttcttctccgcttcctcttcgatcatcgcttcagaatgccgccgaagttcgacccctcccagatcgtcgacgtcttcgtacgcgtcaccggcggtgaggtcggcgcggcgagttccctcgccccgaagatcggtcccctcggtctctcccccaagaagatcggagaagatatcgccaaggaaaccgccaaggactggaagggcctccgcgtcaccgtcaagctcaccgtgcagaaccgtcaggccaaggtca

SEQ ID NO: 169509 - DNA, 272 bp, Glycine max
gcgtctttcaaggagagagagaaaatatagcacgccgaaaaacacgctcccacttgtaacttagtataacgacctccaacaactgatacatacaatctcctttccttcgtgttggacaacaacaatggcggcgaaatctagttcgagttcgacaacaaacgtggtgactctgaaggcggcgtgggttctcccgcagcgcacgcagaacatccgtgaggtgtacgaggtggggcggaagttggggcagggtcaattcgggactaccttcgagt

SEQ ID NO: 169510 - DNA, 287 bp, Glycine max
ctcgagccgctaaagtaagcagcgttgcaacgctgtttcctttctgtttcttttcttctaccttccgacgagatctacaacgttgttgttgtttagatcttgaatagtgtattggtgttcggtgagatggaagaaaggaagcaatcacgttatgtgaagttgactaaagatcagacacctctcgaagacattacccctggcgaactcaaccagccaattcaggttcctcagttggacgttcgcaagtgccctgaatgtagacagccgctacctgaaagctatgctcc

SEQ ID NO: 169511 - DNA, 283 bp, Glycine max
gacacattatggccacaccagcatccatcaccaatgtcactgtggagttccttcaattccccgcggtggtgacacctcctgcctctaccaaatcctatttccttggtggcgcaggggtgagagggttgaatattgaagaagaatttgtaaagttcacgggaataggtgtttatttggaagacaaggccgtgtcatcactcggtgccaaatggaagggcaaaagtgcagctgaattgctggactcacttgacttctacagagatatcatcaaaggtccgtttga

SEQ ID NO: 169512 - DNA, 281 bp, Glycine max
gtggtcttgttaccatgcctttcatcattgcaaatgaggcacttgcgagggtggcaagtctgggccttttgcccaacatgatactgtatttgatggggacctacaggcttcaccttgcccaagcaacccagatacttctctggtcccatgctaccagcaatttcacacctgtggtgggtgctttcattgctgattcttatctgggtcgattcctcgctgttgggttgggttcggccatcacttttctgggaatgacactgctgtggttaacagctatgatc

SEQ ID NO: 169513 - DNA, 197 bp, Glycine max
aatgaagcctgaggaaattgacatgggagagaatccagggctagtcacatacatgaggactccaatacaagctgtggtttctcctaggctcccctcacatttatacaaacgtgtgcctgctgagatctaatctttcttttctttcccttggtatactctttgttgcattaagaaaaatgccttgtggcactactttt

SEQ ID NO: 169514 - DNA, 274 bp, Glycine max
gcaaagttatagatataacatactcaaagggccgtggcaagaaagggttggaggaagccttggataggatatgtgcggaagcaatgctgcaattagtgatggctacactacccttgtgttgtctgatagagccttctcaaggaaacgtgttgctgtgagctccctgctggctgttggtgctgtccatcaacatctagtgaaaacacttgagcgtactagagttgccttagtaatagaatctgctgagccacgtgaagtgcaacatttctgcaca

SEQ ID NO: 169515 - DNA, 271 bp, Glycine max
gggcagtgccggcgcgcgctgaagtttgctaggttcatgagcaggttcgggaagagttaccgaagcgaggaagagatgagggagaggtacgagatattctcgcaaaacctcaggttcatccgctcccacaacaagaaccgcttgccctacactctctctgttaatcattttgctgattggacttgggaggagttcaaaagacacagactaggcgctgcccaaaattgctctgccactcttaacggcaaccacaagctcactgatgctgttc

SEQ ID NO: 169516 - DNA, 279 bp, Glycine max
ttcggcacgacgactcgagatgcgaaactacagtcagcattcgtaaaagatgagtagcatcggtacaggttacgatctatcggtcaccactttctcccctgatggccgcgttttccagatcgagtatgccgctaaagccgtcgacaacagcgggactgttattgggatcaagtgcaaagatggggttgtgttgggcgttgagaagcttattccgtcgaaaatgatgcttccgggttccaatagaagaatacactccgttcatcgtcactctgggatggc

SEQ ID NO: 169517 - DNA, 263 bp, Glycine max
ctcttcttctcttgcggctagggttttagcgcacttcttctagatttaaggaagatgggtaaggaaaaggttcacatcagtattgtggtcattggccatgtcgactctgggaaatccactaccactggtcacctgatttacaagcttggaggcattgacaagcgtgttattgagaggtttgagaaggaagctgctgagatgaacaagaggtctttcaagtatgcctgggtgctggacaaacttaaggctgagcgtgaaagagg

SEQ ID NO: 169518 - DNA, 267 bp, Glycine max
cacacaccacacacatagtagctattatactctctagagtaattgcggaatctgctagaattttctaataatggcgaaagacgttgagcaggtcacagagcaaggtgaatactccgcgaaggactaccatgaccctcctccggcaccgttgatcgacccagatgagctcacaaagtggtccttgtacagagccgccatagctgagttcatagcaacactcctttttctttacatcaccgtgttgaccattattggctacaagagaca

SEQ ID NO: 169519 - DNA, 270 bp, Glycine max
cggctcgagcttcgagtcaaaggctgatgctggagcatctaagacatttccccagcaagctggcaccatccgcaaaaacggttacattgtcatcaagaacaggccatgcaaggttgtggaggtttcaacttccaaaactggcaagcatggacacgcaaagtgtcactttgttgcaattgacatcttcactgggaaaaagcttgaggatattgtcccatcttcccataactgtgatgttccccatgttaatcgcattgactaccagctcat

SEQ ID NO: 169520 - DNA, 269 bp, Glycine max
ctggaagttggaagcgagactgtgatagacaaaagcaaatccatcaagacattcctgatgcagatcttcgagaaatatggaaatactgacattgagggtgttgattcaactaatgcatgctatggaggaactgctgctctgtttaattgtgtcaattgggtggagagcaattcatgggatggacgctatggacttgttgtctgcactgacagtgcagtttatgctgaagggcctgctcgacctactggaggagctgctgctattgccat

SEQ ID NO: 169521 - DNA, 272 bp, Glycine max
aaacaggcaactgagtgtggttcaccctatttacaaacttctgtttcctcactaccgtgacaccatgaatattaattcacttgcccggaaagccctggtcaatgcagatggtattatagagaaaacattcttgtggggtaggtactctatggaaatgtccgctgtcatttacaaggactgggttttcactgatcaagcattacctaatgatcttgtaaagagaggagttgctgttaaggacccatctgctccccatggagttcgtcttttga

SEQ ID NO: 169522 - DNA, 282 bp, Glycine max
gctcaacaccgcctccgctgccgccgccgccgctccctccccgccgccggccaatctcgacgccggatcgcgtggcctcatgattccctctcccagcgagtcacgcaagatcgagttgtactcccccgccttctacgccgcctgcaccgccggtggaatcctcagctgtggcctcactcacatgaccgtcactcctcttgacctagtcaagtgtaatatgcagattgaccctgctaagtacaagagcatctcgtctggttttggagttttgcttaaggagca

SEQ ID NO: 169523 - DNA, 281 bp, Glycine max
tccacagacttcttctgataaaaataccacattgggtctatcagtactaaggaactttgatgtttatgctaaaaaagattggtactggattggagctgctgctcttcttggtttcacagttctgtacaacgttctcttcacccttgcgcttatgtaccttaaccctcttggaaagacacaagcaattatttctgaggaagatgcaagtgaaatggagtctggaggagacaccaatgaagaacccagacttgtaaggcccccatcaaacagagaatcaatgc

SEQ ID NO: 169524 - DNA, 275 bp, Glycine max
cattaatctccgatccgaaaccgaatggggattctgtacgcgctggttggtcgtggatcggtggtgctggcggagttcagcggcaccaccaccaacgccagcgcaatcgcgcgtcagatccttgaaaaaatccccggcaacaacgacacgcacgtttcttactctcaggatcgctacatcttccatgttaaacgcaccgatggactcaccgttctctgcatggccgacgacaccgccggaaggcgaattccttttgcgtttcttgaggatattca

SEQ ID NO: 169525 - DNA, 266 bp, Glycine max
cgggaaaaaatggtgtcgctgaaactgcagaagcggctggccgcaagcgtgctcaagtgtggcagaggaaaggtgtggcttgaccccaatgaagtcaacgaaatctccatggccaattctcggcaaaacatcaggaagttggttaaggatgggtttatcatcaggaagccaaccaagattcactcacgctcgcgtgctcgtaggatgaaggaggcaaagaagaagggccggcactctggttatggtaagagaaagggtacaaggga

SEQ ID NO: 169526 - DNA, 263 bp, Glycine max
cctagctctgtcgttccgtcgttgacgatggcgtttcgggtgcgaaccctgacctccgctctctctttcttctctctctcttgtccatcgcttccgccaatgtcttcttcgaagagcgtttcgatgacgggtgggaaaatcgatgggttaaatcagattggaaaaaagatgagaacgtggctggggagtggaaccacacctctggtcaatggaatggagacgctaatgacaaaggtattcaaaccagtgaggattacagattc

SEQ ID NO: 169527 - DNA, 262 bp, Glycine max
gttaattactatgacattagaaagaaatgtgtgggagttctgtgttatgacttctctgtgatggaggatttcttaaacgagaagacagtgagagatgctttaggtgttggggacttggacttcgtttcatgcagtagcacagtgtatagtgctatgatgcaagactggatgagaaatctggaagttggtattcccacacttcttgaggaaggaatcaaggtgcttgtgtatgctggagaagaagatctcatatgcaattggc

SEQ ID NO: 169528 - DNA, 268 bp, Glycine max
atctccatctaatagtgttaatttgtctttctctatctctatcggtcatgggtgcttttgcttttgatgaggaaaactcctccaccgtggctccggcaatactctacaaagctctgacaaaagatgctgacactatcatcccaaagattattggggccatccaaactattgaaatcgttgaaggaaatggaggacccggaaccgtcaagaagataacagctagtgaaggtgaccaaacctctttcgtgctgcaaaaagtggatgcaat

SEQ ID NO: 169529 - DNA, 278 bp, Glycine max
gttgagaagagagaatggctgtggcgtcgtcatcatcccttatcacgttgaaggtgaaaccttgcattttcgggtctcctcggagatccgcggtggttcggaattgtgcgaagtcaacggcggggacaatatcgacgagttggagcctggacagctggagggcgaagaaggcgcttcagcttccggagtacccagatgcgaatgaattggacctagtcctccaaaccctctcttcttttcccccaatcgtcttcgccggcgaggcgaggaatctggag

SEQ ID NO: 169530 - DNA, 279 bp, Glycine max
atcaatactcataacttctcttttctttcattctctctcttttattcttatcatcacaatgccttcaattcccgtagagcccctcctggctccgaacccggatcgcttctgcatgttcccaatccaatacccccaaatctgggaaatgtacaagaaagccgaagcctcgttctggacggcggaggatgtggacctctcccaggacctccgccactgggactccctcaccgacggcgagcgtcacttcgtcacccacgtcctcgccttcttcgccgcctc

SEQ ID NO: 169531 - DNA, 264 bp, Glycine max
gttgtttcggagttagggaccttacgcagccatggccactgctacgaatgccgccgccgccccaccacgccagctctcccagaaggaagctgacatccagatgatgttggccgccgacgtccacctcggcaccaagaactgcgacttcccaatggaacgttacatcttcaagcgccgcaacgacgggatttacattattaaccttgggaagacgtgggagaagcttcagctagcagctagggttatagttggaattgagaaccc

SEQ ID NO: 169532 - DNA, 272 bp, Glycine max
gacttaacaacagcacaaagcgggttactgtctgttcaagctaccatctctctctctctttcttagtgcctccttgccagaagttaaaatggcccaagaaactttcctattcacatctgaatcagtgaacgaggggcaccctgacaaactctgtgaccagatctccgatgctgtgctcgatgcatgcttggagcaggaccctgacagcaaggttgcctgtgaaacctgcaccaagaccaacatggtgatggttttcggagagatcacaacca

SEQ ID NO: 169533 - DNA, 273 bp, Glycine max
tttcctccttctgcaaccatcaatgtcggcaatcgcggctccccaacaagatgcaggtcctccagcccgccgccaagatgctcgtcgagctctccaagtcccaggactccgccgccggcgacggcaccaccaccgtcgtcgtcatcgctggcgccctcctcgagcagtgcctcctcctcctttcccacggcatccaccccaccgtcgtctccgacgccctccacaaggctgccgtcaaggccgtcgacgttctcaccgccatggccgtccccg

SEQ ID NO: 169534 - DNA, 261 bp, Glycine max
caaaattcaggaaaaaaaaaaaaaacatggtggtaaaggtgtatggtccaacctatggatcccccaagagggtcctggtgtgtctgattgagaaggaaattgagtttgaaacagtgcatgttgatctcttcaagggagagattaaggaacctgagttccttaagctgcagccatttggatcccttcctgttattcaagacggtgattatactctctatgaatctcgtgcaataatcagatacttagctgagaagtataaag

SEQ ID NO: 169535 - DNA, 262 bp, Glycine max
tgaggttgctgcagcaggtgtctaatgtgtaccaatctatgaagattgaaaccttatcggggatgatccccttctttgatttctctcaagtggaaaaggtttcggtagatgctgttaagcagaagtttgtatcgatgagagttgaccacatgaaaaatgctgtgattttttgcaaaaagagtcttgagtctgatggcttaagggatcacttggccaattttgctgaacaattaaataaagcaagacagatgatttatcctcc

SEQ ID NO: 169536 - DNA, 277 bp, Glycine max
ataaaattctctcttcctttttgggttctcctattccaagcttcaatcttttctctcttctcacagccttcttcactcacaggaggtgaagatgtcgactccggctaggaagagactgatgagggattttaaaagattgcaacaagatcctcctgctggcatcagtggggctccccaagacaataatattatgctttggaatgctgttatctttggcccagatgacaccccttgggatggaggtacgcttaagttgacacttcagtttacagaggat

SEQ ID NO: 169537 - DNA, 276 bp, Glycine max
cctttttgtggcggatgttaacacccagttgaagaacaagaacatcaccactgatatcaaagtggacaccggttccaatcttttcacaactatcactgtcaatgagcctgctcctggtctcaagactatttttagctttagagttcctgatcaaaggtctggaaaggtggaagtccagtacttgcatgactatgctggaataagcaccagtgtgggtttaacagcaaacccaattgtcaacttctccggcgttgtaggaactaatgtacttgccct

SEQ ID NO: 169538 - DNA, 273 bp, Glycine max
ttcacactggtctttgcttctcgttactcatttctcacctaactttctattcttctcagtctcagatcagaaccttggccatggcagcgttccagaagatcaacgtcgccaaccccatcgtcgagatggacggagatgaaatgactcagggttatctggaagtcaatcaaggacaagctcattttgcccttcttggagttggacatcaagtattatgacttaggccttccttaccgtgatgagaccgatgataaagttacaattgaaagtgcg

SEQ ID NO: 169539 - DNA, 269 bp, Glycine max
cgtctctcacacacaccactttatatacgcacacgagagtcggaagcactactctcttcgccgcttgctctctctctctcgctctttcagctttgactttggtggaaactaaagactagtcaaaatggtgaagttcacagctgaagagctgcgtcgcattatggactataagcataatatccgtaatatgtctgtcattgctcatgttgatcacggaaaatcaaccctgactgattctcttgtggctgctgctggtattattgctcaag

SEQ ID NO: 169540 - DNA, 259 bp, Glycine max
tgttaatttgtctttctctatctctatcggtcatgggtgcttttgcttttgatgaggaaaactcctccaccgtggctccggcaacactctacaaagctctgacaaaagatgctgacactatcatcccaaagattattggggccatccaaactattgaaatcgttgaaggaaatggaggacccggaaccgtcaagaagataacagctagtgaaggtgaccaaaccagtttcgtgctgcaaaaagtggatgcaattgacga

SEQ ID NO: 169541 - DNA, 260 bp, Glycine max
ataacaacaatcctcacatgatgtctactgaaatggttgcatgtattgcaattgaggctatctccatattagagaagatgcattctagaggatatgtgcacggtgatgtaaaacctgagaactttttgctgggaccccctggaactcctgatgaaaagaagttgtttctggttgatcttggattagcaactcggtggcgtgatagttctactggccttcatgttgactatgatcaacgtccagatgtttttaggggcaca

SEQ ID NO: 169542 - DNA, 260 bp, Glycine max
cctttttcaacttcgcggtgtgagtgagacggagagtgctaagcaatcgtcttctcttctcggagcttggctttgcttatcgattctctctcctctcgtttctctaattccaaggtttgtaaaagatggcagatgccgaggatattcaaccccttgtttgcgacaatggaactggaatggtcaaggcaggatttgctggtgacgatgctcctagggctgtctttcccagtattgttggccgacctcgacatactggtgtt

SEQ ID NO: 169543 - DNA, 277 bp, Glycine max
cacacttcgagcttccaaggaaggaagaagatgggtggcgtgacctcttcaatggcggcgaactaggcgttcttccctccgtccccggcgtcctacaaggtgctgaaggaggaggcgacggggctgctgctcatggagccgttcccgcaccgcgagaacgtggagattcttcggttcccgaaccgccgcggcacggagatcgtggccatgtacgtgcggcaccccatggccaaatccaccttgctctactcgcacgggaacgccgccgacattggcc

SEQ ID NO: 169544 - DNA, 265 bp, Glycine max
actcgagccgattcggctcgagaattagttcattctcattgcgcagctccctacctctccttgccagatgcagatcttcgtcacagacgctcaccggaaagaccatcaaccttgaggtggaaagccctgacaccatcgacaacgtcaaggccaagatccaggacaaggaaggaattcccccggatcagcaacgtctcatcttcgccggaaagcagctcgaggacggccgtaccctcgccgactacaacatccagaaggagtcaac

SEQ ID NO: 169545 - DNA, 274 bp, Glycine max
gtggtgccttatcgctgtggttatcatcttcttcttcctctttcttagatctcttctttctctacgccgcacgccgaaaccatggccggaaaaggagagggtcctgctatcggaatcgatctcggaaccacctactcttgcgtcggtgtgtggcaacatgaccgcgttgaaatcatcgccaacgaccaagggaacagaaccacgccgtcttacgtcggattcactgacaccgagcgtctcatcggtgatgcggccaagaatcaagtcgccatga

SEQ ID NO: 169546 - DNA, 269 bp, Glycine max
gaatattgagtccaattctccttcgctttccctctttatctgaaaggtatggagtgttttgacttctggaagagataatggtgcagtgcctagacggattaaagcatttgtgtgctgctctggtaaattgttgtgatgccgattcgtcaaagtcacctacaggtttagacaatccagaagttcttgcaagagaaacagtgtttagtgtaagtgagattgaagcgctgtatgaattgttcaagaagatcagcagtgcagtgattgatgac

SEQ ID NO: 169547 - DNA, 260 bp, Glycine max
agggtccaaacacttgaaaattattaccatcattcatattcatcaacgacccctcttctgtgcccacttccaaatcttctcctctcgctatgggttgcggctcctcccttccagataggggctcaaggcagttgggtcgacccaattcagagaatggtggagggcaggacgccaagaatctgagggtcaagcttgttctcttaggtgattctggtgttggtaaaagctgtattgttctacgatttgttcgtggtcagttt

SEQ ID NO: 169548 - DNA, 260 bp, Glycine max
  unsure (1)..(260): unsure at all n locations
agcaaaactacggagaaaaagttcttgttcagtttgaagattttgcaaaccacaatgcttttgagttgcttgcaaaatatggcacaactcatcttgttttcaacgatgatattcaggggactgcatctgttgttcttgctggggttgtggcagccttgaagctcattggaggtactctggctgaccacacattcttgtttcttggtgctggagaggcaggaactggaatagcagaactaatagctcttgagnatgtcaag

SEQ ID NO: 169549 - DNA, 264 bp, Glycine max
tctcaccaaattcttattagaacgaaaaaagaaaagaaaagaaaaaagagcgatttttccctcaccaaagaagaaccaaaacaatggcggatcaactcaccgttgaacagatctccgagttcaaggaagccttcagcttgttcgataaggacggcgatggttgcatcacaaccaaggagcttggaactgttatgcgttcattggggcaaaacccaactgaggcagaactccaggacatgatcaatgaagtggatgctgatggga

SEQ ID NO: 169550 - DNA, 268 bp, Glycine max
cttaatttcctcactcacaaggaacaccaatgacaaagctattcaatttcctcccattcctcttcctcaacatcttcatccaaacaatttcagcccaagtagcaccggcaccagcgggacccaccaacatcacccaagtgcttgagaaagcaggacaattcacaaccttcatcaaactcctcaaagcctcacaaatagctgatagaatcaattcacagctaaacaactcaaaccaaggcctaaccgtgtttgcacccactgataatgc

SEQ ID NO: 169551 - DNA, 274 bp, Glycine max
cttatctatcttcacctccatcttttaacagttcccctcgaaacttctgaagatgggtggcagtgcattcggacgcttggatgattctttcagtttaacctcaatcaaggcctatattgctgagttccattcaaccttgctctttgtttttgccggtgttggttcagccatagcctatggtaagttgacatcagatgcagcacttgatcctgctgggttactggcagttgctatttgccacggttttgcactctttgttgcagtttctgttggt

SEQ ID NO: 169552 - DNA, 270 bp, Glycine max
attctcacactacttactctctttctctctctaaagggtatcccttgctctcttccaacttccaagatgtgacgattatatcatgcagctgcatctgtaacatgacaagactagatgcagctaaagtatcagatgctttgctagagagaggccaaaatcgtgtcatagatgcttcacttacacttattcgagaaagagcaaagcttaagggagaacttgtgcgtgctttgggaggtgctaaagcaacttcaactttcttggagttccttt

SEQ ID NO: 169553 - DNA, 270 bp, Glycine max
gatggcacgcttgtcactgctcattttcgcgttctgcgccgtcgccgtcgccgtcgcgggctcctccttcgatgatgccaaccctatccgtttagcgtcggacttggagtcgcacgtgctggacgtgatcggacagagccgccacgctctctccttcgcccgcttcgctcgccgccacggcaagcgctaccgttccgtcgacgagatccgcaaccgcttccggatcttctctgataatcttaaactcatcagatccaccaacaggaggtc

SEQ ID NO: 169554 - DNA, 269 bp, Glycine max
cttctgaaagatctcattgttcagtgtatgcttagactgaaagaaccttcagtcctattgagatgtcggaaagatgacctgcacttggtagagcatgtgctggattcatctgcacaggactatgctgagaaagcaaatgttgatcacccagagatcattgttgacaaccaagtttatcttccacctggacccagtcatcacaattctcatgatctctactgctctggtggggaggtgttggcttctcgtgatggaaagattgtgtgcga

SEQ ID NO: 169555 - DNA, 270 bp, Glycine max
tttcgggagaaaaagcaatccactcagagagctagaagaattcaacgatgcctcgctatgatgataaatacggcaatacccgcctctatgtggggcacttatcttcgaggactcgttcccgggatctggagcgtgccttcagcagatatggaagagttcggggtgtggatatgaagaatgatttcgcctttgttgattttagtgatcctcgagatgctgatgatgcaagatataacttggatggtcgggatgttgatggaagtcgtatta

SEQ ID NO: 169556 - DNA, 269 bp, Glycine max
gagggagagtgttgacgctccatcaagatgggtatttctagggattccatgcacaagaggcgtgccactggtggcaagaagaaggcatggagaaagaagagaaagtatgagcttgggcgtcaggccgcaaacaccaagttatcaagcaacaaaactatccggaggattcgtgttcgaggtggcaatgttaaatcgagggcattgaggttggataccggcaattactcatggggtagtgaagcagttactcgcaagactcgtattctaga

SEQ ID NO: 169557 - DNA, 267 bp, Glycine max
atccagacgcgttggcaaaggcattcgtggagcactactacagcaccttcgacaccaacaggaacggcttagcgaatctctaccaggagggttccatgctcactttcgaagggcagaagatccaaggcgcttccaacatcgttgccaagctcacctccctcccttttcagcagtgccaccactcaatctccaccgtcgactgccagccctccggcgtcaacgccggcatgctcgtcttcgtcagcggaaaccttcagctcgccggcg

SEQ ID NO: 169558 - DNA, 270 bp, Glycine max
cttaaatcagaaatggaagcaatgcgtgattgtgaccctttatctcgctcgtcactggattgttaggaacactaggactgtaaaccgaactgggcatctaactggttacaagctagtacctggctcaaattgtttacctttagctggctcagaggccaagtttttgagaagggcagctttcttgaaacacaacctttgggttactccttatgcacgcgatgaaatgcatcctggaggagagttccctaatcaaaatccacgtgttggaga

SEQ ID NO: 169559 - DNA, 273 bp, Glycine max
actcgagccgaatcggctcgagagcaatttgcgagttgcaatgagacaacgaaaaggctccttactcagcttcttcgagtagatacgagttgagcaaaggcatcaatggcctcgacaaggttattcttcgcgacgcacgtggtagctccgctgaggtgtacttgtacggtgctcacgtgacttcatggaagaatgaccatgccgaggaattgctttttctcagtagtaaggctatctttaagcctccaaagccaattcgtggagggatcccaa

SEQ ID NO: 169560 - DNA, 265 bp, Glycine max
gcatcatggcctcgagagcagtgctattgttggctatgtgtgtgcttccggccatggttgtcgccattcgcccagcaaagtaccctttttgcgtgaagggtcgcgtctactgtgacccttgccgtgctggttttgagacctcagcaaccacctacattgccggtgctgacattatgttgcaatgcaagagcagggttagcaacgaggttgtgtacaccaagaaggggtacactgactcaactggagcatacacaatgtacgtgga

SEQ ID NO: 169561 - DNA, 138 bp, Glycine max
ttcgttgttgttgttctaaaacgtccacacattctccgtcgccacaacaacaatggctccgaagaaaggtgtgaaaggttccgttgtagcagcgaagaagaaggttcaggagaaggtgacgaatcctttgttcgagaa

SEQ ID NO: 169562 - DNA, 270 bp, Glycine max
caggaaaagaagctgtgtgcagttattcaattaccatcacagacattgctactatctgtttctgacaaagccttccgcttgattgggatgctttttcctggggatatggtcgtatttaagccgcaattgtcgagtcagcagcagcaacagcaccagcagatgcaaaaccaacagcaacatcttccgcagttgcaacaacagcagcagctacctcacatgcagcaacaacaacttcctcagctgcagcagcagcagcagcttcctcagctg

SEQ ID NO: 169563 - DNA, 264 bp, Glycine max
gcagcagcagcagcaacaggcgcggctttcacagcagcagtagccactgtggttcgagctccacctaaagatttcagactcgtcaagcaagaatgggccgctataagaatccaaactgctttccgcgccctcttggcaagaagggctttgagggcattgaagggagtggtgaggattcaagctcttgttcgggggagacaggtgaggaagcaggctgcggtgacattgaggtgcatgcaggccttggttcgtgttcaggcccga

SEQ ID NO: 169564 - DNA, 262 bp, Glycine max
gattcagccattctaataaatgagatgggggtcaatggagattgttatgatggtagaaacaaggaagttaacccagttcttggcgaaagctcagaatgggaaattcaatgggaggatcttgatattggtgagcgtattggtattggttcttatggtgaagtttatcgtgctgattgcaatggcactgaagttgctgtaaagaagtttctggaccaagatttctctggtgatgcgctagtcagttcaaatctgaagttgagat

SEQ ID NO: 169565 - DNA, 269 bp, Glycine max
cttctatgagacatatgggtttgtcattcaacatactcagtggcattgtctgcaagttggcaatgcacagagaccaaactatttgccaatggaggtttgcaagatagtggagggtcaaaggtactcgaaaaggcttaatgagaggcaaatcactaatttgctgagagttacatgccagcgtccttctgagagggagcgtgatatcatgcagacagtacaccacaacgcataccacgaagatccttatgctaaagaatttggaatcaaga

SEQ ID NO: 169566 - DNA, 266 bp, Glycine max
attctcacactacttactctctttctctctctaaagggttatcctttgctctcttccaacttccaagaaatgacgattatatcacgcagaggcatctgtaacatgccaagactagatgcagcaaaagtatatgctgctttgctagagaaaggccaaaatcgtgtcatagatgcttcacttacacttattcgagaaagagcaaagcttaagggagaacttgtgcgtgctttgggacgtgctaaagcaacttcaactttcttggagtt

SEQ ID NO: 169567 - DNA, 268 bp, Glycine max
cctcgctctatttctcagtctctgtgtttgcggctgaggattccgaacgagtgaccttcttcgtttctcgtaaagtttaagtaatcatgggtaaggaaaaggttcacatcaacattgtcgtcattggacatgtcgactctgggaagtcaactaccactggtcacttgatctacaagcttggaggtattgacaagcgtgtgattgagaggttcgagaaggaggctgccgagatgaacaagaggtcattcaagtatgcctgggtgctcga

SEQ ID NO: 169568 - DNA, 269 bp, Glycine max
ttcttcctctgcgcaggaattaggaatattcgacaggtagagtttcttcaatggctcctaaagttgataagaagaatgatccaaaggcccaggccttgaagactgctaaggcagttaagtcaggtgctacctttaagaagaaggtaaagaagatccgaacttctgtcactttccacaggccgaagaccttgaagaaggataggaaccccaagtaccctcgcattagcgccccgccgaggaacaagcttgatcattatcagatcctgaaa

SEQ ID NO: 169569 - DNA, 267 bp, Glycine max
ggaaggttgcttgtattggtgcctggcatcctgcaagagtttcattcactgttgccagggctggtcagaatggataccaccaccgaacagagttgaacaagaaggtttacaagcttggcaaagctggagatgaatctcactctgctcttactgagtttgataggaccgagaaagacattaccccaataggtggtttccctcactatggtgttgttaaggatgattatatcatggtcaagggatgctgcgttggtcccaagaaaaggg

SEQ ID NO: 169570 - DNA, 272 bp, Glycine max
gtactttcttgcgaaacagaagggcgaaggggcaaacacaacttttttgtttttttgtagagcgagagagaaaaaaatgttggggatcttcagcagttccgtggtgtcgccgccggaggagctggtggctgccggcagcagaacgccgtcgccgaagacgacggcggggaagctgctgaaccggttcgtggagaacaaggcgtcggcggtgtcgctgcaggtgggagaacacgtgcagttggcttacacgcaccacaacgagtcaccgtggc

SEQ ID NO: 169571 - DNA, 265 bp, Glycine max
cagaggtgtactctaaggaattaaaaggtgctatatctgccttggcctcacttcaaggccatctattaatagcatctggtccaaaaattactctgcacaagtggaatggcactgagttgaatggtattgcattttttgacgcaccgccattacatgttgtgagcttaaacattgtaaagaacttcatccttattggcgatatccataaaagcatatactttcttagttggaaagagcagggtgctcaattgagcttattagccaa

SEQ ID NO: 169572 - DNA, 265 bp, Glycine max
tggaagtctcagcatatcgtccgttcctgagaaagattttcatctcccatcaccagcagtagagattctcccttccaagacagttcacactgaaaaagataatggggagaatatagatcattttaagggtttagttagtgttgccgatattgttggattcagtggttcagagacaatatccttaaaacctgatggttatctgaaatcctggactagttccattgatcttgttagtgttcttaagcatgagattcgtgatggacaa

SEQ ID NO: 169573 - DNA, 264 bp, Glycine max
gatacagagagcactgttgatgatgatatcttggaagatgatgtggttcgcagcttgagaacaagcccaatccattcttcaagggatcgcacctctattgatgactttgagattataaaacctatcagtcgtggggcatttggaagggttttcttggctaaaaagagaacaactggtgatctttttgcaataaaggttctcaagaaggcagatatgatccgtaagaatgctgtggaaagtatattagcagaacgtgatatctta

SEQ ID NO: 169574 - DNA, 264 bp, Glycine max
ctttaactcatgctttttcccacttgcaaactccaaattcactctctgacagtttttgcagccaattaagaagaacttaacagacatataaacatagtgatcgtcatgtctacgcaaccaaagcttggtcggatttccagtatcagagaccgagttgaagacactctctctgctcaccgtaacgaactcatttctctcatctccaggtatgtggctcaggggaaagggattttgcaaccccataatttgattgatgaacttgac

SEQ ID NO: 169575 - DNA, 270 bp, Glycine max
ggaagtgagccagcagaggaaggactacgtagaccctccgccagcccccctcatcgacttggccgagattaagctctggtccttctacagagccctcatcgccgagtttatcgccacactcctcttcctctacgtcaccgtcgccaccgtcattggccacaaaaaacagaccggaccatgtgacggcgttggccttctcggcatcgcatgggccttcggtggcatgatctttgtcctcgtctactgcaccgccggcatttctggtggaca

SEQ ID NO: 169576 - DNA, 270 bp, Glycine max
cttaattcccagtttgctagaacacacatctcttctatgcaagggggaggacctactcctacgctggtcaaggccgaggttccgtggtctgctagaaggggaagtctatctgaaaaggatcgcgtcataaaaactgtgaaaggaatactgaataagttgactcctgaaaaatttgatatcctgaagggtcagttaatcgattctggcattacatcagctgacatcttaaaggatgtcatttcacttatttttgataaggctgttctagaa

SEQ ID NO: 169577 - DNA, 268 bp, Glycine max
gttcatttctacacatccctagctctgtcgttccgtcgttgacgatggcgtttcgggtgcgaaccctgacctccgctctctctttcttctctctctcttgtccatcgcttccgccaatgtcttcttcgaagagcgtttcgatgacgggtgggaaaatcgatgggttaaatcagattggaaaaaagatgagaacgtggctggggagtggaaccacacctctggtcaatggaatggagacgctaatgacaaaggtattcaaaccagtgag

SEQ ID NO: 169578 - DNA, 265 bp, Glycine max
ctctctgtgtatttccctacctctcccttcaagatgcagatcttcgtcaagaccctcaccggcaagaccatcacccttgaggtggaaagctctgacaccatcgacaacgtcaaggccaagatccaggacaaggaaggaatccccccggaccagcaacgtctcattttcgccggaaagcaacttgaggacggccgtacccttgctgactacaacattcagaaggagagtactcttcacctcgtcctccgtctccgtggtggcatgc

SEQ ID NO: 169579 - DNA, 268 bp, Glycine max
gttgttgattcaccatgctgtctggtgactggagaatacggttggactgcaaacatggaaaggatcatgaaagctcaagccctaagggacaacagcatggcaggatacatgtcaagcaagaagacaatggagatcaaccctgagaacccaatcatggaggagctcaggaagcgtgcggatgctgacaagaacgacaaatccgtgaaggaccttgttctgttgctgttcgagactgctcttctcacttctggtttcagccttgacgaac

SEQ ID NO: 169580 - DNA, 269 bp, Glycine max
gttgagaagaaagaccccaccggagccaaggtcacaaaggctgccgccaagaagaagtgaatgcattttggcaattttgctagcacatgtgatcatcaacgtggtttcaaaaaaacttgttcctttacagtagtttatctttgcagagtcttaggtgtttgttttaccagttatattttgaagtgtccgccgatttcatgtagccgtagccttcaaaactgggttcttgatcggcggtaacattttcgttgctgtttgtttttgatgag

SEQ ID NO: 169581 - DNA, 268 bp, Glycine max
cgagatcgtgaatgaagagattgacagcgcgcgcgagaatttggagtggaagctgacgatggagaacggattcgctcgcatggacgacgaggttaatcgcaggagccagagcaaccagaccttcacctgcaggtgcgagctccagactccccactgcgacgccgtcggatccaccgccgtcgtcgccatcgtcacgccggacaaactcgtcgtttccaactgcggcgactcccgcgccgtcctctgccggaaaggcgtagcaatccct

SEQ ID NO: 169582 - DNA, 264 bp, Glycine max
caagaatggcacttcgttgcttggtgatgtccctttctgttctcttcactcttggtcttgcgagagaaagccatgccagagacgaagatttttggcatgctgtttggccaaacactcccattccaagttcattgcgagatcttctaaagcctggccctgcaagtgttgaaatcgatgatcaccctatgcaaactgaagaaacacagtacccgaaaaccttcttctataaagaagaccttcatccaggcaaaacaatgaaagtac

SEQ ID NO: 169583 - DNA, 263 bp, Glycine max
ccgaaatgggagagttgaaaatgtctttggggtttttgtagttgttatgagggtgaagctaaaattatgagatgtcttcctctgtcaccaatggcgatgattctctcactggccacatcatatctacaactattggaggcaaaaatggggaacccaaacagactattagttacatggctgaacgggttgtaggaactggatcatttggaattgttttccaggcaaaatgtttggaaactggggaagcagtggccattaaaaag

SEQ ID NO: 169584 - DNA, 254 bp, Glycine max
ctttttacttcccctatggctcgtcactccttgctcttagccctcctcctcttcgccgccgtcaccatcgccgcgatggcggtggccgcgtccgacgccgacgacatcctgatccgtcacgtggtgccagatgttggcgaaccagagaggaggacaacctgctgaacgccgagcaccacttcgcgagcttcaaggccaagttcgccatcacctacgccaccaaggaggagcacgatcatcgcttcggcgtcttc

SEQ ID NO: 169585 - DNA, 265 bp, Glycine max
aagaaaatgaaagtccttgttttctttgttgctatagttctagcagcatggcattgccatggctcagaccatgaccatgaccatggccacacctaccaaattttccctctgagaatgaaaactggccatggtggccactacattccggaggtatcatgccaaagttggaggcttggtgtggaagcacacaacgtcattgactggaaaaccgttcctcaagattgcgagggatatattgggaactacatgcttggcgaacaatata

SEQ ID NO: 169586 - DNA, 280 bp, Glycine max
agtaattggtggattccagcaatggccgtggttcatggcagttgggtcaagcttgatcaaagaggagaagggcaaggagcgagaagctcacatgctatagccatagtagcacagaaggtgtatgcatttggtggcgaattcgtgccacgtgtccccgttgataacaaacttcacgtgttcgacctagagactttgacttggtccgtggctgatgcatcaggggatgccccaccgccacgtgtcggtgtcacaatggccgtagtgggagaaaccatatatg

SEQ ID NO: 169587 - DNA, 273 bp, Glycine max
tagggtttatacaattttcgatggcttcttcagatgttgagtaccgttgctttgtcggtgggctcgcttgggccactgacgaccaagctctcgagagagccttctctcagtacggcgaaatcgttgaaacgaaggtctgtttgttgcaggcatcacatctgatctcacacgattcggattcggaattttctcgatccctttctgatctgtgatctctgatctgtttgcgttacttgatcttatgatacttgtgttactatatgattctcttat

SEQ ID NO: 169588 - DNA, 265 bp, Glycine max
gaagggcttttattttattttttacttagtagtacttctattaagtcttgcttccggattgcgttgtctctgtcatgatctggaaatacctctacgagagcatgagtaatttttgcttaactaataagttgtataatattgtgaagtaagcttgtttcttgctctcaaaaaaaaaaaaaaaaaaaaaaaaaaaaaaaaaaaaaaaaagaaaaaaaaaaaaagaagagacaaaagaaaaaaaagataatgagtaatgggggggggg

SEQ ID NO: 169589 - DNA, 270 bp, Glycine max
ctctgacacaagaattaagttgtgagatggagagaagtagtgaagaggagatgttaataacgaaaggtccatggacagagcaagaggattctcttctcttcaattacatcactgtccacggcgaaggtcactggaactctgtcgctcgctacacaggcatgcaaagcattaattatattcatcatcttaatcctagcttctttcttactcacactcatcacgttttcaatcacaggtctaaaacgaacgggcaaaagctgcagattaaga

SEQ ID NO: 169590 - DNA, 270 bp, Glycine max
  unsure (1)..(270): unsure at all n locations
aggaatccattttaaagctctcaacgccatctccagcagcatccttataaaaagcacttcgccccaaaaattctagcttcctctccttcatacacttcttccaacgctattaattacaaaattaacctctccgcttccctccgatccattcactccctccctcttaaaacctccttgcagatcaaatgctcccaaacagatgggaatggaagtacctgcaagaggacagtgcttcatgatctttatgagnaagaagggcagagtccatgg

SEQ ID NO: 169591 - DNA, 263 bp, Glycine max
ctgcttttggtggcatagtttcctgggagggagaaggggcaccttttggggaatctgaccagagcatttctcatcagattgttgacagggaagcacaaggacatcggttcctctcaagagaatacgttcaaccacagtgggtatatgactgtgtgaatgcacgaattattttgccaactgacaattatttggtgggaaggactcctccaccacatttgtcaccttttattaactacgatgaagaaggagcatacattcctgat

SEQ ID NO: 169592 - DNA, 269 bp, Glycine max
aaaggatcggtacattctcggcgagcaattgggttggggacagtttggtgtcataaggacatgttctgacaaattgacaggagaggttttggcctgcaaatcaattgctaaagataggttggttacttcggatgatttgaagagtgtcaaacttgagatagagataatggctaggctatccgggcaccccaatgttgtggatctcaaggcggtttatgaagaggaaggttttgttcacctggtgatggagctttgtgctggaggggagc

SEQ ID NO: 169593 - DNA, 284 bp, Glycine max
ctcgagccgaatcggctcgaggttgagaccaagacacactcgttcatatatctctctgctcttctcttctcttctacctctcaagtttttgaagtataaagatggcagagacattcctattcacctcggagtcagtgaacgagggacaccctgataagctctgcgaccaaatctccgatgctgtcctcgacgcttgcctcgaacaggacccagacagcaaggttgcctgcgaaacatgcaccaagaccaacttggtcatggtcttcggagagatcaccaccaag

SEQ ID NO: 169594 - DNA, 259 bp, Glycine max
gaacgttccagaccacatacagagatttctctagtgatcttcgttcttctgtggagatcttgttttttcatctcacttttcttctaattaaggaacaagctttccgcagttgaaaaccctagctagctagcttccaccaatttgaatcaccaatggctcgctctttctctaacgtcaaggttctctctgctcttgtggccgacggattctccaacactctcaccaggtaccacaatcgtttctcatctcaatttttatc

SEQ ID NO: 169595 - DNA, 265 bp, Glycine max
gtgacccctaaactcatggcattggacatttcctttaacaacttttctggcagcattccaccagcttttcagaaacttagaagactcacttggttgtatctccaaaacaattctatatctggagctattcctgacttcaaccttccaagtctcaagcatttgaacttgagcaataataacttgaatggctcaattccaaattccataaagacatttccttacacttcttttgtaggaaattctctcttatgtggtccacctctca

SEQ ID NO: 169596 - DNA, 257 bp, Glycine max
tcattgctaccctgttggtggataacaaaacttcagcaacccctttgcatctgatctaagaatcccaacttcaagtacccatttttagtcatttcatgatctaggtgatagatcgtgaaaatgacaaggatgacccatgattttggggatactatgcagaaagatgcagtgccggtggtgtcggccgatgtaatatttgcttctcttcggtttcctaattacaaaatcggagttaataatcagatcatggagacaaa

SEQ ID NO: 169597 - DNA, 262 bp, Glycine max
gtgccttctctgggaaggatcctaccaaggttgataggagtggtgcctacattgtgaggcaagctgcaaagagcattgttgcaaatggacttgctaggagggcaattgtgcaagtatcctatgccattggtgtgcctgagcccttgtctgtgtttgttgacacttatggcactgggaagatccctgacaaggaaatcctcagcattgtgaaggagagttttgacttcaggcctggcatgatctccatcaagcttgatctcaa

SEQ ID NO: 169598 - DNA, 269 bp, Glycine max
ggttttgatccaatgccttctgaaattcagaggttaagatgcaaatgtaatttccatgctttgaagttcgcgcctacaattcaacaaattggctcgctattgatccaaaggattagaaaatatggtgctcgacgcagcatgttagacactcaattgctggggaagttcatccgcaacaatgaatatcatgaagctaaaaggggctcagcaaaatatcttgctttgcacctgaggtttgaaatagatatggtggcctattccttatgtga

SEQ ID NO: 169599 - DNA, 265 bp, Glycine max
cggccagctcctgaagggccgcatcaccgtcaatctcatctggtacggcaccttcaccccgatccaacggtccataatcgtggacttcataaactcgttaagcagcgcgccaaacgcgcctctcccctcgaccgccacgtggtggaaaaccacggagaagtacaaggtgggaggaggatcccctgcgctcgtcgtagggatgcagttcctacacccggcttacacgctagggaaaaatctcaaaggaagagatctcctcgcactc

SEQ ID NO: 169600 - DNA, 259 bp, Glycine max
caacagcatcggcggcgacagtcactctccgacaacaacacttccgcggcgaaaaatgtctctggtggcgaacgaggatttccagcacattctgcgtgtgctgaacaccaacgtggatgggaagcagaagataatgttcgctatgacctccatcaagggtattggaaggagattcgccaacatcgcttgcaagaaggccgatgttgacatgaacaaaagggctggtgagttgagtgctgcagagttggatagtgtgatg

SEQ ID NO: 169601 - DNA, 260 bp, Glycine max
gagacacaaagaagaatcatggaggtgaacaaccaaatcgtggagaggagcaagagggttaaagggagagtggttttgatgaagaagggtgtgttggacttccacgacatcaaagccaacgttctcgatcgagttcacgagttattaggcaagggtgtctctcttcagcttattagtgctactactcctgatccagcaaaggggttattgagagggaaggtggcaaacttggagaggtgggtttcgacgattacctcttt

SEQ ID NO: 169602 - DNA, 268 bp, Glycine max
ttcactttggaaaaacatggtcgcatagatgttttgttcagcaacgcgggaataataggttccttatctgggatccttgaccttgatctgaatgagtttgacaacacaattgccacaaatgttcgcggtgtagccgccacgattaagcacacggcacgtgccatggttgctaaaagcacccgtggatccatcatatgcaccacaagtgtggctgctatgattggtggaactggacctcatggctataccacatcaaaacatgctcttc

SEQ ID NO: 169603 - DNA, 265 bp, Glycine max
tgattattgaaaattaagttcaattggggggtctcatcctcagagaatttggcttttgaatcatatgatttttccataggggatgaaatgacccgagtgatttggaaactgataaaagataagcttatttttccttatttggagctggatattaagtattttgaccttggccttcctcatcgcgatgccactaatgatagagttactattgaaagtgctgaagctacactcaagtataatgtagctatcaaatgtgctactataa

SEQ ID NO: 169604 - DNA, 265 bp, Glycine max
ctcaagcatgaacctgcttttagggctgcaatcataatgttccagagagaatttgccatgagactggttgctcagcctggtgataaactatattgtcgtctcacagtcaacactcaactacatgctcgagtcttccacctcctcaaagttggaagaaacaacttcaggccccctcccaaggtggattcctctgtggtgcgaattgagcccaggaaaccccgtattgaagttaagcaaaaggagtgggatgggtttttgcggattt

SEQ ID NO: 169605 - DNA, 259 bp, Glycine max
aaatattgtacacataaatctagctccaattcctaatcacctggttaatttcttcacatagagctatcaagatccaacgttaacatgaagaatgttttagtaaggtcagctgcgcgagctctgcttggcggcggtgggcggagtactaccgccagctctcaacggcggcgatcgtggaacagagacaccagcacggtggcggcgcgtttggaagcttccacttgcggaggatgtccactcttccagaggtaaaggatca

SEQ ID NO: 169606 - DNA, 260 bp, Glycine max
cttacttagtagacattctcaagccatgacttgtaaacttgtgatctacttcactttcttcttctgcttgctttttaccttggttccttatgttcatatgtatccctcgtacccctatagtggaaattaccagcttgacctcaatttctatgatagatcatgcccaaatttgcaaaggattgttggatatggtgtttggttagccttaaaaaatgacaacagaatggccgcgtccctccttcggttgcactttcacgatt

SEQ ID NO: 169607 - DNA, 258 bp, Glycine max
aaattcctgaatattggatcggaggccaaattaagaaagaccactgaaattttaaatgaatttgttttcaagctaatcaacactagaattcttcaaatgcagatttcaaagggagattctggtagcaaacgaggagatattctgtcaaggtttctgcaagtgaaggaatatgatccaacatacttacgagatataattctaaactttgttattgcggggaaagacacgacggctgccacactttcttggttcatgtac

SEQ ID NO: 169608 - DNA, 258 bp, Glycine max
gaacaacggaagttgaatcctccattttcgacccgcgcgacgatggaacctctgaccactggatccaacggaactcttcccttgtccgtttaacgggaaagcacccgtttaactcggagccacccctccctcgcctcatgcaccacggcttcatcaccccggtccccctccactacgtccgcaaccacgggccagtcccccgggcccgctgggaggactggaccgtggaagtcacgggcctggtcaccaggcacacat

SEQ ID NO: 169609 - DNA, 256 bp, Glycine max
cgagaacaaaaaaaaaaaaaaaatccgggattcgctcttctcttggaaaagtgaaacccagaagtacgaccgaaagagaagagcgttttaaaagtgagaaaagatggggttgtcgttcacgaagctgttcagcaggttttttgcacagaaggaaatgaggattctgatggtaggccccaatgacgctggtaagacaaccatcttgtaaaagctcaagcttggagaaatcgtcaccattatccccaccatgggtttt

SEQ ID NO: 169610 - DNA, 257 bp, Glycine max
actcgagccgaatcggctcgagcgaggagtcaacaccttttctccacaaggccgtttgtttcacggttgagtatgcaatcgaacccatcaagctgggatcaactgcgattgggttgaagaccaaagaaggagttgtccttgcagttgaaaagcgcatcacatcgccgctcctggagcctagtagtgttgagaaaattatggaaattgatgagcacatcggttgtgcaatgagtgggttgattgcagatgctcgaaca

SEQ ID NO: 169611 - DNA, 259 bp, Glycine max
attctctctctctatatatatatggtaaaaagtagttagttccaggatcaactcccataagtagatgaagcatttgatgattcattcctgaagtccgtgaaacaacagctttcatggttccattggtggctggtgatggaaccaaaactcaggcacttgctatttgccacacaaatacttctggaatgaatcatcaaatgcttcatcaacttatgggagttgatcctggaactaaccctgtttgccatttccttggaag

SEQ ID NO: 169612 - DNA, 266 bp, Glycine max
ttcactttggaaaaacatggtcgcatagatgttttgttcagcaacgcgggaataataggttccttatctgggatccttgaccttgatctgaatgagtttgacaacacaattgccacaaatgttcgcggtgtagccgccacgattaagcacacggcacgtgccatggttgctaaaagcacccgtggatccatcatatgcaccacaagtgtggctgctatgattggtggaactggacctcatggctataccacatcaaaacatgctct

SEQ ID NO: 169613 - DNA, 263 bp, Glycine max
tgattattgaaaattaagttcaattggggggtctcatcctcagagaatttggcttttgaatcatatgatttttccataggggatgaaatgacccgagtgatttggaaactgataaaagataagcttatttttccttatttggagctggatattaagtattttgaccttggccttcctcatcgcgatgccactaatgatagagttactattgaaagtgctgaagctacactcaagtataatgtagctatcaaatgtgctactat

SEQ ID NO: 169614 - DNA, 263 bp, Glycine max
ctcaagcatgaacctgcttttagggctgcaatcataatgttccagagagaatttgccatgagactggttgctcagcctggtgataaactatattgtcgtctcacagtcaacactcaactacatgctcgagtcttccacctcctcaaagttggaagaaacaacttcaggccccctcccaaggtggattcctctgtggtgcgaattgagcccaggaaaccccgtattgaagttaagcaaaaggagtgggatgggtttttgcggat

SEQ ID NO: 169615 - DNA, 259 bp, Glycine max; identical to SEQ ID NO: 169605

SEQ ID NO: 169616 - DNA, 255 bp, Glycine max
ctcttcctcaccgattgctagaatggaatttcgatgctcagtcatctcttttaccattctcttctctcttgctcttgcaggagagagccatgtccatgcatcgctacctgaggaagattattgggaagctgtttggccaaacactcccattcccactgcactgcgagagcttctaaagcctctccctgcaggtgttgaaatcgatgacctccctaagcaaattgatgatacacagtacccagaaacattcttcta

SEQ ID NO: 169617 - DNA, 248 bp, Glycine max
cactcaagagactgatagatatcagcatgggggttataactcctttgacagagcagctaacaaagccattacccaatgccatggttctagtaaaccttaaggaaatatctaccggagcttataagcttttgccacaaggaacacgcttggttgtgtctgtccgaggtgatgagccttatgaagaactggacattcttaagggtgttgatgctactatgcttctcccatgacttcccttatacagaaga

SEQ ID NO: 169618 - DNA, 253 bp, Glycine max
gaaatgtcaaagatagaattgagatcaatgtacagtctgttatgtcaagatgacatgccaatggttagaagatctgctgcttcaaatcttgggaagtatgctgctactgttgaatatgcccatttgaaggcagacactatgtcaatttttgaggatcttactaaggatgatcaagactctgttagattgttggctgtggagggttgtgctgctcttgggaaactgctggagccacaagattgcatcacacata

SEQ ID NO: 169619 - DNA, 254 bp, Glycine max
gcctaggcaacaatgtgaggtctatgccttctgtggtggatttgggagctgcactgagaatgccatgccatattgtaattgtatgaatggttatgagccaaagtcacaatctgattggaatcttacggattactcaggagggtgtgtgaagaagaccaagtttcaatgtgagaatccaaattcctctgacaaggaaaaggacaggttccttccaattctcaacatgaagttgcccaatcattcgcaatccatag

SEQ ID NO: 169620 - DNA, 250 bp, Glycine max
cggctcgagggataagatgtactacaggtacatgggatcactcactgcacctccttgcactgaagacatcatttggaccgctgataagaaggtaagaactgtttcaagggggcaagtgaagttgctcaaggatacggtacttaaatattatgccaaatggaatgcaaggccgctgcagcccctaaatcaacgagcgatacaactttacgtcccaaagacaaagaatatacccgtgtattagtttttcttg

SEQ ID NO: 169621 - DNA, 257 bp, Glycine max
agaactttgtttcccaatttccattgcctccgcttccacctcgcaaccatgatcatcccggagaagaaccgcaaggagatctgcaaatacctcttccaagagggagtttgcttcgcgaagaaggacttcaatttggccaagcaccctgagatcgacgtgccgaatctgcaggtgattaagctgatgcagagtttcaagtctcgcgagtacgtgagagaaacttttgcttggatgcactattactggttcctcaccaa

SEQ ID NO: 169622 - DNA, 256 bp, Glycine max
ggaggtggaactgggtctggaatgggtaccttgcttatctcaaagatcagagaagagtatccggataggatgatgttgactttctcagtgttcccgtccccgaaggtctctgacactgtggttgaaccctacaatgccactctctctgttcatcaactagttgagaatgcggatgaatgcatggtcctcgataatgaggcactctacgatatctgtttccgaacactcaagctcacaaatccaagttttggtgatc

SEQ ID NO: 169623 - DNA, 261 bp, Glycine max
cgaagtttccctcaggatagctggagcccgcgggcgagttctatcgggtaaagccaatgattagaggcatcgggggcgcaacgccctcgacctattctcaaactttaaataggtaggacggtgcggctgctctgttgagccgcgccatggaatcgagagctccaagtgggccatttttggtaagcagaactggcgatgcgggatgaaccggaagctgggttacggtgcccaactgcgcgctaacctagaccccacaaaggg

SEQ ID NO: 169624 - DNA, 254 bp, Glycine max
ccccttgtttggggaccataatttcgccatccatagagatggcaaatcagttcacctttcacttgatgaaagaacaggttctggatttgtgtctcatgacctttaccttcacgggtatttcagtgcctcgatcaagctgcctgctgattacactgctggagttgtggttgcattttatatgtcaaatggtgaaatgttccagaacaaccatgatgagatagactttgagtttttggggaacattagaggcaaag

SEQ ID NO: 169625 - DNA, 258 bp, Glycine max
gtcaggttcttatgatgaagaaagaacttgaaaaggatccagcacttgcccaggagaactgggataggttccttccaaaattcaagaacaaaaatgttaagcaaaagaaggttaacactaaacagaagaaaccatacactcctttccctccacctcaacagcccagtaagattgatatacaattagaaactggagaatactttttaagtaacaaaaggaaatcagcaaagatatggcaagagaagcaagagaagcagg

SEQ ID NO: 169626 - DNA, 252 bp, Glycine max
gtgaaacactagctagggtattgggagctctcgttgtttcggagttagggaccttacgcagccatggccactgctacgaatgccgccgccgccccaccacgccagctctcccagaaggaagctgacatccagatgatgttggccgccgacgtccacctcggcaccaagaactgcgacttccacatggaacgttacatcttcaagcgccgcaacgacgggatttacaatattcaccttgggaagacgtgggag

SEQ ID NO: 169627 - DNA, 253 bp, Glycine max
gagaactgaagaagggtttgaatccaccatcactcacaaatctggtatttgtgtcgccttacatgactacagctgtcaaaactggcattgtcgttggcatcatatcacttgcggaaggaatagcagtaggaagaagctttgcaatgtacaaaaattacaatattgatggcaacaaagagatgatagctattgggaccatgaacgtagttggttctttcacctcttgctacctcacaacaggaccattttcgcg

SEQ ID NO: 169628 - DNA, 253 bp, Glycine max
ggagttcttgagagaaaacggcgacaacgaaaaccgttccgtctcgcggagtgacttccctcccaacttcatcttcggagttgccacttctgcatatcagatagaaggtgcttgtaaggagggtggtagaggtcctagcatatgggatgcctttacacacacggaaggaaaaattcttgacaaaagcaatggtgatgttgcagttaatcattatcatcggtacatggacgatattgatcttatagccaagttg

SEQ ID NO: 169629 - DNA, 192 bp, Glycine max
caggtctgccactcgctcggcggcggaacgggctccgggatggggacgcttcttatttccaagatcagagaggagtatcctgacaggatgatgcttactttctccgtttttccttcgcccaaggtctccgacactgttgttgagccttataacgctactctctctgttcaccagttggtggagaatgctgat

SEQ ID NO: 169630 - DNA, 191 bp, Glycine max
ggacgtgacaatggcagcatgtggttctgggattggaagagtggtcataatttccagcaatcccaaacaattgtacagcctggttccctggatagtgaagctggtatttatgcttgtacctatgatcttactggctcgaggcttataacctgcgaggctgacaagacgataaaaatgtggaaagaagacga

SEQ ID NO: 169631 - DNA, 193 bp, Glycine max
gaagaatgactaggtgtgaccataagaagaattttggaaacgaaacctcgtaaaggcttctcactaacaaacaatggcggctgaggctgagcttccggagtacttaaagtgtccgatttccctggaaattatgtccgaccccgtcatcctctcttccggccacaccttcgaccgctcctccatccagcgctgg

SEQ ID NO: 169632 - DNA, 192 bp, Glycine max
cacgaatatcttgttgtttggagcgatccgagaataactctgtaaacatgttggtttaccaggatctccttataggtgatgagctctctctctgagtccttccgttacatggaaattgactctggaatgctgtggtaagttgaggggaagtgggctgttaaaggagcagtcgatgtagacattggtgcaaac

SEQ ID NO: 169633 - DNA, 192 bp, Glycine max
agagattctaaagcctctccctgcaggtgttgaaatcgatgaactccctaagcaaattgatgatacacagtacccaaaaacattcttctataaagaagaccttcatccaggcaaaacaatgaaagtacaattcaccaagcgtccctatgcaaaaccttatggtgtatatacatggttaacggatattaaaga

SEQ ID NO: 169634 - DNA, 189 bp, Glycine max
ttctggctgtgttaatatgcgtttcagcactgtcactgagtccttctgttgcgggggaagggcaaaataatggccttgttatgaacttctacaaggaatcatgccctcaggctgaagacatcatcacagaacaagtcaagcttctctacaagcgccacaagaacactgctttctcctggctcaggaaca

SEQ ID NO: 169635 - DNA, 191 bp, Glycine max
ctttgggaatagtgctgcaatggcttcaagtcaggaggaggtgacccttttgggagctactggaagcccatttgtgtgcagggttcatattgccctcaagttgaagggagttgaatacaaatatgtcgaagaaaatttgaggaacaagagtgaactgcttctcaaatccaacccagttcacaagaaggttc

SEQ ID NO: 169636 - DNA, 189 bp, Glycine max
aattggatgagaaaagaaaatcctttgaagatggattgaagaataaattggtggtagtgggaaagaaagaagctgaaatcactcacatggaggagaaagttgcgaaacggaaacaagccttgggaaagaaagcagagaagcttaaagagaaagagatagcgtatgaacaaaatgtcacagctttgaggg

SEQ ID NO: 169637 - DNA, 202 bp, Glycine max
cgcggcttgagtcttcttctctctttcttagattctctcttttttctttctgcactccgccatgattgaggattaggagatgtcttcctctgtcaccattggcgatgattccctcactggtcacatcatatctacaactattggaggcaaaaatggggaaccaaacagactattagttacatggcagaacgggttgtaggaa

SEQ ID NO: 169638 - DNA, 196 bp, Glycine max
actcgagccgaatcggctcgagcaatgtttggaactcgattgcctccagtaattggagggtactacacctttgttccaaccacaatctcaattatccttgctggccgattcagtgatgaaccagatcctatagagaaattcaagaggataatgaggtcaatccaaggtgctcttattgttgcttcgactcttcaaa

SEQ ID NO: 169639 - DNA, 192 bp, Glycine max
tgaagggccatgactttaggctacttccattcgggtcgggtcgacgagtatgcccgggtgcccaacttggtatcaacttggcagcatccatgttgggccacctcttgcaccatttctgttggaccccacctgaaggaatgaagcctgaggaaattgacatgggagagaatccagggctagtcacatacatga

SEQ ID NO: 169640 - DNA, 193 bp, Glycine max
attctctctgtgtatttccctacctctcccttcaagatgcagatcttcgtcaagaccctcaccggcaagaccatcacccttgaggtggaaagctctgacaccatcgacaacgtcaaggccaagatccaggacaaggaaggaatccccccggaccagcaacgtctcattttcgccggaaagcaacttgaggacg

SEQ ID NO: 169641 - DNA, 188 bp, Glycine max
ggaaaaatggcacctttcgtttccctctctttgttgcttctctttctcaaccaccccctcctttccctctcaaccaaccctgaagggaacgctctgcatgctttgagaagcaggctttctgatcccaacaatatgttgcagagttgggacccaacactggttaatccctgtacttggtttcatgttac

SEQ ID NO: 169642 - DNA, 191 bp, Glycine max
gaaaatctcaggatgagttttaagaagatatgtgtgagtggggacaatgccactctatctgagtttgaggaggtgctgaaagcaatgaacatgccatcactgatccctctagcaccgcgaatatttgacttgtttgacgacaaccgagatggaacagttgacatgagagagatactatgtggtttttccag

SEQ ID NO: 169643 - DNA, 192 bp, Glycine max
atttctccatttccattttctctctcacttttcaagaatcgtaagctatgggaaagtcttacccaactgtgagtgctgattaccagaaggccgttgagaaggcgaagaagaagctcagaggcttcatcgctgagaagagatgcgctcctctaatgctccgtttggcatggcactctgctggaacctttgaca

SEQ ID NO: 169644 - DNA, 190 bp, Glycine max
gcgactgcgcttcagcacaatgggtgcctacaagtatgtttcggagctatggcgcaagaagcagtctgatgttatgagattcttgcagcgggtgaggtgctgggagtatcgccagcaaccttctattgtccgtttgacaaggtctactcgcccagataaggctcgtcgcttgggtttcaaggctaagcag

SEQ ID NO: 169645 - DNA, 180 bp, Glycine max
gtgatttcagtgagtgatcggtgttcacttgatctcatcataatcgtcagcgtcaattgaagaagatgccgatcagaaacatcgccgtcggaaggcctgaagaggcgactcaccccgacacgttgaaggcggctttggctgagttcatctcaaccttcatcttcgtgttcgccggctcag

SEQ ID NO: 169646 - DNA, 189 bp, Glycine max
tgtcactggagatgatatgcagacacaggttatcatcaatcaccaggctcttccttgccttctgaatctgttgaccaataattataaaaaaagcatcaagaaggaagcttgttggaccatatcaaacatcacagctggtaataaacagcagattcaggctgtgattgaggctaatctaattgctccttt

SEQ ID NO: 169647 - DNA, 185 bp, Glycine max
gcgttgttgccgttgaggtcaccggtggacctgaagttcccttccatcctggaagagaggacaaacctgagccaccaccagagggtcgcttgcccgatgccactaagggttctgaccatttgagagatgtgtttggcaaagctatggggcttagtgaccgagatatcgttgctctgtctgggggt

SEQ ID NO: 169648 - DNA, 190 bp, Glycine max
ctttttcacgcgacgccctagttcatttttcttctccgtactctactctctctgttcttcactcactctcattcattcaccatgacgaaacaacatgccaattggtctccttacgataacaacggaggatcatgtgttgcgattgctggagcagattactgcgtcatcgccgcagatacgaggatgtcca

SEQ ID NO: 169649 - DNA, 187 bp, Glycine max
ttcagaaataacgacctatgaacacacaagtattgcttttgcaccttatggagaatattggagacaggtacgaaaaatatgcgccatggagcttctctccccaaaacgtgtcaactcattccggtcaattagagaagaagagttcaccaatcttgtcaaaatggttggttcacatgaagggtccccc

SEQ ID NO: 169650 - DNA, 185 bp, Glycine max
aactttctctctctctctctacaaaacttagctctgtttttaattattccttgcattctcttgtattaagatggaagcaactaccatcaccaatgggagccaaaacggttcgttttgcttgtccactactaagggaagtagtgatccgttaaactggggagcggcggcagaggcgatgaagggga

SEQ ID NO: 169651 - DNA, 183 bp, Glycine max
ctttcttctttccaagattctggcagttactgtcagattcattatcaaagatgcagaggagaagaaggcctcttttaatccaaggccacttttcagattattcatcaactggcttctagatcttggttcacttgagcctgttactgatggtgcaaatcttcagattttaactgcttttgccaa

SEQ ID NO: 169652 - DNA, 185 bp, Glycine max
atttaattcactgtactttatccttttgtgtggggaattatggtaattgattttgagggtttgactactcatggattatgatggtatgagaaaaccttccaaaaacttatttcactctcgcttctcccttttgggttctattgctgggattgggagttcttgaccgctctcctcctttttagttc

SEQ ID NO: 169653 - DNA, 182 bp, Glycine max
gtgcgatctcacggcaaataaagttgtgtcctatgagacagcaaaggcttttgcagatgaaattggaattcccttcatggaaactagtgctaaaaatgccaccaatgttgaacaggctttcatggccatggctgctgaaattaaaaacagaatggcaagccagccagtgaacaatgcgaggc

SEQ ID NO: 169654 - DNA, 189 bp, Glycine max
cagcgtcttcataaacgcctttattctccatttccgtttccttcccggaattcgatttttcatctctgcaaatgagagagtgcatctcgatccacattggtcaggccggtatccaggtcggaaatgcttgctgggagctctactgtcttgagcacggcatcgggcccgatgggcaaatgccaagtgaca

SEQ ID NO: 169655 - DNA, 186 bp, Glycine max
gggaaaaggcacagaaagtgacaaattggtgcaactatatagtagaatccctttggcttttgctagagattttaaagcttcaatgatcaagatggggaacatgaagcctctcactgggaggcagggagagatcagatgcaattgcagaagggtcaactagttggattgcaaggtctggattacaat

SEQ ID NO: 169656 - DNA, 183 bp, Glycine max
gcatgaggcaatttcaaagtttatacaaggcactgttgctgatggtgcaccagtagtacctatttcagcacagttgaagtataatattgatgttgtgtgcgaatatattgtgaagaagatcccaatccctgaaaggaactttgtttctccacctaacatgattgttattcggtcatttgatgt

SEQ ID NO: 169657 - DNA, 181 bp, Glycine max
gcgtttgctcacgacttggagttggaatcctcttcttcccctctggtgttctcagtacggaggagtgaaccggagctggtggctccggccaagcccactccccgcgaaattaagatcctatctgagatagattctcaggcgggtcttcgtacccaaattccaatcatacagttctaccgta

SEQ ID NO: 169658 - DNA, 186 bp, Glycine max
gacaaatgcaaggtgttggtcaacattgagcagcagagccctgatatcgcccagggtgtgcacggtcacttcaccaagcgcccagaggaggttggtgctggtgaccagggtcacatgtttggctatgccactgatgaaacccctgagtacatgcccctcagccatgtccttgcaaccaaactcggt

SEQ ID NO: 169659 - DNA, 216 bp, Glycine max
tcgaggttgaatttcgatgaggagtcgcccaagctgcctccttcccccgggcagagaagtgctctgatgtcgcctgctggtggaattgatgggaattcggcggccttcagcttggagtttggaaatggggagttcagtgggcctgaactgaagaaaattatggccaatgaaaagcttgctgagattgccttgatcgatccaaagcgtgccaaaagg

SEQ ID NO: 169660 - DNA, 215 bp, Glycine max
cgagtataactcctgtttctttattaattctctctttcaaatatatggcagaagatgcttcaattattccaacacacacaaaagcttggtactactctgaacatggtagtccaggtgatgttctcaaattagatcctaattggcccttaccccaacaactcaatgatgaccaagtgctcatcaaggtcatcgctgcatccattaatcccgttgat

SEQ ID NO: 169661 - DNA, 209 bp, Glycine max
gctcgaggtgatggcaaggggaacttttgccaacattcgtcttgttaacaagctcttgaatggagaagttggtcccaagacagttcacattccgaccggggagaagctttatgtgtttgatgcagcccagagatacaaggctgaagggcaggacaccattgtgctggctggagctgaatatgggagtggaagttccagagattgggctg

SEQ ID NO: 169662 - DNA, 214 bp, Glycine max
cggctcgagttaggatccaatctttggaaggaagatactggctgtcttgattggcttgaatccaaggaacccagatccgttgtttatgtgaattttggcagcatcacagttatgtctgcagaacaactcttggagtttgcttggggtttggccaacagcaagaaaccctttttgtggatcattaggcctgaccttgtcattggtggctctgtga

SEQ ID NO: 169663 - DNA, 215 bp, Glycine max
tcggctcgagccacctccgaaccctccctcgccgtcgaaatcgcggacgccgctaccgccaaaggctgccactcaatcgacgcccccgtgtccggcggcgaccgcggcgcgaagaacggaaccctagcaatcttcgccggcggggaagaatcgacggtgaagcgtatggaagccttgttctcccatttggggaaagtgaactacatgggagggag

SEQ ID NO: 169664 - DNA, 214 bp, Glycine max
cggctcgagctctttctccggcgacgatctcagattccggtcactcctctcgacggcgatcccttattcctccgtcctccgtcgagtcctttccgattcgaatcgttcccagccttgtgccaccatgaatcccgaatacgattatttgttcaagcttttgctgattggagattctggtgtaggcaagtcatgtcttctcctgaggtttgctgat

SEQ ID NO: 169665 - DNA, 217 bp, Glycine max
cggctcgagaaattagttgctaatgaaggaaacaacacacttcattctggacccaaagcattcagtgatgttctttggaaagtgacaaggtatataaaagatggtgaaaaacccagaatcaccttcagttaccacagttatgatggtgaaggaggatttcctggggacctcctagtaactgtgagctacattcttgggaaaaactcattgaggataa

SEQ ID NO: 169666 - DNA, 215 bp, Glycine max
cggctcgagcggaaaccgtcgctgctaatcgctgttccaaagaagaccgagtggatccagttcgggagcccggatccgaacccggtgatggctgcgccggagaacctgccgcagaagaatcactacagaggtgtccggcagcggccctggggcaaattcgccgccgagatccgcgacccgaacaagcgcggctctagggtttggctcggaacctt

SEQ ID NO: 169667 - DNA, 213 bp, Glycine max
cggctcgagcacaaaacttgctatagcagtaagctataactcatttgaggctctgtgagaattgagaaatggctaaagatgttgaggttcaagagcaaggaggagagtactctgccaaagactaccatgaccctcctccagcacctttgttcgacccagaggagctcacacagtggtccttctatagagccctcatcgctgagttcatagcaa

SEQ ID NO: 169668 - DNA, 212 bp, Glycine max
tcggctcgagcctcgctctgtttctgtctctgtgtttgcggctgaggattccgaacgagcgaccttcttcgtttctcgcaaagtttaagtcctcatgggtaaggaaaagactcacatcaacattgtcgtcattggacatgtcgactctgggaagtcaactaccactggtcatttgatctacaagcttggaggtattgacaagcgtgtgattg

SEQ ID NO: 169669 - DNA, 213 bp, Glycine max
cggctcgagattcgttgattccttcatttccttgcagttttgttgctgagtgtgtgtgaaactgtgaaagagagttatggcaggaggtggtggagctccagcacctaagattgatgagccacaacctcatcccccgaaggatcagttaccgaatgtttcttactgcattacgagtcctcctccatggcctgaggccatacttcttggttttca

SEQ ID NO: 169670 - DNA, 204 bp, Glycine max
atggggaacacggagaagctgatgaaccagatcatggaattgaaattcacttcgaaatcgctgcagcgtcaatcgcgtaagtgcgagaaggaggagaaatcggagaagctgaaggtgaagaaggcgatcgagaaaggcaacatggacggcgctcgaatctacgcggagaacgcgatccgtaagcgcacggagcagatgaactac

SEQ ID NO: 169671 - DNA, 203 bp, Glycine max
ctagtcccaaagagctaacaagagattcaagaccggcatggctaatgaagaggaacagaaaaaccacctcttcggcatcaaagatctcggtcacaagactctccttcagagtgatgcactctatcagtatatacttgaaaccagtgtctatccaagagagcacgagtgcttgacagagatacgcaagatgactgcaaaacacc

SEQ ID NO: 169672 - DNA, 201 bp, Glycine max
ccggagccctcctcgccggcggcctctactggttcgtgtgcgttctgggccccgccgagcagaagggcaaacgcgccaccgatctttccggcggctccatctccgccgagaaagtccaagacaactacaaacagtactggtccttcttccgccgcccaaaggagatcgagaccgccgacaaagtccccgacttcgtcgaca

SEQ ID NO: 169673 - DNA, 206 bp, Glycine max
gaacaagcccgaaggccctcccaatagtcgtgcttacactcctggctctccattaataggatatggtgtgtctaaagtcctggaatctgggcacccagattataaggaaggtgatttagtgtggggctttaccaaatgggaagagtatagcttgttaccctcagctcaaatactcttcaaaattgagcacactgatgttccactta

SEQ ID NO: 169674 - DNA, 204 bp, Glycine max
ttccaatatattccattctctctgtgtatttccctacctctcccttcaagatgcagatcttcgtcaagaccctcaccggcaagaccatcacccttgaggtggaaagctctgacaccatcgacaacgtcaaggccaagatccaggacaaggaaggaatccccccggaccagcaacgtctcattttcgccggaaagcaacttgagg

SEQ ID NO: 169675 - DNA, 201 bp, Glycine max
agcgacacgtatcttcatcaataatcgcagaagcagtttccggtgcatctcatcgtcttccaaaatgaacgacgcagatgtctcgaagcaaatccagcagatggtgcgtttcatccgccaggaagctgaggagaaagccaacgagatctctgtatctgccgaagaggaattcaatatcgagaagctgcagttggttgaagc

SEQ ID NO: 169676 - DNA, 198 bp, Glycine max
caattttcagctagtcatgaagatccactgcgacgtgtgtaacaagcaccaggcctcttacttctgcaccgccgacgaagctgccctatgcgacggctgcgaccaccgcgtccaccacgccaacaagctcgcctccaaacaccaacgcttctccctcacccacccctctgcgaaacattttcccctctgcgatgtttg

SEQ ID NO: 169677 - DNA, 197 bp, Glycine max
aattggccttggggccaaggatcctgttgatgtcattgcggttgtagagctcatagtcaaagcctactttttcaacaccctctatgaacctttccgagaaggtgcagattttgttcgcggttaccccttcagtctccgggaaggtgtaccaactgcagtttctcatggtctttggctcaacatcccagattacgatg

SEQ ID NO: 169678 - DNA, 196 bp, Glycine max
cacaaacagaggctacgtacgatcaaattaattaagatggcggaagtgaggaacaaacaagtggttctgagggactatgtgagtggttttcctaaggaatccgacatgaacatagttgaaggaaccacaatattgaagcttccacaaggttccaatgatgtgcttctaaaaaatctctacctttcctgtgaccctt

SEQ ID NO: 169679 - DNA, 200 bp, Glycine max
gcaatattatagtggacattgaatactttaaagaagccctttccaaagtagactctcagatgaaaaatcttcctgcaacagctcaggtagctgcacaacaaggagtctatcttgcagactgtttcaaccgcatggaggagtgtgagaagtatccagaaggccctctcaggttcaggggagttggacgccatcggttccgt

SEQ ID NO: 169680 - DNA, 208 bp, Glycine max
cacaagctcacagagcaagaacactgttccaatacggaatctaaggcaaagcaaaccaaacatcttgaatcatgggttcaacaggtgagactcagattaccccaacccacgtatctgatgaagaagcaaaccttttcgccatgcaactagccagtgcttctgtccttccaatgatcctcaaatcagcacttgagcttgatctgttgga

SEQ ID NO: 169681 - DNA, 201 bp, Glycine max
gaggtgccaatatggtgaagatagctcttggtactttggatgactcttttagcgctgcctctcttaaggcttatttcgcagagttccacgcaactctgattttcgtgttcgctggtgttggatcagccatcgcttacaacgagcttacaaaagatgcagccttggatccaacggggctggtggcagtagctgtggcacatg

SEQ ID NO: 169682 - DNA, 192 bp, Glycine max
gcttacaatcccttcttgtaggcgagggggattgcatttggacagaaaaatgcgtactgttttgataaatttagctacttctcaagttggaagggaggaaattgtatctactcctggactcattggtgcattggcttcgatattggacaccggtgagctcatagaacaggagcaagctgtctcttgtctcct

SEQ ID NO: 169683 - DNA, 194 bp, Glycine max
cacaaagcgggttactgtctgttcaagctaccatctctctctctctttcttagtgcctccttgccagaagttaaaatggcccaagaaactttcctattcacatctgaatcagtgaacgaggggcaccctgacaagctctgtgaccagatctccgatgctgtgctcgatgcatgcttggagcaggaccctgacag

SEQ ID NO: 169684 - DNA, 198 bp, Glycine max
ttcaaagcgaaaagagattcgaatccaaggaagggaaaggaaagtaagagaagagaagaatggccgaagagggacaagtgattggtgtccacagcgtggaggagtgggaggaacatctcaagaagggacaagagtccaagaaattgattgtggtggattttactgcttcttggtgcggcccatgccgtttcattgccc

SEQ ID NO: 169685 - DNA, 195 bp, Glycine max
gcgatatcttgctttcatatggatcttcttagcgaactgacagctgcattacgtcctgccgatgagcctggtgcagaggttccaaacggtgcagctggtcattatctattagggctcatttacagatgcactgacagaaggaaaaatgccatacaacatttcaagcaggcactgtcaatggatcctcttatgtgg

SEQ ID NO: 169686 - DNA, 194 bp, Glycine max
atcacaagctcccaatatagcaagcagcaaacatgatttcttccgtgtcctttccagcgtctcttcccgccgttaacttctccggcaacgccatggcttcgccgtcgtgccgcgtcaaatcccggccaatagtcgccttcgccaccgccactgccaccgctgaagctcgctcttcctggacggagcaaccgaga

SEQ ID NO: 169687 - DNA, 291 bp, Glycine max
atcttctccctttcttagattctccctcttttctctctgccctccgccatgactgaggataaggagatgtcttcctctgtcaccaatggcgatgattccctcactggtcacatcatatctacaactattggaggcaaaaatggggaacccaaacagactattagttacatggcagaacgggttgtaggaactggatcatttggaattgttttccaggcaaaatgcttggaaactggggaagcagtggctattaaaaaggttttacaggacagaagatacaagaatcgcgaa

SEQ ID NO: 169688 - DNA, 286 bp, Glycine max
gattgttgtgactcgttcttcttcgtcgttatcttcttcttttgtagtttgtgtgtttgttttttctctcacctgaaaatgtcttgctgcggtggtaactgtggttgcggaagcgcctgcaagtgcggcaacggctgcggaggctgcaagatgtacccagacttgagctacaccgagtcaaccaccaccgagaccttggtcatgggagtggcaccagttaaggctcaattcgagagtgctgaaatgggtgttcccgctgagaacgatggctgcaaatgtggagcta

SEQ ID NO: 169689 - DNA, 274 bp, Glycine max
gtggtttcagtgagtgatcggtgttcacttgatccttcataagtcgtcatcatcatcatcatcatcaccgttgattgaagaagatgccgatcagaaacatcgccatcggaaggcctgaagaggctactcaccccgacacgttgaaggcggggttggctgagttcatctccaccttgatcttcgtgttcgccggttcaggttccggcatcgcctacaacaagctcaccgacaacggcgccgcaactcccgccggcctcatctccgcttccatcgc

SEQ ID NO: 169690 - DNA, 276 bp, Glycine max
atggctcccaagggtttaatctttttggctgtgttatgcttctcagcactgtcactgagtcgttgtcttgcggaggataatggacttgttatgaacttctacaaggaatcatgccctcaggctgaagacatcatcaaagaacaagtcaagcttctctacaagcgccacaagaacactgctttctcctggctcagaaacatcttccatgactgtgctgttcagagttgtgatgcttcactgttgctggactccacaagaaggagcttgtctgagaag

SEQ ID NO: 169691 - DNA, 277 bp, Glycine max
caagtttgagcgttaatacacttagaagtgaaatggcttctcgacccttggtctctatttataatgagaaaaatgagccaaccggcaagcaaatcaagcttccggccgttttccgggctccaattcggcatgacattgtgagcttcatccatgaccaaattcgcagaaacaagcgacaagcgtatgctgtgtcaaccgctgccggtcatcaaacttccgccgaatcgtggggcactggtcgcgcactggcgcgtattccgagcgtccgtgagcggtg

SEQ ID NO: 169692 - DNA, 275 bp, Glycine max
atgcaaagcatccttcgcttcaatctctctctctctctttgcgctttctgcaaaccgaacatttcatctccaaagggatcaacaggtcgaaggagaaatggggctgacattcacgaagcttttcagccggcttttcgcgaagaaggaaatgcgaattctgatggttggtcttgatgctgctggtaagaccactatcctctacaagctcaagctcggagagatcgttactacaattcctaccattgggttcaatgttgagactgtggaatacaaga

SEQ ID NO: 169693 - DNA, 252 bp, Glycine max
ctcgagccgaatagtgttaatttgtgcttctctatctctatcggccatgggtgcttttgactttgatgaggaaaactcctccaccgtggctccggctacactctacaaagctctgacaaaatatgctcggcactatcatcccaaagattattggggccacccgggctattgagatcgttgaaggaaatggacgacccggaacacgtcaagaacattacagctagtgaaagtgaccaaaccatgttcgtgccg

SEQ ID NO: 169694 - DNA, 276 bp, Glycine max
  unsure (1)..(276): unsure at all n locations
ganattctgaatgtctggaggaatcaggggtaacttgcaatggaagaagttgaaggaacatcttttcgaaccgagagcctgatattattggaactcctgctaaaggaaaaaaattgcctcaggaagagctttctctacaacagaaattatcagttgcagatgtgacatgtacaatgtgcaagcaactgctctttcatcctgtagttctcaattgtggtcatgtgtactgtcaaatttgtgtcatcaacatagatgacgagatgctcagatgtaaag

SEQ ID NO: 169695 - DNA, 276 bp, Glycine max
aggctcgaggggataccccaatacggaggcagcatggctgggaacgtgttgtacccaaaggacaacaaaaagggttgcaaggagttcgatgagtatgggatttccttcaaatccaaacccggtgctcttcccactatcgttttgctcgatcgaggaaattgcttctttgctttgaaggtatggaatgcacagaaggctggagcttctgctgatcttgttgcggatgatattgtggaaaagttgataaccatggacactcctgaggaggatgtgtca

SEQ ID NO: 169696 - DNA, 283 bp, Glycine max
gcctcagctaataacaacaatgcttctgcttcattgggtgtccatcgtcgacgacgcaggaagaaatcagaaataaaaaggagagatcctgctcatccaaaacctaacagaagtgggtacaatttcttctttgctgagcagcatgcaagactaaagctacttcaccatggaaaggacagagagattagtaggatgattggtgaactctggaacaagttaaaagaatcagaaaagacggtttatcaagagaaggccatgaaggataaagagaggtacagagtag

SEQ ID NO: 169697 - DNA, 280 bp, Glycine max
gtgaggtgaggtgccaaaatggtgaagataactcttggtactttcgatgactcttttggtgttgcctctcttaaggcttatttggcagagttccatgcaactctgattttcgtgttcgctggtgttggttcagccatcgcttacaacgagcttacaaaagatgcagccttggatccaacggggctggtggcagtagctgtggcccatgcatttgcactgtttgtaggtgtctccgtcgaagccaacatctcgggtggccatttgaacccagctgttactt

SEQ ID NO: 169698 - DNA, 272 bp, Glycine max
aatatattccattctctctgtgtatttccctacctctcccttcaagatgcagatcttcgtcaagaccctcaccggcaagaccatcacccttgaggtggaaagctctgacaccatcgacaacgtcaaggccaagatccaggacaaggaaggaatccccccggaccagcaacgtctcattttcgccggaaagcaacttgaggacggccgtacccttgctgactacaacattcagaaggagagtactcttcacctcgtcctccgtctccgtggtg

SEQ ID NO: 169699 - DNA, 270 bp, Glycine max
ctcactgtgattggttacaagagccagagtgatgtcaaggccgggggtgatgtgtgtggtggagttggcattcttggcattgcttgggcctttggtggcatgatcttcatccttgtttactgcactgctggaatctccgggggtcacataaacccagcagtgacatttgggctcttcttggctcgcaaggtatctttgattagagccataatgtacatggtggctcaatgcttgggagccatatgtggagttgggttggttaaggcattc

SEQ ID NO: 169700 - DNA, 276 bp, Glycine max
gccgtgactagacactcatctcactcgcgccatcgtagggtttctccttttgtttcgcaacatggttgccgctaagaaaactaagaagacccatgagagcatcaacaacaggctcgctcttgtcatgaagagtggcaaattcaccctcggttacaagaccgttctcaaatctcttaggaactccaaagggaaattgattatcattgctaacaactgcccccctttgagaaagtcagagattgaatactatgctatgttggcaaaggttggagttca

SEQ ID NO: 169701 - DNA, 270 bp, Glycine max
agagagtgagagagtgagtgagatagagagagacgcttcgcaaatctcaatcgaatctcagaaaaatgagagaaatcatcagcattcacataggtcaggccgggatccaggtcggaaactcctgctgggaactctactgcctcgaacatggcatccagcccgacggcatgatgccttctgactccaccttcggtgtagcccacgacgccttcaacaccttcttcagcgaaaccggatctggcaagcacgtcccccgtgctgtcttcgtcg

SEQ ID NO: 169702 - DNA, 274 bp, Glycine max
acgactttgaccgagtcaaacgctggaaggccaaggattgggcccggcccatggccctcatttcccgcgacggctcctccgacctcgtcgaccaggccgtcgccatggcctttggtcagtgccgcagcaccaattatgtccgcattcaggcaaatgggtcaagtatggggcgatgtggacccaatgtggatacagattcaagtcccggcaatgtgaagatgctgataggaatagcagaggagatgttgaagcaggagaatgtagagtctgttct

SEQ ID NO: 169703 - DNA, 277 bp, Glycine max
aggacataaaatattattgtcctttgacttgtttcatcaattatagcaaaaatgagaacccattttcactctctcccattgatttttttgttcaccctttcccttctattgggtaaaacccgacccgaccctgatccacttcaagattattgtgtagcagatagcaaaagtgaatttttcattaatggggtgccttgcattgacccagataaagtttcctcctcccattttgtcacatctgctttatcaaaaactggcaacactagcaaccaatttg

SEQ ID NO: 169704 - DNA, 271 bp, Glycine max
acacactacaccgatatttccaccaaacccgtttgcgttgttgtttgcgaataaatggcgactaagaggagcgtgggaacgttgaaggagggtgatttgaaggggaagagggtattcgtgagggtcgatctgaacgtgcctttggatgacaaccttaacatcaccgatgacactagagtccgtgctgctgttcccaccatcaagtacttgactggttatggtgctaaagtgatcctttctagccatttgggacgtccaaaaggtgtaacac

SEQ ID NO: 169705 - DNA, 271 bp, Glycine max
agaggagacaggggtacgccgttcaaagctagatgcggtggccgtggtggccgcggaggaggcaggggtggtggccgtggcggcggcataggtggaatgaagggaggtagcaatgttgtggttcagccccataggcatgatggcattgtcattgctaagggtaaagaagatgctcttgttactaagaatcttgtgcctggtgaagctgtttacaacgagataaggattaccgttcagaacgaagacagttccagagatgagtacagagttt

SEQ ID NO: 169706 - DNA, 269 bp, Glycine max
agatagagagatagagagatagaggagaagatgaacggtggtgaatcttacggtgctattgagacacaatacataaggaggcatcacaaacatgaaccaagggaaaaccagtgcacctctgcacttgttaaacacataagagctcctgttcaccttgtgtggtcgctggtgagaagatttgatcaacctcagaaatataaaccatttgttagcaggtgcatcatgcaaggggatcttggcatcggaagtgttcgagaagtgaatgttaa

SEQ ID NO: 169707 - DNA, 265 bp, Glycine max
gacacattatggccacaccagcatccatcaccaaagtcactgtggagttccttcaattccccgcggtggtgatacctcatggctctaccggatcctatttacttagcggcgcaagggtgagatggtagaataatgacgaagaatttgtaaagtacacgggcataggtgattatttcgaagacaaggccgtgtcatcactcggtgccaaatggaatggcaaaagtgcagctgaattgctggactcacttgacttctacagagatat

SEQ ID NO: 169708 - DNA, 264 bp, Glycine max
gtttatgctaagattagtctgaccagtaatcctgagaccaccatgtctaccaaaaccatcaatggaggaggaaggaaccctgttttcaacgagaatcttcgtattgatgttaggactgttgatgcatctctcaagtgtgagatatggatgcttagcagggtgaagaactaccttgaagaccagttgcttggttttgctttggtacccttgtctgaagtactggtccagaatgggaaacttgagaaagagttctctctttcttca

SEQ ID NO: 169709 - DNA, 267 bp, Glycine max
caggtacaaaagatagagatactcaggcaggcaattttagcttggagcagatcagagttgctactgatgacttctcttctgctaataagattggggaaggtggttttggtcctgtatacaagggtcaattgctagatggtacttttatagcggtcaagcaactgtcatcaaaatcacggcagggaaatcgtgaatttataaatgaaataggcttgatatcttgtgtgctcaccctaaccttgtaaagctttatggatactgtgctga

SEQ ID NO: 169710 - DNA, 286 bp, Glycine max
ttcggctcgagaggctcgaggcagagacaaagcctcacgctgtgttcactccatatccacttcaaggccatattaacccattgttcaaactagcaaagctgcttcatctgaaaggctttcacataacctttgtccacactgagtacaactacagacgcttcctcaattcaaagggtcccgacgcccttgatgagcttcctgattttcgcttcgaaaccatcccagatggccttcctccctcggatggtgatgtcagtcaagacataccctctctttgtgactctct

SEQ ID NO: 169711 - DNA, 282 bp, Glycine max
agcagctcccacaaaaaccagacatgtccgagtcggaagtagcaggtcagaggtaccgtgtgggctatcctctccaaggcaagaaagtcgaaagcttcattcaaccctcactcctcgatcacgccaaacaacacagcatcgatctcgtccaaatcgaccccaccgcacccttacaacaacaatgtcctttccactgcatcattcacaaactccacacccaacactggaaaaacctcctccaacaattctcatccaaacacccaaacaccgtaatcatcgacc

SEQ ID NO: 169712 - DNA, 273 bp, Glycine max
agaaaaaccatggcaataacactcaacaatggcttcaagatgcctatcattggattgggcgtgtggcgcatggaaggaaacgaaatcagggacctaattctcaattccatcaaaattggttatcgccattttgattgtgctgctgactacaaaaacgaagcagaagttggagatgcgcttaaggaggcttttgatagtggccttgtgaagagagaggatctcttcattaccaccaagctttggaattctgatcaaggccacgttcttgaggcg

SEQ ID NO: 169713 - DNA, 269 bp, Glycine max
attctggtagtcttggaaggtaccctctacgttggttttgtcgcgtccaatcaaaacgacaaccggttattcaccaaggtgttgtacaagggtgatgtgtttgtgttcccaatagggctgattcacttccagcaaaacgtaggttatggaaatgccgtggccattgctgctcttagtagccaaaaccctggagttattacaattgcaaatgctgtttttggatctaaacctcctatctctgatgaagttctcgccaaagcttttcaagt

SEQ ID NO: 169714 - DNA, 263 bp, Glycine max
gcctcatatatcaataatggatttgatctgattctggctcaacgttcatgacgatcaccacccactactccattccgggaagctctgggtatctggacatatacccagagaggaaagtctctgcctttcaaaacccttacattatgggcttcactgctgtcgctatcattggtggattgctctttggctacgacactggtgttatatctggagcccttctctatatcaaagatgattttccggaggtcaggcacagtaatttt

SEQ ID NO: 169715 - DNA, 268 bp, Glycine max
aagatggcttcttttcatatccaatattcattccttgtgcttgtgcttgctatggtgatcacattgatgaaccctaccaatgcaaccctctctccccatttctatgataaagtttgccctcaggcattgccagttataaagtcagtggttcaacgagcaattatccgtgagcgacgcatcggagcatctcttctgcgcttgcatttccatgattgtttcgtaaatgggtgtgatggatcaatattgctagatgacacccgaaacttca

SEQ ID NO: 169716 - DNA, 269 bp, Glycine max
attctcactctcgtttaccaagagcgagatatctatttagatctctgaaaaacagagtttcatttcaattcagtcttattattagggtttgccgattgagagagaaagagaaatgggagaacgaaaaggaatcccaatggctttggggctcttggcgatgatcctcttcttcattgcatcctcttcctctcacctcgatcgcgcttccggtgacgccgacgacgcgatcttctacgagtcgttcgacgaggattttgatggacggtgga

SEQ ID NO: 169717 - DNA, 258 bp, Glycine max
attctttcatcgcttcggatcttcaatctcatctccgatctcaaaatgcccgctgtttatggagctcgcttgaccaccttcgaagactccgagaaggagagtgaatacggttacgttcgcaaggtttcaggacccgtagtcgttgcggatggcatggctggtgctgctatgtatgtactcgtgcgtgttggtcatgataatctcattggtgaaattattcgtctcgaaggggattctgctaccatccaagtttatgag

SEQ ID NO: 169718 - DNA, 265 bp, Glycine max
gtttctttctctctcatgttgtagtatctcacttgtgtttttcattcgtttctgaaccacacaaacatcaccaccgaacaatgccgacggggttaccggcggcgaattccttagtggcgccggacgaagaggggtgggtgtgggggcagatcaaggcggaggcgcgccgcgacgccgagtcggagcctgctttggcgagctacctctactcgacgatcctctcgcactcgtcgctcgagcgttctctgtcttttcacctcggaaa

SEQ ID NO: 169719 - DNA, 265 bp, Glycine max
gttgatgttacaatggcacgaagcattcagctcctacgctggctccgcaagtgcgatcatcgacccttccaaggtcaaacaagtttcgtggaaaccgagagctttcgtttacgagggttttctgacggaattggaatgcgatcacttgatttccatcgccaaatcggagcttaagagatccgcggtggccgataatttgtccggcgagagcaagttgagcgaagtcagaacgagctccggcatgttcattcccaagaacaaggat

SEQ ID NO: 169720 - DNA, 263 bp, Glycine max
attgcggctagggttttagcgcacttcttctagatttaaggaagatgggtaaggaaaaggttcacatcagtattgtggtcattggccatgtcgactctgggaaatccactaccactggtcacctgatttacaagcttggaggcattgacaagcgtgttattgagaggtttgagaaggaagctgctgagatgaacaagaggtctttcaagtatgcctgggtgctggacaaacttaaggctgagcgtgaaagaggaatcaccatt

SEQ ID NO: 169721 - DNA, 266 bp, Glycine max
aagaaattagagatgttttggacacatttcatgtcatagcagaactaccaccagacaactttggagcctatatcatatcaatggcaactgcaccatctgatgtgcttgcagttgagcttctacaacgtgaatgccacatcaagcatcccttaagagttgtgccattgtttgagaagctagctgatctagaggctgctcctgctgctttggcacggttgttctcgatagactggtatagaaataggatcaatgggaagcaagaagtg

SEQ ID NO: 169722 - DNA, 266 bp, Glycine max
acccaattcaaaactctcactccgttagaagcaccaaatcctgatggcaccaaaggcagagaagaagccagcggagaagaagcccgcagaggagaagaagtccacggtgggagacaaggctccggcggagaagaagccaaaggccggaaagaagcttccgaagagggaggcgccggcgggaagggaagaagaagaagagaaacaagaagagcgtggagacatacaagatctacatcttcaaggttctgaagcaggttcaccctgac

SEQ ID NO: 169723 - DNA, 270 bp, Glycine max
attgtctttctctctttccgcggcctagatctgagcagtttggaaaccctaactgctctcaccaacgacatcaccactctctccgatcaactacctctttcgtcgccctaagtcatggcaggaattgcacccgagggatcacagtttgacgctcgtcaatatgataccaagatgaatgagctgcttacgtccgatggacaggatttcttcacatcctacgatgaggtttatgacagttttgatgctatgggcttgcaagagaatctcctg

SEQ ID NO: 169724 - DNA, 270 bp, Glycine max
ggaaattaagggagtggatattaagcacaagagtgagatcaagagcgatcaacatggtatcttggtgtcggcaaacagcattggtgtttaccacgaccacttctacatttaccatcttgaccttgacattgatggtgttgccaactcttttgagaagacaagtttgaagactgtaagagtgacagatggaagttcgaagaggaaaagctattggacaactgaggttgaaactgccaagactgaaaatgatgcaaagataatacttgggtt

SEQ ID NO: 169725 - DNA, 281 bp, Glycine max
gttcttccacccccgtaccgtctctgcctctctgcaatccacagccgaaaatgcctttcaagaggtacgttgagatcgggagggttgctcaaatcaactacggcaaggaatatggcaggctcgtcgtcatcgtcgacgtcattgaccagaacagagcacttgtcgatgcccctgatatggtgaggtcccaagtcaatttcaaaaggctttcccttaccgacatcaagattgacatcaagagggtccctaagaagaaagatcttgtcaaagccatggaggat

SEQ ID NO: 169726 - DNA, 275 bp, Glycine max
cttttattggtctctggagttacaccacagccacgccgctctaggactgctcattaggtagttttttatttagaggctaacatgagctttgctgcgccatcacttggttctgctggtggtagatctgctagaagagcatttgagtttgggagaacctatgttgtcaggcctaaaggtaaacaccaagcaactatagtctggttgcatggcctcggggataatggctccagttggtcccagctattagagacccttcctcttccaaatattaaatg

SEQ ID NO: 169727 - DNA, 268 bp, Glycine max
caaacataacttgcagtaatggcttcaatgaataaccaaaaagaaattgagctctttgagggccaatctcttctgtacatgcagctatatgggcacctaagacctatgtgtcttaagtgggctgttcaactaggtattccagacataatacagaaccatgccaaacccatttctctttctgacttggtctctactcttcaaattccaccagctaacgctgcttttgtgcagcggttcatgcgcttcttggcacacaatggaatctttg

SEQ ID NO: 169728 - DNA, 266 bp, Glycine max
caaattaatcaaacatggctagggttagtgctttgtttcactctttgctcttgatttcttcccttgtattggcttctcaaatccatgtttcctctgggaaactagtccctggactatcatggaattactatttgttgacatgtcccaagcttgagaggattataaggaagcatcttgaggatgtcttcgagaaggacagtggagtagctcctggcatacttcgactcttcttccatgactgctttcctaatggatgcgatgcgtct

SEQ ID NO: 169729 - DNA, 260 bp, Glycine max
ctctctctcaccaaagccttcctagaacgaaaaaaaaaaagaagagcaattttccctcaccaaagaagaagaagcaaacaatggccgatcaacttaccgatgaacagatctccgagttcaaggaagccttcagcttgttcgacaaggacggcgatggttgcatcacaaccaaggagcttggaactgttatgcgttcattggggcaaaacccaactgaggcagagctccaggacatgatcaatgaagtggatcctgatggg

SEQ ID NO: 169730 - DNA, 251 bp, Glycine max
gtctcgctgttccaagatgggtgtggctgagaacattcccgatatggaggagggtaccttggagattggaatggaatacagaactgtatctggagttgctggaccattggtcattcttgacaaagttaagggacccaaatttcaagagattgttaatattcgtttaggagatggagctactcggcgtggacaagttctagaggttgatggcgaaaaggctgttgttcaggtatttgaaggccatctgggat

SEQ ID NO: 169731 - DNA, 209 bp, Glycine max
caaattagttcattctctttgcgcagttccctacctctccttacaagatgcagatcttcgtcaagaccctcaccggcaaagacatcacccttgaggtggaaagctctgacaccatcgacaacgtcaacgccaagatccaggacaaggaaggaattcaccaggatcagcaacgtctcatcttcgccggaaagcagctcgaggacggacgt

SEQ ID NO: 169732 - DNA, 264 bp, Glycine max
gcttcttgcaagaagtttctgagcttttatatcctctatatatagttctctggcaattaaggtctcatccaaataagcactaatgggtatccagagttacttcaaggctttgattatttgccttatagcactaattggatcaactcaagctcaattgcagcttggtatctatgccaaaagttgtccaaaggctgagcaaataattctgcaatacgttgttgagcatatccagaacgctccatcactagcagctgcactcataag

SEQ ID NO: 169733 - DNA, 262 bp, Glycine max
ctcgagccggtgtacactgcatacgttagaaccggttcggtgatgaagggcggaacggactataagatcgggctgaagctgtacgacaagtacggctactacatctacattaaaaacctcgaagcatggggcggcttgatgggcaagggctacgactacttcgagcgcggcaacctcgacatcttcagcggaaggggaccctgtcttgacggacacgtctgtgccgataacgttacttctgacggatcgggttctcaccacg

SEQ ID NO: 169734 - DNA, 258 bp, Glycine max
ctttaggtgttcctgctcttccgttgacatacgttggtcacgttctggcagttgttggcagcgtcctggtcgtggtcttgggcgtcaatttcaggggtggcttggcttgggattctgataaaaaatccctcatcttcaacattcatccagttcttattgttactggcttactagttcatgggggtgaagctattataagttacaaagcttttcccctaaagaaggaagtgaagacattgatacacttgttttccatgc

SEQ ID NO: 169735 - DNA, 258 bp, Glycine max
catttgatcagattaatttattacatgttacttccatctctaaattaatctgatcaaatgcacaatataaactttcgagaacaagcacgtgttgagaaatgaaatgcttttaaagttaaggcgtatacagctttggagtaatattatgggaaattgcaactgaaaagataccttgggataatctcaactcaatgcaggtgattggagctgtaggattcatgaatcaacggctagagattccaaaaaatgttgatccac

SEQ ID NO: 169736 - DNA, 265 bp, Glycine max
gccttggtcagcgttgcgccaagtactatgaagccggtgcacgttttgccaagtggcgtgctgtgctgaagattggtcccaacgagccatctgagctggctatccatgagaatgcctatggcttggccagatacgctgtcatatgccaggagaatcgcctggttcccattgttgagcctgagatccctgttgatggatctcatgacattcactagtgtgctgccgtcaccgagcgtgtccttgcagcatgctacaaggctttgaa

SEQ ID NO: 169737 - DNA, 267 bp, Glycine max
aaaaatggcacctgcaacactgtctctgtctctcctcctcctgttctcactcagcatcgccgtaaccgttagatcgagcgactacgactacgattgtgtgtacactgcatacgttagaaccggttcggtgttgaagggcggaacggactctaagatcgggctgaagctgtacgacaagtacggctactacatctacattaaaaacctcgaagcatggggcggcttgatgggcaaaggctacgactacttcgagcgcggcaacctcga

SEQ ID NO: 169738 - DNA, 289 bp, Glycine max
gttctgcatcatcacccacaagctcaatctcaccgttgggatcatcccttctcttaatgttgctgctggcttgttggggttcttctttgtgaggacctggactgggttgttgaccaagatgggatttttcaccaagccctttactaggcaagagaacactgttattcagacctgtgttgttgcttgctatggccttgccttcagtggggggtttggttcatccttgattgccatggatgagagaacatatgaactcataggccctgattaccctggtaatagagctgaa

SEQ ID NO: 169739 - DNA, 287 bp, Glycine max
tcgcaatacgtggattactattgaaaggtggagattatattgaaacactttctggaattaagacagttgcttttgataaaacgggcacaataacaagaggagagttcactgtgacagatttttctgtatctgtagatgacattagcattgaaactttactgtactgggtttcaagtgttgagagtaaatcaagtcatcctatggcagctgcactagtggaatatggaatgttgaattctgtcaagccaatccctgaaaatgtggagaatttcaaaattttccagggg

SEQ ID NO: 169740 - DNA, 289 bp, Glycine max
agaaggggtcatcagaaaaagaagggaaattgaagtataacatgaatgatttgttgccttatggcaaggttggatatgaagccttcctcatattccttggctatgtatatactggtaaactcaagccctctccaatggaggtgtctacttgtgttgacaatgtttgtgctcatgatgcgtgtagacctgccattaactttgctgttgagttaatgtatgcctcttccatttttcaaataccagagttggtatcacttttccagagacgtctacttaactttataggaaa

SEQ ID NO: 169741 - DNA, 287 bp, Glycine max
tgtggctgatgtcaacacccagttgaagaacaaaaacatcactactgatatcaaagttgatacagattctaatctcttcacaactatcactgttaatgaacctgctcctggtctgaaggctatttttagcttcaaagttcctgaccaaaggtctggaaaggtggaagttcagtacttgcatgactatgctggaataagcaccagtgttgggttgacagcaaacccaattgtcaacttctctggtgttataggcactaatgttcttgctcttggtgctgatctttctt

SEQ ID NO: 169742 - DNA, 287 bp, Glycine max
gttcgatttcagactcttcattcgggatttgccatagcgattccttggttctcattcattcgttgcgtgctcgttcggctgttctcgtcgttccagtgaagagttccgtttcagtcatacaaccttgcatgagaattgatggcgccaatcctgcagagctctcagccatgggtcgagaaataccggccaaagcaagtgaaagatgttgcccaccaagatgaagttgttcgagtactaacaaacacccttgaaacttgcccccacatgctcttctatggtcctcctgg

SEQ ID NO: 169743 - DNA, 287 bp, Glycine max
ggataatagcttttgacctagctaatagcacacaataatgggaagatccccatgctgcgatgagaatggccttaagaaaggtccctggactcccgaagaagatcagaaactagtccaacacattcagaaacatggccatggaagttggagagccctccctaagttagctggtctcaatagatgtggaaaaagttgtaggctaaggtggactaactatttaaggcctgatatcaagagggggaagttttctcaagaagaggagcaaacaattctgcatctccattcca

SEQ ID NO: 169744 - DNA, 285 bp, Glycine max
ctatttctcagtctctgtgtttgcggctgaggattccgaacgagtgaccttcttcgtttctcgcaaagtttaagtaatcatgggtaacgaaaaggttcacatcaacattgtcgtcattggacatgtcgactctgggaagtcaactaccactggtcacttgatctacaagcttggaggtattgacaagcgtgtgattgagaggttcgagaaggaggctgccgagatgaacaagaggtcattcaagtatgcctgggtgctcgacaagctcaaagctgagcgtgaaag

SEQ ID NO: 169745 - DNA, 282 bp, Glycine max
gggagccgtagcagcggaagctctagcttgggtagcgaatcacaatggcgagaggattaaagaagcatctgaagaggcttaatgccccaaagcattggatgcttgacaaactgggtggtgcatttgctcctaagccctcatctggaccacacaaatcgagggaatgcctgccactcatactcattttgcgaaaccggctgaagtatgctctaacataccgtgaagtcattgctattctgatgcagcgacatgtccttgttgatggcaaagtcaggactgaca

SEQ ID NO: 169746 - DNA, 284 bp, Glycine max
ccccgttatagatctttctccctccctctccggcgagtgggacccacttctctgcgccgaggtcagccgcagcctcagggaaaccggcgcgctcctcgtcaaggaccctcgctgcaccgtcgaggacaacgatcgcttcatcgacatgatggagcgctacttctcaaaaccccgcgacttcaaacaccgccatgagagaccccacttgcattaccaggttggggttacaccagagaaagtagaagttccaagaagcttggttgatgacgaaatgcaggagaaac

SEQ ID NO: 169747 - DNA, 279 bp, Glycine max
gaaagctacctagagcttgcacctattggtatcttctacaatatcctctcatagtgctcttcttcttcttcattctcattatcaagatgtctttgctttcggatctcatcaacctcaatctctcagaatccacagaaaagatcgttgctgagtacatatgggttggtggatctggtatggacctcagaagcaaagccaggactcttcctgggccagtgagtgaccctgcaaagcttccaaagtggaactacgatggctctagcacagaccaagctccag

SEQ ID NO: 169748 - DNA, 281 bp, Glycine max
gaacgctgctgccgaaacccttccggaaccctaaggtaagtgagtaatcagtggttgagaatggtggcgaaggcgaagggtagaaaggaggaggtggttacccgtgagtacaccattaacctccacaagcgcctccatggctgcacatttaagaagaaagctcctaaagctattaaggagataaggaaatttgcccaaaaggccatggggaccaatgatgtgagggtggatgtgaagttgaacaagtttgtctggagccagggaatcaggagtgttccaag

SEQ ID NO: 169749 - DNA, 264 bp, Glycine max
tttccctttctctctctcattctcttctccatcgcgcgtaagaaacacattttagttgctactaatgggaactgttgaagctgcaaacaaggatgcaaatggaagtctcctagagaaaaatccttcagttgtttttgtgttaggtggcccaggaagtggaaagggtacccaatgtgcaaatattgtccaaaattttgggtatactcatctcagcgctggtgatcttctgcgagcagaaatctaatctggttctgaaaatggtac

SEQ ID NO: 169750 - DNA, 288 bp, Glycine max
ggcttcttcactgggtcgaagaagaacccacgctcccaaatcttcctccaccctaaacgacgacgtttcctgcgaggactgcggcgacggccactctccttcgaagcttcttctctgcgacaaatgcgaccgtggctaccacctcttctgcctccgtcccattcttccctctgtccccaaaggctcttggttctgcccctcttgctccaatcacaaacctaagtgtttccctcttgtgcagaccaaaatcattgacttctttcgaatccaacgctcgcccgaggcatt

SEQ ID NO: 169751 - DNA, 285 bp, Glycine max
agcaaaaggaaagaatatcaacaaggtaaagtagattccttactagacatggcgttgaaggacacattctacatatctcatggatcaccaactttgtccatagatgaatccattcaggccaggaagttccttcagtcatggaagaaggacgtgtttcctcaaagaccctcttcaattcttgtcatctctggtcattgggaaaccgcagttcccacggtcaacgtcgttgactccatcaacgacaccatctacgatttctatggcttccccaaacaaatgtaccag

SEQ ID NO: 169752 - DNA, 281 bp, Glycine max
cttgctggttgccacactacaccgatatttccaccaaacccgttagcgttgttgtttgcgaataaatggcgactaagaggagcgtgggaacgttgaaggagggtgatttgaaggggaagagggtattcgtgagggtcgatctgaacgtgcctttggatgacaaccttaacatcaccgatgacactagagtccgtgctgctgttcccaccatcaagtacttgactggttatggtgctaaagtgatcctttctagccatttgggacgtccaaaaggtgtaaca

SEQ ID NO: 169753 - DNA, 281 bp, Glycine max
cagaatgctactgggcccaaatcagggttgtttgttccagaagtgccatttgaagtccttgtgcgaaggcaaatatcacgtctattggatccaagtcttcaatgtgccaggtttatatatgatgaattaataaagatcagccatcgctgtatggtaaatgtactgcagcgattccctttcttgcggaagcgcatggatgaagttatagggaactttctacgagaaggccttgaaccctcagagaacatgattgcgcacctcatagaaatggagatggacta

SEQ ID NO: 169754 - DNA, 284 bp, Glycine max
ctatagaagagccttccatatatagcctcccaaaaaaatgaagagtactacctctttggctctctttctactttgtgccctaacttcatcatatcagccttcagccaccgctgatattgtattcgacaccgaaggcaatcctattcgaaacggcggcacatactatgtgttgccagttataagaggaaagggcggcggaatagaatttgccaaaaccgaaacagaaacatgccctctcactgttgtgcaatctccctttgaggtctcacagggtctaccactga

SEQ ID NO: 169755 - DNA, 280 bp, Glycine max
gattgctagaatggaatttcgatgctcagtcatctcttttaccattctcttctctcttgctcttgcaggagagagccatgtccatgcatcgctacctgaggaagattattgggaagctgtttggccaaacactcccattcccactgcactgcgagagcttctaaagcctctccctgcaggacttgaaatcgatgaactccctaagcaaattgatgatacacagtacccaaaaacattcttctataaagaagaccttcatccaggcaaaacaatgaaagta

SEQ ID NO: 169756 - DNA, 279 bp, Glycine max
caaatgactcaagcccagattcaaccagttaaacttggaacccaaggctttgaggtactattaactacattacttgctcttattttgataattgatacaattaatctcattctaggtttcaaaattgggattcggatgtatgggccttactggagcgtacaatgaccctctccaagaacaggatggcatatctgttatcaagtatgcgttcagtaagggaatcacattttttgatactgcggatgtttatggagccaatgctaatgaacttttggttgg

SEQ ID NO: 169757 - DNA, 282 bp, Glycine max
cgatgtgtcattgagacagaagaagaagacgaaattggagggggtgtgtgatcgggtcctcaggtgaagatctgcggctgttggtgtctcttttcttttctccgagttccaaagatgagcgcttctaggttcatcaagtgcgtcactgtttgggatggtgctgtgggcaaaacctgtatgcttatttcctccaccagcaacacttttcccaccgattatgtgccgactgtttttgacaatttcagcgcaaatgtggttgtcaatgggagcattgtgaatctg

SEQ ID NO: 169758 - DNA, 283 bp, Glycine max
ctaatcctcaaaagcggggaaaggaagattggattctgggactttgacgttgtttcaattgtggtcgtgtcggtgcccgatctcaaacgacgatgtcatctttatatagaggagaatccaggaggtacaacaataaaccaagaggacgtcataatttgacaacgcagaagaagcaggagattaaggaagcctttgagttatttgatactgatggctcaggaactattgatgccaaagagctgaatgttgccatgagggcccttggatttgagatgacagaaga

SEQ ID NO: 169759 - DNA, 282 bp, Glycine max
ttttcttatctgtgtttttcttcgaattgcatgacgtgggtttttctagggtttggaggctatgccgaaaacgggttaaataagctcggaaaatgattctcacaaagcagtaccgatgcatacactcagctagttgtcaatgtactaaagggcatttaagtgaagatatgatattcttagtatttcataatttgaattggaatcccaagctaattgcaactctatcatgtgtgtgcaaatggtttgatgatcttgccaagcgagttctatggaaagagtttt

SEQ ID NO: 169760 - DNA, 279 bp, Glycine max
tcgggaagccggctattcaggcatcatggctaaggttttggctcagtctattaatgtccctggtctattggctgagcataagcatcgtcagcattaggcatcaggaatattattcagatagaccataatgatgagtgctttacgaacaaatggattatgaatgtcaggtatctcaaggcttcgtactttcaatcctttggatactatgttgagatctggaatagatagtcattctacggtctccattgcaacttcttcacggcgcgcttgacctaccaa

SEQ ID NO: 169761 - DNA, 279 bp, Glycine max
ctcttccttcagcaactacgatcttcgatagtgatttatcagattcttcctttgcggtcgaatcatggagcccatggacatcgttggtaaatcaaaggaagacgcttcgcttcctaaagcaacaatgaccaaaattattaaagagatgttacccccagatgtacgtgttgcaagagatgcccaagatctattgattgagtgttgtgtagagcttataaaccttgtctcgtcagaatccaatgaagtctgtaatagagaggataaacggacaattgcacc

SEQ ID NO: 169762 - DNA, 276 bp, Glycine max
ctgatctctctgctgttgtgttttgttaatctcattcagacaatcacagttatactctctctctctcactttgatcactgatctcatctcaattttcagatatgtcgacatctgataagccagaagaggtggaaaggggtagcaaggatgaaaagcacaaggcagatgatcaagaggaggggaagggtggattcattgagaaggtgaaggatttcattcatgacattggtgagaagattgaggaagctattgggtttgggaagccgagtgccgatg

SEQ ID NO: 169763 - DNA, 275 bp, Glycine max
acctttctcctaaaacatctccagtgggttcttcttcttctattacaacaacgtcgtccaagaccatgaccatggccatggccacgatcctgctcctgttcacggtcttcgcggtttcatcggccctagacatgtcgataatctcgtacgacaacgcccacgccgccacgtcgcgcagcgagagcgagctgatgtccatgtacgagcagtggctagtaaagcacggcaaggtgtacaacgcgctcggagagaaggagcagaggttccagatcttc

SEQ ID NO: 169764 - DNA, 283 bp, Glycine max
ctgcgcttcacgatgggtgcttacaactatgtttcggagctatggcgcaataagcagtcttatgttatgagattcttgcacccagtgaggtcgttggaataccgccagagacctactattgtccggttgacaaggtctactcgcccagacaaggctcgcggattgggtttcaaggctacgcagggttatgtgaattcacgcattcgtgtacgaaagggttgtcggaagagaccatctccctaaggcattgtacgtggtaatccctccaaccaaggtgttactc

SEQ ID NO: 169765 - DNA, 277 bp, Glycine max
gtctcttccattcacaaccttaaacctttctttcttgtaaactttattgattgattctgagaatagaactacgagggtatagacatggctagcgcaattgcagcttcttttttggttctgcttctggctttccccactgtatttggagctgaccatgaagttggtgacactagtggatgggccctcggagttaattacaacacctgggcctctgggaaaactttcacagttggtgacactttggtgttcaagtatgactccactcatcaagttgatg

SEQ ID NO: 169766 - DNA, 280 bp, Glycine max
ctctttctccgagaacaacaaaaaaaccgtgattcggtcttcgctaccgaataaaccacaaaaccaccaaacgagaagaggagtgaacgaagatggggttgtcgttcacgaagctgttcatcaggttgtttgccaatatggaaatgaggattctgatggaaggtctcgatgctgctggtaagacaaccatcttgtacaagctcaagcttggggaaatcgccaccaccatccccaccatcggatttaatgttgagactgtggagtccaaaaacatcagctt

SEQ ID NO: 169767 - DNA, 279 bp, Glycine max
ctccacgtggctaacagaagaaaaggtttcttgaactacatgcttcttctaagactgactccgacactagctaacacatttagtaattgtgcttcaccaattgtggatgtgccttatcatattttcttcttggcaactgttattggactaatacctgctgcttatgtcactgtcaaggtacgtagctatcagcataataatttttatttagaaatgttattgatattttataataaaaagatagatacgatagcgaaaagtgagatgtaattactgatg

SEQ ID NO: 169768 - DNA, 280 bp, Glycine max
gttttctacgattattcatagtgaggcaatagtagcagcaattcacactggtctttgcttctcgttactcatttctcacctaactttctattcttctcagtctcagatcagaaccttggccatggcagcgttccagaagatcaacgtcgccaaccccatcgtcgagatggacggagatgaaatgactagggttatctggaagtcaatcaaggacaagctcattttgcccttcttggagttggacatcaagtattatgacttaggccttccttaccgtgat

SEQ ID NO: 169769 - DNA, 276 bp, Glycine max
gtggaatctacagtgttcttaaccagaagcgtggacacgtgttcgaggaaatgcagaggccaggtaccccactatacaacatcaaggcatacctccctgtcatcgagtcctttggtttctcgagcacattgagggctgcaacatcaggccaggccttcccacaatgtgtgtttgatcactgggacatgatgtcttctgacccattggaggctggatcacaagctgcacagcttgtcactgacattcgcaagaggaagggcttgaaggaacagatga

SEQ ID NO: 169770 - DNA, 266 bp, Glycine max
ctcataaagttgccagacttaaagcaaaaaccaaattgagagagcacatgatgaagccatcgatgctcagatctcttcactctgccgccactcgctgcgcctcccacctctcccgccgtggctacgcctccgagccggtgccggagcgcaaggtggccgttctaggtgccgccggcgggatcgggcaacccctctcccttctcatgaagctcaaccccctcgtttccagcctctacctctacgatatcgccggaactcccggtgtc

SEQ ID NO: 169771 - DNA, 214 bp, Glycine max
caaagaaggcgtcttcataaacgcctttcttctccgtttccgtttcctcgttcgaattcgcgttttgatctgcgaacatgagagagtgcatctcgatccacattggtcaggctggtatccaggtcggaaatgcttgctgggagctctactgcctcgagcacggcatcgggcccgatgggcaaatgccaagtgtacagacagttggcggtggtga

SEQ ID NO: 169772 - DNA, 273 bp, Glycine max
gtatttccctacctctcccttcaagatgcagatcttcgtcaagaccctcaccggcaagaccatcacccttgaggtggaaagctctgacaccatcgacaacgtcaaggccaagatccaggacaaggaaggaatccccccggaccagcaacgtctcattttcgccggaaagcaacttgaggacggccgtacccttgctgactacaacattcagaaggagactactcttcacctcgacctccgtctccgtggtggcatgcagatcttcgttaagac

SEQ ID NO: 169773 - DNA, 275 bp, Glycine max
cagaccagcaacgtctcatcttcgccggaaagcaacttgaggacgggcgcatcctcgccgattacaacatccagaaggacatcaacccttcacctcgtcctccgtctccgtggtggcatgcagatcttcgttaagaccctcaccggcaagactataaccctagaagtcgagagctccgacaccatcgacaacgtcgaggctaagatccaggacaaggatggtatccccccagaccagcagaggctgatcttcgccggcaagcagctcgaggacgg

SEQ ID NO: 169774 - DNA, 278 bp, Glycine max
caaatcttagtcttcttagtttcctcactcacacaaatggcaaagctaatccatttcctccttttccttttcatccaaacaatttcagcccaaacaccagcagcaccagcgggccccaccaacatcacccaagttctagagaaagcaggacaattcacaaccttcattaaactcctcaaagcttcacaaatagctgatagaatcaattcacagctgaacaactcaaaccaaggcctaaccgtgtttgcacccactgataatgcattctcaagcctcaa

SEQ ID NO: 169775 - DNA, 276 bp, Glycine max
gatgacctgaatgaaattgttcagcttgtgggcaaggatgctttagctgaaggagataagatcaccttagaaactgcaaagcttttgagagaggattatcttgctcaaaatgcctttacaccatatgacaaattctgccccttctacaagtctgtttggatgatgcgcaacattatccatttctacaatttggcaaatcaggcagtagagaggggagctggttcagatggtcagcagatatcttacacccttatcaagcatcgtatgggagatctg

SEQ ID NO: 169776 - DNA, 276 bp, Glycine max
tccctcgagccgattcggctcgagctcactcaaactcgtggatcacagaactccacaacagttcttgcactgaggtttcacgatgtacgctggaacttgcacttggattgtctgtgtcagctttgcttctgcacttgcgtcccacaccaagtgcataatccaaaagcacttcgccacctcccaaaccctccaagctcatagcctcgacttcccttcattggccaccttcacctcttaaaagataaacttctccactatgcgatcatcgatctctcc

SEQ ID NO: 169777 - DNA, 272 bp, Glycine max
caatcaaattcttcgcgttgaacacaggggccaagattccttctcttgggttagggacttcgcaagctgaacctggtgttgtagctgaagctctcaccacaggcattcaggttggatacaggcatattgactgtgctagtgcgtataaggatcaagcagagattggttctgctcttaagaagctttttgatgatggtgtggtgaagcgtgaggacttatggatcacttccaaactctggtgttcagatcatgcaccagaagatgtgccaaaa

SEQ ID NO: 169778 - DNA, 265 bp, Glycine max
ctggctttcatcttctaaattggttgttaaacctgacatgttatttcgaaagcgtggcaaaagtggtttggttgccttgaatttggattttgcacaagttgtttcatttgtgaaggagcgtcttggaaaagaggttgagatgagtggatgcaaaggacccataacaactttcattgttgaacctttcatcccacacaatgaagagtattgacttaacattgtctccgagagacttggggacagtataagcttttcagactgtgga

SEQ ID NO: 169779 - DNA, 254 bp, Glycine max
aaactccgcaaatactggggcggcaatgacgaagaccctttggcctctgatgactatatgtggaacaaggagtttatgggtcgcttccaaaagttgattgaggaacccaatgctcaaccccctcctgcaaaggaagagccttcagggtttctaagcttaaatagagtcatgagcctggacagtttggaagttgatttgagcaaagaactcgcagctcctgtaaatcataatgcacacctgcaaattgatgcaga

SEQ ID NO: 169780 - DNA, 249 bp, Glycine max
gaagtctgatctttaccttttacaaggctcagggttattcagttgggtcatctcttgtggaggaagacaagcttagccttgcaactacacttcttgaaaaggccaaggctaaaggggtttctttgttgcttccaactgatgttgtcatagcagacaagtttgctgctgatgctaacagcaagactgtgccggcatcaagcatcccagatgggtggatggggttggatattggtcctgattccatcaaga

SEQ ID NO: 169781 - DNA, 247 bp, Glycine max
gttgacttctttcaacctaacccatcgttcgcacggagccgtggtggttctggctctgtccttttttcctttctctcgttaccagaaccagaagaaccatttgtggccaacatggatttggaccagtggatctccaaggtcaaagagggccagcatcttcttgaagacgagcttcaacttctctgcgaatatgtaaaagagatccttattgaggagtccaatgtgcagcctgtcaatagtccagtga

SEQ ID NO: 169782 - DNA, 243 bp, Glycine max
gttcttgctttcgaagcaggaagaaagcgcaaaattagagtcaatactatatctgctggtccactgagaagtcgggctgcaaaggctattggattcattgatatgatgatcgattactcatcagccaatgcacctctacagaaagaactatcagcagaggaggtgggcaacacagctgccttcttagcatcacctttggcatctgctatcactggtactgttctatacgttgacaatggtctg

SEQ ID NO: 169783 - DNA, 248 bp, Glycine max
cacatagtagctattatactctctagagtaattgcggaatctgctagaattttctaataatggcgaaagacgttgagcaggtcacagagcaaggtgaatactccgcgaaggactaccatgaccctcctccggcaccgttgatcgacccagatgagctcacaaagtggtccttgtacagagccgccatagctgagttcatagcaacactcctttttctttacatcaccgtgttgaccattattggctac

SEQ ID NO: 169784 - DNA, 252 bp, Glycine max
acaagttgcaactgaaccaatcaacaactttcttgtattccaaattatcttcaccattacaatcctcaaagtcaaaaagtgaagaccttaacataaaacaaaacacaatggtaatgtgggtatttgggtatggttctttgatctcgaaagctgggtttcactatgacgaacgtattgttggtttcatccaaggctatcgacgagtcttctaccaaggctctactgaccacagaggaacccctgagttccctg

SEQ ID NO: 169785 - DNA, 245 bp, Glycine max
cttttctccaaaaccatccaacaagggaaacagaatattattccatttttcaattatggcatcctcaactcaattctccaccactctggttacactatgtctcttccaattcctagcaggttcgtattcaacgacattcacgattgtgaacaagtgcagctacacagtttggcccggcattttatccggcgccggaacctcgccgctccccaccaccggcttcgtcttacaacccggcgagtcca

SEQ ID NO: 169786 - DNA, 242 bp, Glycine max
ctttaggtgttcctgctcttccgttgacatacgtggctcacgttctggcagttgttgccagcgtcttggtcgtggtctgggtcgtcaatttcaggggtggcttggcttgggattctgataacaagtccctcatcttcaacattcatccagttcttattgttattggcttactagttcatgggggtgaagctattataagttacaaagcttttcccctaaagaaggaagtgaagacattgata

SEQ ID NO: 169787 - DNA, 240 bp, Glycine max
tcgagcacagagagaagagaagagaacttgtattttctgccagtttcccagtatggctgccacaagcacaaatcaatccgagttagaaacaagtaagaaggattccacttatgacagaatagctgaagtcaaagcctttgatgaaacaaaacttggtgtgaaaggcctcttcgattctgggatcacaaagataccacgcatgttccatcatgccaaggtggaggaccacactgaaaccat

SEQ ID NO: 169788 - DNA, 247 bp, Glycine max
cattggtatggctatgttactccggatgacgtggcagccttgttggaccgacaaattgccaagggagaggtcataaaaaaactttggaggggtcaaatggggccacccggtgccgaaatcaaggtagcagatgaccataaacttgctaacggagtttataataacaaggccaatctaagcaacaatgaaaatgttacaggatgctgtcagggtgttaatggggtttcttgctgcaggactgcaagtt

SEQ ID NO: 169789 - DNA, 247 bp, Glycine max
agatcctagaaataaggagattgatcttgatagttcaatgtatgagaaaattcctgacctaactgaggaagatatgaaaaaacaagaaggagattacatctaccgttatcgttacaatggtgggggtgcaactcaagtttggctaagctctggcagatttgtggtgattgacctttcggcagggccatgcacttatggtaagattgaagctgaagagggaagtgtctgttctagaaccctgccaaga

SEQ ID NO: 169790 - DNA, 247 bp, Glycine max
gcgaaactgaggtcgtagaaagaatggcgaaaacgacgtcgttgttgctctttacactgctcctcttcggaaccttagctctcatccaggcgaagaaatcgaaggaggatttgaaggaagtgacccacaaggtttactttgatgttgagattaatggaaaagaagcaggtcgtattgtgatgggtctttttggaaaggctgttccaaaaactgcagaaaactttcgagctctttgcactggggaaaa

SEQ ID NO: 169791 - DNA, 242 bp, Glycine max
ctcctcattccttcatttttaaacctagctccatctccctccactcaccataacatggcatcagaagcaaatgctgccaacaccaacttctgtgtaaatgttagcaacaatggctacattagtgctaatgaccccttgaactggggtgcggctgcggaggctatggctgggagccacctcgacgaggtcaagcgcatgctagaggagtaccggaggcccgtcgtcaagctcggtggagagac

SEQ ID NO: 169792 - DNA, 238 bp, Glycine max
ccggatcccccttcgaagtgaattatattgcagcgaatcacacacactctgaacaacgcccaccatgcaggccagtgataggtttaacatcaattcccagcttgagcatctccaagccaaatatgttggaactggccatgccgatttgaacagatttgagtgggcagtgaacattcaacgagatagctatgcatcatatattggacactaccctttactgggattctttgctattgct

SEQ ID NO: 169793 - DNA, 171 bp, Glycine max
ctcttcttctcttgcggctagggttttagcgcacttcttctagatttaaggaagatgggtaaggaaaaggttcgcatcagtattgtggttattggccatgttgactctgggaagtccactaccactggccacctgatctacaagcttggaggcattgacaagcgtgttatt

SEQ ID NO: 169794 - DNA, 241 bp, Glycine max
ctcagaattctctaaaagagatctttttctgctctttgaagaaagaagggtctttgcttgattttggagatgtctctgctctcagatctcatcaaccttaacctctccgataccaccgagaaggtgatcgcagagtacatatggatcggtggatcaggaatggacctgaggagcaaagcaaggactctcccaggaccagttagcgacccttcagagcttcccaagtggaactatgatggtt

SEQ ID NO: 169795 - DNA, 241 bp, Glycine max
catttctccatttccattttctctctcacttttcaagaatcgtaagctatgggaaagtcttacccaactgtgagtgctgattaccagaaggccgttgagaaggcgaagaagaagctcagaggcttcatcgctgagaagagatgcgctcctctaatgctccgtttggcatggcactctgctggaacctttgacaagggcacgaagaccggtggacccttcggaaccatcaagcaccctgccg

SEQ ID NO: 169796 - DNA, 241 bp, Glycine max
tcgagtttgagccaaaacccgaaataattgagccacaattggaattcagttttccaaccacacgctgcaaatcgagtcgaaggccgtcgctgcaaatctctctcccgaagaagaccgagtggatccaatttggagagcccgaggttaccgaaacggtgtcgcagagtaacccgaacgcggaagagaagaagcactacagaggagtgcgacagagaccgtgggggaagtttgcagcggagat

SEQ ID NO: 169797 - DNA, 237 bp, Glycine max
gagcctttgagggttaatgttctgttccaacatatacaaaatatgctgtctggtgaaactgctgtaattgctgagacaggggactcctggtttaattgccaaaagctgaaattgccaaaggcatgtgggtatgagttccaaatgcaatatggttcaattggatggtctgttggtgctactctgggttatgctcaagccgttcctgagaagcgagtgattgcctgcattggtgatgga

SEQ ID NO: 169798 - DNA, 237 bp, Glycine max
cacgaggagacaatcactcagtccccaacaatgtacaaaatatagccaagcctgtcaaaatagatggatcttcccatgcattgcagaatggcatagattcagcaatacgccatactcacagaattttagcaattttagaggcgctgttttcattgaagccatcttctgttggtacctcatggagttacagctcaaatgaaatagttgcagctgctatggttgctgcacatatttctg

SEQ ID NO: 169799 - DNA, 241 bp, Glycine max
tgtcacttcaggtgtgaaaaaggttacgaatgatatgaagactaagaatcgcaccgatagaactggagttgttcgtgctattgaaaaagaaactccggcaagttcacgcgtgttttctaaagcaggacctccaaaatttgaactctcaaatgggtcgcaaatgggttgttgagaatcaaattgagaagaaagacttggtgattgaagattgtgattcaaagcagtctgtatatatttatgg

SEQ ID NO: 169800 - DNA, 241 bp, Glycine max
  unsure (1)..(241): unsure at all n locations
agcgccctgcgtgaagcggtggtgtactcgactccganctcgtactcgtcgacgacatcgccaagctcgcgacaacctcgttgggagaacacaacaacgttttggcggcgccggaatattgcaacgcgaacttcacctcgtacttcactcccacgttctggtcgaacccttctctgtcgctaacgttcgcggacagaaaacagaaagcgtgttactttaacacgggggtgatggtgattga

SEQ ID NO: 169801 - DNA, 245 bp, Glycine max
gtttttgagcaacagcagttaaaagagaaaagggattcagcgaagatgacatcgcttggtgtggcaccaacttcgggtttgagagaagccagtgggcatggagcagcagctgcggatagattgccagacgagatgaacgatatgaaaattagggatgatagagaaatggaagccccagttgttgatggcaacggaacggagacaggacatatcattgtgactaccattgggggtagaaatggtca

SEQ ID NO: 169802 - DNA, 242 bp, Glycine max
atcgaatcgaatctccgaagatggccgcgagcgatcgcacagtgttgcaattctcttcatcatcttcttcttcgcagagcttgtccccgaaggtccaccctctggtcatcttcaacatctgcgattgctacgttcgacgccctgaccaagccgatcgcgtcatcggaaccctactcggctccgtccttcccgatggaaccgtcgatatccgcaattcctatgcagttcctcacaacgaatct

SEQ ID NO: 169803 - DNA, 236 bp, Glycine max
cctcgagccgaatcggctcgaggggttttgtgattttttgaagaataccgttttggagttagtacggagatggagctgtcgactccgaattcttcctcgaagcacttgtccattacgccgggttctagggttttgagaaaccctctctccgacgaacagatctggaagcgcctccgtgacgctggcttcgatgaggaatcgattaagcacaaagataaggctgcgcttattgctta

SEQ ID NO: 169804 - DNA, 235 bp, Glycine max
ggtggtttgtgtcaccggagccagcggcgccatcggatcatgggtggtcctactcctcctccagcgtggttacaccgtccatgccaccgtccaagatatcaaggatgaaaatgagacgaaacatttggaggaaatggaaggagcaaagagtgatctccatttttttgaaatggatcttcttgacatcgactccattgccgctgccataaagggttgttccggcgtaatccacctt

SEQ ID NO: 169805 - DNA, 237 bp, Glycine max
gtatttccctacctctcccttcaagatgcagatcttcgtcaagaccctcaccggcaagaccatcacccttgaggtggaaagctctgacaccatcgacaacgtcaaggccaagatccaggacaaggaaggaatccccccggaccagcaacgtctcattttcgccggaaagcaacttgaggacggccgtacccttgctgactacaacattcagaaggagagtactcttcacctcgtcct

SEQ ID NO: 169806 - DNA, 236 bp, Glycine max
aacagctttcatggttccattggtggctggtgatggaaccaaaactcaggcacttgctgtttgccactcagatacttctggaatgaatcatcacatgcttcatgaactcatgggagttgatcctggaactaaccctgtttgccatttccttggaagcaaggccattttatgggtacccaatttatctatggacactgcctatcagactaacgttgttgtttaattagtccatgcat

SEQ ID NO: 169807 - DNA, 238 bp, Glycine max
ctcgttgttgcttcgctgttgaatcatggatcagaaggtcgatttcagcgctccccattccatgggaaccactatcatcggcgttacttacaacggcggtgtcgttctcggagccgactctcgaaccagcaccggagtgtatgttgccaaccgagcatcggacaaaatcactcagctcactgataatgtatacgtgtgtcgctctggatcggctgctgattctcagattgtctctgat

SEQ ID NO: 169808 - DNA, 242 bp, Glycine max
catcattcaaccagatggctgagcagcttcagaaaacttttcaaggagctccacaggatgctatgcctagctttgataatcaacaatatttttcaaccatgcaacaggttatgcagaatcctaattttatgaccatggctgagcgcctgggtaatgcattgatgcaggatccacctatgtctgccatgcttgaaagtttttctaatccatcacataaagaccagcttgaagaaagaatgaca

SEQ ID NO: 169809 - DNA, 236 bp, Glycine max
ggacatcttgtgagcactacggattgttataggaagactagaatattcattgagacttttcttccaaagatggggatcacgaccactgtaattgatccagcagatgttggagccttggaatctgcattggagcagcacaatgtgtctctattcttcactgagtctcctaccaattcattcctgagatgtgttgatattaagctggtttcagagctttgccacaagaaggggacttt

SEQ ID NO: 169810 - DNA, 234 bp, Glycine max
gttgattcggatctagagtcttttttcactcttcagttctcgttgttgttcttcgctttcctgaaactagggttttcaatttcgattcattcgttaataattaaagatgtttgggagggcaccgaagaagagcgataatacgaggtactacgaaatcctcggcgtctcgaagaacgcttcgcaggatgatctgaagaaggcttacaagaaagccgccatcaagaatcaccctga

SEQ ID NO: 169811 - DNA, 236 bp, Glycine max
cttttctgaatctcgcggcgttgttagttctgcggcggttgtagttccggcggcgatgggacagcaatcgttgatctacagcttcgtcgctcgcggcaccgtgatcctagcggagtacaccgagttcaccggaaacttcaccagcgtggcggcgcagtgcctccagaaactcccttcctccaacaacaagttcacttacaactgcgatggccacaccttcaactacctcgttgata

SEQ ID NO: 169812 - DNA, 237 bp, Glycine max
caaatgagctgtcctttcaaatgtggacaaatcaaatacaagaaactctaaattctaagaagcaaggcgattctgcttttcatgctagagacttctccacggccattgactgctatacacaattcatcgatggtggaactatggtatcaccaaccgtgtatgccaggcgctgcttgtgctacctgatgaatgacatggcacaagaagcacttggagatgccatgcaagctcaatcaa

SEQ ID NO: 169813 - DNA, 242 bp, Glycine max
aatagtgttaatctgtctttctctatctctatcggtcatgggtgcttttgcttttgatgaggaaaactcctccaccgtggctccggcaacactctacaaagctctgacaaaagatgctgacactatcatcccagagattattggggccatccaaactattgaaatcgttgaaggaaatggaggacccggaaccgtcaagaagataacagctagtgaaggtgaccagaccagtttcgtgctgc

SEQ ID NO: 169814 - DNA, 244 bp, Glycine max
tttacaaatcatctgggaacttctgtactcaatgtgaggctgaaggcttccgtaaaattacattttatcaggatcgacctgatataatggcaaaatatacagttcgcattgaggcagataaatcactgtatccagtgtattgtgcaatggcaacctagctgaacaaggtgacttagaggatggcaggcactacgctgattaggacgaccccttcaagaacccttcgtatctgtttgccttggtt

SEQ ID NO: 169815 - DNA, 244 bp, Glycine max
agccgatgtggtagagcagttcctcccagaccacaatgaatccatttctgcagttcttgacaagtttggtgccatgggaattgacacccccggcgtagttgcattgcttggagcacacagtgttggtcgaacccatttgtgaagttggtgcaccgtttgtacccagagattgatccagctctgaaccctgaccacgtccctcacattctgaagaagtgccctgatgccattccagaccctaagg

SEQ ID NO: 169816 - DNA, 241 bp, Glycine max
cttgttgttggaaagaaaccctagcaagcggaacaatggcagacgttgaggtcgatgtggcggctgcagcagcagcagggcagccgaagaagagaacgttcaagaagttcagtttcaggggcgtggatctcgatgcgttctggacatgtccaccgatgaactcgtgaagatgttcagtgctcgcgcacgtagaaggttccagagaggcctcaccagaaagcccatggccttgatcaagaag

SEQ ID NO: 169817 - DNA, 245 bp, Glycine max
cccttcctcgatctctccaccgccagccccgcctgccaccgccgtccccttccccgccgaacccaacgaccaccttccaccacccattcccgaaccaccttctaaccacccaccctacgccgagatgatatacacggaatcgaggcgctgaaggagacagacggttctagcaagagggcaatagcgaagtatattgagcaagtgtatacgcagcttccaccgaatcactcagacttgttgactca

SEQ ID NO: 169818 - DNA, 241 bp, Glycine max
ctttgcatgtcacaatctcattcatcatcatcttcttcttaaaagttaaaaggttaagagagagagagaaagatgagtagcgtgttggagcatggtgttgtgggatgttgcaaatcagggccaggctatgctaccccctggaagccatgtctggtccaagagagtctcttatttatgtaactgctgtctacacagggacaggaatagagaagccggactatttggccacagtggacataga

SEQ ID NO: 169819 - DNA, 234 bp, Glycine max
caactcgcagcaccaccaccagcaccaccaccagcaccgttctattcttcttccacaatgggtatctctcgtgattccatgcacaagaggcgcgccaccggcggcaagaagaaggcttggaggaagaagagaaagtagagcttgggaggcagccagcaaacacaaagctatcaagcaacaagacggtgaggaggattagggttcgctgcggaaacgtgaagtggcgtgctttga

SEQ ID NO: 169820 - DNA, 240 bp, Glycine max
aacatccaggagaaaagctgttgcctctcgaatcagatttctctgaagaaagagatcagttattgtgttgtaatcaactgggctacctccctccatttgagacatcattaatgcaaaattaacagcgccctgaggtctgtccggagaattgtttgcagaaggaagaggtagtcaggtgtgtacccaacctgtttagagtaaatcagaattttgtcaaactccctcctctcagcaaacgca

SEQ ID NO: 169821 - DNA, 252 bp, Glycine max
cggtcgagctccttgatcagatcaggggactaagagctcacactgatgctggtggcataattctactcttccaagatgacaaggtgagtagcttgcagctcctcaaggatgaccagtggatcgatgtcccaccaatgcgtcactcattgtaatcaaccttggtgaccaacttgaggtcataaccaatggcaagtacaagagtgtgatgcaccgagtgattgctcaaaccgatggtaccagaatgtccatagc

SEQ ID NO: 169822 - DNA, 240 bp, Glycine max
gacatagtgtttgtctctgtcaacaccccgacaaaaactcgcggtcttggagccggtaaggccgcggatttaacgtactgggagagtgcagcacgcatgattgctgatgtatccaagagtgacaagattgtggtgagaaatccactgtccctgtgaaaactgctgaggccatagagaaaattttgactcacaatggcaagggaatcaagttccaaatcctttcaaaccctgaattccttg

SEQ ID NO: 169823 - DNA, 237 bp, Glycine max
ctttttctccacgtctaaggggtgccctgagatcactttgagcaatggtgaaggctgtggcagttcttggcagcagcgagggtgtcactggaactattttcttcactcaggagggaaatggtccaaccaccgaactggatctcttgctggtcttaagcctggtctccatggcttccatgtccatgccttgggggacactaccaatggttgcctgtcaactggagcgcatttcaatcc

SEQ ID NO: 169824 - DNA, 242 bp, Glycine max
ctctgaacggaaaagcaccgtcgcaccttccctgaggcttctcttgtctgtcgcgagtgaccatggtgagggttagtgtgctgaacgatgctctgaagagcatgtacaatgctgagaaaaggggaaagcgccagtcatgattcggccatcctccaaagtcattatcaaattccttttggtgatgcagaagcacggatacattggagagtttgagtatgttgatgaccacagggctggtaaaa

SEQ ID NO: 169825 - DNA, 228 bp, Glycine max
cagtcattgcacttaagtgcccatccattgaagtcgctgttgttgatatctctaaatcccgcattgcagcctggaacagcgaccagcttcctatctatgaacctggccttgatggtgttgtgaagcaatgcgtggcaagaacctcttcttcagcactgatgttgaaaagcatgtctttgaggctgacatagtgtttgtctctgtcaacacccaaaccaaaactcaggg

SEQ ID NO: 169826 - DNA, 236 bp, Glycine max
aaaagatccagtttgctgatgttggttgtggttttggagggctgctcataagtctttccactctgttcccagaaacattgatgattggaatggaacttagagacaaagtgactgagtacgtcaaggagcgatttcatctttaagggtagcaaatcctggtcaataccaaaatgtttctgtggtgcgaactaactccatgaagtatattcctaattactttgagaaaggaacgctct

SEQ ID NO: 169827 - DNA, 240 bp, Glycine max
gagagaaagaaacagaatttggaagaaaaaaagcacaagatgggttattggaagtctaaggttcttcccaagatcaagaaggtttttgagaagaatagcaccaagaaagctgctgctgctgaggccaccaagcctttgatgagtcaaaggaggaatacaacaaagccttcgaagaaaagaagactgaacttcaaactaaagtagttgaaatatacgaggcttcatcaactgaaatcaaaa

SEQ ID NO: 169828 - DNA, 236 bp, Glycine max
caccttcacccttaacttctccaaaggttctagccaagtcattgctcaatactaccaactaattcgccttggttttgagggatatagaaacgtgatggaaaactgcagagacaacatgttggtgctgaaagaggactagagaaaacagggagattttcaattgtgtccaaagacaatggagtgcctttggtggcattcacactgaaagaccacacccactttgatgaattccaaat

SEQ ID NO: 169829 - DNA, 238 bp, Glycine max
gattgtcctaatatggacattggtaacttcaccattgcttgtgttgggtggtattgctggtaaaaatagcaaaactgagttccaagcacctgtccgcactacaaaatatccccgagagattccacctctgcttggtacaggagtaccattccccagatggcaatggcaggatttcttccttttagtgccatctacatagagctgtactacatttttgccagtgtatggggccacagaa

SEQ ID NO: 169830 - DNA, 235 bp, Glycine max
gaacgatacagagcagttacgagtgcatattacaggggtgctgtgggggcaatgttggcttatgacatcactaaacgccaaacctttgatcacataccacgttggttagaagaactgcgcaaccacgctacaagaacatagtcatcattcttacaggcaacaaatgtgatcttgagaaccagcgtgacgtacccactgaggatgcaaaagaatttgctgagaaagaagggttgtt

SEQ ID NO: 169831 - DNA, 237 bp, Glycine max
aagccagcgagtgagtgagcgagccaggtagggttttcggtgttcccctctttgtgttcgttcgcgacgatggggtccatccccgatccaggcgagttgagcgagttgactcagccgagcttcgacgagtccagcgccaaacctctctcatgaccagctgcaccctcctctggaaggagctctccgaccacttctcctccctcgagcaagacctcaaccacaaatccgaagccctca

SEQ ID NO: 169832 - DNA, 235 bp, Glycine max
cgtcaaactgttgctgtgggagtcatcaagaacgtggagaagaaggatcctactggagccaaggtcaccaaggctgcccagaagaagaagtgaatcgtgcggtttggttcatcaggggatgtcgtttctatggttacaataaatgttggttccttgcccttgtgtcttcgttcctaggtagcttgtttttcggacatagtttgaagtctccaccatcatctcgcaacttttgttc

SEQ ID NO: 169833 - DNA, 236 bp, Glycine max
ctcctctctctctctgtctctctgtctcctccatggccatctccttcagtcccaaacaccctccttacgatgagatgatatacacagcaatcggagctctgaaggagagggatggttcgagcaagcgagcataggaaagtacatagaacaagtctacaaggaccttccacccactcaccctgctttgttgactcaccatctcaaccgattgacctcctctgccctcctcgtcctcg

SEQ ID NO: 169834 - DNA, 234 bp, Glycine max
cctttacaaagctctagttacagatgccgacaacgtcatcccaaaggctgttgatgccttcaggagtgttgaaaaccttgaggggaacggtggccctggaaccatcaagaagatcactttcgttgaggtggagaaagcaagtttgtgttgcacaaaatagaatcagttgatgaggcaaacttgggatacagctatagcgtagttggtggagttgggttgccagacacagtggag

SEQ ID NO: 169835 - DNA, 236 bp, Glycine max
gatcggtgttcacttgatctcatcataatcgtcagcgtcaattgaagaagatgccgatcagaaacatcgccgtcggaaggcctgaagaggcgactcaccccgacacgttgaaggcggctttggctgagtcatctcaaccttcatcttcgtgttcgccggctcaggctccggcatcgcctacaacaagctcaccgacaacggcgctgccacccctgccggcctcatctccgcctcca

SEQ ID NO: 169836 - DNA, 233 bp, Glycine max
gaaccaacaagaggggtattgagattgagattcaagtaatggggaagagcaaggttcttgtggtggggggaactgggtacatagggaggaggatagtgagggcaagcctggcactgggccatgagactatgtggttcagaggccagagttgagcctccagatagagaagctgcagaggctcctctccttcaagaagcaaggtgctcatctcattgaggcctctttcaatgatc

SEQ ID NO: 169837 - DNA, 237 bp, Glycine max
ctccacagaagatgggagacccctctgtcgaggttactgaagagaatcgtgatgcatcgcagatggccaaaattaaagccatggatgctatttctgaaggtaagttggaggaggcgattgagaacttacagaagctatttcactcaatcctacctctgccataatgtatggaactagagccagtgtttacatcaaaatgaagaaacccaatgctgcgatccgtgatgcaaatgctgc

SEQ ID NO: 169838 - DNA, 231 bp, Glycine max
agttgttgaagtgcccaatgtcagctgggaagatattggtggtcttgaaaatgttaagagggaactccaagagactgttcaatatccagtggaacaccctgaaaaatttgagaagtttggaatgtaccttcgaagggagtcctcttttatggacctcctggttgtggtaaaacgcttttggctaaagctattgccaatgaatgtcaagcaaacttcattagtgtcaaaggt

SEQ ID NO: 169839 - DNA, 233 bp, Glycine max
ctttgattcagtgttctgcaacttccctctccgctgtccccatcactacccgtttcaccacgacccacaagtctcgccttcgctgctccttagatgctaatgtttccgacatgagcgttaacgcgcaaaagggttgtctcctccggaacctgaacattatcgaggaccaaaactgaaagtggcaattattggagctggacttgcaggcattccaactgcagtggaactcttgg

SEQ ID NO: 169840 - DNA, 235 bp, Glycine max
gcccaaatgattgaaactggggaagatattgactggggatttgcagaggcgcttgcttatgctaccttgcttattgaaggtaaccatgttcgattaagtggtcaggatgttgaaagaggaacttttagtcaccgccatgctgtagttcacgatcagacaacaggagagaaatattgtcccctggacaatgttataatgaaccaagatgaagagatgtttaccgttagcaatagtt

SEQ ID NO: 169841 - DNA, 257 bp, Glycine max
tcggtttcaccgtttatccatcccctcaggtttcgacctcggtcgtggaaccctacaacagcgtcctttcaacgcattctctcctcgaacacaccgatgttgctgtgcttctcgacaacgaggcaatctacgacatttgcaggagatctctgacatcgaacgccctacctacaccaacctgaaccgtctcgtttcccaggtgatatcatccctcactgcctctttgaggtttgatggagcactgaatgttgatgtga

SEQ ID NO: 169842 - DNA, 253 bp, Glycine max
gtgctagttgggctggcttcttcattttgcaatcattcactttgaagaagtacccggcagagctctcactgacagcttggatttgtgtgatgggtattattgagggttcaatcgcatcccttatatttgaacgagacttcagtgtatggccataggctgggactcaagacttcttgcttgtgtttactctggggtgatttgttctggaatggcatactatgtacaaggggttgtaaccagggaacgtggacca

SEQ ID NO: 169843 - DNA, 254 bp, Glycine max
gtggcatgcagatcttcgttaagaccctcaccggcaagactattaccctagaagtcgaaagctccgacaccatcgacaacgtcaaggctaagattcaggacaaggagggaatccccccagaccagcagaggctgatcttcgccgggaacagctcgaggacggacgcacccttgctgactacaacatccagaaggagtcaactctccacttggtgttgcgtcttcgtggtggtatgcagattttcgtgaagactc

SEQ ID NO: 169844 - DNA, 250 bp, Glycine max
agcaaacataacttgcagtaatggcttcaatgaataaccaaaaagaaattgagctctttgagggccaatctcttctgtacatgcagctatatgggcacctaagacctatgtgtcttaagtgggctgttcaactaggtattccagactaatacagaaccatgccaaacccatttctctttctgacttggtctctactcttcaaattccaccagctaacgctgcttttgtgcagcggttcatgcgcttcttg

SEQ ID NO: 169845 - DNA, 248 bp, Glycine max
caacaatgcctcctttgactttgtggctagtgctgccttttctcgtgttgctagcggcggcaacaacgtctccaacacgcgccacgacggtcgcctcgtcgttccacggtcaacgagagtttgactatttcgctttcgcgttgcatggcccggcacttactgcaaacgcacccgcagttgctgccccaccaacggttgctgcagaggctccaattttccaacagtgttcaccatacatggactctggc

SEQ ID NO: 169846 - DNA, 250 bp, Glycine max
agagaattagggtcacgagggtttcatcctgcggcatcagacatgggaggaggcaatgggcaaaaggcaaagatggctcgcgagaagaacatcgagaagcagaaggccgcctcaaagggaagccagctggattcaaacaagaaagaatgtcgatccagtgcaaggtgtgcatgcaaacatttatgtgcaccacatcggaagtgaagtgtagggagcatgctgaagccaaacaccctaaatctgatgttta

SEQ ID NO: 169847 - DNA, 249 bp, Glycine max
gaggaactccacggagttcgcgagcaacagtttggcgattgtcacgaagatcctagggttgctgtcgcagttcgcggcgccgattcaccaccggcggctgctaggatttccggagtggctcggggcggcggagcggaggttgcttaggtgaacagcagcgaaacaacgctggacgctgtggtggcgcaggacggtagcggacagttcaggacgatcggtgaggcgctgaaattagtgaagaagaagagc

SEQ ID NO: 169848 - DNA, 250 bp, Glycine max
cgaacggctacttggtagttggagtggtagcttttgctctactttgctcattcagagtttctttgacagattcagttccactattttcgcctgttcatgacgctgcttctttgactcgcaactctttccctgctggcttcatcttggggctggatcctcagcctaccagttcgaaggagcagcaaaggaaggtggaagaggaccaagcatatgggataccttcacacataaccatccagaaaagataaga

SEQ ID NO: 169849 - DNA, 246 bp, Glycine max
ggcattacagaagtctgccttagtgggtttattgcttttgatgttcctcctccaaagggtccattgtggattcttggcgatgttttcatgagggcatatcacaccgtctttgactatggaaatctccaagttggctttgccgaacagtctaattacgctttctggaggattttctttgtaaatttgttaagcgtgttgtaaataagctgttataattgtagctctggttactttttgaaaccacga

SEQ ID NO: 169850 - DNA, 258 bp, Glycine max
gtaatttgggaattattgctcccatcgccattggtttcattgtcggcgctaacattttgttgggtggggccttctctggagcggccatgaaccccgctgtgacatttgggcctgctgtcgtgagctggacctggaccaaccactggatctactggccgggcctctcatcggtggtggaatcgctggccttgtttacgaggttgtctttatcagccacacccacgagcagcttcccaccactgactactagaggggggg

SEQ ID NO: 169851 - DNA, 246 bp, Glycine max
gtaactttcttgttttttcactcaagtttggagtatggttagcttcctctagtcatgttatgttagctgaagtcgtccactctgttgccgattttgctaaccaggcactacttgcttatggtttatctagctcgaggcgtgcgcagatgctattcatccttatggctattccaaggaaagatttgtttggtccttgatatctgctgttgggatattttgtcttggttctggtgccaccgttgttaa

SEQ ID NO: 169852 - DNA, 247 bp, Glycine max
gtggatttcccagtggaaaatacctctttgctggagtggttgatggaaggaacatctgggccaatgaccttgctgcttctctcactacattgcagggtcttgagggcattgtgggcaaagataagcttgttgtgtccacctcccctcccttcttcacactgctgttgatcttgttaacgagaccaagttggatgacgagatcaagtcatggctagcatttgctgcacaaaaaattgttgaagttaac

SEQ ID NO: 169853 - DNA, 249 bp, Glycine max
gcaaaacaaaagacgcagtgatggagaggatgaagagggtgcttctgctgcttctggccttcactgttcttctcatgttgccagaagcttctgctacaaagtttactgttggaaacaaccagttttggaaccccaatattaactaactgagtgggctaaaggcaaacatttctaccttggtgactggctctattttgtgtacgataggaaccaagcgagcgtgttggaagtgaacaagacagattatga

SEQ ID NO: 169854 - DNA, 251 bp, Glycine max
ttctgctttcactctctgactcaatcgttctaatccacaaaacatgaccttttattacaacattgccctcgccttctctgcggtgctcaccctgctcctctttcccctactgaccgtaggggagctcgtggaggagcagccactatcctcaagtaccacaacggccagctcctgaagggccgcatcaccgtcaatctcatctggtacggcaccttcaccccgatccaacggtccataatcgtggacttcat

SEQ ID NO: 169855 - DNA, 249 bp, Glycine max
cagatcatgagacctggaatgttcagttgtttagatccattgatggtggggctgcttttgggttcccggagactcctgcagatgctgccagagctggtcttattagtgggaaggataatatcattgatcgtagcattcaagatcttatattaatgctattcgacgtgcaaagaacttcatctatattgaaaatcagtatttccttggaagctcttttgcctggagtgctgatgatattaagcctgaaga

SEQ ID NO: 169856 - DNA, 245 bp, Glycine max
atggcttcttttcatatccaatattcattccttgtgcttgtgcttgctatggtgatcacattgatgaaccctaccaatgcaaccctctctccccatttctatgataaagtttgccctcaggcattgccagttataaagtcagggttcaacgagcaattatccgtgagcgacgcatcggagcatctcttctgcgcttgcatttccatgattgtttcgtaaatgggtgtgatggatcaatattgcta

SEQ ID NO: 169857 - DNA, 252 bp, Glycine max
caaagcgaaaccctaaccctaacggagagatggcggacacttggcatcgatattcgggacggagaaggacagggtgaactgtccgttctacttcaagatcggcgcgtgcaggcacggcgaccggtgctcccggcttcacacgaagccacaattagcccaacgttggttctgtcgaacatgtaccagaggcccgacatgaacatgaacatcatcaccaaccccgatcagccccagccccaatctctcgacccc

SEQ ID NO: 169858 - DNA, 256 bp, Glycine max
aagaaatagagggttttggtgtttggtgtttgaatcgtgaaaatgttcagaaaccagtatgacacggacgtgacgacatggagcccggcggggaggctgttccaggtggagtacgcgatggaggcggtgaagcagggctcggctgcgatgggctccgatccaagacccacgtggtcctcgcatgcgtcaacaaggctaactccgaactttcatcgcaccagaagaagatcttcaaggtcgacaaccacatcggcgt

SEQ ID NO: 169859 - DNA, 247 bp, Glycine max
agagagactctctctctagaaaccctattgcacgttttgcaatcgaactcgacaatggccaacagcaacctccctcgaagaatcatcaaggaaacgcagcgtttgctcagtgagccagcaccaggaattagtgcctccccttcgaagagaatatgcgatatttcaatgtgatgatccttgggccaacccagtcgccttatgaaggaggagttttcaagttagaactatttttgccagaagaatatcc

SEQ ID NO: 169860 - DNA, 239 bp, Glycine max
ctcagctagggagaagaaagatggaagatccagaggttattattgggagcttgaatccaaatgataccaggggaaagaccgttacttgcaaagctgccgtggcatatggtcctggagagccctttgtggtggaacgtgttctgttcatcctcctcagaaaatggaggttcgaatcaagatcctcttcacttcaatctgccacaccgatctcagtgcttggcaaggcgagaatgaggctc

SEQ ID NO: 169861 - DNA, 244 bp, Glycine max
gcttcttctagatttaaggaagatgggtaaggaaaaggttcacatcagtattgtggtcattggccatgtcgactctgggaaatccactaccactggtcacctgatttacaagcttggaggcattgacaagcgtgttattggaggtttgagaaggaagctgctgagatgaacaagaggtctttcaagtatgcctgggtgctggacaaacttaaggctgagcgtgaaagaggaatcaccattgata

SEQ ID NO: 169862 - DNA, 246 bp, Glycine max
cctcgagccgaatcggctcgaggcctgcagttgttgttctcagtcacaagatcaccgtcgagagctttccccattcaatcaaaccacaaaaatggaggtgactgttttcactcctgcactggaaggaattaagcttgtaaaatcgagcaaggagaaattttgacccagcctttcttggatgcttgcaagcatatacttcctgttatagataagtttggagctgctatggcccttgttaaatctgac

SEQ ID NO: 169863 - DNA, 245 bp, Glycine max
taggggccctgatgatctggacactcgtcttctccgtgccatgataaccaagggtctgattgagcccatatctagtgtttttgtgaacttggttaatgctgatttcactgccaagcaaagagggatcaggataactgaggaaaggttattcttgatggttcacctgagaatccactggaattcgttcaggtgcagattgctaatgtggaatctcgatttgctagtgccatatcagattctgggga

SEQ ID NO: 169864 - DNA, 244 bp, Glycine max
cagctttcaatggaaaatataaggaaacttattactgaagctgatgggtatcagcctcatcttatagctccagaacaaggatatcgtcgtctaattgaatcttctctaataactattaggggccctgctgaggcagctgttgtgcggttcactcgctgttaaaggacttggttcacaaagctatcagtgagactttggacttgaagcagtatcctggtctccgggttgaggttggggctgctgc

SEQ ID NO: 169865 - DNA, 243 bp, Glycine max
aacacaacaagggtgttgtttagtattattattcattgtctgttgtcatgagcttccacaagctcataatgtcgaatgtgccactactcttggtggtggtggtgtttgcatgctcactgattggtcatgcttcagcttcttgtcctatgaccataaggctatcaccatcaatggattcagaaggatactcctttctggctccattcactatcccagaagcacccctgagatgtggccagatct

SEQ ID NO: 169866 - DNA, 241 bp, Glycine max
cctcgagccgaatcggctcgaggaaaagaaaatcctcaattttctgcgcagccaaacactcactctctgtctctcgaaaattctcagtttgcagagaaaatctgaatcatgtcgtggcaagcgtatgtcgacgatcacctctgtgtgacatcgaaggtaaccacctcactcacgctgctatcatcggccaagacggcagcgtttgggctcagagtaccgacttccctcagttcaaacctga

SEQ ID NO: 169867 - DNA, 242 bp, Glycine max
agccaattcagggtgattggaatggtgctggtgctcacacaaactacagcactaagtccatgagaaatgatggtggctatgaagtgatcaaaaccgccattgagaagttggggaagagacacaaggagcacattgctgttatggagaaggcaacgagcgtcgtttgacagggcgccacgaaaccgctgacatcaacaccttcttatggggagttgcaaaccgtggagcttcagttagggttg

SEQ ID NO: 169868 - DNA, 235 bp, Glycine max
ctagaatggaatttcgatgctcagtcatctcttttaccattctcttctctcttgctcttgcaggagagagccatgtccatgcatcgctacctgaggaagattattgggaagctgtttggccaaacactcccattcccactgactgcgagagcttctaaagcctctccctgcacggtgttgaaatcgatgaactccctaagcaaattgatgatacacagtacccaaaaacattctt

SEQ ID NO: 169869 - DNA, 249 bp, Glycine max
gaaaaatggggtgtttccatctcacagtgactagtctgtgctttgtagtggttgtggttggagtgcttccactctccttagatgcacaactagatccctcgttttacagagacacgtgtcccaaggttcactccattgttcggaagtggtgaggaacgtttccaagaaagatccccgcatgcttgccagtctcattagacttcactttcatgactgttttgttcaaggatgtgacgcatcagttttgtt

SEQ ID NO: 169870 - DNA, 251 bp, Glycine max
ggccaacaatgcttacattttcccgggctttggtctggggttggtaatctcaggagcaatcagagtgcatgatgatatgcttctagcagcttcggaagccttggctaaactagtgtccaacgagaactacgaaaagggcttgattatccaccattctctaacatcagagaaatttcagctaacatagcagcaagtgtagctggcaaggcatatgagctaggcttggctactcgtctccctcgtcctcagaa

SEQ ID NO: 169871 - DNA, 250 bp, Glycine max
cttcctttcacctcctcagcagtcgtcagaaagactccataacccacaaatgcctttcaagaggtacgttgagattggaagggttgctcagatcaactatggcaaagagtacgggcggctcgtgatcattgtcgatgtcattgaccaaatagggctcttgttgatgctcccgacatggtgaggtcccaagtgaacttcaagaggctctcgctcactgacatcaagattgatattaagaggattcccaaga

SEQ ID NO: 169872 - DNA, 282 bp, Glycine max
cgtcctagatcgcgagcggccgcccgcgatctagaacatgacctgcttctggctgcctctgaggctttggctgcacaagtgagccaagagaactttgctaagggactcatatacccaccattcaccaacatcagaaagatttcagcacacatagctgccaatgttgctgctaaggcttatgaacttggcttggccactcgccttcctcaacctaaagatttagtgaagtttgcagagagctgtatgtataccccagcctacagaagctaccgatgaaaagtg

SEQ ID NO: 169873 - DNA, 275 bp, Glycine max
gcaaaaaaagctccaccaatggcgggttacagagccgacgacgactacgactacctcttcaaggtggtcctgatcggcgattccggcgtgggcaagtccaacctcctctctcgcttcaccaagaacgagttcaacttggagtccaagtccaccattggcgtcgagttcgccacccgcaccttgaacgtcgattccaaagtcatcaaggcccagatctgggacaccgcaggccaagaaaggtatcgtgccatcaccagtgcatactatcgtggggc

SEQ ID NO: 169874 - DNA, 276 bp, Glycine max
cctgccgaggaaaagaaagacagacaaaaaaaacagcgccctagaactgctcttctttgcttcggaagaaagagaaaaacaaataacaatggcgttcgcttctttcctcggcagagttctcttcgcttccgtcttcatactctctgcttaccaagaatttaacgaatttggagttgatgggggacctgcagcaaaagcactcagacctaagtttgatgcctttacacatcgagtgcattctcaagttggctttcaacttcctgagattgatctgaa

SEQ ID NO: 169875 - DNA, 273 bp, Glycine max
cacactcacttcatttcttctttagtactactcactctctcaagctctctgtctgcgacaacacaaaacgacatcactctgattgtctcattaacgtcgtcaaaaatgctgcaaacccgtcccggcggctccggtggccgcacggtgctggtgggggtgaagatggactcccccagcaaggaattgctcacatgggctttggtcaaagttgcacaccctggtgataccgtggttgctctgcatgttcttgggaacaatgaaaccgtgaatgga

SEQ ID NO: 169876 - DNA, 269 bp, Glycine max
gaagacattgaccttgccgtcaaagcgtctcgtctggctttcgaccatggtccatggcctcgtatgcctgccgtagaaagagcaagaattatgatgaaatgggctgacctaattgaccaacacgtagaagaaattgcagcactggatgccattgatgctggaaagttgtaccatatgcttaaggctattgaaattcctgcaacagcaaatactatacgttattatgctggtgctgctgataaaattcatggagaggtattaaagccggc

SEQ ID NO: 169877 - DNA, 267 bp, Glycine max
tccacgaggagatggccgtcgatctcatcgaggccaagcccggcaacaaaatcctggacgtgggctgcggcgtgggccggcccatgcgggccatcgcggcccactcccgcgcgaacgtggtgggcatcaccatcaacgagtacaggtcaatcgagcacggatgcacaacacgacggctgggttggactctctctgcgaggtcgtgtgtgggaacttccttaagatgccgtttgtcgacaacagcttcgacggagcgtactccatcga

SEQ ID NO: 169878 - DNA, 267 bp, Glycine max
gtgggaagaatggattcggatcaaggcaagcttttcatcggtgggatttcatgggatacgacggaggacaagctcaaggagcatttcggtaactacggcgacgttttgagcacttccgtcatgcgggagaagaacactgggaaccaaggggctttggtttcgtcgtttttgcggatcctaacattctagatagggttttggaagacaaacatgtcatagacggcagaacggttgatgccaaaaaggccttctcaagagaggatcaac

SEQ ID NO: 169879 - DNA, 267 bp, Glycine max
ttcgatttgtaccaaattttcttcacaaaatgtctggtcgtgggaaaggtggcaagggtttgggaaagggcggtgccaagaggcacagaaaagttcttcgtgataacattcaaggtatcacgaaacctgcgattcgtaggttagcgagaagaggtggcgttaagaggatcagtggtttgatctatgaggaaaccagaggagttctgaagattttcttggagaacgtgattcgagatgctgtgacctacaccgagcacgctaggagga

SEQ ID NO: 169880 - DNA, 271 bp, Glycine max
cctcgagccgaatcggctcgagaagtagaccaaatttttgaagaacggtgatgcaggtatggctaagatgattccaaccaagcccatggtggttgaaactttctctgagtatcctccccttggtcgttttgctgtgagggacatgcgtcaaactgtggctgtcggagtcatcaagagtgttgagaagaaagacccccccggagccaaggtcaccaaggccgctgccaagaagaagtgattgcatttgggcaattttgctagcacatgtgat

SEQ ID NO: 169881 - DNA, 269 bp, Glycine max
tattaattcacttgcccggaaagccctggtcaatgcagatggtattatacagaaaacattcttgtggggtaggtactctatggaaatgtccgctgtcatttacaaggactgggttttcactgatcaagcattacctaatgatcttgtaaagagaggagttgctgttaaggacccatctgctccccatggagttcgtcttttgattgaggactatccttatgcttctgatgggctagagatatgggatgccatcaagtcctgggtgcaag

SEQ ID NO: 169882 - DNA, 272 bp, Glycine max
tcgggattggtttctatggcttctgaagtaatagagtaccgatgctttgtcggtgggcttgcttgggccaccgacagcgatgctctcgagaaagccttctctcattatggtgagatcgtcgaatcgaaggttatcatcgatcgtcaaacgggaagatcgagagggtttggatttgtgaccttcgcctcggagcaggcgatgaaagacgcaatcgaaggaatgaacggtcagaacctcgacggtcgtagtatcacagtgaacgaagcacaatc

SEQ ID NO: 169883 - DNA, 272 bp, Glycine max
cagagagtgatttcagtgagtgatcggtgttcacttgatctcatcataatcgtcagcgtcaattgaagaagatgccgatcagaaacatcgccgtcggaaggcctgaagaggcgactcaccccgacacgttgaaggcggctttggctgagttcatctcaaccttcatcttcgtgttcgccggctcaggctccggcatcgcctacaacaagctcaccgacaacggcgctgccacccctgccggcctcatctccgcctccatcgcccatgcattc

SEQ ID NO: 169884 - DNA, 271 bp, Glycine max
ttcattatttccattaacacccgattctgcttaaattggcacaccaccaattttcgtgggaacccgaaccaataaaacaaaaaaagagtccaattttgtgaaaattattaccattcattcttattcatcaacgtccccccttctgtgcccacttccaaatcttctcctctcgctatgggttgtggctcctcccttccagatagggattcaaggcagttgggtcgacccaattccgagaatggtggagggcaggacgccaagaatctaaggg

SEQ ID NO: 169885 - DNA, 267 bp, Glycine max
  unsure (1)..(267): unsure at all n locations
ctcttcttctcttgcggctanggttttagcgcacttcttctagatttaaggaagatgggtaaggactcccgttcacatcagtattgtggttattggccatgttgactctgggaagtccactaccactggccacctgatctacagcttggaggcattgaccagcgtgttattgagagatttgagaaggaagctgctgagatgaacaagaggtctttcaagtatgcctgggtgcttgataagcttaaggctgagcgtgacagaggaatc

SEQ ID NO: 169886 - DNA, 267 bp, Glycine max
gatctctccgtcaccactttctcccccgatggccgtgttttccagatcgagtatgctgccaaagccgtcgataacagcgggactgttattgggatcaagtgcaaagatggggttatgttgggcgttgagaagcttattccgtcgaaaatgatgcttccgggttccaatagaagaatacactccgttcatcgtcactctgggatggctgtagcaggattagcagctgatggcaggcaaattgttgctagggccaagtctgaagcaact

SEQ ID NO: 169887 - DNA, 268 bp, Glycine max
cctcgagccgaatcggctcgaggaaaaacctgatttcttctcttcctctcttctctttcgtatcgatcttcgatctctgaaaatgagagagtgcatttcaatccacatcggtcaggccgctattcaggtcggaaacgcctgctcggagctctactgcctcgaacacggcattcagcctgatgggcagatgccaagtgataagactgttggtggaggtgatgatgctttcaacaccttcttcagtgaaactggggctggaaagcacgtg

SEQ ID NO: 169888 - DNA, 271 bp, Glycine max
ccagaatcggtgtaggttacaggtttaagggttttgttttcatttaggtcactaatccgatatcatgaagctcgatacgactagtctcgaatcgtttcccacactgattgcacctcaaaacgacgtcgccggagaactctccgcgctccgttctttgaccttccgaattccaatgacttcgatgggttcttgaaagacgctattcagatggtgaagcccgcgaagggtactacaactcttgcttttatatttaaagagggtgttatggtag

SEQ ID NO: 169889 - DNA, 271 bp, Glycine max
gctttgtttcactctttgctcttgatttcttcccttgtattggcttctcaaatccatgtttcctctgggaaactagtccctggactatcatggaattactatttgttgacatgtcccaagcttgagaggattataaggaagcatcttgaggatgtcttcgagaaggacagtggagtagctcctggcatacttcgactcttcttccatgactgctttcctaatggatgcgatgcgtctatattgttgaatggagacggtgacgagaagcaac

SEQ ID NO: 169890 - DNA, 271 bp, Glycine max
ctctgttctctctccccctccccgattcgttttgcccctttcgccgccccaatttcaaccatgcctcgccgtagctccggtggaagatctgcccgtcctgctcctcgtgcagcacctcgtcctgctccagttcaccatgctcctcctccagcccctgctcagagcggtggcggatctatgcttggtggcattggttcaaccatagctcaaggtatggcttttggcactggaagtgcagtggcacacagggctgtggatgctgtcatgggtc

SEQ ID NO: 169891 - DNA, 271 bp, Glycine max
ctctttctccgagaacaaaaaaaaaaacgtgattcgctcttctctccgaataaaccacaaaaccaacaaacgagaagaggagtgagagaagatggggttgtcgttcacgaagctgttcagcaggttgtttgcgaagaaggaaatgaggattctgatggtaggtctcgatgctgctggtaagcaaaccatcttgtacaagctcaagcttggagaaatcgtcaccaccatccccaccatcggatttaatgttgagactgtggagtacaagaac

SEQ ID NO: 169892 - DNA, 266 bp, Glycine max
acaccacacacatagtagctattatactctctagagtaattgcggaatctgctagaattttctaataatggcgaaagacgttgagcaggtcacagagcaaggtgaatactccgcgaaggactaccatgaccctcctccggcaccgttgatcgacccagatgagctcacaaagtggtccttgtacagagccgccatagctgagttcatagcaacactcctttttctttacatcaccgtgttgaccattattggctacaagagacaga

SEQ ID NO: 169893 - DNA, 265 bp, Glycine max
tagcaagggatatatatgagcatgctgttgtccttagtgtgaaaattgaggatcaagatgctttcgaaagggatttcttccagttgaagccttattatacagatgcctgcaatcgtcttccaccatctcctcaggagtaccctatactgggtctcaacctgttgagactacttgtgcagaataggattgctgagttccatactgagttggaattgctttcatctgctgctcttgagaatccttgcattaagcatgccgtggagtt

SEQ ID NO: 169894 - DNA, 274 bp, Glycine max
ccctcgagccgaatcggctcgagcaactcttcaaaagggagaagaaacggaaagaaaactctcaaaaaactattatagcaatggcagaacaaaaccaaaaccaaacaactgaagctggaaggcaccaagaggttggtcacaagagcttctccagagtgatgctctttaccagtatattctggagacaagtgtctacccaagagaacctgaatccatgaaagaactgagagagttgacagcaaaacacccatggaacatcatgacaacctctgca

SEQ ID NO: 169895 - DNA, 273 bp, Glycine max
ctactgtgaaggtatggaagctaaacaatggactctggaagatggactgcttccctgctcttcagatgcacacggattgggttcgagatgttgcttgggcacccaatttagggctccctaaatctaccattgctagcgcatcacagacggtaaagtgattatatggaccgtggcgaaagagggggatcagtgggaaggcaaggttttgaatgatttcaacacccctgtttggagggtctcatggtcattgacaggaaacatattggctgtggc

SEQ ID NO: 169896 - DNA, 260 bp, Glycine max
ttgagatgttggggtggtgggactggatgggctgttgaagatgccaaggacaaaatcatgaagctcttggaggcgtacgagcgtggaggtgttgtgagtgaagcatgccagtgtatccgtgacctgggaatgcctttcttcaacacgaggttgtcaagaaagctttggttatggccatggagacgaagaatgataggatgctggatctgctgcaggaatgtttcagtgaaggtctaataaccatcaatcagatgaccaaa

SEQ ID NO: 169897 - DNA, 269 bp, Glycine max
cgcttatggaatcaaatctgtatcccaagatgtcttgcctgtcttgactgatgcattcgatggaaatattttgagccttgagtttgataattttgctgaagtgcacaaactctatgaaggtggagttacactacctacaaacttcttagcaagatcgcccctataccagtgatcaaggaaatttttcgaactgatggcgaacagttcctcaagtatccaccacctaaagtgatgcaggtggataagtctgcatggatgactgatgaaga

SEQ ID NO: 169898 - DNA, 267 bp, Glycine max
  unsure (1)..(267): unsure at all n locations
ctagctcttgttgacattccaataactttggtgctatgatcatggagatcaatgcatcccccgacaacattaattcagtcaagtacaacgtacatgaaaaacagccttaccgaacttggtaccactttcagcccccacaaantggatgaatgatccaaatggaccaatgtactacaaaggagtttaccactttttctaaccancataanccttatgcnaccaacnttggtaggctaatggtatggggtcttccgtatctatgatctc

SEQ ID NO: 169899 - DNA, 269 bp, Glycine max
aggccagtcaagcatagaaggtccaagttatggcaagaaggtcattgaagaaggtgtgaaactaaccgccaatgttgatttgcaaagagaagatgaatgtgggatttgcttagagccttgcaccaaaatggttttacctgagtgctgccatgccatgtgtattaaatgctaccgcaagtggaacagaaagtcagagtcttgtcctttttgccgtggtagcttgaggagagttaattcggaggatctatgggtattaacttgtaatgatg

SEQ ID NO: 169900 - DNA, 267 bp, Glycine max
catttgaattgggcactgaagccagagagatgccatgcaaccatatttaccattctgactgtattgttccttggttggttcagcataactcatgtcctgtttgccgtgttgagctggcacctcaaggacaggctagttccgtggtactcgaagttggggaggacggaatgccagcaacagcagcagcagtggcagcaatgatagctccaggggcagagagaacagccatcagaaccatggaaggagaaatccattttcatttttgtg

SEQ ID NO: 169901 - DNA, 266 bp, Glycine max
gaggaatatggcttccttaagctcctcattagtgctgctccttgcagctctaattctatcccctcaagttcttgctgactatgagacgcccccaatttacaagccacctgtttacacaccgccagtttataagcccccagtcgaaaaaccaccagtgtacaaacctccagtttacaagcctccagttgacaaaccacctgtttataagcctccagtttataagccacccgtttacaagcctccagtgtataaacctccagttgata

SEQ ID NO: 169902 - DNA, 262 bp, Glycine max
gcaatatgcattggaagacatgcgtttggtgatcaatatcgggcgactgacacagtaattaaaggagctggaaagctgaagctggtgtttgttccagaaggccagggtgaggagactgaattcgaggtttttaacttcactggtgaagggggtgtttcattggctatgtacaatactgatgagtctattcgttcttttgctgaggcctctatggcaactgctttagagaaaaagtggccactttatcttagcaccaaaaata

SEQ ID NO: 169903 - DNA, 269 bp, Glycine max
gcaagctagctaggttgaaaatagtttggttttgtagtaagtgaggtgaggtgccaaaatggtgcagataactcttggtactttcgatgactcttttggtgttgcctctcttaaggcttatttggcagagttccatgcaactctgattttcgtgttcgctggtgttggttcagccatcgcttacaacgagcttacaaaagatgcagccttggatccaacggggctggtggcagtagctgtggcccatgcatttgcactgtttgtaggtg

SEQ ID NO: 169904 - DNA, 269 bp, Glycine max
cgagatcaacgaagacaacgtcctctacattgttgaaaacatcaacgttgctgcaattgaaacaactctatggtcgattgagtggggcattgctgagcttgtgaaccacccagagatccagcaaaagttaagggatgagattgacagagttcttggagcagggcaccaagtgactgagccagacatccaaaagctcccatacctccaagcagtggtcaaggaaactcttcgtcttagaatggcaatccctctccttgtaccacacatga

SEQ ID NO: 169905 - DNA, 266 bp, Glycine max
gctggcggttggcgcaacctttcgatcttcatccaacggggcaacgttggatctgctgaactgaacttctttttatatgcactctgtgatttcactctgcttcgccatcctatgggggacaacaacagcaacaacgatgcttcatgcgcaaccaaaacgccgccgttcaggcccgcaccaaagcgcagaaccgctccaacgtccttcagctcaaactgattggacagagtcacccaaccggtctcacagcgaacctgttgaagctc

SEQ ID NO: 169906 - DNA, 267 bp, Glycine max
cttctctctctttctccggcgacgatctcagattccggtcactcctctcgccggcgatcccttattcctccgtcctccgtcgagtcctttccgattcgatccgttcccagccttgtgccaccatgaatcccgaacacgattatttgttcaagcttttgctgattggagattctggtgtaggcaagtcatgtcttctcctgaggtttgctgatgattcataccttgacagctatatcagtaccattggagtggactttaaaatccgca

SEQ ID NO: 169907 - DNA, 269 bp, Glycine max
ctctcgagccgaatcggctcgagcttcaaatcgattaagttcatagagcgaattgaaatatctacttggtaagtgattgagagactgaatttgtagataataagatgggttcgtcgactaatggtggtgtgccgccagggtttagatttcatccaacggatgaagagctgcttcattactacttgaagaagaaggtgtcctttcagaagtttgacatggatgtcattagagaggtcgacttgaacaagatggagccttgggacttgcaa

SEQ ID NO: 169908 - DNA, 263 bp, Glycine max
cgttgtcttctcacttcgtcaaaaccaaccaaacccctccccaattctcaagccaaccatgtcttccttcaagagcaagtaccaagatgaactcattgccaatgctgcttacattggcaccccagggaagggtatccttgctgctgatgagtcaactggtacaattggcaagcgattggccagcattaatgtcgagaatgttgaagcaaataggcgtgctcttcgtgaactcctattcaccacacctggtgcttttgagtgcc

SEQ ID NO: 169909 - DNA, 268 bp, Glycine max
catatatcagaatcattaaagataagattatattgctaagaagaaaaaatatgaaggttgtctacttgcttgttgccctcttggctttgacatcaactgttgtctctgcctatgaccctagtcctctgcaagatttttgtgtggcagccaaagaaaaagatggtgtatttgtgcacgggaaattctgcaaggaccccaagcttgtcaaagcagaagatttcttcagacatgtggaacctgggaaaactgacaacccactaggttcaaa

SEQ ID NO: 169910 - DNA, 263 bp, Glycine max
gaaacaagtgatcaaggtcaatgattatcagaagagccggttcgtgaatcgcgtggcttcgtcaatgtttaacactgttgcaagcaaaaagatagcaattcttgggtttgcattcaagaaggacactggtgacacaaggagagcaccagccattgatgtgtgcaaaggactactcggcgacaaggcgcgcctaagcatatatgatccacaagtcactgaggaccaaattcagagggctttatggatgaacaagttgattggga

SEQ ID NO: 169911 - DNA, 268 bp, Glycine max
catccatcttggttactcatctttggcagatattgaagcagctccacccacagctgaactggagcctatacgttctaattacagtcagcttgatgaagtcgatatgggaatgacttacgaggagctatcagtttatggaagactacgaaaaattttccgttgtggtccagtttccatgttccagaatctatgctacagatggggtgccagattgacaccatcacaagtggctgaaaaagtataacacttcttcaagtattattctatc

SEQ ID NO: 169912 - DNA, 264 bp, Glycine max
agggcattggaaatggcattccccttggtgctgttgtaactactccagagattgcagaggtcttaacccgccggagctacttcaacacctttggtggcaaccctgtttgcactgctgcagggttggctgttttgaaagtatagagaaagagcagcttcaacagaacgcgtttgtggttggatcccatttgaaagaaaggctcactgccctcaaggacaaatatgaattaattggtgatgtcagaggaagaggcctgatgctagg

SEQ ID NO: 169913 - DNA, 264 bp, Glycine max
cgcatttcctcgtttttttcttcccttttctctttctccggcgacgatctcagattccggccactcctctcgccggcgagcccttactcttccctcctccgtcgagccctctccgattcgaatcgttcccagcctcgcacaccatgaatcccgaatacgattatttgttcaagctttcgctgattggagattctggtgtaggcaagtcatgtcttctcctgaggtttgctgatgattcataccttgacagctatatcagtacca

SEQ ID NO: 169914 - DNA, 262 bp, Glycine max
cgcaaacagtgagccatggccgtcggatagaacaagtgcatctccatcgggaagaagggtggcaagaagaaggcagctgatccctttgccaagaaggattggtatgacattaaggctccttctgtttttcaagtgaaaatgttggcaaaaccctcgtctctcgtactcagggtaccaagattgcttctgaaggactcaagcatacagtgtttgaggtctccttggctgatcttcaaggggatgaggatcatgcattcaagaa

SEQ ID NO: 169915 - DNA, 257 bp, Glycine max
gtcgagctgagaataccagttgctccagtagccggcactaaacaacatggcggacaaggcagtcaccatccgaaccaggaagtttatgacaaacaggcttctctccagaaagcagttcgtcgttgatgtccttcaccagggagggctaatgtttccaaggctgaactgaaggagaagctgggaagaatgtatgacgtgaaagacaccaacactgtatttgtcttcaagttccgaactcattttggtggtggcaagtc

SEQ ID NO: 169916 - DNA, 256 bp, Glycine max
ctagaatggactttcgatgctcagtcatctcttttaccattctcttctctcttgattttgcaggagagcgccatgtctctgcatcgctacctgaggaagattattgggaagctgtttcgccaaacactcccattcccatgcactgcgagagcttctaaagcctctctctgcatgtgttgaaatcgatgaactccctaagcaaattgatgatacacagtacccaaaaacattcttctataaagcagaccttcatcca

SEQ ID NO: 169917 - DNA, 270 bp, Glycine max
caaacatggcctccaaatccttcaccctcattctcctcatcctcaccacattcctcacggcccaaacccaagcccaagctcccgcaccggccccctcaggcgcggtgaacctcaccgcgatcctcgaaaagggtggccagacaccaccctaatcaaactcctaaaggacacacaacaactcactcagatcgagtcccagctcaaatcaaactcacaaggcttcactctcttcccacccactgacaatgccttccagagcctcaaacccgg

SEQ ID NO: 169918 - DNA, 272 bp, Glycine max
ccactcttaatttctctctgccttgctcatttacacacctctccaacctttcactttcagctttatttgaatccctctctctcctttccaaatggccagcgttgaggttgcacatcaaacaccaacaacagttccagaaaatgaaacaaccgaggtaatcaagacccaggaaacaaccccggaaccagtaccagccactgaggctcctgcaacagaacaagcagcagctgaggttcctgcccaagaagaacaacaagcaactgaggttcctg

SEQ ID NO: 169919 - DNA, 288 bp, Glycine max
cttcctctctttaaatcctccaccagccaacaccctttttctcccctaactctctcacagatccaaaacccaaaaaagagaatagagtgagagaaagagaatcatggaattagaacaaaaccagagatgggaaggctatgtgaactggaggaacaagcctgctctcagtggctgcaatggtggcatgcttgctgcctcctttgttttagtggttgagatattggagaatctggcatttctagccaatgcaagcaatttggtgctgtatctgaggcagtacatgcacat

SEQ ID NO: 169920 - DNA, 281 bp, Glycine max
ttgcaatcaaattagttcattctctttgcgcagttccctacctctcctttcaagatgcagatcttcgtcaagaccctcaccggaaagaccatcacccttgaggtggaaagctctgacaccatcgacaacgtcaaggccaagatccaggacaaggaaggaattcccccggatcagcaacgtctcatcttcgccggaaagcagctcgaggacggccgtaccctcgccgactacaacatccagaaggagtcaacccttcaccttgtccttcgtctccgtggtgg

SEQ ID NO: 169921 - DNA, 277 bp, Glycine max
aagaaaacggttagagttccggcgattagttcgaaggtcgccgatattccgccggatgagtactcgtggaggaagtacggacagaagccgatcaagggatcaccgtacccgaggtgagtggtttgtggccgttgatttggtgttggctttggtcaaaggtgtgttaactgacgttgatttgttttgtgttctcagggggtattacaagtgcagtaccgtgagagggtgcccggcgaggaaacacgtggagcgtgcttcggacgatccgacgatgttg

SEQ ID NO: 169922 - DNA, 277 bp, Glycine max
cagagatgaatcatctccatatgctgctatgcttgctgcgcaggatgttgctgctagatgcaaggaactgggcataactgctcttcatatcaagctccgtgccacaggtggaaacaagacaaaaacaccaggtcctggtgctcaatcagctcttcgagcccttgctcgttcaggaatgaaaattggtcgcatagaggatgtgacccccattccttccgatagcacacggagaaagagtggtagaaggggtagaaggctttaagcttcttatggtata

SEQ ID NO: 169923 - DNA, 276 bp, Glycine max
gggagttaggttctgcacgctctgcttccagcgagtgttctttcttcgtttcaacaccttaatttgcacacgctgcttcttcagcttgagaaatggcacaagaaacctttctattcacatctgaatctgtaaacgagggtcaccccgacaagctgtgcgaccagatctctgatgcagtgcttgatgcgtgccttgaacaggaccctgacagcaaggttgcctgtgagacatgcaccaagaccaacatggtcatggtctttggagagatcacaacca

SEQ ID NO: 169924 - DNA, 276 bp, Glycine max
gcgtttttctcttcgtcttcttctacgcataatagcatcagaatggtgaagcactacagacccccggggaagaaaaaggagggatatgctgccaaatttgtcattaggtcacaagcaatcaagcagcttcaaatcagtctaccccttttcaggaaactatgtattttgaaaggtgtaactccaagggagcctaagaaaaagttcaagggaactcatcagacttattaccatgtaaaggatgtttccttccttcatcacgagcctttggttgaaata

SEQ ID NO: 169925 - DNA, 275 bp, Glycine max
cacaaactagtaaatagtaatattattcttcgaatccattttattcataatgggtgttttcacatttgaggatgaaaccacctcccctgtggctcctgctaccctttacaaagctctagttacagatgccgacaacgtcatcccaaaggctgttgatgccttcaggagtgttgaaaaccttgaggggaacggtggccctggaaccatcaagaagatcactttcgttgaggatggagaaagcaagtttgtgttgcacaaaatagaatcagttgatg

SEQ ID NO: 169926 - DNA, 276 bp, Glycine max
gttgaaaagaaaccctagcaagtggagcaatggcagacgttgaagtcgatgtggcggcagcagcagcagcagggctgccgacgaagagaacgttcaagaagttcagttttcgaggcgtggatctcgatgcacttctcgacatgtccaccgatgaactcgtcaagatgttcagtgcccgcgctcgtagaaggttccagagaggcctcaccagaaagcccatggccttgatcaagaagctccgtaaagcgaaaagggaagctccaccaggtgagaagc

SEQ ID NO: 169927 - DNA, 275 bp, Glycine max
gcgatcgaagtttcacatcagccttatccagtttagggtttcggttccttaccctacctttgacgtatcgaaaccttaaatttgggattaggtctgagcaatctggttggtagaacctttggtcttagagagtcaagttttatgtctggattagacgatcaaattcctactgccttcgatccttttgctgatgcaaatgctgatgactcgggtgctgggtcaaaggagtatgtgcatattcgcgttcagcagcgaaatggtaggaaaagcctgac

SEQ ID NO: 169928 - DNA, 278 bp, Glycine max
ctcatccttggcacaaggttttccacaagagaatgcctcctgaagcaattgaccttgcatcaaggcttctccaatattcacctagtctacgctgcactgcgctggaagcatgtgcacatcctttctttgatgagcttcgcgagccaaatgcccgtcttcctaatggccatccactgcccccacttttcaacttcaaacaggagttagctggagcatcacctgaactgatcaataggctcatcccagagcatattaggcggcagatgggtctcagcttc

SEQ ID NO: 169929 - DNA, 274 bp, Glycine max
gaaaattatgctggctaggcaaacaggcttgaccagaaaccaggtggcaaattggttcatcaatgcaagggtgcgtctctggaagccaatggttgaggaaatgtacaaagaggagtttggagattccgagatgaactgcaacctttcatctgagaacaacacggtcaaaggtaaaagagatgatgttcaagagtctgataacattaacaataataataataaatgggaagagtcacaggacaatttagtaactgttgacagtgtgcaagtccaa

SEQ ID NO: 169930 - DNA, 273 bp, Glycine max
ctcctttctctctcttcacacttcaatggatattctttcttgaattcttttatgggtgtcattcatagggatctcaagccagagaatttcttgctatctagtaaggatgacaagggacttctcaaggccacagattttggcttgtcagttttcattgaagaaggaaaggtgtatcgaaatatagttggcagtgcttactatgttgctccagaagttctacgtcgtagctatgggaaggaagcagatatatggagtgcaggagttatattgtat

SEQ ID NO: 169931 - DNA, 274 bp, Glycine max
cttcaaagttcaattctttctctgtcgtcgctctttcttcaacttcaagcttaattcctcatgtctttcagaggcctcagccggccaaatgccacatcaggcatgggtgttgctgatcacagcaaaaacaccttcatggaattgaagcagaagaaggttcatcgttatgtgatctttaaggtcgatgagaagaaaagggaggttgtggttgagaagactggtggcccggctgagagctatgacgattttgctgcatctttgccggagaatgatt

SEQ ID NO: 169932 - DNA, 274 bp, Glycine max
ctagaatggcaaacaacggtgatgttgttaagatcaatattgaggagatgctggagatgctggagggggcaaaggcacccctaattactgagtgttgcatttacaaagtgccgtttagtatccgaagacacaacgaaaaagcctacaccccagaggttgtttctattggcccttttcaccacggccatcctcgcctccaagacatggagaaacacaaactcttttactccaaggcttttctcaaacgaactcaaacaactttggacactttgat

SEQ ID NO: 169933 - DNA, 270 bp, Glycine max
ggagaaggcattacagaagtctgccttagtgggtttattgcttttgatgttcctcctccaaagggtccattgtggattcttggcgatgttttcatgagggcatatcacaccgtctttgactatggaaatctccaagttggctttgccgaagcagtctaattacgctttctggaggattttctttgtaaatttgttaagcgtgttgtaaataagctgttataattgtagctctggttactttttgaaaccacgaatgtatttatccattta

SEQ ID NO: 169934 - DNA, 273 bp, Glycine max
cccgaatccggacccggttgtgatccgccaggtttgggcttcaaatctcgaatccgaattccaactcatccgcgaattcatcgaccactatccttttatctcgatggacacagaattccccggtgttgttttccgaccacacctggaccccacaaaaccctacaaccaccgcaacaacaatcgcaaccgccactccgaccactaccgcctcctcaagtccaacgtcgacgctctcaacctcatccaggtcggcctcactctcaccgacgccgc

SEQ ID NO: 169935 - DNA, 274 bp, Glycine max
aatttctccaacgctatcgagccaaacccaaacgttaactcagaagaagaccagcagaagaagaagaagaagaaacaaaaccgaaccactttcaactctccaacgtcgccacacgattcatcgcgtttcgcaggctgcaatggcgacgttcgaactgtaccgcaggtcgacgatcggaatgtgcctgacggagacgctggacgagatggttcagaacggcactctcagccccgagctcgcgattcaggttctggtccagttcgataagtccatg

SEQ ID NO: 169936 - DNA, 276 bp, Glycine max
gcagtgactaaaccaaacctctcactcgccgtcgtagggtttctcctttcgtttagcaacaacaacaatggttgcagccaagaaaaccaagaagacccatgagagcatcaacaacaggctcgctcttgtcatgaagagtggaaaattcaccctcggttacaagacggttctcaaatcacttaggagctccaaagggaaattgattatcattgctaacaactgcccccctttgaggaagtcagagattgaatactatgctatgttggccaaggttgg

SEQ ID NO: 169937 - DNA, 275 bp, Glycine max
gatgaaacaaaaccttgacatatttgactgggaactgagccaagaggaatcacagaaattcagccagattccgcagcgtaggatgtatcgcggaataacttttgtatcagaaaatgggccttacaagaccttggaagagctttgggattgagattcctgaaatcattcctaatagcagcaaaatgtcatataaggctgtgtgtttggtttaagatgggaggagggaactaggagagaaattttgtacttttcatgtggaactcacatcttttaca

SEQ ID NO: 169938 - DNA, 273 bp, Glycine max
cgcgagattagggtcggatcgctcggtctcgctaggtcggagagagagagagagagagagaatgggagtgtttgtttgtgtgtgatgcgagtgagagagaagtgtgaaaaggggcgaatagggttagggttagggtttgattgaggatgccgaagaacaagggaaagggaggtaagaacaggaagaggggaaagaacgaggcggacgacgagaagcgggagctggtgttcaaggaggacgggcaggagtacgcgcaggtgctccggatgctgg

SEQ ID NO: 169939 - DNA, 270 bp, Glycine max
ctttctccggcgacgatctcagattccggccactcctctcgccggcgagcccttactcttccctcctccgtcgagccctctccgattcgaatcgttcccagcctcgcaccaccatgaatcccgaatacgattatttgttcaagcttttgctgattggagattctggtgtaggcaagtcatgtcttctcctgaggtttgctgatgattcataccttgacagctatatcagtaccattggagtggactttaaaatccgcactgtggagcagg

SEQ ID NO: 169940 - DNA, 269 bp, Glycine max
cttcttgttcctctcgcccagaatccgagatcaaccctgacccctaaggccaggggtttttctcggcttcttcagattcctgaaatggcgtctgtttcagctttagccaagtacaagctcgtcttcttgggtgaccaatccgtgggcaaaaccagcatcatcactcgcttcatgtacgataaattcgataacacctatcaggctacaattggtattgattttctatcaaaaactatgtatctcgaagatcgaactgttcgactgcagtt

SEQ ID NO: 169941 - DNA, 269 bp, Glycine max
gctggtgctcctgcaacatcttctccacccaggaccacgccgccgccgctattgcccgcgacagtgccgccgtcttcgcctggaagggtgagaccctccaggagtactggtggtgcaccgagcgcgccctcgactggggccccggtggtggacccgacctcatcgtcgacgacggtggtgacgctacccttctcatccacgaaggcgtcaaggccgaggagctctatgagaagaccggcgaactccccgaccccaactccaccgacaac

SEQ ID NO: 169942 - DNA, 274 bp, Glycine max
gcaaattccaattcccaattcccaattcccaattcgaaacccttattcctttcaaagaaccaaattgagtgatcgtgatggcaccaaaggcagagaagaagccagcggagaagaagcccgcggaggagaagaagtccacggtgggagacaaggctccggcggagaagaagccaaaggccggaaagaagcttccgaaggagggaggcgccggcggagaagggaagaagaagaagagaaacaagaagagcgtggagacatacaagatctacatctt

SEQ ID NO: 169943 - DNA, 275 bp, Glycine max
ttctagcaagctttcaaaagttgatgagttggttgatgagataaacatatataacattctagaaccatgctatcacggcacagaagcagagaagattacagaatcctatattaggatgccatctaccttccggaagttgggtgagaccgaaagaccttttcctgtgaggaaaagaatgttcggtcgtgcttggcccctaagagctcctgtgagagatggaattgtaccaacttggccacaactgatgaatagtaaatctgctccaccatgcacgg

SEQ ID NO: 169944 - DNA, 274 bp, Glycine max
gatgacctcaacaacgtttgcatctgccactgttaatgtcctcccggccattacttttgtaatggcactcattttcaggctagagaaggtgaacttgagaaaatttcacagtgtagccaaagtcattggaacccttataacagtttcaggagctatggttatgactctgtacaaaggccctgccttccaaatcataaagggtggaggagccatcagcaaccatagcaactctagcagtactagtaccaccgaaccctctgaccagcactggata

SEQ ID NO: 169945 - DNA, 274 bp, Glycine max
gcccggcaaccgctactacggcggcaacgaattcatcgaccagatcgaaaacctctgccgctcacgcgccctccaggccttccacctcgacgcccaatcctggggcgtcaatgtgcagccctactccggctcccctgccaacttcgccgcctacaccgccgtcctcaacccccacgaccgcatcatggggctggatctcccctccggcggccacctcacccacggctactacacctccggcggcaagaagatctccgccacctccatttacttc

SEQ ID NO: 169946 - DNA, 265 bp, Glycine max
ggagaagaaagatattgtgcaacttcattagagtccatggtagattttgtcacttctaagcttgggaagaatgctcgagttatttctacagaagcagaaaaggaaagtaagtcccaaaaattctcggtgaaagatggagtgaagttgttagcagaagataaggtcattgtttgtcatcctatggattacccatatgttgtgtttatgtgtcatgagatatcaaatactactgcgcattttatgcctttggagggagaagatggaa

SEQ ID NO: 169947 - DNA, 268 bp, Glycine max
ttttgcttgtgtgaagtgccaaattaagagagaaacagagagatagaaggaaaagcatcaaagatgaaacccaacttttcatttttgtttaagcttttgatactgcaatatctagcagttctatccatttctcaggaatttgatttcttctactttgttcagcagtggccaggagcatactgtgacacaaagcagagctgctgttatcccaagactgggaaaccttcagcagatttcagcattcatggactttggcctaactacaatg

SEQ ID NO: 169948 - DNA, 269 bp, Glycine max
cgcacacgaggagcagcctcaggaggagaaggatgtctcacaggaagttcgagcacccaaggcacggttcactgggatttcttcccaggaagcgtgctgctcgtcacaggggaaaagtgaaggcattccccaaggatgacccatccaaggcacccaagctcactgcattcttgggttacaaggccggtatgactcacattgttagagaggtcgcgaagccaggatcaaagcttcacaagaaggaaacttgtgagcctgttacaattatt

SEQ ID NO: 169949 - DNA, 271 bp, Glycine max
ttttgtgcttctttctgtgtgcaagaaaggtaaaagctttcacacaccaagaaaagtagccatggctgcttgctcaagaacttctcttttgctccttttctttctctttggattctccgcagctaaggaactattggttggaggcaaaatagatgcttggaagattccatcttctgaatcagattccctcaatcaatgggctgaaaggtctcgtttcagagtcggcgatcatcttgtgtggaaatatgagaatgggaaggactcagtgttg

SEQ ID NO: 169950 - DNA, 270 bp, Glycine max
gtttctttcttcaacgtttccatcatacacagatcccaatcctctctcaagccctaatttcccctcatttccatggccacagaagagtccactgtcgcggtggaacccgctcccgaacctgcctccgccgatcctcccccggaggagaaggaggagaccaaacctgaagccaaggctaagaaaaccaaggagcccaaacctaaaaaggtttccagacctcgcaaccctcccactcatccttcctacgaagagatggttaaagatgcaatt

SEQ ID NO: 169951 - DNA, 265 bp, Glycine max
taattacttgccttgaggaacgttccagaccacatacagaggtttctctagtgatcttcgttcttctgtggagatcttgttttttcatctcacttttcttctaattaaggaacaagctttccgcagttgaaaaccctagctagctagcttccaccaatttgaatcaccaatggctcgctctttctctaacgtcaaggttctctctgctcttgtggccgacggattctccaacactctcaccaggcgtgggtacgcagcagcgaca

SEQ ID NO: 169952 - DNA, 265 bp, Glycine max
ctccagacacaatccatggatcacttcgtgtgacagtccaaggtgaagtcattgagcaatcatttggagaacaacacttgtgttttagaacactacaacgtttcactgctgccactctagaacatggcatgcaccccccgatttctccaaaaccagaatggcgtgctttgatggatcagatggctgtcattgctactgaggaataccgttccattgtattcaaggaaccacgctttgttgagtatttccgcctggctacaccgga

SEQ ID NO: 169953 - DNA, 263 bp, Glycine max
gaaatctgaagctaacttaagggaaatgagatggccaatggcaacactagtcatcgcttcaagctcttgcttttccttctaactctgcactcttcattcgctgagattttcttcgaagagagattcgaagatggatggaagagccgttgggtgctatccgattggaaaaggagtgaaggaaaagcgggtaccttcaagcacacagcaggaaaatggtctggggatcctgatgacaaaggtcttcagacatataatgacgccaa

SEQ ID NO: 169954 - DNA, 268 bp, Glycine max; identical to SEQ ID NO: 164801

SEQ ID NO: 169955 - DNA, 265 bp, Glycine max
ctgccgtggtgctttctccactgcctaaaccgactctctctctctgcctctgcaagcttgttacttggctttgtttgattgattgccccaatggccgcgtgtggctatatatctgctgccaacttcaatcatcttgttggcgccagacacttatccaaattcagttcttcggatgccacaatttcgttatcatttggcgggagcgattcaatgggtcttagtttgcgacccgctccaattcgtgctcctaagaggaaccatttct

SEQ ID NO: 169956 - DNA, 263 bp, Glycine max
ctattacatatatcagaatcattaaagataagattatattgctaagaagaaaaaatatgaaggttgtctacttgcttgttgccctcttggctttgacatcaactgttgtctctgcctatgaccctagtcctctgcaagatttttgtgtggcagccaaagaaaaagatggtgtatttgtgaacgggaaattctgcaaggaccccaagcttgtcaaagcagaagatttcttcagacatgtggaacctgggaaaactgacaaccca

SEQ ID NO: 169957 - DNA, 262 bp, Glycine max
caatcttctgagagtgtttggttgaaagtagcaaagatgtttcctttcgggcaaaagggtcacaagataaaggggactatggtggttatgcagaagaatgtgttggatatcaacagcatcaccagtgttggagggatcgttgaccaaggcttaggcttcataggcagtgcagtcgatgcacttacttttgcagccaccaaaatctccatccagttgattagtgctaccaaggctgatggtgggaaaggaaaaattggaaaga

SEQ ID NO: 169958 - DNA, 260 bp, Glycine max
agttactatactctctctttctgaaacaatttgcccaattgtttgagatgttcaatatgagatttgtatctcaagattgggtggtttcatgtgcactaatacttctggtgtcatgcacaacatactcatcagcttctttggggaaacctgagaacaacataaaaacatctgtttttaaatcacccaagattgagctaggtccagggttagtttcaaacaaattttattttgatgttgactttccaagaggccatattgca

SEQ ID NO: 169959 - DNA, 258 bp, Glycine max
actttcttccttaattttctagctcttgctacgtacttgaattcaattagttattaatggctgagattgagggttctcccggaagctccatgcatggagtaacaggaagagaacaaacatttgtagcctcagtcgcttctccaattgtccctacagacaccacagccaaatttgctctcccagtggattcagaacacaaggccaaggttttcaaactcttctccctggccaatccccacatgagaaccttccaccttt

SEQ ID NO: 169960 - DNA, 260 bp, Glycine max
tgttgtagagagaagtaatggcgaacatagacatcgaagggatcttgaagcagcagcagccttatgatgggcgcgttccgaagacgaagatagtgtgtactttgggccctgcttctcgatccgtagaaatgaccgagaagcttctgagggcagggatgaacgttgctcgtttcaatttctctcatggcacccacgactatcaccaggaaaccctcaacaatctcaagactgccatgcacaacactggcatactctgtgcc

SEQ ID NO: 169961 - DNA, 262 bp, Glycine max
taaatctcctctttgtttccgagtcagagagcaatggcacgtaccaagcaaaccgctcgcaagtccaccggcggaaaggcgccgaggaagcaattggcgactaaagccgctcgcaagtcagctccggccaccggcggagtgaagaagccccaccgcttcaggcccggaacggtggctctgagggagatcagaaagtaccagaagagcactgaacttctgatccgaaaactcccattccagaggctcgtcagagaaatcgctc

SEQ ID NO: 169962 - DNA, 275 bp, Glycine max
cttattgaagactacccttatgcagctgatggactcctcatatggtccagcataaagaagttggtcaggacctatgtcaacattactataaaaattccaatgccgtttcttctgacaacgaactccaatcttggtacagagaattcatcaatctcggacaccctgatcataaaaatgctagttggtggcctaaacttgacatccctgaggatctcacctccatgcttaccactgttatttggcttgtatcagcacaacatgctgtcttgaacttt

SEQ ID NO: 169963 - DNA, 273 bp, Glycine max
tctacaaccaagataagccatgggatgaccattggatcttttgggtaggaccatttattggggcagccattgcagccttctaccatcagttcatcttaagagcaggtgcagctaaggctcttggatcattcaggagtaacccccataattgagttgtctttctcttccttatgatggctctagtggaaagaagataattggagagatggaggttgatatggcaagtttaataataattgggaatgcttttggcttgtgttttgcaacgtttct

SEQ ID NO: 169964 - DNA, 271 bp, Glycine max
agcaggtagccacagctgttataaaagaagcagtggaggaggacctagctgaaggatatcatggaatggatgctcgggagtgcagaaactaagcgaggatgaaatcgcggaatatgtgcagaataacatgtggagtccagagtaccctacattagtttacaagaaagaatgagtaacctgcagggttgataactacaatttccctctcgatgcatgtttggttcgatcaggttgttcacagaatcctgtttactggattagatgatttaaa

SEQ ID NO: 169965 - DNA, 270 bp, Glycine max
agtgagtctacgtgtttgagagaaaggttgagctatagcctaaagggagagacacataaatagtttctactttctattcatagatagatggctggcccaattatgagacctcagattgtgctatttggctcctccataattcaaatgagcttcgacaatggtggttggggtgctattctagctaacttgtacgctaggaaggcggacatcatcttaagaggatactctggttggaattcaaggcgggctttggaggttttggatgaaatt

SEQ ID NO: 169966 - DNA, 265 bp, Glycine max
attttcatagggaggtctggggctattggaccactggtagaattattgggaagtggaacccctcggggaaagagagatgtgccactgctttatttaatttgtcaatatttcatgaaaacaagaatcggattgtgcaagctggtgctgtgaggcaccttgtggacttaatggacccagcagctggaatggttgacaaggcggttgccgtcttagcaaatcttgccacaattccagaaggaagaaatgcaattggtgatgaaggtgg

SEQ ID NO: 169967 - DNA, 269 bp, Glycine max
cagaatcggtcactaaatccgcaatcatgaagctcgataccaccggtctcgaatcgtttcccacactgcttgcgcctcaaaacgacgtcgttggagaactctccgccgctccatccttcgaccttccgaattccaacgatttcgatgggtttgtgaaagaagctattcagatggtgaagcccgcgaagggtactacgactcttgcttttatatttaaggagggtgttatggtagctgctgattctcgagctagcatgggaggatatata

SEQ ID NO: 169968 - DNA, 269 bp, Glycine max
tttctctcttctctctccacccaaaccctaactcccgaccctgttcccctctcgtatccgtcatgaaaggaggaaagtcaagaccgaatctaagagagccgatcccaaacttgctgtgaataagaagggagccgccaccaaggctaggaaacccgccggcaaggggaaggcagcgaaagaccctaacaagccaaagaggcctccaagtgctttcttcgttttcatggaggagttcaggaaggtattcaacaaagaacatcctgaaaaca

SEQ ID NO: 169969 - DNA, 268 bp, Glycine max
gaacgaatgacggattgataatatcaatcctgggtcacagaaacgcggctcagcgtaagttgattcgtgaagcttatagtacaacccatggagaagatctccttaaagatttagacaaagaactttcaagtgactttgagcgggctgtgatggtttggacattggatccttctgagcgtgatgcctttttagcaaatgaagccactaagatgttgacttcaaacaattgggtcattttggaaattgcttccactagatcttcacttga

SEQ ID NO: 169970 - DNA, 273 bp, Glycine max
ctccgatggctaatccctcactcttgttcttcagtctcctcctattatccgccaccgtagccgccgccgaacggatcgacgatgaagacgaccttctgatccgtcaagtggtgccggatgcggaggaccaccacctgctcaacgcggagcaccacttctccgccttcaagacaaagttcggcaagacctacgccacgcaggaggagcacgaccaccgcttccgtatcttcaagaacaacttgctccgcgccaagtcacaccagaaattggatc

SEQ ID NO: 169971 - DNA, 269 bp, Glycine max
cttggttacactgaagatgatgtggtctccactgactttatcggcgatagcagatcaagtatttttgatgcaaaggctggaattgcattgaataagaactttgtgaagcttgtttcttggtacgacaacgagtggggatacagctcacgtgtcattgatcttcctgtattcgttgccaagaagtctctttaaggtgttacttcaaagtatcttgtcttcacattattaccgtatgtttatgtttagctgcgatttagtgtcttgctcga

SEQ ID NO: 169972 - DNA, 268 bp, Glycine max
atcatctttagttcttcagtaatttattgtgggattctattctaagattttgagaatgtctagctgtgggtgtggaagcagctgcaactgtggcagcaactgcggttgcaacaagtactcttttgacttgagttacgttgagaagacaaccacagagactctagttttgggtgttgggcctgtgaaggcccaattggagggtgctgaaatgggtgttgcatctgagaacggtggctgcaactgtggatcaagctgcacctgtgaccca

SEQ ID NO: 169973 - DNA, 269 bp, Glycine max
cataaatattccgttttgcgtttctctgcctaaaaggattgaaagatgggtcaagcactaggttgctatcaagttgatcagtcaaatgtggctatcaaggagcattttggaaaatttgatgatgtcctagaacctggatgtcattgcctgccttggtgtcttgggtaccagattgctggtagtttgtcactgcgtgtgcagcaacttgatgttcgatgtgagacgaaaaccaaggacaatgtctttgtcactgtggttgcatctgtgca

SEQ ID NO: 169974 - DNA, 267 bp, Glycine max
caaattccaatcccaagaagctacctctcatcgttttctttcacggtagccgcttcgtgcgactcagcgcggcttccacaatgttccacgatttttgcgtcgaaatggcgaacaccgcggaggccttcgtggcctccgttgactaccgcctcgcaccggagcaccggcttccggcggcgtacgacgatgccgtggaggcgctgcggtggatcgcgtgcagcgaagaggagtggttgacgcaatatgcggattatagtaagtgttatc

SEQ ID NO: 169975 - DNA, 265 bp, Glycine max
gtgaaccactacaagctaagagggaatatccaaagttataatcttggtggcatgggttgcagtgctggactaatctctatagaccttgccaaacagctcctccaggttcatccaaactcttatgccttagtggtgagcatggagaacatcactctcaactggtattttggcaacaacagatcaatgctagtctcaaattgtctattcagaatgggtggagctgcagtcctcctctccaacaagtcttctgatcgcagaagagcca

SEQ ID NO: 169976 - DNA, 263 bp, Glycine max
cataaatattccgttttgcgtttctctgcctaaaaggattgaaagatgggtcaagcactaggttgctatcaagttgatcagtcaaatgtggctatcaaggagcattttggaaaatttgatgatgtcctagaacctggatgtcattgcctgccttggtgtcttgggtaccagattgctggtagtttgtcactgcgtgtgcagcaacttgatgttcgatgtgagacgaaaaccaaggacaatgtctttgtcactgtggttgcatc

SEQ ID NO: 169977 - DNA, 266 bp, Glycine max
aaacaaagaacaaaaacattaatagagtatagaaagaaaaaagatgatgtccccatcccatgtgatcctatccatatttttcttggtgtgtacaacaacaccaccactgtcccttgcccagaacacccctcaagactttcttgatgtgcacaatcaggctcgtgccgaggttggtgttggtccactctcatggaaccacacccttcaagcctacgctcaaaggtatgccaatgagagaatccctgactgcaacctcgaacactcca

SEQ ID NO: 169978 - DNA, 265 bp, Glycine max
caaattccaatcccaagaagctacctctcatcgttttctttcacggtagccgcttcgtgcgactcagcgcggcttccacaatgttccacgatttttgcgtcgaaatggcgaacaccgcggaggccttcgtggcctccgttgactaccgcctcgcaccggagcaccggcttccggcggcgtacgacgatgccgtggaggcgctgcggtggatcgcgtgcagcgaagaggagtggttgacgcaatatgcggattatagtaagtgtta

SEQ ID NO: 169979 - DNA, 269 bp, Glycine max
gtgaaccactacaagctaagagggaatatccaaagttataatcttggtggcatgggttgcagtgctggactaatctctatagaccttgccaaacagctcctccaggttcatccaaactcttatgccttagtggtgagcatggagaacatcactctcaactggtattttggcaacaacagatcaatgctagtctcaaattgtctattcagaatgggtggagctgcagtcctcctctccaacaagtcttctgatcgcagaagagccaaata

SEQ ID NO: 169980 - DNA, 266 bp, Glycine max
ctcgagccgctcgagccgcttgctttgaccttttgccggttgttgtgttgcattggtgcaacatggcgttactcagaagcgtttctgcactttctcgacttcgctctcgcgtgggccagcaatctaatcttgcgaattcagttagatggctccaaactccgagctccagtaacactgatctttattctgagttgaaggaactagttccagagtatcaggaacgtgttaagaagctgaagacagatcatggaagtgttgaattggga

SEQ ID NO: 169981 - DNA, 267 bp, Glycine max
cacttttgcttcgagatggcaaagtcgaagaatcacacagcacacaatcagtcctacaaggcccacaaaaacggcatcaagaaacccaagaggcatcgccacacttccaccaaagggatggatcccaagtttctgaggaatcagaggtacgcgaggaagcacaacaagaagagtggtgaaacagccaccgaggaagagtgaaatggcactttctaacggaaccattagggtttttttatgctcatttttttggttaaactttgtttg

SEQ ID NO: 169982 - DNA, 269 bp, Glycine max
aagaaatagagggttttggtgtttggtgtttgaatcgtgaaaatgttcagaaaccagtatgacacggacgtgacgacatggagcccggcggggaggctgttccaggtggagtacgcgatggaggcggtgaagcagggctcggctgcgatagggctccgatccaagacccacgtggtcctcgcatgcgtcaacaaggctaactccgaactttcatcgcaccagaagaagatcttcaaggtcgacaaccacatcggcgtcgccatcgccgg

SEQ ID NO: 169983 - DNA, 265 bp, Glycine max
aattaatcaaacatggctagggttagtgctttgtttcactctttgctcttgatttcttcccttgtattggcttctcaaatccatgtttcctctgggaaactagtccctggactatcatggaattactatttgttgacatgtcccaagcttgagaggattataaggaagcatcttgaggatgtcttcgagaaggacagtggagtagctcctggcatacttcgactcttcttccatgactgctttcctaatggatgcgatgcgtcta

SEQ ID NO: 169984 - DNA, 259 bp, Glycine max
cttgtcttctgaaggcagctggagggaagttatttcaggtgccaacaaatcaatatatgctcctgaccctctgatgttgggagaatcttacaagtagatcattgtctcaaatgggaaaaagctcaccctaacaactaatcccattcaaactgtttcaggacttggaagccatgtggagacacttctacgaaaatctaatactgattttactgtagttatttctcaaatgaatggaaaagatcactcatcccattctact

SEQ ID NO: 169985 - DNA, 261 bp, Glycine max
tttgcttcttcgagtttcacagccaagtcgtaaaagggtttcaagggatggaaaacatgcagagcttctggcaattgggtgatgaactccgtgggcactcaaaagcatcggaggatcacaagtggttaatggttgcctcgaaactggccgaacagacaagattgaagggggagcgtgtgaacaaccttgatctttcaaagggacccattgaaacaaggtcaagggataaatttgggttccaggaagagaacaaatttgatt

SEQ ID NO: 169986 - DNA, 233 bp, Glycine max
acaaaacttgctatagcagtaagctataactcatttgaggctctgtgagaattgagaaatggctaaagatgttgaggttcaagagcaaggaggagagtactctgccaaagactaccatgaccctcctccagcacctttgttcgacccagaggagctcacacagtggtccttctatagagccctcatcgctgagttcatagcaacccttctcttcctttatgtcactgtgctca

SEQ ID NO: 169987 - DNA, 266 bp, Glycine max
aatttgaattgggcactgaagccagagagatgccatgcaaccatatttaccattctgactgtattgttccttggttggttcagcataactcatgtcctgttcgccgtgttgagctgccacctcaaggacaggctagttcccgtggtactcgaagttggggaggaaggaatgccagcaacagcagcagcagtggcagcaatgatagctccaggggcagagagaacagccatcagaaccatggaaggagaaatccattttcatttttg

SEQ ID NO: 169988 - DNA, 261 bp, Glycine max
ctcagattgcaattgcctcttctcttctcccagaatcggtgtaggttacaggtttaagggttttgttttcatttaggtcactaatccgatatcatgaagctcgatacgactagtctcgaatcgtttcccacactgattgcacctcaaaacgacgtcgccggagaactctccgccgctccgttctttgaccttccgaattccaatgacttcgatgggttcttgaaagacgctattcagatggtgaagcccgcgaagggtact

SEQ ID NO: 169989 - DNA, 262 bp, Glycine max
ggaaaattagcctcacaaaagcaaagatcaaacaaaccaaggacgagaacacgatgttgcttgaacttgcacttggtttattggttttggctctgtttctgcacttgcgtcccacacccactgcaaaatcaaaagcacttcgccatctcccaaacccaccaagcccaaagcctcgtctaccccttcataggacaccttcatctcttaaaagacaaacttctccactacgcactcatcgacctctccaaaaaacatggtccct

SEQ ID NO: 169990 - DNA, 257 bp, Glycine max
ggagaggataaggctttgcatttcatttgagagagagagcgtcttaactttacattatcaaaatggctgtttcggctatcacaggagcgaggctaaatctagggatagggttggcgatacctctttcctctcccacgcgctctcgaaccgtcgcaatggccgtatccgtcgaccccaagaccgacaacaaactcactcttaccaagtccgaggaagctttcgctgctgccaaggagctgatgcctggaggtgtcaac

SEQ ID NO: 169991 - DNA, 257 bp, Glycine max
ctaatctccatctaatagtgttaatttgtctttctctatctctatcggtcatgggtgcttttgcttttgatgaggaaaactcctccaccgtggctccggcaacactctacaaagctctgacaaaagatgctgacactatcatcccaaagattattggggccatccaaactattgaaatcgttgaaggaaatggaggacccggaaccgtcaagaagataacagctagtgaaggtgaccaaaccagtttcgtgctgcaa

SEQ ID NO: 169992 - DNA, 263 bp, Glycine max
ctcacactcactgcagatctcaatccatggctaccattgttagcatcaaggcccgccagatctttgacagtcgtggcaatccaaccgtcgaggtggatttgacatgctccgatggtacttttgctagagctgctgttccaagtggtgcatccactgggatttatgaggcccttgaattgagagatggaggatctgactaccttggaaagggtgtatcaaaggctgttgacaatgtgaacaccattattgcccctgctttggtt

SEQ ID NO: 169993 - DNA, 266 bp, Glycine max
cggctcgagtggaaccatttccctcataaaattctctcttcctttttgggttctcctcaatccattccaagcttcaatcttttctctcttctgccctctgcacctcccctcacacccttcctcattcgcaggaggtgaagatgtcgaccccggcaaggaagagactgatgagggattttaaaagattgcaacaagatcctcctgctggcatcagtggggctccccaagacaataattatgctttggaatgctgttatctttggacc

SEQ ID NO: 169994 - DNA, 254 bp, Glycine max
ctgagaatgagataaaggacaagaagttctttggaggtgacgagattgggttggtagatattgctgctgtctacatagcattttgggtccctatggttcaagaaattgcagggttagagttattcacaagtgagacatttcctaagctccacaattggagccaagaatttttgaaccatccaattgtcaaagaaagtctgccccctagagatcctgtttttgcctttttcaagggtcgctatgaaatccttttt

SEQ ID NO: 169995 - DNA, 254 bp, Glycine max
atcaacatgaaaccgatgtaggaatgggcacaactaaatgtggctaattgatattgcagatggctggagtggggtcagtggtgatgacaccattaataggaaacttgtcggaccgatatggcagaaaagcgttgctcacacttcctctcactgtctctgtcattcctcaagtgatattggcatatagcagggatacccaattcttctacgcgtactatgtggtgaaaactctggctgccatggcaggcgaaggg

SEQ ID NO: 169996 - DNA, 276 bp, Glycine max
gctgccacaaattataataatagggttgttgaatgccatttggcttctattgtgctcgctataaagctagggatggatccaaaagaggcaatatcaaaagtgagcacactgtctgatgttgaagggttatgcgtatcatttgctggtatttataactcatctgatcctgtacttgctgtaaaggaatatttgaaggaagaaccatatacagctgaagaaattgaagcagttacaggggaaaactgacttcattttgaacataatgcagttatttag

SEQ ID NO: 169997 - DNA, 277 bp, Glycine max
gcattgtgatgatctaaatacacaacaaattatcatggatgaaatcatgcaatctgtcggcactttagcacaggatcaatatggaaattatgttattcagcatattgtggagaatggtaaaccacatgaacggactgctattatcagcaagtctgccgggcagattgttaagatgagccagcaaaagtttgcttcaaatgttatcgagaagtgtttggcttttggtagtcctgaagaacgtcagattttggtgaatgaaatgcttggtacttctgat

SEQ ID NO: 169998 - DNA, 266 bp, Glycine max
gatttatctggtagggttgttatgctggggatccaaggtctggctgctgctggacagtgttgcaagcagcttgaagacttgaatctgcgattctgcgaaggattcactgatactggtctggttaaattagccttaggtgtggggaagtcgttgaaatctcttggtgtggcagcttgtgccaagataactgatatctcaatggaggctgtagggtcacattggaggtcccttgagaccttgtcgttcgactctgagtgcatccacaa

SEQ ID NO: 169999 - DNA, 279 bp, Glycine max
gtcccaaagagctaacaagagattcaagaccggcatggctaatgaagaggaacagaaaaaccacctcttcggcatcaaagatctcggtcacaagactctccttcagagtgatgcactctatcagtatatacttgaaaccagtgtctatccaagagagcacgagtgcttgaaagagatacgcaagatgactgcaaaacacccactgaacatcatggcaacaccagcagacgaaggacaacttctgagcatgcttgttaagctcacgaattcacagaacgc

SEQ ID NO: 170000 - DNA, 281 bp, Glycine max
gttcgggtcctctcaatccgatcaacgacaccgtcgaattccgatcccctcgcgacgccgatggccacggcacccataccgcctccaccgccgccggccgctacgccttccaagccagcatgtccggttacgctgctggaatcgcgaaaggcgttgctccgaaagccagattggctgcttacaaagtttgctggaaaaattccggttgcttcgactctgacatcctcgccgcctttgacgccgccgtgaacgacggggtggatgtgatttcgatctccatc

SEQ ID NO: 170001 - DNA, 281 bp, Glycine max
ggaaaacgcagaagaacttgcggcactagatgccattgatgcggggaagttgtaccatatgtgtaggaatttggaagttccagcagcagcaaacactcttcgttactatgcaggtgctgccgataagattcatggcgaggtgttgaaaatgtcccgagacttccatgcctatacattgcttgaaccacttggtgttgtgggacacattactccctggaatttccccaataccatgttctacatcaaggttgctccttctttagctgctggctgcaccatgg

SEQ ID NO: 170002 - DNA, 280 bp, Glycine max
ggaaaagacactgtctcgcgagtgaacacaggttacagcaatggctttctttggtagaattgggaatttattaagacagacagcaagcaggcaggttagttcagaattgcgatcatccccttcgttttttcaggctatacgcagtatgtcatctgctccaagcacaaagctgtttatcggaggtgtttcatattctactgacgagcaaagtttgagggaagctttttcaaaatatggtgaagttgttgatgctaggataattatggatcgtgaaactggt

SEQ ID NO: 170003 - DNA, 277 bp, Glycine max
ctcacgaccctccgccgccgcggttgcaagcagagcacaccatcgaaatgggcgaacgaaggcgttggttccggaatcggtggtgaagaaggagaagaggaacgaggagtgggctttggagaagaagcaggaactcgatgccgcaaagaaaaagaggttcgaaacgcggaagctgatttttaacagagccaaacagtactcaaaggaatacgacgagcagcaaaaggagttgattaggttgaagcgtgaagccaagcttaagggagggttttatgtt

SEQ ID NO: 170004 - DNA, 273 bp, Glycine max
gttgatctttggttgaagattcaagaggaggcaaggttagatgttgatcaagaaccaattttatccagctactatttcagttccattttgtctcacaaatctttggagagtgccttggccaaccacctctccacaaatttgagcagcttgagccttccaagcagcaccctttttgaccttttcatgggtgttttggttgatgatggagatgatgacatcgtaggtgctgtgaaggatgatttgatagctgttaaggagagggaccctgcttgc

SEQ ID NO: 170005 - DNA, 278 bp, Glycine max
gttactttccaatttgaattgttccattttcatttctttcgcaaaagttgcaactacttcctcagaaaaaaagtttctaagttaaggcaatccagacacacaaacatcgacggaaaacgttcagctacatgcatagacatcttccttgctatcattcttcctcctcttggagtgcttctcaaatatggctgccaggtggagttctggatttgtttggtgctgaccctttttggttatatacctggaattatctatgctgtctatgctatcaccaagtg

SEQ ID NO: 170006 - DNA, 275 bp, Glycine max
gctttctcccaactctaccaccaccacttcaacaccttcgtttcccaaacaaattgcatagtagtctccgtggagtacaggctcgccccggagcaccctctccccgcatgttacctcgattgttgggaagctctcaaatgggtcgcatcccattccagcgaaaatagccccatcaacgcagaacagtggttaattagccacggcaatttccaaagagttttcattggaggtgacagtgcaggtggcaacatcgttcacaacattgccatgcgtgc

SEQ ID NO: 170007 - DNA, 272 bp, Glycine max
cggctcgagggaagagagagggagattctttgtttgctaccttctctcggaaaaatggttacgttcaggtttcaccagtaccaggtggttgggagggctcttcccacggaagcagatcagcaccccaagatctaccgaatgaagctctgggccaccaacgaggttcgcgccaagtccaagttctggtattttctgaggaaactgaaaaaggtgaagaagagcaatggccaagtgcttgccatcaacgagatttttgagaagaacccaaccaa

SEQ ID NO: 170008 - DNA, 270 bp, Glycine max
atgggttcttcttcttctatgtggacggtgtgtgtgattttggcatcactggcctctgcagcactctgtgccaacccacgcaggccagtggatgtacaatttggccgaaactacgtgcccacatgggcctttgatcacatcaaatatttcaatggtggttctgacattcagcttcatcttgacaagtacactggtactggcttccagtccaaagggtcttacttgtttggtcacttcagcatgtacataaagatggttcctggagattca

SEQ ID NO: 170009 - DNA, 271 bp, Glycine max
caaaagcaaccacaacaagcacttctcttatttcctatcacaccctattacagattcacaagcgcagacacttcaaatggctctggaagctcttcaatcacccagaacagccactccatcgtttagtccctttgaagaaaccaacctcagttacttggagacaccgtggaccaaaggaaagcgttctaagcgtagcgcatggagcagcaactgcaacactcttcatgcaccgaggaagagtacctcgctctctgtctcatcatgctcgctc

SEQ ID NO: 170010 - DNA, 274 bp, Glycine max
ttttcatttccgatccataattgtcccaacgcgatacaccaattcttccttcctttcatctcgtgaaatccaaagagttgcgacacgttaaattgttttccaggttgcgcatatccagcatgcaggcatcgcgggcaaggctgttcaaggagtacaaagaggtgcagcgggaaaaggctgttgatcttgatattcaactagtttgtgatgattcaaacatttttaaatggaccgctcttatcaagggaccctctgagactccttatgagggtgg

SEQ ID NO: 170011 - DNA, 273 bp, Glycine max
gtgccattcatttcttctagccatggacgagaagctcatacagcggttagaatcggcggtgttgcgcttggagtcgctatcctctggactccacccctccgcttcacaatccggcggcgcccacgcttcccgatgcggcgctcgatccctccgtcgtcgccttcgccgatctgatcgaccagtacgtcggtagggtttccggcgctgcagaggttatcggcggacaggtcttgggtgtcaccaaactggtgcaggaagctttcaatgttcaga

SEQ ID NO: 170012 - DNA, 269 bp, Glycine max
aaagtttcttcctttctctgctctttgccttctctgacacatttggtgccttgtagagcgtgttttggcaggaaggtggtatggcgaaggacgttgaggttgctgagcgtggctccttctctgggaaggactaccaggaccctccaccagcaccactcattgatgctgaggagctcacaaagtggtccttttacagggctctcattgctgaattcattgccactttgctcttcctctacattactgtgctcacagtcatagggtacaag

SEQ ID NO: 170013 - DNA, 271 bp, Glycine max
aaattgtgaaggaagtctcttcctacttgaagaaagtaggatacaaccctgacaagattccttttgttcctatctctggttttgagggagacaacatgattgacaggtccacaaaccttgactggtacaagggtccaactctgcttgatgcacttgaccagattagttcgcccaagaggccctctgacaagccccttaggcttccccttcaggatgtgtacaagattggaggtattggaactgtgccagtgggacgtgttgagaccggtgt

SEQ ID NO: 170014 - DNA, 272 bp, Glycine max
agcaaagaaagaaagaaagaaaaccctagcttaccttttcaactttcaagatgcaaatcttcgttaagacactcactggtaagacaatcacccttgaggtggagagttcagataccatagataatgtaaagtccaagattcaagacaaggaagggatcccaccagaccagcaacgtctcatttttgctggcaagcagcttgaggatggacgtacacttgctgattacaacatccaaaaggagtccactcttcacttggtgctccggctccgt

SEQ ID NO: 170015 - DNA, 273 bp, Glycine max
taagcagcggctaccctaatcctctcctcttcctctctactaatttcagctatggccgacgaagctgtggttgttccagatcccacccagatcgatgtcaagctctttaaccgctggagcttcgacgatattgagtggcgacatccaagcacgccacgtatgtgcctcacaccgccggcagtcactcggtgaagcggttcaggaaggcgcaatgccccattgttgagaggctgaccaactctctcatgatgcacggtagaaacaatggcaaga

SEQ ID NO: 170016 - DNA, 271 bp, Glycine max
gtgaaagagaatccgaggcgaagagaagagaaaaattaagatggaggggaaggagcaggatgtgtcgctgggagcgaacaagttcccggagagacagccgattgggacggcggcgcagagccaagacgacggcaaggactaccaggagccggcgccggcgccactggttgacccgacggagtttacgtcatggtccttttacagagcagggatagcagagtttgtggccacttttctgtttctatacatcactgtcttaaccgtcatggga

SEQ ID NO: 170017 - DNA, 269 bp, Glycine max
ctggacttgaagcaatatcctggtctacgtgttgaggttgggaatgccgccattgattcgctagaaaaaatgagggaggaaagcaaaacagcaacactacagctagttgatatggagtgtggctatttgacggttgattactttcggaagcttcctcaagatgttgataagggtggcaatgctacacattcaatttttgatagatataatgattcatatcttaggagaattggaaccaatgttctgtcttatgtcaatatggtctgtgc

SEQ ID NO: 170018 - DNA, 268 bp, Glycine max
ctctaatcactctagctgttgcaaatttctactatttttcaatggcttctgcagatgttgagttccgttgctttgttggtgggcttgcttgggtcaccggcaacgatgccctcgagaaagccttttcaatctacggcgacatcgttgaatcgaaggttatcaacgaccgtgagactggaaggtccagaggattcggatttgtgaccttcgcctcagagcagtcaatgaaagatgcgatcgcaggaatgaacggccaggaccttgacgg

SEQ ID NO: 170019 - DNA, 265 bp, Glycine max
aacgacctgtttcctccctcgcacggatccacccgatttctgagattccttcgaattgttaactctctttcagtttcaagttggaaactttttcgattttcgctttctggaggtgtgaattgttgtttgaaagtcacaagcaatggtgaaggacactgcgtattatgacatattaggtgtcaattatgatgcatctgctgcagagatcaagaaagcttattatgtcaaggctagaattgttcaccccgataaaaatcctgaggat

SEQ ID NO: 170020 - DNA, 270 bp, Glycine max
caaattaatcaaacatggctagggttagtgctttgtttcactctttgctcttgatttcttcccttgtattggcttctcaaatccatgtttcctctgggaaactagtccctggactatcatggaattactatttgttgacatgtcccaagcttgagaggattataaggaagcatcttgaggatgtcttcgagaaggacagtggagtagctcctggcatacttcgactcttcttccatgactgctttcctaatggatgcgatgcgtctatat

SEQ ID NO: 170021 - DNA, 270 bp, Glycine max
catcaatctcgtttgttctcactaactattacttcatcatgtcgtcgagcacagttggtcaagtcatcaaatgcaaagctgcggtttcatgggaggcagggaagccacttgtgattgaagaagtagaggtggcaccaccacaagctggtgaagtgcgtttgaagatcctctacacctctctttgccacactgatgtttacttctgggaagccaagggccaaactccattgtttcctcgtatatttggtcatgaagctggagggattgtgg

SEQ ID NO: 170022 - DNA, 271 bp, Glycine max
actgacgtctactggactactatatggatggggttggaataagtttggacaggttggagttggtgacaatgttgatcgttgctctcctgtgcaagtgaagttcccccatgatcagaaagtagttcagatctcatgtgggtggagacacacaattgctgtaactgaaaaggaaaatgtattttcttggggaagaggcacaaatgggcaacttgggcatggggataccgttgaccggaattctccaaagattattgaggcattgagtgtggat

SEQ ID NO: 170023 - DNA, 271 bp, Glycine max
ctcacgcatttcctcgttttcttcttcttcccttttctctcttctctctctttctccggcgacgatctcagattccggtcactcctctcgccggcgatcccttattcctccgtcctccgtcgagtcctttccgattcgaatcgttcccagccttgtgccaccatgaatcccgaatacgattatttgttcaagcttttgctgattggagattctcgtgtaggcaagtcatgtcttctcctgaggtttgctgtccaaatgtattgacgtatta

SEQ ID NO: 170024 - DNA, 268 bp, Glycine max
gtacgcccagcgtgtcggtaccggtgctcccgtttacttggccgcagttctcgagtacctagctgctgaggtgcttgagttggctgggaatgctgcacgtgacaacaagaagaacaggattattccgagacatgtgctgttggctgtaaggaacgatgaggagttggggaaattgcttgctgacgtcaccattgctcatggtggtgttcttccaaacattaaccctgttttgctacctaagaagactcaggttgctaaggaaccaaaa

SEQ ID NO: 170025 - DNA, 267 bp, Glycine max
gggcaataaaacagcaaaagtttcaattttgtttctgttgaattttctcgggttggtttgcagtagcaatggcggagacatagtggtttactggggccaagacgacagcgagggcacattgagcgaaacatgcaactctggactatacaaaatagtgaacataggctttctggcaaaatttggcggtgggcgggaaccagaaataaacctagcaggacactgcgaccctgcatcaaacggttgcaaaagtttgagcaaagacataaa

SEQ ID NO: 170026 - DNA, 265 bp, Glycine max
tcaatgagttagcttcgggtttggaattgagtggtcaaaggttcttgtgggttttgagagcaccaaataattcagctagtgctgcttaccttgaggcttcaaaggaggaccctttgcaattcttaccaagcgggtttttggaaaggacaaaggagaaaggtttggttgtggcttcatgggcacctcaggttcaggtccttggtcacaattcagttggggggtttctaaggcattgtggttggaactcaacattggagagtgtgca

SEQ ID NO: 170027 - DNA, 268 bp, Glycine max
tgttaagaaccctacttctaagattgtctatgatgatcacaaccatgaaagatttcccccaggtgacccaagcaagagggcatttgcctacttcgtacttacaggtggtaggtttgcttatgcctctgtggtccgtctccttgtcctcaagtttgtgctaagcatgtctgccagtaaggatgtttctgctctggcttcacttgaggttgacctctccagcattgagcctggcactacagtgactgttaagtggcgtggaaagcctgtg

SEQ ID NO: 170028 - DNA, 265 bp, Glycine max
aggttcatcttcttctcttgcggctagggttttagcgcagttcttctagatttaatcaagatgggtaaggacaaggttcacatcagtattgtggtcattggccatgtcgactctgggaaatccactaccactggtcacctgatttacaagcttggaggcattgacaagcgtgttattgagaggtttgagaaggaagctgctgagatgaacaagaggtctttcaagtatgcctgggtgctggacaaacttaaggctgagcgtgaaa

SEQ ID NO: 170029 - DNA, 265 bp, Glycine max
atccatatggaggtttaatcctaaacaggccaactattagcaggagattcatgcctgaaaaggggtctcctgaatatgatgcgttggctaagaaccctgagaaggagtttttgaagactattactggcaagaaggagaccctcattgaccttacagttatagaaatcttgtcaaggcacgcatctgatgagttctaccttgggcagagagatggtggtgactactggacttctgatgccggtccattagaggcatttaagaggtt

SEQ ID NO: 170030 - DNA, 267 bp, Glycine max
agcgcagaatccaagaagaaaggatcaactgtcaaagataaggaaaaatctaaaaggatgaagggtcaatcatcccatgcaacctggaaaagtgaaacagagatgcatctaaggcaacagtttgattagcattatgtgttcttgtatgttaccagttacctggtagaatgtgatgtgtttaggactatgctgttaaatcaacaaattaacttcgtcgttatcaatgccagcaggtacaagttgctacatatggctctaaaattatgg

SEQ ID NO: 170031 - DNA, 266 bp, Glycine max
caattaattatagtttaggctgcaaattatggaatcccatgatgaagagcatgctgccaaactacttagagctcaaacccacatatggaatcacatatttagcttcataaactccatgtcccttaaatgtgtggttgacttaggcataccagatatcatacacaactatggccaacccatgccactctcaaacctcattgcttcactaccaatccacccatccaaaacttgcttcgtccatcgcttgatgcgaatcatgatccatt

SEQ ID NO: 170032 - DNA, 271 bp, Glycine max
ccctcgagccgattcggctcgagcaaattcccttcccatggtctctccctcttcaattaattccatttagctttccccaaatcccaaaccctttttcgcttagatcccaatccaattgggttatggacatggcttccagtccccgcaccgtagaagagatcttcaaggattacagcgccagaagaacctctgttattcgcgctctcactcacgacgttgatgaattttacggcctctgtgatccagataaggataacctgtgcctctatgg

SEQ ID NO: 170033 - DNA, 263 bp, Glycine max
cgccagtctcccagaaggaagctgacatccagatgatgttggccgccgacgtccacctcggcaccaagaactgcgacttccaaatggaacgttacatcttcaagcgccgcaacgacgggatttacattattaaccttgggaagacgtgggagaagcttcagctagcagctagggttatagttgcaattgagaacccccaggatatcattgttcaatctgcaaggccttatgggcaaagagcggttctgaagtttgctcagtac

SEQ ID NO: 170034 - DNA, 262 bp, Glycine max
ccagaattcatgccattgagtcatgttcttgcaaccaagctcggtgctcgtctcaccgaggttcgcaagaacggaacctgcccatggctgaggcctgatgggaagacccaagtgactgtggagtattacaatgataatggtgccagggttccagttcgtgttcacaccgtgctaatctccacccagcatgatgagactgtcaccaacgacgaaattgcggctgacctcaaggagcatgtgatcaagcctgtgatcccggaga

SEQ ID NO: 170035 - DNA, 262 bp, Glycine max
caaattctctgtgttgtgttgtgtacttgtgttaattgtgttgttgttgtaggaaatttaagtgaagagagaatggtgatgaagtctgctatgtgtgcattggtgcttgtggcactggttgtggttgaagtggggcccatggctgaggctgcggtgacttgcaacccaacacagttgacttcttgtcttccggcaattaattcaggttctgcaccttcgagtgcttgttgccagaagctgaaggagcaaaagccatgcttct

SEQ ID NO: 170036 - DNA, 263 bp, Glycine max
cgcaacaaaaagaaagaatcccaggcgaggagaaagatggaggggaaggagcaggatgtgtcgttgggagcgaacaagttccccgagagacagccaattgggacggcggcgcagagccaagacgacggcaaggactaccaggagccggcgccggcgccgctggttgacccgacggagtttacgtcatggtcgttttacagagcagggatagcagagtttgtggccacttttctgtttctctacatcactgtcttaaccgttat

SEQ ID NO: 170037 - DNA, 254 bp, Glycine max
cctagatacatatgttcacgctgctgatggtactccgttactcatcaagaacgcaatctgtgtctttgaacaatatggcagcatcatgtgggcgtcacaccgaaacaggcattcccaatgaatcgttcgaagaaacgagaacggaagtcaacttagtggtaagaactgttgttaccgtgggcaactacgataacatcattgattgggagtttaaaacaagtggctcaatcaaaccctcgattgctctctcgggt

SEQ ID NO: 170038 - DNA, 267 bp, Glycine max
gttcaacaacgtggcgctgcaattatcaaagctagaaagctttcaagtgcactatcagctgctagtgctgcttgtgaccatattagagactgggttcttggaactcctcagggcacttgggtatcaatgggagtatattctgatggttcctacaatgttccagctggacttatatattcattccccgtcacttgtgccaatggggaatgggcaatagttcaaggactttccattgatgagttctcaaggaagaagttggacttgact

SEQ ID NO: 170039 - DNA, 148 bp, Glycine max
gctgccacaaattataataatagggttgttgaatgccatttggcttctattgtgctcgctataaagctagggatggatccaaaagaggcaatatcaaaagtgagcacactgtctgatgttgaagggttatgcgtatcatttgctggta

SEQ ID NO: 170040 - DNA, 281 bp, Glycine max
gcattgtgatgatctaaatacacaacaaattatcatggatgaaatcatgcaatctgtcggcactttagcacaggatcaatatggaaattatgttattcagcatattgtggagaatggtaaaccacatgaacggactgctattatcagcaagtctgccgggcagattgttaagatgagccagcaaaagtttgcttcaaatgttatcgagaagtgtttggcttttggtagtcctgaagaacgtcagattttggtgaatgaaatgcttggtacttctgatgaga

SEQ ID NO: 170041 - DNA, 274 bp, Glycine max
aattcagaaactgaatagaatgtcctgaaacaggttgaaaaagggaagcaagatgatgcactgtcagatttaagtgatctcttgggagaactgaaaggcatggccattgacatgggatctgaaatcgggaggcaaaaccaagccttggacggttttgacaatgatatggagaagttgaccgtccgtgtgaatggtgctaatcaacgtagtcatcgtttgcttgggaaataggggcgtatatcatgagattgatactaatttttaccatgcatta

SEQ ID NO: 170042 - DNA, 287 bp, Glycine max
gtcccaaagagctaacaagagattcaagaccggcatggctaatgaagaggaacagaaaaaccacctcttcggcatcaaagatctcggtcacaagactctccttcagagtgatgcactctatcagtatatacttgaaaccagtgtctatccaagagagcacgagtgcttgaaagagatacgcaagatgactgcaaaacacccactgaacatcatggcaacaccagcagacgaaggacaacttctgagcatgcttgttaagctcccgaattcagagaacgccttggaaa

SEQ ID NO: 170043 - DNA, 285 bp, Glycine max
gttcgggtcctctcaatccgatcaacgacaccgtcgaattccgatcccctcgcgacgccgatggccacggcacccataccgcctccaccgccgccggccgctacgccttccaagccagcatgtccggttacgctgctggaatcgcgaaaggcgttgctccgaaagccagattggctgcttacaaagtttgctggaaaaattccggttgcttcgactctgacatcctcgccgcctttgacgccgccgtgaacgacggggtggatgtgatgtcgatctccatcggtg

SEQ ID NO: 170044 - DNA, 274 bp, Glycine max
ggaaaacgcagaagaacttgcggcactagatgccattgatgcggggaagttgtaccatatgtgtaggaatttggaagttccagcagcagcaaacactcttcgttactatgcaggtgctgccgataagattcatggcgaggtgttgaaaatgtcccgagacttccatgcctatacattgcttgaaccacttggtgttgtgggacacattactccctggaatttccccaataccatgttctacatcaaggttgctccttctttagctgctggctgc

SEQ ID NO: 170045 - DNA, 256 bp, Glycine max
ggaaaagacactgtctcgcgagtgaacacaggttacagcaatggctttctttggtagaattgggaatttattaagacagacagcgagcaggcatgttagttcagaattgcgatcatccccttcgttttttcaggctatacgcagtatgtcatctgctaccaagcaaaagctgtttatcggaggtgtataatattctactgacgagcaagtttggagggaagctttttcaaaatatggtgaagttgtggatgctagg

SEQ ID NO: 170046 - DNA, 277 bp, Glycine max
gttgatctttggttgaagattcaagaggaggcaaggttagatgttgatcaagaaccaattttatccagctactatttcagttccattttgtctcacaaatctttggagagtgccttggccaaccacctctccacaaatttgagcagcttgagccttccaagcagcaccctttttgaccttttcatgggtgttttggttgatgatggagatgatgacatcgtaggtgctgtgaaggatgatttgatagctgttaaggagagggacctgcttgcataag

SEQ ID NO: 170047 - DNA, 116 bp, Glycine max
atgggttcttcttcttctatgtggacggtgtgtgtgattttggcatcactggcctctgcagcactctgtgccaacccacgcaggccagtggatgtacaatttggccgaaactacgt

SEQ ID NO: 170048 - DNA, 272 bp, Glycine max
caaaagcaaccacaacaagcacttctcttatttcctatcacaccctattacagattcacaagcgcagacacttcaaatggctctggaagctcttcaatcacccagaacagccactccatcgtttagtccctttgaagaaaccaacctcagttacttggagacaccgtggaccaaaggaaagcgttctaagcgtagcgcatggagcagcaactgcaacactcttcatgcaccgaggaagagtacctcgctctctgtctcatcatgctcgctca

SEQ ID NO: 170049 - DNA, 279 bp, Glycine max
ttttcatttccgatccataattgtcccaacgcgatacaccaattcttccttcctttcatctcgtgaaatccaaagagttgcgacacgttaaattgttttccaggttgcgcatatccagcatgcaggcatcgcgggcaaggctgttcaaggagtacaaagaggtgcagcgggaaaaggctgttgatcttgatattcaactagtttgtgatgattcaaacatttttaaatggaccgctcttatcaagggaccctctgagactccttatgagggtggtgtgt

SEQ ID NO: 170050 - DNA, 271 bp, Glycine max
gtgccattcatttcttctagccatggacgagaagctcatacagcggttagaatcggcggtgttgcgcttggagtcgctatcctctggactccacccctccgcttcacaatccggcggcgcccacgctcccgatgcggcgctcgatccctccgtcgtcgccttcgccgatctgatcgaccagtacgtcggtagggtttccggcgctgcagaggttatcggcggacaggtcttgggtgtcaccaaactggtgcaggaagctttcaatgttcag

SEQ ID NO: 170051 - DNA, 276 bp, Glycine max
aaagtttcttcctttctctgctctttgccttctctgacacatttggtgccttgtagagcgtgttttggcaggaaggtggtatggcgaaggacgttgaggttgctgagcgtggctccttctctgggaaggactaccaggaccctccaccagcaccactcattgatgctgaggagctcacaaagtggtccttttacagggctctcattgctgaattcattgccactttgctcttcctctacattactgtgctcacagtcatagggtacaagcaccaga

SEQ ID NO: 170052 - DNA, 138 bp, Glycine max
aaattgtgaaggaagtctcttcctacttgaagaaagtaggatacaaccctgacaagattccttgttgttcctatctctggttttgagggagacaacatgattgagcaggtcacaaaccttgactggtacaagggtcca

SEQ ID NO: 170053 - DNA, 277 bp, Glycine max
agcaaagaaagaaagaaagaaaaccctagcttaccttttcaactttcaagatgcaaatcttcgttaagacactcactggtaagacaatcacccttgaggtggagagttcagataccatagataatgtaaagtccaagattcaagacaaggaagggatcccaccagaccagcaacgtctcatttttgctggcaagcagcttgaggatggacgtacacttgctgattacaacatccaaaaggagtccactcttcacttggtgctccggctccgtggtgg

SEQ ID NO: 170054 - DNA, 280 bp, Glycine max
taagcagcggctaccctaatcctctcctcttcctctctactaatttcagctatggccgacgaagctgtggttgttccagatcccacccagatcgatgtcaagctctttaaccgctggagcttcgacgatattgagtggcgacatccaagcacgccacgtatgtgcctcacaccgccggcaggtactcggtgaagcggttcaggaaggcgcaatgcaccattgttgagaggctgaccaactctctcatgatgcacggtagaaacaatggcaagaaactctt

SEQ ID NO: 170055 - DNA, 113 bp, Glycine max
ctggacttgaagcaatatcctggtctacgtgttgaggttgggaatgccgccattgattcgctagaaaaaatgagggaagaaagcaaaagagcaccactacagctagttgatat

SEQ ID NO: 170056 - DNA, 277 bp, Glycine max
ctcgaggacgagttccgctcgctcatggagcgcggcggcgaggccttcgacctcactcggagccaccggaaaggcgactcagcggggaatttgccgttcgagtcagacgaagacgtcgacgaagaagaagaagaagagcggaacgttggaataggaggaggagacgaggaggagcagattccggtggcgctgccggtccgggacttcgacatcgtcatcgacgcactgccgtcggggacgatcaacgacctgcacgagatcacgaagcgaatggtgg

SEQ ID NO: 170057 - DNA, 154 bp, Glycine max
ctctaatcactctagctgttgcaaatttctactatttttcaatggcttctgcagatgttgagttccgttgctttgttggtgggcttgcttgggtcaccggcaacgatgccctcgagaaagccttttcaatctacggcgacatcgttgaatcgaa

SEQ ID NO: 170058 - DNA, 274 bp, Glycine max
aacgacctgtttcctccctcgcacggatccacccgatttctgagattccttcgaattgttaactctctttcagtttcaagttggaaactttttcgattttcgctttctggaggtgtgaattgttgtttgaaagtcacaagcaatggtgaaggacactgcgtattatgacatattaggtgtcaattatgatgcatctgctgcagagatcaagaaagcttattatgtcaaggctagaattgttcaccccgataaaaatcctgaggatcctaaggcc

SEQ ID NO: 170059 - DNA, 275 bp, Glycine max
caaattaatcaaacatggctagggttagtgctttgtttcactctttgctcttgatttcttcccttgtattggcttctcaaatccatgtttcctctgggaaactagtccctggactatcatggaattactatttgttgacatgtcccaagcttgagaggattataaggaagcatcttgaggatgtcttcgagaaggacagtggagtagctcctggcatacttcgactcttcttccatgactgctttcctaatggatgcgatgcgtctatattgttg

SEQ ID NO: 170060 - DNA, 276 bp, Glycine max
catcaatctcgtttgttctcactaactattacttcatcatgtcgtcgagcacagttggtcaagtcatcaaatgcaaagctgcggtttcatgggaggcagggaagccacttgtgattgaagaagtagaggtggcaccaccacaagctggtgaagtgcgtttgaagatcctctacacctctctttgccacactgatgtttacttctgggaagccaagggccaaactccattgtttcctcgtatatttggtcatgaagctggagggattgtggagagcg

SEQ ID NO: 170061 - DNA, 273 bp, Glycine max
actgacgtctactggactactatatggatggggttggaataagtttggacaggttggagttggtgacaatgttgatcgttgctctcctgtgcaagtgaagttcccccatgatcagaaagtagttcagatctcatgtgggtggagacacacaattgctgtaactgaaaaggaaaatgtattttcttggggaagaggcacaaatgggcaacttgggcatggggataccgttgaccggaattctccaaagattattgaggcattgagtgtggatgg

SEQ ID NO: 170062 - DNA, 275 bp, Glycine max
gtacgcccagcgtgtcggtaccggtgctcccgtttacttggccgcagttctcgagtacctagctgctgaggtgcttgagttggctgggaatgctgcacgtgacaacaagaagaacaggattattccgagacatgtgctgttggctgtaaggaacgatgaggagttggggaaattgcttgctggtgtcaccattgctcatggtggtgttcttccaaacattaaccctgttttgctacctaagaagactcaggttgctaaggaaccaaaatctccat

SEQ ID NO: 170063 - DNA, 263 bp, Glycine max
tcaatgagttagcttcgggtttggaattgagtggtcaaaggttcttgtgggttttgagagcaccaaataattcagctagtgctgcttaccttgaggcttcaaaggaggaccctttgcaattcttaccaagcgggtttttggaaaggacaaaggagaaaggtttggttgtggcttcatgggcactcaggttcagtccttggtcaaattcagttggggggtttctaagcattgtggttggaactcaacattggagatgtgcaaga

SEQ ID NO: 170064 - DNA, 273 bp, Glycine max
tgttaagaaccctacttctaagattgtctatgatgatcacaaccatgaaagatttcccccaggtgacccaagcaagagggcatttgcctacttcgtacttacaggtggtaggtttgcttatgcctctgtggtccgtctccttgtcctcaagtttgtgctaagcatgtctgccagtaaggatgttcttgctctggcttcacttgaggttgacctctccagcattgagcctggcactacagtgactgttaagtggcgtggaaagcctgtgttcat

SEQ ID NO: 170065 - DNA, 268 bp, Glycine max
gttcactcttcttctcttgcggctagggttttagcgcacttcttctagatttatagaagatgggtaaggaaaaggttcacatcagtattgtggtcattggccatgtcgactctgggaaatccactaccactggtcacctgatttacaagcttggaggcattgacaagcgtgttattgagaggtttgagaaggaagctgctgagatgaacaagaggtctttcaagtatgcctgggtgctggacaaacttaaggctgagcgtgacagagg

SEQ ID NO: 170066 - DNA, 267 bp, Glycine max
atccatatggaggtttaatcctaaacaggccaactattagcaggagattcatgcctgaaaaggggtctcctgaatatgatgcgttggctaagaaccctgagaaggagtttttgaagactattactggcaagaaggagaccctcattgaccttacagttatagaaatcttgtcaaggcacgcatctgatgagttctaccttgggcagagagatggtggtgactactggacttctgatgccggtccattagaggcatttaagaggtttg

SEQ ID NO: 170067 - DNA, 251 bp, Glycine max
agcgcagaatccaagaagaaaggatcaactgtcaaagataaggaaaaatctaaaaggatgaagggtcaatcatcccatgcaacctggaaaagtgaaacagagatgcatctaaggcaacagtttgattagcattatgtgttcttgtatgttaccagttacctggtagaatgtgatgtgtttaggactatgctgttaaatcaacaaattaacttcgtcgttatcaatgccagcaggtacaagttgctacatat

SEQ ID NO: 170068 - DNA, 269 bp, Glycine max
caattaattatagtttaggctgcaaattatggaatcccatgatgaagagcatgctgccaaactacttagagctcaaacccacatatggaatcacatatttagcttcataaactccatgtcccttaaatgtgtggttgacttaggcataccagatatcatacacaactatggccaacccatgccactctcaaacctcattgcttcactaccaatccacccatccaaaacttgcttcgtccatcgcttgatgcgaatcatgatccattctg

SEQ ID NO: 170069 - DNA, 268 bp, Glycine max
actcgagccgattcggctcgagcaaattcccttcccatggtctctcactcttcaattaattccatttagctttccccaaataccaaaccctttttcgcttagatcccaatccaattgggttatggacatggcttccagtccccgcaccgtagaagagatcttcaaggattacagcgccagaagaacctctgttattcgcgctctcactcacgacgttgatgaattttacggcctctgtgatccagataaggataacctgtgcctctat

SEQ ID NO: 170070 - DNA, 269 bp, Glycine max
cgccagtctcccagaaggaagctgacatccagatgatgttggccgccgacgtccacctcggcaccaagaactgcgacttccaaatggaacgttacatcttcaagcgccgcaacgacgggatttacattattaaccttgggaagacgtgggagaagcttcagctagcagctagggttatagttgcaattgagaacccccaggatatcattgttcaatctgcacggccttatgggcaaagagcggttctgaagtttgctcagtgcactggt

SEQ ID NO: 170071 - DNA, 266 bp, Glycine max
ccagaattcatgccattgagtcatgttcttgcaaccaagctcggtgctcgtctcaccgaggttcgcaagaacggaacctgcccatggctgaggcctgatgggaagacccaagtgactgtggagtattacaatgataatggtgccagggttccagttcgtgtacacaccgtgctaatctccacccagcatgatgagactgtcaccaacgacgaaattgcggctgacctcaaggagcatgtgatcaagcctgtgatcccggagaagta

SEQ ID NO: 170072 - DNA, 269 bp, Glycine max
cgcaacaaaaagaaagaatcccaggcgaggagaaagatggaggggaaggagcaggatgtgtcgttgggagcgaacaagttccccgagagacagccaattgggacggcggcgcagagccaagacgacggcaaggactaccaggagccggcgccggcgccgctggttgacccgacggagtttacgtcatggtcgttttacagagcagggatagcagagtttgtggccacttttctgtttctctacatcactgtcttaaccgttatgggagt

SEQ ID NO: 170073 - DNA, 270 bp, Glycine max
cctagatacatatgttcacgctgctgatggtactccgttactcatcaagaacgcaatctgtgtctttgaacaatatggcagcatcatgtggcgtcacaccgaaacaggcattcccaatgaatcgttcgaagaaacgagaacggaagtcaacttagtggtaagaactgttgttaccgtgggcaactacgataacatcattgattgggagtttaaaacaagtggctcaatcaaaccctcgattgctctctcgggtatattggaaattaagga

SEQ ID NO: 170074 - DNA, 272 bp, Glycine max
gttcaacaacgtggcgctgcaattatcaaagctagaaagctttcaagtgcactatcagctgctagtgctgcttgtgaccatattagagactgggttcttggaactcctcagggcacttgggtatcaatgggagtatattctgatggttcctacaatgttccagctggacttatatattcattccccgtcacttgtgccaatggggaatgggcaatagttcaaggactttccattgatgagtcctcaaggaagaagttggacttgactgcaga

SEQ ID NO: 170075 - DNA, 280 bp, Glycine max
ccctgttggtgctaaaataaattttgtttcttggtctcctgatggttgtcatttgtcctttagcattcgtgtgaatgaggaggacaatgatagcagtaaactcacagtatggattgcagatgtgaaaacagggatagctagaaagttgtttcagtcacctaatgtacatttgaatgcagtttttgacaattatgtttgggtaaataattcttcattgttagtttgcaccattccatcatcccgtggagctcctccaaagaaacctttggttccaagttgc

SEQ ID NO: 170076 - DNA, 282 bp, Glycine max
cttgtttatcattttcttactttcctctcacgctctgccacaaaactccgtctccgcaataacggaataaaaaaacaagtttaattactattatggcgccgagggatcataagacaagcaacgctaaggctaacggtaacggtaacagcggggtgaaggaggtgcattttcgtggagtgagaaagaggccgtgggggagatacgccgcggagatcagagatcccggcaagaagagccgcgtctggctcggaaccttcgacacggcggaggaggcagcgcgtg

SEQ ID NO: 170077 - DNA, 273 bp, Glycine max
tgctgctgttgcaaaacttagggttgggcctttttttgaggttttcagcgcttctttctcacaatggttcttcagaatgatattgatttgctgaatcctccagctgagttggagaagagaaagcacaaactcaagcgtcttgttcagtcaccaaactctttcttcatggatgttaagtgccagggatgcttcaacataacaactgtgtttagccactctcaaactgttgtggtgtgcggaaactgccagactgttttgtgccaaccaacaggg

SEQ ID NO: 170078 - DNA, 249 bp, Glycine max
ggaaaatgagttacttgggtttgggtgttagtccaggtactgttccagtgtaccatggaacaaaacttaaagtgttggataggagggtgaggataacagagctggtgttaaggtgtgtgagccttggtcttggagttgttgcaattgtccttgtggtgactgattcccaagtcaaagagtttttctcctttcagaagaaagctaaatttacagacatgaaggctttagtgttcttggtagttgcgaacg

SEQ ID NO: 170079 - DNA, 262 bp, Glycine max
gaaattgcctctttcaagaagcatctgagtgtttactattttgtactatatttatatatagtcactcaagcttctaggatttctgcctgctgcatcaaaatgggaagcaacttgaggtttttgagtctttgcctcttggcattgattgcatcaactcatgctcaacttcagcttggtttttatgctaacagttgcccaaaagcagagcaaattgtcctgaaatttgttcatgaccatatccacaatgctccatcactagcag

SEQ ID NO: 170080 - DNA, 266 bp, Glycine max
ctcgagcgcttggactttacagatcatgtttggacagagtgcttctctcaattcttgggaagatggatgcatcttgacccatgtgaaggaatctatgacaagccattattatatgaaaaagggtgggggaaaaaattaaattatgtaatagccatagcaaaagatggagtttatgatgtcaccaaacgatacacaaggaagtggcatgaggtcctatctcgacgtactatcattacagagccttctttgtcatctttactctctaa

SEQ ID NO: 170081 - DNA, 270 bp, Glycine max
cggctcgagaacctcaaataacccttgttatctctctttcattctcacttgtactcatctctttttcacaactttttttgtaccttctgatctaatggcagttccagtgattgatttttcaaagctgaatggtgaagaaagaaccaaaactatggcacagattgctaatgggtgtgaagagtggggattttttcagttgatcaaccatggtattccagaggaactccttgagagggtgaagaaggttgcctctgagttctataagctgga

SEQ ID NO: 170082 - DNA, 254 bp, Glycine max
tagaaaatggggtctctaatggcctctcttactctcactcttgtattggcaatagtttctctaagctcgtgctctcaagcctcagctgacaagtacgactattcatctccaccaccaccagtttacaagtacaagtccccaccaccaccctacaagtattcatctcctccaccacctcctaagaagccttactaatacccatcaccaccaccaccagtctacaaatactagtcaccaccaccaccatacaagta

SEQ ID NO: 170083 - DNA, 283 bp, Glycine max
caacaagttaatagcattccgcaaaatggctgccaccaccttagtctctgaagtcactctcccctcctcctccggccagcggaagatgccgctgatgggcctcggcaccgcgccggaagcaaccagcgcggttaccacaaaagatgctgttcttgaggccatcaagcagggctacaggcactttgatgctgcttctgcttatggtgtggaacagtctgtgggagaagccatagctgaagcacttaagcaaggactaattgcatccagagatcaactcatcatc

SEQ ID NO: 170084 - DNA, 275 bp, Glycine max
gaaagattcgaaacgaagaaagaaagcgttgtgaagaatggcggaagagggacaagtgatcggtgtccacagcgtagaggagtggaaggaacatctcaagaagggagaagagtccaagaaattgattgtggtggattttactgcttcttggtgcggtccatgccgtttcattgccccaattcttgcagagtttgctaaaaagttgccgaaggtcaccttcctcaaggtggatgtggatgaattggagactgtttccaaggagtggggaattgagg

SEQ ID NO: 170085 - DNA, 272 bp, Glycine max
gggaatcggcacgtagatcgaggatgaggaaacagcagcacctggaaggtctcagtgcccaattggatcagctaaaaaaggagaacacccaaatgaacacaaacataggcatcagcacgcagctgtacctcaacgtggaagctgagaacgcgattctgagggctcaaatggaagaactgagcaagagattgaactctctgaacgaaatgataagtttgattaactccaccaccaccaccaacaactgcttgatgttcgatgaggcacaggag

SEQ ID NO: 170086 - DNA, 263 bp, Glycine max
tcggaacaaacagggaatataagagagaaaaagatgggtttcataatggaattcgcggagaacttggtattgattttgatggaggatccgaagaaagggatcggaggttccgggagcacgtttatagagtgaaggacaggtgcgagaagacgaaggagatgtggagctaccctatgcgaccctatgggttttggactttcgaacgccacaattctcagcttgcttgggatgcacagattagccaagtggctgggaggagggac

SEQ ID NO: 170087 - DNA, 280 bp, Glycine max
tgagagaaacacgatgcatttatgttgagagaacttgtgaagagatgggcagaccatcaaattatggctcggtggctttctcggttctttcattattaggatcgatactttattgctcggaggtcacttccgccccttaatgaagttgggttgacttgcttccgcgatttgatttacaaggaactaaatgggaaagttagagatgcagttatttcactaattgatcaagaacgggagggagaacagattgatcgagctctattaaagaatgtattagaca

SEQ ID NO: 170088 - DNA, 268 bp, Glycine max
atttctttcccgtatttcaaatacttcgtacagtgcccaataagttattgggcgttcttttaatggtttcggtacctacaggattattaacagtaccctttttggagaatgttaataaattccaaaacccatttcgccgtccagtagcaaccaccatctttttgattggtactgtagttgccctttggttaggtattggagcaacattacctattgagaaatccctaactttaggtcttttttaaacttataaaattgattccattat

SEQ ID NO: 170089 - DNA, 263 bp, Glycine max
aagggacagctttttccatgacagaacgagatcgtcttgatctacgaggactgcttcctccaaatgttatgtctcctgacctacagattgaacgattcatggttgatctgaagacgcttgaagttcaagctagagatggaccttctgatcctaatgcattggccaagtggcggatacttaaccgcttgcatgacagaaatgagactatgtactataaggttttgattgccaaaatagaggaatatgcaccaatagtgtatact

SEQ ID NO: 170090 - DNA, 264 bp, Glycine max
gaaaaatccactttggttgttcacttgtatatgtatctcagtctcaggtggtggtgcatcgctgagttgtgtgagagtgagaaagagagagtgtgtgtgtgtgcagaagatgtggccattcagcagaaaaggggcttctggtttttcatcatcatccacggcagagcaagtcactgaaggaattgatggaactggtctcactgccattgtcacaggagcatccagtggtattggcactgagactacacgtgtcctttcattgcg

SEQ ID NO: 170091 - DNA, 265 bp, Glycine max
cttggaaagcctctgtaaacaccctgaagaatatctttcttatgatggtcattgcagtgattcaacagtgaaatcactgtcaagctcacttgtttgtactgttggggagatatcaacatggccaagtgccagtactgtcattccaggccaggttacatataccgtggatatacgagcgatagatgaccttggacgtgaagctgttatctatgatttatcgaaacaaatttaccaaatatgtgacaagcgttcagtttcctgcatt

SEQ ID NO: 170092 - DNA, 274 bp, Glycine max
cgggggatcaacctttgtacaacgaagacaaaactgttattgtcactgtaaatggggagatatacaatcacaagcaattgaggcagaaactgagttcccatcaatttcgaactggtagtgattgtgaagtgattgcccatctttatgaagaacatggagaagaatttgttaatatgctggatgggatgtttgcctttattcttcttgatactagggataaaagttttattgctgctcgtgatgctattggcattacccctctatacttgggctg

SEQ ID NO: 170093 - DNA, 278 bp, Glycine max
cacttttaggaggtccctacatcttacgtacatttcccgctgtacagattcatccagttcttagtgttattggcttactagttcatgggggtgaagctattataagttacaaagcttttcccctaaagaaggaagtgaagaaattgatacaccttgttttccatgccatcgcattaatacttggaatagttggaatttatactgccttcaagtttcacaatgaaagtgggattgccaatctctacagcttgcattcatggcttggaattggggttatt

SEQ ID NO: 170094 - DNA, 261 bp, Glycine max
gccagctagggcttgagatctcatatatcatggctacctccatggtgaagcttatgcttttctctgctctcatactcttgtccttgcaagcagttgtgtctgtaacaccactgcattttcaacatccactagaccctttaaccaaacaagagataagtcttgtccaaaccatagtccaaaataagtacccaagctcaagtaacaggttgagcttccactacattggactcttcgaacctgaaaaggatgccatcctcaaat

SEQ ID NO: 170095 - DNA, 193 bp, Glycine max
ttcattctcatctttctctcttctctctccacccaaaccctaactcccgaccctgttcccctctcgtatccgtcatgaaaggaggaaagtccaagaccgaatctaagagagccgatcccaaacttgctgtgaataagaagggagccgccaccaaggctaggaaacccgccggcaaggggaaggcagcgaaaga

SEQ ID NO: 170096 - DNA, 272 bp, Glycine max
gaaagaaaggaaacggaataattcgatacccctctcgtctcgtaactaaccatggcagcgctccgatggaagagcttcgaggagaatgaggatcgcccagccaagcctcgtcattttggcgtcaccgagattcaaagcccccactgcactctcttctcccacaaccttcttcaggatatttttgaatctatgggagactatgtagatgggttaaagttttctggaggttctcacagcatgatgccaaaggctactatcaagcaaatcattga

SEQ ID NO: 170097 - DNA, 257 bp, Glycine max
taataacaagctagctattagttcgattttgtagtaagtgaggtgccaatatggtgaagatagctcttggtactttggatgactcttttagcgctgcctctcttaaggcttatttcgcagagttccacgcaactctgattttcgtgttcgctggtgttggatcagccatcgcttacaacgagcttacaaaagatgcagccttggatccaacggggctggtggcagtagctgtggcacatgcatttgcactgtttgta

SEQ ID NO: 170098 - DNA, 261 bp, Glycine max
gaaagagactgggcaaaagatgaaacatcactgaagtcaggttttaggcatctagagcacatgccattccctttctggttggccctttttgttgaaggaactcgtttcacgcagacaaagcttttacaagctcaagagtttgctgcttcaaaagggctgcctatacctagaaatgttttgattcctcgtactaagggttttgtcacagcagtacaaagccttcggccattcgttccagccatttatgattgcacatatgca

SEQ ID NO: 170099 - DNA, 263 bp, Glycine max
gtttgagagaaaggttgagctatagcctaaaggctgagacacataaatagtttctactttctattcatagatagatggctggcacaattatgagacctcagattgtgctatttggctcctccataattcaaatgagcttcgacaatggtggttggggtgctattctagctaacttgtacgctaggaaggcggacatcatcttaagaggatactctggttggaattcaaggcgggctttggaggttttggatgaaattttcccc

SEQ ID NO: 170100 - DNA, 265 bp, Glycine max
aaagaaaagaccatcaaagtttcacttcagccttatccggtttagggtttcggtttttgaccctacctttgacgtatcgaaaccttaagtttcggatcaggtctgagcaatctggttggtagaacctttggtcttagagagtcaagttttatgtctgaattagacgatcaaattcctactgccttcgatccttttgctgatgcaaatgctgatgactcgggtgctgggtcaaaggagtatgtgcatattcgggtacagcagcgaa

SEQ ID NO: 170101 - DNA, 271 bp, Glycine max
gttgttgctgctcatcctccgtaacctccgagctctgcaccgaagaacgaagccatggggaagacacatggaatgggatctgctcgcaagctcaagtcccaccgcaggaggcaaaggtgggctgacaagtcatacaagaaatcacctgcttggaaatgaatggaagaaaccttttgctggttcatcccatgccaagggaattgtccttgaaaagataggtattgaggctaagcagcccaactctgccattcgtaagtgtgccagggttcaa

SEQ ID NO: 170102 - DNA, 271 bp, Glycine max
ctcggtgacagtggggtggggaagacatctttgatgaaccaatatgtgaataagaagtttagtaatcagtacaaggcaaccattggagcggattttttaaccaaagaagtgcaattcgaagataggcttttcaccttacagatttgggatacagctggccaagaaagattccaaagccttggagttgctttctatcgtggtgctgattgttgtgttcttgtatatgatgttaattcgatgaaatcatttgacaaccttaataactggaggg

SEQ ID NO: 170103 - DNA, 275 bp, Glycine max
gtgaagtccttcttacatagtatagacattctcaagccatgatttgtagacttttcaccatctacttcactttcttcttatgtttgccttttaccttcttcgttccttatgttcatagcaataaccagcttgataccaatttctatgatggatcatgccccaatttggccacgattgtcagatatggtgcttggtcagccattaaaaatgacaacagaatggctgcgtccctccttcggttgcactttcacgattgcatagtaaatggttgtgat

SEQ ID NO: 170104 - DNA, 257 bp, Glycine max
ctcaggtggctaaactacctccgccctaacatcagacacggtggtttctccgaagaagaagacaacatcatttgcagcctctacgttagcattggaagcaggtggtcggtcattgcagcacaattgccgggaagaactgataatgacataaagaactattggaacacgaggctgaagaagaagcttctagggaaacaccgtaaggaactacaggcacgcaacaaaggaaacggtggtatccttaaacaggagaacag

SEQ ID NO: 170105 - DNA, 161 bp, Glycine max
attgatgacatcttgaacaagttcgaccctgtcgttgaaagggtcatcaagaagcgccgtgagatcgtcagaaggagaaagaacggagaagttgttgagggcgaggccagcggcgtcttcctcgacactttgcttgaattcgctgaggacgagaccatgga

SEQ ID NO: 170106 - DNA, 252 bp, Glycine max
ctcgagccgcgcaacctcaactttgttctgtttccctgatgtcccagggccacatgatccccatgatggacatagcaaaaattctggaccagaacggtgttactgtcacagtggtcacaacccaccaaaacgcatcacgcttcacatcaactttttctacttcccaaatccgattactcgaagttcaattcccataccaagaagcagggttgacagaagggtgtgagaatctcgacatgttaccttcacttg

SEQ ID NO: 170107 - DNA, 261 bp, Glycine max
gtcccaattttctagggttttattcattttccgatggcttctgcagatgttgagtaccgttgctttgtcggtgggctcgcttgggccactgacgaccatgccctcgagagagccttctctcagtacggcgaaatcgttgaaacgaagattatcaacgatcgtgagactggcagatccaggggttttggatttgtgaccttcgcctcggagcagtccatgaaagatgcgatcggagcgatgaatggacagaacttggacggc

SEQ ID NO: 170108 - DNA, 249 bp, Glycine max
gttccgagacctcccagaaccggtcagcatccccggttgcactcctcttcccggcaaggactcgttggacccggttcaggaccgcaaaaacgaggcctacaagtggatcctacaccactgcaagcgatacaaagaagccgaggggataatcgggaacagcttcgaggagctcgaaccgggagcctggaacgagctgcagaacgaagaacaagggagtgctccggtttacgcggtgggaccgcttgtaag

SEQ ID NO: 170109 - DNA, 205 bp, Glycine max
gttgaggatcagattgctgtcgggaaacgcgtggtattagtaggtagcacaggggttgtgaagtctcaaactgattctgcttatggtgccaatgttgaagtgcggcttagagaggcagattttccaattggccaggaccagtcttcactgagcctttctcttgtgaagtggagaggagacctggctttgggggctaatcttcagt

SEQ ID NO: 170110 - DNA, 275 bp, Glycine max
aagaaagaaggtttttttagtatagttaacagcatggagagggaggaagatgttaaggttggagcacagaaattctcggagaggcaagcactgggtacaggagctaagagtgacaaggactacaaggaggcaccaccagcacccttgtttgagccaggggagttaaagtcatggtctttttacagagctgggatcgcagagtttgtggccacattcttgttcctctacatcactgtcttgactgtcatgggtgtcaacagggcacccaacaagtg

SEQ ID NO: 170111 - DNA, 267 bp, Glycine max
gtttttattgctgccactttcatggagcagggtggcattccaccttcaacgaaccctgcaactcttcttaaggaagcaatccatgttatcagctgtggttacgaagacaagacagaatggggcaaagagattggatggatctatggctctgtgacagaagatatcttgactgggttcaagatgcatgctcgtggttggatttccatctattgcatgccacctcgcccagcatttaagggttctgctcctatcaatctttctgatcgt

SEQ ID NO: 170112 - DNA, 261 bp, Glycine max
ggatggtgagtgttgaagagatccgtcaggcacaacgtgcagaaggccctgccactgtcatggcctttggcaccgccactcctcccaactgcgtcgatcagagtacctatcctgactattacttccgcatcaccaacagcgtgcacatgactgagctcaaagaaaagttcaagcgcatgtgtgataagtcaatgattaagaagcgatacatgtacttaaatgaagagatcctgaaggagaatccgagtgtttgtgcatata

SEQ ID NO: 170113 - DNA, 256 bp, Glycine max
ggatcaatcagtttgatcgtggagccatgcagatcagcacacttgaaggcaatggaagtagccaaggaatctgggtgcttgctctcctatgaccccaaccttcgtctacctttgtgcgccttcggctgaggaagctcgtaagcaaatactgagcatttgggagaacgctgatttgatcaaggtcagtgatgcggacttgagttcctcacaggaagtgacaagattgatgatgaatctgctttgtcattgtggcacc

SEQ ID NO: 170114 - DNA, 262 bp, Glycine max
gaagaatgttgcagtcaaggatctcaagcgtggttttcttgcatccaactccaaggatgaccctgccaaggaagctgccaacttcacatctcaagtcattatcatgaaccaccctggccagattggaaatggatacgcaccggtgcttgattgccacacttctcacattgctgtcaagttttctgaaatcttgaccaagattgacaggcgatctggtaaggagcatgagaaggagcccagatttttgaagaatggtgatgca

SEQ ID NO: 170115 - DNA, 256 bp, Glycine max
accgattgctagaatggactttcgatgctcagtcatctcttttaccattctcttctctcttgctcttgcaggagagagccatgtccatgcatcgctactccgaggaagattattgggaagctgtttggccaaacactcccattcccactgcactgcgagagcttctaaagcctctccctgcaggtgttgaaatcgatgaactccctaagcaaattgatgatacacagtacccaaaaacattcttctataaagaaga

SEQ ID NO: 170116 - DNA, 251 bp, Glycine max
aaaattcgtataggagcacataaaatggcagacatgcctcgggtgaagcttggaagccaaggcctgaaggtttccaagttaggatttggctgtatgggcctaagtggagtgtacaacgatcctgttcccgaagagggtagcatctctttgatcaaacacgcattcaccaaaggggtcactttcagtgattctgcagatttttatggagcacgtgccaatgaagtttgagtcggaaaggctctcagggactt

SEQ ID NO: 170117 - DNA, 261 bp, Glycine max
atcaaccttggatcaggtttagggaatggctgcaatcttagctcgaaaatcactccttgctcttcgtgcgcgccaattggctgtaagcggtcaagggctgcacagctcccaatactatggccttcggtcaagtgaacactccttctctaccaaaagagaggatgaggaaagggagcaactcgcaaaggacatttcacaggattggagttctgtctttgaacgtagcattaacactctctttctcactgaaatcgttcgagg

SEQ ID NO: 170118 - DNA, 278 bp, Glycine max
gaccatcaccgtcctggccctcgacaatgccgccatgtcctccctcctcgacaagcacctctccctccccaccatcaaaaacgtcctctccctccacatcctcgtcgactacttcggcgccaaaaagctccaccagatcaacaacagcaccaccctcgtctcctccatgttccaggccaccggctccgcctccggcaccgccggctacgtcaacatcaccaacctcaaggccggcaaggtcggcttcgccgccgaagacaacgacggctccctccact

SEQ ID NO: 170119 - DNA, 281 bp, Glycine max
gcacaaacagaccaattccaacggttgaattttttggctgaagacaccccaccgacgttagtcaaataaaacatgtcttgctccgtcgcggtttccaattcgccggtgttctctccttcttcttccctcttctgctcgaagccctccatcatctcttcttcgccggaatccctctcgctctctctctcgcatctcaaaccttccaactcttctacgacgtcgtcttgttcttcaccctctgctgctgcttcttcatcttcttctccttcttctccgtttcg

SEQ ID NO: 170120 - DNA, 267 bp, Glycine max
gctagggttagtgctttgtttcactctttgctcttgatttcttcccttgtattggcttctcaaatccatgtttcctctgggaaactagtccctggactatcatggaattactatttgttgacatgtcccaagcttgagaggattataaggaagcatcttgaggatgtcttcgagaaggacagtggagtagctcctggcatacttcgactcttcttccatgactgctttcctaatggatgcgatgcgtctatattgttgaatggagac

SEQ ID NO: 170121 - DNA, 266 bp, Glycine max
accgtgttcctatacatgtttgtaatagggatgtggaaatggaggttccgcccgagataccctcctcacatggatgctagtctctcttgtgcatatgtaaccagccctgaggactttgatgaggaaatggacacttttccaaccacaaagagctttgatatcgttcgttggaggtatgataggttgagaagtctggcagggaaggttcagagtgttgttggacagatagcaactcaaggagaaagaatccatgctcttataaattg

SEQ ID NO: 170122 - DNA, 267 bp, Glycine max
aagaatttgagtacatgatgacagccaaaataggagaaagggacactaaagaggagctcatgaaagctttccatattattgatcatgataaaaatggaaagatatccgcattagacatcaagcgcattgcaaaagagctaggtcaaaatttcactgacagagagattcaggagatggttgaggaagcagaccaagataatgatcgagaggttagtgcggaggagttcatcacgatgatgaacagaactcgcttccatcactagtctt

SEQ ID NO: 170123 - DNA, 271 bp, Glycine max
cgacgaaaactactcgctcggcaaatccctcacgagcaagcacctcattcagctagcttcaaagggtgaccacaaaaacgccatcaacgttgtgttaacttccgctgacgtggcagttgaaggtttctgcacgagccgatgtgggacccacggttcttcctcagcgggccatgcaaagaacaagaactacaagttcgcatacatatgggttgggaattcggaggcccaatgcccgggccaatgcacgtggccgtttcaccagcccatatat

SEQ ID NO: 170124 - DNA, 273 bp, Glycine max
ctcacgcatttcctcgtttttttcttcccttttctctttctccggcgacgatctcagattccggccactcctctcgccggcgagcccttactcttccctcctccgtcgagccctctccgattcgaatcgttcccagcctcgcaccaccatgaatcccgaatacgattatttgttcaagcttttgctgattggagattctggtgtaggcaagtcatgtcttctcctgaggtttgctgatgattcataccttgacagctatatcagtaccattgg

SEQ ID NO: 170125 - DNA, 271 bp, Glycine max
tttcactctttgtatttttcgctgactccggcgtcactttccgttgagtctccgtccaccggcgtggcgatgtactcggaatcttcaaactccgattctcaaccgcaccctctctcgaacccaatcgacgacgcgtgccacgacatgagctccctggaagagctcgcgaaccgcggcgcgtggcgttccatcattgacaaggtctcacgtgctcgcgccctctctctcctccacaagccccacgaccacctcacctaccttgccttcaacg

SEQ ID NO: 170126 - DNA, 264 bp, Glycine max
agatcaaccccgacgaaggcaaggggtttttctcggcttcttcagatttctgaaatggcgcctgtttcagctttagccaagtacaagctcgtcttcctgggtgaccaatccgtgggaaaaaccagcatcatcactcgcttcatgtatgataaattcgataacacctatcaggctacaattggtattgattttctatcaaaaactatgtatcttgaagatcgaactgttcgactgcagttgtgggatacagctgggcaggaaaga

SEQ ID NO: 170127 - DNA, 263 bp, Glycine max
cttcatatcccacggaaacacagccaggcttgctaaggagcacggcgatataaagttggcccagatctgcggcatgattgcctcagatgagaaacgccatgagactgcatacacgaagatagtggaaaagctatttgaggtcgatcctgacggtacagttatggcgtttgccgacatgatgaggaagaagattgccatgccagcacacctcatgtatgacggccgtgatgacaacctgtttgatagctactcttcggtcgcgc

SEQ ID NO: 170128 - DNA, 265 bp, Glycine max
caccgagaaggacagcaggaaacaaacaaaaaggagcagatgggtagctcaggtttctcatggcaattggcggatcatccaaagcatccaaagggtaagactgtggctgttgtggtattggatggttggggagaggccacacccaatgagtacaactgcatccacaaggccgaaacaccctgcatggattcacttaaaaagggtgctcctgaacggtggagattggtcagggctcatggtactgctgtaggacttccaacagaag

SEQ ID NO: 170129 - DNA, 264 bp, Glycine max
cgaactcctggtggcggtgctgactctgctttccggaaggcagaggatgtggtctccggcatgctagccaagggctttatcttagggaaagatgctgtcaacaaagcaaagacctttgacgagaagcaccagttatcctccacagcctcagcaaaagttgcgtctttcgatcagaaaattgggcttagcgagcaaataagtgctggtgctacagtagtgggtgatagagttcgagaagtggaccaaaagtttcaggtttcagag

SEQ ID NO: 170130 - DNA, 265 bp, Glycine max
agggtctcttccattcacaaccttaaacctttctttcttgtaaactttattgattgattctgagaatagaactaagagggtatagacatggctagcgcaattgcagcttcttttttggttctgcttctggctttccccactgtatttggagctgaccatgaagttggtgacactagtggatgggccctcggagttaattacaacacctgggcctctgggaaaactttcacagttggtgacactttggtgttcaagtatgactcca

SEQ ID NO: 170131 - DNA, 270 bp, Glycine max
tgtggctttgaaccattctggtgttagatggtatgtgtttggggatgatgacaccattttcttccctcagaatttggtcaaaactctttccaaatatgatcataggctttggtactacgttgggtcgtactcagagatttatgagggctcccaggtttttggttttggaatggcttttggtggaggtggttttgccatcagttcctctctagcacaagtcctagccaaggtttttgattcatgcatacaaaggtattctcatctatatgg

SEQ ID NO: 170132 - DNA, 265 bp, Glycine max
cttcctcaccgattgctagaatggaatttcgatgctcagtcatctcttttaccattctcttctctcttgctcttgcaggagagagccatgtccatgcatcgctacctgaggaagattattgggaagctgtttggccaaacactcccattcccactgcactgcgagagcttctaaagcctctccctgcaggtgttgaaatcgatgaactccctaagcaaattgatgatacacagtacccaaaaacattcttctataaagaagacct

SEQ ID NO: 170133 - DNA, 264 bp, Glycine max
ctcgagccgcgcgtttggacgcagacggtagcaaggaaacccaccgtaagcgataagcaatagaattcagagagagagagatagagagtctcttgctctgtatctttgatttgatcattccaatcttcaatttttctatatatccatcaatccgctgagtgcaaagttctaatctttcgcctattgggttctactcctttctctcttcgtttccgatcgatccaattttcttcccatggctacgatcggacacaacaatctcaa

SEQ ID NO: 170134 - DNA, 262 bp, Glycine max
aacatctttggacagtggccctgcaaattttgaggcaatggctcacacttatagcattgctttattgttcactcgttcaaagacatccagttacatggctttagtaagatgtttccaactggcattttccctcatgagcctctctctggaccaagaaggaggtttacaaccatctcgcaggagatctctttttactatggcatcatacatgcttatattctcagccagggcaggcaatttccccgagctaattcagaaagtt

SEQ ID NO: 170135 - DNA, 261 bp, Glycine max
ctcgagccgattttctagcttccaaaccctaacactcctcttcctcttcgatcatcacctatccacaatgccgccgaagttcgacccctcccagatagtcgacgtcttcgtccgcgttaccggcggcgaagtcggcgcggcgagttccctggccccgaagatcggtcccctcggtctctcccccaagaagatcggataagacatcgccaaagataccgccaaggactggaaggcccccgcgtcaccgtcaagctcaccgtt

SEQ ID NO: 170136 - DNA, 260 bp, Glycine max
gtttgcttccatggaagtgatttccgcttcgagcttgaatcccaacgctccgatgttcgtgcctctcgcctatcggacggtggaggatttctccgaccaatggtgggacctcgtccactcctccccctggttccgcgactactggctccgcgagtgcttccaagatccccagtaccaatacgacgacgttttcgacttcgactttgacctagatctccaagataaagatgaaaatgaagggaaggaagggaaagaggtgg

SEQ ID NO: 170137 - DNA, 256 bp, Glycine max
tctagctccaattcaaccatggcttcgagactcacggtaacagccttggtgctgatagctttggcaacagtttctctccaaacttcagcttcatcagtgggtaaattcatcgacgaaaccatcacttcccacaagatcgtcattttttccaagacctattgcccgtactgtagaagggcaaaagctgttttcaaagagttgaaccaagttccacatgttgttgagctcgacgagagagaggatggttcaaagattc

SEQ ID NO: 170138 - DNA, 260 bp, Glycine max
agggagacaagacagagtagtacagattactaccaatggctaccaaggtttacattgtttattattctacgtatggacatgttgagaagctagctagagagatagaaaaaggggctgcttctgtggagggagtagaagcaaaactgtggcaggtacctgaaacattgcctgaagaagtccttgctaagttgggagcacctccaaagagtgatgttccaattattactcccaatgagcttcctgaggctgatggctttttg

SEQ ID NO: 170139 - DNA, 263 bp, Glycine max
caaattacgaaccctgaacctctttgcgaattcagctgaaccttgatgggaaatctgagatttctgataggaaatagaaagccccaaaacattaccttagaataagggatttctcccgttactgaaggaaagacccccatttcatagcgcctggggaacgcaagtttgatcgaggattggagaggagaggtggaatggaagaaaaggcgaaggatggatctgtcttaaggatcttcagtcttacttggttagtagttttagat

SEQ ID NO: 170140 - DNA, 263 bp, Glycine max
gacctccgtgaatcgataagcaaccaaaccgacgtcgctctgagcatcacaaagctcctgttgtcgaaaaacgctcgggacagtaacctcgtgtactcgccgctgtcgttgcacgttgttctgagcatcatcgcttctggctccaagggccccacactcgatcagcttctctccttcctccgatccaagtccaccgaccatctcaactccttcgcctctcagctcgtcgccgtcgtgctctccgacgccgctcccgccggcgg

SEQ ID NO: 170141 - DNA, 257 bp, Glycine max
aggcgctgctgtttctacgattcatgttaccccagaagatggtttcagttatgcaagcttcgaaactgttggttatgacttcaaagcggtgaatctgaacgaaatggttcagagggtattggcatgtttcctcccaactgagttttctgttgcagttcatgtggatggtgcaagcaagtcgtttgagcagacctgctttctggatgttaagggatactgtcgtgaagagaggagccacgaagggcttggaatgggtg

SEQ ID NO: 170142 - DNA, 259 bp, Glycine max
atcgtgctgaatggcatggatcagatgttgctatcaaggttttaacagttcaggatttccaagatgatcaattgacagagtttctaagagaggttgcaataatgaaacgagtacgtcatccaaatgtggtgttgttcatgggtgcagttactaaacgtccccatctatctatagtaacagaatatttgcctagtttatttcgcctaatacataagccagcatctggtgagattctagatccaaggagaagattacggat

SEQ ID NO: 170143 - DNA, 258 bp, Glycine max
cacgaacagaagcttgactgtggtggtggctacatgaagttgctcagtggggatgttgatcagaagaaatttggcggggatactccttacagtattatgtttggcccagatatctgcggttacagtaccaagaaagttcacgctattcttacctacaataacacaaaccacttgataaagaaggatgttccttgtgagactgaccaacttactcatgtttacacatttatcctccgtccggatgcaacctacagcatc

SEQ ID NO: 170144 - DNA, 260 bp, Glycine max
agagaatagagaaagcgaagggaaggcccgtgagttttgcgcgtgcgagagagacagtggaaagaaaggcaagggatgacgctgggtctgatcaatgcgaatcctgtggttcacgccaagaaagagcgaatcgctcgttctgatgatcctcacgccgatgacgccgttgatcctctcgacatctatgatttcgtgagggatattcgggatcccgaacatccttattccctggaacagctcagtgttctctccgaggaatc

SEQ ID NO: 170145 - DNA, 267 bp, Glycine max
cgtagatatggctgaaactgacatccaagactatctccaactcttcttcctctggttactctccatcatcgccgttagagccatactcaccaaactccgccacaagcctcgccgtccaccgggcccacggtccctccccatcatcggccacctccatctcatctccgccctgcctcaccagtctttccacgcgctctccacgctttacggccccttcgtgcaagtcttcctcggctccgtccccgccgtggtcgtttcgtgcccgga

SEQ ID NO: 170146 - DNA, 261 bp, Glycine max
caaaatgttgccacttgtgtacatactcatagctcttcctgcagtagtgttgctattgatcctcttcaaagccaacaaaaacaacccgccacgtccaccaggtccaagaggccttcccataatcggcaaccttcaccaactcgacgcttcgaagctcaatctccaactagggcagctctcaaagacctacggtccccttttctccctccgaatcggcttcaagccagccctcgtcgtttcctctccaaaactcgccaaaga

SEQ ID NO: 170147 - DNA, 251 bp, Glycine max
tttaaccggaatcgggcccccacagcccgacaagaccgacgctctgcagcaggtgggcttgaaattagcccaattggcccaaatcatcggcgtgcagttcgaattccgcggcttcgtttgccgcagcctcgcggatctcgacccgaatatgctcgagatccgagccggggaagccgtagcggtggattccgacttcgaactccaccgcatgctcgccctgtgcggatgcgtcgacaaggtcttggacactg

SEQ ID NO: 170148 - DNA, 259 bp, Glycine max
cgtgcgtgcattccattgttgttgttattgtatcgtagccagagaagaagaagagaagagatcgcggcgaagaaagaaagatgacggaggcacatataaggaagaagcccgggatggcgagcgtgaaggacatgccggttctccaggatggtccaccgccgggcgggttcgctccggtccggttcgcccggcgcatcccgaacaagggccccagcgccgttgccatcttcctcaccaccttcggcgctttctcttgggg

SEQ ID NO: 170149 - DNA, 258 bp, Glycine max
atagacttatattccatggctccgccgctcgaacacaacggcgtttccaccagcggtgactctctgagatctattccgacgccgtttctcaccaaaaccttccaactcgtcgacgatcacaccatcgaccatgtgatttcgtggaacgattctggatcgtccttcatcgtctggaacaccaccgctttcgccaaggatttgcttcctaaatatttcaagcacaacaacttctccagcttcgttcgccaactcaacact

SEQ ID NO: 170150 - DNA, 258 bp, Glycine max
ctcgtgcaccagattgagaccgttccaaaccctaaggggctctgtgcggtttcgcagctgtccgattctctcgttctcgcgtgccccggtttgcacaagggtcagattcgcgtggaacactacgcgcagaagaagaccaagttcatctcagcgcatgattccagaatcgcttgcttcgctctcacgcttgatggacagttaatcgccaccgccagcaccaagggtacgctgattcggattttcgacaccgatcacggc

SEQ ID NO: 170151 - DNA, 260 bp, Glycine max
tggtcatcctcggcacacaatacgccggggaaatgaagaagggtcttttcggtgtcatgcattatctcatgcctaagcgccaaatcctctccctacactctggatgcaatatgggcaaagatggggatgtggcactcttctttggactctcaggtaccggaaagaccactctttcgaccgatcacaataggtatctaatcggagatgatgaacactgttggggtgacaatggtgtctccaacattgaaggttgttgctat

SEQ ID NO: 170152 - DNA, 263 bp, Glycine max
tctcgagccgattcggctcgagcggctcgagttcctttccccgtttttcttctctctctcaatctctttcatgtgagggtagacccacaacaaaacacaaaccacacactctcctaactcgaggttatttttttctttccccaaagaggcatgagttgcaacgggtgccgcgtccttcgaaagggttgcagcgagtcttgtattctgcggccgtgtctacagtggatcgatacgcacgaagcacaaggccatgccactgtctt

SEQ ID NO: 170153 - DNA, 260 bp, Glycine max
ggccattggtaccggcatttttgactatgtctgggtacaattctataacaacccttcgtgcagttatagccaaaacaatttagataactttctaaaatcatggagagagtgggccacatcattgaaagtaggtaaactgtttctggggttaccagcagatgaagctgcagctccggccggaggttatgttccggctgatgtattaatgtctaagatcttacctgaaataaacaagtcaacaaattatggaggtctcatgt

SEQ ID NO: 170154 - DNA, 280 bp, Glycine max
acttcggctcgagcaacatgtcaattctctttcctttccttttcctccttttctcgatctctccgtcggtcatcatcatcagacccaaacaaattctctacgcagatcgaatcaaagctcctccatccaattccgagatgagcactggcgaccttctcagcatcgaacctctcgaacttaagttcttctttgagctcaagaagcagatatcatgctctcttatattgtcaaataagaccgatagctatatagctttcaaggtgaaaacaaccaatcccaa

SEQ ID NO: 170155 - DNA, 256 bp, Glycine max
tcagaaggagaaagaacggagaagttgttgagggcgaggccagcggcgtcttcctcgacactttgcttgaattcgctgaggacgagaccatggagatcaaaattaccaaggagcaaatcaagggccttgttgtcgactttttctctgcagggacagattccacagcggtggcaacagagtgggcattggcagagctcatcaacaatcccagggtgttgcaaaaggctcgtgaggaggtctacagtgttgtgggcaa

SEQ ID NO: 170156 - DNA, 108 bp, Glycine max
attctccgtcgccacaacaacaatggctccgaagaaaggtgtgaaaggttccgttgtagcagcgaagaagaaggttcaggagaaggtgacgaatcctttgttcgagaa

SEQ ID NO: 170157 - DNA, 256 bp, Glycine max
atttcattccatcataatggccgcctcagcgatggtgtttgatccgccgcccttcctcccgtcgacaaagtccgcctacctccaaggcggtgacgccacggtcttcgatgaggaagatctctacagccgcctcaaatccctagtgcgtcactcgagttcgtcgacatccaggaggaggatgtgaaggacgaactgaagaatctcaggcgcgagctacctccgcgcgatggaggaggtgaagcggatccagtcggtg

SEQ ID NO: 170158 - DNA, 256 bp, Glycine max
gtcgggtgtactttcttgcgaaaccgagagagcgaaggggcaaacacaattttttttatcttctttattattctatgtagagagagagagagagaaaatgttggggatcttcagcagttcagtggtgtcgccgccggaggagctggtggccgctggcaacagaacgccgtcgccgaagacgaccgcgggagaagctgctgaaccggttcgtggagagctaggcgtcggcggtgtctctgcaggttggggaacacgt

SEQ ID NO: 170159 - DNA, 257 bp, Glycine max
ctcatgcagtgatggaaccatttgccatagcaaccaataggcatctcagtgtgctccaccctatttataaacttctttatcctcactaccgcgacactataaatatcaatggacttgctaggcagtccctgattaatgcagatggcattatagagaaatcatttttgcccggaaagtactccattgagatgtcttcatccgtctacaagaattgggttttcactgaccaagcattaccagctgatctcgtcaagaga

SEQ ID NO: 170160 - DNA, 248 bp, Glycine max
gtgagtagaaggcatagagactagcgcggagatagcaatccatctcatacatttcaatggcaactcaaggtcaagtcattacctgaaaagctgacggtggcctgggaatccaacaagcccttaactgtccaagacgttcaagtggctccgcctcaagccggcgaggtccgtgtccaaatcctattcaccgctctctgccacaccgatgcttacacttagggcggccaagatccgaagtctcttccctg

SEQ ID NO: 170161 - DNA, 256 bp, Glycine max
caacaaacacaacaacactctctcttctcgctcttggcttttcgctcttcactcactctcattcattcatttccaccgaacatggatcctgtaagcgtgtggggtaacacgcccttggcgacggtagatcccgagatccatgacctcatcgataaggagaatcgccgtcaatgccgcggaatcgagctcatcgcctccgaggacttcacctccttcgccgtcatcgaagccctcggcagcgctctgacgagcaaat

SEQ ID NO: 170162 - DNA, 265 bp, Glycine max
attaattgcaagaatggcacttcgttgcttggtgatgtccctttctgttctcttcactcttggtcttgcgagagaaagccatgccagagacgaagatttttggcatgctgtttggccaaacactcccattccaagttcattgcgagatcttctaaagcctggccctgcaagtgttgaaatcgatgatcaccctatgcaaattgaagaaacacagtacccgaaaaccttcttctataaagaagaccttcatccaggcaaaacaatg

SEQ ID NO: 170163 - DNA, 268 bp, Glycine max
gcggcggcaacagggagagaagatgaagttcaatccacgtgtgtcgagcagccgccgcaagagccgaaaggtcatttcacggcgccatcgagcgtgcggcgggtgcttatgagcgcccctctgtcggcggactgcggtctaagtacaacgtgaggtcgatcccagtacggaaggaggacgaggtgcaggtgatgcgaggaacatacaagggtcgcgaggggaaggtgactcaggtctaccgtcgaaagtgggtgattcacattgagcg

SEQ ID NO: 170164 - DNA, 266 bp, Glycine max
cactcgagcgaattcggctcgagaattaataacaagctagctagcagttcgattttgtactaagtgaggtgccaatctggtgaagatagctcttggtactttggatgactcttttagcgctgcctctcttaaggcttatttcgcagagttccacgcaactctgatttccgtgttcgctggtgttggatcagccatcgcttacaacgagcttacaaaagatgcagccttggatccaacggggctggtggcagtagctgtggcacatg

SEQ ID NO: 170165 - DNA, 267 bp, Glycine max
ctcggttctgccttcacaaaaaaattatcgagatcccctttttctcctaagaaaagccatggctaagggtcccggtctctactctgacatcggcaagaaagccagggatctgctgttcaaggactaccacagtgaccagaagttcaccatcaccacctactcacccactggagttgctataacagcatcaggaaccaggaaaagtgaactgtttgtggctgatgtcaacacccagttgaagaacaaaaacatcactactgatatcaa

SEQ ID NO: 170166 - DNA, 265 bp, Glycine max
ctcctcgttagcagttttcgttctccattctctccattccttcgccatgtccgatctcggctccgatcttcctgctgccgccgccgctcttagtgctgaggatcgtgctggtctcgtgaatgcactcaaggacaagctccagctcctcgctgggcaacatgtggacatcctggagacactgccacccaaagtcaggcaacgcgtggaaattctcagagatctgcagagtcaacatgatgaggtggaggctaaatttttagaggag

SEQ ID NO: 170167 - DNA, 263 bp, Glycine max
caaaccgaggcctcttcacatctgaccaaactctcttaactaatgctgaaacagccagccaggtgaaacaaaatgccagggatccctatttatgggcaagtcaatttgcagatgcaatggtgaagatgggtcaaatcattgtcttaaaaggtaatgctggagagattagaacaaattgcagggtggtcaatagttagcaatagtggtgaaggactcaagtgcctgcagcaaagaagatttacaaattctaagtcatgtttctt

SEQ ID NO: 170168 - DNA, 261 bp, Glycine max
ggtttgataagcttcttcaggttacaggtccaggcatagtcaatgtgctgacacatcatgtgtataatttgggcccaggtagtgatgagcatcttgacaggaagattctagatcctgagtgcttgagcaaggttgaatcaatttttagcaatctttcagaaaccattcaaaaatatggcccttggtcttctgcatgggtaggtgaagctggcggggcattcaacagtggtggtcgttctgtttctaacacatttgtaaata

SEQ ID NO: 170169 - DNA, 256 bp, Glycine max
gtttaatatcactaaccacttcctcgttgaatcataacataaccacttggtctgtgtttgtttttgcaacttcatattgtacataaaaacatggatgatgaatatgctaagcttattagaaggatgaacccaccaagggttgtgattgacaacaatgcctgtgaaaacgcaactgttattcaggttgacagtgtcaacaaacatgggattctccttgatgttgtccaagttatatcagatatgaaccttgtgataa

SEQ ID NO: 170170 - DNA, 250 bp, Glycine max
ctggattccaaggtttccaagtcctgtgctgtgctttcaatacctacgtcatggaatttctcaaaaaggtttaagttctttggcgtggattcatatcaagttgcatttggattttgactttgagactctgcttggggtgctacttacgaatgttttcccggaaaaacgtaaatttcttctaatgctttatgaaaagaataacgaacaagttcaatgtataccgcctttataaaataataacaagtttcat

SEQ ID NO: 170171 - DNA, 261 bp, Glycine max
tttcatttctacatccctggctctgttccgtcgatgacgatggcgtttagggtgcgaaaccctgacctccgctttctcattcttctctctctcttgtccatcacttccgccaaggtcttcttcgaggagcgtttcgatgacggatggggaaatcgttgggttaaatcagattggaaaaaagatgagaacctggctggggagtggaaccacacctctggccaatggaatggagacgctaacgacaaaggtattcacaccagt

SEQ ID NO: 170172 - DNA, 266 bp, Glycine max
gaaaagaagaggaaaaggagagtggagaggaagaaaaggattgaagttgttgctgtgagaaagagaaagagtgaaatcggagtttgggaaggaattgcaatcaatggatgtgataaagacgcagcaaatctcatctcgaccaatcgagaaggtggtggttcaccctctcgtgcttctcagcatcgtcgacaactacaacagagtcgccaaagacactcgcaagcgcgtcgtcggcgtcttgctcggctcctccttcaaaggcaccg

SEQ ID NO: 170173 - DNA, 264 bp, Glycine max
tgacaagggaggttgatctagaatactctgaggcagttaaagccacgggcttgacagacagtttgttgaaactaagggaggaagtttcaaaagcaaatgcagataatcaaattgtcgatccattgctgaaggataagatagaaaagctaagggtggagtttgaacagcaactgcgtgcagctcccaattatggaaggctgcagaataagtttacctatctgagcgaattatgtaaagttaagcttctgtcagatgcaaacaagg

SEQ ID NO: 170174 - DNA, 262 bp, Glycine max
cagactagagagagtaagagtaagagaagagatggaaagagtagcatcagtatctcggccactgaaaatatacttcctcccattcttctcaccggggcacctaatccctctggtccagctggctcgcttggtggcggcacgaggccagcacgtgaccatcatcaccacccccgccaacgctcaactcttcgaccagaacatcgacaaggacaccgcctccggccaccacatccgcgtccacatcatcaagttcctcaacgcc

SEQ ID NO: 170175 - DNA, 261 bp, Glycine max
atctgattcgttcgttcactttcactttaccaactcctaacaatttctctctgtttccttcttcaccgcatcaatggagttggacggcgttctcctcggcatgtgcaaccctctcctcgacatctctgccgtcgtcgacgacgctttcttgcaaaaatacggtatcaagttgaacgatgcgattctcgctgaggataagcacaaacctatgtatgaagaattggctaacaatcctaatgtggagtacattgctggaggtgc

SEQ ID NO: 170176 - DNA, 258 bp, Glycine max
aaaatgtggtttcttggttggaaaggggcatctgggttctcagcctcttccacagccgaacaagtcactcaagggattgatggaaccgccctcaccgccatcgtcacaggagcaacaagtggccttggtctggagaccacccgggttcttgcattgcgcggtgtccatgttgttatggcagtaaggagtctggacagtggtaagaatgtcaaagaaacaatacttaaggaaatcccctcggctaaaattgatgtcatg

SEQ ID NO: 170177 - DNA, 259 bp, Glycine max
tgatgcttcgcttggggattctgatggcctaaaaaatcctgctttgaagaaaaggactaaatctgattcaagtactgcttctagctccaaagcgtgtcgggagaagttgaggagggataggcttaatgacaagtttgttgaattgggctccatcttggagcccggaaggcctcccaaaacagacaaggcttccattctgattgatgctgcccgaatggtgacacagctgcgggatgaagccctgaagttgaaagactca

SEQ ID NO: 170178 - DNA, 254 bp, Glycine max
ggaaaaaattggaacctgcctctgttaaactttgtatttttctgagtgggtgggttgattgagagtgctgtgcaagctttggaactttttcccaacctgctacttcaatggccactgaagaggttaacaaacctcaatcacttcctccataccctgagatgatagtgaaagcacttgaagcactgaatgagccaaatggatcgaacaagtcagcaatatcaaagtacatagaaacccactagggtgagtcgcca

SEQ ID NO: 170179 - DNA, 262 bp, Glycine max
cttgcggctagggtttagcgcagctcttctagatttaaggacgatgggtaaggaaaaggttcacatcagtattgtggttattggccatgttgactctgggaagtccactaccactggccacctgatctacaagcttggaggcattgacaagcgtgttattgagagatttgagaaggaagctgctgagatgaacaagaggtctttcaagtatgcctgggtgcttgataagcttaaggctgagcgtgaaagaggaatcacaatt

SEQ ID NO: 170180 - DNA, 262 bp, Glycine max
ggggggtggcactgtttggccgttgatgatcagggcagagcttatgcttggggtggaaatgaatacgggcagtgtggcgaagaacccgagcgcaaggatggcactggtagacctttaaggagagatatagagatccctcagcgctgtgctcctaagcttgttgttcggcaggttgctgcaggaggaactcactcagtggtacttacacgagaagggcatgtttggacatggggtcagccatggccgcctggtgacataaaac

SEQ ID NO: 170181 - DNA, 260 bp, Glycine max
atcctaagtctttgggaatagtgctgcaatggcttcaagtcaggaggaggtgacccttttgggagctactggaagcccatttgtgtgcagggttcatattgccctcaagttgaagggagttgaatacaaatatgtcgaagaaaatttgaggaacaagagtgaactgcttctcaaatccaacccagttcacaagaaggttccagtgtttattcacaatgagaagcccatagcagagtctcttgtgattgttgaatacattg

SEQ ID NO: 170182 - DNA, 257 bp, Glycine max
gcaggttgagtatcccaacaatgtacatttaatacgtggaaaccatgaagctgcagatattaatgcactgtttggtttccgaattgagtgcatagagaggatggtaaggaatttcatgtactagaaattgtgtcttgtttatattgggttcatcaaccaatcatgaaaaattgttgatcagggtgagagagatggaatttggacatggcatcggataaacaagctgtttaattggcttcctctggcagctttaattg

SEQ ID NO: 170183 - DNA, 258 bp, Glycine max
ctgagctggctatccatgagaatgcctatggcttggccagatacgctgtcatatgccaggagaatggcctggttcccattgttgagcctgagatccttgttgatggatctcatgacattcacaagtgtgctgccgtcaccgagcgtgtccttgcagcatgctacaaggctttgaatgatcaccacgtccttcttgagggtaccctattgaagccaaacatggtcacccccggatccaattctgctaaggtttcccctc

SEQ ID NO: 170184 - DNA, 256 bp, Glycine max
gagtgagatagagagagacgcttcgcaaatctcaatcgaatctcagaaaaatgagagaaatcatcagcattcacataggtcaggccgggatccaggtcggaaactcctgctgggaactctactgcctcgaacatcgcatccagcccgacggcatgatgccttctgactccaccttcggtgtagcccacgacgccttcaacaccttcttcagcgaaaccggatctggcaagcacgtcccccgtgctgtcttcgtcga

SEQ ID NO: 170185 - DNA, 244 bp, Glycine max
gttcccaaacacgcaacctcaactttgttctgtttcctctgatgtcccagggccacatgatccccatgatggacatagcaaaaattctggcacagaacggtgttactgtcacagtggtcacaacccaccaaaacgcatcacgcttcacatcaactttttctaattcccaaatccgattactcgaagttcaattcccataccaagaagcagcgttgccagaagggtgtgagaatctcgacatgtt

SEQ ID NO: 170186 - DNA, 258 bp, Glycine max
gaaaatcctcacccattttcttcgtagccaaacactctgaaattctcagttatgtcgtggcaagcgtatgtggatgatcacctactgtgtgaaatcgaaggtaaccacctcactcacgccgctatcatcggccaagacggaagcgtttgggctcagagcaccaacttccctcagttcaaacctgaggaaataactgccatcaataatgactttaatgagcctggatcacttgctccaactggattgtatatcggtggc

SEQ ID NO: 170187 - DNA, 257 bp, Glycine max
gagcaggactttctcaacatgtacttcaaggacaagtacaagccaataccgaacatgtacaaccttgtgctggccatgttgtggcgtcaccctgaaaatgttgaacttgataaagttcaagtggttcattactgtgctgctgggtctaagccttggaggttcactgggaaggaagagaacatggatagggaagatatcaagatgcttctgaagaagtggtgggacatatatgaagatgagacactggactacaataa

SEQ ID NO: 170188 - DNA, 101 bp, Glycine max
gaaggaaccagattccttaatcagttgtgtatgcttaagtcatgtatttggagtggctgaatgtatttgtatttgtcattaataaagagagttgtgttagt

SEQ ID NO: 170189 - DNA, 255 bp, Glycine max
aagaaaatcctcacccattttcttcgtagccaaacactctgaaattctcagttatgtcgtggcaagcgtatgtggatgatcacctactgtgtgaaatcgaaggtaaccacctcactcacgccgctatcatcggccaagacggaagcgtttgggctcagagcaccaacttccctcagttcaaacctgaggaaataactgccatcaataatgactttaatgagcctggatcacttgctccaactggattgtatatcg

SEQ ID NO: 170190 - DNA, 261 bp, Glycine max
aaaaaataattaaggtgtttttctttaaatgggttggttgattggttcaatgaaccgatcaagaccacagcaggttcatggggatgcgaggattaagacgctttgttttttaatcttccgatgtcactcttgtttgttagtttgtttttttattctttatttcaataagtactgtgcaagtaggttagagttgggtagaagggcatgttcatggtgttaattactatgttatgtatgcatgtgagtgctgctatcgatggc

SEQ ID NO: 170191 - DNA, 258 bp, Glycine max
gtttcagtgagtgatcggtgttcacttgatccttcataagtcgtcatcatcatcatcatcatcaccgttgattgtcgaagatgccgatcagaaacatcgccatcggaaggcctgaagaggctactcaccccgacacgttgaaggcggggttggctgagttcatctccaccttgatcttcgtgttcgccggttcaggttccggcatcgcctacaacaagctcaccgacaacggcgccgccactcccgccggcctcatct

SEQ ID NO: 170192 - DNA, 253 bp, Glycine max
tctgtctctgtgtttgcggctgaggattccgaacgagcgaccttcttcgtttctcgcaaagtttaagtcctcatgggtaaggaaaagactcacatcaacattgtcgtcattggacatgtcgactctgggaagtcaactaccactggtcatttgatctacaagcttggaggtattgacaagcgtgtgattgagaggttcgagaaggaggctgctgagatgaacaagaggtcattcaagtatgcctgggtgcttg

SEQ ID NO: 170193 - DNA, 256 bp, Glycine max
gttacaatggagttagaaatgcaatgggatgggaacccaagtattatacttgatattaaaactcttcttggtgttgcactaccggtgcaggtaaaaaatattggatttacgggtgtttttaggttgatcttcaagccgttagttgatgaatttcctggttttggagctgttagctattcattaaggcaaaagaaaaagttggattttactctaaaagtcattggtggcgacatatcagcaattcctggattatatg

SEQ ID NO: 170194 - DNA, 258 bp, Glycine max
cctcgagcgaatcggctcgagtgaaccgggagcctggaacgcgctgcagaaggaagaacaagggaggcctccggtttccgcggtgggaccgcttgtaagaatggaagcaggtcaggccgactcggagtgcttgacgtggctggacgagcagccacgtggaagtgttttgtttgtttccttcggaagcggtgggacactctcgagtgcacagatcaacgagctggctctcgggttggaaaaaagtgagcaacggtttct

SEQ ID NO: 170195 - DNA, 260 bp, Glycine max
ttttcatgtaggcaagtctatatccaggaaaagtattgtacctcaaaatgcaaaaaccagaaggttttaagttccatagtggcatgtatatattcattcagtgcccccaaatttcgccctttgaatggcatccattttccttgacttcagggccacaagaagactacctcagtgttcacattagaacactcggagactggagctaccaaatatatgatctattccaagaggcagtgttatcacgatcacaagggtgtcca

SEQ ID NO: 170196 - DNA, 256 bp, Glycine max
tatagaaaagaaactcaagaaccgaattcaatggaagggactggatgtttcaagaccgggtgaggctgatgatagtcttcctagtttacaggcagaagttgaaaatttaacaatgaaggagcgccagttagatgaacaaataagggagatgcaagacagactgcgagatcttagtgaagatgaaaataatgacaagttgctttctgttactgaggaggatataaagaatttgccctgcttccagaatgaaacctta

SEQ ID NO: 170197 - DNA, 256 bp, Glycine max
acagcattggccttgtaaatgctggacagtatcttgaggagacatatgggggtggactatttccaattttatacatatggggtattggattattagcagcaggccaaagtagcactattacaggtacttatgctggacaattcatcatgggaggttttctaaacttaaggttaaagaagtggatgagagcattgatcacccgaagttgtgcaatatttccaaccatgatagttgctcttatattcgatacctcgga

SEQ ID NO: 170198 - DNA, 257 bp, Glycine max
cataaacgccgcccaaaaccatttatagggttttcttttctttgccaagaaaatgagagagtgcatttcaatccacattggtcaggccggtatccaggtcggaaacgcctgctgggaactctattgccttgaacacggcattcagcccgatgggcagatgccgagtgacaagaccgttggaggaggagacgacgccttcaacacattcttcagcgagaccggcgccggaaagcacgtgcctcgcgccgtcttcgtgg

SEQ ID NO: 170199 - DNA, 255 bp, Glycine max
ctacatctcaaagtcttggatgactacaaaagagccactcaatatatggagtaagagcagtttcactgtagaaggtatatgggagcacttaaatgttacaaaggatcaatctgattacctttggtattcaaccagagtatatgtttcagatagtgacatcttgttttgggaggaaaatgatgtccatccaaaacttactatagatggtgtccgtgacatattgcgtgtattcatcaatggccagcttataggtat

SEQ ID NO: 170200 - DNA, 253 bp, Glycine max
gcagttcttaccggaagggttcgtggagcgaacaaaaggaagagggtttttggttcagtcttgggctccgcagcctcaggtattgggccatccatccacgggtgggttcttgacccactgcggctggaactctattctggagagcgtggtgaacggtgtgcctttcatagcctggcctctgttcgcggacagaggaccaacgcctttatgctcacgcatgacgtcaaggtggcgctgaggcccaacgttgcag

SEQ ID NO: 170201 - DNA, 238 bp, Glycine max
ggaagcttgtgtctatgaacaatatacacttccaaaactctatgtgaagatgcagtactgtgtttcctgtgctatccactctcatgttgtgagggttcgatcccgcaccgacaggaggaagcgtgagcctccacagagattcatcaggcgcagggatgatgcaccaagacctggtcagcccggtcaaggacctcgtcctgcgggcacagcagcagcacctgtcggaccctaaaagcaa

SEQ ID NO: 170202 - DNA, 255 bp, Glycine max
cccatgtctcaaactccgaatccaacgttgtctctcctacccttgtcgaatctactacgaacactctaggggtgctgaagaatatgaaggtgttcgtgtacgagcttcctccaaagtacaacaccgattggcttgcgaacgagaggtgtagcagtcatttattcgcttcggaagttgctattcacagggcactgttaacgagcgaggttcgcacgtttgacccatacgaagctgatttcttcttcgtcccagttt

SEQ ID NO: 170203 - DNA, 256 bp, Glycine max
cagcaccatcctcgtgctcctcgaagctcgaaagcagcagcaacaagaacaacaacaacgttgtctttctcagcaaaacctacgatccgaggaagaggaaggaacgatgtcttcgtcatcgggaagcacagcagcagcaacgccgattctgaaggaggaggtggacatagtgattcccacgatacgtaacctggacttcttggggatgtggaggcccttcttcgagggttatcatttgataatagtgcaggacggt

SEQ ID NO: 170204 - DNA, 260 bp, Glycine max
ccctgtttcaaaacttcaacaatcagagagggagaagttgttgcatttagaggaagtgcttcataagcgtgttgtaggccaagaccctgctgttaaggcaattgctgaggctatccaacgttcaagagcaggtctttcggatcctcatcgtccaattgccagcttcatgtttatgggacctacaggtgtaggaaagacagagctggctaaggcacttgcagcctacttgttcaacactgaagaagctcttgtacggattg

SEQ ID NO: 170205 - DNA, 259 bp, Glycine max
cttttacaggatcagaagccatgtttgctgatcttgggcactttacacaattatcaatcaagattgcttttacttctgtggtttatccatctttaattcttgcatatatggggcaagctgcttatctatctaaacatcataacattgcacaagattatcactttgggttttatgaatctgtaccagagaaattgagatggcctgttctcgttatagccatacttgctgcagttgtgggaagtcaagccattatcactgg

SEQ ID NO: 170206 - DNA, 255 bp, Glycine max
gatttctgcaatctacaaaaattcactatgggagtcacaacctttacacaggaatactcctcctctgttgccccatcacgcatgttcaaggccttgattgtagactccagaaatttgcttccaaagctcttacctcagtttgtaaaagatgtgaatgtgatccaaggtgatggtgaagctggaagcattgaacaagttaacttcaatgaagctagccccttcaaatatctgaaacacaggattgatgtgcttgac

SEQ ID NO: 170207 - DNA, 252 bp, Glycine max
cttggaataagggtcattaggaagggtatccctccacccccagcaaagaagggccaaagtggagtcctatttgtatgcaaccacaggacagttttagaccctgtggttacagctgttgcattaggaaggaaaattagctgtgtcacatatagcataagcaaattcactgaaataatttcaccaatcaaagctgtggcactctctagggagagggacaaagatgctgccaacatcaagaacttgcttgaggaa

SEQ ID NO: 170208 - DNA, 253 bp, Glycine max
ctcgagccgttcagttctttctggataagcttgcatcatctcttggtccacgcttttatactaacattttcaaatgcaagcaaatatcagaaactggagctcaacagatgctattagatacccaagctgtaaagacgattcttcttgaagttccttcccttggtagacagacatcaggtgcccctagttattccaagtttgtaagccgcgagatgagcaaagccgaggcccttttaaaggttatactttctcc

SEQ ID NO: 170209 - DNA, 277 bp, Glycine max
gaaggaataaactattacaacaatcttatcaatgagctagtggctaatggtatacaaccacttgtgactctatttcattgggatcttccccaagccttagaagatgagtatggcggattcttaagtccacgcatagtgaaagattttcgggactatgcggaactttgcttcaaggaatttggtgatagggtgaagcattgggttactttgaatgagccatggagttacagccaaaatggctatgcaaatggacgaatggcaccaggacgttgttctg

SEQ ID NO: 170210 - DNA, 279 bp, Glycine max
ctctcacatttcattacttctaccaagctactacatttttaacttcctctttctacatttcattcaaaacaatcatggcttctcttcattccattacattttcaacaaaaactgtcctttatgtatttgtattggcctcttccatcgcagcctctgctggcaacttctaccaggattttgacgtaacttggggagatggtcgtgccaagatactcaacaacggcgatcttctcactctttcccttgacaaagcctctggctcggggtttcagtccaaaa

SEQ ID NO: 170211 - DNA, 281 bp, Glycine max
ctctttcaccagaaagtgacactgagagaagaaggaaaaactaaccaacaccacagcccctaatttcctttttctcacaatggcggcttcagtcgacaaccgtcaatacggcacccacataaacgccgtcgttcgcgcttgcggcccagacttcaatacccctctcccgtcggatttcgatctggactcatccagcgacgacgaagaccaaaacgacgacgcttcgtatctcaaggagttgatacaaaaagcgaacgcgcaaaccgaggcgtcgctgttgg

SEQ ID NO: 170212 - DNA, 278 bp, Glycine max
cagagagaggtatcacagtgaaacgaagaagccctaactacgcacgcactcattcttgagaaagctcaatattcattcgtccatggcactctcttctcgtctcttttccaaatccaaattgatctatggctgtcaaatacttctgcaaaaggagcatgctattccagttcgtcactttgctaaagagtctgcccctcctgcccttaagggagatcagatgctgaagaacatttttgtggaggtgaagaacaaatttgagactgccataggaatattaa

SEQ ID NO: 170213 - DNA, 283 bp, Glycine max
tggtgagtgaaaatggcggtacccttgctctccaagaggatcgtgaagaagcgcgtcaagaagtttatacgcccccagagtgatcgcaagatctccgtcaagccaagctggcgcagacccaagggtattgattctcgtgtcaggagaaagttcaaaggatgcactttgatgcccaacattggttatggctcagacaagaaaacccgccattatctaccaaatggtttcaagaaatttgtcgtgcacaatgtgaaagacctggaacttctcatgatgcataaca

SEQ ID NO: 170214 - DNA, 280 bp, Glycine max
ttcaaatttaataattggcattgacttcaccaagagcaatgagtggacaggcaagcactccttcaaccacaaaagccttcattttactggaaacactcctaatccgtatgagcaagcaatctctataattggccgtactctctcttcatttgatgaagacaatctgataccatgttttggatttggtgatgcatctacacatgatcagaatgtgttcagcttttatcctgatgagtgctattgtcatggttttgagcaagtacttgcacgctaccgagag

SEQ ID NO: 170215 - DNA, 276 bp, Glycine max
gaactgtgatccatcgtcaatctttcagtaacaaacatgagcggactgttcttgttgctgtggctgctgctatcggcaacttgctgcaaggatgggataatgccaccattgcaggtcatatttttattcggttagccaattaagataacattcaaccaagtctaattggctttctatgctatgcaggatctattttgtacataaagagggagtttaatttacaaagtgaacccacaatagaaggtctaattgtggccatgtcacttattggagcca

SEQ ID NO: 170216 - DNA, 279 bp, Glycine max
gtccgtttcacaccttccttggataccttgagtccactaaagtgattgacactttccaaaaccaagccaacaacactgaagaaggaattaccatctttgttcctaaggacagcgctccaaatgctataaagaaaactaccctatccaacctcacctctaaccagctaaagcaagtgatcctcttccatgccttgccacatttctattctctggctgagttcacaagccttagccaaaccagctctactcccacattcgccggaggagattacactttga

SEQ ID NO: 170217 - DNA, 275 bp, Glycine max
aacttattgaagaattgagtactccagccccgggttcaaaggacctttatttttcttcaaagtactctaggtcctttattacccaatgcatggcttgcttatggaaacaacattggtcttactggcgcaataatgaatacaccgccctaagatttctctttacaattgctgttgccttgttgtttgggagcatatattggaaccttggctccaaaatcaaaaagcaacaagatcttttcaatgccatgggatccatgtatgctgctgttcttctt

SEQ ID NO: 170218 - DNA, 273 bp, Glycine max
tgctgctgatgagtcaacagggacaattggcaagcgtttggccagcatcagtgtagagaatgttgaatccaacaggcgtgctcttagggagctgcttttcaccgctcccggtgctcttaaatatctcagtggtgtcatcctctttgaggaaactctctaccagagcacagctgcaggcaagccctttgtggaagtcttgaaggaggctggtgttcttcctggcatcaaggttgacaagggcacagttgagcttgctggcactaatggagaaac

SEQ ID NO: 170219 - DNA, 274 bp, Glycine max
ctcatctgcttcccctagcaaccttcttcttacttctctccgcttcttatctccagattgctggggcggaagcacaaccgttgactagtctcaaacttaactctcatattcttcaggagtctactgctaaagagattaatgaaaatcccgaggcaggatgggaggctgctataaatcctcgtttctccaattatacagttgaacaatttaagcgccttcttggagtcaaaccaatgcctaagaaggaacttagaagtacacctgctatatctca

SEQ ID NO: 170220 - DNA, 274 bp, Glycine max
gtgaagaaaccagagacaatcacatgaaccctaacctaaacccctgagaaattattgaaattgatgcatggcggaactgaacactctggtggtgcgaaagccatgttttggccttccaaccggttgcactcaatccctctctgcctacatttatctcaaattcgcccaaattcccttccaattggacttccacctcaacaaccctcattctgatcaaattccttactttgaggttgatgactctgtggcttataataatgagaaggaggggatc

SEQ ID NO: 170221 - DNA, 270 bp, Glycine max
gtcgcttctcgaaccctacttcttccgcggtgattgcatttcaattcctgtaatggcgattgataatatttttaaacatgaagccagtgaagaaaaaggagagcgggccagaatggcttcttttgttggagccatggctattgctgacttggtgaagacaaccttggggccaaagggaatggataaaattttgcagtcaacaggtagaggacgtgaagttactgtcactaatgatggtgctacaatcttgaagtccctccatattgataa

SEQ ID NO: 170222 - DNA, 139 bp, Glycine max
aacctctaacctacctctttttcttctctctcaacaacttcaccttcttcctcctcgatcatgtctcacttcaagggcaagtaccatgatgagcttatcgccaatgctgcgtacattggcactcctggaaagggtattc

SEQ ID NO: 170223 - DNA, 283 bp, Glycine max
gaagcaccttttctgagggagagagtcttccacttttctgcagagtccatagcaaaactgaaagcaaaagccaactcagagtccaataccacaaaaatctcttcattccagtcattatcagcacttgtctggagatccataactctcgcgcgctccgtgccgtacgagcaaaaaacaagttgcaagatggctataaacaatagatcaagaatggaaccgcctatgccagaagaatactttggaaacttagttcaagtagtgagtgcagaaacgacaacaaggg

SEQ ID NO: 170224 - DNA, 282 bp, Glycine max
cactgttccaatacggaatctaaggcaaagcaaaccaaacatcttgaatcatgggttcaacaggtgagactcagattaccccaacccacgtatctgatgaagaagcaaaccttttcgccatgcaactagccagtgcttctgtccttccaatgatcctcaaatcagcacttgagcttgatctgttggaaatcatagccaaggctggccctggtgttcatctttcccccactgacatttcttctcagctcccaacacagaaccctgatgcacccgttatgttgg

SEQ ID NO: 170225 - DNA, 281 bp, Glycine max
cagaaccttctgaggttaaagcaaaaaacaaagagagagagagagagaaaatgatgaagccatcgatgctcagatctctccactccgccgccacccgcggcgcctctcatctcttccgccgtgggtacgcctccgagccggtgccggagcgcaaggtagccgttctcggcgccgctcggcgggatcgggcagcctctctcccttctcatgaagctcaatcccctcgtttcgagcctctccctttacgatatcgccggaactcccggcgtcgccgccgatat

SEQ ID NO: 170226 - DNA, 275 bp, Glycine max
ggggggtggcactgtttggccgttgatgatcagggcagagcttatgcttggggtggaaatgaatacgggcagtgtggcgaagaacccgagcgcaaggatggcactggtagacctttaaggagagatatagagatccctcagcgctgtgctcctaagcctgttgttcggcaggttgctgcaggaggaactcactcagtggtacttacacgagaagggcatgtttggacatggggtcagccatggccgcctggtgacataaaacagatttcagtccc

SEQ ID NO: 170227 - DNA, 275 bp, Glycine max
aaaggacactacttatgtctcaaaagagcttggagaagcgttttggtcagtctccagtttttattgctgccactttcatggagcagggtggcattccaccttcaacgaaccctgcaactcttcttaaggaagcaatccatgttatcagctgtggttacgaagacaagacagaatggggcaaagagattggatggatctatggctctgtgacagaagatatcttgactgggttcaagatgcatgctcgtggttggatttccatctattgcatgcca

SEQ ID NO: 170228 - DNA, 275 bp, Glycine max
gaggttttgacgcaacacactttcactgagaaaggatctctatctaccaaggagcagaataaaacccttctctctggtaagtgaataagagaatggcttcagatcggaaacttcacactttcgaggaggtggcaaagcacgaccagaccaaggattgctggctcatcatttctggcaaggtgtatgatgtcacccctttcatggaggatcatcccggaggtgatgaggttttgttatctgcaacaaggaaagatgcaaccaatgattttgaagat

SEQ ID NO: 170229 - DNA, 273 bp, Glycine max
ccacacaccacacacatagtagctattatactctctagagtaattgcggaatctgctagaattttctaataatggcgaaagacgttgagcaggtcacagagcaaggtgaatactccgcgaaggactaccatgaccctcctccggcaccgttgatcgacccagatgagctcacaaagtggtccttgtacagagccgccatagctgagttcatagcaacactcctttttctttacatcaccgtgttgaccattattggctacaagagacagagtg

SEQ ID NO: 170230 - DNA, 272 bp, Glycine max
ctcgagctctttctttccccaatttgtgagtgttactgttgaatcgattggattggcattaggttgatctgaaatacgcaattgacatggcgagcgcgatggtagaggacgcgaacttcgaagatgaccaactagccaatatgaccaccgacgacatcgtcagagcttctcgtcttctcgacaacgagattcgcatcctcaaggaagagttgcagaggaccaatttggaattggaatcgtacaaggacaagatcaaggagaatcaggagaag

SEQ ID NO: 170231 - DNA, 273 bp, Glycine max
gcaagctagctaggttgaaaatagtttggttttgtagtaagtgaggtgaggtgccaaaatggtgaagataactcttggtactttcgatgactcttttggtgttgcctctcttaaggcttatttggcagagttccatgcaactctgattttcgtgttcgctggtgttggttcagccatcgcttacaacgagcttacaaaagatgcagccttggatccaacggggctggtggcagtagctgtggcccatgcatttgcactgtttgtaggtgtctc

SEQ ID NO: 170232 - DNA, 284 bp, Glycine max
taggcagagtctcttgcacgctttcaaggagggtcaccctacatatatcctttgtatggtttaggagagcttccccaggcatttgcacggcttagtgctgtttatggtgggacatatatgttgaataagcctgagtgcaaggtagaatttgatgaggaaggaaaggttgttggtgtcacatctgaaggggaaactgcaaagtgcaaaaaagttgtttgtgatccatcatatttgcccggcaaggtgaggaaggttggtagggttgcaagagcaatagccataat

SEQ ID NO: 170233 - DNA, 276 bp, Glycine max
gctcgtgcctctagggttatcatatctccatttccatttcctctctctcagtttccaagaatcttaagctatgggaaagtcttacccaaccgtgagcgctgattaccagaaggccgttgagaaggcgaagaagaagctcagaggcttcatcgctgagaagagatgcgctcctctaatgctccgtttggcatggcactctgctggaacttacgacgtgagctcgaagaccggtggtcccttcggaaccataaagcacccctccgaactcgctcacgg

SEQ ID NO: 170234 - DNA, 274 bp, Glycine max
gtggttttcatcgtcttccttctcttatatttctttttttttttgtcttcgccgcacgccgaaacaatggccggaaaaggagagggtcctgctatcggaatcgatctcggaaccacctactcttgtgtcggtgtgtggcaacatgaccgagttgaaatcatcgccaacgaccaagggaacagaacgacgccgtcttacgtcggcttcactgataccgagcgtctcatcggtgatgcggctaagaaccaagtcgccatgaaccccatcaacaccg

SEQ ID NO: 170235 - DNA, 272 bp, Glycine max
caaaacgtttatagatcataactactacgtattggaagacagctttggtttcagttttttgtcatcactctcagctggtcggtgcttatagatccagcgccagcagattcaatttgacactggaagcaacttttcatttcaaagattaagtgaaaacatggctgtccttgctgcttccattgtgagcaaatctggcaaagttctagtttctagacagtttgtggacatgtctcgtatcagaattgagggacttctagcagcatttcccaagt

SEQ ID NO: 170236 - DNA, 274 bp, Glycine max
caccaccctattactacaaatcacctccacccccatcaccttctccaccacctccttactactacaagagtcctcctccaccatctcccgtttctcatcctccctactactacaaatctcctccacccccaacgtcgtctcccccacctccttatcactacgtgagccctccaccaccaaccaagtctccaccaccaccagtttacatttatgcttcccctccaccacccatctacaagtaagcttggaattaagaagcagcaacaataataag

SEQ ID NO: 170237 - DNA, 271 bp, Glycine max
ctttgataatctcctatcctttggttactaccgtaaaacctgtccccaatttgaatccatcctacacaacaaagtcacagaatggatccagaaggactacactttagcagctagtctcatgaggctccacttccatgattgctctgtcaggggatgtgatgggtccattctgttgaagcatgatggaagtgagaggacagcacaagctagcaagacactgagagggtttgaagtggtggatgatataaaggcagagttagagaaacaatgc

SEQ ID NO: 170238 - DNA, 272 bp, Glycine max
cgcctcttcaacaacccttgttttgttctgtgcaagtgcatcttgaaaggaacaacaatggtgaagtctataaactttctcctgcttctgtctctactagcctttgttccctcctgtcactgcaaaaagaaaataggaggttacctctaccctcaattttacgacggttcatgccccagagctcaagagattgtccaatccatcgttgccaaggctgtggcaaaagaaccccgcatggctgcttcgttgctcagactacatttccatgattg

SEQ ID NO: 170239 - DNA, 274 bp, Glycine max
caaaaaaaactcccttgtatattgttgcagctctagctagggtttcgcaagtgcgatcgaagaagaacaacgacgatggcgatggctgcagctctgcgtcgcgaaggaaggcgtttgattcaaccaatcaacgccctccactcttctctcaattcctccctcatctctcaagaccaagcctctcatggcgcgcgctccatttccactcaagttgtgaggcaccgaatgaagagtgtgaggaatatccagaagatcaccaaggacatgaagatgg

SEQ ID NO: 170240 - DNA, 157 bp, Glycine max
cttcccttgttcgtttcactctcacaatggactccctctctcacttctgcaccggagcccttctcgccggcggcctctactggttcgtctgtgttctggggcccgccgagcagaaggggcaacggggcaacgatctatccggggggttcattttcgg

SEQ ID NO: 170241 - DNA, 269 bp, Glycine max
ctaacactcattaattgcaagaatggcacttcgttgcttggtgatgtccctttctgttctcttcactcttggtcttgcgagagaaagccatgccagagacgaagatttttggcatgctgtttggccaaacactcccattccaagttcattgcgagatcttctaaagcctggccctgcaagtgttgaaatcgatgatcaccctatgcaaattgaagaaacacagtacccgaaaaccttcttctataaagaagaccttcatccaggcaaaa

SEQ ID NO: 170242 - DNA, 271 bp, Glycine max
ggcgttctatatattattgaattgacaatgaggcctgctcttgctttgcttcctcttctatttgctttcttgttagctgccactacagaatcaagaaaagatacaggggaatattggaaaatgatcatgaaagatcaggaaatgccagaaggacttcaaggtcttgtttcatttcaatctgaaaataaccctaagactcaagagcagcttggtaaaggttccaaaaaccattgtgaagagtctctagttacaaatacacaagttaatagtg

SEQ ID NO: 170243 - DNA, 273 bp, Glycine max
ccaggatgttccgcatccaccaaggcatgcatatacggcatccagtacggcgacagttccttctcagttggctacttcagccgcgagcgcctcaccgtgacagccaccgacgtcgtcgacaacttcctcttcggctgcggccagaacaaccagggcctcttcggcggctccgccggcctcattggcctcggccgccaccccatcttcttcgtccaacaaaccgccgccaaataccgtaaaatcttctcctactgcctcccctccacctccagc

SEQ ID NO: 170244 - DNA, 272 bp, Glycine max
gggaagaggaaccctagctagggtttggaagaagctgatccgagaagatggtgcagcgtctcacctaccgcaaacgccacagctatgctaccaaatccaaccagcacagagtcgtcaagactcccggtggcaagcttgtttatcagaccacgaagaagagggccagcggacccaagtgccctgtcactggaaagaggattcaagggattccacatttaaggccagcagagtataatagatcaaggttacacagaaaccgaaggactgtgaac

SEQ ID NO: 170245 - DNA, 271 bp, Glycine max
gttcgtttttggggactcgtatgttgataccgggaactatagaataaatcaagctggttcgtcgtggaaaaacccttatggcgaaacttttcccggaaaaccagccggaagattctccgatggaagagttctaaccgactacattgctaagtatttgggactcaaatcaccagttccctataaatttaggaaagtgatgcagcaacatttgaaatacgggatgaattttgcatttggtggtacgggagtgtttgacacatcctccaaaaat

SEQ ID NO: 170246 - DNA, 268 bp, Glycine max
gggtgttaaagccaggaaacggaagctcagtggttttggacttcgtgtgtacaaaaattatgatccaagagcaaaggtcttgaggaaactgacagaggaagtgttttccattgttggccgggatcctcttatagagattgctgttgccttggagaagattgcactgtctgatgagtatttcatcaagaggaagctatatccaaatgttgacttctactctggactgatttatagggccatggggtttcaacctgagtttttcactgtt

SEQ ID NO: 170247 - DNA, 269 bp, Glycine max
taatggcgtttgctcacgacttggagttggaatcctcttcttcccctctggtgttctcagtacggaggagtgaaccggagctggtggctccggccaagcccactccccgcgaaattaagatcctatctgagatagattctcaggcgggtcttcgtacccaaattccaatcatacagttctaccgtaacgacccatcattggcaggcaaggacccagttcaagccattcgaaacgctcttgcggaagcacttgttttctactacccgttt

SEQ ID NO: 170248 - DNA, 269 bp, Glycine max
ctcgagcggtttgattgggatcatcctatccacttgcagcccacaagtcctactactgtgaagaaggtcagtgttgtttgggatgcctatgaagcaacaaaggatgcacatggcctttgcattctaaccgagtgggatgagttcaagactcttgattaccagaagatatttgacaacatgcaaaaaccagcatttgtttttgatggcagaaacattgtggatgctgataagttgcgtgagattggcttcatagtttactcaattggtaa

SEQ ID NO: 170249 - DNA, 270 bp, Glycine max
gtcagatctggtccctacggtcagattttccgacctgataacttcgtcttcggccagtccggcgccggaaacaactgggccaaaggtcactacaccgaaggcgctgagttgattgactctgttctcgatgttgtcaggaaggaggcagaaaactgtgactgccttcaagggtttcaggtttgccactctcttggtggtggaactggttctggaatgggaacactgttgatctcgaagatcagggaagaataccctgaccgaatgatgctt

SEQ ID NO: 170250 - DNA, 275 bp, Glycine max
agtgatttcagtgagtgatcggtgttcacttgatctcatcataatcgtcagcgtcaattgaagaagatgccgatcagaaacatcgccgtcggaaggcctgaagaggcgactcaccccgacacgttgaaggcggctttggctgagttcatctcaaccttcatcttcgtgttcgccggctcaggctccggcatcgcctacaacaagctcaccgacaacggcgctgccacccctgccggcctcatctccgcctccatcgcccatgcattcgccctctt

SEQ ID NO: 170251 - DNA, 227 bp, Glycine max
ttgacaaccatgagtgatgtatatagctttggagttgttctcctagagctcctcacaggaaagaactctgtggacaagaaaagacccaccagagagcaggatttggtggaatgggcaaggccattgttgaaggattcccataaactagaaagaataatggacacaagacttgaggatcagtactcaactgaaggggctagaaaatttgcagccttggcttatcaatg

SEQ ID NO: 170252 - DNA, 251 bp, Glycine max
gctcgacaagctcaaagctgagcgtgaaagaggaattaccattgatattgctttgttgaagtttgaaaccaccaagtactactgcacggtcattgatgctcctggacatcgtgactttatcaagaacatgattactggtacctcccaggccgactgtgctgtccttattattgactccaccactggtggttttgaagctggtatttctaaggatggacagacccgtgagcatgctcttcttgctttcaccc

SEQ ID NO: 170253 - DNA, 252 bp, Glycine max
ctttgttcgacaattttgaatggtcttcaggttatacatcacgttttgggatgatcttcgtggattacaaaaatggtttgaagagataccaaaagctttcagcgcaatggttcaagaattttctcaagaaagaaagaagactttatagctctagtaaataatatgaaattcgtttattcattggttatatttgtaaataattatttggtttttctttgatattcttttattctaaagaggtcctaatttgac

SEQ ID NO: 170254 - DNA, 250 bp, Glycine max
caggcagctagtactaccctgcccctgctagctattttgtaacaagcagatcaaattaattgcttgatatcaagaaacatggcaatcaccggtgttcatggatggggagacatcaagagtctcagcgtccaagtgatcaccggtcgatggatcgtcgtattcgcctcttttctaatcatggcagccgccggagcaacctacatgttcggtctctattccagcgacatcaaaaccaccctcggttacgacc

SEQ ID NO: 170255 - DNA, 251 bp, Glycine max
gtgatcggtgttcacttgatccttcataagtcgtcatcatcatcatcatcatcaccgttgattgaagaagatgccgatcagaaacatcgccatcggaaggcctgaagaggctactcaccccgacacgttgaaggcggggttggctgagttcatctccaccttgatcttcgtgttcgccggttcaggttccggcatcgcctacaacaagctcaccgacaacggcgccgccactcccgccggcctcatctccg

SEQ ID NO: 170256 - DNA, 250 bp, Glycine max
taattctcatttcttcatcgttcgattcttctcctcctaaagatcttcgtgaaaactttgaccggtaagaccatcacccttgaggtcgagtcctccgacaccatcgataacgtgaaacctaagattcaagacaaggaagggatcccacctgaccagcagagacttatctttgcgggtaaacagcttgaggatggtcgaacccttgccgactactacatccaaaaggaatccactctccacctcgtgcttc

SEQ ID NO: 170257 - DNA, 250 bp, Glycine max
ggaatttcttcttccaatttttcagaactttgcacgaaagaagaaactctgaaggaagtgcatgcatcacttgtaaaggaaggacagaaggctcgtttggagaaatttgagattcctgcaaaaattaaattgctttctgatccatggactcctgaatctggcctagtcactgctgctctcaaactcaagagagaggccataaaaaagacttttgatgaagaactttctgagttgtatgcttcataggctt

SEQ ID NO: 170258 - DNA, 250 bp, Glycine max
cgtttaagcttagtttgtcaatttagttttccaaatttaacacattgttaaggctaattatggctgatattgagggttctccaggaagctccatgcatggagtaactggaagggatcaaaccttcatagcctcagtggattcccctatggtccctacagacaccacagcaaatttcgctttgctactagattctgagcacaaggcaaaaattttcaagcttgtttccttagctaaccctcacgtgagaac

SEQ ID NO: 170259 - DNA, 251 bp, Glycine max
actcgagcgaatcggctcagaattaactatgaagcctaccactactattatcccttaccttcctgcctctctttgctttcctggctctttcagaagatgttgaacaagttgtggacataagtggcaaccccattttcccaggtggcacatattacattatgccatcaacttggggcgctgccggtggtggattgaaactaggccggacaggaaactcaaactgcccagttactgttttgcaagattactca

SEQ ID NO: 170260 - DNA, 247 bp, Glycine max
atggctttaggtgttcctgctcttccgttgacatacgtggctcacgttctggcagttgttgccagcgtcttggtcgtggtctgggtcgtcaatttcaggggtggcttggcttgggattctgataacaagtccctcatcttcaacattcatccagttcttattgttattggcttactagttcatgggggtgaagctattataagttacaaagcttttcccctaaagaaggaagtgaagaaattgatac

SEQ ID NO: 170261 - DNA, 248 bp, Glycine max
gctaggttgaaaatagtttggttttgtagtaagtgaggtgaggtgccaaaatggtgaagataactcttggtactttcgatgactcttttggtgttgcctctcttaaggcttatttggcagagttccatgcaactctgattttcgtgttcgctggtgttggttcagccatcgcttacaacgagcttacaaaagatgcagccttggatccaacggggctggtggcagtagctgtggcccatgcatttgca

SEQ ID NO: 170262 - DNA, 249 bp, Glycine max
aatcactactacacaaatcacacacacacacacagagttgcaagagaaagagagcgagattccgatggcgactctggattccgacgtgcctatggttcccgccggcgagccctcgagcagcgccggtccttcttccaagaagcccaagcgcttcgagatcaagaagtggaacgccgtcgctctctgggcttgggacatcgttgtcgataactgtgctatctgccggaaccacatcatggatctctgcat

SEQ ID NO: 170263 - DNA, 248 bp, Glycine max
tgcgttacgatactatgcaggtgcggctgataaaattcatggtgaagtattaaaaatgaatggggattttcatgcatatacacttttggaaccaattggtgttgtgggacacataattccatggaatgcccccagcctctcgtttttcatcaaggttagcccttccttagctgcaggctgcaccatggtcctcaaacctgctgaacaaacacccctctctgccttgttttatgctcatctagctaagt

SEQ ID NO: 170264 - DNA, 247 bp, Glycine max
gtttaagcaaacataacttgcagtaatggcttcaatgaataaccaaaaagaaattgagctctttgagggccaatctcttctgtacatgcagctatatgggcacctaagacctatgtgtcttaagtgggctgttcaactaggtattccagacataatacagaaacatgccaaacccatttctctttctgacttggtctctactcttcaaattccaccagctaacgctgcttttgtgcagcggttcatg

SEQ ID NO: 170265 - DNA, 252 bp, Glycine max; identical to SEQ ID NO: 161302

SEQ ID NO: 170266 - DNA, 248 bp, Glycine max
gtgaatctcccgttgttgttgttctttctggaagcatggaacccggattcaagcggggagacatcttgttcttgcacatgagtaaagatcctattcgggttacgggagattgttgtgtttaatgttgatggacgtgagattccaattgctcatcgtgtaattaaggtacatgaaagggaagatactggggaggttgatgttctcacaaaaggagacaacaattatggggatgacaggctactgtatgc

SEQ ID NO: 170267 - DNA, 249 bp, Glycine max
gggtcctgcaatcattggtcacgctgatgatcaggtgcttgcagctctgggtgaaaccatgaagaaaggaaccagctttggtgcaccctgtctgctggaaaacactttggcagagctggttatcgatgccgtccccagcattgaaatggttcggtttgtcaattcaggcactgaagcttgcatgggtgcgctccgtctggcccgtgcttataccggaagagagaagatcatcaagtttgagggctgtta

SEQ ID NO: 170268 - DNA, 248 bp, Glycine max
gttgccccaaagacactattaagtttggtgtgtgtgctgatgtgttaggtttgatcaacgtgcaacttgggaagccaccaaagaccccatgctgcaacctcattgagggtctcgctgatcttgaagctgcagtgtgcctctgcactgctctcaaagctaatgtgttgggcatcaacctcaatgttccagtgaacttgagcttgctactcaactactgtggaaagggtgttcccaagggtttcgtctgc

SEQ ID NO: 170269 - DNA, 245 bp, Glycine max
aataactatggttgctgagccattagaaagaggtcttgcagaggacatagagaatggtgttgttagcactgactggagtaaaaagaaactaggtgactttctccagactaaatatgactgggatcttcttgctgcacggtcaatctgggcatttggccctgataagcagggtcccaatattctgttagatgacacccttccaactgaagttaacaaggatctaatgaatgccgtgaaggattcca

SEQ ID NO: 170270 - DNA, 249 bp, Glycine max
gtgaaagagaatccgaggcgatgacaagagagaaattaagatggaggggaaggagcaggatgtgtcgctgggagcgaacaagttcccggagagacagccgattgggacggcggcgcagagccaagacgacggcaaggactaccaggagccggcgccggcgccactggttgacacgacggagtttacgtcatggtccttttacagagcagggatagcagagtttgtggacacttttctgtttctatacat

SEQ ID NO: 170271 - DNA, 249 bp, Glycine max
cgcgtcgctgctccgtaccagtttcactgcataaatttgagagaaaactctgcaaacatgttggtttatcaggacctccttacaggtgatgagcttctctcggactccttccgttacaatgaaattgagaatggaatgctgtgggaagttgaggggaagtgggttgttaagggagcagttgatgttgacattggtgcaaacccttctgctgagggtggagaagatgagggagtcgatgacgcagctgtt

SEQ ID NO: 170272 - DNA, 252 bp, Glycine max
caaaactcaggcacttgctgtttgccactcagatacttctggacatgaatcatcacatgcttcatgaactcatgggagttgatcctggaactaaccctgtttgccatttccttggaagcaaggccattttatgggtacccaatttatctatggacactgcctatcagactaacgttgttgtttaattagtccatgcatctgcatcttgggcaccataagattgtatataaaataaattatggtgtgttgtgt

SEQ ID NO: 170273 - DNA, 246 bp, Glycine max
ctctcctttcgctcctgcttgagaaaatcaggtatgaaagttcacttctccgttcaactcgttctttctctgtttctactgttcgcatttcacgttccacatatggttgttgggactgtggagcttagagctctgatggagttgaagtcctctctggatccagagggaaagatccttggctcgtggatcagtgatggtgatccatgcagtggcttcttcgaaggggttgcgtgcaacgagcatcgc

SEQ ID NO: 170274 - DNA, 246 bp, Glycine max
ggcagactagtatccgatcctctgtcctctcgaagctttcatcgttcaacatattctcaccatctcagtcatgggcctgctatcttgttttaggtctaccgtcctgagaaaatgttccaaaggaagctctggcatgtcaagattcctgtatacgaacaattttcaacgaaacttgatttcgtctggtggcaatgaatcgtattatgggtattttaacaggagatcatacacttcactttatatggg

SEQ ID NO: 170275 - DNA, 242 bp, Glycine max
gaagcttgcatgctcttcttcatgggaacctgggaccaggaaggattccgttagattggaccacgagaataagcttgatgttaggtgcatctagaggtttagcacggattcaggaggagtatagcgcatcagagatacatcagggaacgtgaaatcttccaacgtgcttcttgacaaaaacggcgtcgctttaatatctgactttggcctttcgctgcttttaaaccctgttcacgggattg

SEQ ID NO: 170276 - DNA, 236 bp, Glycine max
cttggacttatatctcatccactggcccctcagttctcagctatggaagttctcctttcctattgaggtagatgatctcttgcctttcgatgtgaagggtgtgtgggaatccatggaagagtgccagatacttggactcaccaaagccattggagtcagcaacttctctgtcaagaagcttcagaatctggtctctgttgctaccatccgtcccgtggtcgatcaagtggagatga

SEQ ID NO: 170277 - DNA, 248 bp, Glycine max
gcaatgtgacatcattaaaatcagtggcatggttcgcaataaggagcgatttgtaaaaagaagacaacatcttgtgggtcccaattcttccaccttgaaggctcttgaaatactcactggctgctacattctcgtccagggaaacacagttgctgctatgggttcattcaaaggcttgaagcaagtcagaagaattgttgaagaatgcatgctgaatagaatgcatcctgtatacaacattaaggttc

SEQ ID NO: 170278 - DNA, 247 bp, Glycine max
agattatcctaagtctttgggaatagtgctgcaatggcttcaagtcaggaggaggtgacccttttgggagctactggaagcccatttgtgtgcagggttcatattgccctcaagttgaagggagttgaatacaaatatgtcgaagaaaatttgaggaacaagagtgaactgcttctcaaatccaacccagttcacaagaaggttccagtgtttattcacaatgagaagcccatagcagagtctcttg

SEQ ID NO: 170279 - DNA, 247 bp, Glycine max
gacaaaattcagatcacaggcccttcagggaagataatgcttttacccgaggatgacccaaatgctacccatataatgattgccaccggtacaggtgttgctccattcagaggctatctacgccgaatgttcatggaatcagtccctacatacaagtttcgtggactagcatggcttttccttggagttgccaacactgacagtcttctctatgatgaagaattcagcaaatacctcaatgactatt

SEQ ID NO: 170280 - DNA, 242 bp, Glycine max
agaatttctatctatctcttgtttcaatttcaacaacggtttctcctttttcgttttgagtttcaatcaagccatcatcatgtctaccgcagcgcaacccaaggccaagaaatcggcgtcgtccaagaagcccctctcccaccctcccttcgccgtgatgatagcagaggcgattgcgagtctgaaagagagaaccggttcgagccaatacgcgataaccaaatacatcgaagggaagcaca

SEQ ID NO: 170281 - DNA, 253 bp, Glycine max
ccctatggctcgtcactccttgctcttagccctcctcctcttcgccgcgtccgacgccgacgacatcctgatccgtcaggtggtgccagatgttggcgaagcgaagaggaggacaacctgctgaacgccgagcaccacttcgcgagcttcaaggccaagttcgccaagacctacgccaccaaggaggagcacgatcatcgcttcggcgtcttcaagtccaacctccgcagagccaggctgcacgccaagctcg

SEQ ID NO: 170282 - DNA, 268 bp, Glycine max
caggccaccaaagccaaaggttccattgccaccaggcactgttgtgtcccctccaaggccaaggggtcgtcccccaaaagaccctaatgcccctcctaagtcccctaaggctaaggccacccctgccactggcaggccaagaggaaggcctaagaaggttgctcgctcaccggccgtgccgtctcccaccgccgtctccactggaaggcctagaggcaggcctcccaaagtgaagcctcagttgacagaagtcagtgttgagtcatag

SEQ ID NO: 170283 - DNA, 270 bp, Glycine max
gtttcagtgagtgatcggtgttcacttgatccttcataagtcgtcatcatcatcatcatcatcaccgttgattgaagaagatgccgatcagaaacatcgccatcggaaggcctgaagaggctactcaccccgacacgttgaaggcggggttggctgagttcatctccaccttgatcttcgtgttcgccggttcaggttccggcatcgcctacaacaagctcaccgacaacggcgccgccactcccgccggcctcatctccgcttccatcg

SEQ ID NO: 170284 - DNA, 269 bp, Glycine max
gctctctcactcacaaacgcacactgaattcaaaaacatcgaaagagagaggcatggtcgagcaaaccttcatcatgatcaagccagatggcgttcaaagatgccttattggcgagattattagcagatttgagaggaagggtttttacttgatagggttgacactcgttactgtggaccgtccttttgctgagaagcactatgctgatttgtctgcaaagcctttctttagtggtttggtggattacattgtctctggccctgttgtt

SEQ ID NO: 170285 - DNA, 225 bp, Glycine max
cctagctcttgttgacattccaataagtttggtgctatgatcatggagatcaatgcatccaccgacaacattaatacagccaagtacaacgtacatcacaaacagccttaccgaacttggtagcactttcagcccccacaaaattggatgaatgatccaaatggaccaatgtactacacaggagtttaccacatcttctaccatcataacccttatgcaccaacc

SEQ ID NO: 170286 - DNA, 269 bp, Glycine max
ccaggaccaaacagcatccgcgcgcagcgacggtaaccctccaacaacaacacttccgctgcgaaaaatgtctctggtggcgaacgaggatttccagcacattctgcgtgtgctgaacaccaacgtggatgggaagcagaagataatgttcgcaatgacctccatcaagggtattggaaggagattcgccaacatcgcttgcaagaaggctgatgttgacatgaacaaaagggctggtgagttgactgctgctgagttggatagtgtga

SEQ ID NO: 170287 - DNA, 269 bp, Glycine max
actcaaactcgggatcacagaaaccaacaacagttcttgcactgaggtttcacgatgttgctggaacttgcacttggtttgtttgtgttagctttgtttctgcacttgcgtcccacaccaagtgcaaaatcaaaagcacttcgccacctcccaaaccctccaagcccaaagcctcgtcttcccttcattggccaccttcacctcttaaaagataaacttctccactatgcactcatcgatctctccaaaaagcatggccccttattctc

SEQ ID NO: 170288 - DNA, 264 bp, Glycine max
gttcattctgttttcttgaagtctttccctagccaatggccactgatcgtttgacccgggttcacagtctccgtgagacgcttgatgaaaccctcactgccaacaggaacgaaattttggcccttctgtcaaggatcgaagctaagggcaaggggatcctgcaacaccaccaggtcattgctgagtttgaggaaatccctgaggagaacaggcagaagcttactgatggtgcctttggagaagtcttgagatctacacaggaag

SEQ ID NO: 170289 - DNA, 269 bp, Glycine max
gagaatccgaggcgaagagaagagaaaaattaagatggaggggaaggagcaggatgtgtcgctgggagcgaacaagttcccggagagacagccgattgggacggcggcgcagagccaagacgacggcaaggactaccaggagccggcgccggcgccactggttgacccgacggagtttacgtcatggtccttttacagagcagggatagcagagtttgtggccacttttctgtttctatacatcactgtcttaaccgtcatgggagtcg

SEQ ID NO: 170290 - DNA, 270 bp, Glycine max
ctacactatacttgtcaaccctttgagagttagaatggctgctgctattgaaatccccacaatagtgtttccaaactcctctgcccaacagaggatgccagtggttggaatgggatctgcccctgacttcacatgcaacaaagacacaaaggaggctatcattgaggccgtgaaacagggttacagacacttcgacactgctgctgcttatggctctgaacaggctctcggtgaagctctcaaggaagctatccatcttggcctcgtctc

SEQ ID NO: 170291 - DNA, 268 bp, Glycine max
taagaattagggcgaactggtcataggtgtgaagtgaaagagagattctgcgtgcaggaagagcgaacatagtgagtgtggcaatggcggaggagcaaagtgacttcaggatttacaattccatgactcagcagacagagatcttcataaccaaagtccccggcaaggtttccatgtacgtttgcggagtcactgcctaagacttcagccatctcggtcacgctcgcgctgcggtttctttcgatatcctcttcaggtaccttaagca

SEQ ID NO: 170292 - DNA, 271 bp, Glycine max
tggaggtcgccgtttcagtgagggaacaagtgcagatcgtgagattcagagaacgctaatggagctgcttaatcaactcgatggatttgatcaacttggaaaggttaaaatgataatggcaacaaaccgacctgatgtacttgaccctgctctcctgcgtcctgggagattggatagaaaaatagaaatccctctgcctaatgaacaatcaaggatggaaattcttaagattcatgctgctggaattgccaagcatggtgaaatagactat

SEQ ID NO: 170293 - DNA, 274 bp, Glycine max
cgttctttgtctcgcaatcttcactattttcaccgagcatttgcattccacattgaatatggctgaggctacacaatctaatgctgagttgttggagtggcctaagaaagataagcgccgcttcctgcatgttgtgtatcgtgttggtgatcttgatcgcaccattaagttttatactgaatgttttgggatgaagcttttgaggaaaagagatattccagaagagaaatatgccaatgcttttcttggatttggccctgaacaatcccatttt

SEQ ID NO: 170294 - DNA, 269 bp, Glycine max
cggggttcttccctccaagcctaacggctttacgatacaccttcattcccgaatcgccaatttccacatttgcccctccccataaacggtgccgtttcgtgtaccagaagagaatcttgtacttcaccgcagtagcatagtccacacggtaccacattctcccagccaccgccgcggtgaggtttccgccgccgccgctgaagtttccgtgcttggtggccttcttctggtggccctggtagaacctttgcacggtggcgttgccgagt

SEQ ID NO: 170295 - DNA, 268 bp, Glycine max
gtcacaggtgaaaatggcaccatagatggtcagggtgagttttggtggcagcaatttcacaggaagaagttgaagtacactcgcccatacctgattgaattgatgttctcagacaacattcaaatctcaaatctaactctcctcaattccccatcatggaatgttcatcctgtttacagcagcaatattattgtgcaaggcatcaccatttgtgctcctgtcacatctcctaacactgatggcatcaacccagattcttgcacaaatg

SEQ ID NO: 170296 - DNA, 267 bp, Glycine max
ggaatctgggtctagcgaaggagaagaggtgcagcaacgcgtgccgttgagggagagagtggagtggtcagatgttactccggttcctcaaaacgacggccctaaccctgtcgttccgatccagtacactgaagagttttccgaagttatggattactttcgcgccgtttacctcaccgatgaacgctcccctcgcgccctcgctctcacagccgaagccgttcaattcaactccggcaactacactgtgtggcatttccgacggtt

SEQ ID NO: 170297 - DNA, 265 bp, Glycine max
atccctccatcaaaagtggcatatgtagctaaagaactatatgatatgggttgctttgaaatctcacttggggacacaattggagttggtactcccggtaatgaattagctagatgtctttctttttgaaaactttatgctacacacagaacataataatatcagcctcatggcagcattcccttgtttggcatttgtcttcaaacactttttactaaacatcagcctattactcacctttcctgtgctttgtgttgatcgtgat

SEQ ID NO: 170298 - DNA, 273 bp, Glycine max
cttgtcaaccctttgagagttagaatggctgctgctattgaacatccccacaatagtgtttccaaactcctctgcccaacagaggatgccagtggttggaatgggatctgcccctgacttcacatgcaagaaagacacaaaggaggctatcattgaggccgtgaaacagggttacagacacttcgacactgctgctgcttatggctctgaacaggctctcggtgaagctctcaaggaagctatccatcttggcctcgtctcccgccaagacct

SEQ ID NO: 170299 - DNA, 111 bp, Glycine max
ctcgaccgttcaaggtgtggtgtgtttcacatttgaagtaacactgaaaagaaaggaaagtgaagttgagagtttaagaagaacaagaaatgggggttggttcccaggatg

SEQ ID NO: 170300 - DNA, 262 bp, Glycine max
gcatcacctcttcgtcattgtctatgccctgttggttgtacatggaatcaaactttacttaactaaggaatggtacaagaaaacggttagcaccttcagttgaaccttatatttatgtagttgttttggattgaaaaataatcgattaaaatgcacttgacattatgtgattgatagacctggatgtatctggctattcccatcaccatttatgcattggaaagactggttagagcattcagatcgagcattaagtccgtca

SEQ ID NO: 170301 - DNA, 267 bp, Glycine max
ggaatattggttctcaacaatgccatagcttcttgcactgaagcaatagaacaacacaagggtaaacttgtggttaaggaggcagctagagcagtgagtgaacgtgatgataaattgcttgccgagcacatggctaagctacgccaagataatgaagaggtcagtggtgatgaagacagtgaggaggaagaagatacaggaatgggcgaggttgatgtggataatggtgccgggataacagagtgacaaaaaacgtgtgggtatagt

SEQ ID NO: 170302 - DNA, 266 bp, Glycine max
cataaatattccgttttgcgtttctctgcctaaaaggattgaaagatgggtcaagcactaggttgctatcaagttgatcagtcaaatgtggctatcaaggagcattttggaaaatttgatgatgtcctagaacctggatgtcattgcctgccttggtgtcttgggtaccagattgctggtagtttgtcactgcgtgtgcagcaacttgatgttcgatgtgagacgaaaaccaaggacaatgtctttgtcactgtggttgcatctgt

SEQ ID NO: 170303 - DNA, 264 bp, Glycine max
ctctttgcaacacaacaataaaagacaacacagagagaagcgtcttaataaacgctcttctctgaaaaacctgatttcttctcttcttctcttctctttcgcttcgatcttcgatctctgacaatgagagattgcatctcaatccacatcggtcatgccggtattcaggtcggtaacgcctgctgggagctctactgcctcgaacacggcattcagcctgatgggcagatgccatgtgataagactgttggtggaggtgatgat

SEQ ID NO: 170304 - DNA, 265 bp, Glycine max
ctcagctagggagaagaaagatggaagatccagaggttattattgggagcttgaatccaaatgataccaggggaaagaccgttacttgcaaagctgccgtggcatatggtcctggagagccctttgtggtggaacgtgttcttgttcatcctcctcagaaaatggaggttcgaatcaagatcctcttcacttcaatctgccacaccgatctcagtgcttggcaaggcgagaatgaggctcaacgtgcatatcctcggattttcgg

SEQ ID NO: 170305 - DNA, 264 bp, Glycine max
atgggttcaaacccaaaaccccttgtgcacctttctcttcttctcctggtcctcttttcttcctcaaccgaatccctgagatttgaaatccaatccgggcacaccaaatgcatctccgaggatatcaagagcaattccatgaccgttggcaagtaccaaatcgttagccccaacgagggtcaacctctgccagatgcccacagattcaccgtcagggtgacttcgtcttatgggaacaatatcactacggggatcgcgttcaga

SEQ ID NO: 170306 - DNA, 264 bp, Glycine max
agattattgactgggaaaactcttctgtgaagcaagttgagattcctttcaagcctgctcgtgttctactgcaggattttactggagtccctgctgttgttgacctggcttgcatgcgtgatgctatgaataagcttggcagtgattctaataagattaatcctctggttcctgttgatcttgtcattgatcattcagttcaagttgatgtagcaaggtcagagaatgcagtgcaagccaatatggagcttgagtttcagagaa

SEQ ID NO: 170307 - DNA, 266 bp, Glycine max
ctagtagttaagaaacattagttaaagaagataagaaacattacacctagctactagagtttaacatggcttccaaaacttgctcctcccttgctcttttcctcacactcaacctcgttttcttctcacttgtctctgcatgtggttatacaccatgccctggtccaaacccaaagccaaggcccaaccccaaccctaaccctaaccccagccgaagtggctcgtgcccccgtgatgcactcaaactaggtgtatgcgccaatgtg

SEQ ID NO: 170308 - DNA, 264 bp, Glycine max
caagtgttagggaggacaaataccgcccctttatgcgcgaagacagtgagaagaacatcaaatggagatatggtgctcctccaaattatgacgttgtcaacaaattatttgatgaaggcagaaccaaggtatggcctccgggttcacttgaagaaaaggtgcagactttagtgaagaattgggagatggaaatgttccacaaggaggatttcaaggataacagatcagtggacccagagaaatacactttcagcctaaacggaa

SEQ ID NO: 170309 - DNA, 266 bp, Glycine max
tgctaatagatccattttggtcattgaagacattgattgcagtgtggatctgccagagcgtcgccatggtgatcatggacgtaaacaaactgacgtacagttgaccttgtctggattactgaacttcatagacgggttatggtctagttgtggagacgagagaatcatcatattcaccaccaaccacaaggagaggctagacccagcactgttgaggccaggaagaatggacatgcacattcacatgtcctattgctcctaccaag

SEQ ID NO: 170310 - DNA, 268 bp, Glycine max
ggaaaacgttgtagagttcacagacttacccgtcaagagacctagagaagaagaagaagaagaagaagaacaaaccaatggagtctccaacgacgccgtttcaacgctacccaatgaccctcaataccctggtatctctgctgttattcccggttggttctcagaaatcagcccaatgtggcctggggaggcgcactccttgaaggtggaaaagattttgtttcaagggaagtctgactatcagaatgtcatggtcttccagtcatca

SEQ ID NO: 170311 - DNA, 269 bp, Glycine max
gaagcctaccctactattatccctttccttcctgcctctctttgctttcctggctctttcagaagatgttgaacaagttgtggacataagtggcaaccccattttcccaggtggcacatattacattatgccatcaacttggggcgctgccggtggtggattgaaactaggccggacaggaaactcaaactgcccagttactgttttgcaagattactcagaaatcttccgtggcacaccagtcaaattcagcatacctgggataagcc

SEQ ID NO: 170312 - DNA, 258 bp, Glycine max
aaaaccctttcattccattttacattattgtaaagcattcttctcttttctttcttttctctttcctctctctctctctacgctttctcgtttgagatccctcaagggatccactaactgaaggagcaatggggttgacatttaccaagctttttagccggcttttcgccaagaaggaaatgcgaattctaatggttggtcttgatgccgctggtaagaccaccatcctgtacaagctcaaacttggagagatcgtta

SEQ ID NO: 170313 - DNA, 266 bp, Glycine max
ggaaatcttgcgcaagagaagagctgggaaacttcctggtgacacaacttctgttcttaaagcttggtggcaatcacattccaagtcgccttaccctaccgaggaggataaggcaaggttggtgcaggaaactggattgcaattaaagcagattaataattggtttatcaatcaaaggaagaggaattggcacagcaatccttcaacttcaactgtcttgaagagcaaacgcaaaaggtattcccatcaaaactagtaatttgtaa

SEQ ID NO: 170314 - DNA, 264 bp, Glycine max
gtcggcgattatgttgacgtcaaggttaacggtgccgttcacaagggaatgccccacaagttctaccatggccgcaccggacgcgtctggaatgtcaccaaacgtgctgttggcgtcgaagtcaacaagcaggttggcaacagaattataaggaagaggattcatgtgcgggtagagcatgttatgccttcaaggtgcactgaggagttccgcctcaggaagattaagaatgatcagctaaaggccgaagccaaggtcaagggt

SEQ ID NO: 170315 - DNA, 262 bp, Glycine max
gagacgcttcgcaaatctcaatcgaatctcagaaaaatgagagaaatcatcagcattcacataggtcaggccgggatccaggtcggaaactcctgctgggaactctactgcctcgaacatggcatccagcccgacggcatgatgccttctgactccaccttcggtgtagcccacgacgccttcaacaccttcttcagcgaaaccggatctggcaagcacgtcccccgtgctgtcttcgtcgacctcgaacccaccgtcatcg

SEQ ID NO: 170316 - DNA, 264 bp, Glycine max
aaaacggaaagttgagctaccaagtgagaagcatgttgatggggttttctatgatcctccacttactgggacacaagttttttcaaacctaccactgaccaaccaatttaggtgtttgaataaagcagctgtaataatggagggggagcaaaaccctgatgggagtagagcaaataagtggaaagttgtcagcatccaacaagtggaagatgtgaagtgcttggcaaggattttcccaatttgggctgcagggatcctaggatt

SEQ ID NO: 170317 - DNA, 263 bp, Glycine max
cagcataagaaagatctccaacaaataagacagtctgctggaaatcacgaaatagactatatgccttacatgggagaagttgttcctttcaaaaactatctttaccgatatactactccctacttggcctccaatagctccagtcccctctggtatgcagttaggcgtgcgtctgctcatataattgtgctatccagctattcaccatttgtgaaatacactcctcaatacatgtggcttaaagaagagctgaagcgagttga

SEQ ID NO: 170318 - DNA, 264 bp, Glycine max
aaaccctactcattctccatacctcaacgaagaggttaaagagacggcaacactttgctgtccgccttgaccgagcagagcttcgtcttggccctcgattttgccctaaagtactcccagtcacaacagacaccgtcgtcgttgtcgtcatcatcaatggcaccgaagcagaccaaggctgagaagaagatcgcttacgatgcgaactgtgcgacctaatggaggagtacggccagatcctcgttgtgaactctgataacgtgg

SEQ ID NO: 170319 - DNA, 263 bp, Glycine max
attttcgtggcattcgtcactctcgtgtcgggtgaaggcgaaaaccaaatcaagatgctgagagtgggcgcaaagaggcttttgggaacgacgtcgttgggcgttagggttccggcgaggctgtaccacgagagggttgtggatcactacgacaacccccggaacgttggatcgttagacaagaacgacccgagcgtggggacgggtttggtgggggcaccggcgtgcggcgacgtgatgaagctccagattaaggtcgacga

SEQ ID NO: 170320 - DNA, 267 bp, Glycine max
cgaaaatgtggaagagaacgggttttgaagaagaagcagttcaattgatcaactcagatttcagggacctaagtctagctgctaatagactcgcccatcatgccatcaaacttggtggcattggctttggagcctcttttttcggattgtttgctgccattgctgctatttatctgttgattttggatcgtacaaactggaaaacaaatattctcacagcactactcattccatacattttcttcagcttgccttcattaattttcg

SEQ ID NO: 170321 - DNA, 273 bp, Glycine max
gggtaaccacggcgccactcgaacaagtgcggcaattcccaacgcttctcttctcagggggagttcgaatcctgtgagctttcaatatgacgtcgttcttgaagcctgagaatgctctgaaaagggcggaagaattaatcaatgttgggcagaagcaggatgctttgcagactcttcatgacctcatcacctcaaaacgatacagagcatggcagaagacacttgaaaggattatgttcaagtatgtggaactttgcgtcgacatgcgaaaag

SEQ ID NO: 170322 - DNA, 271 bp, Glycine max
tcttcatgaagaataggagttgtcaagatggttatgcagtgaaatcatctttgaaagctgaagatggaattctgtatccccttgagaagagcttcttctttctacctaaacctcccactcttattcttcatgaagagattgactatgtggaattcgagcggcatgctgctggtggctccaatatgcattattttgaccttcttatcagactaaaatctgaacaagagcatctcttccgtaatattcagagaaatgagtaccacaatttgtt

SEQ ID NO: 170323 - DNA, 269 bp, Glycine max
attacttctttccttctctctctcaccaaaacaatttgctcacaaaggaggaaaaatggcacctttcgtttccctctctttgttgcttctctttctcaaccaccccctcctttccctctcaaccaaccctgaagggaacgctctgcatgctttgagaagcaggctttctgatcccaacaatatgttgcagagttgggacccaacactggttaatccctgtacttggtttcatgttacctgtgactccaacaatcatgtgattcgcttag

SEQ ID NO: 170324 - DNA, 272 bp, Glycine max
ctcgatcaactcaacacaaaccaaaactcaagctaaaattctcactctctctctcatctcgagatcatagtatcatattcaatatcatttcataccaaacacatggctttggaagctctcaactcaccaacaacaaccgctccatcttttccctttgacgacccaactattccatgggcgaaacgaaaacgttcaaagcgttctcgcgaccatccttctgaagaagagtacctcgccctctgcctcatcatgctcgctcgcggcggcaccac

SEQ ID NO: 170325 - DNA, 269 bp, Glycine max
gggcacagtccacgtttcttgggtgcagccaagagttctgggtattcaacagatcaaatccttacgggatcgactagacagttggaccggaaaagttcacactgcattgttgtccattgaggcagaaacacctgatctaattggatcgtgatctttctttaattttttttctgccctatgtaacaatttctcaagtcaaagggaacacatcctaaggcttcaaaagatgaagagaaattccaagtgacatgggcaatgtagccaacttg

SEQ ID NO: 170326 - DNA, 272 bp, Glycine max
aattttcaaagccagacagacaaacatgtccgagaatattgagtccaattctccttcgctttccctctttatctgaaaggtatggagtgttttgacttctggaagagataatggtgcagtgcctatccggattaaagcatttgtgtgctgctctggtaaattgttgtgatgccgattcgtcaaagcaacctacaggtttagaaaatccagaagttcttgcaagagaaacagtgtttagtgtaagtgagattgaagcgctgtatgaattgttc

SEQ ID NO: 170327 - DNA, 273 bp, Glycine max
taattacttgccttgaggaacgttccagaccacatacagaggtttctctagtgatcttcgttcttctgtggagatcttgttttttcatctcacttttcttctaattaaggaacaagctttccgcagttgaaaaccctagctagctagcttccaccaatttgaatcaccaatggctcgctctttctctaacgtcaaggttctctctgctcttgtggccgacggattctccaacactctcaccaggcgtgggtacgcagcagcgacacaaagcgc

SEQ ID NO: 170328 - DNA, 268 bp, Glycine max
cataaatattccgttttgcgtttctctgcctaaaaggattgaaagatgggtcaagcactaggttgctatcaagttgatcagtcaaatgtggctatcaaggagcattttggaaaatttgatgatgtcctagaacctggatgtcattgcctgccttggtgtcttgggtaccagattgctggtagtttgtcactgcgtgtgcagcaacttgatgttcgatgtgagacgaaaaccaaggacaatgtctttgtcactgtggttgcatctgtgc

SEQ ID NO: 170329 - DNA, 270 bp, Glycine max
tggggatcgatcttaaggctgggggtaagagcaaaaagaccaaaagaacagcaccaaagtccaatgacatctacctcaaattacttgtcaagctttatcgattccttgttcgaaggacagacagcaatttcaatgctgtgatactcaagcgcttgttcatgagcaaggttaacaagcctccaatttctttgtcaaggttaattaagtatacgaaggggaaggaggataaaattgctgtagtagtggggactgtaactgatgatatcagag

SEQ ID NO: 170330 - DNA, 269 bp, Glycine max
gaaagatgcaaccaatgattttgaggatattggtcacagcaccagcgccgtagccatgatggatgagttctatgttggagacattgatacatcaaccatccccagcaaggttaagtacactcctccaaaacaacctcactataaccaggacaagatgccggagttcatcatcaggatcctccagtttctagttcccttgtttatcttgggtttggcagttggtattcgtttctacaccaaatcaacataatcatttaactgcaagagca

SEQ ID NO: 170331 - DNA, 267 bp, Glycine max
ggatgagcatcggcttctggtttatgaatttatgcccaagggtagcatgcaaaatcatctattcagaagaggttcttactttcagccattctcttggagtttgcgaatgaagatagcacttggggctgcaaagggccttgcttttcttcatagtacagaacctaaagtcatataccgtgactttaaaacttcaaatatcttactcgatacaaactacagtgccaaactttctgattttggcttggccagagatggtcctactggtga

SEQ ID NO: 170332 - DNA, 267 bp, Glycine max
gcgccgtgagatcgtgaggaggagaaagaacggagaggttgttgagggtgaggtcagcggggttttccttgacactttgcttgaattcgctgaggatgagaccatggagatcaaaatcaccaaggaccacatcaagggtcttgttgtcgactttttctcggcaggaacagactccacagcggtggcaacagagtgggcattggcagaactcatcaacaatcctaaggtgttggaaaaggctcgtgaggaggtctacatgttgtggga

SEQ ID NO: 170333 - DNA, 264 bp, Glycine max
gcttcttgcaagaagtttctgagcttttatatcctctatatatagttctctggcaattaaggtctcatccaaataagcacaaatgggtagccagagttacttcaaggctttgattatttgccttatagcactaattggatcaactcaagctcaattgcagcttggtttctatgccaaaagttgtccaaaggctgagcaaataattctgaagtacgttgttgagcatatccacaacgctccatcactagcagctgctctcataag

SEQ ID NO: 170334 - DNA, 264 bp, Glycine max
gtacaacaacatgtaccgcataatgttcgaccggaggttcgagagcgaggaggatcccatcttccagaggctaagagccttgaacggagagaggagtcgcttggcgcagagctttgagtataactatggtgattttattcccatcttgagacccttcttgaagggttacttgaagatttgcaaggaggtgaaggagacgaggttgaagcttttcaaggattacttcgttgacgagaggaagaagcttggaagcaccaagagcac

SEQ ID NO: 170335 - DNA, 264 bp, Glycine max
caactacctcaacttttacaagctctatcaacctcttgtggtagttgaggtagtaaaagttggtggcgtgatcgggtacgacaacaccctatggaacggatctgtggtggcaccccctgatgctcctcttaggaagtatgttaggtactacagggacttcgtgctggagctcaacaaagccctcgctgtggaccccaggatcgagatttgcatgctcccggttggtgatggaatcactatctgccgtcggatcagtgatttctg

SEQ ID NO: 170336 - DNA, 266 bp, Glycine max
ctcgagcgaatcggctcgagcaaccctcccttctccctattacaaccgatcgccaccactttttctctctaacttccacatggacgacgtcgctttttactctctgcttttcctgtgcttctttcaatcggtgcgagggattttggaccccaacgatttcctcgctctgcaatcaattcggaaatcccttcacgatgttcccggttccaattttttctcctcctgggacttcaccgccgacccctgcaacttcgccggcgttttct

SEQ ID NO: 170337 - DNA, 269 bp, Glycine max
ctcagatgttccttccatcaaccactccagcaaagataagcttgttgtgtccacctcctcctcccttcttcacactgctgttgatcttgttaacgagaccaagttggatgacgagatcaagtcatggctagcatttgctgcacaacaaattgttgaagttaacgcattggctaaggcattgtctggcaacaaggatgtggccttcttctctgctagtgctgcagctcaggcttcaaggaagtcctctccaagagtgaccaacgaggctg

SEQ ID NO: 170338 - DNA, 272 bp, Glycine max
gaagtgccaaattaagagagaaacagagagatagaaggaaaagcatcaaagatgaaacccaacttttcatttttgtttaagcttttgatactgcaatatctagcagttctatccatttctcaggaatttgatttcttctactttgttcagcagtggccaggagcatactgtgacacaaagcagagctgctgttatcccaagactgggaaaccttcagcagatttcagcattcatggactttggcctaactacaatgatggatcatggccctc

SEQ ID NO: 170339 - DNA, 266 bp, Glycine max
gagaatggctcccaagggtttaatctttttggctgtgttatgcttctcagcactgtcactgagtcgttgtcttgcggaggataatggacttgttatgaacttctacaaggaatcatgccctcaggctgaagacatcatcaaagaacaagtcaagcttctctacaagcgccacaagaacactgctttctcctggctcagaaacatcttccatgactgtgctgttcagagttgtgatgcttcactgttgctggactccacaagaagga

SEQ ID NO: 170340 - DNA, 263 bp, Glycine max
ggaagagagagggagattctttgtttgctaccttctctcggaaaaatggttacgttcaggtttcaccagtaccaggtggttgggagggctcttcccacggaagcagatcagcaccccaagatctaccgaatgaagctctgggccaccaacgaggttcgcgccaagtccaagttctggtattttctgaggaaactgaaaaaggtgaagaagagcaatggccaagtgcttgccatcaacgagatttttgagaagaaccaaccaaa

SEQ ID NO: 170341 - DNA, 262 bp, Glycine max
aacaaagtacccttgttttccccaagggaaatcccataccaagtgtcaaggcactgaccatctacaggtcaggaaccttttctattgatgttcagtatgatgacgtgagtggtttgcaaacacctgcaaagatcagcacatatactattggccctttccaatctacaaaaaatgaaaaagcaaaagttaaagtgaaagttcggttgaatgtgcatggaattatatctgtcgaatctgcaactctactggaagaggaagaaga

SEQ ID NO: 170342 - DNA, 266 bp, Glycine max
ggaaaacgttgtagagttcacagacttacccgtcaagagacctagagaagaagaagaagaagaagaagaacaaaccaatggagtctccaacgacgccgtttcaacgctacccaatgaccctcaataccctggtatctctgctgttattcccggttggttctcagaaatcagcccaatgtggcctggggaggcgcactccttgaaggtggaaaagattttgtttcaagggaagtctgactatcagaatgtcatggtcttccagtcat

SEQ ID NO: 170343 - DNA, 271 bp, Glycine max
accgacagagccatccacgtcatcttcattggcgagggacccaaccaccgtggttcacccaaggcgcgagcattcgagcacggcctcttgccaatcccgcgcctcatcttctccgacccgacgcaaaccctaatctcgttgaagcagaagcttctcgagttatcctctaaccagcgagtcgactcggcggcaatctccgagtcactgcagatccccattgagcacgccaggctcgtccttgataccctcgcctcgattctgcactccgact

SEQ ID NO: 170344 - DNA, 273 bp, Glycine max
catttctccatttccattttctctctcacttttcaagaatcgtaagctatgggaaagtcttacccaactgtgagtgctgattaccagaaggccgttgagaaggcgccgaagaagctcagaggcttcatcgctgagaagagatgcgctcctctaatgctccgtttggcatggcactcttctcggaacctttgacaagggcacgaagaccggtggacccttcggaaccatcaagcaccctgccgaactggctcacagcgctaacaacggtcttga

SEQ ID NO: 170345 - DNA, 264 bp, Glycine max
ttcagatctatatttgcctcagaaaagagttggacaatcattgtacagtcagcaccaagagatgtgtggcattcttcagctttctgatgaagtcttggctcacaacattttgtcacgcttgacaccgagggatgttgcatccattgggtctgtatgcaggaggatccgtcaattaacaaagaacgagcatgtcaggaagatggtatgtcaaaatgcgtggggcaaagaagtgacgggcacattggaactgatgaccaagaagtt

SEQ ID NO: 170346 - DNA, 263 bp, Glycine max
agagaatggctcccaagggtttaatctttttggctgtgttatgcttctcagcactgtcactgagtcgttgtcttgcggaggataatggacttgttatgaacttctacaaggaatcatgccctcaggctgaagacatcatcaaagaacaagtcaagcttctctacaagcgccacaagaacactgctttctcctggctcagaaacatcttccatgactgtgctgttcagagttgtgatgcttcactgttgctggactcacaagaa

SEQ ID NO: 170347 - DNA, 263 bp, Glycine max
ctttagtgatttgagcataactagcagcggacctggttttggaagtggctctggttttggattgagttctgatgttggttccttttctaccaagtctaaaggtggtccaacttcatctgccactgctccaccaaaaggtcttggaatgaagcttggtaaatctcaaaggacaaatcagtttttggaatcattgaaagcagaaggtgaggtcattcttgaacatgttcaaccaaaacttgctcaggcagctgccccaccatcta

SEQ ID NO: 170348 - DNA, 256 bp, Glycine max
atggatcagaaagtcgatttcagtgctccgcattccatgggaaccactatcatcggcgttacttacaacggcggtgtcgttctcggagccgactctcgaaccagcactggagtgtatgttgccaaccgagcatcggacaaaatcacacagctcactgataatgtttacgtgtgtcgctctggatcggctgctgattctcagattgtctctgactatgtgcgctacttccttcaccaacacacgatacacttggaca

SEQ ID NO: 170349 - DNA, 259 bp, Glycine max
tcgcaagcaaaaagaaagaatcccaggcgaggagaaagatggaggggaaggagcaggatgtgtcgttgggagcgaacaagttccccgagagacagccaattgggacggcggcgcagagccaagacgacggcaaggactaccaggagccggcgccggcgccgctggttgacccgacggagtttacgtcatggtcgttttacagagcagggatagcagagtttgtggccacttttctgtttctctacatcatgtcttaacc

SEQ ID NO: 170350 - DNA, 263 bp, Glycine max
attctggggtagtccttttgtcctcagggtcaagtgggttcttgaactaaaagggattcagtaccaatatgtggaagatctcggcaacaagagtgccatgctcctacagtataaccctgtccacaagaagctaccggctctcgtgcatgacggtaagcccctggcagaatcactagtgattcttgagtatattgatgagacctggaagcaagatccctcccttcttccacatgatccctatgaaaaggccaatgcgattctgg

SEQ ID NO: 170351 - DNA, 265 bp, Glycine max
gttttgaaggtattgcaaatgtgagatgccttataacccggatgatctcatggtacaatgtgaagggtgcaaggattgggattatgtgattccagcgcctgcagaatgaacgccgtaaagggtgttaaggtgttgtaaaggtcaaatttggtagtaaaatgagaaggggaatggttgtgacaacaggaagctcatagaaaatgtaccatcctgcttgcatgggcatgactattgaagaagctaagaaactagatcattttgtatg

SEQ ID NO: 170352 - DNA, 269 bp, Glycine max
cgtcactccttgctcttagccctcctcctcttcgccgccgtccccaccgccgcgatggcggtggccgcgtccgacgccgacgacatcctgatccgtcaggtggtgccagatgttggcgaagctgaagaggaggacaacctgctgaacgccgagcaccactccgcgagcttcaaggccaagttcgccaagacctacgccaccaaggaggagcacgatcatcgcttcggcgtcttcaagtccaacctccgcagagccaggctgcacgccaa

SEQ ID NO: 170353 - DNA, 258 bp, Glycine max
cacaccaaattaacaaagccttctttttcttgtgtgatctcacaagcccctaaaggccaccatgtcttccttcaagagcaaattccaagatgagttgattgccaatgctagttacattggcaccccaggaaacggtatccttgcggctgacgagtcaacagggacaattgggaagcgtttggcgagcatcaacgtggagaatgttgaaccaaaaaggggaatcctccgtgagctcctattcactgcccctggttgtct

SEQ ID NO: 170354 - DNA, 248 bp, Glycine max
agagaatccgaggcgaagagaagagaaaaattaagatggaggggaaggagcaggatgtgtcgctgggagcgaacaagttcccggagagacagccgattgggacggcggcgcagagccaagacgacggcaaggactaccaggagccggcgccggcgccactggttgacccgacggagtttacgtcatggtccttttacagagcagggatagcagagtttgtgggcacttttctgtttctatacatcact

SEQ ID NO: 170355 - DNA, 263 bp, Glycine max
gcgagagcagaagctacagcgaggcaagcctgcttccgcggcttgccacgtggtacaaatccaaggacgtagcgcagaggatccttctctcagttgaatgccaaatgaggaggtgttcctacacgctgggtttgggtgagccgaacctagcgggcaaaccgagcctgctctacgacctcgtgtgtaagccgaacgagatccacgcgctgaagacgacgccgtacgatgagcgcgtagagaatcacgagaaccacgcgttgcac

SEQ ID NO: 170356 - DNA, 262 bp, Glycine max
tagtgagagaaagttctctctgcttctctctcttagactcaaaaccctattgcgtgctttgcaatcgaccccgattatggccaacagtaacctccctcgaagaatcatcaaggaaacgcagcgtttgctcagtgagccagcacctggaattagtgcgtccccttcggaagacaatatgcggtatttcaatgtgatgatccttggcccaactcagtcgccttatgaagggggagtttccaagttggaattatttttgccagaa

SEQ ID NO: 170357 - DNA, 262 bp, Glycine max
caggtgttggtgccctaatcgtgagaagaaaggaaagggaaaagaggaaaatggtgtgcataaggaaggcgacggtgaaggaccttctggcgatgcaggcgtgcaacctgttctgcctccctgagaactaccagatgaagtactacctctatcacatcctctcctggccccagctcctctacgtcgccgaagactacaacggccgcatcgtcgggtacgtcctcgccaagatggaggaagaaaccaccgactgccacggtca

SEQ ID NO: 170358 - DNA, 258 bp, Glycine max
gttgaattgaagttgaagccatgagatgaatcacttatctcttgacaccgaagattattctctgtcaagcttgctggagcttgcagccaacaacgatgtctcgggtttcaaaagactaatcgagtgcgatccttcctccatagacgaggttcggttgtggtatatccgtcacaaagagtcaaagaagatggtcaatgagcaaagaactcctttgatggttgctgctacctatggcagcattgatgtcatgaagctgat

SEQ ID NO: 170359 - DNA, 258 bp, Glycine max
ctcttcttcttcccacgctcctccttctcatacccttcgccaccctcgtctccgcccgccctcacctcgccggagactttctccgactgccctccgaaaccgataacgatgacaacgtccagggcacccgctgggccgtcctcctcgccggttccaatggctactggaattacagacatcaggctgatgtttgtcacgcctatcaaatactaaggaaaggtggcctgaaagaagaaaatattattgtttttatgtatg

SEQ ID NO: 170360 - DNA, 258 bp, Glycine max
gttgtccccccatgtccttggacccaggtggcctgccacgtgggtccaagaacaagcccaagccgcccatagtcataaccaaggaaagtcccaacgcactccgaagccacgtcctggaaatcaactccggcagtgacgttgctgagagcatcgccgcctttgccaaccgccgccaccgcggcgtgtcggtgctcagcgggagtggcattgtcgccaacgtcactctccgccagcccgccgccccggccggcgtcataa

SEQ ID NO: 170361 - DNA, 261 bp, Glycine max
gagctgcgaaaacccccaactccaacctctgttcatcgtctaccgcgctttcttttcaaccagaactatgattaagctttttaaagtaaaggaaaagcagagagaacttgcagaaaatgcaagtggcggaccacctgttaagaagcaaagtgctggagagttgcgtcttcacaaagatataagtgagctgaatctaccaaaatcatgtaccatgcaattccccaatggcaaagatgatctgatgaactttgaagtttcaat

SEQ ID NO: 170362 - DNA, 261 bp, Glycine max
ggatcttccccaagctttggaagatgagtatggtggtttcttaagctcccatatagtagatgattttcaagactatgcggatctttgctttaaggaatttggagatagggtgaagtcttggagtactttgaatgaaccatggttgttcagccagggtggctatgcaaccggagcgacggcaccaggaagatgtaccggtccacaatgcctcggtggtgatgctggcactgaaccttacatagttacacacaatcaaattct

SEQ ID NO: 170363 - DNA, 265 bp, Glycine max
tctgggcgaacaccactggactgggacagccgtatgaaaatagccctaggagccgcaagacggcttacatgcctccacgtggcaggcaaggtggtccacggcaacatcaaatcttccaacatcctcctccgagggccggaccacaatgccggcgtttctgacttcggcctcaaccccttgttcggaaacggagccccgtcgaaccgcgtggcgggctaccgggcacccgaagtggtggaaacccggaaggtgagttcaagtctga

SEQ ID NO: 170364 - DNA, 260 bp, Glycine max
gtctcgtttacacatctctccaacctttcactttcgtttctcagttttattcgaatccctctctcaatctcctttccaaatggccagcgttgaggttgcacagcaaacaccaacaacagttccagaaaatgaaacaaccgaggtaagcaagacccaggaaacaaccccagtcactgaggctcctgcaacagaacaaccagcagctgaggttcctgcaacagaacaaccagccgctgaggctcctgccccagaatcaacca

SEQ ID NO: 170365 - DNA, 261 bp, Glycine max
gaaagaattagcaaaagacaatgattcttcaaaggagaaaaatcaagttcaaccagggcttagtggtcctctgaaaaagagaattcagcagcttgttgactctaatcctgtcatgcttttcatgaaaggaactcctgaagagccaaaatgtggatttagcaggaaagttgttgttgtgttgaacgaagagagagtcaagtttggaagttttgatgtcctatcagactcagaggttcgtgaaggcttgaagaagttttccaa

SEQ ID NO: 170366 - DNA, 258 bp, Glycine max
aaaagattaacaataaaagtgtggagtactgttgatagcaaagatgtttgggatcttcgacaaggggcaaaagataaaggggacagtggtgttgatgccaaagaatgtgttggacttcaacgccataacctccatcggtaaaggtggtgttattgacacagccaccggcatcttaggccaaggcgtcagcttagttggtggagtaattgatactgccacttccttcttaggccgtaatatctccatgcaattgatcag

SEQ ID NO: 170367 - DNA, 254 bp, Glycine max
gctagctaggttgaaaatagtttggttttgtagtaagtgaggtgaggtgccaaaatggtgaagataactcttggtactttcgatgactcttttggtgttgcctctcttaaggcttatttggcagagttccatgcaactctgattttcgtgttcgctggtgttggttcagccatcgcttacaacgagcttacaaaagatgcagccttggatccaacggggctggtggcagtagctgtggcccatgcatttgcact

SEQ ID NO: 170368 - DNA, 254 bp, Glycine max
ttcacaatcactttttgcgcttctctcactcactcactcttcttcttcctcttcgtgtggttttctttctcgaactcgaacgaagatgcgtgagattcttcacatccagggagggcaatgcgggaaccagatcggagccaagttctgggaggtggtgtgcgcggagcacgggatcgattcaacggggaggtaccaaggggacaacgagttgcaactcgagcgagtcaacgtctactacaatgaagcgagttgcg

SEQ ID NO: 170369 - DNA, 265 bp, Glycine max
atagttttgaagagatatgcatcaagaaagaagcgtttgagggagaagagaagttttgtgcaaaatccttgggaacagtaattggttttgccatttcatagctgggaaagaacattcaagtactttcaagttcctttgtcaataagcaagagcaatacactgtggaaggactgcagaatcttggagacaaagcagtgatgtgtcatgggctaaatttcagaactgcagtattttactgccataaagtccgtgaaacaacagcttt

SEQ ID NO: 170370 - DNA, 268 bp, Glycine max
tccagttctctcttttccccatcacttcctatctgaggcaaaagaaagacactaaaaaaattatccacagcatcaaagttggaatctcccttgtattgatttcactcctgtacttcgtggatcctctctatgagcaagttggagataatgctatatgggctatcatgactgttgttgtcacttttgaattttctgcgggtatagagctacgctaggaaaaggtttaaatcgcggaatgggaaccatattaggaggtggactgggttgc

SEQ ID NO: 170371 - DNA, 260 bp, Glycine max
ctcttcttctcttgcggctagggttttagcgcacttcttctagatttaaggaagatgggtaaggaaaaggttcacatcagtattgtggtcattggccatgtcgactctgggaaatccactaccactggtcacctgatttacaagcttggaggcattgacaagcgtgttattgagaggtttgagaaggaagctgctgagatgaacaagaggtctttcaagtatgcctgggtgctggacaaacttaaggctgagcgtgaaag

SEQ ID NO: 170372 - DNA, 260 bp, Glycine max
gttgtgttgagcagagagagagagtgagggataagaagagaatagggttagggttagggtttgattgaggatgccgaagaacaagggaaagggaggtaagaacaggaagaggggaaagaacgaggcggacgacgagaagcgggagctggtgttcaaggaggacgggcaggagtacgcgcaggtgctccggatgctggggaacgggcggtgcgaggcgatgtgcatcgacgggacgaagaggctctgccacatccgcggga

SEQ ID NO: 170373 - DNA, 258 bp, Glycine max
ctttttgatcctcatagtggtgacaactatgatagggatgaggatcatctggcattgatgatggagcttcttgggatgatgcctcgcaagattgcacttggtggatgctattcccgagattttttcaacagatatggagatttgaggcacatccgtcggttgcgtttctggcctcttaataaggtgctgacagagaagtatgatttcagtgaacaagaagcaaataacatgaccgatttccttcttccattacttgat

SEQ ID NO: 170374 - DNA, 258 bp, Glycine max
ctacttggtagttggagtggtagcttttgctctactttgctcattcagagtttctttgacagattcagttccattattttcgcctgttcatgacgctgcttctttgactcgcaactctttccctgctggcttcatctttggggctggatcctcagcctaccagttcgaaggagcagcaaaggaaggtggaagaggaccaagcatatgggataccttcacacataaccatccagaaaagataagagatggagccaatgg

SEQ ID NO: 170375 - DNA, 259 bp, Glycine max
tcttgctagggttttaggaaaagacactgtctcgcgagtgaacacaggttacagcaatggctttctttggtagaattgggaatttattaagacagacagcaagcaggcaggttagttcagaattgcgatcatccccttcgttttttcaggctatacgcagtatgtcatctgctccaagcacaaagctgtttatcggaggtgtttcatattctactgacgagcaaagtttgagggaagctttttcaaaatatggtgaagt

SEQ ID NO: 170376 - DNA, 258 bp, Glycine max
ctctccgcatacactctgctcgtagggtttctccacctagagggacatggctcccaaaccgcctagtacgggtctgtttgttggactgaacaagggtcacgtcgtcaccaagaaggaattgcctccacgcccctcagatcgtaaggggaaaacaagcaagagggtgcactttgtgaggaacctcataagagaggtagccggttttgcaccctatgaaaagcgtataactgagttgctgaaggttgggaaggataagag

SEQ ID NO: 170377 - DNA, 254 bp, Glycine max
gagatagaccccagaagtggtttctgcagctccaattcaatcttctacagcaagcgtaagcccctcccactccctcccaacaacgccttcgacgtcaccaccttcatctcctcccgcgcccaccgcgccaccacagccttcgtcgacgccgccaccgcccgccgcctcacctacacccagctatggcgttccgtggagggcgtggcagcctctctctccgtggacatggggatccgaaagggcaacgtggtcct

SEQ ID NO: 170378 - DNA, 253 bp, Glycine max
gaaaaacatatcacacaatatggcattcaagggctatttccttctcggcctcgttactcttgttcttgttaaatcttccaaagttacatgcgaaacagaatcggttaatacagtttcacccattattgacatttcactcaatcggaagagcttcccagaagggttcatatttggggcgggatcttcctcgtaccagttcgaaggggcagcaaaggaaggtggtagaggaccaagtgtatgggataccttcacc

SEQ ID NO: 170379 - DNA, 252 bp, Glycine max
ttttggcacgaatcagacagaagcaaacacattgagagttgttggaacatatggctatatgtcccctgaatatgctatggatgggaacttctcagtgaaatctgatgtttttagctttggagttctagtgctggaaattataactgggaaaaaaaatagaggattctattactcaaatgaagatatgaatcttctagggaatgcatggaggcagtggagagatggcagtacattggaactcattgattcatc

SEQ ID NO: 170380 - DNA, 254 bp, Glycine max
agacacaaaaaaatggctagtggccgcaatttgaagaacgctgtgattgcattcttggttcctcttccctccatcttcttctacctctcattcctcaaccactacgactcagcaaaatccccatctttttggtcaactctatggtcatggtgctatcaccaccctcttctattagccaacgctctcttcttcctcaacgtcaatgtcctcttctggctcataggcctaatacaatccagccactggatgatcga

SEQ ID NO: 170381 - DNA, 257 bp, Glycine max
gaccagcaaagagaaagcctagtggaggcattgaaacactgcgtgcaataccttggatttttgcatggactcagacaaggtttcatcttccagtgtggctaggctttggagcagcatttaaagaagtcattgagaaaaatgttaacaatctcaatatgctgcaagagatgtacaatcaatggcctctctttagggtcacacttgatttggtggaaatggtgtttgccaaaggagatccgaaaattgctggtctgaat

SEQ ID NO: 170382 - DNA, 256 bp, Glycine max
ctgacgacagactgaagttgtttttctggggcaactaaggcatccacatctcgtgaagctgataggatactgctgtgaagaagaacacagggttttagtatatgaatatttaccaagaggaagcttggagaatcaattatttagaagattctcggcatcactttcatggtcaacgagaatgaaaattgctgttggagctgcgaagggtttagcatttcttcatgaagctgagaagccagtcatctatagagatttc

SEQ ID NO: 170383 - DNA, 255 bp, Glycine max
ttttaccttaaacaacaatggccgatgccgaggatattcaacccctcgtttgcgataatggaaccggaatggtcaaggctggttttgctggagatgatgcaccgagggctgtgttccctagcattgtggggcgtccacgtcacactggggtgatggttgggatggggcagaaggatgcgtatgttggggacgaggctcaatccaagaggggtattttgactctcaaatacccaattgagcatggaattgtgagca

SEQ ID NO: 170384 - DNA, 256 bp, Glycine max
ctcaaatctcttcgttccttcgattcgttccatttcttccaaaatggccaaagacccagttcgcgttctcgtcactggagctgcagggcaaattgggtatgctcttgtccctatgattgctaggggagtgatgttgggtcctgaccagcccgtgatcctccacatgcttgacattcctccggcagcagagtcattgaatggggttaaaatggaattggtggatgctgcattccctcttcttaaaggtgttgttgcc

SEQ ID NO: 170385 - DNA, 249 bp, Glycine max
acctacctctttttcttctctctcaacaacttcaccttcttcctcctcgatcatgtctcacttcaagggcaagtaccatgatgagcttatcgccaatgctgcgtacattggcactcctggaaagggtattcttgctgctgatgagtcaacagggacaattggcaagcgtttggccagcatcagtgtagagaacattgaatccaacaggcgagctcttagggagctgcttttcactgctcctggtgttct

SEQ ID NO: 170386 - DNA, 250 bp, Glycine max
cgattgctagaatggaatttcgatgctcagtcatctcttttaccattctcttctctcttgctcttgcaggagagagccatgtccatgcatcgctacctgaggaagattattgggaagctgtttggccaaacactcccattcccactgcactgcgagagcttctaaagcctctccctgcagctgttgaaatcgatgaactccctaagcaaattgatgatacacagtacccaaaaacattcttctataaaga

SEQ ID NO: 170387 - DNA, 250 bp, Glycine max
gtcgcgattgatcgattcagctacgtccgatgaagataaagtcgcacccgtttacaaattggaggaaatctgcgaacttttgcgctcttcgcatgttagtattgtgaaggaggtttccgagtttgtcttaaaacgtttggaacataaaagcccaattgttaaacagaaggctttaagattgataaagtatgcggttgggaagtctggtgtggagttcagaagggaaatgcagagacattcagtggcggtt

SEQ ID NO: 170388 - DNA, 253 bp, Glycine max
tgacttttcgagaaaggaaaaaaaaagagtttccggcattattccatcatgaacgctcttcccattcttctcttcttcctcttcgtttcggcattagtttatgcgaagaaaactggcgatgtgacggagttgcaaattggcgtgaagcataaaccagcatcatgtgaagttctggcacacaaaggtgacagagtcaaagtacactatcggggaaaactcactgatggaactgttttcgattctagctttgaaa

SEQ ID NO: 170389 - DNA, 254 bp, Glycine max
gtttcaaggggagttgagtgatgcttcggttgtggcggtgaagaggttggagaggccggggggtggggagaaggagttcagggctgaggtgtccacaattgggaacattcagcatgtgaatcttgtgaggctgagagggttttgctctgagaattctcataggcttttggtttatgagtatatgcagaacggtgcccttaatgtttatttgagaaaggaagggccttgtttgagttgggatgttaggtttaggg

SEQ ID NO: 170390 - DNA, 256 bp, Glycine max
gacaaccagagtcatccatggccaagcccaatccacacactgaagccccttctgcacctgagccacccaaagctgtaaagcgagagggcaatcgcaagggaacaacatcaagctctgagcaggaagcacccaaaacaccagatcctaagacactaagaagacttgctcagaatagagaagcagcaaggaaaagcaggctcaggaaaaaggcgtacgttcagcaactagagtcaagtaggattaagcttaatcagat

SEQ ID NO: 170391 - DNA, 254 bp, Glycine max
gtatcttgagtctgaagcagaagagttgaggaaatctaatttaagattgcagatagaaaattctgacttagctcgaagattggattctacccagatccttgcaaatgcatttctggaagacccagaggcaggtgctgtgaagcaagaaagtgagtgtcttaaacaagaaaatgtgcgcttgatgaaggaaattgagcaatttcagtctgatcgatgttcagatcttgaagaattggtatatctgcggtggataa

SEQ ID NO: 170392 - DNA, 254 bp, Glycine max
ctctttgcaacacaacaaaaaaagacaacacagagagaagcgtcttaataaacgctcttctctgaaaaacctgatttcttctcttcttctcttctctttcgtttcgatcttcgatctctgaaaatgagagagtgcatttcaatccacatcggtcaggccggtattcaggtcggaaacgcctgctgggagctctactgcctcgaacacggcattcagcctgatgggcagatgccaagtgataagacggttggtgg

SEQ ID NO: 170393 - DNA, 254 bp, Glycine max
ctttataccccccctctcttttttgcgttcattctgttttcctgatgaagtctttccctagccaatggccaccgatcgtttgacccgggttcacagtctccgtgagaggcttgatgaaaccctcactgccaacaggaatgaaattttggcccttctgtcaaggatcgaagccaagggcaagggcatcctgcaacaccaccaggtcattgctgagtttgaggaaatccctgaggagaacagacagaagctcactg

SEQ ID NO: 170394 - DNA, 254 bp, Glycine max
aatgtttttaggtcccggaaggactcagcaagcatgttgtgtcttctaagaaggctcaggctaattggtatagaaagttagtagatgcttggaaagaggcaaaacctcctcctaagacacctgaagaagcagctagacttgtcattcagaccttgagaagacatcaaaaagcagatgttgagggattgttggctttctatggtcttcctctaccacacacactggttcaaggaactacccaacccctttcatcc

SEQ ID NO: 170395 - DNA, 248 bp, Glycine max
tggtcgtccatttcctcctctatttaacttcaaacaggaattatctgaagcatctccagtgcttgttaacaaattgatacctgaccacgtgaagcggcaaatagggctgcaatttgttcctccagcaggatcatgatgatgagctttaggggggctttagtgtatactagttgatgagttaaacaaaagtgacaccgttatttttgtctaaattagcatgttctgtggcctgaccagtgtagtttcaa

SEQ ID NO: 170396 - DNA, 251 bp, Glycine max
cgcagtgcttttattcgcaccgcaaacagtgagccatggccgtcggaaagaacaagcgcatctccaaggggaagaagggtggcaagaagaaggcagctgatccctttgccaagaaggattggtatgacattaaggctccttctgtttttcaagtgaaaaatgttggcaaaaccctcgtctctcgtactcagggtaccaagattgcttctgaaggactcaagcatagagtgtttgaggtctccttggctgat

SEQ ID NO: 170397 - DNA, 249 bp, Glycine max
gggtgcccaaaattggggaatcaaatcgccggcctctagcaatgttgagaccaaatgcttcacttacttcagccctaaacttattagttcaagctcaagtaagttcaataccaatagttgatgatagtgactcattactggatatatattgtcgaagtgatataacagctttggcaaaggacagaacttacacacatattaatcttgatgaaatgactgttcatcaggcattgcaattgggccaggatt

SEQ ID NO: 170398 - DNA, 246 bp, Glycine max
attgtagaaggcgatggccgcgcgagctctgttgaccagaaaaaccctagccaccgtgctccgcaacgacgcgaagccataatcggagttggcataacagcagcggctactcattcacgctggttgcacgtgtacacgctacccgatctggattacgactatggcgcactggagccagccatcagcggcgacatcatgcagctgcaccaccagaagcaccaccagacttacatcaccaactacaac

SEQ ID NO: 170399 - DNA, 251 bp, Glycine max
ccactctcgcgtcgttaccatgccgcaaggggattacatagaacgccacagaagagactatggctaccgtctcgatcacttcgagcgtaacgcaagaaagaggcacgtcaagttcacaagcgctctgcaattgcccagaaggctctgggtattaagggcaaaatgattgccaagaaaaattatgctgaaaaggcgcagatgaagaagactttggctatgcatgaagaatcatcgtctaggcgcaagactga

SEQ ID NO: 170400 - DNA, 253 bp, Glycine max
actcgagccgaatcggctcgaggaaaagaaaatcctcaattttctacgcagccaaacactctctctctgtctctcgaaaattctcagtttgcagagaaaatctgaatcatgtcgtggcaagcgtatgtcgacgatcaccttctgtgtgacatcgaaggtaaccacctcactcacgctgctatcatcggccaagacggcagcgtttgggctcagagtaccgacttccctcagttcaaacctgaggagataactg

SEQ ID NO: 170401 - DNA, 251 bp, Glycine max
gcaagaatggcacttcgttgcttggtgatgtccctttctgttctcttcactcttggtcttgcgagagaaagccatgccagagacgaagatttttggcatgctgtttggccaaacactcccattccaagttcattgcgagatcttctaaagcctggccctgcaagtgttgaaatcgatgatcaccctatgcaaattgaagaaacacagtacccgaaaaccttcttctataaagaagaccttcatccaggcaa

SEQ ID NO: 170402 - DNA, 250 bp, Glycine max
gaacagcctctggtcgatggaacaatgtaggcaagggaagtcggcaaaatggatccgtaacctcgggaaaaggattggctctgagggctgggcacgggggtcccagtcccgaacccgtcggctgtcggtggactgctcgagctgcttccgcggcgagagcgggtcgtcgcgtgccggtcgggggacggattgggaacgggcccttcggggcctcttccccgggcgtcgaacagtcaactcagaactggta

SEQ ID NO: 170403 - DNA, 251 bp, Glycine max
gcctctttcaagaagcatctgagtgtttattattcgtaatatatagtcactcaagcttctaggatttctgccagctacatgaaaatgggaagcaacttgaggtttttgagtctttgcctcttggcattgattgcatcaactcatgcccaacttcagcttggtttttatgcccagagctgcccaaaagctgagaaaatcattttgaaatttgttcatgagcatatccacaatgctccatcactagcagctgc

SEQ ID NO: 170404 - DNA, 248 bp, Glycine max
ctaatccctctttcttcctcttcctcagtagtgcgattttcgattctcttctctgcaactatgcctaaccctaaggtcttcttcgacatgaccatcggcggtcaacctgccggccgcatcgtgatggagctctatgccgacgtgactcccagcaccgccgagaacttccgcgcgctctgcaccggcgagaagggcgccgggcggagcggcaagcccctccactacaaaggctcgtccttccaccgcgt

SEQ ID NO: 170405 - DNA, 247 bp, Glycine max
attcattcaagattcagcaagtgcgttttggaagcagagaccgaaatacttcgagatggcccgtacaaagcaaactgctcgtaagtcaactggaggaaaagctcccaggaagcagcttgcaaccaaggctgcacgtaagtctgcaccaacaactggtggtgtgaagaagcctcatcgttatcgccctggaactgttgctcttcgtgagattaggaaataccagaagagcactgagctcctaatcagg

SEQ ID NO: 170406 - DNA, 250 bp, Glycine max
ggaaaccctagctggataggtcaaacatcatcatgtcggacgaagagcaccatttcgagtccaaggcagacgccggtgcctccaaaacctaccctcagcaagccggtaccattcgcaagaacggctacatcgtcatcaaaggacgcccctgcacggttgtcgaagtctcgacttccaaaactggaaagctcggtcacgccaagttccacttttttggaattgatattttcactgccaagatacttgagga

SEQ ID NO: 170407 - DNA, 247 bp, Glycine max
attcaatggtctcgttgatgtctacaggaagacattggcatctgatggtgttgccgggctctaccgtggtttcaacatctcatgtgttggaatcatcgtgtatcgtggtctgtactttggattgtatgattctgttaaaccagttgtcctcacagggtcattgcaggatagcttttttgccagctttgcccttggatggctcatcaccaatggtgcaggtcttgcatcatacccaatagacactgtt

SEQ ID NO: 170408 - DNA, 250 bp, Glycine max
gagagacccttttccttctctctggctttcctttgacgcttctgacactgctccttttctttctctccgtgtcctaatggctctccccgactcttcttcctgccgcaactccctgatcccctccttcatctactcctcttcctccaaaacgctccctctacaccacatgctcaactccgcctccgccgccgccccctcccagccgccggaaaacctccacgccggatcgcgcggcctcatgattccctct

SEQ ID NO: 170409 - DNA, 249 bp, Glycine max
tttacgtattgaatctcagaattctctaaaagagatctttttctgcactttgaagaaagaagggtctttgcttgattttggagatgtctctgctctcagatctcatcaaccttaacctctccgataccaccgagaaggtgatcgcagagtacatatggatcggtggatcaggaatggacctgaggagcaaagcaaggactctcccaggaccagttagcgacccttcagagcttcccaagtggaactatg

SEQ ID NO: 170410 - DNA, 249 bp, Glycine max
tctgtttctgtctctgtgtttgcggctgaggattccgaacgagcgaccttcttcgtttctcgcaaagtttaagtcctcatgggtaaggaaaagactcacatcaacattgtcgtcattggacatgtcgactctgggaagtcaactaccactggtcatttgatctacaagcttggaggtattgacaagcgtgtgattgagaggttcgagaaggaggctgctgagatgaacaagaggtcattcaagtatgcc

SEQ ID NO: 170411 - DNA, 245 bp, Glycine max
caagcaacttaattccagaggctcctcctcctagcaaagctgatgaagacagtaagattaaagcctttcttgatactccagccttggactggcaacgtcaaggttcagactttggcactggtagaggctttggaaggggtacagggggacggatgggtggtggacgtggttttgggatggagcggaaaacacccccacaaggctatgtatgtcacagatgcaaggtgcctggacattttattcag

SEQ ID NO: 170412 - DNA, 258 bp, Glycine max
ggagtgtgcaaaagagcgtcgtagtcgcaaccctaatcagaagaagcgcacttcaagcgagtgacagccaccagccatgggtcgtatgcacagccgcggtaagggtatatcctcttctgctttgccctacaaaaggacacctcctagctggctcaagatctcttcgcaagatgtcgaagaaaatatctgcaagtttgcgaagaaaggtttgaccccgtctcagattggtgtcattctcagagattctcacggtattgc

SEQ ID NO: 170413 - DNA, 241 bp, Glycine max
tgttaatttgtctttctctatctctatcggtcatgggtgcttttgcttttgatgaggaaaactcctccaccgtggctccggcaacactctacaaagctctgacaaaagatgctgacactatcatcccaaagattattggggccatccaaactattgaaatcgttgaaggaaatggaggacccggaaccgtcaagaagataacagctagtgaaggtgaccaaaccagtttcgtgctgcaaaa

SEQ ID NO: 170414 - DNA, 243 bp, Glycine max
gattgctagaatggaatttcgatgctcagtcatctcttttaccattctcttctctcttgctcttgcaggagagagccatgtccatgcatcgctacctgaggaagattattgggaagctgtttggccaaacactcccattcccactgcactgcgagagcttctaaagcctctccctgcaggtgatgaaatcgatgaactccctaagcaaattgatgatacacagtacccaaaaacattcttcta

SEQ ID NO: 170415 - DNA, 247 bp, Glycine max
attctcagtctctgcacacacctcagaagaacagaacagaaccaccagtgcttttcaaaaacggtttcagcaatggcgttcttaaataaaattggaaatctggtcaagaattctgctgtcaagcacatcaatcaagatttttcggtgtctaccccatcacttttccaagcaattagatccatgtcatctgcaaagctttttgtcggaggtatttcttacagcactgatgatatgagtttgcgagagt

SEQ ID NO: 170416 - DNA, 248 bp, Glycine max
ccgacgaagccaaagccaaaggcaacgcagccttctcctccggggactatcctgccgccatccaccacttctccgatgccatcgccctggctccctccaaccatgtcctctattccaaccgatccgccgcatacgcctccctcaaaaactacgcagatgcattagcggatgccaaaaagacagttgaactcaagcccgactggtccaagggttacagccgtctcggtgccgcgcatcttggcctttcc

SEQ ID NO: 170417 - DNA, 245 bp, Glycine max
ctaatttctctcgttgtcatattctagtttcaacttatggagtttacctctaataatatgcttccttttgtttcaatgttttggcttgtgttcctaagtcctttagtgaactgtcaactttattataatttctatgactcaacttgtccaaacctgaccggaattgttcgatccaacgtgtggtcagctatggccaaggatgcaagaattgctgcttctctcttgcgccttcatttccatgattg

SEQ ID NO: 170418 - DNA, 245 bp, Glycine max
cgaaaaaagacttgagatatcattttttgaaaatggtgtgtttgctgaccccggaggattaggcctccgagcattgtccaaagaccaattggacgagattcttaaaccagcagagtgcactattgttgcatcactttcaaatgattatgttgactcttatgttctgtcagagtcaagcctgttcgtctatccttataaaattatcatcaaaacttgtgggactaccaaattgcttctgtccatcc

SEQ ID NO: 170419 - DNA, 247 bp, Glycine max
atcgtaagcagcggctaccctaatcctctcctcttcctctctactaatttcagctatggccgacgaagctgtggttgttccagatcccacccagatcgatgtcaagctctttaaccgctggagcttcgacgatattgagattactgacatttctctggctgattatatcggagtggcgacatccaagcacgccacgtatgtgcctcacaccgccggcaggtactcggtgaagcggttcaggaaggcg

SEQ ID NO: 170420 - DNA, 244 bp, Glycine max
cttaacaacagcacaaagcgggttactgtctgttcaagctaccatctctctctctctttcttagtgcctccttgccagaagttaaaatggcccaagaaactttcctattcacatctgaatcagtgaacgaggggcaccctgacaagctctgtgaccagatctccgatgctgtgctcgatgcatgcttggagcaggaccctgacagcaaggttgcctgccaaacctgcaccaagaccaacatggt

SEQ ID NO: 170421 - DNA, 238 bp, Glycine max
gcggcactacttcggctccatcttcttcgatctctcaaactctatcggcgcagaaccaatcctatatcactatggggaagacacatggaatgggagctgcccgcaagctgaagtctcaccgtaggagacaaaggtgggctgacaagtcatacaaaaagtctcatcttggaaatgaatggaagaagccttttgctggttcatcccatgcaaagggtattgttcttgaaaagataggtat

SEQ ID NO: 170422 - DNA, 207 bp, Glycine max
cgagctggagatgatttgcagacagaggttatcatcaaccatcaagctctttcacgtcttctgaatctcttgactaataattatagaaaaagcataaagaaggaagcatgctggaccatatcaaacatcacagctgggaacaaaaagcagattcaggatgtaattgaggctagtataattgctcctttagtccatttgcttcaaaat

SEQ ID NO: 170423 - DNA, 211 bp, Glycine max
cggctcgagccctcattcttattttcttcctctcttcactttcactctctctctctctcagccatcatcatgggagcagtgattctcccagatctcggcaccgagattttgattccggtctgcgtcatcattggaatagggtttcccctcttccagtgggtcctcgtctccaaggttaagctctccgctgccagagacgcttcccctaacg

SEQ ID NO: 170424 - DNA, 214 bp, Glycine max
tcggctcgagcggctcgaggttctgaactttctgaattcttcactttgatcatcatcttcttcaattccagcaaggatgtcacagcaaggcgaatcatcggacccgaaatcggggaagaaggacttctcgaccgcgattctggaacgcaaaaagtcgccgaaccggcttgttgtggatgaggctgtcaacgacgacaactccgtagtgaccatg

SEQ ID NO: 170425 - DNA, 212 bp, Glycine max
ttcggctcgaggcggctgctacttcggctccatcttctccgatctcctcaaactctatcagcgcagaaccaagcctctatcaccatggggaagacacatggaatgggagctgcccgcaagctgaagtctcaccgtaggagacaaaggtgggctgacaagtcatacaaaaagtctcatctgggaaatgaatggaagaagccttttgctggttc

SEQ ID NO: 170426 - DNA, 210 bp, Glycine max
ttcggctcgagtcccttttctatctccctctgcaaaaacgaagtaaatgggtcggcttaatctcctacttgtgtggtcactctctttaacacttttccttaattatctacacccaacctctgcccagctcagtccaaaccactatgctaacatatgccccaaccttgaaagcatcgttagacaagccgttactaataagttccaacaaac

SEQ ID NO: 170427 - DNA, 213 bp, Glycine max
attcggctcgagcgcgtatttagtcctccacctccaaattgtagacgaatcattgttgcaacaaatattgctgaaacttccttgactgttgatggtgtagtgtatgttattgactctgggtatgtgaagcaaaggcagtataatccatctagtggcatgtattctcttgatgttgttcaaattagcaaagtgcaagctaaccagcgagcaggc

SEQ ID NO: 170428 - DNA, 212 bp, Glycine max
ttcggctcgagcaagaacccaagaggcattacccttcttcagaggatgggaattggccttgtaatccacacattgatcatgatcattgcatctgggactgaaagctatagactcaaggttgcaagagaacatggcgtggttgaaagtggagggcaagttcctttgagcatattcattttgcttcctcagtttatacttatgggaactgctga

SEQ ID NO: 170429 - DNA, 198 bp, Glycine max
gggccacaggagtcgcctcgtgtttccgtttccgtttcaatttcctctcacaggctttaaccttaccagctcgagataagacatggaccggatcaaaggcccatggagtccggaggaggacgaggctctgcagaagctggtggagaaacacgggcccaggaactggtctctgatcagcaagtccatcccgggccggtc

SEQ ID NO: 170430 - DNA, 197 bp, Glycine max
gtgctataatggctgagcttttctctcttcgtcctcttttcccaggtgccagtcaagcggatgagatttacaaaatatgtggtgtgataggcaatccaacctttgaatcatgggcggatggactcaaacttgcaagggatattaactaccagtttccacagcttgccggtgtgcatctttctgctttgattccgtct

SEQ ID NO: 170431 - DNA, 196 bp, Glycine max
ctgaagagtaattggtggattccagcaatggccgtggttcatggcagttgggtcaagcttgatcaaagaggagaagggcaaggagcgagaagctcacatgctatagccatagtagcacagaaggtgtatgcatttggtggcgaattcgtgccacgtgtccccgttgataacaaacttcacgtgttcgacctagaga

SEQ ID NO: 170432 - DNA, 198 bp, Glycine max
cacaaactagtaatattattcttcgaatccattttattattcataatgggtattttcacatttgaggatgaaaccacctcccctgtggctcctgctaccctttacaaagctctagttacagatgccgacaacgtcatcccaaaggctgtcgaagccttcaggagtgttgaaaaccttgaggggaacggtggccctgga

SEQ ID NO: 170433 - DNA, 197 bp, Glycine max
tccgggttcacgtttcacaatcactttttgcgcttctctcactcactcactcttcttcttcctcttcgtgtggttttctttctcgaactcgaacgaagatgcgtgagattcttcacatccagggagggcaatgcgggaaccagatcggagccaagttctgggaggtggtgtgcgcggagacgggatcgattcaacgg

SEQ ID NO: 170434 - DNA, 197 bp, Glycine max
gagtgcggtaggctcatccgagaccggaagcagcaatggggatcgatctcaaggccggaggtaaaagcaaaaaaaccaaaagaacagcacccaagtccaatgatatctatcttaagctcttggtcaagctttatcgcttccttgttcggagaactggcagcaaattcaatgccgttatactcaagagattgttcatg

SEQ ID NO: 170435 - DNA, 191 bp, Glycine max
tctggctgtgttaatatgcgtttcagcactgtcactgagtcctctgttgcgggggaagggcaaaataatggccttgttatgaacttctacaaggaatcatgccctcaggctgaagacatcatcacagaacaagtcaagcttctctacaagcgccacaagaacactgctttctcctggctcaggaacatctt

SEQ ID NO: 170436 - DNA, 196 bp, Glycine max
cctcgagccgaatcggctcgagtaccacaccaaaatcaatctgcggcgtcagaaagccatggacccctacaagaatcggccatcaagcgccttcaattctcccttctggactacaaattccggtgctcccatctggaacaataactcatcgctgactgttggatctagaggtccaattctgctggaggattaccat

SEQ ID NO: 170437 - DNA, 196 bp, Glycine max
cattttcagaggaacaatggcgggtagggtttcgacgtgcttcttcttcgtgtttgctctttctctccttcttccttttcagatctccgtcgaggaatcatcggagaaagagttcgtactcacattggatcactctaactttcacgacactgtcagcaagcacgatttcatcgtcgtcgagttctacgctccatgg

SEQ ID NO: 170438 - DNA, 195 bp, Glycine max
tccagggaatatttatttcaagtactggagatcaggcacagtcaatgagtggaaatggcgctatggcatttgatgtagagtacgcacgatggttagaagagcataatagacaaaccaatgagctaagggcctgcaataaattctcatgctggagatattgaacttcgaaccattgttgacaatttcatgacgcag

SEQ ID NO: 170439 - DNA, 193 bp, Glycine max
ctcattaattgcaagaatggcacttcgttgcttggtgatgtccctttctgttctcttcactcttggtcttgcgagagaaagccatgccagagacgaagatttttggcatgctgtttggccaaacactcccattccaagttcattgcgagatcttctaaagcctggccctgcaagtgttgaaatcgatgatcac

SEQ ID NO: 170440 - DNA, 193 bp, Glycine max
gattatcctaagtctttgggaatagtgctgcaatggcttcaagtcaggaggaggtgacccttttgggagctactggaagcccatttgtgtgcagggttcatattgccctcaagttgaagggagttgaatacaaatatgtcgaagaaaatttgaggaacaagagtgaactgcttctcaaatccaacccagttca

SEQ ID NO: 170441 - DNA, 193 bp, Glycine max
caaaaacattcttctataaagaagaccttcatccaggcaaaacaatgaaagtacaattcaccaagcgtccctatgcacaaccttatggtgtatatacatggttaacggatattaaagacacctctaaagaaggatatagttttgaagagatatgcatcaagaaagaagcgtttgagggagaagagaagttttg

SEQ ID NO: 170442 - DNA, 192 bp, Glycine max
caaggcgcttggagtggataccgttccggtcctcgttggccctgttacatacctgttgctctccaagcctgccaagggagttgagaaatccttttctctcctctctctccttcccaaggttcttgctgtctacaaggaagttattgctgaccttaaggcagctggtgcttcatggattcagtttgatgagcc

SEQ ID NO: 170443 - DNA, 218 bp, Glycine max
tcggctcgagccaaatctccgctcgagctcacagtgagaaagagagagagagagagagaaactgagagaaattcgcaaaccctaatttcggaaagatcggcgatggctgcctccaaggatcgcgagaacttcgtctacatcgccaagctcgccgaacaggccgagcgatacgaagagatggtggaatcaatgaagaacgttgcgaatctcgacgttga

SEQ ID NO: 170444 - DNA, 190 bp, Glycine max
gtttctgcagcagttgagaggaggcactgtggcagaagtcctaggagtgtaaaacagagacgcaaaatgaagacgatcttgtcgtctgagaccatgaatattcccgacggcgtgagcatcaaggttcacgctaaggttatcgaggttgagggccctcgtggaaaactcgtgcgagacttccaccatctga

SEQ ID NO: 170445 - DNA, 189 bp, Glycine max
gcacaatgttggtgccaccatggcttgagccactcctaaacacatccttcttcaatgtgtgtcggattcacggagatgccgcgaggagcgaatgtaacatgttttgtctcgactgcaatgagaatgcgttttgcttctattgccgttcctcaaaacacaaggatcaccaagtcattcagatacggagat

SEQ ID NO: 170446 - DNA, 203 bp, Glycine max
ctggcttccacattgacccttaccatggtgaccgtgctgctgatctccttgttgacttctttgagaagtgcaagcttgacccaactcactgggacaagatctcaaaggctggtctccagcgtattgaagagaagtacacatggcaaatttactctcagaggcttctcactctcaccggtgtctatggcttctggaagcatgtg

SEQ ID NO: 170447 - DNA, 192 bp, Glycine max
cccatttcctctcagaaccctcgatcactcccacgcgctcctatatcctctccttcaccgtcgctctctccaacgatcacaacaacatcgtcatcccatggcaaacgccgcatctggtatggcagtccatgatgactgcaagttaaggtttttggagctgaagacaaagaggacacaccgtttcatagtttt

SEQ ID NO: 170448 - DNA, 192 bp, Glycine max
aacaacaacgacaacatcgccgtgacagatctcacttccgccctcaatgaagagaatcgcgccgacctagtcaatgctctcaagagcaagattcagagtctggctggggctcattctgatgttctggagactctatcccccaatgtcaggaagcgtgttgaatctcttagagagattcagggtaaacatgat

SEQ ID NO: 170449 - DNA, 189 bp, Glycine max
actttctgcgcttcttggcggcgacgcggcggcggcggcgtcttcgccggagagttctacttctagagtctcctccttccactcgtcgccgcgctggcagctctacttcaacgagatcaaagataccgataagctcgttgtgatagatttctcggcgtcgtggtgcggtccttgcaaattcatagagcc

SEQ ID NO: 170450 - DNA, 187 bp, Glycine max
accctcttctctctctctctctcggatttcttgcgcggtttatcatgggggatagtcagtattcgttttctctcaccacatttagcccttctggaaagcttgttcagattgagcatgctttgacggctgtcgggtctggacaaacgtctttgggaattaaagctgcaaatggagttgtcattgctac

SEQ ID NO: 170451 - DNA, 191 bp, Glycine max
ctctgtttctgtctctgtgtttgcgcgctgaggattccgaacgagcgaccttcttcgtttctcgcaaagtttaagtcctcatgggtaaggaaaagactcacatcaacattgtcgtcattggacatgtcgactctgggaagtcaactaccactggtcatttgatctacaagcttggaggtattgacaagcgt

SEQ ID NO: 170452 - DNA, 190 bp, Glycine max
cgtgtaccctcctgagaatcagacgcagttcgccatggcatattacgtcatcaactattccaagctacgtatttgggagtttgtggagttcagcaagatgatatacctagacggtgatatacaagtgtttgacaatattgaccacttgtttgacttgcctgataactacttttatgcggtgatggactgt

SEQ ID NO: 170453 - DNA, 190 bp, Glycine max
gttcgtcaccatgacttttaagcgcaggaatggaggtcgcaacaaacacggccgtggccacgtcaagttcattcgatgctccaactgcggcaaatgctgtcctaaggacaaggctatcaagaggtttctggtgaggaacattgttgaacaggctgcagtcagagatgttcaggaggcttgtgtctatgaa

SEQ ID NO: 170454 - DNA, 190 bp, Glycine max
gcacagcagaactctgcttcttcggattccgatcgcacgcgccgtcaccatggtgaacgttccgaaaacaaagaagacatactgcaagagtaaggagtgcaggaagcacacgctgcacaaggttacccaatacaagaagggtaaggatagcattgctgcccaaggaaaacgccgttatgatcgcaaacaa

SEQ ID NO: 170455 - DNA, 189 bp, Glycine max
ggaggatggaacactacatcgtttccaagctgcttcaacaattttggccacagggggtcatggtagagcatacttctctgcaacctcagcacatacttgtactggagatgggaatgccatggttgcacgtgctgggatccctcttgaggatttggagtttgtacaatttcacccaaccggtatatatgg

SEQ ID NO: 170456 - DNA, 193 bp, Glycine max
agcgatcgtgctcctgttcacggtctttgccgtttcctccgccctagacatgtcgataatctcgtacgacagcgcccacgcggacaaggccgccacgttgcgcaccgatgaggagctgatgtccatgtacgagcagtggctcgtgaagcacgggaaggtgtacaacgcgctcggcgagaaggagaagcgcttc

SEQ ID NO: 170457 - DNA, 189 bp, Glycine max
aaaagattgatgactgatgtgccttttggtgttctactctctggaggtttggactcttcattggttgcatccgtcacttctcgctacttggccaacacaaaggctgctgagcagtggggatcaaagttacattcattctgtgtaggccttgagggctcaccagatttgaaggctgcaaaagaagttgct

SEQ ID NO: 170458 - DNA, 189 bp, Glycine max
cgattgctagaatggaatttcgatgctcagtcatctcttttaccattctcttctctcttgctcttgcaggagagagccatgtccatgcatcgctacctgaggaagattattgggaagctgtttggccaaacactcccattcccactgcactgcgagagcttctaaagcctctccctgcaggtgttgaaa

SEQ ID NO: 170459 - DNA, 187 bp, Glycine max
cgccgcctcccctccctccgcgcctcctcctccccggaaatcctggtctccgacaacaacggtgccccctcgccgcccccctccgatccgagctccatcgaggtggacgccgtcacggaggccgagctcaaggagaacggcttccgcagcacgcgcaggaccaagctcgtctgcactgtgggccccg

SEQ ID NO: 170460 - DNA, 188 bp, Glycine max
cagttggaaaaaaaaaaaaagttgttcgagatggcacgtacgaagcaaactgctcgtaagtccacaggaggaaaggcacctaggaagcagctcgcaaccaaggctgcacgtaagtctgcaccaactactggtggtgtgaagaagccacatcgttatcgtcctggtaccgttgctcttcgtgagattag

SEQ ID NO: 170461 - DNA, 186 bp, Glycine max
agctactgagaattctgcttatcttgatatgcttcggttgtttgcacatggaacatggagtgattacaagagtaatgctgaccgtcttccacaattgatatctgatcagatcctcaagcttaagcaacttacagttcttacactggctgagacatacaaggtactaccctatgaccaactgaagca

SEQ ID NO: 170462 - DNA, 187 bp, Glycine max
actcgagcgattcggctcgagatcgggcgactgacacagtaaacaaaggagctggaaagctgaagctggtggttgttacagaaggccagggtgaggagactgaattcgaggtttttaacttcactggtgaagggggtgtttcattggctatgtacaatactgatgagtctattcgttcttttgctga

SEQ ID NO: 170463 - DNA, 190 bp, Glycine max
gaaaacagctgtagcaaatataccatatggtggtgccaaaggagggatagggtgtgacccagcagaattaagtatatctgaattagaaagacttactagagtttttacacaaaaaattcatgatttgattggaactcacacagatgtgccagcacctgatatgggaacaggaccacagaccatggcatgg

SEQ ID NO: 170464 - DNA, 190 bp, Glycine max
attgaatctcagaattctctaaaagagatctttttctgctctttgaagaaagaagggtctttgcttgattttggagatgtctctgctctcagatctcatcaaccttaacctctccgataccaccgagaaggtgatcgcagagtacatatggatcggtggatcaggaatggacctgaggagcaaagcaagg

SEQ ID NO: 170465 - DNA, 189 bp, Glycine max
caacgttcgaggtgctgacgtcatacgtctggcgctgccgcacgaaagcgcttcaaatccctccaaatgaagatgtgagaatgatgtgcatcgtcgacgcgcgtggaaagttcgatcctcccttcccggcggggttctacggcagctgcttcgcgtttccggcggcggtgacgggcgccggagatctct

SEQ ID NO: 170466 - DNA, 186 bp, Glycine max
cttagaattaagttagtagcgaggaagaaaaatgaaggttgtatacctcttcgttgtgctgatggctttggcatcatctgttgcctttgcttatgatccaagccccctgcaagacttttgtgtcgctatcaatgacaccaaagctggtggtctatacggtgtgttcgtgaatggaaaattttgcaa

SEQ ID NO: 170467 - DNA, 184 bp, Glycine max
cctttgttcactcttcttctcttgcggctagggttttagcgcacttcttctagatttaaggaagatgggtaaggaaaaggttcacatcagtattgtggtcattggccatgtcgactctgggaaatccactaccactggtcacctgatttacaagcttggaggcattgacaagcgtgttattgag

SEQ ID NO: 170468 - DNA, 185 bp, Glycine max
gttagtagcgagagagggagaaatgaaggttgtttacttcttcgttgtgctattggctttggcatcctccattgcctttgcttatgatccaagccccctgcaagacttttgtgtggctatcaatgataccaaaactggtgtgttcgtgaatggaaaattttgcaaggatccaaagcttgctaagg

SEQ ID NO: 170469 - DNA, 189 bp, Glycine max
tcgaatcgagcgaatcggctcgagcccgtttgcgttgttgtttgcgcataaatggcgactaacaggagcgtgggaacgttgacaggagggtgatttgaaggggaagagggtattcgtgagggtcgatctgaacgtgcctttggatgacaaccttaacatcaccgatgacactagagtccgtgctgctgt

SEQ ID NO: 170470 - DNA, 186 bp, Glycine max
ctggtcaatgcagatggtattatagagaaaacattcttgtggggtaggtactctatggaaatgtccgctgtcatttacaaggactgggttttcactgatcaagcattacctaatgatcttgtaaagagaggagttgctgttaaggacccatctgctccccatggagttcgtcttttgattgaggac

SEQ ID NO: 170471 - DNA, 186 bp, Glycine max
tcgtgccttatcgctgtggttttcatcgtcttccttctcttatatttcttctccctcctgtctccgccgtacgccgaaacaatggccgtaaaaggagagggccctgctctcggaatcgatctcggaaccacctacccttgtgtcggtgtgtggcaacatgaccgagttgacatcatcgccaacgac

SEQ ID NO: 170472 - DNA, 186 bp, Glycine max
ggaaatcttccgcagtgatggggaaagtgtccttcaatttccaccacctcatgtagtccaagttagtaaatctgcatggatgactgatgatgaatttgcaagagagatgattgctggtgtaaacccaaatgtaatccgccttcttaaagagatcccaccacaaagcaagctggaccccactctcta

SEQ ID NO: 170473 - DNA, 185 bp, Glycine max
ccttgatctaagttctgtttccaccatggatcttcaaaccctctacttcacatccattttatccattttcatttttatgtttttggggcacaaaataattacaaagaaacctacctcaactccaaatttaccaccagggccttggaagatacctatcatagggaacatacacaacgttgttggct

SEQ ID NO: 170474 - DNA, 184 bp, Glycine max
ctcttctccatcgcgcgtaagaaacacattttagttgctactaatgggaactgttgaagctgcaaacaaggatgcaaatggaagtctcctagagaaaaatccttcagttgtttttgtgttaggtggcccaggaagtggaaagggtacccaatgtgcaaatattgtccaaaattttgggtatact

SEQ ID NO: 170475 - DNA, 184 bp, Glycine max
gtctaggggaagcttatatgactttctgcacaaacaaagaggtgtatttaagcttccatctttgctaaaagtagcaattgatgtttccaagggaatgaactatttgcaccaaaataatataattcacagggacctcaagactgccaatcttctgatggatgaaaatgaagtggtcaaggttgct

SEQ ID NO: 170476 - DNA, 184 bp, Glycine max
ctctttctccgagaacaaaaaaaaaaacgtgattcgctcttctcttcgaataaaccacaaaaccagcaaacgagacgaggactgagataagatggggttgtcgttcacgaagctgttcagcaggttgtttgcgaagaaggaaatcaggattctgatggtaggtctcgatgctgctggtaagaca

SEQ ID NO: 170477 - DNA, 187 bp, Glycine max
cttattctatagggctatattccttcgctgaagggtttaatttgcgccatggcttctctcttcgcgagaaccaagaggttctcatggactactcttctgcttcttctggagctattcacaatagtccttcacacggcagatgctcaaattggtgtttgttatggtatgatgggcaacaatctaccac

SEQ ID NO: 170478 - DNA, 187 bp, Glycine max
cgttgccattctcatcctcttctttctctctctaccattgccatggatccctacaagcaccggccatccagcgccttcaattctcccttctggactacaaattctggtgctcctatttggaacaacaactcctctttaaccgttggagctagaggtccaattctgctggaggattatcatcttgtgg

SEQ ID NO: 170479 - DNA, 183 bp, Glycine max
caccgattgctagaatggaatttcgatgctcagtcatctcttttaccattctcttctctcttgctcttgcaggagagagccatgtccatgcatcgctacctgaggaagattattgggaagctgtttggccaaacactcccattcccactgcactgcgagagcttctaaagcctctccctgcag

SEQ ID NO: 170480 - DNA, 181 bp, Glycine max
ggcgcgggtcgaattgggaagcttttgctccagaggctgaagccttttaactgtaatcttctgcactatgatagacttaggatgaatactgatttggagaaagagattggagcaaagtttgaggaggaccttgatgcaatgcttccaaagtgtgatgtaattgttatcaacatgcctctta

SEQ ID NO: 170481 - DNA, 183 bp, Glycine max
aaagaggagaaggtatagactatagagagagagagagagagagatctgatccggagcgatgagtgagagtgagaagcagagagtaacggggaaggtgaagtggttcgatgaccagaagggttttggcttcataaccaccgacgacagcggcgaggaattcttcgtccaccagtcctccatccg

SEQ ID NO: 170482 - DNA, 180 bp, Glycine max
gcacaacacacggagaaagtgagaatggagttggaggagcagcgagtgaggcaatcaagaatgttgatagcggcgattcaagaagccgtggcgaagaaactgaaggagaaggacgaggagattcagcgcgtggggaagctgaattgggttctgcaggaacgagttaagaacctctgcgtg

SEQ ID NO: 170483 - DNA, 181 bp, Glycine max
caggttggttgctccatatacacctcctcatgtaagtcaccatgcgagaaagtagtcttcacatccaattgaaacaaaggccaatgatgtgtagcagcaagagagataagaatacgaaaggaggaaagcttagcaacaagggaaaaagtatcagtataatcaactccataagtttgagcat

SEQ ID NO: 170484 - DNA, 177 bp, Glycine max
aaattgagctctttgagggccaatctcttctgtacatgcagctatatgggcacctaagacctatgtgtcttaagtgggctgttcaactaggtattccagacataatacagaaacatgccaaacccatttctctttctgacttggtctctactcttcaaattccaccagctaacgctg

SEQ ID NO: 170485 - DNA, 183 bp, Glycine max
tttagcaccaaagaggccaaatatcccaacggaaatcgctctaacagagccacaaattcgggttattggaaggcaactggcttggacaaacaaattgttacttcaaaagggaaccaagttgtggggatgaagaagacacttgttttctacagaggcaagcctcctcatggatccagaactgat

SEQ ID NO: 170486 - DNA, 251 bp, Glycine max
caacatccaaggaaaaccagttgtcactgcaacccagatgttggagtcaatgatcaaatctcccaggccaaccagggccgaagctactgatgttgccaatgcagttctggatggcacagactgtgtgatgcttagtggtgaaaccgctgctggagcctatccagaccttgctgttcaaacaatggctaaaatatgcattgaagcagagagcacccttgactatggtgatgtgttcaaaaggattatggagc

SEQ ID NO: 170487 - DNA, 235 bp, Glycine max
agagatatcgaggatggctctacccacagctaaggagatcgtgtcgtccaattccgtcgtcgttttcagcaaaacctattgccctttctgcgtcgatgtgaagaagctcttcggtgacctcggtgccaattacaaggccatcgaactcgacactgaatccgatggaaaagagctccaagcagcattagttgagtggacgggccagcgaaccgtgcctaatgtgtttattggtgga

SEQ ID NO: 170488 - DNA, 238 bp, Glycine max
gagagagagagaggcgcgaaaatgagcggacgtaggggaagaagaagggagcgagctttgtgatcgattgcgcgaagcggtggaggataaaattatggacattgcttctctggagaagttccttcaggagaggattaaggttggcggcaaggccggtgcactcggcgattccattactgtcactatggacaagagcaagatcaccgtcacctccgacagcaacttctctaaacggtat

SEQ ID NO: 170489 - DNA, 246 bp, Glycine max
gaaaggcattaataccagaatcaaagacggtgccggctccggtggccgcattgaacgccaacgcctcaggaggaatatcgacaactttccgaccaaccctaattgcaaccaagttgacataatagagtgaagatcttctaggattcttgagaagaggggtatacttaatccttatgggctgggccacaggcccaagtcttagcgacccagagaagttaagtgatttgaagctgggcaagcagtagg

SEQ ID NO: 170490 - DNA, 245 bp, Glycine max
cacttttaggggttaaagtaattgtatacataagcgtgggggaactgtccttggaacatcacgaggtggacatgacaccaaaaagatagttgacagtattcaagatcggggaatcaatcaggtttatataattggaggagatggaactcagaagggtgcatctgcaatttttgaggaagtcagaaggcgtggtctcaaagtttcagttgtaggtatccccaaaaccatagataatgatatcccgg

SEQ ID NO: 170491 - DNA, 245 bp, Glycine max
cttgacctcaactttctcgacaagaggctctctgtcggtgttctctcccttccctttggtgtcgtgtctttcaaatggcgaacgtttgattcctctgttcaatcgggttttggtggagaaaatcgtgcctccatcgaagaccaccgctggcattttgttacccgagaaatccaccaagctgaattccggaaaagttattgctgttggccctggctttcacagtaaggatgggaagctaattcctg

SEQ ID NO: 170492 - DNA, 239 bp, Glycine max
cgttacctttgtcaagtttcaacgctccaactatccatggcaaaccgctggctcagacccgaggtgtatccactgttcgctgcggttggtgctgctgttgggatctgtggattccaactggttcgtaatatctgcatcaaccctgaagtcagggtgaacaaggagggaaggaaggcaggagttttggagaactttgctgagggagagaagtatgccgagcacttcctgaggaagtatgt

SEQ ID NO: 170493 - DNA, 240 bp, Glycine max
tgcaggcccacctggatctgggaaaggcacccagtcaccaatcataaaagatgagtactgcttatgccacttagctactggtgatatgttaagagcagctgtagcagctaagacccctcttggtgtcaaggctaaagaagctatgaataagggagaacttgtttctgatgacttggttgttggcattatagatgaagcaatgaaaaaaccttcatgtcagaaaggtttcattcttgatgg

SEQ ID NO: 170494 - DNA, 241 bp, Glycine max
gtggtttcagtgagtgatcggtgttcacttgatccttcataagtcgtcatcatcatcatcatcatcaccgttgattgaagaagatgccgatcagaaacatcgccatcggaaggcctgaagaggctactcaccccgacacgttgaaggcggggttggctgagttcatctccaccttgatcttcgtgttcgccggttcaggttccggcatcgcctacaacaagctcaccgacaacggcgccgc

SEQ ID NO: 170495 - DNA, 239 bp, Glycine max
cttcgtctcaaacttcttcgttccttcgattcattccatttcatccaaaatggccaaagacccagttcgcgttctcgtcactggagccgcaggcaaattggatatgctcttgtccctatgattgctaggggagtgatgctgggtcctgaccagcccgtgatcctccacatgcttgacattcctccagcagtagagtcgttgaatggggttaaaatggaattggtggatgctgcattccc

SEQ ID NO: 170496 - DNA, 237 bp, Glycine max
cttttgatttattttatttgttcatgtggggttattggttatttttctatgatcggttgatcacaggtgcgggactgaaaggtagcaatggcgaccaggaacttggaaaagatggcatccattgatgcacagcttaggcaattggctcctgccaaagtgagtgaggatgacaaactgattgagtatgatgctcttctgctggatcggttccttgatatccttcaagatttacatggg

SEQ ID NO: 170497 - DNA, 236 bp, Glycine max
ctcagatcccacgggtgacaagttacaggattggataccagaaatggcattccatgtgaagaaaattgatccaaagcacctagtggaggttggagtagaaggattttatggctcatcaacacctcagagaactcagttcaatcccaacacatatgctacacaggttggaactgattttatcagaaaccacctggttcttggagtggacttcgcttctggtcacatatatgctgact

SEQ ID NO: 170498 - DNA, 243 bp, Glycine max
agtcactgctctgtttcaccaagtttgggcgtttaaatcagaaccaaatcgtgttctcttccattggcaaacatggcaactcaaatgagcaagaagagaaagtttgttgcggacggagtgttctttgccgaactgaacgaggttctgacacgtgaattggcggaggacggttactccggcgtggaagttagggttacgccgatgcgcaccgagatcatcatcagagccaccagaacccaagct

SEQ ID NO: 170499 - DNA, 243 bp, Glycine max
gtttcagtgagtgatcggtgttcacttgatccttcataagtcgtcatcatcatcatcatcatcaccgttgattgaagaagatgccgatcagaaacatcgccatcggaaggcctgaagaggctactcaccccgacacgttgaaggcggggttggctgagttcatctccaccttgatcttcgtgttcgccggttcaggttccggcatcgcctacaacaagctcaccgacaacggcgccgccactc

SEQ ID NO: 170500 - DNA, 241 bp, Glycine max
tcaagcttcagcaagtgcgttttggaagcagagaccgaaatacttcgagatggcccgtacaaagcgaactgctcgtaagtcaactggaggaaaagctcccaggaagcagcttgcaaccaaggctgcacgtaagtctgcaccaacaactggtggtgtgaagaagcctcatcgttatcgccctggaactgttgctcttcgtgagattaggaaataccagaagagcactgagctcctaatcagg

SEQ ID NO: 170501 - DNA, 244 bp, Glycine max
aacgaagctttcttgagttgagttaacagcatggagagggaggaagatgttaaggttggagcacagaaattctcagagaggcaagcattggggacaggagctcagggtgacaaggactacaaggaggcaccaccagcacccttgtttgagccaggggagttaaagtcatggtctttttacagagctgggattgcagagtttgtggccacattcttgttcctctacatcactgtcttgactgtca

SEQ ID NO: 170502 - DNA, 238 bp, Glycine max
gctcttctctctagagctgctgcgttgctaaaacgcaccggtttgttcctgttctcgttcaaaagaaaactgacacaagtgaggcttggtgcataaacagcaatggcagaaaaaccccaaccggttcgggttctctactgcggcgtgtgcagtttgccccccgaatactgcgaattcggatccgatttcgagaaatgcaaaccctggttgatccaaaacgtccctgacctataccctg

SEQ ID NO: 170503 - DNA, 236 bp, Glycine max
cagatttgctcataataggagggaatcgaatcgaatcgaatcgaaaggacagtgcagaatggctgacatgccgttgccggcgctctttgagcaagcccgcaagatccacgccgcagccaccgattccggcgccgaccaggaggttgtgaagaaggggtgcgaggctctgcatagatgcgaggacatggtcaataatctaggtttgttctctcccaacgagaccaaagaagatatca

SEQ ID NO: 170504 - DNA, 249 bp, Glycine max
ctcttccgtgcacagcttgaacacaccgcgtttcggagagagacgtcgcaatggggaggaggcctgcaaggtgttatcggcagataaaaaacaagccataccccaaatcacgcttttgccgtggtgttcctgatcctaagatcagaatttatgatgttggtatgaagaagaaaggtgttgatgagtttcccttctgtgttcatctggttagctgggaaaaagaaaatgtttcaagtgaagcattggaag

SEQ ID NO: 170505 - DNA, 240 bp, Glycine max
gttagatctgtacctgcctagccattgatttggaaaagtccaagcttcaaagatgagtaagcttcagagtgatgctcttagagaagctatctcaggaatcatgactgattccaaggaaaagaacaggaaatttgtggagaccattgaactccaaattgggctgaaaaactatgatccccagaaggacaagcgttttagtggctctgttaagttgcctcacattcctcgccccaagatgaa

SEQ ID NO: 170506 - DNA, 241 bp, Glycine max
caggcttcgaaatagcaagtttatgggttggattagttgttggcgtcccttcttattaccttgctggaagcctcgttgaccttggcatggcatggtggcagggcatagcaactgtggtggcagcaaacatgatcctcttggttcctttggttctcactggccatgcaggaacacgttatggcatatcattcccagtacttgttagatcctcttttgggatcaatggtgctcatgttcctac

SEQ ID NO: 170507 - DNA, 240 bp, Glycine max
aacggagccctctcttcaggtcaccatctagactgcaatcatggctgatggatcacagcatccatcagttgttcagaagctagcttgacagtcgtacctggtgtccaggcttagccccaactttaactctaggaattattctgcaactggtgcttacgtccatggcggaatgcactcgcctgggttggctgttgtgtcacctggatctccagttactgttcatgctccagcagagaaagg

SEQ ID NO: 170508 - DNA, 241 bp, Glycine max
tcctaattgtttaaacctaattctcatttcttcatcgttcgattcttctcctcctaaagatgcagatcttcgtgaaaactttgaccggtaagaccatcacccttgaggtggagtcctccgacaccatcgataacgtgaaagctaagattcaagacaaggaagggatcccacctgaccagcagagacttatctttgcgggtaaacagcttgaggatggtcgaacccttgccgactacaacat

SEQ ID NO: 170509 - DNA, 238 bp, Glycine max
cttctctctctttctccggcgacgatctcagattccggtcactgctctcgccggcgatcccttattcctccgtcctccgtcgagtcctttccgattcgaatcgttcccagccttgtgccaccatgaatcccgaatacgattatttgttcaagcttttgctgattggagattctggtgtaggcaagtcatgtcttctcctgaggtttgctgatgattcataccttgacagctatatcag

SEQ ID NO: 170510 - DNA, 235 bp, Glycine max
gtttctgtctctgtgtttgcggctgaggattccgaacgagcgaccttcttcgtttctcgcaaagtttaagtcctcatgggtaaggaaaagactcacatcaacattgtcgtcattggacatgtcgactctgggaagtcaactaccactggtcatttgatctacaagcttggaggtattgacaagcgtgtgattgagaggttcgagaaggaggctgctgagatgaacaagaggtcat

SEQ ID NO: 170511 - DNA, 237 bp, Glycine max
tttttcttaaatcctatacaaaacaggcgcattcagcactatttcccagatccattaaagttttggcaaagatagcaagcttagaatcccttcataaactggaggaaatagtgcaagctctctgatgggatcatggtggctcggggtgaccttggtgtcgaaataccacttgaacagattcctacagtccaagaggatataatttacgtatgcagacaattaaacaagccagtgatt

SEQ ID NO: 170512 - DNA, 240 bp, Glycine max
tgatcttgaaagaatttgctccatctattcccgagagaaacatttcttgtttgactagattggaccacaatagggcactgggccaaatttctgagagactgaacattcaggtttctgatgtaaagaatgtcattatctggggcaatcactcatcaacccaatatcctgatgttaaccatgcaactgttggggagaagcccgtccgcgagcttatagctgatgatgcctggttgaatggtg

SEQ ID NO: 170513 - DNA, 239 bp, Glycine max
ctctctaataacatttctaatctcattctccttctgttcaaacactctctctcatggcatcagataagaagattaggatcggcatcaacgggtttggaaggattggccgtttggtggccagggttgcccttcaaaggaatgatgttgaacttgttgctgtcaacgatcctttcatcaccactgattacatgacatacatgttcaagtacgacaccgttcatggccagtggaagcatttt

SEQ ID NO: 170514 - DNA, 237 bp, Glycine max
gaagtatcagatctggagcaggagaatagcgttggcagcgtttgcgtttgctctgctgttccaatcggcctcagcagacgacgtcgttgtgctctctgaagataacttcgagaaggaagttggtcaggacagaggagctctcgttgagttctatgctccttggtgtggacactgcaaaaagcttgctccagaatatgaaaagcttggtagcagcttcaagacagccaaatctgtttt

SEQ ID NO: 170515 - DNA, 211 bp, Glycine max
cgaaagcgattttgagggaagaagaggatgaggccgatttttgctgggaacttggagtatgatactcgtcaatcagagctcgaacgcttgttcgcaaagtatggaaggattgaccgcgtggaactgaaatctggttttgcttttgtctatcatgaggatgagcgtgatgcagaagaagcacattcgtgcacttgacaatgttccatttggt

SEQ ID NO: 170516 - DNA, 237 bp, Glycine max
gtcccaccaatgcgtcactccattgtaatcaaccttggtgaccaacttgaggtcataaccaatggcaagtacaagagtgtgatgcaccgagtgattgctcaaaccgatggtaccagaatgtccatagcttctttctacaaccctggtgatgatgctgtcatttctcctgcaccagccttggtgaaggaattagatgagacaagccaagtgtacccaaaatttgtgtttgatgattac

SEQ ID NO: 170517 - DNA, 240 bp, Glycine max
tctcgagccgaatcggctcgagatttgataatgtatttatgaataacatgatttaacatattaccatggatggcaggctaagcactcatgcaattgttgagccatttgtcatagcaacaaacaggcaactgagtgtggttcaccctatttacaaacttctgtttcctcactaccgtgacaccatgaatattaattcacttgcccggaaagccctggtcaatgcagatggtattatagaga

SEQ ID NO: 170518 - DNA, 241 bp, Glycine max
aagattcctaattgattaaacctaattctcatttctacatcgttcgattcttctcctcctaaacatgcagatacttcgcgaaaactttgaccggtaagaccatcacccttgaggtggagtcctccgacaccatcgataacgtgacagctaagattcaagacaaggacgggatcccacctgaccagcagacacttatctttccgggtacacagcttgcggctggtcgaacccttgccgacta

SEQ ID NO: 170519 - DNA, 241 bp, Glycine max
cccagtgatctcagggctgccaatgaattgctaaagcagattaggcaacactcttctcccattggggatgcatcacagaggttggctcattactttgccaatggcctcgaggcacgcttggttggggatggtacaagtacccaaggaatgtatacttttctgagctctaagaacaacactttttctgagttactcaaggcataccaggttttcagttcctccagccctttcaagaagtttg

SEQ ID NO: 170520 - DNA, 233 bp, Glycine max
ggcaatagcagagcagcgactcacactggtcttcgcttctcattcatcatttctcacctaaccttctcttcctctcagtctcagatcagaaacctccgccagccatggcagcgttccagaagatcaaggtcgtcaaccccatcgtcgagatggacggcgatgaaatgactagggttatctggaagtcaatcaaggacaagctcattttgcccttcttggagttggacatcaag

SEQ ID NO: 170521 - DNA, 235 bp, Glycine max
ctctcgagccgaatcggctcgagcttagcgtgacggagatggttgcacggcaccacgctcacgcggtggggcccaaccagtgatgctccttcgtgatccaggcgatcgacgcgccggtctccgccgtgtggccggtggtgcggcgcttcgacaacccgcaggcctacaagcacttcgtaaagagcgaccaccgcctcaggaactaccggtccgtcaccacgctccacggcgacgg

SEQ ID NO: 170522 - DNA, 231 bp, Glycine max
aataacatagcatagagtgagaagtgagaagagaaaaatggcaatctccatacccagtagacaacttttcatagatggagagtggaaagtccctcttctcaacaaccggtttccgatcatcaaccccgctactgaagacatcatagggcatattccagccgctactaaggaagatgttgaccttgcggtggatgctgctaaaaagagccttttcccataacaaaggcaaag

SEQ ID NO: 170523 - DNA, 212 bp, Glycine max
cttttggtttttgcagaaagacgaagactgtggaagaggtacttgaaaatatatatcaaacctggttggaagaaaggcacaaaaataacatttcctgggaaaggcaaccaagaagcagaagctactgctcctgacgatctaatctttgtggttattgaaaaacacatgctttgttcaagagagatggaaatgatttggttgtcacacagaaa

SEQ ID NO: 170524 - DNA, 153 bp, Glycine max
gaagatccgaacttctgtcactttccacagaccgaggacattgaagaaggataggaaccccaagtaccctcgcattagcgcgcctccaagaaataagcttgatcattatcagatcctgaaataccctctgacaactgattccgcaatgaggag

SEQ ID NO: 170525 - DNA, 234 bp, Glycine max
attggtgcaaatggcgttcttcagaagcgtttctgcactttctcgacttcgctctcgcgtgggccagcaatctaatcttgcgaattcagttagatggctccaaactccgagctccagtaacactgatctttattctgagttgaaggaactagttccagagtatcaggaacgtgttaagaagctgaagaaagatcatggaagtgttgaattgggaaaaattactgttgatatggt

SEQ ID NO: 170526 - DNA, 239 bp, Glycine max
gttgttgctgcaccaccgaacaacttcccctgtaaatcgcgtttcgtttgtgcaaggttttaaaagatggctgatgctgaggacattcaacctcttgttgttgataatggaactggaatggtcaaggctggttttgcaggtgatgatgctcctagggccgtgttccccagcattattgggagaccacgccatactggtgtaatggttgggatgggtcagaaggatgcttacgtgggtga

SEQ ID NO: 170527 - DNA, 239 bp, Glycine max
gctggtgcttctttttctctgcagcctcttcgatcccgctggtgctcacttcgatcccgttggcgctctcttcgattcagtttagcaggttgtgctgaggcttaattgacccttgaagcatatttcggagttttatcagagaacaaatgggatatattggggctcatggtgttgcagctctgcacagatataaatatagtggagtagatcattcctacgtggccaaatatgtactacaa

SEQ ID NO: 170528 - DNA, 233 bp, Glycine max
cgaagttgtttctcaatatggagagttgatatgggatctcttggtatcaggggtgaagcctgatgacatatgttcacaagttggtttatgttcttccaaaaggcatgaatctaagagtgctggaattgaaatggtgactgaaaaggagcagggagagttgacggcaagagataatcctttgtgttcttcttgtcagatgcttgttctttggatccagaatcaactaaaacaaa

SEQ ID NO: 170529 - DNA, 170 bp, Glycine max
gcaaattgatgatacacagtacccaaaaacattcttctataaagaagaccttcatccaggcaaaacaatgaaagtacaattcaccaagcgtccctatgcacaaccttatggtgtatatacatggttaacggatattaaagacacctctaaagaaggatatagttttgaag

SEQ ID NO: 170530 - DNA, 207 bp, Glycine max
cctttgttcactcttcttctcttgcggctagggtttagcgagctcttctagatttaaggaagatgggtaaggaaaaggttcacatcagtattgtggtcattggccatgtcgactctgggaaatccactaccactggtcacctgatttacaagcttggaggcattgacaagcgtgttattgagacgtttgagaaggaagctgctgaga

SEQ ID NO: 170531 - DNA, 239 bp, Glycine max
ctttcactcacccaaaaccaagctagtccgaggaagtcctctattcagaaccagatatggagacaaaacccaccgagatcagcagcggcaagatgttcggaggctacaacaagaggttcagacatttcagccctaccctcggctgctccatgaacttccacatctacttccctccatctccttctccctctcacaaattcccagtcttgtactttctctctggcctcacatgcacggac

SEQ ID NO: 170532 - DNA, 236 bp, Glycine max
tttcagtttcagaaagaaagcaaaagcaatagcaatgggttggatcggtgagactgttgattccatcaaatctcttcagatccgccaggtcctcacccaggctgtgagcctaggcatgattgttacgtctgcactgataatatggaaggcattgatgtgcgttactggcagtgaatctcccgttgttgttgttctttctggaagcatggaacccggattcaagcggggagacatct

SEQ ID NO: 170533 - DNA, 211 bp, Glycine max
aaagccccttcttttcccttcactccaggtatggaagctgttggggttgtgacagctgtgggtgctggactcactggtaggcaggttggagatcttgtagcttatgcaggtcaaccaatgggttcatatgctgaagagcagatacttcctgcaaataaagtagtccctgttccttcgtcaattgacccagctgttgcagcatccatcattc

SEQ ID NO: 170534 - DNA, 244 bp, Glycine max
gtgaactaatgcttggccagcctctattccctggtgagagtggagtagatcagcttgttgaaattatcaaggttttaggtaccccaacaagggaagaaatcaagtgcatgaatcctaattataccgagtccaaatttccacaaattaaagctcacccatggcacaagatctttcacaagcgcttacctcctgaggctgtggatctcgtctcaaggctactgcaatactctccaaatcttcgatg

SEQ ID NO: 170535 - DNA, 239 bp, Glycine max
ctcgagcgtggaacccggctcgttgcttcattaaacaatgtctcttttgtgatgcaccaaactgcacttctccaagctcactacttcagtatctggggggttttcaggactgattttccagaccgccctccatcccctttcaactttactggtgcgcccctaactgccaatcttgccactttaactggcactagagttagcaagattgctttcaattccacagtggagctagttttgca

SEQ ID NO: 170536 - DNA, 237 bp, Glycine max
gagcccaagagaccctcagacaagcctttgaggcttcccttgcaggatgtctacaagattggtggtattggaacagtgccagtgggacgagttgaaactggtgtcttgaagcccggtatggtggtgacttttgctcccactggcctgacaactgaagttaagtctgtggagatgcaccatgaagctctccaggaggcccttccaggtgacaacgtaggatttaatgtgaagaatgtt

SEQ ID NO: 170537 - DNA, 223 bp, Glycine max
tggaaactccttcaacaacaaagatattgccagaggactatgttcagagagtgaagcatgttcatgaatctggtggttatgggtctagagggtatgcatatgactggaagagagaggaagcaaataaaaaccttctgcgaacccatacaactgctgtttcctccaggatgctttaccaattagcacagaaaccatttgcccccaaaaaaatatttctctatag

SEQ ID NO: 170538 - DNA, 170 bp, Glycine max
ctttttccttcaagtcactaagataatggcaagcatttataacattccatcacacataaaagcttgggtctattatgaatatggaaacatagaagagattctcaaatttgaatctaacatacccataccagacatcaaggaagaccaagtgctcatcaaggttgtggctg

SEQ ID NO: 170539 - DNA, 215 bp, Glycine max
cctttttgtggcggatgttaacacccagttgaagaacaagaacatcaccactgatatcaaagtggacaccggttccaatcttttcacaactatcactgtcaatgagcctgctcctggtctcaagactatttttagctttagagttcctgatcaaaggtctggaaaggtggaagtccagtacttgcatgactatgctggaataagcaccagtgtgg

SEQ ID NO: 170540 - DNA, 232 bp, Glycine max
cagatcagaaccttggccatggcagcgttccagaagatcaacgtcgccaaccccatcgtcgagatggacggagatgaaatgactagggttatctggaagtcaatcaaggacaagctcattttgcccttcttggagttggacatcaagtattatgacttaggccttccttaccgtgatgagaccgatgataaagttacaattgaaagtgcggaagaactctcaagtataatgt

SEQ ID NO: 170541 - DNA, 239 bp, Glycine max
ttcacagttagcacttagcagactctgctgcagtgaggtgaggggaggtttgtttgttgtttcgtttttcctttcctttccgccagaatccgttgagaatggcgttgccggtagtcgtcgatgcagagtacctcaaggaggtcgacaaggctcgccgcgatctccgcgcactcatcgctaacaggaactgcgctcctctcatgctccgattagcctggcacgatgccggaacttacgat

SEQ ID NO: 170542 - DNA, 191 bp, Glycine max
ttgcaatcaaattagttcattctctttgcgcagttccctacctctcctttcaagatgcagatcttcgtcaagaccctcaccggaaagaccatcaccttgaggtggaaagctctgcacatcgacaagtcaaggcagatccagacagaagatcccggtagaagctatctgcggacagtcagcgcgactgcgta

SEQ ID NO: 170543 - DNA, 166 bp, Glycine max
aaccctgctcgtagtcttggtgctgctatcatcttcaacaaggaccttggttgggatgatcactggatcttctgggtgggacctttcattggtgctgcacttgcagcactctaccaccaggtcgtaatcagggccattcccttcaagtccaagtgattcaatcaaa

SEQ ID NO: 170544 - DNA, 231 bp, Glycine max
acaagatggcttcttttcatatccaatattcattccttgtgcttgtgcttgctatggtgatcacattgatgaaccctaccaatgcaaccctctctccccatttctatgataaagtttgccctcaggcattgccagttataaagtcagtggttcaacgagcaattatccgtgagcgacgcatcggagcatctcttctgcgcttgcatttccatgattgtttcgtaaatgggt

SEQ ID NO: 170545 - DNA, 234 bp, Glycine max
tctctgtcgaacttgaaggagctcaatgtgagttttaatgagcttgagtacgtgcctgagagcctgtgttttgctacctcgcttgtgaagatgaacatagggaacaactttgctgacatgcgatccttgccgaggtccattgggaaccttgaaatgcttgaggagttggatatcagcaacaatcagattcgtgtccttcctgactcttttaggatgctcactcgtttacgtgtc

SEQ ID NO: 170546 - DNA, 236 bp, Glycine max
gaaaaaaccccactttctctctttcactagctccgttcaagttctaactaagcacttcgtcgctgcttttgcttctgtagaagatgtctctgcgagtgctgaaccctaacgccgaagtgctgaacaaatcggcggcacttcacatgaacatcaatgccgccaagggtctgcaagatgtcctcaaaaccaacctcggtcccaaaggaaccatcaaaatgctcgttggtggtgccggt

SEQ ID NO: 170547 - DNA, 245 bp, Glycine max
acgaagttgtttctcaatatggagagttgatatgggatctcttggtatcaggggtgaagcctgatgacatatgttcacaagttggtttatgttcttccaaaaggcatgaatctaagagtgctggaattgaaatggtgactgaaaaggagcagggagagttgacggcaagagataatcctttgtgttcttcttgtcagatgcttgttctttggatccagaatcaactaaaacaaaaggcaacgaag

SEQ ID NO: 170548 - DNA, 163 bp, Glycine max
gcaacacaaagcagcacctctgtttgataggcttgtgtttgataagacaaaactagctctaggtggacgtgttcgcatcctgttatccggagctgctcctttgcctaggcatgtggaagagtttatgagggtcactagtggatctacattatcacaaggtttt

SEQ ID NO: 170549 - DNA, 197 bp, Glycine max
gatagtgtgggagagagaagagcggaagagaaaatgacgaccaggttcaagaagaacaggaagaagagaggtcacgtcagcgccggacacggccgtatcggaaagcaccgcaagcatcccggaggtcgcggtaacgccggtggcatgcatcaccaccgtatcctcttcgacaagtaccatcctggtttcttcgggaa

SEQ ID NO: 170550 - DNA, 214 bp, Glycine max
cgatgtcagatcttgaggctcacttgcgccctaagaggaagaaggtttgggtggactatttcgttcagtttcgatggatccttgttatttttgtggtccttcccatctccttcaccatttatttccttacataccttggggatgtaagatctgagtggaagtcctataagacgcgtcagaaggaacatgatgagaatgtgaagaaggttatcaa

SEQ ID NO: 170551 - DNA, 239 bp, Glycine max
gtggacagaagagagcgtcctagtcgcaaccctaataagaagaaccacagcttcaagcgagtgacatccaccagccatgggtcgtatgcacagccgcggtaagggtatatcctcttctgctttgccctacaaaaggacaccccctagctggctcaagatctcttcgcaagatgtggaagaaaatatctgcaagtttgcgaagaagggtttgaccccgtctcagattggtgtcattcttc

SEQ ID NO: 170552 - DNA, 232 bp, Glycine max
ttgcttttgaaattctcaccaccacctattccaccttggtaatacttactctttcacttaccaaccaaccaccatggtttctgagacactccaaagccaaaccaagaacgtgtgcgtgattggagcaggaccatcagggctagtggcagcaagagagttgagaaaagagggtcacagggtggttttgttggagcagaatcatgatgttggaggacagtggctatatgaatca

SEQ ID NO: 170553 - DNA, 163 bp, Glycine max
gtctttgtgtaccacaaggaaatctcgagacctttgacttgccacagatttgggtcccctgatatggatgacgctgaagatgaggctggatcgtacttcattagtgctgtatgctggaagagtgatcgccccactattctaactgcaaatagtcaaggcacca

SEQ ID NO: 170554 - DNA, 231 bp, Glycine max
ggtggcacctgcccctgagtatacatttcttatttattgttctccagttggcagctaccagaagggtgcactaaatttaaaggttgaggataaactatatagagcaatatctggctgtggtggaactggagggatcaaaagtgtcaccaattatgcccctgtttatactgcaatggctgatgcaaaggccaacggattctctgatgtgctgttcttagactcagcaactgg

SEQ ID NO: 170555 - DNA, 229 bp, Glycine max
ccactttcttttttcccgcagtcatgggcaaggtcaagatcggaatcaacggatttggaagaattggccgtttggtggccagggtggctctgcagagagacgatgttgaactcgttgccgttaacgatcctttcattaccaccgattacatgacatacatgtttaaatacgacagtgttcacgggcactggaagcatcacgatgtcaccgttaaggatgagaagaccct

SEQ ID NO: 170556 - DNA, 234 bp, Glycine max
gttctttggatgaggttacagctgcacttgcaaatgctgggctggaatcttctaatctcattgttggcattgatttcaccaagagcaatgagtggacagggaagaggtcattcaatcgaaaaagtttacatgacattagaagtggtcaaaacccttatgaacaagcaatttctattatcgggaaaactttatctgctttcgatgaagataacttgattccttgttttggatttg

SEQ ID NO: 170557 - DNA, 208 bp, Glycine max
tttgagtgtaaaataacagagtatagtgtagggccttgttcttgatactgtgctaaatttgttggatggcggagaaatcatgcatcaagcgccttcagaaggaatatagagccctttgtaaagagccagtttctcatgttgtggctcgtccttctccaagtgatattcttgagtggcattatgtgttggagggaagtgaaggaacact

SEQ ID NO: 170558 - DNA, 238 bp, Glycine max
gaaagttcatccaatctccgaagcccttcaccgcattgcaaccatgtcgagaagaaaggttagagagccaaaagaagaaaacgtgactctgggcccagctgttagagatggcgaacatgtctttggcgtcgctcgcatctttgcctccttcaatgataccttcattcatgtcactgatctgtccgggagggaaacacttgtacgcatcacaggtggaatgaaggttaaggctgacagg

SEQ ID NO: 170559 - DNA, 274 bp, Glycine max
gttggggtttgttttgtggcccatgatataactgctcagaagaatgtcatggacaaatttacgcgtattgaaggtgattacaaggcaattgtacagaaccgcaatccattaatccctcctatatttggcacagatgaatttggctggtgtgtgagtggaatccagctatgacgaagttaactggatggaagcgagaggaggtgattgaaaaactgcttggggaactttttttggacccccatatggctgcttgtcgcctaaagaatcaagaagc

SEQ ID NO: 170560 - DNA, 271 bp, Glycine max
gtggtgaacaggctcccgaggcagagtatgaggaagtcaagaaatgacatttaggcgtggttttgtagcatttgtttcttattaatcatcacataattgcaagaatacaaggttacttcttttgtatctaatgttgaaaaccattttttgctggaaggctctttaatttgtagcacttttggagtccaaagttccgaccaaaaaaaaagtgaaagatataaaaaaaaagggggggcgccccactaggggccccactcgccgcgaatttttt

SEQ ID NO: 170561 - DNA, 276 bp, Glycine max
gataaatataaacattacaagaagctatggaaaccaactcagtttccaagcttctgttgcttgtcttcagtgttctctttgttggttctgagttgatccattgcagtgtcacctatgataggaaggccattctcatcaatggccaaagggaatcctcatctctggctccattcactaccccagaagcacccctgaaatgtgggaggatctaattcggaaggcaaaagacggaggccttgatgtcatcgacacttatgtcttttggaatgttcatga

SEQ ID NO: 170562 - DNA, 277 bp, Glycine max
tttgtttccaaggttgctctgggaatccgaggttctaaactctgcaactaactttaatggcaactgggcaagtcattaataaacctccttcacttcctccgtaccctgagatgattcgggaggcaattgaagcactgaatgaagagaatgttcgaataaatcatcaatttcgaagtacatcgaatccacctatggtggattgcctcaggcccacaaggttttgctcaatgtgcacctcgcgaaaatgagggaaagtggagtgctagtgttttggaag

SEQ ID NO: 170563 - DNA, 280 bp, Glycine max
accgcccccaaaatctcactcttctgccttctcttttctcttctcttcttcctccaaaacaagtaaacaaacaacactctcacattcaccacaacacaaacacaaacacaaacaaagacaacaaccttgtttgtctgcaatcaaaaccttcaagctggcgttcgagaaccaagacacccctgtccgagaaatcaagcccaagaaccggagaatcatgggtgctggaggccctgatgacgaggacaataggtggccaccatggctgaaacctcttctcaaa

SEQ ID NO: 170564 - DNA, 279 bp, Glycine max
gaggaggcactgtggcagaagtcttaggagtgtaaaacagagacgcaaaatgaagacgattctatcgtccgagaccatgaatattcccgacggcgtgagcatcaaggttcacgctaaggttatcgaggttgagggccctcgtggaaaactgtgcgagacttccaccatctgaacttggacttccaacttattaccgacgatggcggtaaaaggaagctcaagattgattcttggtttggttctcgtaaaacctccgccgccatccgcaccgccctcagc

SEQ ID NO: 170565 - DNA, 276 bp, Glycine max
caaacttcaacaacaatttgatagctacgtgtcccaatgccgagtcccccaacaccgttaatttggacgtgagaacccccgtgaagttcgacaacatgtattacatcaacctcttgaaccgccaaggagtgttcacttctgaccaggactcgcgggcagccccaaaaccaaggaaatcgtgaaccagttcgcttcagaccagaaactgttttttaagaaattttccgatgcttttgtgaaggtgagccagctagatgtgataacggatcgtattgg

SEQ ID NO: 170566 - DNA, 274 bp, Glycine max
cacaaaccttcttccaagtgttcttcccattattctacattgtcctctctttggttctctattatttattaattgtgcactccttttggttctctaatatttatttccaccgttttcttaaaacaaaagcctcttcaaattctccaacactaataaccaaaatggccactgaaaagcttagaagttgtgcaaacttccttgagaactctaaaccctactttgccatgattgctatacaatttggctatgcaggcatgaacattatcactaagat

SEQ ID NO: 170567 - DNA, 279 bp, Glycine max
tgaattcagagaaggtcctgctctaccagttcttgatgaaatgattaaagatgagaagaaccatggaagctatgacttcatctttgttgatgcggacaaggacaactacctcaactaccacaagaggttgatagagcttgtaaaagttggcggcgtgatcgggtacgacaacaccctatggaacggatctgtggtggcaccccctgatgctcctcttaggaagtatgttaggtactacagggacttcgtgctggagctcaacaaagccctcgctgtgga

SEQ ID NO: 170568 - DNA, 280 bp, Glycine max
ggtgtctcatcatacaaggtttcctgggtgccagatcccgtcaccggttactacaaaccggaaaacatcaaggaggttgatgttgccgatttgcgtgctacccttctccgcaaaaaattcaacaactaatttcaacaattttaattttttccaaaccttgggtgattgattcgttatggaattaattttgatactcatatgctctgcccaccttcattatacgattgctatagttttacaagtcagtagaataactattagcagctaataagaattgtaa

SEQ ID NO: 170569 - DNA, 276 bp, Glycine max
ccttgatataggaatggctcaaatgtaaagggatattatgtatggtctttgttcgacaattttgaatggtcttccggttttacatcaagatttggaatgatttatgtagattacaaaaatgatttgaagagatacaagaaattctctgcatatggtttgagaattttctgaagaaagaaaccaaactatatggttctagcaaatagtattatgaaatttgtttacaaaatagttatatatatttgtaaataattatttgatttgtatttggtcatt

SEQ ID NO: 170570 - DNA, 275 bp, Glycine max
accggaatcagaggctccccctaacttctggggccacaccccggaagaagaatactacacctcccaaggcgttcgcaacaccaagtcccacttcgaaacccccaacggcaaaatcttcacccagtccctcctccctctcaacctccaacccaccaagtcaaagccaccgtctttatgacccacggctacggctccgacaccggctggctcttccagaaaatctgcatcaacttcgccacctggggctacgccgtcttcgccgccgacctcctcgg

SEQ ID NO: 170571 - DNA, 274 bp, Glycine max
gaggaagtaagaaaacacaacacgaatttcattgcagagtgttattttgagtatcagcatcaatggctccaattgcagtgggaaacgtgattccagacggcattttggcttacttggatgaagaaaacaaaccccaaactgtctccatcactctctcgccaccggcaagaaagtcatcatctttggggttcccggtgccttcactcctacttgcagcttgaagcacgttcctggcttcattgagagagcagaagagctgaaagggaagggtgtg

SEQ ID NO: 170572 - DNA, 276 bp, Glycine max
tgttgatccatctcttgtttcttgctttctttcttcaccatgtcacttgctgggaaaatcaccactgaaatcggggttcatgcaaccgctacaaagtggttcaacctcttcgcaacacaactccatcatgttcaaaacctaactgataagtgcatggaaccaagctgcatcaaggtgaagactggcatcacaacgagacagtcaagcactggacttataccatagatggtaaggttacaacatgtctggagagtattgaatccattgatgaacaga

SEQ ID NO: 170573 - DNA, 278 bp, Glycine max
cgattgctagaatggaatttcgatgctcagtcatctcttttaccattctcttctctcttgctcttgcaggagagagccatgtccatgcatcgctacctgaggaagattattgggaagctgtttggccaaacactcccattcccactgcctgcgagagcttctaaagcctctccctgcagcgtgttgaacgcgatgaactccctaagcaaattgatgatacacagtacccaaaaacattcttctataaagaagaccgtcatccaggcaaaacaatgaaa

SEQ ID NO: 170574 - DNA, 279 bp, Glycine max
ctacaaatcccctccaccaccaacgtcgcatcctccaccttaccactatgtgagccctccaccaccttctccatctcctcctccaccataccattacacatcaccacctcctccttccccagctcccgctcccaagtacatttacaaatccctccacctccagtttacatatatgcttccccacctccacctatctacaagtaagttcgaattgcggaagaccattcacgataaatcatgttctagtttttatcgaggaataaaggcaagctctatttg

SEQ ID NO: 170575 - DNA, 272 bp, Glycine max
  unsure (1)..(272): unsure at all n locations
gctgtggctgggataatgtctgatgcgaacatcctaatcaataccgctagggtccaagcacaacgctacacatacgcctatcaagagcccatgccagttgagcagttagttcagtctctctgtgataccaagcaaggttacacccattcggtggtcttcggccatttggagtctcgtttctgtttgcgggatgggacaaaaactttggctttcaactttacatgagtgaccctagtgganattacggtggctggaaagctggagccattggg

SEQ ID NO: 170576 - DNA, 277 bp, Glycine max
ctcccctcgcaaggaactcaaggtcaccttccccatggaaagctcagtcgagatcgagatctaggtcaaggtcgagatctaggtcgaggtctaggcctagacaaaggccaagatcgcgttctagaagtcgtggcaggtcaaggtcaccattcgtggaaggtcaaggtcaccaattcatggaaggtctgaacctacaaatcctggtgacacactttatgtaactggtctatcttcgagggtcaccgaaagagacctagaggagcatttctccaaggaa

SEQ ID NO: 170577 - DNA, 280 bp, Glycine max
ttcttcgcaaccactactactcactcactgcagatctcaattgcatcgctgtccatggctaccatcgttagcatcaaggcccgccagatcttcgacagtcgtggcaatccaactgtcgaggtggatttgacttgctccgatggtacttttccagagctgctgttccaagtggtgcatccactgggatttatgaggcccttgaattgagagatggaggatctgactaccttggaaagggtgtatcaaaggctgttgacaatgtgaacaccgtcattggccc

SEQ ID NO: 170578 - DNA, 272 bp, Glycine max
ctggtgtgcctgctgttgttcagtttgttctcatgctcttcctccctgaatccccaagatggctttttgtcaagaataggaaaaatgaagccgttgatgtgctttctaagatctttgacgttgctcgcttagaagacgaagtcgatttcctcactgctcaatccgagcaagagcgccaaagaaggtcaaatatcaaattctgggatgtttttagatccaaagaaatcagactggcattcctcgtcggtgccggacttctggcttttcagcag

SEQ ID NO: 170579 - DNA, 259 bp, Glycine max
gtttcgttccgtttcaatggggagcgaagagcagaacggcgaattctacctgcgttactacgtcggtcacaagggcaagtttggtcacgagttcctggagttcgagttccgcccagacggcaagctccgctacgccaacaactccactacaaaaacgacaccatcatccgcaaggaggtttacctaacccccgccgttctccgcgagtgccgtcgcatcatcgccgagagcgagattatgacggaagatgataacaact

SEQ ID NO: 170580 - DNA, 273 bp, Glycine max
ggcgtcatcaagtgttagggaggacaaataccgcccctttatgcgcgaagacagtgagaagaacatcaaatggagatatggtgctcctccaaattatgacgttgtcaacaaattatttgatgaaggcagaaccaaggtatggcctcgggttcacttgaagaaaaggtgcagactttagtgaagaattgggagatggaaatgttccacaaggaggatttcaaggataacagatcagtggacccagagaaatacactttcagcctaaacggaagg

SEQ ID NO: 170581 - DNA, 273 bp, Glycine max
atttgtaaacacacactatcaaagcaaatggggtgctcattctccgggttgaacgcactttacgactccgtgaacggcggaggtgatgtttggatcaacgagaaccgtttccgcatcgtgcgccagtacggagaaggtggcttccctacgtctacctcgtcaaggaggctcccgacgactccgccgccgctggcctcgccaagaagctcaaaggctcctctcatctctccgatgatggaccttatgctatgaaaaaggtcctcattcagaaca

SEQ ID NO: 170582 - DNA, 269 bp, Glycine max
gaacgggttttgaagaagaagcagttcaattgatcaactcagatttcagggacctaagtctagctgctaatagactcgcccatcatgccatcaaacttggtggcattggctttggagcctctattttcggattgtctgctgccatgctgctatttatctgttgattttggatcgtacaaactggtaaacatatattctcacagcactactcattccatacattttcttcagcttgccttcagtaattttcgacgtcttcaggggagagc

SEQ ID NO: 170583 - DNA, 274 bp, Glycine max
gaagaaataaaagtgaagttctaattggtgttattgagcagatagcatggagccacagtgtagaatcaagaaggatgccactgaattgatagggaataccccaatggtatatctgaacaacattgtggatgggtgtgtagcccgtatgctgctaaattggagtacatgcaagcgtgctgtagtgtcaaagataggattgctttgagcatgattgaagatgctgagaaaaaaggccttattacacctggaaagactgttctggttgagtatacaa

SEQ ID NO: 170584 - DNA, 265 bp, Glycine max
aatttccctaggggcttaatatctcccctcacttgtgcctagccttatgtcatagtattatcattcattctcatctttctctcttctctctccacccaaaccctaactcccgaccctgttcccctctcgtatccgtcatgaaagaggaaagtccaagaccgaatctaagagagccgatcccaaacttgctgtgaataagaagggagccgccaccaagctaggaaacccgccggcacagggtaggcagcgaaagaccctaacaagc

SEQ ID NO: 170585 - DNA, 271 bp, Glycine max
attccaatatattccattctctctgtgtatttccctacctctcccttcaagatgcagatcttcgtcaagaccctcaccggcaagaccatcacccttgaggtggaaagctctgacaccatcgacaacgtcaaggccaagatccagacaaggaaggaatccccccggaccagcaacgtctcattttcgccggaaagcaacttgaggacggccgtacccttgctgactacaacattcagaaggagagtactcttcacctcgtcctccgtctccg

SEQ ID NO: 170586 - DNA, 267 bp, Glycine max
gcggcggaagtccttcccacgtgctcactgggtaggtgtcaaattttgtcaatcggaaacacccggcgccggaaaagcagtgaaagtgtcggagccgatgaagaaaagtcgccgaggaccacgctcgcgtagctcacagtacgaggagttactttctacagaagaactggtagatgggaatctcatatatgggattgtggaaagcaagtgtatttgggtggatttgacacagcacatgcagctgctcgtgcgtatgatagagcagct

SEQ ID NO: 170587 - DNA, 270 bp, Glycine max
cttcgtctcaaacttcttcgttccttcgattcattccatttcttccaaaatggccaaagacccagttcgcgttctcgtcactggagccgcagggcaaattggatatgctcttgtccctatgattgctaggggagtgatgctggtcctgaccagcccgtgatcctccacatgcttgacattcctccagcagcagagtcgttgaatggggttaaaatggaattggtggatgctgcattccctcttcttaaaggtgttgttgctacaaccgat

SEQ ID NO: 170588 - DNA, 192 bp, Glycine max
tctggctcccgtggttggtactgtggaaacattccttgggaggccatggaaggagtactcaaggactgtttatatgcagtctttcatggatagtttgatagctccggctggttggcatgaatggaatgggaatttttcactggcaccttgtactacgcagactatgataacacaggtcctggttcaaacact

SEQ ID NO: 170589 - DNA, 269 bp, Glycine max
gcaactcttagtgcaggtgagaggcgtcacgatgatagcccagatcacaccatatttgttggagacctggctgccgatgttacggattatcttcttcaagagacatttcgggcacgatatccctcaattaagggggccaaagtgtaattgataggctaactggacggacaaagggttatggttttgttaggtttggagatgagagtgaacaggttagagctatgactgaactgcaaggggttctttgttcaacaaggcccatgcgaatt

SEQ ID NO: 170590 - DNA, 273 bp, Glycine max
atagtttaacagcaaatagaacccttgcgaatcaaaaccttcctgctcctttcttcaacctcactcaacttaaagctgcctttgctgttcaaggccttgacactaccgatcttgttgcactctcaggagctcattcatttggcaagttcgctgcttattcattcttgaccgattgtacaatttcagtggtactggcagacccgatccaactcttgacacaacttacttaaaacaattgcgccaaatatgcccccaaggtgggccccctaacaa

SEQ ID NO: 170591 - DNA, 275 bp, Glycine max
gctaatttctctcgttgtcatattctagtttcaacttatggagtttacctctaataatatgcttccttttgtttcaatgttttggcttgtgttcctaagtcctttagtgaactgtcaactttattataatttctatgactcacctgtccaaacctgaccggaattgttcgatccaacgtgtggtcagctatggccaaggatgcaagaattgctgcttctctcttgcgccttcatttccatgattgttttgtcattggatgtgatgcatctgtgct

SEQ ID NO: 170592 - DNA, 265 bp, Glycine max
atccctagctctgtcgttccgtcgttgacgatggcgtttcgggtgcgaaccctgacctcctctctctctttcttctctctctcttgtccatcgcttccgccaatgtcttcttcgaagagcgtttcgatgacgggtgggaaatcgatgggttaaatcagattggaaaaaagatgagaacgtggctggggagtggaaccacacctctggtcaatggaatggagacgctaatgacaaaggtattcaaaccagtgaggattacagattc

SEQ ID NO: 170593 - DNA, 269 bp, Glycine max
gcttattgcagattaattctatgttgcaatagttcttctagagttacagaagcaatccgctctcgatgtctcaatgtgcgaataaatgcaccaagtgaagaacagattgttgaagttttagaattcattggtaagaaggaaggctgcaacttcctcctggttttgctgctcgcattgtggagaaatcaaatcgaaatttaaggagggccatattgtcatttgagacttgtcgtgtccaacagtatcctttcactaacaaacaaacaatt

SEQ ID NO: 170594 - DNA, 261 bp, Glycine max
cttcaattcattctagttctggattccgactagccgcgttgactcggttccgtttttcattctcgcggatctaatatcaaggaatagcttaagggcacattacaatgaaggcattgattctggttgggggatttggaaaaggctgaggccactgacactcagtttccctaagcctcttgttgattttgctaacaagcctatgattttgcatcagatagaagcccttaaggccattggagtgactgaggtagtgctagccat

SEQ ID NO: 170595 - DNA, 235 bp, Glycine max
gcatattttgatgagtacgattatcgggtgaaacttctacagaaaaagcaatggagagaggagttgagaaggatgagagagatgaagaaaaaaggtaacacaaaagaaaatgactatggttacatggaagaagatgatcagagaatggaagtccagcagcagtgccagttccattgcctgatatggccatgccaccatcctttgacagtgacaatccagcctatagataccggtt

SEQ ID NO: 170596 - DNA, 269 bp, Glycine max
ctgcaatttcagttgagtgggccatggctgagttgataagaaacccaagggtgcaacaaaaggtccaagaggagctagacagggtaattgggcttgaaagggtgatgactgaagcagacttctcaaatctcccttacctaaatgtgtgaccaaagaagcaatgaggcttcacccaccaaccccactaatgctcccacaccgtgccaatgccaatgtcaaagttggaggctatgacattcccaaagggtccaatgtgcatgtgaatgtgt

SEQ ID NO: 170597 - DNA, 270 bp, Glycine max
ggaaaattagcctcacaaaagcaaagatcaaacaaaccaaggacgagaacacgatgttgcttgaacttgcacttggtttattggttttggctctgtttctgcacttgcgtcccacacccactgcaaaatcaaaagcacttcgcatctcccaaacccaccaagcccaaagcctcgtctccccttcataggacaccttcatctcttaaaagacaaacttctccactacgcactcatcgacctctccaaaaaacatggtcccttattctctct

SEQ ID NO: 170598 - DNA, 270 bp, Glycine max
cagaaacagtttttccagacaaaagccgttttgccaaatgctgtttgtagtacttctcaaaaacatctttttcttgcaggtatcggaatagcatcatcaccttgtcaagggtaacttctacatcatcctcactaacccctttagacctttccggagtttatcatctacaaatagtgaaatgaactctggagaacgagggttcaagttgatgaaatattcaaatgaggaattcaatgcattctggaaagacttgtcattgacgaatgccaa

SEQ ID NO: 170599 - DNA, 267 bp, Glycine max
aagtgttctaagagtgagcaacttcaaaacaccatagtgagaaatgacttccaagggtgcaattctcttgtgtctcaatgttctcttcttcactgtggttagttccacatatgttccatgcaacccaccccccaaaactccaaacacccacctgtcccaaagccaccttccccaaagcaagtttcttgccccaaggacactgttaagtttggtgtgtgtgctgatgtgttaggtttgattaacgtgcaactagggaagccaccaaaa

SEQ ID NO: 170600 - DNA, 262 bp, Glycine max
gcaaacataacttgcagtaatggcttcaatgaataaccaaaaagaaattgagctctttgagggccaatctcttctgtacatgcagctatatgggcacctaagacctatgtgtcttaagtgggctgttcaactaggtatccagacataatacagaaccatgccaaacccatttctctttctgacttggtctctactcttcaaattccaccagctaacgctgcttttgtgcagcggttcatgcgcttcttggcacacaatggaa

SEQ ID NO: 170601 - DNA, 257 bp, Glycine max
ataagaagaagaggagagggaagatgatgatgatgacaatggaggggatgatggacaagggggtgttggatgatgtgataagaaggcttctggaagggaaaggagggaaacaggtgcaactctctgagcggagatccgtcaactctgcgtcaacgccagacaaatcttcctctctcagccaattcttctcgacctccgtgctcccatccgcatctgcggtgatatacatggtcagtaccaggacttgctgaggcttt

SEQ ID NO: 170602 - DNA, 272 bp, Glycine max
ctcacacctctccaaaatccgttccccctttctttcaaacccttttttttttcttccaacaaatcagcgatggcgacgacgtcggtggtgccggcgaatcggcggcgtgcggcggcgaaccccgccgaggatatggacttcagacgacggagggcgtgaaggccatcgcgagcttcgaggagatggggatcaaggacgatctgctccgcggaatctaccagtacggcttcgagaagccctcagccattcagcagcgggccgtgactccgatc

SEQ ID NO: 170603 - DNA, 235 bp, Glycine max
cctgggtaacagcagtcattcttaatctcatgtgacaaataatgatcatcgtgaatggtaacgttgagtgtcctaatgtgaagtacaccgagactgagattcagtccgtgtacaactacgaaacaccgaacttgttcacgagaacaggaatggcacctatcagtggattgtcaaacccaaatctgtcaaatacgaatttaaaaccaacatccatgttcctaaatgaggggtaatg

SEQ ID NO: 170604 - DNA, 246 bp, Glycine max
actcgagccgattcggctcgagacacaacatttacattactctcacactttctccaatatgcgttcttctcgaaatgagacttatgcacttatgctagtggtggtggttggctccatagtggcttcctgtggtgcaacttcaaccaagactttgatctaacttggggtgatcagcgtgctaagatattcaatggtggtcagcttctatctctttccctggacaaagtctctggctctggcttccaa

SEQ ID NO: 170605 - DNA, 254 bp, Glycine max
gaggtcatcatccgcagctgctgttattcgcaccgcaaacaaacagtgagccatggccgtcggaaagaacaagcgcatctccaaagggaaaaagggtggcaagaagaaggcagctgatccctttgccaagaaggattggttgacattaaggccccttctctttttcaagtgaaaaatgttggcaaaaccctcgtctctcgtacgcagggtaccaagattgcttctgaaggacttaaacatagagtgtttgaggt

SEQ ID NO: 170606 - DNA, 239 bp, Glycine max
gagaaagacaaatggcaacaagcgaagaagtggttgccgcgggcggaggagcccgctggaggcagggctgaagcacaaactggagagaaaatggacgttttggtgcgacaaccaatccaaacccaaacaggggctgcttggggtacctctcttcgcaaggtctacaccttcgacaccgttgaagagttctggtgtttgtatgatcaggtattcaagaccagcaagttgcaaatcaatgc

SEQ ID NO: 170607 - DNA, 247 bp, Glycine max
caggacttggaccagaagaaaacctaacagagagtggcagttcttataagcctcagatatttaccttccgggagcttgcaacagcaacaaaaaattttagggatgaaacctttattgggcaaggtggatttggcatgtttataaaggcacgatcgggaaaataaatcaggttgtagctgttaaaagacttgatactactggtgtccaaggggagaaagaatttctggtggaagttctcatgctttcc

SEQ ID NO: 170608 - DNA, 247 bp, Glycine max
gttcttggaaacaagtatcaaagcaaattgcttgaagttatagatgccagtgagttgccagaatttctgggaggtacctgcacttgtgaagatcagggaggttgccttagatctgataaaggcccctggaaaaacctgatatattcaagatggttctcactggtggagcatggcggtcaaaacaagttgtaaaagttcttaacaatgaaaggaaggttattgtgtatgccaagccaggatacccgat

SEQ ID NO: 170609 - DNA, 244 bp, Glycine max
ggtggaggaggaaagctggatgagttccaacctcatcccgtcacggagcaacttcccggtgttgatgactgtgttaccagatctcctgcatggcctgaagggattattcttggctttcagcattacctcgttgtcttgggtccattctcattctttccaccatccttgtccctctcatcggtggtggcaatgtggaaaaggctgaaacaattcagactctactttttgttgcggccattcacac

SEQ ID NO: 170610 - DNA, 252 bp, Glycine max
attcaattctgttcatcctttgcttcccaaagaaagagaaaataaaaagcaatgggtagccttgaagcggaaagaacaacagtaggattggcagcaagagacccttcagggattctctccccatacacctacaatctagaaacacaggccctgatgatgtttacataaaagttcactactgtggaatttgccattctgatctccaccagattaaaaatgatcttggcatgtccaactatcccatggtcccag

SEQ ID NO: 170611 - DNA, 246 bp, Glycine max
cttgaatcttcgttatccttctttttttctccttgaactcgaatattcactatggcagatgaggtggttctgctagatttctggccaagtccatttgggatgagggtcaggattgcacttgctgaaaagggttcaaatatgagtccaaagaagaggacttgcagaacaagagccctttgctcctcaaaatgaacccggttcacaagacaatcccggttctcatccacaatggcaaacccatttgtg

SEQ ID NO: 170612 - DNA, 244 bp, Glycine max
gtttgaggaaaagatagctaaggagaacagaggcatgctgattaagggatgggcgccgcagccgttgatcctgaaccaccctgcggtgggaggatttttaacgcactgcgggtggaacgcggtggcggaggcgtcagctccggggttccgatggtgacaatgccggctttcggggaccagtactataacgagaagctgataacggaggtgcacgggttcggggtggaggtgggggcggcggagt

SEQ ID NO: 170613 - DNA, 245 bp, Glycine max
cgattattgatcaggatctaatagcaggtggtaatgagagttcagcagtaacagtggaatgggctatcacacagcgattgagaaggccagagattttcgagaaggcaacagaggagctagctacggtaataggtgagatagatgggatgaagagcaggacattgtatatttaccttatgtgaatgccattgcataggacgcaatgaggctgcaccctgtcgcaccaatgttggggtcaagactag

SEQ ID NO: 170614 - DNA, 246 bp, Glycine max
cagagatcttcttcaaggatatttggccatccagtgaagaaatagcaaatgttgtacaatcaagtgtgctgcctgatatgtttagggacacatataatgcaatcacccaagggaatcccatgtggaataatttactgttccaacgggcactctttatgcttgggaccctacatcgacttatattcatgagccaccttattttagagatatgagcatgtctcccccaggctctcatggagtgaagga

SEQ ID NO: 170615 - DNA, 247 bp, Glycine max
tgtttacacactcaaggagatggaggaggcaacatgttcattcagtgatgagaatctgcttggtaaaggaggatttggcaaagtctaccggggaactttgcggtcaggagaggttgtagcaatcaagaaaatgagttgccagcaattaaagcagcagagggggaacgtgagtttcgtgttgaagttgacatcttgagcagacttgaccacccaaatcttgtttctttgataggctactgtgcggatg

SEQ ID NO: 170616 - DNA, 245 bp, Glycine max
gttaggttacctctgtgacatttgtgctgctagttcatatatttccggctgacaccgagaaggaaagcaggaaaaaaacaaaaaggagcagatgggtagctcaggtttctcatggaaattggcggatcatccaagcttccaaagggtaagactgtggctgttgtggtattggatggttggggagaggccacacccaatgagtacaactgcatccacaaggccgaaacaccctgcatggattcact

SEQ ID NO: 170617 - DNA, 245 bp, Glycine max
gggaaacaggtgcagctctctgagtccgagatccgtcaactctgcgtcaacgccagacaaatcttcctctctcagccaattcttctcgaccttcgtgctcccatccgcgtctgcggttttacggtccatttaaaaaaccgtggatgtacttcgtgttctagtgtagataagggattttggctgaggggagtgcattttaggatataaaatccaataatgtcccatcttcaatcccttgttcctaa

SEQ ID NO: 170618 - DNA, 243 bp, Glycine max
tttatgaggcagcactaatttatatagcaagctagctaggttgaaaatagtttggttttgtagtaagtgaggtgaggtgccaaaatggtgaagataactcttggtactttcgatgactcttttggtgttgctctcttaaggcttatttggcagagttccatgcaactctgattttcgtgttcgctggtgttggttcagccatcgcttacaacgagcttacaaaagatgcagccttggatccaa

SEQ ID NO: 170619 - DNA, 241 bp, Glycine max
caagctagctattagttcgattttgtagtaagtgaggtgccaatatggtgaagatagctcttggtactttggatgactcttttagcgctgcctctcttaaggcttatttcgcagagttccacgcaactctattttcgtgttcgctggtgttggatcagccatcgcttacaacgagcttacaaaagatgcagccttggatccaacggggctggtggcagtagctgtggcacatgcatttgca

SEQ ID NO: 170620 - DNA, 244 bp, Glycine max
aatatcctcttagatgagaactttgttgctaaagttgccgattttggcctctccaagactggtccttctctcgatcaaacccatgtgagtactgctgttaagggtagttttggttatcttgatcctgaatattcagaaggcaacagcttactgagaaatcagatgtgtattcatttggggtggtgttaatggaagtgttatgcacaaggccagccttgaaccctgtccttccaagggagcaggt

SEQ ID NO: 170621 - DNA, 245 bp, Glycine max
gtgaaagagaatccgaggcgaagagaagagaaaaattaagatggaggggaaggagcaggatgtgtcgctgggagcgaacaagttcccggagagacagccgattgggacggcggcgcagagccaagacgacggaaggactaccaggagccggcgccggcgccactggttgacccgacggagtttacgtcatggtccttttacagagcagggatagcagagtttgtggccacttttctgtttctata

SEQ ID NO: 170622 - DNA, 247 bp, Glycine max
atctttctctcttctctctccccgcccaaaccctaactccctaccctattccgctttctctcatccatcatgaaaggaggaaagtccaagaccgaatctaagagagccgatgccaaacttgctgtgaataagagggcgccgccaccaagactaggaaacccgccggaaaggggaaggcagcgaaagatcctaacaagccaaagaggcctccaagtgctttcttcgttttcatggaggaattcaggaa

SEQ ID NO: 170623 - DNA, 236 bp, Glycine max
ctctctcttgcaaaacctaattttcatttcttccctcaaatttcaaaatgcgtgagatccttcacatccagggtggccaatgcggcaaccagatcggcgccaagttctgggaggtggtttgcgggagacgggatcgaccctaccggaaggtacggtggggactcggagttgcagctcgagaggatcaatgtctactacaacgaggccagttgcggtcggttcgtgccgcgcgcggt

SEQ ID NO: 170624 - DNA, 240 bp, Glycine max
ctatgttggtgggaaagatgggtgggttttgtacccttctgagacttacaatcattgggctgaaaggatgaggttccaagtcagtgatactcttgtttttaagtacaagaagggctcggatactgtgttgtggtgaacaaggatgattatgagaaatgtaacaagaagaacccgatcaagaagtttgaggatagtgaatcggagtttcagtttgatcgatcgggtccattttacttcatt

SEQ ID NO: 170625 - DNA, 239 bp, Glycine max
cgcaacaaaaagaaagaatcccaggcgaggagaaagatggaggggaaggagcaggatgtgtcgttgggagcgaacaagttccccgagagacagccaattgggacggcggcgcagagccaagacgacggcaggactaccaggagccggcgccggcgccgctggttgacccgacggagtttacgtcatggtcgttttacagagcagggatagcagagtttgtggccacttttctgtttctc

SEQ ID NO: 170626 - DNA, 240 bp, Glycine max
attctctgtgttgtgttgtgtacttgtgttaattgtgttgttgttgtaggaaatttaagtgaagagagaatgatgatgaagtctgctatgtgtgcattggtgcttgtggcactggttgtggttgaagtgggcccatggctgaggctgcggtgacttgcaacccaacacagttgactccttgtcttccggcaattaattcaggttctgcaccttcgagtgcttgttgccagaagctgaagg

SEQ ID NO: 170627 - DNA, 241 bp, Glycine max
ctggttttggggtactttgaaaagttgcaatggcgaacaggaacttggaaaagatggcatcgattgatgctcagcttcggctgttggttccggccaaagtgagtgaggatgacaaactggttgagtatgtgctttgcttttggatcggttccttgatattcttcaggatttacatggggaggatctgaaagaaacggttcaagaggtgtatgagctttctgctgagtatgaaggtaagcat

SEQ ID NO: 170628 - DNA, 242 bp, Glycine max
atagtttaacagcaaatagaacccttgcgaatcaaaaccttcctgctcctttcttcaacctcactcaacttaaagctgcctttgctgttcaaggccttgacactaccgatcttgttgcactctcaggagtcattcatttggcagagttcgctgcttattcattcttgaccgattgtacaatttcagtggtactggcagacccgatccaactcttgacacaacttacttaaaacaattgcgcc

SEQ ID NO: 170629 - DNA, 242 bp, Glycine max
agctagctaggttgaaaatagtttggttttgtagtaagtgaggtgaggtgccaaaatggtgaagataactcttggtactttcgatgactcttttggtgttgcctctcttaaggcttatttggcagagttcatgcaactctgattttcgtgttcgctggtgttggttcagccatcgcttacaacgagcttacaaaagatgcagccttggatccaacggggctggtggcagtagctgtggccca

SEQ ID NO: 170630 - DNA, 241 bp, Glycine max
cctcaaagcaacacaagaacactctcttgaacattcatggatccagtgagcgtgtggggtaacacgcccttggcgacggtggatcccgagatccatgacctcatcgagaaggagaagcaccgccaatgcgcggcatcgagctcatcgcctccgagaacttcacctccttcgcagtcatcgaggccctcggcagcgccctcaccaacaaatactccgagggcatgcccggcaaccgctacta

SEQ ID NO: 170631 - DNA, 244 bp, Glycine max
ggaagggcgaagttgaaaaaccaaaacccttggcgagtgaagccctactcactagactacacacttcgcaatggcggttgttgctcaaacccctgacatcgccggcgagcggcagtccggccaagacgtcgcacccaaaacgttgtggcatgccaagccgttgccaacatcgtcaaaagctctttaggccccgttggcctcgacaagatgctcgtcgacgacattggcgacgtcaccatcacca

SEQ ID NO: 170632 - DNA, 240 bp, Glycine max
ctcaagaatagtgaatctcctggcaacagcagcaacaatctaccacttagcatgaatcggagcccctcaacttccgttactcctatccctgataagtactgttgtctctctagagaagatgtgctcctttcatcatcggttgtcttggcgcattggctccccttcctctcacttccattgctgctcttgaagcaattaattcaaactacaactatattgaatcttctactccagccattg

SEQ ID NO: 170633 - DNA, 233 bp, Glycine max
ctcttcttcgtctcaaacctcttcgatccttcgattcattccatttcttccaaaatggccaaagacccagttcgcgttctcgtcactggagccgcaggcaaattggatatgctcttgtccctatgatgccaggggagtgatgctgggtcctgatcagtccgtgatcctccacatgcttgacattcctccagcagcagagtcgttgaatggggttaacatggaaatcgtggatg

SEQ ID NO: 170634 - DNA, 237 bp, Glycine max
atcaaaattcatcgaagaagaaggagaaggagatgtatagcaatttcaaagagcaagcaatagagtacgtgaaacaagcggtagatgaagacaataagggaaactacgcgaaagcgtttcaactttactgaacgcgttggagtatttcaaaacgcacctcaagtacgagaagaaccctaagatcaaggaggccatcactcagaaattcaccgagtatctccgccgggccgaggagat

SEQ ID NO: 170635 - DNA, 246 bp, Glycine max
tccaaagtttgtatagtgtaggatttgttggtattcgtgataaaaacacctcatcctattcattttgccatgacgggcgaactccagataaaggttttgaaagtaatgagaaattattaattcatccatgttactgcttggtttgaatctaaatcgtaatgcacttgctccagaggaagcagaggagataaatgacgaatatgatattaatattatttcagataattcagccattagaaataaaac

SEQ ID NO: 170636 - DNA, 240 bp, Glycine max
ctttcatcaccgccgttgattacttctcctttctctaccctgacgccagcgttgaccgcatcttcgccgtggtttacatgatagtcgggctggtggggatctccctcataatcctctacagccacaatctgacgcctatgtgaggatcaacgttggattggccctattcgtcgtttcgcttctcgtcgttcccctccttgatgccttttacataaagggtcgggtcgggttttatagcgg

SEQ ID NO: 170637 - DNA, 243 bp, Glycine max
cgcgatcgtgcgagtgattggtttgaaaaacaattgcactttctgcggcgtcttccgtcgacaggcccttgaccgaggtgcttctctcttgaaagtggacaaagtcgttactgggcacaatgccgatgtattgccgagaccgtcctcctcaacctcctccgaggagatgttgcccgattgagtagatgcacctctataaccaccggtgaggatggccccattccccgatgcaaacctttcaag

SEQ ID NO: 170638 - DNA, 251 bp, Glycine max
tcttctgcatgcccttggttatagcagccattgtcgagagcatgggccgtttcaccatccaagtgatgggtttcttcttcatgacagtcttcatgtttgctcttgctataccttacgatcattggaagaaccacaacatattggctttgttgttatgtactcattcacattcttcttctccaactttggtccaaatgccaccacatttgttgtgccagcagagattttcccagcaaggctaagatctactt

SEQ ID NO: 170639 - DNA, 237 bp, Glycine max
gcttctcactgatctccattcccattccatggcttccactgaatcatcccctttcaagaaaattcagattcaaagggatgacactacatttgacgcatatgtggttggaaaagaggatgctcctgaattgttgtgattcaggagtggtggggtgtggattacgaaattaagaaccatgccgtgaagatttctcagcttggtagtgggtttaaagctcttattccagatttatacaga

SEQ ID NO: 170640 - DNA, 236 bp, Glycine max
cttttgtgtggggaattatggtaattgattttgagggtttgactactcatggattatgatggtatgagaaaaccttccaaaaacttatttcactctcgcttcttcctttttgggttctattgctggattgggagttcttgaccgctctcctcctttttagttcttccccttaatcttctttcttcacaatttttatttccttccttattagacgtattagatcagattgaacaaaa

SEQ ID NO: 170641 - DNA, 237 bp, Glycine max
attcgagattgctcgatccaccaaagcgtacaagacgattctccagaaccttccctacatattcgttggcacgtgcgagcggttgcagagcatcgtggcgctcgtgtcggaggcagcgaacagagctgaagaagaagggaatgcacgtgcctccatggaggagaaccgaatacgtgaaagcgaagtggctctccccttacacgcgcactcacgatatcaaagaggagaagaagaagg

SEQ ID NO: 170642 - DNA, 234 bp, Glycine max
ctttgatcaatacgatgttgatttgattgtgttttgtttggtttcatcgatcttcaattttcataatcagattcagcttttattatctttacaacaacgtccttaatttgatgattctttaatctagatttgctctaattagagctttttcatgtcagatccctttacaacaagccttaattgttgattcattaatcgtagattagggctttttttcattgattacttcagatc

SEQ ID NO: 170643 - DNA, 236 bp, Glycine max
ttcaaaggtaaggtaggttaacactcttcttcatcgtccgcaatgggacgtgtgatccgtgcgcagcgtaagggagcaggctcggtcttcaagtcccacacgcaccaccgcaagggccctgctcgttccggagcctggacttcggggagcgcaacggctacctcaagggcgtggtcaccgacgtcatccatgaccctggccgcggcgcgccgctcgccaaggtcgccttccgccac

SEQ ID NO: 170644 - DNA, 237 bp, Glycine max
ccaagaccaagttgcagataaagcctgctccagccatggcagctttctctcctagagggcccaacacagtcacaccggagatcctcaagcctgatgtcattgctcctggtgtgaacattattgcgcctactcagaaggggttagcccaacaaatctgggatttgataagcgcagggttccttttatcaccatgtctggaacatccatgtcttgtcctcatgtggctggagttgttgg

SEQ ID NO: 170645 - DNA, 255 bp, Glycine max
tgcaaagcgcaaattaaagcgcaaaaaccattctccttcggtgctcttgaaaacatgggaaaacagagcacagaattctctgccctcaactgcatcgacctctccaaccctgacatcaaccaatccgtcaatttactcaaacaggcatgtttggattccggttttttctacgttgtcaatcatggaataagccaggaattcatggaagaggtttttgcacagagcaagaaattcttctctcttcctcacaaggag

SEQ ID NO: 170646 - DNA, 250 bp, Glycine max
attctagttctggattccgactagccgcgttgactcggttccgtttttcattctcgcggatctaatattaaggaatagcttaagggcacattacaatgaaggcattgattctggttgggggatttggaacaaggctgaggccactgacactcagtttccctaagcctcttgttgattttgctaacaagcctatgattttgcatcagatagaagcccttaaggccattggagtgactgaggtagtgctagc

SEQ ID NO: 170647 - DNA, 253 bp, Glycine max
gtttacgatgctgttaaatcaatgacccaaaacaatgttggagctttggttgttgtgaaatctgacgcgaataaggcaattgcaggaattattactgaaagagattacttaagaaagatcatcgtgcagggaagatcatccaagtctactaaggttggagatattatgactgaagagaacaaacttatcacagtcacccctgataccaaagttctgcaggctatgcaactgatgactgacaatagaatcaggc

SEQ ID NO: 170648 - DNA, 249 bp, Glycine max
ctcacggaataatattccctacaattagcagaaaaaatggttcagcaagatatccgaagggtccctggacagaacaggaggactacaaattggtgtattttgttggcatgttcggagatcgtagatgggactttatagcaaaggtatcaggtttgaaggtggagggagactgtaaataaaataggtatgaatatttggacatgctaagttatactatgaagcaccctttaaccacctcacttttttgta

SEQ ID NO: 170649 - DNA, 256 bp, Glycine max
cgccattggaaggcacatagtctgggcaagtgtgaaggcagggaacccaacatttgtgttggtgaggaacacccctggctctaacaacagggtcaatctggtcaaagctgctaatcctgaaaccaaggaagagctcattgagagcttcaaaaattcaggagtaaatctaattcagggagatatgaatgatcatgagagtctggttaatgcaatcaagcaagttgatgtcgtaatctgcgcatttggtagactacta

SEQ ID NO: 170650 - DNA, 254 bp, Glycine max
ctgcacaacaattcgagattccaaccatcgatctcaattttcaaccttaacctctaagaatgtcttacgcttatctcttcaaatacatcatcatcggtgacaccggagttggaaagtcttgtcttctacttcaattcacggacaagcgctttcagcccgtccatgacttgaccatcggtgttgaatttggtgccaggatgatcacaattgataacaagccaatcaagttgcaaatatgggatacggctggtcaa

SEQ ID NO: 170651 - DNA, 253 bp, Glycine max
caattattaatcaggatctaatagcaggtgggactgagagttcagcagtaacagtggaatgggcaatcacagagctattgagaaggccagagattttcaagaaggcaacagaggagctagacagggtaataggtagagaaagatgggttgaagagaaggacattgtaaatttgccttatgtgaatgccattgcaaaggaagcaatgaggctgcaccctgtggcaccaatgttggtgccaagactagccagaga

SEQ ID NO: 170652 - DNA, 252 bp, Glycine max
cggctcgagcttttgcagctgatattggggataatagcctcagcaacaggcacagctgggggtgtagcatatttcgggtttgcaagggacacagacacgtggtgggttggaataaaatttgccatgtttacgacaagttctgtaggcatgttggtgcctccatagcagtggctttgtttggaagcgttgtgacagtcttgctcatttggctttcagcttacagcattcatagccgagtccccaagtagatgg

SEQ ID NO: 170653 - DNA, 251 bp, Glycine max
gagagagagagatctatctatctatcaagatggcgttgttggttgagaaaacaagcagtggaagggagtacaaggtgaaggacatgacgcaagccgatttcggaagattggaaatcgagctggcggaggttgaaatgcccggcctcatgtcctcccgcaccgagttcggcccctctcaacccttcaagggcgctaggatcaccggctccctccacatgaccatccaaaccgccgtcctcatcgagaccctc

SEQ ID NO: 170654 - DNA, 250 bp, Glycine max
cgtgtttgagagaaaggttgagctatagcctaaagggagagacacataaatagtttctactttctattcatagatagatggctggcccaattatgagacctcagattgtgctatttggctcctccataattcaaatgagcttcgacaatggtggttggggtgctattctagctaacttgtacgctaggaaggcggacatcatcttaagaggatactctggttggaattcaaggcgggctttggaggtttt

SEQ ID NO: 170655 - DNA, 252 bp, Glycine max
caaccctaacgcgtgcagagcagagagagacgcagccatggggcgaagacccgcgaggtgttataggcaaattaagaacaaaccataccccaagtcacggttttgccgtggtgttcctgatcccaagatcaggatttacgatgttggtatgaagaagaagggtgttgatgaatttcctttctgtgtccatctggttagttgggagaaggaaaacgtttctagtgaggccctggaagctgctcgtattgcttg

SEQ ID NO: 170656 - DNA, 254 bp, Glycine max
ccccaaaaagcacaagcctggtaaaacaccaaagacacccacagtacccgttgttaagccaccagtcacaatccctcccattgttaatccaccagtcacaatccctcccattgttaatccaccagtgacagttccacccgttgtgcttccaccaatagtgaagcccccgggttttctccctccaattcttaacccaccaagtacaccaacaccgtcgccggggaagggagggaacactccatgtccaccaccaa

SEQ ID NO: 170657 - DNA, 248 bp, Glycine max
tcgctactgcgatgcgcttcagcacaatgggtgcctacaagtatgtttcggagctatggcgcaagaagcagtctgatgttatgagattcttgcagcgggtgaggtgctgggagtatcgccagcaaccttctattgtccgtttgacaaggtctactcgcccagataaggctcgtcgcttgggtttcaaggctaagcagggttacgtgatttaccgtgttcgcgtacgaaggggtggccgtaagagacca

SEQ ID NO: 170658 - DNA, 249 bp, Glycine max
gctggtgttatcctcaagggaaaaatcagtatcgtggccaatcctggtgttaagctggaagttcccgatggtgctgtcatttcggataaggaaattaatggcccagaggacctcctgtgaggaagcccgctgagtttagaagtatcagactgtatactatctttatggtctcatgttttttccaattattactactcccaagtttgatgggcaaagaaaataagtccctttttgtttgtcttctgattc

SEQ ID NO: 170659 - DNA, 249 bp, Glycine max
tatctttctctcttctctctccccgcccaaaccctaactccctaccctattccgctttctctcatccatcatgaaaggaggaaagtccaagaccgaatctaagagagccgatgccaaacttgctgtgaataagaagggcgccgccaccaagactaggaaacccgccggaaaggggaaggcagcgaaagatcctaacaagccaaagaggcctccaagtgctttcttcgttttcatggaggaattcaggaa

SEQ ID NO: 170660 - DNA, 252 bp, Glycine max
ctcgttttttctcaaaaagttgcaagagttaaagcaaaaaccaaagtgagagagaaaatgatgaagccatcgatgctcagatctcttcactctgccgccacccgcggcgcctcccacctctcccgccgtggctacgcctccgagccggtgccggagcgcaaggtggccgttctaggtgccgccggcgggatcgggcaacccctctcccttctcatgaagctcaaccccctcgtttccagcctctccctctac

SEQ ID NO: 170661 - DNA, 251 bp, Glycine max
gcaaaaagaaagaatcccaggcgaggagaaagatggaggggaaggagcaggatgtgtcgttgggagcgaacaagttccccgagagacagccaattgggacggcggcgcagagccaagacgacggcaaggactaccaggagccggcgccggcgccgctggttgacccgacggagtttacgtcatggtcgttttacagagcagggatagcagagtttgtggccacttttctgtttctctacatcactgtctta

SEQ ID NO: 170662 - DNA, 251 bp, Glycine max
gcggtgagaggaaacagaagagagaagagcaatcggtgagtgaatggaatggattcaggtcctccggcgaacgatttgtgttcagtgtgccatggcaactttcatattccatgccaagccaattgttctcactggttttgcggaaattgcataatgcttgtgtggcagcacggatcagtgggttgttcatgcaagtgcccactgtgtcgtcgagccatcagtctcttagtccccacagaagagtctctgag

SEQ ID NO: 170663 - DNA, 251 bp, Glycine max
ggcaataaaacagcaaaagtttcaattttgtttctgttgaattttctcgggttggtttgcagtagcaatggcggagacatagtggtttactggggacaagacgagagcgagggcacattgagcgaaacatgcaactctggactatacaaaatagtgaacataggctttctggcaaaatttggcggtgggcgggaaccagaaataaacctagcaggacactgcgaccctgcatcaaacggttgcaaaagttt

SEQ ID NO: 170664 - DNA, 249 bp, Glycine max
tccaaccaaacccatggttgttgaaactttctccgagtatcctccacttggtaggtttgctgttagggacatgcgtcaaactgttgctgtgggagtcatcaagaacgttgagaagaaggatcctaccggagccaaggtcaccaaggctgcccagaagaagaagtgaatcgtgcgggctggttcatcaggggatgttggttacaataaatgttggtttcttttctgtactcttgtgtcttcttttctagg

SEQ ID NO: 170665 - DNA, 248 bp, Glycine max
ctaactagaattttccttctctctttcataacctagtgagactctgtgtcagagtttgtgaagtgaatcccataatcatgaagaaaggaaacttgggacttggtctcaaactctcagttcctgtgtctgatcaatctaattttgccaggttcctgactgaaagtgggacttttaaggatggggatctgcttgtcaacagggatggagttcgaattgtctctcagaatgatgtcgaagctccacctcca

SEQ ID NO: 170666 - DNA, 231 bp, Glycine max
caagattctaagagagattttgctgctctttgaagaagggtgtttgcttgattttggtgatgtcgctgctctcagatctcatcaaccttaacctctcagacactactgagaaggtgatcgcagagtacatatggatcggtggatcaggaatggacctgaggagcaaagcaaggactctcccaggaccagttagcgacccttcaaagcttcccaagtggaactatgatggtt

SEQ ID NO: 170667 - DNA, 247 bp, Glycine max
ggagagagagagagaggttttgacgcaacacactttcactgagaaaggatctctatctaccaaggagcagaataaaacccttctctctggtaagtgaataagagaatggcttcagatcggaaacttcacactttcgaggaggtggcaaagcacgaccagaccaaggattgctggctcatcatttctggcaaggtgtatgatgtcacccctttcatggaggatcatcccggaggtgatgaggttttgt

SEQ ID NO: 170668 - DNA, 248 bp, Glycine max
gcggcgggagcgctcgatctcgtgacggtgcttgacgttaataacagcatgagcggcgcacagtttcacatgctaaagcgcgccatgcgtttggttatatcgtcactcggcccggctgaccggctcgccgtcgtggcttcctcggctaataccaaacggttgttacctctgaggagaatgacggctcagggacaacgcgcggcgcggcgcgtcgtggatcggctcgtgtgtgaccatggaaacagcgt

SEQ ID NO: 170669 - DNA, 250 bp, Glycine max
ggaaaattgactggtatggcataccgtgttcccaccgtggatgtactctgtagtagacctcacggcgaggctggagaaggaagcctcatatgatgggattaaaaatgctatcaaggaggcatcagacggcaagttgaacggaattcttggttacactgaagatgatgtggtctccaccgacttagttggtgataacagatcaagtatttttgatgcaaaggctggaatcgcattgaataagaattttgtg

SEQ ID NO: 170670 - DNA, 247 bp, Glycine max
gaaggtgtcttgatagagtagctatagtatccgattatgagagtaaaagtggtgactattctaatccatggagactttgcaccgtgacccaggtggaggaattgaaaatcttgatctgcgtgtttccaatttgggccaccaggatcatttttgctgcagtctatgcccagatgtcaacattgtttatggagcaaggaacaatgatgaacacatgcattggttccttctaactacccctctcaacttt

SEQ ID NO: 170671 - DNA, 251 bp, Glycine max
gaaaccttaaaaaacaagtagtgttccgaaaagatggctcagcaggaagtggtagaagggttcaagttcgaacagaggcacgggaaagagcgcgtgagagtggcgcgcgtgtggaagacgaggcaggggcagcacttcgttgtggagtggcgcgtgggcatcactctcttctcagactgcgtcaactcgtatctccgcgatgacaactctgacatcgttgctactgataccatgaaaaacacagtgtatgc

SEQ ID NO: 170672 - DNA, 243 bp, Glycine max
ctaatctccatctaatagtgttaatttgtctttctctatctctatcggtcatgggtgcttttgcttttgatgaggaaaactcctccaccgtggctccggcaacactctacaaagctctgacaaaagatgctgacactatcatcccaaagattattggggccatccaaactattgaaatcgttgaaggaaatggaggacccggaaccgtcaagaagataacagctagtgaaggtgaccaaacca

SEQ ID NO: 170673 - DNA, 245 bp, Glycine max
gctacatgtcaaaaacagggagaagcttctcacatcccttcgtcaacacctctccgactcttctcgttctctccatggcttcgtcctccttcaaggtggcgaggagcaaacgcgttacgacaccgatcacttggagctcttcaggcaagagagttacttcgcttacttgtctggagtcatagagcctggattctatgcagctattgacgttgcaactgggaattctatcctatttgctcctaggt

SEQ ID NO: 170674 - DNA, 248 bp, Glycine max
gtgcaaggcatcaccatttatgctcctgtcacatctccaaacactgatggcatcaacccagattcttgcacaaatgtaagaattgaagattgctatatagtttctggggatgactgtgtggcggttaagagtggatgggatgagtatggcataaaatttgggtggcccaccaaacagctagtgataagaaggctaacatgcatctcaccatacagtgcaaccattgccttgggaagtgagatgtcagg

SEQ ID NO: 170675 - DNA, 247 bp, Glycine max
gttatcttctcatatagtgcagagttagtgttgtagaagcaacctgtgtcttggtattttttttattcatagatacttataaaaagggaagcaactgagataaatttcctgaatctgtttctcattgagaagatggtggtaatgcagcattttgttgagatgggttcaggtgaaaagtctgcaagattttgttgtatgtcaaatgttatttgtattattataagaatatattgggggtgtttagttg

SEQ ID NO: 170676 - DNA, 263 bp, Glycine max
ctcgaaggagagacccactcttggtggcacgcggattaagacccgcaaacggaatattgctgcgccgctggaccctgcagcattctcggatgcagtggtccagatttatttggataatgctggtgatctggaacttattgctaagagcattgaatcttcagaccttaacttttcaagatacggcgataccttttttgaggttgttttcactgggggtcgtacacaacctggaactaccaagcctgatgagggggaccgccatc

SEQ ID NO: 170677 - DNA, 257 bp, Glycine max
caacatctcaatgggttcttcttctattacaacatcgcccgcaaccatgaccatggctgcgatcgtgctcctgttcacggtctttgccgtttcctccgccctagacatgtcgataatctcgtacgacagcgcccacgcggacaaggccgccactctgcgcaccgaggaggagctgatgtccatgtacgagcagtggctcgtgaagcacgggaaggtgtacaacgcgctcggcgagaaggagaagcgttccagatctt

SEQ ID NO: 170678 - DNA, 260 bp, Glycine max
gggacttgacgaggtatgaggaactggacaaagagactcaagatcagatgaacgaggagctctctggatggaaacttgttgtgggtgatgtgtttagggagcctgattgctcgaagcttctctgtgtgatggttggagatggggttcaaattcttggaatggctggtgttactattgtttttgcagcacttggattcatgtcacctgcatcccgaggaatgctactaacagggatgatcattttatatcttatcctggga

SEQ ID NO: 170679 - DNA, 263 bp, Glycine max
gaattcggagttccgtgaggctcctgagaaggatcagatccacgcggcgacgcttttgagcttgggaggccatcgaatcgattcggcgcggaacaaggatgatgtggcggaggcgctgtcgaggcagtactgggaatataatgtgcttgactatgaggagaaagtggtagatggttttcatgatgtatatgggccctataatgattcagtaatgcaaggcaagatgccatctcgaacagatcttgaagcaaaccctggaggtt

SEQ ID NO: 170680 - DNA, 262 bp, Glycine max
ctgcagggcttttcctaacacttatggacaccctttggctcactttctcagggccactgccaaagtccctgatgctcagatcataactgagttccctcctattagggtggggattgtcttttgtgggagacaatctcctggagggcataatgtcatttggggtatccacaatgctctcaaaattcacaatcccaacagtgttttgcttggacttcttggtggttcagaaggtctatttgcccagaaaactctggagataact

SEQ ID NO: 170681 - DNA, 263 bp, Glycine max
gaagaacgctcgctcgcactgtccagatcttaatcaagaggagtgagtcttgtttttccagccatgacgccgctgatcctgcatgctgggaaaaccaacaaaaattcttacaagacactcattgcagccgagtatgctggcgtccaagttgattttgcccctaattttgagatgggtgtctccaataaaactcctgaatttctcaagatcaatcctattggcaaggttcctgtgctggaaacccccgatggtccaatattcga

SEQ ID NO: 170682 - DNA, 259 bp, Glycine max
gttcatccttattacaaggactgggcacgttaagcttcacaattcattcacattcacattgtagctccgttaacaagattcactttcatctatccactcactaacgtgatcacacactcatcatcatcaataatggcggagttgttggaaaaggccaaaaactatgttgcggagaaagtcaccaacatgcccaagccagaggcgagtgtcaccgacgtggacttcaagcgcgtgagccgcgacagcgtcgagtacttgg

SEQ ID NO: 170683 - DNA, 255 bp, Glycine max
cgatgactgatgcagaactgagaaatatggttagcaagaccctcacttgtagaattgataagagagagaactgcaatgagaagatggaccaatttctaataagatgtttctaccattctggtcaatatgattctcaggaaaactttgcagcactagacaagaagctgaaggaacatgagggtgggagaacttctaatcgcctgttttatctttcaattcctcctaatatattcatagatgctgttaaatgtgcaa

SEQ ID NO: 170684 - DNA, 262 bp, Glycine max
cagaaaggtatgagaacattatggacctgaccttggagatattgggttgggttgagtcactggaagatgcgctgactcagtttacttcccctgaagatttggatggagagaatatgtacagatgtggaaggtgcacatcatatgttcgagctagaaagcaactgagcatacatgaggctcctaacatcttgactatagttctgaagagatttcaggaaggaagatatgggaaacttaacaagtgcataacttttcctgaaat

SEQ ID NO: 170685 - DNA, 263 bp, Glycine max
ctgtctctgtgtttgcggctgaggattccgaacgagcgaccttcttcgtttctcgcaaagtttaagtcctcatgggtaaggaaaagactcacatcaacattgtcgtcattggacatgtcgactctgggaagtcaactaccactggtcatttgatctacaagcttggaggtattgacaagcgtgtgattgagaggttcgagaaggaggctgctgagatgaacaagaggtcattcaagtatgcctgggtgcttgacaagctcaag

SEQ ID NO: 170686 - DNA, 260 bp, Glycine max
gatcaagtcatttagagtgccagagctttttatagaggttccagaaactgcaacaattgggtccttgaagaggacagtgatggatgcagtgactgctgtgcttggaggtgaattgcacattggtgtttttctccagggaaaacaagttaaggatgacagtaaaactctacttcaaactggaatttctcatcataacgagttggatgctttgggtttcaccctggagcctaattcttcacaaagcctaccgattgtatgtg

SEQ ID NO: 170687 - DNA, 261 bp, Glycine max
ggtgtttgttgatcaactaccgggactaaacacgccgggcataggcttgcctcccatagatttcgcaccaaacgccctgcacgctccccacactcaccctcggtgcactgagatccttatagtccttgagggtactctctatgttggatttgtgacttccaatcaagatggaaatcgcctcttcaccaaagtcctgaacaagggtgacgtgtttgtgttcccaattggtctcattcatttccaactcaatgtgggatatgg

SEQ ID NO: 170688 - DNA, 263 bp, Glycine max
tccacctcgagcgaatcggctcaggtcgagaccgccaacgccgccacacgacaccttcaaggcatacggcgtcgacatgaaaccaccccaccaacacgttctccaactacgccggcggcgcaacggcgccgtcgagagattctccagctaccgcgataaggccaacgtcggagccgactccttcacctcgtacgccaagtccgccaacgccgccgacatcggattctccaactacggcaagtccttcaacgagggaaccgaca

SEQ ID NO: 170689 - DNA, 257 bp, Glycine max
ctcgagcgctggtaatatacctctcatctctcattagaagtgtaattgcactccacaacttgattaacaacaagatgcttaacaaggaacatgagcgggcagaagattcgaaatcagttacggtgccaggtgcagctgcttaagttttgaggggttgtgatgttcggagctctaaatgtcatttgagtacatggatttgagattgttacaccttttcctatttctgctagggttagagtacttacacctaacatggc

SEQ ID NO: 170690 - DNA, 273 bp, Glycine max
gtaaaatcttctgccccaccctgcatttcagcagagtgattctgttcactacaatgccatcatcactatcctctttcctccatatggttcctattctctcccttcttgtactctcatgtgtgatttgttctagtagtgctcagggaccaccttcacctggctactaccccagttccaaaattagtcctgttagtttttatcaagggtttagaaacctatggggacctcagcatcagaggctagaccaaggctcattgacaatctggcttgact

SEQ ID NO: 170691 - DNA, 262 bp, Glycine max
gccgtatcataaatgtcattggagagcctattgatgacaagggagaaatcaataccgagcattatttgcccattcatagagaagctcccgcttttgttgagcaagaaaccgcacagcagattcttgttactggaatcaaggttgttgacctgcttgcaccatatcaaagaggaggaaagattgggttgtttggtggtgctggtgtaggaaaaactgtgcttattatggaacttattaacaatgttgcaaaagctcatggtgg

SEQ ID NO: 170692 - DNA, 259 bp, Glycine max
cacaacactagctatagtaagctacacttatttgaggttggagaaatatggctaaagatgttgaggttcaagagcaaggaggagagtactctgcaaaagactaccatgaccctcctccagcacccttgttcgacccagaggagctcacacagtggtccttttatagagccctaatcgctgagttcatagcaacccttctcttcctttatgtcaccgtgctcaccattattggctacaaaaggcagactgatgccacgct

SEQ ID NO: 170693 - DNA, 257 bp, Glycine max
gaaaaaagaggcgcaagatgagtggtagggtttctgggaaggtgaagtggttcaacgatcagaaggggtttggattcataacccctgacgatggcagcgaggaactcttcgttcaccaatctcagatcaaatctgacggtttccgaagcctagctgaaggagagtccgttgagttcgctattgaatctgaatctgacggacgcgccaaggctgttgatgtcactggccccgacggcgccaggtccagggaaccagac

SEQ ID NO: 170694 - DNA, 249 bp, Glycine max
aacaacttctgctacttcctactccaaccgcacttctgttccgcaattatcatgggcaaggtcaagatcggaatcaacggatttggaagaattggccgtttggtagccagagtggctctgcagagagacgatgttgaactcgttgccgttaacgaccctttcatcaccaccgattacatgacatacatgtttaaatacgacagtgttcatggacactggaagcatcacgatgtccccgttaaggacgag

SEQ ID NO: 170695 - DNA, 260 bp, Glycine max
acatgccaaacgacagcgttctgagtcttttcttcttcgtctccctcttcacatgccttctctctgctaattcccacgatgaccatattttcctaccgagtcaactccatgacgatgactcagtgagttgcactgctaccgacccaaaccttaactacaagccggtgatcggactcctgacccaccccggcgacggtgcctctggccggctcagcaacgccaccggggtttcttacatcgccgcctcctacgttaaattc

SEQ ID NO: 170696 - DNA, 259 bp, Glycine max
cttatatctatatttcagttcattttgttctccaataatttcttctgctactttagagaccttgctgcaaaggttctctcttagcatggtaacaatgggtttgaaagcactttttgtttggtgcataatatggttggcgtttgcacagttgtcactaggaggaagagtgaggcattacaagtttcatgtggagtacatgatcagacagccagattgcttggaacacgttgtgatgggaatcaacggccagtttccaggc

SEQ ID NO: 170697 - DNA, 262 bp, Glycine max
atgcaacgaccacaattttgttcctcaccaaaatgggaactcttaagcctattgctatccagcttgctcttccaactgggaatccaaatacttcatccaagcaagttctcactcctcccaaagatgccacctctaaatggctctggcaacttggcaaagcacatgtttgctccaatgatgctggtgttcatacacttgtgcaccactggttacgtatacatgcttgcatggaaccgttgataattgcaactcatcggcaatt

SEQ ID NO: 170698 - DNA, 253 bp, Glycine max
gctgagtctaatcccacaattaacctctctgtgttggaagtggcatcaccacaagcttatggcctggttggaatggcagcgactcttgcaggagtttgtcaagtaccacttactgcagttttgcttctgtttgaattgacacaggactatcggattgttctaccacttcttggagcagtaggcttgtcgtcatggatttcatctgtacagacaaaaagaggagatgatggaggggcaaaacaaattgagttag

SEQ ID NO: 170699 - DNA, 255 bp, Glycine max
cagcgatctgggacttttctttctcccccacaccacacccagattcaaaaactcgctctgctctgctctgcaattccccttccgtttcgtttcgatctcaaaacatgttcttcttcgattggttctatggcattctagcttccctcggtctctggcagaaagaagccaaaattctcttccttggtctcgataatgcagggaagaccacacttcttcacatgctcaaagacgagagattagttcagcaccagccga

SEQ ID NO: 170700 - DNA, 259 bp, Glycine max
tctcgagccgaatcggctcgagtgaagatcactcaaaccaatctactctatctatctggtataggcatggagctttgttggcaaaaatctatccatggctcttaaaagaagcatggaggattgtgtgagagggttctcacccttcacactccacctcctaaagtttgcttatgctttagctattggcttctctaatcaataaccacaaaagggtatgacacatggaggaacatagttctctctatgagtggcatgaagc

SEQ ID NO: 170701 - DNA, 257 bp, Glycine max
caactttttcgacggcaaggttatgaaggaggcactgaccaaggtgctggtgcccttctacccaatggctgggcggctccggcgagatgacgacggtcgcgtcgagattgactgcgacggtcagggggtgcttttcgtggaggccgacactggcgccgtcatcgacgatttcggcgatttcgctcccacccttgagctccgccagcttatccccgccgtggattattcacaaggaatagcatcctatcccctgttgg

SEQ ID NO: 170702 - DNA, 257 bp, Glycine max
agacagagtagtacagattactaccaatggctaccaaggtttacattgtttattattctacgtatggacatgttgagaagctagctagagagatagaaaaaggggctgcttctgtggagggagtagaagcaaaactgtggcaggtacctgaaacattgcctgaagaagtccttgctaagttgggagtcactccaaagagtgatgttccaattattactcccaatgagcttcctgaggctgatggctttttgtttggt

SEQ ID NO: 170703 - DNA, 250 bp, Glycine max
tttacagctatcgaagatggctcctcccagaggtcgtggtggtactcgtggtggtggtggtggtgggttcaggggtggtggtaggggtgacagaggcagaggcaggggcggtggaggacgaggaggagacagaggtacacccttcaaagctagaggcggtggtagaggtggtggaggccgtggaggaggcaggggtggtggccgtggcggtggcagaggtggaatgaagggtggtagcaaggttgttgtt

SEQ ID NO: 170704 - DNA, 252 bp, Glycine max
agagaccatggtgaacctagtggtagcacagagaccattgctacatgggcttatgaagatggcggggatcaggccctacacggtggagatagagcccgggactaccatgagcttctgggtcccttcggagaccataacaaagcctaagaaaaaggacgagaagcccagaatcagggcgaacctagcaagcccgcggtgattctggtgcacggcttcgcggccgaggggatcgtgacgtggcagttccaagta

SEQ ID NO: 170705 - DNA, 258 bp, Glycine max
ggttcattcactgtcaccacggatacctctggtgaggttcttggcaggggtactaagatcactctcttcctcaaggaggatcagctagagtaccttgaggagcgccggttgaaggatttgattaagaagcattctgagttcattagctacccaatttctctttgggttgagaagactaccgagaaggagatttctcacgatgaggatgaggaagagaagccggatgaggagggtaaggtggaggatgttgatgaggag

SEQ ID NO: 170706 - DNA, 256 bp, Glycine max
cattttcagaggaaaatggcgggtacggtttcgacttgtttcttcttcgtgtttcttctttctctccttcttccttttcagatctccgctgaggaatcctcggagaaggagttcgtactcacattggatcactctaactttcacgacactgtcagcaagcacgatttcatcgtcgtcgagttctacgccccatggtgtggtcactgtaagaagcttgctccggagtatgagacagctgcttctatcttgagtagtc

SEQ ID NO: 170707 - DNA, 255 bp, Glycine max
aaatttcgtttgtgagacaagctaggcacaatttttgttattcctatcttatcttaacattgtttcttggagttgattgacatggcagtgcaacctgaaattgagcatcccaggaaggcctatggatgggcagctagggatacatctggtgttctctcccctttttggttctctagaaggaaaacaggggagaaagacgtgacatttaaagtgttgtattgtggagtatgccactcggaccttcacaagttgaaa

SEQ ID NO: 170708 - DNA, 254 bp, Glycine max
ctcgatcactcccacgcgctcctatatcctctccttcaccgtcgctctctccaacgatcacaacaacatcgtcatcccatggcaaacgccgcatctggtatggcagtccatgatgactgcaagttaaggtttttggagctgaagacaaagaggacacaccgtttcatagtttttaagattgaggagcagcagaagcaggtcattgtggagaagcttggtgagccagcccaaggctatgaagatttcactgccag

SEQ ID NO: 170709 - DNA, 256 bp, Glycine max
cttggaagtcatggctgcccatggatgcaagaagctcgtgttctcttcttcagcaactgtatatggttggccaaaggaagttccatgcacagaagagttccctctgtcagcaatgaacccatatggacgaactaagcttatcattgaagaaatttgtcgtgatgtccaccgtgcagagccagattggaaaataatattgttaagatacttcaacccagtcggtgcacaccctagcggttgtattggggaggatccc

SEQ ID NO: 170710 - DNA, 234 bp, Glycine max
cttctttctttttctgtgagcctttctttcaggttcttaacttgatcagtgtgcagtgtccaaatcataagggtagttgcaaattgcaatggctaagcatgatgttgagggtggttccttctctgcaaaggactaccatgatcctcctccagcaccgttgattgatgctgaggaactcacacagtggtccttctacagggctttgattgctgagttcattgccacaatgctctc

SEQ ID NO: 170711 - DNA, 255 bp, Glycine max
tgaagatcatgcccgtccagaagcagacccgcgccggtcagcgaacccgcttcaaggccttcgtggtggtcggcgacaacaacggccacgtcggtctcggagtgaagtgcagcaaggaagtcgccaccgccatacgcggcgccatcattctcgcaaagctctctgttattcctgtgaggagaggctattggggtaacaagatcggaaagccccacaccgttccctgcaaggttaccggaaagtgtggctccgtca

SEQ ID NO: 170712 - DNA, 244 bp, Glycine max
ttaattccaaattagaatcctcaaattccaaaattgaaaaggtcaagatgactggtacaggatctccttgtggagcctgcaagttcttgagaagaaaatgtgtgagaggctgtgtttttgcaccttacttttgccaagagcaaggtgctactcattttgcagccattcataaggtctttggtgcaagcaatgtctcaaagctcctcgctcaccttcctgtgagtgatcgttgtgaagctgctgt

SEQ ID NO: 170713 - DNA, 259 bp, Glycine max
gtgatttcagtgagtgatcagtgttcacttgatctcatcataatcgtcagcgtcaattgaagaagatgccgatcagaaacatcgccgtcggaaggcctgaagaggcgactcaccccgacacgttgaaggcggctttggctgagttcatctcaaccttcatcttcgtgttcgccggctcaggctccggcatcgcctacaacaagctcaccgacaacggcgctgccacccctgccggcctcatctccgcctccatcgccca

SEQ ID NO: 170714 - DNA, 272 bp, Glycine max
gttctgctctggcggccggctgtgctgcaatattgaagccctctgagttggcatctgtgacatgcttggagctggctgaaatttgcaaagaagtcgggcttcctcctggcgtgttgaacattctcactggattaggacctgaagcgggtgctcctttagcagctcatcgcgaatgtagacaagattgcctttactggaagctctgcaactgggagcaaaattatgacagctgcagctcagctgatcaagcctgtttcactagagcttggtgg

SEQ ID NO: 170715 - DNA, 252 bp, Glycine max
gcgaagagaatggctcccaagggtttaatctttttggctgtgttatgcttctcagcactgtcactgagtcgttgtcttgcggaggataatggacttgttatgaacttctacaaggaatcatgccctcaggctgaagacatcatcaaagaacaagtcaagcttctctacaagcgccacaagaacactgctttctcctggctcagaaacatcttccatgactgtgctgttcagagttgtgatgctttcactgtg

SEQ ID NO: 170716 - DNA, 264 bp, Glycine max
gcagcagcagagagtgcggtaggctcatccgagaccggaagcagcaatggggatcgatctcaaggccggaggtaaaagcaaaaaaaccaaaagaacagcacccaagtccaatgatatctatcttaagctcttggtcaagctttatcgcttccttgttcggagaactggcagcaaattcaatgccgttatactcaagagattgttcatgagcaaggttaacaagcccccattgtctttgtcaaggttgattaagtataccaaggg

SEQ ID NO: 170717 - DNA, 251 bp, Glycine max
ccatggcttccgcttgtgcttcctctgcaattacagctgttgccatctctacgccgagttccgggcagaagaatggatcaggaggttgttttcttagtggaaggaaattgagggtgaaaaaggagagagcagcaattggaggacgatcgatgggcactacagtgtgcgcagttgctgagcctgacagacctctatggttcccaggcagcacccctcctccatggcttgatggcactctacctggagacttc

SEQ ID NO: 170718 - DNA, 266 bp, Glycine max
cacatcatcatcatcttcttcttcttcaatcagttgactcttcgttcctccctctattcatctgtgcgcgttcttctatctttctcttttctctcagatctgtgttcccggtatcgtcgttttgttcattcttttttttggatctcaggatggagcccatggacatcgttgggaaggccaaggaagacgcttctcttcctaaagcgacaatgacgaaaattattaaagagatgttgcccccggacgtgcgtgtcgccagagatgca

SEQ ID NO: 170719 - DNA, 168 bp, Glycine max
ccctagtctccatacatcaacttgggaggttaaagagacggcaacgttgtgctgtccgccttgaccgagccagagcttcgtcttggccctcgattttgccctgtaaaactaatcccagtaacaacagaaataatcaatggcaccgaaacagaccaaggctgagaagaa

SEQ ID NO: 170720 - DNA, 148 bp, Glycine max
  unsure (1)..(148): unsure at all n locations
tggagaggtggaagagctgcttcgttcaatataattcctagcagcactggagctgctaangctgtaggaaaagttcttccagcgctgaatggtaaattgactggaatgtccttccgagtccccactgttgatgtttcagttgttgacc

SEQ ID NO: 170721 - DNA, 150 bp, Glycine max
agaactcgcagcaccaccaccagcaccaccaccagcaccgttctattcttcttccacaatgggtatctctcgtgattccatgcacaagaggcgcgccaccggcggcaagaagaaggcttggaggaagaagagaaagtatgagcttgggag

SEQ ID NO: 170722 - DNA, 160 bp, Glycine max
gccacatagagacacaatacagagtgagttgttgctccttcgccacaactctctgccaacatgggtatctccagagattctatgcacaagaggcgtgccactggtggcaagaagaaggcctggaggaaaaagagaacgtatgagcttggtcgccagcctg

SEQ ID NO: 170723 - DNA, 145 bp, Glycine max
cttttctactttgagtcttcttgatccttctttttctccttgaactcaaacatggcagatgaggtggttctgctagatttctggccaagtccatttgggatgagggtcaggattgcacttgctgaaaagggtatcaaatatgagt

SEQ ID NO: 170724 - DNA, 154 bp, Glycine max
tgctctgctcgtgcctctagggttatcatatctccatttccatttcctctctctcagtttccaagaatcttaagctatgggaaagtcttacccaaccgtgagcgctgattaccagaaggccgttgagaaggcgaagaagaagctcagaggcttc

SEQ ID NO: 170725 - DNA, 148 bp, Glycine max
gcagagaagagccatggtgcacgtttctttctaccgaaactatgggaaaacgttcaagaagcctcgtcgtccctacgagaaggagcgtttggacgccgagttgaagctggtcggtgagtacgggcttcgctgcaagagggagttatgg

SEQ ID NO: 170726 - DNA, 268 bp, Glycine max
tgcttcagagaagaaactttcgaacccaatgagggatataaaagtgcagaagctcgtcctcaatatctctgttggcgatagtggagatcgtctcaccagagccgccaaggtgttggaacaacttagtggccaaaccccagtgttttccaaagcaaggtacactgttcgttcctttgggattagaagaaatgagaagattgcatgctatgtcactgtcagaggtgacaaggcaatgcaacttttggagagtggtttgaaggtgaaggaa

SEQ ID NO: 170727 - DNA, 261 bp, Glycine max
ctcctcccatctctctgctctaaacgacaccgttttagtcttctcatcaagtcatggccacactcaagagcctctgcttcagaggaactgcctttcccgtttgcccctccaatgtcaccaacaatagaaactccaggagctcatattggaggcctgcacaagcagccgtgaagcccaatttccatctcccaatgcgcagttttgagttaaaaaataggacttctccagaggacataaaggctctgagattgataactgcca

SEQ ID NO: 170728 - DNA, 244 bp, Glycine max
attccaatatattccattctctctgtgtatttccctacctctcccttcaagatgcagatcttcgtcaagaccctcaccggcaagaccatcacccttgaggtggaaagctctgacaccatcgacaacgtcaaggccaagatccaggacaaggaaggaaatcccccggaccagcaacgtctcattttcgccggaaagcaacttgaggacggccgtacccttgctgactacaacattcagaaggaga

SEQ ID NO: 170729 - DNA, 250 bp, Glycine max
gaagtgttggatgcatttctatttctaactaattattgtgcttattattattgttgagaaagaaaagaatggcaaagttaataaaattctttgagttgaacacaggggccaagattccttctgttgggttaggcacttggcaagctgagcctggtgttgtagccaaagctgtcaccacagccattctggttggatacaggcatattgattgtgctcaagcgtataacaatcaagcagagattggttctgc

SEQ ID NO: 170730 - DNA, 260 bp, Glycine max
cgcgctcagccgcatccgcaacaacgcgcggaacctcctcaccctcgacgagaagaacccgcgccggatcttcgagggagaggcgctgctccgaaggatgttccgacacggtctcctcgatgagacacagaacaagcttgattacgtcctcgccctcaccgtcgagaactttctcgagcgccgcctccagacccttgttttcaagtccggcatggccaagtccatccaccatgctagggttcttatcaagcagagacata

SEQ ID NO: 170731 - DNA, 263 bp, Glycine max
attctcttctcttctcttctgggtttttgctttttcctcattctctcattctcaaacaccacaaaaaaatgggccttgtttcccaggatgccctcaaccaactccaagctctcatggatcaagtgctacttgaggaggagccactgcagagaacgtttcagaatgttcatcaaggatgtgtcaccgaaaccttaacacggtttctaaaagcaagggagtggaatgctaccaaggcccataaaatgatagtcgattgtttgaag

SEQ ID NO: 170732 - DNA, 264 bp, Glycine max
cgcacatcgctattctcttcattccatggctttgcccaaccagcaaaccgtggattaccctagtttcaaactcgttatcgtcggcgatggtggcacaggaaagacaacctttgtgaaaaggcatctcaccggagaattcgagaagaaatatgagccaaccatcggtgtggaggttcacccattggattttttcacaaactgtggaaagattcgattttactgctgggatactgctggacaggagaaatttggtggcctcagaga

SEQ ID NO: 170733 - DNA, 263 bp, Glycine max
caaaaatggcacctgcaacactgtctctgtctctcctcctcctgttctcactcagcatcgccgtaaccgttagatcgagcgactacgactacgattgtgtgtacactgcatacgttagaaccggttcggtgttgaagggcggaacggactctaagatcgggctgaagctgtacgacaagtacgggctactacatctacattaaaaacctcgaagcatggggcggcttgatgggcaagggctacgactacttcgagcgcggcaa

SEQ ID NO: 170734 - DNA, 142 bp, Glycine max
cactaacagtagggatacacaagaggtaatgttggagcctggcctgaaattaatcaaaattttcaaggaatataccagcaagacatgcattctggatgattttggcttctatgaggcccgtcagaagactattttggagaag

SEQ ID NO: 170735 - DNA, 152 bp, Glycine max
cgagattccccctaaacccgtttgcgttgttgtttgcgaagaaatggcgactaagaggagcgtgggaacgttgaaggagggtgatttgaaagggaagagggtgttcgtgagggtcgatctgaacgtgcctttggatgacaaccttaacatca

SEQ ID NO: 170736 - DNA, 185 bp, Glycine max
cctccctcccgcagtagccatgtttctcaaaactgaactatgccgattcagtggtgccaagatctaccccggaaagggcatcagatttgttcgtggtgattctcaggttttcctgtttgccaactcaaaatgtaagcggtatttccacaaccgcctgaagccctcaaagctcacctggactgcta

SEQ ID NO: 170737 - DNA, 138 bp, Glycine max
gtgagagacatggcttccttaagctccttagtgctgctccttgcagctctaattctatcccctcaagttcttgcaaactatgagaatgccccagtgtacaagcctcccactgagaaaccaccagtttgtaagccccca

SEQ ID NO: 170738 - DNA, 264 bp, Glycine max
gcagagtgttattttgagtatcagcatcaatggctccaattgcagtgggaaacgtgattccagacggcattttggcttacttggatgaagaaaacaaaccccaaactgtctccattcactctctcgccaccggcaagaaagtcatcatctttggggttcccggtgccttcaactcctacttgcagcttgaagcacgttcctggcttcattgagagagcagaagagctgaaagggaagggtgtggacgaaataatctgtatcagt

SEQ ID NO: 170739 - DNA, 262 bp, Glycine max
gcaagtttgttctttcgccgccgtcgctcacaactcgcaaaccacaatgcctaagcagatccacgagattaaggatttccttctgacggcacggaggaaggatgcgaggtcggtgaaaatcaagaggagcagggatgtcgttaagtttaaggttcgatgctccaagtatttgtacacgctttgtgtctttgatcctgagaaagccgataaattgaagcaatctcttcctcccggtttgagtgttcaagacctgtagaggtgc

SEQ ID NO: 170740 - DNA, 256 bp, Glycine max
ctgaaacagagcatggctcctctcacattctccttcttcttcatccttatctcttacatttcttcatcatcagaagcgggatcaatcggaataaactatggaagaattgcgaacgacctacctacaccggcgaaagtggtggagcttcttaagagtcagggggctgaacgtgtgagcctctacgacaccgacgccaccgtcttaaccgcgtttgccaactcaggaatgaaggtggtggttgccatgccaaacgagc

SEQ ID NO: 170741 - DNA, 151 bp, Glycine max
ctccatttctcactcgccgtcgtctcttccgtctagggtttctcctcttcacaaaaatggttgccgcaaaaaaaactaagaagacccatgagagcatcaacaacaggctcgctctcgtcatgaagagtggcaaattcaccctcggttacaa

SEQ ID NO: 170742 - DNA, 256 bp, Glycine max
cattttctagcttccaaaccctaacactcctcttcctcttcgatcatcacctctccacaatgccgccgaagttcgacccctcccagatagtcgacgtcttcgtccgcgttaccggcggcgaagtcggcgcggcgagttccctggccccgaagatcggtcccctcggtctctcccccaagaagatcggagaagacatcgccaaagaaaccgccaaggacctggaaggcctccgcgtcaccgtcaagctcaccgttca

SEQ ID NO: 170743 - DNA, 259 bp, Glycine max
gaatgcagccccaatcgggcggtaaattccgtccaaggctaaatactggcgagagaccgatagcgaacaagtaccgcgagggaaagatgagcaccaaggaggtcgatgaacaaatgatcaatgtgcagaacaagaactcctcatactttgtggaatggattccccacaatgtgaaatccacagtctgtgacattcccccaaccggcttgaagatggcttcaacattcattggcaactctacctccattcaggagatgtt

SEQ ID NO: 170744 - DNA, 255 bp, Glycine max
aacggtcacgggtgcttccctcgctgcgttactgaaaacatcagaaatcatgtcacgcttgagaatctgagttcagactcagagccttttgttgttcctaatctccctcacagaatcgaaatgacaaggtctcggcttccggtttttctgaggaacccgtctcagttccctgataggatgaagcaatgggacgacaacggtttcggcattgtcaccaacagcttctatgacttagaaccggattatgctgattac

SEQ ID NO: 170745 - DNA, 256 bp, Glycine max
aacaaaatgtgccttttcctcttcctgttttttatggaatgctatctggccacggcaatgggaattgtggtgctacaaaagtcagaagctgcaatcccagtgacaacattgtcaccacctgaaggcaacactacattcattgatggcacaacttggtgtgtggctcttgctggtgtttcccaagctgacttgcagaatgctcttgattgggcttgtggacttggaatggcagattgcacagccatccaacatggtg

SEQ ID NO: 170746 - DNA, 147 bp, Glycine max
ccgggagttctatctggagaaaagcaacgcacacaacgagcatatgattttacgggtgtaacatcttggtttgctgctaagtgtgatttgattctccttctgtttgatcctcacaaacttgacatcagtgatgagttcaatcgtgtg

SEQ ID NO: 170747 - DNA, 256 bp, Glycine max
atcacttaatgttcgccattttgttccaggccagtatgttgatatcacaggaataacaaaaggaaaaggttttcagggtgtgatgaagcggcatggatttagtggagggccagcatcccatggtaattcattggcccatcgaacacttggttctgtaggtcatttaactagtcatggaaaggtttttaaaaataaaaagatgcctgggcgaatgggtggagaccaaagaacagttaaaaatgtatgggtctacaaa

SEQ ID NO: 170748 - DNA, 198 bp, Glycine max
gtgaccaaactccatttctcactcgccgtcgtctcttccgtctagggtttctcctcttcacaaaaatggttgccgcaaaaaaaactaagaagacccatgagagcatcaacaacaggctcgctctcgtcatgaagagtggcaaattcaccctcggttacaagaccgttctcaaatctcttaggagctccaaagggaaat

SEQ ID NO: 170749 - DNA, 172 bp, Glycine max
caaagcgtgcgggaagctgctcttgctcgtttgaaggtttatgaaggaatccctcctccatatgacaagaccaagagaatggttgttcctgatgcactcaaggtgttgaggcttcagaagggacacaagtattgtgtgctgggcaggttgtcatctgaagttggatggagct

SEQ ID NO: 170750 - DNA, 295 bp, Glycine max
  unsure (1)..(295): unsure at all n locations
aaaaaaaaatagaagaggggacgcagtgctatcgagtttttttttcttaatgccatggctgctctgcaatacttggaatcgctgcgcaacgcgcatcctgagctctccgattggtacaattcgctggcggatctataccagaacaagctctggcaccagcttaccctcaagcttgagcagttcgtggctctcgccgtcttccaggccggtgatgcattaatacaattatatcacaatttcatcacagactttgagaccanaatcaaccttctcaagcttgcgcatttcgctgtta

SEQ ID NO: 170751 - DNA, 157 bp, Glycine max
agtgccaatgcgagctaccagaatcttacgaagcttacaggaaacagcagcatagatagcattctgggccaatgcaactgttccgcttgtgtttgcctgatatcatcagggccaagataagtgtgtggaagaaattcaacatgatattcctcttctt

SEQ ID NO: 170752 - DNA, 147 bp, Glycine max
  unsure (1)..(147): unsure at all n locations
ccaacttccgctacttccctactcccaacccactttcttttttcccgcagtcatgggcaaggtcaagatcggaatcaacggatttggaagaattggnccgtttggtggccagggtggctctgcagagagacgatgttgaactcgttg

SEQ ID NO: 170753 - DNA, 294 bp, Glycine max
gaacagcggaagaatacaccgccacacgctgcaagccctttaccttgtgcttcctgcgttcctgtgagaacccacgttctctaacgcgcttctccttcaaagttcaaattcctatacatttgcgtaatcgcttctcaaatctcaacaaaagtattcccaaaaaaccctaattattattattaaacatgaggccgattctgatgaaaggccacgagaggccactgacgttcctcaagtacaacagggacggcgatctccttttctcctgcgccaaggaccacaaccccaccgtct

SEQ ID NO: 170754 - DNA, 295 bp, Glycine max
gtagcaacacaaccttaaagttaaaactcagatatggtttggtttcaatgcgaagattgcggagacaacctcaaaaaacccaagttgtctagtcacttccgaacttgctctgcctacaaattgtcgtgcattgactgtggggaaatatttgggcgtgacaccgttcaggatcacacgcagtgtatcacagaagcggagaaatatggaccaaaaggccaaggcaaaactttgaacgttgcaactgcaaaccctaataaggatagcaaacaaaggcccgacattgatattaatgtgg

SEQ ID NO: 170755 - DNA, 292 bp, Glycine max
  unsure (1)..(292): unsure at all n locations
actccccttgctgcggttgctccatcacctaatcacttccccacttcccctgtaaatcacgtttagttcgcacaaggttttaaaaaatggctgatgctgaggacattcaacctcttgttgttgataatggaactggaatggtcaaggcgggttttgcaggtgatgacgctcctagggccgtgttccccagtattattgggcgaccacgccatactggtgtaatggttgggatgggtcagaaggatgcttacgtgggtgatgaagctcaatcanaaaggggtatactcacctt

SEQ ID NO: 170756 - DNA, 279 bp, Glycine max
tagactcttctttttctctaagtctaaggggtgccctgagatcactttgagcaatggtgaaggctgtggcagttcttggcagcagcgagggtgtcactggaactattttcttcactcaggagggaaatggtccaaccaccgtaactggatctcttgctggtcttaagcctggtctccatggcttccatgtccatgccttgggggacactaccaatggttgcctgtcaactggagcgcatttcaatcctaataacaacgagcacggtgcccctgaggacg

SEQ ID NO: 170757 - DNA, 287 bp, Glycine max
tcttgggtgaggaattggacacccagaagaattgaatggccatggaaaatcaaaattttctagagtattgggttttgccactacttatgatgcttttgttgggtcattggatctctgttcaagctgccccttcaccctctctcatcactcaactccctggctttaacgccaatttcccatccaagcactattccgggtatataagtattgatggaaatgctgaaagtgggaagaacctgttctactactttgttagttcagaaagtagtccagagaaggacccagtt

SEQ ID NO: 170758 - DNA, 289 bp, Glycine max
ctttgtttgcttctcaagtctctcgaagcctctttctctctcttactagaagctatctgtgtttggtgttactaagtctccaacaagcaaagtacatggttgatttggaaatccaggtccccaccccattcgacccgtttgccgaggcgagagaatcggatgcccccggagcaaaggagtatgtgcatattcgaattcagcagaggaatgggaagaagagtctgaccacagtgcaagggctgaagaaggatttcagctacgagaagatcctcaaggacctcaagaagga

SEQ ID NO: 170759 - DNA, 289 bp, Glycine max
gagtgatcggtgttcacttgatccttcataagtcgtcatcatcatcatcatcatcaccgttgattgaagaagatgccgatcagaaacatcgccatcggaaggcctgaagaggctactcaccccgacacgttgaaggcggggttggctgagttcatctccaccttgatcttcgtgttcgccggttcaggttccggcatcgcctacaacaagctcaccgacaacggcgccgccactcccgccggcctcatctccgcttccatcgcccatgctttcgccctcttcgtcgccg

SEQ ID NO: 170760 - DNA, 192 bp, Glycine max
tatggcttcaactctgcttcccctggcaaccttcttcttagttctctccgcttcttatctccagattgctggggcgaaagcacaaccgttgactagtctcaagcttaactctccgatccttcaggagtctattgctaaagagatcaatgaaaatcctgaggcaggatgggaggctgctataaatcctcattt

SEQ ID NO: 170761 - DNA, 285 bp, Glycine max
  unsure (1)..(285): unsure at all n locations
ctgcgaaggtgatcaagaaggattcggccaagaagacggccaagaagtcgcgtgtgaaggcgttcgtgaagctcgtgaactaccagcacctcatgcccacgcgctacacgctcgatgtcgatttgaaggacgcggttacacccgacgtgctccaagccaaggataagaaggttactgctctcaaggagaccaagaagcgcctcgaggagaggttcaagactgggaagaatcggtggttcttcaccaagctcaggttctgagcataatattatgcatntttgtttt

SEQ ID NO: 170762 - DNA, 152 bp, Glycine max
agtcgcaaccctaatcagaagaagcgcacttcaagcgagtgacagccaccagccatgggtcgtatgcacagccgcggtaagggtatatcctcttctgctttgccctacaaaaggacacctcctagctggctcaagatctcttcgcaagatgt

SEQ ID NO: 170763 - DNA, 283 bp, Glycine max
gtttgtaccattgaggagtctggtgaacacattgttgctggtgcaggagagcttcatcttgagatctgtttgaaggacttgcaggatgatttcatgggtggagctgagatcattaaatctgaccctgttgtgtcattcagggagactgtcctggagagatcatgccgcactgtgatgagcaaatcacccaacaagcacaatcgtctgtacatggaagcaagaccattggaggagggtcttgccgaggccattgacgatggcaagattggaccaagggatgacc

SEQ ID NO: 170764 - DNA, 288 bp, Glycine max
ctattctattccatcatcaatggagaacaccgagggatccggatctgcgacgaacggggtgctggctccgccgcgcaaggtggcattgataaccggaattaccggacaagacggttcgtacctgacggaattcctcctggacaaggggtacgaggtgcacggcctgatccgccgctcgtcgaacttcaacacgcagcgcatcgaccacatatacgtggatccccacaacgcccacaaggcgcgcatgaagctccactacgccgatctctccgacgcctcctccctccg

SEQ ID NO: 170765 - DNA, 288 bp, Glycine max
cttcctcagtagtgtcatttacgcttctcttctctgcagcaactatgcctaaccctaaggtcttcttcgacatgaccatcggcggtcaatctgctggccgcatcgtgatggagctctacgccgacgtcactccccgcaccgccgagaacttccgcgcgctttgcaccggcgagaagggcgtagggcggagcggcaagcccctccactacaagggctcgtccttccaccgcgtgatcccgagtttcatgtgtcagggtggcgacttcaccgccggaaacggaaccggcg

SEQ ID NO: 170766 - DNA, 278 bp, Glycine max
tcgacaccggaatctggccggagctcaagagcttctccgacgaaaacctctccccaatctcctcctcctcctcatggaaaggctcctgccaatcctcacccgacttcccttcctccctctgcaacaacaaaatcatcggcgccaaagccttctacaaaggctacgaatcctacctcgacagaccaatcgacgaatctcaggaatcgaaatcgccacgcgacaccgtaggccacggcacgcacaccgactccaccgccgcagctcgtcgtctccaacgc

SEQ ID NO: 170767 - DNA, 282 bp, Glycine max
cgctctctaattacatttctaatctcattctccttctgttcaaacactctcatggcatcagataagaagattaggatcggcatcaacggatttggaaggattggccgtttggtggccagggttgcccttcaaaggaatgatgttgaacttgttgctgtcaacgatccttcatcaccactgattacatgacatacatgttcaagtacgacaccgttcatggccagtggaagcattttgatgtgaaggtgaaggactctaagacccttctctttggtgagaagc

SEQ ID NO: 170768 - DNA, 284 bp, Glycine max
cagcttcagcagcagcggcaagcaactccatccgcaatgggaatcgatttgaaggcaggaggtaagtccaagaagaccaaacgtacagcccccaaatccaatgatatttacctcaagctcctcgtcaagctgtaccgttttcttgttcggacgactggtagtaacttcaatgccgtcatcctcaaacgccttttcatgagcaaggtcaacaagcccccgctatccctctctagattgatgtcgttacaccaagggaaaggaggataagatagctgtggtagtcg

SEQ ID NO: 170769 - DNA, 310 bp, Glycine max
cgtacgtacgcacggactgcagtcggctcgagaattttcttcatccttctctgttctcctagaacttgattacttgaacattccctatgacagatgaggtggttcttctggatttctggccaagtccatttgggatgagggtcaggattgcacttgctgaaaagggtatcgaatatgagtacaaagaagaggacttgaggaacaagagtcctcttctcttacaaatgaacccggttcacaagaagattccggttctcatccacaatggcaaactcatttccgaatcgctcattgctgttcagtacattga

SEQ ID NO: 170770 - DNA, 279 bp, Glycine max
  unsure (1)..(279): unsure at all n locations
gctgcagtagagaagcactcttcgttcttcgactgtctacgatctgctttctctgaattgtgaaaatgtcgctcggagaaactgcttgttcatacgcagctctcatccttcatgaagatggaattagtgtaactgctgacaagatcagcaccttgttgaaaactgcaaaggttccagtagactcttattggccaaccttgtttgctaaacttgctgagaagaaaaatcttggcgatttgatagcaaatgcggcnagcggtggtgcaccagttgctgttg

SEQ ID NO: 170771 - DNA, 285 bp, Glycine max
gtcactcttcctgcagaacccagatctgtagacaatatgggaagcactggtttgctacatttgatatgccttgtcattgctttagtaagtgtgtcgcttgtgcaagcagaagatgcgtataagtatttcacatggacggtgacttatgggactctttatcccttggctagtccccagcaggttattcttatcaatggtcagtttcctgggcctagacttgacttggtaactaatgaaaatgtaattctcaaccttatcaacaagctggacgaaccatttttactc

SEQ ID NO: 170772 - DNA, 280 bp, Glycine max
cgtcgctccgcaccagtttcaccgcacgaatatcttgttgtttggagcgatccgagaaaaactctgtaaacatgttggtttaccaggacctccttacaggtgatgagcttctctctgactccttccgttacaaggaaattgagaatggaatgctgtgggaagttgaggggaagtgggttgttaaaggagcagttgatgtagacattggtgcaaacccttctgctgagggtggaggagaagatgagggagttgatgatgcagctgttaaggttgttgacat

SEQ ID NO: 170773 - DNA, 148 bp, Glycine max
ccaattctcaagccaaccatgtcttccttcaagagcaagtaccaagatgaactcattgccaatgctgcttacattggcaccccagggaagggtatccttgctgctgatgagtcaactggtacaattggcaagcgattggccagcatta

SEQ ID NO: 170774 - DNA, 283 bp, Glycine max
gacgactactatgtctgcagatttcagaaaccaggggaaatggaggctcagatggctgaagttggcactgagtatgttctcgaaaacatccttacaactcgcaatcctggtcctccaattcttcccaagggaaggtttcaattcaatccagaaatgcccaacaccttgccctcttggctcacagaagaagatctcgcctattatgtctccaaatttgagaaaaccggattcactggacccttgaactactacagaaatttcaacttaaattgggagttgacgg

SEQ ID NO: 170775 - DNA, 278 bp, Glycine max
  unsure (1)..(278): unsure at all n locations
gcaactcactgtcttccttctctagggtttttaactcccccaatttcttcgctcaacatggttcttcaaaatgatattgatttgctagatcctccggttgagcttgagaagaggaaacacaagctcaagcgtcttgttcagtcaccaaactcttcttcatggatgttaagtgccaggttgcttcaacataaccactgtctttagccatctcagactgttgttgtatgcggaaactgccagactgtcttgtgtcaancaacggtggcgggcaaggctna

SEQ ID NO: 170776 - DNA, 288 bp, Glycine max
attttgtccatccaaaccttaaaaagattcagtgaagaacaacgttaatggcatctcttggtgtgcaagcagttcatcctcctccattaacatccacctccgacccacctcctctttttgatggcaccaccaggttgtacatcagttattcttgcccctatgcacaacgtgtatggatcgctcggaacttcaagggactaaaagacaagatcaatttggtccctataaaccttcaagacaggccagcttggtataaggtgacagtctaccctgaaaataaggtgccat

SEQ ID NO: 170777 - DNA, 243 bp, Glycine max
taacttgctcattccctatgacagatgacgtggttcttctggatttctggccaagtccatttgggatgagggtcaggattgcacttgctgaaaagggtatcgaatatgagtacaaagaagaggacttgaggaacaagagtcctcttctcttacaaatgaacccggttcacaagaagattccggttctcatccacaatggcaaacccatttccgaatccctcattgctgttcagtacattgagg

SEQ ID NO: 170778 - DNA, 259 bp, Glycine max
aatacggctcgagagctttgcttccttcaaagtgaggtctctaagtttcactttctttgcatagggcaacctcctttctctgtgactctgagtatcgtatcgttttattattatttctaattctctcttatcaggtccattgaatatgtctccgtcgatggatcttcctcccaagggtggcttcagttttgatctatgccgaagaaacgcaatgcttcaaaacaagggcctcaaagccccaacctttctcaaaactggt

SEQ ID NO: 170779 - DNA, 264 bp, Glycine max
cttgaatcttcgttatccttctttttttctccttgaactcgaatattcactatggcagatgaggtggttctgctagatttctggccaagtccatttgggatgagggtcaggattgcacttgctgaaaagggtatcaaatatgagtccaaagaagaggacttgcagaacaagagccctttgctcctcaaaatgaacccggttcacaagaaaatcccggttctcatccacaatggcaaacccatttgtgaatctctcgttgctgtt

SEQ ID NO: 170780 - DNA, 267 bp, Glycine max
gcgatatcatcttcttatagccactcgaaaatgaccaagagaaccaagaaggccggtattgttggaaaatacggcacccgatatggtgctagtttaaggaaacaaatcaagaagatggaagttagtcagcacagtaaattcttctgcgagttctgtggaaagtatgctgttaagaggaaggctgtgggtatttggggctgcaaagattgtggaaaagtgaaggctggaggtgcttacacattgaacactgccagtgctgtcactgtc

SEQ ID NO: 170781 - DNA, 267 bp, Glycine max
ggagaattaggtttttagggtttacaccgagcagccacacctcccgcagcagccatggttctcaaaactgaactatgccgattcagtggtgccaagatctacccaggaaagggcatcatatttgttgcttgtgattcttaggttttcctgtttgcaaactcaaaatgtaagaggtatttccacaatcgcctgaagccttcaaagctcacctggactgcaatgtacagaaagcaacacaaaaaggacattgctcaagaagctgtgagg

SEQ ID NO: 170782 - DNA, 276 bp, Glycine max
gaacccttccactgtggtgactctgcgatgggtgcctacaagtatgtttcagagctatggcgcaagaagcagtctgatgtcatgcgcttcttgcagcgggtgaggtgctgggagtataggcagcaaccttccattgttcgtttgacaaggtctacccgccctgacaaggctcgtcgcttgggcttcaaggctaagcagggctatgtgatttaccgtgttcgtgttaggaggggtggccgaaagagaccagttcccaaaggtattgtttatgggaag

SEQ ID NO: 170783 - DNA, 236 bp, Glycine max
gcaagatgtcgaagagaggacgcggtggttcggcggggaacaagttccggatgtcgctgggtctgccggtggcggcgacggtgaactgcgccgacaatacgggggcgaagaacctctacatcatatcggtgaaagggatcaaagggcgtttgaaccgtctcccctcggcttgcgttggcgacatggtgatggccaccgtgaagaaggggaaacccgatctgaggaagaaggttttg

SEQ ID NO: 170784 - DNA, 260 bp, Glycine max
ttcggatctagagtcttcagtttctcctcgttgttcttcgctttcctgttttcaatttcgattctttcgttaatttaataagatgtttgggagggcaccgaagaagagcgataatacgaggtactacgaaatcctcggcgtctccaagaacgcttcgcaggatgatctgaagaaggcttacaagaaagccgccattaagaatcaccccgacaagggcggtgatcccgagaagtttaaagagctggcgcagcttatgaggt

SEQ ID NO: 170785 - DNA, 260 bp, Glycine max
tagactcttctttttctctaagtctaaggggtgccctgagatcactttgagcaatggtgaaggctgtggcagttcttggcagcagcgagggtgtcactggaactattttcttcactcaggagggaaatggtccaaccaccgtaactggatctcttgctggtcttaagcctggtctccatggcttccatgtccatgccttgggggacactaccaatggttgcctgtcaactggagcgcatttcaatcctaataacaacgag

SEQ ID NO: 170786 - DNA, 256 bp, Glycine max
cgggtgaggtagaacccttccactgtggtgactctgcgatgggtgcctacaagtatgtttcagagctatggcgcaagaagcagtctgatgtcatgcgcttcttgcagcgggtgaggtgctgggagtataggcagcaaccttccattgttcgtttgacaaggtctacccgccctgacaaggctcgtcgcttgggcttcaaggctaagcagggctatgtgatttaccgtgttcgtgttaggaggggtggccgaagaga

SEQ ID NO: 170787 - DNA, 215 bp, Glycine max
tctgacccttcaatggaggagcacccgaagaagaagaagaaaggctgccgaaaccccgagaccaagttccaattcgagttgaactcatgttccaaagccaaggacctccgcggcgcgatatccctctatgacgatgccgtttcgaacaacacccgcctcaaccagcaccacttcaacgccctcctctacctctgctccaactccgtcgcggaccc

SEQ ID NO: 170788 - DNA, 258 bp, Glycine max
aatcacttttctactttgagtcttcttgatccttctttttctccttgaactcaaacatggcagatgaggtggttctgctagatttctggccaagtccatttgggatgagggtcaggattgcacttgctgaaaagggtatcaaatatgagtacaaagaagaggacttgaggaacaagagtcctcttctcctccaaatgaacccggttcacaagaagattccggttctcatccacaatggcaaacccatttgtgaatccc

SEQ ID NO: 170789 - DNA, 138 bp, Glycine max
ggagccgtagtgccagtcttgattacaagggtcgtggtagaggacgctatgatgatgagcgtaatagtagaagccggagcagatcagttgatagccgctcccctgcacgacgcagtcctagtcctcgaaggagtccct

SEQ ID NO: 170790 - DNA, 261 bp, Glycine max
gttttctgattaactctttcttctcataactctgccgccgcaacagccccaaatccaatggcttcagagaagaaactttcgaacccaatgagggagataaaggtgcagaagctcgtcctcaatatctccgttggcgagagtggagatcgtctcaccagagccgctaaggttttggaacagcttagtggccaaacccctgtgttttccaaagcaaggtacacggttcgttcctttgggattagaagaaatgagaagattgca

SEQ ID NO: 170791 - DNA, 274 bp, Glycine max
atccaagcttgggagacagagaaagagaaagagaatggacgccattgattctgtgttcgatccgctgagagaattcgcaaaggacagcgtgaggctcgtgaagcgctgccacaaacccgatcgcaaagaattctccaaggttgccgtccgtactgcaattggttgcgtcgtgatgggattcgtcggtttcttcgtgaagatcattttcattccaattaacaacatcatcgtcggatctggttaggatgaagggaactacaattgcctcagaatt

SEQ ID NO: 170792 - DNA, 273 bp, Glycine max
tcacgaaaccctcttcatcttgttctatctgtgacgagcatcatggcctcaagagcagtgttattgttggctatgtgtgtgcttccggcgatggttgtggccattcgcccagcaaagaaccctttttgcgtgaagggtcgtgtctactgtgacccttgccgtgctggttttgagacctcagctaccacctacattgctggtgctgagattatgttgcaatgcaagagcagggttagcaacgaggttgtgtacacgaagaaggggtacacgact

SEQ ID NO: 170793 - DNA, 139 bp, Glycine max
agccattcgtattgtcgcagagaaagaaaaccctagctcaccgtttcaagatgcaaatcttcgttaagaccctcactggtaagaccatcactctcgaagtcgagagttcagataccatagacaatgtacaggccaaaat

SEQ ID NO: 170794 - DNA, 254 bp, Glycine max
acctcattcatactcttagcttatgctaaatacttgaccaaagcccatgtggttgtgaactgtggtggaaccatagtaactccaaagagactccgagctatagcccaaaaacaggtggattacttgctgggagacaaccccttgaagatgtcttatatggtggggtatggtccacggtacccgcaaaggatacaccacaggggctcatcgctgccgtccgttgctgttcaccctggcaagatccaatgctcagc

SEQ ID NO: 170795 - DNA, 248 bp, Glycine max
atttcatcgtgcattcaatggccaccacagcagctctatccggaaccatggtgagcacctccttcatgaggaggcaacctatgaccaccacaagcctaaagacattccccaacgttggtgaagctctttttggtctgaaaagtggacgaggtggtcgtgtcacttgcatggcctcgtacaaggtgaagctcataaccccagaaggagaagtggagtttgaatgcccagatgatgttttcattgttgac

SEQ ID NO: 170796 - DNA, 194 bp, Glycine max
gtagattcttttttctctttagcgtttggtaagggtgcctatatttattctgcattcgtcctcgatccttaggcggagatttcaaacacaacttcgcttattaaatctcttcttccaattccttctttcattcattcccaggctgagatggcagcggcacaagcagctaccttcattatgggacccacgggttc

SEQ ID NO: 170797 - DNA, 259 bp, Glycine max
agccagcacaaagggcgtaggagaagagggtttcgttccgtttcaatggggagcgaagagcagaacggcgaattctacctgcgttactacgtcggtcacaagggcaagtttggtcacgagttcctggagttcgagttccgcccagacggcaagctccgctacgccaacaactccaactacaaaaacgacaccatcatccgcaaggaggtttacctaacccccgttgttctccgcgagcgtcgtcgcatcatcgccgaga

SEQ ID NO: 170798 - DNA, 258 bp, Glycine max
  unsure (1)..(258): unsure at all n locations
gctcccagcactgagcttaaccgagcttcacaaagatgaatcgggaaaaattgatgaagatggccggttcggttagaactgggggaaagggcaccgtgagaagaaagaagaaggctgtccacaagacaacaaccacagatgacaaaaggcttcagagcaccctgaagagaataggggtnaatgccatcccggctattgaggaggtcaatatctttaaggatgacgtattntccatttctaantcccaaagttcaagct

SEQ ID NO: 170799 - DNA, 246 bp, Glycine max
aatcttaaaaatattcagtgaagatcaacctcaatggcatctcttggcgtgcgaccagttcttccccctccattaacttccatctccgacccacctcctcttttcgatggcaccaccaggttgtacatcagttattcttgcccctatgcacaacgtgtgtggatcgctaggaactacaaggggctacaagataagatcaatttggcccctattaaccttcaagacaggccagcttggtataaggag

SEQ ID NO: 170800 - DNA, 232 bp, Glycine max
ctcaagtatccaccacctaaagtgatgcaggtggataagtctgcatggatgactgatgaagaatttgcaagagaaacgattgctggcttaaatccaaatgtcattacgattatagaggagttcccactaagtagcaagctagatactcaagcctatggtgatcatacctgtataatagcaaagaacatttggagcctaacttaggtgggtcactgttgagcaggtatccaaa

SEQ ID NO: 170801 - DNA, 236 bp, Glycine max
accggatttcggtgccgatgcggcgagctcttctgcgccgagcaccggtactccgaccgccacgactgcagctacgactacaaagccgccggaagagaagccatcgcgagggagaatccggtgattagagccgcgaagatcgtcaaagtctgaaaaaaaacaaaaaagaaggaaaaacccgaacggaacggatctcaaaacgacgtcgttgacggttgactttcgcgcgatcgggt

SEQ ID NO: 170802 - DNA, 252 bp, Glycine max
gagaggaagcagagtgtgtgactgttccccaatttcctgtgcttagagtgaagaagcatttagaaaaagcaagtcacgatgccttcggctcaagatccattctacgttgtcaagcaagaaattcaagaatctattgataagctaaaatccacttttcaccaatgggaaaacactgctgatgttggcgagcgatccagtctatcagaggaagttcttgctagttgtgaaagcattgcatggcaggtggatgaa

SEQ ID NO: 170803 - DNA, 259 bp, Glycine max
ggagagactaatgaaggcgcaagccttggggacactgcaagtttggagtttatgagggggaggagaatattggaaattaatacagatcacgctattatcaaagacttgagtgctgcctgcaagaatgcacctgacagcagcgaagctaagcgagcagttgacctcttatatgacacagcactaatttctagtggattttctcctgacagccctgctgagttgggaaataagatttatgaaatgatggccttggccttgg

SEQ ID NO: 170804 - DNA, 253 bp, Glycine max
atctgagggagaaggtgccggagatattggaggtggaggtggaccccaagggtgggcccgggatgatggaggcggcgatgaaggtttactcggagaaagagaaagggaaggttcatgttttgcaggggatgcaggggattgaggtggcgatgaagaggttcttctacgcgtataagcaggttgtgacggttatgatggggagctccgaggccgataatgggttcaccaagatattccttgaacccacttattt

SEQ ID NO: 170805 - DNA, 200 bp, Glycine max
aagatatccaatggcctcttgggtggcctgttggtggtttccctggacctcagggtccatactactgtggtgttggcgctgacaaggcttttggccgtgacattgttgacgcacactacaaagcctgtatttatgctggcatcaacatcagtggaattaatggagaagtgatgcccggtcagtgggaattccaagttgga

SEQ ID NO: 170806 - DNA, 229 bp, Glycine max
ctgctcgagcggctcgagctgcgacatcactcaggttgcaggaccttatggacttcctcctacacctgcgaggcgtgctcttttcgttgtatatcagactgctattccttatattgcagaacgaattagttctagaattgcttcgcgaggcattgtccttgctgactatgagtctgctgagggttttggtgaaatgcccacaggagccatagtgctcagatttctggca

SEQ ID NO: 170807 - DNA, 240 bp, Glycine max
ctttaaacgccgaagaaagttcatccaatctccgaagcccttcaccgcattgcaaccatgtcgagaagaaaggttagagagccaaaggaagaaaacgtgactctgggcccagctgttagagatggcgaacatgtctttggcgtcgctcgcatctttgcctccttcaatgataccttcattcatgtcactgatctgtccgggagggaaacacttgtccgcatcacaggtggaatgaaggtt

SEQ ID NO: 170808 - DNA, 253 bp, Glycine max
gtcttacccctcttaataccaattttctagggtttatacaattttcgatggcttcttcagatgttgagtaccgttgctttgtcggtgggctcgcttgggccactgacgaccaagctctcgagagagccttctctcagtacggcgaaatcgttgaaacgaagattatcaacgatcgtgagactggaagatccaggggttttggatttgtgaccttcgcctcggagcagtccatgacagacgccatcgaagggat

SEQ ID NO: 170809 - DNA, 244 bp, Glycine max
aaaacactcataacacaaagcacaaagcaaagctcatccttgagttaaaaaatggcagcagcttcttccatggctctctcatccccatccttggctggcaaggccgtgaagctgggcccatcagccccagaagtgggaagggtgagcatgaggaagaccgtcaccaagcaggtctcctcaggaagcccatggtacggcccagaccgagtcaagtacttgggcccattctctggcgagcccccgt

SEQ ID NO: 170810 - DNA, 261 bp, Glycine max
cacaacaagaaaagacaacccagagagcgcgtcttaataaacgctcttctctgaaaacccccatttcttttcttctttcttcttctctttcgcttcttcgatcttcgatcttcgtcgctgaaaatgagagagtgcatttcaatccacatcggccaggccgggattcaggttggaaacgcctgctgggagctttactgcctcgaacacggcattcagcctgatgggcagatgccaagtgacaagaccgttggtggatgtgat

SEQ ID NO: 170811 - DNA, 266 bp, Glycine max
agaagatggagatgtatcagatctggagcaggagaatagcgttgggagcgttcgcgtttgttctgcttttcctatcggcctcagcagacgacgtcgttgtgtctctctgaagataacttcgagaaggaagttggtcaggacagaggagctctcgttgagttctatgctccttggtgtggacactgcaaaaagcttgctccagaatatgaaaagcttggtagcagcttcaagaaagccaaatctgttttaatcggcaaggttgactg

SEQ ID NO: 170812 - DNA, 256 bp, Glycine max
cccgaaactgaaactgaatcgaaattcaatacaatgagttcctcaactacagtgaggaagttgcaggtggtgtcccctgttcctgcggacatagatattgcaaactccgttgaacccgttcatatctcccagattgccaaagacctcaaccttagtcccaatcactatgacctttacggtaaatacaaggctaaggttttgttgtcggttcttgatgagcttcaaggatcagaagatgggtattatgttgtggtcg

SEQ ID NO: 170813 - DNA, 252 bp, Glycine max
gctaaacacagagaaaggcacagcacgatgacgatgaagataatggtagcgattaagcgagtggtggactacgccgtgaaaatcagggtgaagggcgacaagacaggggtggtgacccataacgtgaaaatgtcgatgaaccccttctgcgagatcgcgctggaagaggccctccgcatcagggagtctggcttggcctccgaggttgtcgccgtcaccatgggaccctctcaatctgtagacactctccga

SEQ ID NO: 170814 - DNA, 253 bp, Glycine max
gagaggaagagagagggagattctttgtttgctaccttctctcggaaaaatggttacgttcaggtttcaccagtaccaggtggttgggagggctcttcccacggaagcagatcagcaccccaagatctaccgaatgaagctctgggccaccaacgaggttcgcgccaagtccaagttctggtattttctgaggaaactgaaaaaggtgaagaagagcaatggccaagtgcttgccatcaacgagatttttgag

SEQ ID NO: 170815 - DNA, 251 bp, Glycine max
ctctcattctcttctccatcgcgcgtaagaaacacattttagttgctactaatgggaactgttgaagctgcaaacaaggatgcaaatggaagtctcctagagaaaaatccttcagttgtttttgtgttaggtggcccaggaagtggaaagggtacccaatgtgcaaatattgtccaaaattttgggtatactcatctcagcgctggtgatcttctgcgagcagaaatcaaatctggttctgaaaatggtac

SEQ ID NO: 170816 - DNA, 255 bp, Glycine max
cctcgagcgaatcggctcgacgcggttcccaccatacaccaactcatacttgatcgccactccagcaaccccgaaccagcgtttacccgcggctccggttcatccgaagctgcagcgcctcgctcgcaccggttatactcggtaaactcgaggaggctttcggtgcaccggttttagaggcctatgcgatgacggaagcgtcgcatttgatggcttcgaaccctttgccacaagatggggcccacaagtccgggt

SEQ ID NO: 170817 - DNA, 258 bp, Glycine max
gaaaatgttcaaaaaattttcaggtgaagatgtatctgcacagaaccaagtgaaggcatctgttcaacgaaaaatacggacaagtattgctgaagagtatccgggtcttgaacctgtgttggatgatatacttcccaagaagtcccctctaatagttgctaaatgtcagaaccatctcaatctggttcttgtgaacaacgtgccactgtttttcagtgtccgtgatggaccatacatgcccaccttgcgtcttctcca

SEQ ID NO: 170818 - DNA, 262 bp, Glycine max
gcaaaaataacaagaatcccggagattacaggcctgacattactcatcagtcccttttatctattttggatagcccactaaataaagctgggagattgcggtcggtatacataaggactgaaaaaggtgttcttatagaggttaagccctttgttcgtattccaagaacattcaaacgctttgctggtgtcatgttggaattgcttcaaaaattgagcatatctgctgttggcaagcgcgagaaacttctccgaaccatcaa

SEQ ID NO: 170819 - DNA, 244 bp, Glycine max
gtcaaaaacctaacggggaagccgatacccctagaggtagagtcttcggacacgatcgacactgtcaacgcgaagatccatgacaatgagggcatcccgccggatcagcagcgcctgatcttcgccggaaagccgctggaggacgggcgcacccttgtcgactacaacatccagaaggagtccaccctccacctcgtcctccgcctccgcggcgtcggcaatatgcgcaagaagaagacctata

SEQ ID NO: 170820 - DNA, 249 bp, Glycine max
ggcggattcttctcgggaggagaacgtttacatggcgaaattggcggagcaggccgagcgttacgaggagatggttgagttcatggagaaggttgcaaagactgtggaggttgaggagttgacggtggaggagaggaatctcctctctgtggcttacaagaacgtgattggtgcgaggagggcttcgtggaggatcatatcctccattgagcagaaggaggagagcaggggcaatgaggaccacgtggc

SEQ ID NO: 170821 - DNA, 250 bp, Glycine max
cgaactcgcagcaccaccaccagcaccaccaccagcaccgttctattcttcttccacaatgggtatctctcgtgattccatgcacaagaggcgcgccaccggcggcaagaagaaggcttggaggaagaagagaaagtatgagcttgggaggcagccagcaaacacaaagctatcaagcaacaagacggtgaggaggattagggttcacggtggaaacgtgaagtggcgtgctttgaggcttgataccggg

SEQ ID NO: 170822 - DNA, 248 bp, Glycine max
ggagggaaccgtaacagcggaagctctagcttgggtagcgaatcacaatggcgagaggattaaagaagcatctgaagaggcttaatgccccaaagcattggatgcttgacaaactgggtggtgcatttgctcctaagccctcatctggaccacacaaatcgagggaatgcctgccactcatactcattttgcgaaaccggctgaagtatgctctaacataccgtgaagtcattgctattctgatgcag

SEQ ID NO: 170823 - DNA, 251 bp, Glycine max
gataaatatgcagcggacgaagatgccttctttgctgattacgctgaggctcaccaaaagctttccgagcttgggtttgctgatgcctaagcaacgtttaggggattgttgaagaggcatggtgcccataatatttctctaaaaaattgtatggtcatggtttttaatgccaatgtgggttccccagattttagatagcttttgaatgtattttgctggacgtgacgatgattgggaagttgggttgttgt

SEQ ID NO: 170824 - DNA, 252 bp, Glycine max
caagaatgacactaaacaggttcggcaatacttctagcagttccttgtggtatgaattggcctacactgaagctaaaggaaggatcagaaagggtgacaggacttggcagattgcatttggttcagggttcaagtgcaacagtgctgtgtggcgtgcattgaggaccattaatccagcaaaggagaaaaatccttggatggatgagattcacgagtttcctgttcatgtgcccaaagtggcaaccattggtt

SEQ ID NO: 170825 - DNA, 255 bp, Glycine max
agaaatttaactcgaccttgtatgatgaatgggttaacaagggcaatgcaccggcactgcccgagactcttaagaattacaacaagctggtgtctcttggcttcaagattatattcttgtcaggaagaacactggacaaacaggccgtaacagaagcaaacttaaagaaggctggctaccacacatgggaaaaattaattctcaaggatccacaagatccttccactccaaatgcagtttcatacaaaacagcag

SEQ ID NO: 170826 - DNA, 257 bp, Glycine max
gtcttcgagtttcacagcgaagtcgtaggagggtttcaaaagatggagaacatgcagagcttctggcaattgggcgatgaactccgtggacactcaaaagcatcggaggatcacaaatggttaatggttgcttcgaaattggcggaacagacaagattgaagggggagcgtgtgaacaaccttgatctttcaaagggccccattgaaacaaggtcaagggataaatttgggttccaggaagagaacaaatttgattc

SEQ ID NO: 170827 - DNA, 260 bp, Glycine max
gtgtgatcttctcaggatcaacactgataggggtgtcatgatccatgacagccaaacaagattttctattaagggacaacctatttaccattttgttggtacctccacattcagtgaatacactgttgttcatgccggatgtgttgccaaagtcaaccctgctgccccacttgacaaaatttgtgttctcagttgtggaatttgcacaggtcttggggctactatcaatgttgcaaaaccaaaacctggttcttctgttg

SEQ ID NO: 170828 - DNA, 263 bp, Glycine max
ctggaaactgagggagatatttgctactggcgttgtgctaggaagttacatggcactaatgacagtagtatttttctgggcaatgaaagataccaacttcttctcgaacaagtttggtgtgaggccattgagagatagccccgatgaaatgatggcagccttataccttcaagtcagcataattagccaggctctaatcttcgtcacaaggtcccgcagctggtcttttgttgaaagacctggtcttctcctactaggtgcat

SEQ ID NO: 170829 - DNA, 250 bp, Glycine max
accaaatcaaagcaagccaattggtctctctcttacaccatgagtgcatcaaccaaagcttggattgtggcatcaagcataggggcagtggaggccttgaaagaccaattaggtgtatgcagatggaactatgctttaaggtcactacaacaacatgcaaagaacaacatcagatcttatagtcaagctaggaaattgtcctctgcatcctctgctgcggtttccaacaaggtcaagagaaccaaagaag

SEQ ID NO: 170830 - DNA, 247 bp, Glycine max
ccgacgcctcctccctccgccgctggctcgacaccatcctccccgacgaggtctacaacctcgccgctcagtctcacgtcgccgtctccttcgagatacccgactacaccgccgacgtcgtcgccaccggcgccctccgcctcctcgaggccgtccgttcccacatcgccgcctccggccgctcccacatccgctactaccaagccggctcctccgagatgttcggcgccacccctccgccgcagtc

SEQ ID NO: 170831 - DNA, 248 bp, Glycine max
ctgaagattggtcccaacgagccatctgagctggctatccatgagaatgcctatggcttggccagatacgctgtcatatgccaggagaatggcctggttcccattgttgagcctgagatccttgttgatggatctcatgacattcacaagtgtgctgccgtcaccgagcgtgtccttgcagcatgctacaaggctttgaatgatcaccacgtccttcttgagggtaccctattgaagccaaacatggt

SEQ ID NO: 170832 - DNA, 244 bp, Glycine max
gcttattatggttgggtggctttgaaccacaaaatgggcatgttcgatagctacccagggtctcccactttgggacttgttgatttgggtggctcaccgttgcaggttgtggtagagatagatggttctggggatgatgtgcacatgatgagattgaagctcagctcaacagaacctcggattttggcatactcattgcctgcatttggcttaaatgatgcgtttgataggacagtttctcatg

SEQ ID NO: 170833 - DNA, 253 bp, Glycine max
tctcgagcgaatcggctcgagcctagttctgcagcagccatccgctttgtaaggaggttgtaagaattgccggtgagtgacttacaatggctcctgctaaggcggacaatgccaaaaaggctgatcccaaagctcaggctttgaagacagcaaaggctgtcaaatcaggtggccaagtgtttaagaagaaagctaaaaagatcaggacatctgttacatttcacaggccaaggacattgaagaaagaaaggaa

SEQ ID NO: 170834 - DNA, 255 bp, Glycine max
tagccgtcgcactctgtgttttctgcgccgtctccgatctccgacaatggcgacccaaatgagcaagaagagaaagttcgtagctgatggagtgttcttcgctgaactgaacgaggttctgacaagagagttggccgaggacggttactccggcgtggaagttagggttacgccgatgcgcaccgaaatcataattagagccaccagaacccaagctgttctcggtgagaagggaaggagaataagggaacttac

SEQ ID NO: 170835 - DNA, 258 bp, Glycine max
gaaaaccttagcccaaccggatcttcacgattaggagatggctaagtcgaagaaccacaccgctcacaaccagtcctacaaggcccacaagaatggcatcaaaaagccaaagaggcaccgccacacttccaccaaagggatggatccaaagtttctgaggaaccaaaggtacgcgaggaagcataacaagaagagcggtgaaacagccacggaagaagagtaaagtgtcactctcaaatggggctattaggatttgat

SEQ ID NO: 170836 - DNA, 246 bp, Glycine max
caacagcacaaagcgggttactgtctgttcaagctaccatctctctctctctttcttagtgcctccttgccagaagttaaaatggcccaagaaactttcctattcacatctgaatcagtgaacgaggggcaccctgacaagctctgtgaccagatctccgatgctgtgctcgatgcatgcttggagcaggaccctgacagcaaggttgcctgtgaaacctgcaccaagaccaacatggtgatggtt

SEQ ID NO: 170837 - DNA, 247 bp, Glycine max
gccatacttagctgacaagcgaaaactgtaccaactcgtggatcctcgccttgaactaaattattctctaaaaggagtgcagaagatttcccagttagcttataattgccttagtagagaccccaaatcccgtcctaacatggatgaagttatgaaggctctgactccattgcaggattttaatgaccttgcaatcttgtcttatcactctcgcttatctcaacaagggaggcggaagaagaaagat

SEQ ID NO: 170838 - DNA, 246 bp, Glycine max
caaactccttccaagaggagagtcatcagtttctgggcccgtagttaggctgttcaagccattcgatgaactttttgttgacttccaggatttcaatgtggaagctctagagaagtttgttgaggaatctagtacccctgttgttactgtctttaacaatgaaccgagcaatcaccctttcgttgtcaaattcttcaacagtcccaacgcaaaggcaatgttgttcatcaacttcactgccgaagt

SEQ ID NO: 170839 - DNA, 244 bp, Glycine max
aacccaataagtgattctcatttttatggctcttgccctgaagtcaagttgcttcttgcaattgaacaaacctgaggctggtttcaatgtttgtttttcatctaagaaagctataatctccgtgaaacgtcacactcccgtggctgctatcaggaccatggaagcagtgggactctctgcaacattcaccaggttgaataaagaaggaaaagtagctttcatcccgtatgtcactgctggtgat

SEQ ID NO: 170840 - DNA, 248 bp, Glycine max
tattattagggtttggcgattcagagagaaagagaaatgggagaacgactaggcatcccaattgctctggggctctttgcgatgctcctcttcttcattgcatcttcctacttcctctcacctcgttcgtgattccgatgacgccgacgacgcgatcttctacgagtcattcgatgaggattatgacggacggtggattgtgtccgacaacgaggattacaacggtgtctggaagcatgctaagagtg

SEQ ID NO: 170841 - DNA, 247 bp, Glycine max
caagaaaaccttggaactacacgaaaatggtgtcggcgaacaaggagatggtcgtgtactgcttcgacaccctcctcgctcactacaacagcacggaagctccttcccctgccttcgatcaggctcaacatccattgtttgttacatggaagaaagtggtgaatggtggagatcctcgtcttcggggttgcatcggaactctggaagcacgcagcttgatcaatgggctcaaagattatgcactgac

SEQ ID NO: 170842 - DNA, 252 bp, Glycine max
aaaaaaaagcctcgtctctcgtgccgattctccaggacaattcccttcacccaacctaattggtacttgcttgagatagtaaagttgcaaactttgaagcaattagtgtagaagatgagtacgttggatgcaacaagggctgaacttggtcttcttgttttatatttgggcaaggctgaagcaagggacaaaatatgcagggcaatacaatatggttccaaatttttgagtaacggggaacctggtactgct

SEQ ID NO: 170843 - DNA, 243 bp, Glycine max
acatggatcccgaccctatctgtgccttttcctatgtttgcgaattaaatgaagcattcataaaccataactgaagaaaactaaggaaggaaggaagagtgagcgtgaaagatgccttgggcgaggctttcagggtctccaaggctcgacgttgctattgacatgggcaatccatttctcaatctcactgttgatggtttccttaagatcggagctgtcgcagccacgcgatcagctgctgaa

SEQ ID NO: 170844 - DNA, 242 bp, Glycine max
gtggcctaccatggtggtgacgggtgacggagaattagggttcgattccggagagggagcctgagaaacggctaccacatccaaggaaggcagcaggcgcgcaaattacccaatcctgacacggggagggaatttaactactgagaccttcatggttgactgtaagggtcataacagctttttagttgcccttctgtagtttttctttaatctcaaatgtcttttagtttgtgacagataac

SEQ ID NO: 170845 - DNA, 246 bp, Glycine max
tctctatcgagtaaattaactatgaagcctaccctactattatccctttccttcctgcctctctttgctttcctggctctttcagaagatgttgaacaagttgtggacataagtggcaaccccattttcccaggtggcacatattacattatgccatcaacttggggcgctgccggtggtggattgaaactaggccggacaggaaactcaaactgcccagttactgttttgcaagattactcagaa

SEQ ID NO: 170846 - DNA, 249 bp, Glycine max
ggaagaaccaccactaccttatccatttccactcctcaccaagccccaccatggcctcaaccaacgccctctcttcagcttccattctacgctctcccaaccgccagtctctgaccagaagagcgaaccacaacggaagagtaaattaccgtcaaccgaatagccgtttctccgtcaaagcctccgccaaagagattgcctttgaccagcattcccgctctgctatgcaggccggcattgacaagctcg

SEQ ID NO: 170847 - DNA, 249 bp, Glycine max
tgcaatggctgatgcaaaggccaacggattctctgatgtgctgttcttagactcagcaactggaaaacatatagaggaggcctcagcatgccatgtatttgttttgaaggacaatgctatctccactcctgcaatagatggaaccatcctacctggtatcacccgagaatccatcattgacattgccattgaattgggttatcaggtcatggaacgttccgtatcagtggaggagatgctaggtgctga

SEQ ID NO: 170848 - DNA, 250 bp, Glycine max
cagaaaccatggagaatgtggaattcgatgcttctgagattgagtacgttagttacggtggcgagcatcacctccctctcgtaatgaacctggtggaccaagaactcagcgaaccttattccatcttcacgtaccgttacttcgtctatctctggcctcagctttcattcctggcgttccacaagggtaaatgcgtgggcaccgtggtatgtaagatgggggaacaccgtaacactttcagaggctacat

SEQ ID NO: 170849 - DNA, 254 bp, Glycine max
ctcttccattcacaaccttaaacctttctttcttgtaaactttattgattgattctgagaatagaactaagagggtatagacatggctagcgcaattgcagcttcttttttggttctgcttctggctttccccactgtatttggagctgaccatgaagttggtgacactagtggatgggccctcggagttaattacaacacctgggcctctgggaaaactttcacagttggtgacactttggtgttcaagtatg

SEQ ID NO: 170850 - DNA, 257 bp, Glycine max
gacaaatttgaggattcatacagagtaatggtgttttctaatggtgataaatgctggaatggtcctgataggagtttgaaggtcaagctaagatgtgggttgaaaaacgagattactgatgtagatgaaccaagccgttgcgaatatgtagcagtattatctaccccagccctttgtcaagaggaaaggctgaaggagttacaacacaagctagacttgttgaattcggaaataccatcaaaccatgatgagttgtg

SEQ ID NO: 170851 - DNA, 246 bp, Glycine max
cagagagaatggctgcggaaaacgttgttgagttcacagacttacccgtcaagaggccaagagaagaagaagaaggaaccaatggcgtctccaacgacgccgtttcagcgctccccaatgaccctcaataccctggcatctctgcggttattcccggttggttctccgaaatcagcccaatgtggcccggggaggcacattccttgaagatggaaaagattttgtttcaagggaagtctgactatc

SEQ ID NO: 170852 - DNA, 227 bp, Glycine max
ggctcgagagcatatgctcaggatgaagagagatctaaggatatggacagaaatgagtgaccttgtgacgcgtatgtgttggaaagtagctgcaaagaggaaccaaactgttgtctggcaaaaacctccaacaaatgactgctatatggaaagagaacctggtactcgccctcctctttgccagtctgacgatgactcagatgcagtatggggagtaaatatgaaag

SEQ ID NO: 170853 - DNA, 244 bp, Glycine max
gtcaagcgacgccgtttgggtcctcttccacctcgccttcttctcccaatgccttccctccgcctgggcccactcggcgatcctcctcccgggtcaactcgcccgtgactcaccgcagagctgccccgcccctgaccccaacctctactacaagccagtcatcggaatcgtcagccatcccggcgacggcgcctccggccgcctcagcaacgccaccggcgcctcctacatcgccgcctcctat

SEQ ID NO: 170854 - DNA, 245 bp, Glycine max
agccaccgtaccgtgttgcctctctgcaatctacagccaaaatgcctttcaagaggtacgttgagatcgggagggttgcccaaatcaactacggcaaggaatatggcaggctcgtcgtcattgtcgacgtcattgaccagaacagagctcttgtcgatgcccctgatatggtgaggtcccaagtcaatttcaaaaggctttccctaaccgatattaagattgacattaagagggtccctaagaag

SEQ ID NO: 170855 - DNA, 243 bp, Glycine max
aaaattttcaaatggaaggcccaactagagtgatgaatcagttgcgagcattatggcatattcttgaactgttagacaaagaaatgtttgcccacctgtcaaaaattggtgctgaaagccttcattttgcatttcgtatgttgctagttctctttcgaagagagttgtctttcaatgaggctctttcaatgtgggagatgatgtgggcagctgactttgatgaatccatggcttatgatttag

SEQ ID NO: 170856 - DNA, 248 bp, Glycine max
ggaagaaccaccactaccttatccatttccactcctcaccaagccctaccatggcctcaaccaacgccctctcttcagcttccattctacgctctcccaaccgccagtctctgaccagaagagcgaaccacaacggaagagtaaattaccgtcaaccgaatagccgtttctccgtcaaagcctccgccaaagagattgcctttgaccagcattcccgctctgctatgcaggccggcattgacaagctc

SEQ ID NO: 170857 - DNA, 250 bp, Glycine max
ctagttcattgcactgcaacttagccacttaaaccccattcgttagcctctccacatcttcactgcttcttccatacaaatccgaaaccagacggaattcacaaaagacgttaccatgtcggacgatgagagagaggagaaggaattggatctcacttctccggaagttgtcactaagtacaagagcgccgctgagattgttaacaaggccttgcagttagttatttcggaatgtaaaccaaagacaaag

SEQ ID NO: 170858 - DNA, 254 bp, Glycine max
tgcttcggtgttgaatcatggatcagaaagtcgatttcagtgctccgcattccatgggaaccactatcatcggcgttacttacaacggcggtgtcgttctcggagccgactctcgaaccagcactggagtgtatgttgccaaccgagcatcggacaaaatcacacagctcactgataatgtttacgtgtgtcgctctggatcggctgctgattctcagattgtctctgactatgtgcgctacttccttcaccaa

SEQ ID NO: 170859 - DNA, 189 bp, Glycine max
cgaggtagcccaaccaccctctgattctatttcgagtctttgtttcagtcccaaggccaatttcctcgtcgctacttcatgggacaaccaggtgcggtgttgggagataacaaggaatgggactgttgtcaacagcactcccaaggcttcgatttctcatgaacaaccggttttgtgctccgcttggaa

SEQ ID NO: 170860 - DNA, 186 bp, Glycine max
  unsure (1)..(186): unsure at all n locations
gttgaacaagggtttctctgtctgcttcttcactttctctcgtttcaatcgaaaccaaaacaaaatcatgggcagaaaattcttcgttggtggcaactggaaatgcaatgggaccactgaggaggtaaagaagattgttactactttgaatgaggctagagtccctggagaagatgtcgtagaant

SEQ ID NO: 170861 - DNA, 183 bp, Glycine max
atcaatctcgtttgttctcactaactattacttcatcatgtcgtcgagcacagttggtcaagtcatcaaatgcaaagctgcggtttcatgggaggcagggaagccacttgtgattgaagaagtagaggtggcaccaccacaagctggtgaagtgcgtttgaagatcctctacacctctctttg

SEQ ID NO: 170862 - DNA, 185 bp, Glycine max
cttcctctgcgcaggaattaggaatattcgacaggtagagtttcttcaatggctcctaaagttgataagaagaatgatccaaaggcccaggccttgaagactgctaaggcagttaagtcaggtgctacctttaagaagaaggtaaagaagatccgaacttctgtcactttccacaggccgaagac

SEQ ID NO: 170863 - DNA, 176 bp, Glycine max
cgctgctggatgaattgcagacggatcaatggccggttccgcctgggcgccgccctgcacgctgcaccggagttgctttgagtgttgccgcagggttgctgagtgcttgcaatcctgggactggtgctagaatcgtagctttggttggtgggccatgcacggaaggacctggcgcg

SEQ ID NO: 170864 - DNA, 182 bp, Glycine max
gccgttgctctgcttcaaccttgcggaagaagaagacgccgcagccatggtgaagtactccagagaacccgacaatcccaccaagtcctgcaaggccagaggcgctgaccttagagtgcatttcaagaacactagggagactgcctttgccatcaggaagttgcccctggttaaagctaaaa

SEQ ID NO: 170865 - DNA, 185 bp, Glycine max
ggaagtgagccagcagaggaaggactacgtagaccctccgccagcccccctcatcgacttggccgagattaagctctggtccttctacagagccctcatcgccgagtttatcgccacactcctcttcctctacgtcaccgtcgccaccgtcattggccacaaaaaacagaccggaccatgtgacg

SEQ ID NO: 170866 - DNA, 185 bp, Glycine max
taaatgagtggtttttgagcagaagcagttaaaagagaaagggattcagcgaagatgacatcggttggtgtggcaccaacttcgggtttgagagaagccagtgggcatggagcagcaggtgttgatagattgccagaggagatgaacgatatgaaaattagggatgatagagaaatggaagccac

SEQ ID NO: 170867 - DNA, 179 bp, Glycine max
ctcgagccgctcgagccgtgaagatgtgcaagggaagaatgtcctgacaaatttctggggaatggatttcacaactgacaagctgaggtcattggtgcgaaaatggcaaactctaattgaagcccatgtggatgtgaagacaactgataactacacattgaggatgttttgcattggat

SEQ ID NO: 170868 - DNA, 179 bp, Glycine max
ctttgtcgtccatcccgtaaccatgtctcagactgttgtcctcacaagttggtatgtcatgtgaaggatgtgttggagcagtgaagagagttctaggaaaattggatggtgtggaatcatatgacattgatttgaaggaacaaaaggtggtagtgaaaggaaatgtccagccagacaca

SEQ ID NO: 170869 - DNA, 180 bp, Glycine max
gtctcttcctcctctctccgcatagctgcgttttccgaatcgaaaggtgacgttagtaagtaacaatggtggagaaggccaagggtaggaaggaggaggttgtcactcgagagtacaccatcaacctccacaaacgcttgcatggctgcacatttaagaagaaggctcctaaagcaatta

SEQ ID NO: 170870 - DNA, 195 bp, Glycine max
gttattttttgagtgaaggttagaagtgctacaaacaatggcaactaatcaggaagaggtgtctcttttgggagttgttggaagcccatttgtgtgcagggtgcagattgccctcaagttgaagggaattcaatacaagttttttgaagaaaatttggtcaacaagagtgaactgcttctcaaatacaaccctgt

SEQ ID NO: 170871 - DNA, 181 bp, Glycine max
gcctgtgccttgttctctaaaacttggattgaagtctctggttcatctgctagagatgttgcaaagcagctgaaggaacaacaaatggtaatgcctggacatcgggaatcaaacttgcagaaagaactgaaccgatacattcccaccgcggcagcatttggaggcatatgtatcggtgcat

SEQ ID NO: 170872 - DNA, 179 bp, Glycine max
gacgacgatctgaaactgcgagcattttgggacaagaggatctcacaggaggtcatcggagatgcactcggtgaggaatttaagggctatgtcttcaaaattaccggaggttgtgacaaacaaggatttccaatgaagcagggagtgctgactcctggtcgtgttagacttttgcttca

SEQ ID NO: 170873 - DNA, 257 bp, Glycine max
caacaatgtctccattttctctcttcctcttcaccacattgctatcttttctcggcgccgccaacgcgcgactcaccttggacttctacaaggacacttgtccgcagttcagccagatcataagggacaccgtcacaagcaagcagatcgccagccccaccaccgccgccgccacgctccgcctcttcctccacgactgcctcctccccaacggctgtgacgcctccatcctcctctcctccaggcccttctccagg

SEQ ID NO: 170874 - DNA, 239 bp, Glycine max
atttggtgctactgtgcgacacattgtggaaggagagaccaaggtgtcgaaactgggaaagttgaagtataagaatgaaaatgattctgtgcaagatgtgaaagcagaagatcttcggcaaatgtttctggctatgactgaggaggttcgtgttataattgtcaaattggcagataggttgcataacatgcgcacgctatcacatatgcctcctcataaacagactagcattgcgatgg

SEQ ID NO: 170875 - DNA, 181 bp, Glycine max
  unsure (1)..(181): unsure at all n locations
gtttttatttctctcttctctctgnatcgcntcaggttcttctgaaaagatgtctcgcgtgtatgntggtaacttggattcacgagtcaccgagagagatctcgaagacgaattccgtgttttcggagttattcggagtgtttgggttgcacgtagaccacctggtnatgcttttattgat

SEQ ID NO: 170876 - DNA, 179 bp, Glycine max
ctggaatcacaatcctgaaacaaaaacatcttagcatttaacatactactagacaacatgaccaccacattggaaagaggtttctcggaagagcaagaagctctggtggtgaagtcatggaatgtcatgaagaagaattctggagagttgggtctcaagtttttcttgaaaatatttga

SEQ ID NO: 170877 - DNA, 179 bp, Glycine max
agctaaccaagtgaagagaacctgctatgcacaatcaagccagattagacagattcgtaggaagatgagggagatcatgaccaaccaggcaacatcctgtgatttgaaggagttggtccgcaagtttattcctgagattattggaaaagagattgagaaggcgacatctagtatttacc

SEQ ID NO: 170878 - DNA, 283 bp, Glycine max
cggctcgagctgaggagagtgagagaaaagagaagagaagatgacaacacgcttcaagaagaacaggaagaagaggggccacgtcagcgctggccacggtcgaatcggaaagcacaggaagcaccctggaggacgcggtaacgccggaggcatgcaccaccacaggatcctcttcgacaaataccaccctgggttcttcggcaaggtaggaatgcgctattttcacaagcttcgcaacaaattctactctccgatcctcaacatcgacaagctgtggtccctg

SEQ ID NO: 170879 - DNA, 187 bp, Glycine max
gacggtattgtatatttgttctcgttttcgctgcagaagaagaagaagagtgatggctgagtacgacctaactccgcggatggcgccgaatctcgacaggcaccttgtgttccctctcctggagttcctgcaggagcggcagctctacgacgacgaccacatcctgaaggcgaagatcgaccttctc

SEQ ID NO: 170880 - DNA, 181 bp, Glycine max
gggtttacagagaagcgaagaggcgcagcgtcagcagtaactcgtggaattgctagcaatggcgaggatcaaggtttacgagctgaggcagaagacgaaggctgatctgttgaatcagctgaaggacctcaaggccgagcttgccttgcttcgtgttgctaaggtcaccggcggtgcacct

SEQ ID NO: 170881 - DNA, 198 bp, Glycine max
aattaaattaccatatatagtcacattttctttacactttgtgaggtctaaaatgttgtccatttttcacaaggggtttgctcacccacctgaagagcttaaaagccctgcatctaacagtggctccaacaagcctaagattcctgaggaaactctaagagaatttctttctcatcatccccataacactttttctct

SEQ ID NO: 170882 - DNA, 194 bp, Glycine max
cgcgtcgctgctccgtaccagtttcactgcataaatttgagagaaaactctgcaaacatgttggtttatcaggacctccttacaggtgatgagcttctctcggactccttccgttacaatgaaattgagaatggaatgctgtgggaagttgaggggaagtgggttgttaagggagcagttgatgttgacattgg

SEQ ID NO: 170883 - DNA, 190 bp, Glycine max
gttattttttgagtgaaggttagaagtgctacaaacaatggcaactaatcaggaagaggtgtctcttttgggagttgttggaagcccatttgtgtgcagggtgcagattgccctcaagttgaagggaattcaatacaagttttttgaagaaaatttggtcaacaagagtgaactgcttctcaaatacaac

SEQ ID NO: 170884 - DNA, 174 bp, Glycine max
tcattaaccaaaaaaagatcatcaaaattaaaagaagcaagtatgggggaatccaatgtcatgaccaagactgaggatggtgcttgtctgtctgcaatgctgcttagtactaatctagtgtaccctgcagtactgaatgctgctattgagctcaacttgtttgagatcattgct

SEQ ID NO: 170885 - DNA, 175 bp, Glycine max
gttcttccacccccgtaccgtctctgcctctctgcaatccacagccgaaaatgcctttcaagaggtacgttgagatcgggagggttgctcaaatcaactacggcaaggaatatggcaggctcgtcgtcatcgtcgacgtcattgaccagaacagagcacttgtcgatgcccctga

SEQ ID NO: 170886 - DNA, 176 bp, Glycine max
ctttgagagagagagagggaggagggagagtgttgacgctccatcaagatgggtatttctagggattccatgcacaagaggcgtgccactggtggcaagaagaaggcatggagaaagaagagaaagtatgagcttgggcgtcaggccgcaaacaccaagttatcaagcaacaaaac

SEQ ID NO: 170887 - DNA, 165 bp, Glycine max
tatgtttaataatgctgcaaggaaattttttgacaaatttgttctgggaaaggtttactacatttcaaggggaactttgaaagttgctaacaagcagttcaaaactgtgcaaaatgattatgaaatgacgctaaatgagaattccgaggtggaagaggtggtcgg

SEQ ID NO: 170888 - DNA, 165 bp, Glycine max
agcaattcacactggtctttgcttctcgttactcatttctcacctaactttctattcttctcagtctcagatcagaaccttggccatggcagcgttccagaagatcaacgtcgccaaccccatcgtcgagatggacggagatgaaatgactagggttatctggaa

SEQ ID NO: 170889 - DNA, 163 bp, Glycine max
ctggaatcacaatcctgaaacaaaaacatcttagcatttaacatactactagacaacatgaccaccacattggaaagaggtttctcggaagagcaagaagctctggtggtgaagtcatggaatgtcatgaagaagaattctggagagttgggtctcaagtttt

SEQ ID NO: 170890 - DNA, 176 bp, Glycine max
acaatttatgcagtatcaattacaattcgtattgtgcttggttttatgttgctggctctcatttggaagtttgactttccaccctttatggtgcttattatcgctatcctaaatgatggtactattatgacaatttcaaaagatcgtgtaaaaccatcacctctgccagatagctg

SEQ ID NO: 170891 - DNA, 278 bp, Glycine max
cgacgagtcttgtgtgtgacctcaaaaccctgccgtcagtcaccgtcttctctgccgccatgaagctcgtcaggtttctgatgaagctgaacaacgaaaccgtatcaatcgagctcaagaacggcacagttgttcacggcaccattacaggtgttgatatcagtatgaatacacatttgaaaacagttaaactaactctgaaagggaaaaacccagttactttggatcatctcagtgtgagaggcaacaacattcgatattatatccttcctgacagc

SEQ ID NO: 170892 - DNA, 230 bp, Glycine max
gcgagcacttggagattatcttggtgtgaaggtgcacgcatgtgtgggaggtaccagtgttcgtgaagaccaacgcattctatcgagtggtgttcatgttgttgttggtactcctggtcgtgtatttgatatgctgcgcagacagtcacttcggccagactacatcaagatgtttgtattggatgaggctgatgaaatgctttcccgtggttttaaagatcagatctatg

SEQ ID NO: 170893 - DNA, 185 bp, Glycine max
gcaaaatgggatgctgagttctatgtcaaagtggatgatgatgtccatgttaatttaggtgtacttgcaacaacccttgctcgtcatcgttccaaaccaagggtctatgttggatgtatgaaatttggacctgttctttctcgaaaggatgttaaatatcatgaacctgagttttggaagttggg

SEQ ID NO: 170894 - DNA, 312 bp, Glycine max
cttcttcagtggtggaagctactagaacactagtttgttgaagactgcgatgaggaagtggacggttgcttccgctctccttcttctctctctcctcttactctttgcagatcaaggtcgaaagtttcaggcgaatgccgagggagattccgacgagcttgtagatcctccgaaggtggagggacaagatcggtgctgtgcctcatggcctttccaccgattcagatgtcgtcaagagggagtcggagtcgatctcgaagagatctctccggagcaatgcggagaagttgagttccaagcggaaatgtcacg

SEQ ID NO: 170895 - DNA, 305 bp, Glycine max
ctattatcatccgcagctgcttttattcgcaccgcaaacagtgaaccatggccgtcggagagaacaagcgcatctccaaggggaagaagggtggcaagaagaaggcagctgatccctttgccaagaaggattggtatgacattaaggctccttctgtttttcaagtgaaaaatgttggcaaaaccctacgtctctcgtactcagggtaccaagattgcttctgaaggactcaagcatagagtgtttgaggtctccttggctgatcttcaaggggatgaggatcatgcattcaagaagattaggtt

SEQ ID NO: 170896 - DNA, 304 bp, Glycine max
cgctggtgcttggggcagtgtttttgctgctttgctgcaagatacttatggccaattccgtgataagggtgcaaatcaggatatggagaaggccaggaaagacagttgatagagccactgcagagcacctcttcgaagttatcaattctagggaggatgtgttgaggaggttgataaggcgctgtgcttatctgaaatacgtcgaagccaggcttggtgataggactcttctggctgatgagattttgaaagatgggttttgcttgaatatgattgacacaccactttgtccattgaaggtggt

SEQ ID NO: 170897 - DNA, 305 bp, Glycine max
ctgattagtagtaattaggggtcaagaaacaaagtggagatcggagagagagagagagcgagagaggagggaaatgatgggttgttgccaatcatcgacgttgctgagagtgggagagagggagactcaccctgaaaaggaagaggaaaaagagcaccagaggctctctgaggccgagaaagagggctttgatgtctcctactctgagttctcgctggctgaactgaaggcggccaccaacaatttcagctctgactatatcgtgtctgagattggggagaaagcacccaaccttgtttacaagg

SEQ ID NO: 170898 - DNA, 304 bp, Glycine max
ctcattccccatttcctcagctccttcaaccgctgctaaattctaaggttccgaaatggacgctggcggaaagatcaagaagggcgccggaggtagaaagggcggcggcccaaagaagaagccggtttcaaggtccgtcaaagccggtctccaattccccgtcggaagaattggccgttatttgaagaaaggaaggtacgctcagcgtgtcggtaccggtgctcccgtatacttggctgcagttctcgaatacctagctgccgaggtgcttgagttggctgggaatgccgcacgtgacaacaag

SEQ ID NO: 170899 - DNA, 300 bp, Glycine max
ctttgtgagctatgtttgtggtatcagattgatgagaatgttcagcgggagataattaaccaccgatctttaaggcatccaaatataatcaggtttaaagaggtgttactgacccctacacatttagctatcgtcttggagtatgcttcaggtggtgaactttttgagaggatttgtactgctggtcgatttagcgaagatgaggcaagatattcttccgaagagcaatatctggggttagctactgtcattcaatggaaatttgtcatagagatctaaaattggaaaacactctcttgg

SEQ ID NO: 170900 - DNA, 300 bp, Glycine max
atcacgaggctatgttaaacatgaaaactgaattcatggctctgtgggatggatttacaacagatcagaatgctcaagttatggttcttgcagcaactaatcgtcctacagaacttgatgaagcaatacttcggcgtcttcctcaagcctttgaaattggaattccagaccacagggagagggctgaaatattgaaggttgtcttaaagggtgagagggttgaagacaacatagactttggtcatatagctggtttgtgtgagggttacactggttcagatctatttgatctttgcaaga

SEQ ID NO: 170901 - DNA, 169 bp, Glycine max
gtggcaaatggccttgccagaaggtgcattgtccaagtttcctatgccattggtgtccctgagcccttgtcagtgtttgtggacacttatggaactgggaagattcctgacaaggagattcttcaaattgtgaaggagaatttcgacttcagacctggaatgatcacca

SEQ ID NO: 170902 - DNA, 120 bp, Glycine max
tctcaaactagtagtattattcttccattcataatgggtgttttcacattcgaggatgaaatcaactcccctgtggctcctgctactctttacaaggccctagttacagatgccgacaag

SEQ ID NO: 170903 - DNA, 123 bp, Glycine max
caaatccaagccagttcacaagaaggttccagtgtttattcacaatgagaagcccatagcagagtctcttgtgattgttgaatacattgatgagacatggaagaacaaccccatctagccttc

SEQ ID NO: 170904 - DNA, 311 bp, Glycine max
tcttcaccagctatagtttttctgaactaactgccctgccactgaacacacagcaatgggagcttcttcttctctttacacgtcttcaatgcatatggagatgtttgctccaaagacatcaaagtgtccccaaaattttgtatgctgtcatagcaaaatctcctatatagaacctaattatttaaaaccagtatgctgtcctaattcaagatctttaagtatgaatatgtcatcaaaatgggaacaaacggatcgaagagatgcattgcattgccgcgctttgaaaattgagcctgcaccttccttttcgg

SEQ ID NO: 170905 - DNA, 305 bp, Glycine max
ctttcttttgctcttcatccattccacaccaaaaagtaacactttcagtttcggagggaaacacaacacaaaaagccccctccccccaaagcaaatcacctttttttctttcagttattcaaaaaatgttcgccgaagagaatggactcaagggagaccctagactccaagccatttcccaagccatcagagtcgtccctcacttccccatacatggaataatgtttcaagacataacgacattgttgttggatcacaaggcgtttaaagacactgtcgacatttttgtcgatcgttacagagac

SEQ ID NO: 170906 - DNA, 303 bp, Glycine max
cacatagcatagagtgagaagtgagaagagaaaaatggcaatctccatacccagtagacaacttttcatagatggagagtggaaagtccctcttctcaacaatcggtttccgatcatcaaccccgctactgaagacatcatagggcatattccagccgctactaaggaagatgttgaccttgcggtggatgctgctaaaagagcctttacccataacaaaggcaaagattggtcttcagctcctggctctgttcgtgctcgctatcttcgagccatcgcttcgaagataacagagaaaaaggt

SEQ ID NO: 170907 - DNA, 301 bp, Glycine max
tggttgattagggtttcttcggctgcgtgctagatgctcgttgtttatctcacagtcgacacaaagcagccatgggaaagcaatcacagagggagtgaacaacatcaacatctctgattcttacaagaagaatcgcattcaggtctccaacaccaaaaagcctctcttcttctacgtcaatctcgccaagaggtatatgcaacagcataatgaggttgagctctcagcactaggaatggctattgctacagtggttactgttgctgaaatcttgaaaaacaatgagcttgctattgaaaag

SEQ ID NO: 170908 - DNA, 269 bp, Glycine max
catctgagtatagtggagtagggttgttttgcgtttgagagaagcatgagcaggatttgggaattccggtgaagctgctccacgaggcttcggggcacgtggtgacggtggagctcaagagcggagaactctacagaggcagcatgatcgagtgcgaggacaactggaactgccaactcgagagcatcacctacactgccaaggatggcaaaacatcgcaacttgagcatgtttttattcgaggaagcaaagtcaggtttatggtcatc

SEQ ID NO: 170909 - DNA, 294 bp, Glycine max
ctttctattccaaaacatgccccaagcttgagtccattgtgaggccacatctcaagaaggtgttcaaggatgacaatggccaagctcctgccttactccgcattttcttccatgattgttttgttcagggatgtgatggatcattgctgctagatgggagtccaagtgaaagagaccaaccagccaacggaggcatcagaactgaggccttgcaaaccattgatgacatcagagctattatccattcggagtgtggaaggatcgtttcttgcgcagatatcactgttttggcag

SEQ ID NO: 170910 - DNA, 296 bp, Glycine max
cgaggttggtgctggtgaccagggtcacatgtttggctatgccactgatgaaacccctgagtacatgcccctcagccatgtccttgcaaccaaactcggtgctcgcctcaccgaggttaggaaaaatggtacctgtgcttggctgaggccagatggcaagacacaagtaactgttgagtactacaatgacaatggtgccatggttccagttcgtgtccacactgtcctaatttccacccaacatgatgagcctgtgagcaatgaccaaattgctgctgaccttaaagagcatgtta

SEQ ID NO: 170911 - DNA, 126 bp, Glycine max
cgaggtgagcacaaggtttactttgatgttgagattaatggaaaagaagcaggtcgtattgtaatgggtctttatgggaaggctgttccaaaaactgcagaaaacttccgagcactttgcacaggg

SEQ ID NO: 170912 - DNA, 297 bp, Glycine max
ttcatctcccttaaatatgtttccacaggagacgatttctagcactggtgctggacttggatcgctagacttccttagaaataacccccagtttcaagcattgcgttcaatggtgcaatccaatccacaaattctacagcctgtgcttcaggaacttggtaagcagaatcctggtcttttaagactgattcaagagcatcatggggagtttctgcagttgataaatgaacctgttgatggttctgaaggagatatatttgagcagcccgagcaagacatgccccatgccatcaatgt

SEQ ID NO: 170913 - DNA, 305 bp, Glycine max
gagagttctacagaagacaaacaaaaccctccttcttgagagagaaagaagaaagatggctccgaatcttgaatgtcgcatgtacgaagcgaagtacccgaaggtggacatggcggtgatgatacaggtgaagaacatagcggacatgggggcctacgtgtcactgctggagtacaacaacatcgagggaatgatcttgttctccgagctactcccgccgtcggattcggagcgtgagcagcctcatcaaggttggacgaatcgagccggtgatggtgctccgtgtcgacaaggaaaagggttac

SEQ ID NO: 170914 - DNA, 303 bp, Glycine max
cgaaaacagatagtgtgggagagagaagagcggaagagaaaatgacgagcaggttcaagaagaacaggaagaagagaggtcacgtcagcgccggacacggccgtatcggaaagcaccgcaagcatcccggaggtcgcggtaacgccggtggcatgcatcaccaccgtatcctcttcgacaagtaccatcctggtttcttcgggaaggtaggcatgcgctacttccacaaacttcgcaacaaattctacaatccgatcatcaacatcgacaagctgtggtccctcctcccccaggaggccaaag

SEQ ID NO: 170915 - DNA, 300 bp, Glycine max
gttaattcagaaacttgagttggattttggtgatcttgtgaattgatctgcgatgtcggacgaggtagtactgtaggatacatgggctagcatgtatggtatgagggctaggcttgcattggctgaaaagggtgttaggtatgaatacaaggaagagaatctcatgaacaggagtcctttgcttttgcagatgaacccaattcacaagaagattcctgttttgatccataatggcaaacccatttgtgaatctgcaataatagtgcagtacattgatgaggtctggaatgacaagtctcc

SEQ ID NO: 170916 - DNA, 301 bp, Glycine max
ttcgcaaagaacctttcttttatggtcatgacaaccatgatcagcttgtccaaatagctaaggtgcttgggactgatgaactgaatgcatatcttaataagtatcatctggagcttgatcctcaacttgatgcacttgttggaagacacagtcgaaaaccctggtccaaatttatcaatgcagataatcagcatcttgtgtctcctgaggcaattgattttcttgataagctccttcgatatgatcaccaggacaggctaacagctagagaagcaatggcacatccatatttctctcaggt

SEQ ID NO: 170917 - DNA, 296 bp, Glycine max
ctcactgaaaaaaaatagcttgttcacaccatcctattttttcaactcatatatacaaatatatataacatggcttctaccttctctcgaagcctagcacttgtaagcttttacattgtcgtttgtgctgccggtaacttgaaccaagactttcagcttacgtggggagatggtcgtgctaaaatactcaacaacgaaaatcttctcactctctcccttgacaaggcctctggctctggcttccaatccaaaaacgaatacttatatggcaagattgacatgcagctcaagctcgt

SEQ ID NO: 170918 - DNA, 294 bp, Glycine max
cacattctcataatcaaataccatttcattcattcttacatattgcttaattttatctgaattttgaaacaccttctgaatggctttttcaagagttgcattgttaatatgcacggtaattgggtattttgtgattgcctctgcgggcaatttttaccaagattttgatatcacttggggagatgggcgtgctaagatactcaacaatggcgagcttctcactctgtctcttgacaaagcctctggctcgggtttccaatccaagaacgaatacctttttggtaaaattgatat

SEQ ID NO: 170919 - DNA, 294 bp, Glycine max
tgcggctgcagtagagaagcactcttcgttcttcgactgtctacgatctgctttctctgaattgtgaaaatgtcgctcggagaaactgcttgttcatacgcagctctcatccttcatgaagatggaattagtgtaactgctgacaagatcagcaccttgttgaaaactgcaaaggttccagtagactcttataggccaaccttgtttgctaaacttgctgagaagaaaaatcttggcgatttgatagcaaatgcggcaggcggtggtgcaccagttgctgttgcagctgcccca

SEQ ID NO: 170920 - DNA, 188 bp, Glycine max
cactcgttcttcttcttttgttgttctgtgtttgtgtttgttttttctctcacctgaaaatgtcttgctgcggtggtaactgtggttgcggaagctcctgcaagtgcggcaacggctgcggaggctgcaagatgtacccagacttgagctacactgagtcaaccaccaccgagaccttggtcatgggg

SEQ ID NO: 170921 - DNA, 301 bp, Glycine max
ttcttatgcaactatagtgaggctcagagattggtccataattaatcaaaatgttggctaatattccacaaagcttttgctcatccacctgaagagctcaacagccctgcatcttacaaaggttccaagaagcctaaggttcccgaggaaactctcaaagatttcctttcccaccatcctcacaacacttgctctatgagctttggtgatgctgctgttctagcttatgtccgtcctgatcaatctttctctcgtcatcaaaggctgttttgtgggatcgatgacatatattgtctcttct

SEQ ID NO: 170922 - DNA, 297 bp, Glycine max
cttcgttttctccttaaccatgaagaagctctaccgtaaaggaaacgtcccaccctctccctcgccgtctccgccaaccatctccgaccacctctccttcctccccgccgccatcctcaccctcactctttccctctcttcggaggacagagaagtccttgcatacctcatctcatgctcatccaacaacaacttttccggcaaccctcgccggaaacctaaggttgtcgcggacggcgatcaccctcctctcttcaactgcagttgcttccggtgctacatgagctactgggtccg

SEQ ID NO: 170923 - DNA, 292 bp, Glycine max
tgccaaacagtatacttgggctttcccatggttttcttcttgggcatttacaatcattgggacttgactttccaaagaacattagtgtaattgctgtgtgcccaaagggaatgggtccatctgtaaggaggctctatgtccaaggcaaagagataaatggtgctggaattaatgcaagttttgcagtccaccaggatgtggatggcagggctactgatgttgctttgggatggtctgttgcccttggttctccattcacttttgccactacattagagcaggaatacaggag

SEQ ID NO: 170924 - DNA, 291 bp, Glycine max
ctcagaactggtacggacaaggggaatccgactgtttaattaaaacaaagcattgcgatggtccctgcggatgttgacgcaatgtgatttctgcccagtgctctgaatgtcaaagtgaagaaattcaaccaagcgcgggtaaacggcgggagtaactatgactctcttaaggtagccaaatgcctcgtcatctaattagtgacgcgcatgaatggattaacgagattcccactgtccctgtctactatccagcgaaaccacagccaagggaacgggcttggcggaatcagc

SEQ ID NO: 170925 - DNA, 293 bp, Glycine max
gaagtgttcgagcgacacatggaatccgttggtggccttcgacaccccaatttggttcctcttaagggcttatttccaggccaagcacgagaggctcataatctacgactttcagcccaatggcagcctcttctccctcatacacggttcgagatcaagcagggcaaggccattgcattggacatcgtgcttaaaaatagcagaggacgtagcacaaggtctggccttcatccaccaggcatggagactggtccatggcaatctcaagtactccaatgttctctttggaccaa

SEQ ID NO: 170926 - DNA, 298 bp, Glycine max
  unsure (1)..(298): unsure at all n locations
gctatgctanaattttcataaggcagaagtagagtcaacttaatgcgaacattctggataatggatttggtaacatccatactctctaatctcaatctagtcatccatgggaccagatatgtacagatattgaagatttcaagtgctcttagttaattgtgaaagtcttggaacttagtaatgaacaataaaagacagttctacaagagaactatggtaagccagatccagaaaatcgagctcaagtaaaggccctgtacaatgagcttaatcttcaaggtgtatttgaggagtacga

SEQ ID NO: 170927 - DNA, 255 bp, Glycine max
tcgacgaagcatacgaggaagagcttctcgattacgaagaggaagacgaaaaggccccgactccgccggagctaaagtcaacggcgaactaccaagaagggctatgttggaattcacagttcgggattcagggacttccttctgaagccagagcttcttcgggctattgtggactcgggatttgagcatccatctgaagtgcaacatgagtgcataccacaagcaattctcgggatggatgtcattggtccagca

SEQ ID NO: 170928 - DNA, 304 bp, Glycine max
  unsure (1)..(304): unsure at all n locations
tgcaagcttcgccggtttgcaacacagtgcctacaaccgatgngcgagaaacaagaccagagacaggctttttctgaaagcaaccaaaagtgtttctatgctctaagaaaggtgggaagggaaagaggcctgggaaaggtgggaatcgcttttggaagtcaattgggcttggattcaagactcccagagatgccattgaaggaacctatattgacaagaagtgccccttcactggcaatgtttccattcggggtcgtatcctagccggtacttgtcacagtgctaagatgacaaggaccattat

SEQ ID NO: 170929 - DNA, 290 bp, Glycine max
tgaaaagcatcgttatctgaagatgatgcatttgcctttctgaagggtgacaactatgctgattctgtgacatattttagcttctccgaagcacttcggcaggtgaagttaattggtgtgccttatggactacgttttcaacagttgcaagatctatggaatcaagcagatgctgatggaaatggtgtcatagactttgaagaattcaagcagaaaatatggaattctacatgtccagagcatgtgttggaaaatctgaatggttgcacggaagattgtaacacagaaca

SEQ ID NO: 170930 - DNA, 285 bp, Glycine max
ctttcttcactttcttcctccacatggcagagacaccaaccctcagcctccacgaagtctgccccatctcgccgccacaagaaaccccatcaaccactattcccttcaccttcttcgacgtcctatggctacgcctccccccagtggagcgtctgttcttctattccttcccaaacccaacaacaacctcttcattcttcgacaccaccattctcccaaatctcaaacactccctctccctcactctccaccacttccctcctctcgcccggcacatcacatggc

SEQ ID NO: 170931 - DNA, 286 bp, Glycine max
tgcatctcattctcattcgttcactgtcactttacccaatcctaacactttcttctctctgtttaccgtcttcctcgcatcaatggaattggacggcgttctcctcggcatgtgcaaccctctcctcgacatctctgccgtcgtcgacgacgctttcttgcaaaaatacggtatcaagttgaacgatgcgattctcgccgaggataaacacaaacctatgtatgaagaattggctaacaatcctaatgtggagtacattgctggaggtgctactcagaattcaatc

SEQ ID NO: 170932 - DNA, 281 bp, Glycine max
cgcattttgtatctgaaagaaaaagagggttctcatttcgcaaccatcggccgcacttactcttgttctcaagggattcgattttctctgcactcacttctagggtttcctccgcgctatcagcaatcatggccgacgaaacaccaaatgagatgaaggaggaggttccagaaattgttccttttgatcctaccaagaagaagaagaagaagaagattacaattgtagatcctgctgatgaccctgtggagaaattggctgagaagacagaaaacctctca

SEQ ID NO: 170933 - DNA, 280 bp, Glycine max
ctctgctgcgtttgcttctcctccacccatccacaaacgaacacacactttgattgagaatggggcgtgttcgcacaaagacagtgaagaagtcctcgcggcaagtgatcgagaggtactactctcgcatgacgctggacttccacacgaacaagaaggttctggaagaggtggccatcattccctccaagaggctccgcaacaagatcgcgggattctccacccacctcatgaagcggatccagaagggtcccgtacgtggaatctccctcaagctgca

SEQ ID NO: 170934 - DNA, 273 bp, Glycine max
cgaggcggcacgtgtgacggctgaggtcatagcggacatacggtgagggcgctgcagaggaccgtgcctcccgcagttccggcgatcgtgtttctctccgggggacagagtgaggaagaggcgacggtgaatttgaacgcgatgaatcaactgaaggggaagaagccgtggtcgttgactttctcttatgggagggcgctgcagcagagcacgctgaaggcgtggggtggaaaggacgagaatatccccaaggcgcagagcgcgttgcttgtg

SEQ ID NO: 170935 - DNA, 269 bp, Glycine max
tcaatttccaattagggtttcgcttagagtaaccaattaccatgggagtcttcacctttgtcgttcgcaaatccggcgccgaatggagcgccaagcaacattccggcgacatcgaggcctccgccgactccacctacgatctccaaaggaagctcgtgcaagccgctctcgccgttgattcctccggtggagtccagtcctccttctctcccgtgtctcctacctccgctgtgttccaggtgatagtgggtggtgctgtattcgttgga

SEQ ID NO: 170936 - DNA, 226 bp, Glycine max
tggcgacaggattgaacaagcatttcaagaggcttaatgccccaaagcactggatgcttgacaaactgggtggtgcatttgaccctaagccctcatctggaccacacaaatccacggaatgcctgccactcatactcattttgcgaaaccggctgaagtatgctctgacataccgtgaagtcattgctattctgatgcagcgacatgtccttgttgatggcaaagt

SEQ ID NO: 170937 - DNA, 233 bp, Glycine max
aatgaatagcaataccaccggcgctgcagcaatgaacgaccagctctccaacaccacctccatcttcggcctccgcctatgggtggttctcggggtgtgcgtgggcgccgccatcgtcctcatcctcttcctcatctctgtctggctcgccttcaagcgctcttccaaaaccaaccctgtttccatccccgacgtctccaaagagatccaagaaatcaggctcgacaccaacc

SEQ ID NO: 170938 - DNA, 263 bp, Glycine max
agcttttgaggttgttgcgagaaatgagaatgaagaagctgattttaatactcatagcagcatttaccttcgtttctgtggctagatctgcgtctgatcatttcttcgaaaacgatggcgtttcactggcagttgctgcaacgcccggacctccacctctcatggtccccctcactcttattcagggagctgcttccaaaggagccgtctgtttggatggaacattgcctggttaccactttcatcctggatttggatctggg

SEQ ID NO: 170939 - DNA, 261 bp, Glycine max
attttaaagcttcaaacatcttgttagactcggattataatgcaaaactttccgattttggcttggccaaagatggtcctgaaggagatgacacacacgtttcaactagagtcatgggcacacaaggctatgcggccccagaatacatcatgacaggacacttgacagcaatgagtgatgtgtacagttttggagtcgtgctcttggagcttctaacaggacgaaggtcagtggacaaagggcgcccacaagagaacagaa

SEQ ID NO: 170940 - DNA, 270 bp, Glycine max
aaccagtcatctatagagattttaaagcttcaaacatcttgttagactcggattataatgcaaaactttccgattttggcttggccaaagatggtcctgaaggagatgacacacacgtttcaactagagtcatgggcacacaaggctatgcggccccagaatacatcatgacaggacacttgacagcaatgagtgatgtgtacagttttggagtcgtgctcttggagcttctaacaggacgaaggtcagtggacaaagggcgcccacaaa

SEQ ID NO: 170941 - DNA, 261 bp, Glycine max
ttatcttgtagccctggacagaaaatctcatcaatcaaatttgctagctttggtactccagtaggttcttgtggaaacttccatgaaggaagctgccatgctcacatgtcttatgatgcctttgaaaggaattgtgttggacagaacttgtgcacagtagctgtgtcacctgaaaattttggaggagatccatgtccaaatgtcttgaagaaactctcagtggaagctatttgttcctgatcattttaacctcagaaaata

SEQ ID NO: 170942 - DNA, 260 bp, Glycine max
cagagaatggagttggacatccaatgtatggtcccttaagaattggcaaggcagaacctataaatcttcagtttggtttttatgggatcagtgcatggccaagtgatggtggcactagtcgtgctggaagtgttgacgagtctagagccgatggaactgatacaggtagtagatatgtatcctcttgctgtagctcaccaaggatgtcggatgttgccgcaaaggagctcaaggaagacttctcagtgcatggtagtgat

SEQ ID NO: 170943 - DNA, 267 bp, Glycine max
gcgtttccctttcattttccctcactttctcgctcgccaaacgcccctctctctcctccaatggccgaccagctcaccgacgaccagatcgccgagttcaaggaggccttcagcctcttcgacaaggacggcgatggttgtattactactaaggaacttgggactgtgatgcggtcactagggcaaaacccaactgaggcagaactgcaggatatgattaatgaggttgatgctgatggcaatggaaccatcgacttcccagagttc

SEQ ID NO: 170944 - DNA, 254 bp, Glycine max
gccaaacccacgtcaagagcacttgggttcccgcagccaagcgccgcgaacgacaccaacaactcgctgcgttgcagcaacaacatcaacatcctaaacgacatcacagagacactactactactcaacttgcctccgctccacaacccatcatagggttagagctgggacaattcccacctgaagtgagcacttcggcggtgtttcggtgtgtgagagtgagcgcagtggacgcttcagatgaacagtggggt

SEQ ID NO: 170945 - DNA, 266 bp, Glycine max
aattaacctcactcaaactcgggatcacagaaaccaacaacagttcttgcactgaggtttcacgatgttgctggaacttgcacttggtttgtttgtgttagctttgtttctgcacttgcgtcccacaccaagtgcaaaatcaaaagcacttcgccacctcccaaaccctccaagcccaaagcctcgtcttcccttcattggccaccttcacctcttaaaagataaacttctccactatgcactcatcgatctctccaaaaagcatg

SEQ ID NO: 170946 - DNA, 248 bp, Glycine max
  unsure (1)..(248): unsure at all n locations
gatgatgtcaacttggaagaatttgttatgactaaagacgaattctccggagctgatataaaggcaatatgtactgaagctggtttacttgctctacgagaacgtcgaatgaaggtgactcatgccgactttaagaaggccaaggataaagtgatgtttaagaagaaagaaggggtgcctnangggctgtatttgtnaaaaactccccntntnttnnggccccccctntttttaaaaccnannttggg

SEQ ID NO: 170947 - DNA, 204 bp, Glycine max
cagtggtgttagatctgtacctgcctagccattgatttggaaaagtccaagcttcaaagatgagtaagcttcagagtgatgctcttagagaagctatctcaggaatcatgactgattccaaggaaaagaacaggaaatttgtggagaccattgaactccaaattgggctgaaaaactatgatccccagaaggacaagcgtttta

SEQ ID NO: 170948 - DNA, 263 bp, Glycine max
cgattctctctgcactcacttctagggttttctctgcgctataagcaatcatggcggatgaaacaccaaatgagatgaaggaggaggttccagaaattgttccttttgatcctaccaagaagaagaagaagaagaaaattacaattgtagatcctgctgatgaacctgtggagaaattggctgagaagacagaaaacctctcagtttccgagggggttgagactgcatttactggtttgaaaaagaagaagaagaagcctgtt

SEQ ID NO: 170949 - DNA, 272 bp, Glycine max
aattaacctctccgcttccctccgatccattcactccctccctcttaaaacctccttgcggatcaaatgctcccaaacagatgggaatggaagtcctgcaaagaggacagtgcttcatgatctttatgagaaagaagggcagagtccatggtatgataatctctgcagacctgttacagaccttcttcctcttatagcaagtggtgtcagaggcgtcactagcaaccctgcgatttttcagaaagctatctcatcatcgaatgcttacaatg

SEQ ID NO: 170950 - DNA, 268 bp, Glycine max
ctcgacgtcgagtcgtcccatggtgacatgttcacggaggaacagaatgagttgattgaatcagcggcggaaatgctttatggtctgattcatgccagatatgtgttgaccagcaaaggaatggctgccatgcttgacaaatacaagaactatgattttggcagatgcccaagagtttactgctctggacagccctgccttccagttggtcaatcagacattcctaggtcaagtactgtgaaaatatactgccctaggtgtgaagatc

SEQ ID NO: 170951 - DNA, 254 bp, Glycine max; identical to SEQ ID NO: 125817

SEQ ID NO: 170952 - DNA, 229 bp, Glycine max
caggcaggcacaaagggcagaaggcccagcaaccatccttgccattggaactgcaaacccaccaaaccgtgttgatcagagcacctatcctgattactacttcagaatcaccaacagtgaccacatgaccgagctcaaagagaaatttcagcgcatgtgtgacaagtctatgatcaagacgagatatatgtacctaaacgaagagatcttgaaagagaatccaaacatg

SEQ ID NO: 170953 - DNA, 216 bp, Glycine max
aggcgggacagcctcgtataaagcggccaccatcgcctgtagtgctttgtgttccacgtgcacctcgtccacccccaccatcccctgtgagtgactccaggaaacacaggggttttcccactgttagatctggtagttccagccctaggcactggggaatgcgaggctggtatcatgatgggagtatttttgaggaacttttaaaagaaggggggc

SEQ ID NO: 170954 - DNA, 234 bp, Glycine max
gagagatccatcgatcaattaatttccaatggccgatcagctcaccgacgaacagatctctgagttcaaggaagcctttagcctcttcgacaaggacggcgatggttgtattaccaccaaggaacttgggactgtgatgcggtcgcttgggcagaacccaactgaggctgagctgcaggacatgataaatgaggttgatgctgatgggaatggtaccattgatttcccagaatt

SEQ ID NO: 170955 - DNA, 249 bp, Glycine max
caagccccactcaaccaccacacctctcctcgttcacgctacccctttctgctcttcttctacctttcaagttttaaaagtataaagatggcagagacattcctatttacctcagagtcggtgaacgagggacaccctgacaagctctgcgaccaaatctccgatgctgtcctcgacgcttgcctcgagcaggacccagacagcaaagttgcctgcgaaacatgcaccaaaaccaacttggtcatggtc

SEQ ID NO: 170956 - DNA, 230 bp, Glycine max
acttaattgccttaaggaacgttcgagaccacagaggtttctctagtcttcttctgtggagagcttgttttctcttgttcattcatctcacttccaattaaggaacaagctttccaccaatttgaatcaccaatggctcgctctttctccaacctcaaagttctctctgctcttgtcgccgacggattctccaacactctcaccaggcgtgggtacgcatagcgacacaa

SEQ ID NO: 170957 - DNA, 240 bp, Glycine max
gccaagatccaggacaaggagggaatccccccagaccagcaacgtctcatcttcgccggaaagcaacttgaggacgggcgcaccctcgccgactacaacatccagaaggaatcaacccttcacctcgtcctccgtctccgtggtggcatgcagatcttcgttaagaccctcaccggcaagactataaccctagaagtcgagagctccgacaccatcgacaacgtcaaggctaagatcgag

SEQ ID NO: 170958 - DNA, 240 bp, Glycine max
atggttctggtggtactatactgtttgtaggtgatttgcattggtggactactgatgctgagcttgaaactgagcttagtaagtatgggcctgttaaggaggtgaagtttttcgatgagaaggcgagtgggaagtcgaaggggtattgtcaggtctgagtcttttgagccttctgctgccactgcttgtaaggacgggatgaatgggcatgtttttaatgggaggccgtgtgttgttgcg

SEQ ID NO: 170959 - DNA, 267 bp, Glycine max
ccgaaagggtctgtgtcttcactcattcttctattctattccatcatcaatggagaacaccgagggatccggatctgcgacgaacggggtgctggctccgccgcgcaaggtggcattgataaccggaattaccggacaagacggttcgtacctgacggaattcctcctggacaaggggtacgaggtgcacggcctgatccgccgctcgtcgaacttcaacacgcagcgcatcgaccacatatacgtggatccccacaacgcccacaa

SEQ ID NO: 170960 - DNA, 264 bp, Glycine max
ctggtcttttgttgaaagacctggtcttctcctactaggtgcatattttattgctcagttggtggcaacttttatagcagtgtatgctaactggggctttgcaagaataaagggaatgggatggggttgggctggtgtaatctggctgtacagtgtggtaacctatatccctcttgatttactcaaatttgctatccgctatattctaagtgggaaggcttgggataatcttttggagaacaagactgccttcactacaaagaa

SEQ ID NO: 170961 - DNA, 262 bp, Glycine max
attcttctcactcttcagatctctctcccttccttccatcccaaccacaaggttgctgagaagacataaaaaatggtgaagatttgctgcattggagctggctatgttggtggcccaaccatggctgtaattgccttgaagtgtcctgagatcgaggtggtcgtggtggacattgctgcaccgcgaatcaacgcgtggaacagcgaccacctcccgatatatgagcctggccttgatgatgtggtgaagcagtgcaggggga

SEQ ID NO: 170962 - DNA, 252 bp, Glycine max
cttaaaaatattcagtgaagatcaacctcaatggcatctcttggcgtgcgaccagttcttccccctccattaacttccatctccgacccacctcctcttttcgatggcaccaccaggttgtacatcagttattcttgcccctatgcacaacgtgtgtggatcgctaggaactacaaggggctacaagataagatcaatttggtccctattaaccttcaagacaggccagcttggtataaggagaaagtctac

SEQ ID NO: 170963 - DNA, 254 bp, Glycine max
aattttcattttgtattattttggtcatgcgatttcttccagttgggaaagagattcgagagaaattctctggtgcagttgaagcgttctcccggaggaaccctgcaaatgctagtccttgtggtgatcacaccaaacacaggagttttgaggattaaccagtgcaaaaggatttgcactatgcgcaacacaattccactcgatatggcagcagttcaagaagagccatgatctcatcaaacaagccaatatcc

SEQ ID NO: 170964 - DNA, 256 bp, Glycine max
  unsure (1)..(256): unsure at all n locations
aagtaaagagggttagagaaataaaaagagaaagccgacagcacatagatagagagaggaaaacgacttaatattctttttccttgagacctgaaggggctaaggaaaattagaaggacacacaagtataaaggcggtgaaataaaagagaaagacaagaagacgacatgggaagnccaccttgttgtgacaaagaaggggtcaaganagggccttggactccngaagangnctcntntttgtgtctatattcngg

SEQ ID NO: 170965 - DNA, 245 bp, Glycine max
cacgttattctctctccgagcttcactctcttttcgcctctgctaaagggagaaaaatggggttctcctcctttctgggtcgtgttctctttgcctccctcttcatcctctccgcatggcagatgtttaatgaatttgatgccaatggtggacccatctcgaaagagttgattcccaaactcagtgtggtgaagaataatttatcctcgagattgggggtagctttaccagatagggatgcccgg

SEQ ID NO: 170966 - DNA, 267 bp, Glycine max
tggaaaatggcgggtacggtttcgacttgtttcttcttcgtgtttcttctttctctccttcttccttttcagatctccgctgaggaatcctcggagaaggagttcgtactcacattggatcactctaactttcacgacactgtcagcaagcacgatttcatcgtcgtcgagttctacgccccatggtgtggtcactgtaagaagcttgctccggagtatgagaaagctgcttctatcttgagtagtcatgatcctcctattgtttgg

SEQ ID NO: 170967 - DNA, 262 bp, Glycine max
ctcgtttctggtccaaattcattgatgacaagattgtgggtgctgcatggaatgctgttttcacggttgatgagaaagagcgtgagaagaatgttgtagaaacatatgaggctctgcagtttcttgagaatgagatcaaggacaagaaattctttggaggagaagaggttgggttggtagatatagctggtgtctacatagcattttgggaccctttgattcaagaaattgcagggttggagctattaagcagtgagaaatt

SEQ ID NO: 170968 - DNA, 260 bp, Glycine max
gaaagagagtggcaaatcttctgttctgcttgacgttaagccttgggatgatgaaacagacatgaagaagctggaagaggctgttcgcagtgttgagatgcctggtctattgtggggagcatccaaactggttcctgttggttatgggatcaagaagttgcagatcatgttaactattgtcgatgaccttgtatctgtggacacccttgttgaggagactctcacagttgagcccatcaatgagtatgtccaaagctgtg

SEQ ID NO: 170969 - DNA, 256 bp, Glycine max
tcggaaccgaaacccttcgccgcaaaaaatgcctcccaaatctgccaaatccaaggaagctccagctgagcgacccatcctcggtcgattctcttctcacctcaaaattggcattgttggcttgccaaatgttggaaagtctactctctttaatactctcaccaagttggcaatacctgctgagaacttccccttttgcaccattgagcctaatgaggcacgggtcaatgtacccgatgaacggttcgagtggctt

SEQ ID NO: 170970 - DNA, 258 bp, Glycine max
  unsure (1)..(258): unsure at all n locations
gagaaattgagaagatgggaagaaaggccaactgtgacaatcaatatgctatgaacagaggtccttggtctgctgaagaagacaaaattcttatgaactacgttcaagtccatggagaaggaaaatggagagagctttccaaaagagcaggcttgaaaagatgtgggaagagttgtagactccgatggctgaattatctcaagccagatatcaagagaggaaacatttcttcggatgaagaagatctcattatnagac

SEQ ID NO: 170971 - DNA, 231 bp, Glycine max
aaaaatattattaagatgatcaacattattggagcacttgttctactctttgcatttctcatcctcagttgtgtgtatgcacaagacacaacaacccttgtgcctgcaatcataacttttggtgattctgctgtggatgtagggaacaatgactatcttcccacccttttcaaggctgattaccctccttatgggagggactttgttaaccaccaacctactgggaggttt

SEQ ID NO: 170972 - DNA, 206 bp, Glycine max
agtttggagctggtggtggagatggaataggaggaggaggatttggcggtggtggaggaggtggatttggtggaggtggtggctttggagctagtggtggttttggtggtggcggtggtgctggatttggtggcggagttggtggtggccactaggttgaatgttgatatgaatatggtatccacgagtcattatattcagattgt

SEQ ID NO: 170973 - DNA, 248 bp, Glycine max
cggggtatgcataccctgatacgtgattctcaaacaacgaaacatgactttgtattttattctgaccgtttgattcgtttggttgtagaacatggcctagggcatcttccatttacagaaaagcaagtaaccactccaactgcatcggtatacagtggtgtggatttctgcaagaggttgtgtggtgtctctatcatccggagtggggagagtatggaaaatgctctacgagcatgctgcaaaggtat

SEQ ID NO: 170974 - DNA, 277 bp, Glycine max
atcatttcactcagccgctgcgaggcgaacagagagacccgaagccagatttcaagatgaagttcaacattgcgaatcccaccactggttgtcagaagaagctggagatcgatgatgacctgaagctacgagcattttgggacaagaggatctcacaagaggttgttggtgatgctctgggtgaggaattcaaaggctatgtcttcaaaattactggaggttgcgacaagcaaggatttccaatgaagcaaggagtgttgacacctggtcgtgttcg

SEQ ID NO: 170975 - DNA, 271 bp, Glycine max
attacctttctctgagtccaagttccaacgaaatgtgaacagtgaaagaaacaaaaaaaacaccatgatgctgaaggcggcaccgcgtgcagtaatctactacctctcggagcacccggctatcgtggggttccggtggagccacgcccaatcatggggcgccacgtggtccttcctcttctcctcaattgcctcctacctcttcctctcagtcttcctatacttctctctttctctcctcttccgccgccgtcaaatccctctcggcccc

SEQ ID NO: 170976 - DNA, 268 bp, Glycine max; identical to SEQ ID NO: 121046

SEQ ID NO: 170977 - DNA, 267 bp, Glycine max
ggaagtctcttcttacttgaagaaggttggttacaacccagacaagattccctttgttcccatctctggttttgagggtgacaacatgattgagaggtccaccaaccttgactggtacaagggaccaactctccttgaggctcttgaccaaatcaatgagcccaagaggccctccgacaagcctctaaggcttccattgcaggatgtctacaagattggtggtattggtactgtgccagtgggacgtgtagagactggggttgtgaa

SEQ ID NO: 170978 - DNA, 269 bp, Glycine max
gttgatggcgtcacaagcaagcctcctccttcagaagcagctcaaagatctttgcaagaaccccgtcgatggcttttccgccggtttggtcgacgaaaccaacatttttgaatggagtgtgactataattggacctcccgatactctttatgaggggggatttttcaatgccattatgagctttccacccaactacccaaatagtccaccatcagtgaaatttacttcagagttatggcatcccaatgtgtatcttgatgggcgagttt

SEQ ID NO: 170979 - DNA, 219 bp, Glycine max
gcttcgtgaatcttagtgcatcaagatctctgtctctctgtctctctgcaatcgaaaatgagcaagggaccgggtctcttcaccgatatcggcaaaaaatccaaagatcttttgactaaggactacagctccgatcagaaactcaccgtttcctcctacagcgtctccggagtgaccctcatttcaacatctgtgacgaaaggaggactttcaacaggg

SEQ ID NO: 170980 - DNA, 260 bp, Glycine max
gcgacacgtcttcttcggatttcttctgccgccgccacgtgttcctctgctacaagaaccccgccgtgtggccgccgcgcattgaggctgccgagtttgatcgcctgccaaggttgctccacgccgccatcaatgccagaaagcctcatatcaagaaagagacctgcttaacaatatgtgaggggcatgatgggactgaaacatcaaatggagatgtataaatttttccagacatgatcagatataggagtttaaccatt

SEQ ID NO: 170981 - DNA, 271 bp, Glycine max
gcagccaatattaaaggggatgttgactctgattgcttggattatgaaattttgtgggaggacctgacaatgggagaaccaattgggcaaggttcttgtggaactgtatatcatgctcagtggtatggatcggatgttgctgtcaaggttttctcaaagcatgaatacacagatgatacaatactgtccttcaaacaagaggtgtctgtcatgaaaagacttcgtcatccaaacattattctctttatgggggctgtgacttcacctcaac

SEQ ID NO: 170982 - DNA, 276 bp, Glycine max
aagaatttccattgcatgcaaagcaaatacgcattatattactagttttaatttgttttgtcgtttgcttctttctttgattaatgatgactagctttaaggttgcatgtgtggttgcgatgatgtgcatggttgtcgccatgagtgttacacccatggcacaggccgcaatcacgtgcgggcaggtcgccggcgacgtgtctccgtgcctcagttatcttcgaagcggcggaaaaccgtcggacgcctgctgcaacggagtgaagtcgctcagcg

SEQ ID NO: 170983 - DNA, 196 bp, Glycine max
atcaaagtcattcacctaaaccctatggccgacgaagccaaagccaaaggcaacgcagccttctcctccggcgactaccccgccgcaattcaccacttctccgacgccatcgccttggcccccaccaaccacgtcctctattccaatcgatccgccgcatacgcttctctccaaaactacaccgatgccttagccg

SEQ ID NO: 170984 - DNA, 269 bp, Glycine max
cctcactttctcgctcgccaaacgcccctctctctcctccaatggccgaccagctcaccgacgaccagatcgccgagttcaaggaggccttcagcctcttcgacaaggacggcgatggttgtattactactaaggaacttgggactgtgatgcggtcactagggcaaaacccaactgaggcagaactgcaggatatgattaatgaggttgatgctgatggcaatggaaccatcgacttcccagagttcctcaacctgatggctcgcaag

SEQ ID NO: 170985 - DNA, 267 bp, Glycine max
  unsure (1)..(267): unsure at all n locations
gtttcgctgtctctcccatcctttcgcattctcaatacccttttaatttgtgaaaggaaagcaaacatggttgatcatgtccaatatcctacaatcatggtcaatgtttctggttatctccatctccgntctgaactttcatctggtattagaagttatgatggagcctaccgccacccagctatgtaccaaagaccctcttttgggaattactcgaatgctgcattgtagttttccgtgatgcccacatttaaagctaccatggat

SEQ ID NO: 170986 - DNA, 259 bp, Glycine max
gccatctcatggaggcaatatgggccatgcacttcaggtataaagatttatataagtaatatagatggccgtttctataattatattgtaataactcatattcttaatgtgacaatttctataattattgaaactaaatgttatttcagggtcaccgggcctacgcaggacacaagaaatatataaccccaaacaaaagacagatgctcccctattttctggattcttccctcccgaagaagagttcaataggattatc

SEQ ID NO: 170987 - DNA, 142 bp, Glycine max
attgtttgttgttgtaactcgttcttcttcttttgttgttctgtgtttgtgtttgttttttctctcacctgaaaatgtcttgctgcggtggtaactgtggttgcggaagctcctgcaagtgcggcaacggctgcggaggctg

SEQ ID NO: 170988 - DNA, 263 bp, Glycine max
aattacccttcccaattttcaccaaaacctaatactcccacaccaatcttcgatcatggaccccgattcacaacctcaacaactcgaagagagaacagaggagcaagaactgaagtacctggaattcgtgcaattcgcgaccatacaggctctgatgcgctgcgtcatcctctactcatacgccaaggagcgcgcgggtcctctgaagcccggtgtcgacaccgtggaggaggccgtgaagaccgtcgtggctcgggtctacg

SEQ ID NO: 170989 - DNA, 271 bp, Glycine max
gtgctcctaacattagattagaccctctaccatgttcctctgcctctgaagtctgaacctccccaggaatggcaatggagaatacaacattgtttgtgttgctgctgaatgtgcttcttgtgttcagtgcctctcttgtgtccgcagagcaacaaagtcaagcctcagctgtaggggacccaggaatgcaaagagatggtttaagggtggcctttgaagcttggaacttctgcaatgaagttggtcaagaagctcctcacatgggtagtcc

SEQ ID NO: 170990 - DNA, 277 bp, Glycine max
  unsure (1)..(277): unsure at all n locations
attttcttcatccttctctgttctcctagaacttgattacttgaacattccctatgacagatgaggtggttcttctggatttctggccaagtccatttgggatgagggtcaggattgaacttgctgaaaagggtatcgaatatgagtancaagaagaggacttgaggaacaagagtcctcttctcttacaaatgaacccggttcacaagaagattccggttctcatccacaatggtcaacccatttccgaatccctcattgctgttcagtacattga

SEQ ID NO: 170991 - DNA, 238 bp, Glycine max
ggtatcaactgttttgttaacagacagttgatttacaattttccagaggagctctttgctgatgcaggaatattggctattgagcatgctgattacgatggtattgagcgtctggctttggtaactggtggtgaaattgcgtcaacctttgacaatcctgagtctgttaagcttgggcattgcgaccttattgaggagattatgattggcgaggataaactgattcatttttcgggtg

SEQ ID NO: 170992 - DNA, 264 bp, Glycine max
caatttctatctctcttatactctcactactctctttgctctttcttttctccactatggctgcacaagaaaacaacttccaagactacttgcctgtgatggccaacaagcttggtggggatggcctaattgatgaactgtgcaatgggttcgatcttttgaaggattctgataaaggggtcatcacttttgagagcctcaagaggaattcttacttgcttggtcttcagggtctcagtgatgaggatcttcgctccatggttt

SEQ ID NO: 170993 - DNA, 263 bp, Glycine max
ctttgttttctaaataaagagaatcatgtagtaagactgaattgactgcatgtgctcctcaaaagaacaatgtatgaaatacctatgctatgctatatgctatgatacctttattacataagacgagtggttaattgaagagtccgcaccacccgtgaatgtgatcctgtcaattaaccactcttcttatgtaaagggggatcatactaactttgaaattgagtcttcttttggagtggaagcttcagctctatatcctgatg

SEQ ID NO: 170994 - DNA, 263 bp, Glycine max
tccttctacactaactaaagccgagcagcgagagagagaaaccctagcaaaaatgccggctggtcacggtttgagatcccgcaccagagattccttctctcgtcccttcaggaagaagggtaccatcgccctcaccacatacctcagaacctaccacgtcggcgattatgtcgacgtcaaggttaacggcgccgtccacaagggaatgcctcacaagttctaccatggccgcaccggtcgcgtctggaatgtcaccaaacgtg

SEQ ID NO: 170995 - DNA, 263 bp, Glycine max
gggcagagatgtttccctctatgattgctagagctatcaacctcgatgttatatctaatggcatgggtggaacaagaaatggtgctctacaagtgatgcatgctgaggttcaattgctttcgccactagttcctgtccgtcaagtaagattcatccgattctgtaagcagcatgcagaaggtgtttgggctgtggttgatgtttctattgagattggtcatgatgctgctaatgcacagccagtcatgagctgtaggaggctt

SEQ ID NO: 170996 - DNA, 144 bp, Glycine max
ggcttccttaagctccttagtgctgctccttgcagctctaattctatcccctcaagttcttgcaaactatgagaatcccccagtgtacaagcctcccactgagaaaccaccagtttataagcccccagttgagaagcctcctgt

SEQ ID NO: 170997 - DNA, 257 bp, Glycine max
gtcttcaacgtctcaaactgagatcaacctgcctttcatcactgctgatgcatctggtgcaaagcatctgaacataacattgacaagatcgaagtttgaggctttggtgaatcacttgattgaaaggaccaaggcaccatgtaaaagctgcttgaaggatgctaacatctctatcaaggatgttgatgaggttcttcttgttggagggatgacccgagttcctaaagtccaagaggtggtttcagagatcttgggaa

SEQ ID NO: 170998 - DNA, 266 bp, Glycine max
ctcactcgcaagcaaaaagaaagaatcccaggcgaggagaaagatggaggggaaggagcaggatgtgtcgttgggagcgaacaagttccccgagagacagccaattgggacggcggcgcagagccaagacgacggcaaggactaccaggagccggcgccggcgccgctggttgacccgacggagtttacgtcatggtcgttttacagagcagggatagcagagtttgtggccacttttctgtttctctacatcactgtcttaaccg

SEQ ID NO: 170999 - DNA, 267 bp, Glycine max
aagaaaatacacattacattactaagtctttgttcatttgagtagtagtgatggctagcctcaaggttgcatgtgtggttgctgtgatgtgcatggttgtggtggccatgagtgctgcacccatggcacaggccgcaatcacgtgcgggcaggtcgccggcgacatgtctccgtgcttcagttatcttcgaagcggcggaaaaccgtcgcaggcctgctgcaacggagtgaagtccctcagcagcgcggcgaagaccaccgcggacc

SEQ ID NO: 171000 - DNA, 271 bp, Glycine max
cttttcacactgccgctgcaacaatggcttcagagaagaaactttcgaacccaatgagggagataaaagtgcagaagctcgttctcaatatctctgttggcgagagtggagatcgtctcaccagagccgccaaggtgttggaacaacttagtggccaaaccccagtgttttccaaagcaaggtacactgttcgttcctttgggattagaagaaatgagaagattgcatgctatgtcactgtcagaggtgacaaggcaatgcaacttttgga

SEQ ID NO: 171001 - DNA, 264 bp, Glycine max
cgattacccatttggttatttcgccctaatggctcttgctccatccaaagtttccaccttttctggtttttctcccaaacccagtgttgggggtgctcagaaaaacccaacttgctctgtttctctgagctttttgaatgagaaacttggaagcagaaaccttagggtttgtgcctcaacggtgcctctcactggggtgatttttgaaccgtttgaggaggttaagaagagcgagcttgctgttccaactgctccccaagtctc

SEQ ID NO: 171002 - DNA, 261 bp, Glycine max
ggtgaagtgttcggattgcggcgacgtgagcggttcgctgcccgctttgttgtgagaagtccactgaaccttatcatttagaggaagaaggggcaattttgtttatgtgcctaaggaggtgcctcctactcctactcctgctggatggtaagtgagtgcaaaggcgaagtgtcaaagaccttaggctgagactgcaacaaggggaccccaatgaaactgctgaggtggctgaagatatataaattttggtatcttggtaaa

SEQ ID NO: 171003 - DNA, 258 bp, Glycine max
gtttcatcaattcgattgcccggtttggaccaagacgccaaggccacgcatggatcggtgcttaggttgaacagaggaggctcttcagtgaagtttgatcccacacgggtcactcagctctcgtggagtcccagggcttttctctacaagggctttttatccgatgaagaatgtgatcatttgataactctggccaaggacaagctggagaagtctatggtggcagataacgagtctggtaaaagcataatgagtgaa

SEQ ID NO: 171004 - DNA, 262 bp, Glycine max
cacacacacacacactgtgtttgtgaaactctcacacagacaagtcacaacaacaagtttctgttgttccaatggcatcagcaacaccccttttgaaagatgagctggacatcgtgatcccaacgatcaggaacctggatttcttggagatgtggaggccattctttgagcattaccatctcattattgtgcaagatggagacccttcaaagatcatcaaggtccctgaaggctttgactatgagctctacaaccgcaatga

SEQ ID NO: 171005 - DNA, 247 bp, Glycine max
ctttcttttctctttcctctctctctctctacgctttctcgtttgagatccctcaagggatccactaactgaaggagcaatggggttgacatttaccaagctttttagccggcttttcgccaagaaggaaatgcgaattctaatggttggtcttgatgccgctggtaagaccaccatcctgtacaagctcaaacttggagagatcgttaccacaattcccaccattgggttcaacgtggagactgtg

SEQ ID NO: 171006 - DNA, 255 bp, Glycine max
tagaagcgtaacagcggctaccctaacctcgtcttcctctctactaatttcagctatggccgacgaagctgtggttgttccagatcccacccagatcgatgtcaagctctttaaccgctggagcttcgaggatattgaggttactgacatttcactggctgattacattggagttgcggcatccaagcacgccacatatgttcctcacaccgccggaaggtactccgtgaagcggttcaggaaggcgcatgcccc

SEQ ID NO: 171007 - DNA, 255 bp, Glycine max
cctttgttcactcttcttctcttgcggctagggttttagcgcacttcttctagatttaaggaagatgggtaaggaaaaggttcacatcagtattgtggtcattggccatgtcgactctgggaaatccactaccactggtcacctgatttacaagcttggaggcattgacaagcgtgttattgagaggtttgagaaggaagctgctgagatgaacaagaggtctttcaagtatgcctgggtgctggacaaacttaa

SEQ ID NO: 171008 - DNA, 261 bp, Glycine max
attttaaagcttcaaacatcttgttagactcggattataatgcaaaactttccgattttggcttggccaaagatggtcctgaaggagatgacacacacgtttcaactagagtcatgggcacacaaggctatgcggccccagaatacatcatgacaggacacttgacagcaatgagtgatgtgtacagttttggagtcgtgctcttggagcttctaacaggacgaaggtcagtggacaaagggcgcccacaaagagaacaga

SEQ ID NO: 171009 - DNA, 266 bp, Glycine max
ctgagaaaaacagatagtgtgggagagagaagagcggaagagaaaatgacgaccaggttcaagaagaacaggaagaagagaggtcacgtcagcgccggacacggccgtatcggaaagcaccgcaagcatcccggaggtcgcggtaacgccggtggcatgcatcaccaccgtatcctcttcgacaagtaccatcctggtttcttcgggaaggtaggcatgcgctacttccacaaacttcgcaacaaattctacaatccgatcatcaa

SEQ ID NO: 171010 - DNA, 228 bp, Glycine max
tataagcatcttcttccatcaccgcattattcatcttttctcttctcattcaccaattcacaattcattttatttcttaagatgccaactgacacgtcatcagtttccggcgaaatcgtgtgtgtgaccggtgccggcggtttcatagcctcttggcttgtcaaacttctcttagagaaaggctacactgtgagaggacccgtgagaaatccagatgatccgaaaaat

SEQ ID NO: 171011 - DNA, 246 bp, Glycine max
ggctcgagcggctcgagcgcgttggtgcaaaccatccttcgcttcaaactctctctctctctttgcgatttctgcaaaccgaacatttcatctccaaagggatcaacaggtcgaaggagaaatggggctgacattcacgaagcttttcagccggcttttcgcgaagaaggaaatgcgaattctgatggttggtcttgatgctgctggtaagaccactatcctctacaagctcaagctcggagagat

SEQ ID NO: 171012 - DNA, 204 bp, Glycine max
cggctcgagctcagtctctgtgtttgcggctgaggattccgaacgagtgaccttcttcgtttctagcaaagtttaagtaatcatgggtaaggaaaaggttcacatcaacattgtcgtcattggacatgtcgactctgggaagtcaactaccactggtcacttgatctacaagcttggaggtattgacaagcgtgtgattgaaag

SEQ ID NO: 171013 - DNA, 158 bp, Glycine max
gcgtttccctttcattttccctcactttctcgctcgccaaacgcccctctctctcctccaatggccgaccagctcaccgacgaccagatcgccgagttcaaggaggccttcagcctcttcgacaaggacggcgatggttgtattactactaaggaact

SEQ ID NO: 171014 - DNA, 261 bp, Glycine max
gaagagtttgtggaatctagtgagagagagcagaggaaaaggggaagaaaaatgttgagtgcgacggcgatcggcgcgttattgggtttgggaacccagatgtactccaatgctctccgcaaactcccctacatgcgccatccgtgggagcacgtggtcggaatggggttgggcgcggtgtttgtgaaccagcttctgaaatgggaggcccaagtggagcaagacctcgacaagatgctcgaaaaggccaaggccgccaac

SEQ ID NO: 171015 - DNA, 260 bp, Glycine max; identical to SEQ ID NO: 160745

SEQ ID NO: 171016 - DNA, 258 bp, Glycine max
tgatgatgtcaacttggaagaatttgttatgactaaagacgaattctccggagctgatataaaggcaatatgtactgaagctggtttacttgctctacgagaacgtcgaatgaaggtgactcatgccgactttaagaaggccaaggataaagtgatgtttaagaagaaagaaggggtgcctgaagggctgtatatgtgaaaaactatcctctattatctctggccctcttgtctttcttttaacgttctagttatgcg

SEQ ID NO: 171017 - DNA, 260 bp, Glycine max
gtttcatagtgagcatggtctcatgagcattgaacatccaacaaagaagatgaaagcaatgcctaggattgacagcgagggatttatgtgtggggctaacttcaatgttgactctcagacaaagatccaagtgatgcctcgtgttggaagtgaagctaattgggccacatggagctaacaaacttgactgatttaatcatagcccaacttttttttaaaacccttttctaagtggttaagagtacacaacttaatatgat

SEQ ID NO: 171018 - DNA, 260 bp, Glycine max
aataaattcatctaaccccaaacaaaaccctagcacacttttatcgcttagtggcagcagcagtggcggcaagcaactccatccgcaatgggaatcgatttgaaggcaggaggtaagtccaagaagaccaagcgaaccgcccccaaatccgatgatatctacctcatgcttctcgtcaagctgtaccgttttcttgttcggaggactgggagtaacttcaatgctgttgtcctcaagcgccttttcatgagcaaggtcaa

SEQ ID NO: 171019 - DNA, 213 bp, Glycine max
ctgaaatctgaagctaacttaagggaaatgagatggccaatggcaacactagtcatcgcttcaagctcttgcttttccttctaactctgcactcttcattcgctgagattttcttcgaagagagattcgaagatggatggaagagccgttgggtgctatccgattggaaaaggagtgaaggaaaagcgggtaccttcaagcacacagcggaaa

SEQ ID NO: 171020 - DNA, 232 bp, Glycine max
gcaggtggcctgctgaagcagtgaaaccaaatgaacagcctacagaaagaaagaaaggttttggtgattggatgaatcttattaaacctgccaatgaagagaaggatcattgggtaccagatgaagccgtctcaaaatgtacagcatgtggtactgattttggggcttttgttcgcaggcatcactgtaggaactgtggtgatatttcctgtgacaaatgtacatatggtag

SEQ ID NO: 171021 - DNA, 264 bp, Glycine max
tttcagtgagtgatcggtgttcacttgatctcatcataatcgtcagcgtcaattgaagaagatgccgatcagaaacatcgccgtcggaaggcctgaagaggcgactcaccccgacacgttgaaggcggctttggctgagttcatctcaaccttcatcttcgtgttcgccggctcaggctccggcatcgcctacaacaagctcaccgacaacggcgctgccacccctgccggcctcatctccgcctccatcgcccatgcattcgc

SEQ ID NO: 171022 - DNA, 266 bp, Glycine max
ctttccactgctcaaactctctctctctctcttctcttacacacacaagcactacaacattttctttggtctctcattttctctatagctagatgggttctggtgctttacaacttcttctgatcttgggtcttctggctagctcatgcttagcacaagccccaggtgctgcacccacacaaccacccactacaaccccatcaccaccaccaccaagatcagcacctgcaccagcacccaccccgccagcaacaccaccaccagca

SEQ ID NO: 171023 - DNA, 173 bp, Glycine max
caggacaataatgttattcaagttgttatactggtcccaacccgagaattggcattgcaaacttctcaagtgtgcaaagagcttggaaagcacttgaaaattcaagttatggttacaacaggtggtaccagcctgaaagatgatatactgcgcttatatcaaccggttcattt

SEQ ID NO: 171024 - DNA, 140 bp, Glycine max
gccgtattcaccgctttcatccaggttgtttacatggctttggttggatcatttccatttaactccttcctatcaggagtactttcttgtgtaggaactgctgttctagctggttgtctcaggatccaagtgcctaaaga

SEQ ID NO: 171025 - DNA, 182 bp, Glycine max
attcggctcgatgcagcaagcatctccttctcaaactagtagtattattcttccattccgttctacatataatcattcataatgggtgttttcacattcgaggatgaaatcaactcccctgtggctcctgctactctttacaaggccctagttacagatgccgacaacgtcatcccaaaggc

SEQ ID NO: 171026 - DNA, 170 bp, Glycine max
tgggaacttggtattggaattgtaccatatagtcctcttggtcgtggcttttttggcggcaaaggagttgtggaaaatgtgcctgcaaatagctccctgaaagcacatccacgctttcaagccgagaacttagacaagaacaagaatatatatgaacgaattgaaggcct

SEQ ID NO: 171027 - DNA, 165 bp, Glycine max
gtactgcgtttcggaagcagacacagatggctcgtacgaagcaaaccgctcgtaagtccacaggaggaaaggctcctaggaagcagcttgcaaccaaggctgcacgtaagtctgcaccaactactggtggtgtgaagaagccccaccgttatcgtcctggtaccg

SEQ ID NO: 171028 - DNA, 169 bp, Glycine max
ctctttctctttctctgccaacctgcacactcttcactcgatcaaacagaaaatggcaaagaatgtggggatccttgccattgacatctacttccctcccgcttgcgttcagcaggaagcattggagactcatgatggtgccagtaaagggaagtataccattggtctt

SEQ ID NO: 171029 - DNA, 165 bp, Glycine max
aatgatgatgatgatgacgtgaatgacggagaagacggtgacgatgatgatgaagatgatgaggatttctctggtgatgatggcggggaagaagctgattctgatgatgatcccgaggccaatggtggaggtgaaagcgatgacgacgatgaggatgatgatgac

SEQ ID NO: 171030 - DNA, 168 bp, Glycine max
tagctcgagtgccattggtgagggaatgacacgaaaggatcattctgatgtgtccaaccagctctatgcaaattatgccattggaaaggatgtccaggcaatgaaagccgtggtcggagaagaagcactttcatctgaggacctgctgtatttggaatttttggagaa

SEQ ID NO: 171031 - DNA, 168 bp, Glycine max
gaaagatcttcaggaataggctgggaacgacagatttataagagtgatgcctaataccccagcagctgttggccaggcagcatctgtaatgagcttggggggatctgcaacggaagaagatggaaatattatagcccaattatttgggtcaattggcaaaatatggaa

SEQ ID NO: 171032 - DNA, 168 bp, Glycine max
atctggacctggcgttaggaagggtttcgaaggtggccagatgccgctttatcgccgaatccccaaactcagaggaattgcaggaggtatgcatgcgggattgcccaaatatgtccatgtaaatctgagagacatagaagatgctaaatttaaggaaggggaagaagt

SEQ ID NO: 171033 - DNA, 160 bp, Glycine max
catcttcaccctttccctgtctctcagaaagatgaaggtggtcgctgcgtatctgctcgccgtcctcggtggcaacaacaccccctccgccgatgacatcaaggaaatcctcggctccgttggaatagaggcagatgaagataggattgaatcgttcttg

SEQ ID NO: 171034 - DNA, 166 bp, Glycine max
taaggataaggctgccgcacatttgaagggtggtgcaaagaaggttattatttctgcccccagtaaggatgcccccatgtttgttgttggtgttaacgagcacgagtacaagccagagcttgacattatttccaatgctagctgcacaaccaactgccttgccccg

SEQ ID NO: 171035 - DNA, 164 bp, Glycine max
  unsure (1)..(164): unsure at all n locations
tatgaaatatttggtcncatcaatgaagcttacttctcaattaagatgatggaagggattgttgctacttcttattcatctggcgacaagttttatattgatccaaggaaactgttgcctcttgcaagatttcttccacaacccaagggacaatcagctggtag

SEQ ID NO: 171036 - DNA, 165 bp, Glycine max
cgagaagccttacaagtacaagtctcctcctcccccagtccactctccacctccaccacactactactacaaatcaccccctccaccttaccactactaggtagcactttctcttcacacccccacatggatgcatacagaaagtgtgaaaatgaaagtcatgga

SEQ ID NO: 171037 - DNA, 167 bp, Glycine max
ctgctcatgaccttctaagatccagggagttaagactggaggtcacggagtggagcagcacaggtttaaggtggagttcatgggctggtttcttatgaaaagaaatacttttgaagtatgaaaccatccaaaatcataagcggtgctataatcccttgctgcagttc

SEQ ID NO: 171038 - DNA, 164 bp, Glycine max
gcaactttctgaggctgagatcaagcagctttgtcttgtctccagggatatatttatgaggcagcccaacctcttggaactcgaggcaccaattaagatatgtggagatatccacggtcaatattccgaccttctgcgactttttgagtatggtggattgcctc

SEQ ID NO: 171039 - DNA, 164 bp, Glycine max
gttttcttcagaaaatttgccatcgttgagggaagcgcgagagccttcgttgttcaagatgagagctaagtggaagaagaagcgcatgaggaggttgaagaggaagcgccgaaagatgagacaaagatctaagtaggtgcttgaacaaggagtggagatgatgt

SEQ ID NO: 171040 - DNA, 162 bp, Glycine max
  unsure (1)..(162): unsure at all n locations
ctttacacccccctctctattttgcgttcattctgttttccagtngaagtctttccctagccaatgggccactgatcgtttgacccgggttcacagtctccgtgagaggcttgatgaaaccctcactgccaacaggaacgaaattttggcccttctgtcaag

SEQ ID NO: 171041 - DNA, 162 bp, Glycine max
aatgaacaagggtttctctttctctttctctgtctgcttcttcactttctctcgtttcaatcgaaaaaaatcatggggcagaaaattcttcgtcggtggcaactggaaatgcaatgggaccactgaggaggtgaagaagattgttactactttaaatgaagc

SEQ ID NO: 171042 - DNA, 160 bp, Glycine max
acaagattgacaggcgatctggtaaggagcttgagaaggagcccaaatttttgaagaatggtgatgcaggtatggttaagatgattccaaccaagcccatggtggttgaaactttctctgagtatcctccccttggtcgttttgctgtgagggacatgcg

SEQ ID NO: 171043 - DNA, 160 bp, Glycine max
  unsure (1)..(160): unsure at all n locations
ctacctctttttcttctctctcaacaacttcaccttcttcctccntcgatcatgtctcacttcaaggggcaagtaccatgatgagttatcgccaatgctgcgtacattggcactcctggaaagggtatctgctgctgatgagtcaacagggacaattggg

SEQ ID NO: 171044 - DNA, 163 bp, Glycine max
tagtaacattgatcaaacccgcatgtggaaggttggtgagcgtgtccgatctacaagagcagccggtgatcaaggcccattatatcctttcactgctggtgtctttgtggcattgatgatggcccagattgagatcctgaggaagaaagggcattcctactcg

SEQ ID NO: 171045 - DNA, 163 bp, Glycine max
cgcgtttcggagagagagacgtcgcaatggggaggaggcctgtaacgtgttaccggcagataaaaaacaagccataccccaaatcacgtttctgccgtggtgttcctgatcctaagatcagaatttatgatgttggtatgaagaagaaaggtgttgatgagtt

SEQ ID NO: 171046 - DNA, 161 bp, Glycine max
cacaaatcttagccgccattgatttttcctcttccatttctcttactttctcagcctttttcgattacccatttggttatttcgccctaatggctcttgctccatccaaagtttccaccttttctggtttttctcccaaacccagtgttgggggtgctcag

SEQ ID NO: 171047 - DNA, 159 bp, Glycine max
cagtcatacgtgacaacaacaacacctgatttcaactgtgtctctttactttcgagtcaatagtgcaaattcaagccaaagcaatatgctgatacttcaagagagttgcacagattctactggctcatatgtagtttatgctcctgtggatattgttgc

SEQ ID NO: 171048 - DNA, 159 bp, Glycine max
aattttcttcatccttctctgttctcctagaacttgattacttgaacattccctatgacagatgaggtggttcttctggatttctggccaagtccatttgggatgagggtcaggattgcacttgctgaaaagggtatcgaatatgagtacaaagaagag

SEQ ID NO: 171049 - DNA, 157 bp, Glycine max
gtgtcatttacgcttctcttctctgcagcaactatgcctaaccctaaggtcttcttcgacatgaccatcggcggtcaatctgctggccgcatcgtgatggagctctacgccgacgtcactccccgcaccgccgagaacttccgcgcgctttgcaccg

SEQ ID NO: 171050 - DNA, 161 bp, Glycine max
  unsure (1)..(161): unsure at all n locations
ctcancgatttggccagaaaattcggtgacatcttcctcctccgcatggggcagcgcaacctcgtcgtggtttcttcccctgagctcgccaaagaggttctccacacgcagggcgtggagttcggctcccgcacccgcaacgtcgtcttcgacatcttcac

SEQ ID NO: 171051 - DNA, 160 bp, Glycine max
atcgcccaaaccctaactccctaccctattccgctttctctcatccatcatgaaaggaggaaagtccaagaccgaatctaagagagccgatgcacaacttgctgtgaataagaagggcgccgccaccaagactaggaaacccgccggaaaggggaaggca

SEQ ID NO: 171052 - DNA, 169 bp, Glycine max
  unsure (1)..(169): unsure at all n locations
tgcagcagcggcaagcaactccatccgcaatgggaatcgatttgaaggcaggaggtaagtccaagaagaccanacgtacagcccccaaatccaatgatatttacctcaagctcctcgtcaagctgtaccgttttcttgttcggaggactggtagtaacttcaatgccgt

SEQ ID NO: 171053 - DNA, 158 bp, Glycine max
cactcttctctgcagcttttgcctacaactcccttcaccatggctgaacaaaccgagaaagcttttctgaagcaaccagaagtgtttctcagcacaaagaagactgggaagggaaagagacctggaaaaggtgggaaccgcttttggaagtccattgg

SEQ ID NO: 171054 - DNA, 157 bp, Glycine max
gtttgaatcgtgaaaatgttcagaaaccagtacgacacggacgtgacgacatggagcccggcggggaggctgttccaggtggagtacgcgatggaggcggtgaagcagggctcggcggcgatagggctccgatccaagacccacgtggtcctcgcat

SEQ ID NO: 171055 - DNA, 169 bp, Glycine max
tagttgatctggtcaatactgtatttgcatctgcaactgagagagatatatacactggatataaggctgaaatcgtcgtcctagatgccagtggtattcgtcgtgaatacatggacctaacgcaagattaatgctctacaggtatttactgttggcgagaccagacttg

SEQ ID NO: 171056 - DNA, 290 bp, Glycine max
tgaaatcttagtttctgcccgaaactgaaactgaatcgaaattcaatacaatgagttcctcaactacagtgaggaagttgcaggtggtgtcccctgttcctgcggacatagacattgcaaactccgttgaacccgttcatatctcccagattgccaaagacctcaaccttagtcccaatcactatgacctttacggtaaatacaaggctaaggttttgttgtcggttcttgatgagcttcaaggatcagaagatgggtattatgttgtggtcggaggcattactccgact

SEQ ID NO: 171057 - DNA, 289 bp, Glycine max
tgaccaatattctgaatctgaaactgagactgaaaccttcgtgttcgtgttgcatatccaaaccctaatttggaaattgaatttttgcaagatggttctggcggagttaggtgggagcatttcgcgtgctctccagcagatgagcaacgcgacggtgatcgacgagaaggtgctcaacgattgcctcaacgtcatcactcgcgctcttcttcaatccgatgttcagttcaagctcgtccgcgacctgcagaccaacatcaagaacattgtcaacctcgacgatctcgct

SEQ ID NO: 171058 - DNA, 288 bp, Glycine max
atagcccaagccctatacaaccaaaccctaacacacacccatttgattcagtttccatggctagcctcaaggttgcatttttggctgcagtgctctgcatggttgtggtgagtgcacccatggcacatgcagctatcacgtgcgggcaggtgacgagtagcctggccaattgcatcggttacctccagaagggaggaacgccgtcgtcgggatgctgcaacggagtgaagagcctcaatgccgccgccaagaccaccgccgaccgccagacggcgtgcaactgcctca

SEQ ID NO: 171059 - DNA, 178 bp, Glycine max
cttcctctgcgcaggaattaggaatattcgacaggtagagtttcttcaatggctcctaaagttgataagaagaatgatccaaaggcccaggccttgaagactgctaaggcagttaagtcaggtgctacctttaagaagaaggtaaagaagatccgaacttctgtcactttccacaggc

SEQ ID NO: 171060 - DNA, 244 bp, Glycine max
tgcagaactgtttgggagattaaacaaaggacattggtagatatggctgctgatcgaggatgctacatagatcagagccaaagcttaaatattcacatggatcaacccaactttggaaaactgacttccttgcatttttatgcatggtccaaggtagcaacacagtacttatgcttgcctgtgaagtgagataaatttatgtaatatgtgcaaatatacagttgggttcaattgtttaatgtgg

SEQ ID NO: 171061 - DNA, 210 bp, Glycine max
tgaaagccgtcgctatcctagtctcttcttcccctctacccatttcagtttcaggatggaatctcaggtgaagcacgcccttgttgtcaaagttatgggtcgtactgggtctagggggcaggtgactcaggttagagtgaagtttttggatgatcaaaaccgacacatcatgaggaacgtgaagggacccgtgagagaaggagacattct

SEQ ID NO: 171062 - DNA, 288 bp, Glycine max
tctgaaattttaattgacttttctcccctcataaaaaaaacctaccaatggctcccgcaaaggcagagaagaagcccgcggagaagaagccggcagagaaggccccagcggagaagaagccgaagggcacgaagaagatatcgaaggaaggaggaagcgagaagaagaagaagagaacaaagaagagcgttgagacctacaagatctacatcttcaaggtgttgaagcaagtgcaccccgacatcgggatctccagcaaggctatggggatcatgaacagtttcataa

SEQ ID NO: 171063 - DNA, 284 bp, Glycine max
caacaaacaaagcgagaaaaacgagccaattcatcattttctctcttctctgcttcttcttgttcaaatcttaggagctgaggagaatcaatcgagagaaatatgtctggtatcgctcgtggacgccttgctgaggaacgaaagtcatggcgcaaaaaccatccacacggtttcgttgccaagcccgagactctacctgatggcaccgtaaatttgatggtctggcattgcactattcctggcaagaccgggactgattgggagggtggatatttcccactgac

SEQ ID NO: 171064 - DNA, 288 bp, Glycine max
attcaatggcttccctcatgagcaccatcctcatgcaaaggtcttcttctacttcacttgctgctgggaggttgttctccacaacaacagcaaccattattgattccccttcacttgctcagagaatcagagatttgcctaaggacctccctggaaccaacatcaagaaacatgtttctcagctcattgggaggactccacttgtttatcttaacaaagtcactgaaggatgtggagcttatgttgctgtcaagcaagagatgatgcaacctactgccagcatcaaag

SEQ ID NO: 171065 - DNA, 290 bp, Glycine max
tgctgcagaggataaaatctatgttgatgttggattttggggaggcctaatccctgaaaatgcacttaatacaagtattcttgatggtctcttaagtgctggtgttcttggtgtgaagtcttttatgtgtccttcaggaatagatgacttccccatggctactattgaccatatcaaggcaggattgtctgtgttggcaaaatatagaaggcctatagttgtgcatgctgagattcaacaagattttgaaaatcatttggagcttaatgaggataaccttgatccacgtg

SEQ ID NO: 171066 - DNA, 285 bp, Glycine max
tgctttctggtgcaacaccaccgcctgcacatgtgctcagccgaagcatcgggatgcagggcattggtatgctgcttgaaggcatatttggttccattgttggtaccactgtatctgttgaaaatgttggcctacttggtctgacacacatagggagccgaagagtagtgcaaatatcatgtggttttatgatcttcttctctatttttgggaaatttggagccttttttgcatcgattcccctaccgatatttgctgccatatactgtgttttatttggtatcg

SEQ ID NO: 171067 - DNA, 291 bp, Glycine max
tgtagatagctactacttcactttcatcctttgctccagaaaattaactagctaggatggtgagtgttgaagagattcgtaaggcgcaacgtgcagaaggccctgccactgtcatggctattggcaccgccactcctcccaactgcgtggatcagagtacctatcctgactattatttccgcatcaccaacagcgagcacatgaccgagctcacagacaaattcaaacgcatgtgtgataagtcgatgattaagaagcgatacatgtacttaaacgaagagatcctgaagg

SEQ ID NO: 171068 - DNA, 287 bp, Glycine max
cgcgtttcggagagagagacgtcgcaatggggaggaggcctgtaaggtgttaccggcagataaaaaacaagccataccccaaatcacgtttctgccgtggtgttcctgatcctaagatcagaatttatgatgttggtatgaagaagaaaggtgttgatgagtttcccttctgcgttcatctggttagctgggaaaaagaaaatgtttcaagtgaagcattggaagctgctagaattgcatgcaacaaatatatggcgaaatttgctggaaaggatgctttccacttg

SEQ ID NO: 171069 - DNA, 288 bp, Glycine max
catttatcttacacttacccacagggaggcgaacagagaaactcagagacccgaaggcagatttcaagatgaagttcaacattgcgaatcccaccaccggttgtcagaagaagctggagatcgatgatgacctgaagctgcgagcattttgggacaagaggatctcacaagaggttgttggtgatgctctgggtgaggaattcaaaggttatgtcttcaaaattactggaggttgcgacaagcaaggatttccaatgaagcaaggagtgttgacccctggtcgtgttc

SEQ ID NO: 171070 - DNA, 280 bp, Glycine max
tccattcaaacattgtcaggcagtccctgtctcaccaactcttgatgtaaccagaggccttacaaacacacccatatatatgcatacatgctagcaccaccttcaagcaaagtcgcaaattctcctcctacaccaacaaaaatggcaccttctccacaagaaatcatcttccgatccccactccccgatattcccatccccacacatctcccattgtactcttactgcttccaaaacttgtcaaagttccatgaccgtccatgcctcatcgacggcgaca

SEQ ID NO: 171071 - DNA, 207 bp, Glycine max
gcgagatcttcattcgccgattttaaaagatgagtaagcttcagagtgatgctttgcgtgaagccatttcaggaatcatggccgattccaaggagaagaatcgcaaatttgtggagaccatcgaactccaaatcgggtagaaaaactacgatccacagaaggacaagcgtttcagtggctctgtcaagctgcccaacatcctcgccc

SEQ ID NO: 171072 - DNA, 286 bp, Glycine max
gcttccacaaccctatcgcacatctttctcagttctacgatggagttttggggtgccgaggttaaggttggagagtctgttaaggtagacccagctgaatttgatgcatgcatacacctttctcaggctgctcttggtgaggcaaagatagatttgcctgaaccggtggttctctacatgaaagttggtgaacagaaatttgtcttgggaaccctttccagggagaaaatccctcaaatatctctggaattggttttggaaaaggagtttgagctttcccacagtt

SEQ ID NO: 171073 - DNA, 283 bp, Glycine max
ctcgagccgaatcggctcgagcacaggcgcagacgcaaacgattaacgcaaacgcaaatgcaaacgcagagcgtgatccattgacgaagatggtgcagcgtctcacctaccgcaagcggcacagctatgccaccaagtccaaccaacacagggtcgtcaaaacccctggtgggaagctcgtttatcagactaccaagaagagggccagcggacccaagtgccccgtcactggcaagaggattcaggggattccacacttgaggcctgcagagtacaagaggtc

SEQ ID NO: 171074 - DNA, 288 bp, Glycine max
tttctatctatcgtcaacgttagtgctttgtttaggtgaactaattcggagaccttgcaagacttcatcaatggctgtcaaagtttatattgtgtactactccatgtatgggcatgttgagaaactagcagaagaaataaagaaaggggcttcctctgtggaaggtgttgaggccaagttatggcaggtacctgagacactgctggatgaggtgcttggtaagatgagtgcaccacccaagagtgacgtaccagtcattacccccaatgaactatccgaggctgatgg

SEQ ID NO: 171075 - DNA, 281 bp, Glycine max
ctcaaattcgagttaggacagcttcgattcgctgttaacaaaacacagctcatggaggacagacagattgagctggaggctctagagaaagccatactagaaggattagaagcctatgataagatgcaaggtgaactcgtaaaagccagggcaagcctaaccaaaatcttgacatcaaaggatgccaaagcaactttgctggagatggttgaaaagaatgaaattaatagatctttattggcacttctagatgaaaacatagcaagtgcacaaaagggcaa

SEQ ID NO: 171076 - DNA, 284 bp, Glycine max
gtcacataggctattaagggtgagatatatagaaaaacaaaggagaaaagatagaaatggagaagtttccagttgttgacatggggaaccttaataatgaagagagatcagcaaccatggagataatcaaagatgcctgtgagaactggggtttctttgagttggtgaaccatgggatatccatagagttgatggacaccgtggagaggatgacaaaagagcactacaaaaagtgtatggagcaaaggttcaaagaaatggtagcaagcaaaggtttggagtct

SEQ ID NO: 171077 - DNA, 272 bp, Glycine max
agaatttccattgcatgcaaagcaaatacgcattatattactagttttaatttgttttgtcgtttgcttctttctttgattaatgatgactagctttaaggttgcatgtgtggttgcgatgatgtgcatggttgtggccatgagtgttacacccatggcacaggccgcaatcacgtgcgggcaggtcgccggcgacgtgtctccgtgcctcagttatcttcgaagcggcggaaaaccgtcggacgcctgctgcaacggagtgaagtcgctca

SEQ ID NO: 171078 - DNA, 246 bp, Glycine max
tatccggcaaagagcttgagaaggagcccaagtttttgaagaacggtgatgctggttttgttaagatgattccaaccaaacccatggttgttgaaactttctccgagtatcctccacttggtaggtttgctgttagggacatgcgtcaaactgttgctgtgggagtcatcaagaacgttgagaagaaggatcctaccggagccaaggtcaccaaggctgcccagaagaagaagtgattcgtgcggg

SEQ ID NO: 171079 - DNA, 242 bp, Glycine max
tatttcgtcaattccaacaacaccacaatgggaagaagaccggcgaggtgttaccggcagataaagaacaaaccgtacccgaaatcccgtttctgccgcggcgtgccgagagccgaagatccgaatctacgacgtgggaatgaagaagaaaggcgtggacgagttcccgttctgcgtgcacctggtctcgtgggagaaggaaaacgtctccagcgaggttttggaggcggcgcgcatcgcat

SEQ ID NO: 171080 - DNA, 285 bp, Glycine max
caccggcaagactataaccctagaagtcgagagctccgacaccatcgacaacgtcaaggctaagatccaggacaaggagggtatccccccagaccagcagaggctgatcttcgccggcaagcagctcgaggacggacgtacccttgctgactacaacatccagaaggagtcaactctccacttggtgttgcgtcttcgtggtggtatgcagatcttcgtcaagacccttacgggtaagactattaccctcgaggtggagagctccgacaccattgacaatgtgaa

SEQ ID NO: 171081 - DNA, 283 bp, Glycine max
tgctataagctagtttatcgtgaggagaatatgaagttgtttgttttctttgttgctgcagtagttttggtagcatggccatgccatggcgcaggctaccaaaggttccctctccgaatgaaaactggctatggtgagcgttcttcggaggtaaaatgcgcaagttttaggcttgctgtggaagcacacaacatccgagcctttaaaaccattcgtgaagagtgcgttgaaccaacaaaggactacattaatggcgaacaatttagatcagactctaaaacag

SEQ ID NO: 171082 - DNA, 280 bp, Glycine max
atggcttctgcagaagtagagttccgatgctttgttggtgggcttgcttgggccaccgaccacgatgctctcgagaaagccttctctcaatttggcgaaatcgtcgaatcgaaggtcatcaacgatcgtgaaactggaagatccagagggtttggatttgtgaccttcgccacagagcaggcgatgagagacgcaattgaaggaatgaacggccagaacctcgacggtcgtaatataaccgtgaacgaggctcaatcccgtggaaaaggtggcggcggcg

SEQ ID NO: 171083 - DNA, 282 bp, Glycine max
ggtaagcaatggcgggaaaaggagggaaggggcttcttgcagcgaaaaccaccgcggcgaataaggacaaagacaaggacaagaagagacctatttctcgctcttcccgtgctggaatccagtttcctgtgggacgtatccataggcagctgaaacaaagggtccaagccaatggacgtgttggggcaacagctgcagtgtacttagcctcaattctagagtatctgactgctgaagttcttgaacttgctgggaatgcaagcaaggatctgaaggtgaaga

SEQ ID NO: 171084 - DNA, 180 bp, Glycine max
gccaagtgaaagtgagataaaataaaaatcaaagagcataatgtcagggatcattcacaagattggggagacccttcatgtgggagggcacaagaaggaggaggagcataagggtgagcaccatgctggagaatacaaaggggagcaccatggtgaacacagtagtgagtacaagggaga

SEQ ID NO: 171085 - DNA, 275 bp, Glycine max
tacaactagtaacaaagatccaacaagcagatcaatctctctctctgtctcccaatcaaaacagacatgggtttgaaggaggattttgagcagtatgctgagaaagcaaagactttgccaccgactcaatcaaacgaagacttgcttatcctttatggattgtacaagcaggccaccgttggacctgtcaacaccagccgtccgggaatgttcaacatgagggacagagctaaatgggatgcatggaaggctgttgaagggaaatccaaggacga

SEQ ID NO: 171086 - DNA, 280 bp, Glycine max
ctcgagccgaatcggctcgagcaaccttgaatgtttaccgcaccgccggataaggagacaggagaaggaggatctgagtcgcaggcactgttcatcgccatgtctcgggttgataacagaaattcctcagccaccaagcgtgctaggactgatggtagtcgtagggaagatgattggacatgccccagctgtggcaatgtcaatttctctttcaggacaacttgtaacatgcgtaattgcactcaaccaaggccggctgatcataattcgaaatctgctg

SEQ ID NO: 171087 - DNA, 280 bp, Glycine max
ctcgagcgctcgagccgcgaagtgatccactccaggtgggccatgctcggagccttgggctgcgtcttcccggagttgctgtcccgcaacggggtgaagttcggagaagccgtgtggttcaaggccgggtcccagatcttcagcgagggtgggctcgactacttgggcaacccaagcctgatccacgcccagagcatcctcgccatctgggccacacaagttatcctaatgggtgccgttgaaggttaccgtattgctggtggccccctcggtgaggtca

SEQ ID NO: 171088 - DNA, 184 bp, Glycine max
ccctaattcacacccaaagagaaaaaaaaaaaaaaccaacagtggtacgtgatgccaccgaagttcgatccctcgcaggtggtggacgtgttcgtccgattcaccggcggcaaggtcggcgcggcgatttctctcgccccgaagatcggtcccttgggactctccccaaagaagatcggagagg

SEQ ID NO: 171089 - DNA, 283 bp, Glycine max
gccttcacaaaaaaattatcgagatcccctttttctcctaagaaaagccatggctaagggtcccggtctctactctgacatcggcaagaaagccagggatctgctgttcaaggactaccacagtgaccagaagttcaccatcaccacctactcacccactggagttgctataacagcatcaggaaccaggaaaagtgaactgtttgtggctgatgtcaacacccagttgaagaacaaaaacatcactactgatatcaaagttgatacagattctaatctcttc

SEQ ID NO: 171090 - DNA, 280 bp, Glycine max
ggaggcacaccttcaggagcagtcatggttctcaaaaccgagctgtgccgattcagcggtgccaagatctacccagggaaaggcatcagatttgttcgtggtgattctcaggttttcctgtttgctaactcaaaatgtaagaggtatttccacaacaggttgaagccgtcaaagctcacgtggactgcaatgtaccgaaagcagcataagagggatattgctcaagaagctgtgaagaagagaagacgtgctaccagaaaaccttactctaggtctattg

SEQ ID NO: 171091 - DNA, 278 bp, Glycine max
cacaattaggagggcacatgctgttcatcccattactgctgtgcaactggagtggtccctttggactcgtgaaattgagcaagatattgttccactttgcagggaacttggaattggaatagtaccatacagcccccttggccgtggattttttggtggcaaggctgtcgtagaaagtatacctgcaaacagttttctggcatttcaaccaaggttacgaggggagaactttgacaagaacaacatcttatattctaggatagaaaaattggcagaga

SEQ ID NO: 171092 - DNA, 281 bp, Glycine max
ctttcgttctcactctgaccgggaaaagaaaaatcagctttcatcaagcaccctagatttcctctctctctctctaaaatggcgttctcttcttttctcggccgagtcctcttcgcctctgttttcatcctctccgcttaccaagaatttaatgcttatggagttgatgggggacccacagcaaaagcactcagaccgaagtttgatgcctttgcacatcaagtacattctaaagctggctttcaacttccagatattgatatgaaaattttagttgctgg

SEQ ID NO: 171093 - DNA, 260 bp, Glycine max
gtcactggacacaaaaatggtgatatccataagagcggttatgtagaacatctaataagctttgtatggacgaactggagggaagggactgccttaaatatagtagatcaaacactgcacaataattcaagagacgaaataatgagatgcatccatattggattactttgtgttgaagataacgtagccaatagaccaaccatggcaacagttgtaatcatgtttaacagtaactctctcgttcttcctataccctcaca

SEQ ID NO: 171094 - DNA, 275 bp, Glycine max
cgcgggtgaggtagaacccttccactgtggtgactctgcgatgggtgcctacaagtatgtttcagagctatggcgcaagaagcagtctgatgtcatgcgcttcttgcagcgggtgaggtgctgggagtataggcagcaaccttccattgttcgtttgacaaggtctacccgccctgacaaggctcgtcgcttgggcttcaaggctaagcagggctatgtgatttaccgtgttcgtgttaggaggggtggccgaaagagaccagttcccaaaggta

SEQ ID NO: 171095 - DNA, 278 bp, Glycine max
ctttaaacgccgaagaaagttcatccaatctccgaagcccttcaccgcattgcaaccatgtcgagaagaaaggttagagagccaaaggaagaaaacgtgactctgggcccagctgttagagatggcgaacatgtctttggcgtcgctcgcatctttgcctccttcaatgataccttcattcatgtcactgatctgtccgggagggaaacacttgtccgcatcacaggtggaatgaaggttaaggctgacagagatgaatcgtctccctatgctgctat

SEQ ID NO: 171096 - DNA, 179 bp, Glycine max
gaagttgttggtgctcgtttgatttcccatgctggtagcctcacaaatttagctaagtgcccctcttcaactcttcaaattcttggtgcagagaaggctttgttcagggcattaaaaacaagaggaaacactcccaaatatggtttgatattccactcttcttttattggtcgggcatc

SEQ ID NO: 171097 - DNA, 173 bp, Glycine max
ttaaatagttattgtgcttttgttttattagacagttgtaaggcactgtgttctacatgtgtttgcagttgtctgcatgcattgtaattttcaaagtccgctttatcaagctgagtcagtcaaataaattattccctctcattgctagtgggaatagatttgttcctgtatct

SEQ ID NO: 171098 - DNA, 204 bp, Glycine max
ctttcttggattccacagctcttactctccctgcagagaacagcagctcctcactgtaaacttgttcttctgaagattgcaacattgtatcctcaggctctgtattattggttgcgcacatacttactggaacgacgtgatgttgccaataaatctgaacttggtagaatagcaatggctcaacaaagaactcaccaaagtatt

SEQ ID NO: 171099 - DNA, 219 bp, Glycine max
caggaaggacaaggactccaagttcaggttgattcttgttgagagcagaatccaccgacttgctcgctattacaagaagactaagaagctcccaccagtctggaagtacgaatcaacaactgctagcactctggttgcttagagaatgtatcaactttcatgggttttgctaccgtgcagtcgccgttgagctagcaatttgccatatcattttgatgt

SEQ ID NO: 171100 - DNA, 255 bp, Glycine max
gcctcaggtaagccaaaaccatggttaagcataacaatgttatcccaaacggacacttccgtaagcactggcagaactatgtgaagacttggttcaatcagccagcacggaagacaaggagacgattggctcgtcagaagaaagctgtgaagatattccccagacctacggctggacctctcaggcccattgtacatggtcaaactttgaaatacaacatgaaagtgagaggtggaaggggattttctcttgaag

SEQ ID NO: 171101 - DNA, 275 bp, Glycine max
ggaaaagttgtccttgaattggcagctagaagtaatcttaagcctgttactctggagcttggtgggaaatctccttttatagtatgcgaagatgctgatgtagatgaggctgttgagctagcacactttgcattattctttaatcagggacaatgctgctgtgctgggtctagaacatttgtacacgaacgtgtgtacgatgaatttattgagaaagcaaaggcacgtgctttgaagcgtgctgttggtgatccattcaaggggggaatagagca

SEQ ID NO: 171102 - DNA, 283 bp, Glycine max
aatctcggaagcaaacgcagcattgggagatagaaagagagagagaaagagagagagagaaagacccttacccttctctatcgctcgctttcctttgacgcttctgacccttgcttttctgcgtcttccttctttctttctttctttctctgtgtgtcgtaatggctctcccagactcttcttcccgtcgcaactccctgatcccctccttcatctactcctcttcctccaaaacgctccctctccaccacatgctcaacaccgcctccgctgccgccgccgc

SEQ ID NO: 171103 - DNA, 172 bp, Glycine max
cttattcagtagttcttctctctcgaattttcactcactttctgtgcatcaatggcggcgataagtctccggaaggggaacacgcggcttccgccggaggtgaaccgcgtgctgacgttcggaaccttcccttcaacatcaccagcgaggagatgtacgacatctttggcaa

SEQ ID NO: 171104 - DNA, 272 bp, Glycine max
gtgtgcagaagagcgtcgcagttgtaaccctaatcagaagaagcgcagcttcaagcgagtgacagccaccagccatgggtcgtatgcacagccgcggtaagggtatatcctctctgctttgccctacaaaaggacacctcctagctggctcaagatctcttcgcaagatgtcgaagaaaatatatgcaagtttgcgaagaaaggtttgaccccgtctcagattggtgtcattctcagagattctcacggtattgctcaggtcaatagcgtca

SEQ ID NO: 171105 - DNA, 270 bp, Glycine max
gtggatgtgaagacaactgataactacacattgaggatgttttgcattggatttaccaagagaagagctaaccaagtgaagagaacctgctatgcacaatcaagccagattgacagattcgtaggaagatgagggagatcatgaccaaccaggcaacatcctgtgatttgaaggagttggtccgcaagtttattcctgagattattggaaaagagattgagaaggcgacatctagtatttaccctctgcagaatgtgtttgttcgaaaaa

SEQ ID NO: 171106 - DNA, 272 bp, Glycine max
cccttttccaaacccgagaaatctgattcgttcattgccattgccagggttggaaagacctcgttgatgaatcaatacgtgcacaagaagtttagtcagcaatataaggctacattggggctgattttgtcaccaaagagcttcagattgatgacagacttgtcactctacaaatatgggacactgctgggcaagagagattccagagtctcggggttgcattttacagaggtgccgattgctgtgttcttgtgtatgatgtgaatgtgatg

SEQ ID NO: 171107 - DNA, 277 bp, Glycine max
caaccttaacactcctcacttcgtttccgtcgcagctttttacacactccaccgctgcttccccttcacctccgatttcgttaatcagagatcaaaatgtctcgaagatatgacgccgtacaacaatcttctccccggaaggacgtctttaccaagtggaatatgcaatggaggctattgggaatgctggtaccgcaatagggatcttatcaaaagatggggtagtgctggttggtgaaaagaaggtcacatccaagctgctccaaacctcaacttc

SEQ ID NO: 171108 - DNA, 274 bp, Glycine max
ctcctccttttcaatcctctgttcatccgtcgatcggctcggctggaccatccttgccgccgtttgccgcggcatctccggccactctctctcatcgccattcagtgtattttggttagttgcaaagttttagagttggattggaagattgtgaactaagaaagatggtgaagttgactatgattgcccgtgttactgatggtcttccgctagctgaaggactggatgatggtcgtgatcttaaagatgcagaattttacaaacaacaagtcaa

SEQ ID NO: 171109 - DNA, 282 bp, Glycine max
gtggatgtgaagacaactgataactacacattgaggatgttttgcattggatttaccaagagaagagctaaccaagtgaagagaacctgctatgcacaatcaagccagattagacagttcgtaggaagatgagggagatcatgaccaaccaggcaacatcctgtgatttgaaggagttggtccgcaagtttattcctgagattattggaaaagagattgagaaggcgacatctagtatttaccctctgcagaatgtgtttgttcgtaaagtcaagatcctga

SEQ ID NO: 171110 - DNA, 276 bp, Glycine max
cttgatttggctggtcgtgacctcacagatttcttgatgaagattttgactgaacgtggatattcttttaccacctcagcagagcgtgaaattgtgagggatatgaaggaaagctggcttacatagccctcgactatgagcaagagctagagacatccaagaccagctcttcagtggagaagagctatgagttgcctgatgggcaggttatcactattggcgctgagcgtttcaggtgtccggaggtcttgtaccaaccatccatggtaggaatgg

SEQ ID NO: 171111 - DNA, 269 bp, Glycine max
gttcctcaagccaccgtaccgtgttgcctctctgcaatctacagccaaaatgcctttcaagaggtacgttgagatcgggagggttgcccaaatcaactacggcaaggatatggcaggctcgtcgtcattgtcgacgtcattgaccagaacagagctcttgtcgatgcccctgatatggtgaggtcccaagtcaatttcaaaaggctttccctaaccgatattaagattgacattaagagggtccctaagaagaaagatcttgtcaaagc

SEQ ID NO: 171112 - DNA, 263 bp, Glycine max
aagcaaaaccctagcggcgcctgctttctttgttcgtgttttgcatcaggatggagtctcaggtgaagcacgcacttgttgtcaaagttatgggtcgtactggatccaaggacaagtgacccaggttagagtgaagtttttggatgatcagaaccgtcacatcatgaggaatgtgaaaggacctgtgagagaaggagacattctcaccctactcgagtctgaaagggaggcaagaagattgcgctagatggtctctttttttg

SEQ ID NO: 171113 - DNA, 179 bp, Glycine max
ccgaaacaactatggatacaatcaagtccttcaagggctacggcaaagttgacgagttggagcagcaagcctatcagaagaagacacgtaagcgcctcataataatcacatctcttcaatcgttctaattgcggtgatcatcgccgctatcgcaggggttgtcatacacaagcgcaaca

SEQ ID NO: 171114 - DNA, 271 bp, Glycine max
caattaacacacacaaacagaggctacgtacgatcaaattaattaagatggcggaagtgaggaacaaacaagtggttctgagggactatgtgagtggttttcctaaggaaccgacatgaacatagttgaaggaaccacaatattgaagcttccacaaggttccaatgatgtgcttctaaaaaatctctacctttcctgtgacccttacatgagaatgctcatgaccaaggtggaaggcctcgacgtgtttggcacctatacacctggctct

SEQ ID NO: 171115 - DNA, 269 bp, Glycine max
attttcttcatccttctctgttctcctagaacttgattacttgaacattccctatgacagatgaggtggttcttctggatttctggccaagtccatttgggatgagggcaggattgcacttgctgaaaagggtatcgaatatgagtacaaagaagaggacttgaggaacaagagtcctcttctcttacaaatgaacccggttcacaagaagattccggttctcatccacaatggcaaacccatttccgaatccctcattgctgttcagt

SEQ ID NO: 171116 - DNA, 279 bp, Glycine max
gtagagggatgaaggcattaagctagttgttgaggcgatatgtgctggtatatttaatgacctaggaagtggaagtaatgttgatgtttgtgtgataaccaagggacataaggatatctcaggaaccaccttctaccaaatcctcgtacctatgtcaatccaaaaggctttgatttccccaaaaagacagaggtcctcttaacaaagattacaccgttgaaggagaaggtggaagtgattgaaggagatgctatggaagagtaacaatcattccaaaaa

SEQ ID NO: 171117 - DNA, 277 bp, Glycine max
gaaaggagtagtatttgtgaagtgtaatagagactgagagagaaaggggggaaatgggtatgtgatgagagtgagattggcgtcgttcttcactggggctgccgcggcgtcgtttctggggctctacaccctccacaaggattacaaggtcgcgcaccaatcctttactcaacagatgaatgacctccacaaatcgctggaaggtcgaatttcttccttggaaaaactgaaacaaacggaaacgtctgaacaggttgaagcaactgaataagagttc

SEQ ID NO: 171118 - DNA, 270 bp, Glycine max
gccacatagagacacaatacagagtgagttgttgctccttcgccacaactctctgccaacatgggtatctccagagattctatgcacaagaggcgtgccactggtggaagaagaaggcctggaggaaaaagagatagtatgagcttggtcgccagcctgctaacactaagctgtcaagcaacaagacagtcaggaggatccgtgttagaggtggaaatgtgaaatggagggcattgagattggatactggaaattactcctggggaagtg

SEQ ID NO: 171119 - DNA, 266 bp, Glycine max
gggtaagggaacggggagtttcggtaagaggaggaacaagacccacaccctctgtgtgaggtgtggccgccgcagcttccacctccagaagagtcgttgctctgcgtgcgcttaccccgctgcgcgcaccaggaaatataactggagcgtgaaggccattaggagaaagaccaccggaactggaaggatgaggtacttgcgtaacgtgcctcgcagattcaagagcggcttcagagagggtaccgaagctgcacccaggaagagag

SEQ ID NO: 171120 - DNA, 266 bp, Glycine max
gaaatcagagcctgagccatcgtttgagattctgactaatcctgcaagggtggttcctgcacaggagaagtatattaaatttttgcaggacagcagatatgttccagtaagttggcaccatcaggatttgtgcttctcaaagacttgcgtcctactgagccagaagtgcttgctctcactgacacaccttcatctaccacttcggctgctggtgggtcagcaacaggattgcagagttcttcatcagccatggctgtggatgagga

SEQ ID NO: 171121 - DNA, 250 bp, Glycine max
agttggaggagcaaaatcgagctttgcaaatggaaaagatgaatacaatgatggcgagccaggcgagagcttcgtttcagaaggtcacgagtaatggaatgagaaggcaatgcactcaattttggggttgctttcgatgatgcaagatgataatttgaagagtgaacagaaacttattgtgaattcaatgctaaggaccagcactgtcttgtcaaacttgataaatgatgccatggactactcaactagg

SEQ ID NO: 171122 - DNA, 252 bp, Glycine max
cttattcagtagttcttctctctcgaatttacactcactttctgacgcatcaatggcggcgataagtctccggaaggggaacacgcggcttccgccggaggtgaaccgcggctgtacgttcggaaccttcccttcaacatcaccagcgaggagatgtacgacatctttggcagatacggcgccattcgccagatccgcatcggcaccaacaaggaaactcgcggaaccgttccgtcgtctacgaggactcta

SEQ ID NO: 171123 - DNA, 187 bp, Glycine max
cagaggcacagagagaaaatggtttcggggtcagggatctgtgccaagagggtaattgtggacgcacgacaccacatgctggggaggctggcatcgatcgtggcgaagaacttctgaatgggcagaaggtggtggtggtacgctgcgaggagatttgcatctccggtgggctcgtcaggcagaagat

SEQ ID NO: 171124 - DNA, 186 bp, Glycine max
caaacctcttcgttccttcgattcattccatttcttccaaaatggccaaagacccagttcgcgttctcgtcactggagccgcagggcaaattggatatgctcttgccctatgattgctaggggagtgatgctgggtcctgaccagcccgtgatcctccacatgcttgacattcctccagcagcaga

SEQ ID NO: 171125 - DNA, 265 bp, Glycine max
ccagttctcacctcaccgctgcatcttcacgtcgtctctaacgagggaaaatgagtcgaggaggtgcagcagcagcgaagggaaagaagaagggtgctacattcccattgactgtgcaaagccagtagaagacaagatcatggacattgcttctctcgagaagtttcttcaagagaggatcaaggttggtggcaaagctggtgctcttggtgactctgttaccgttacacgtgagaagactaagattattctcacctctgactgt

SEQ ID NO: 171126 - DNA, 253 bp, Glycine max
tgttgctgctcatcctccgtaacctccgagctctgcaccgaagaacgaagccatggggaagacacatggaatgggatctgctcgcaagctcaagtcccaccgcagaggcaaaggtgggctgacaagtcatacaagaaatcacatcttggaaatgaatggaagaaaccttttgctggttcatcccatgccaagggaattgtccttgaaaagataggtattgaggctaagcagcccaactctgccattcgtaagt

SEQ ID NO: 171127 - DNA, 176 bp, Glycine max
cgagaaactctaacgaaagagcgagaaagcgaagacagccatggcgtcgtttcttcaatcgtttctggatccgaagaagaactggttcgccgctcagcacatgaaatccctctccaaacgcctccgcaaatatgggctccgatacgacgatttgtacgatccttactacgatctgg

SEQ ID NO: 171128 - DNA, 270 bp, Glycine max
gttccctacctctcctttcaagatgcagatcttcgtcaagaccctcaccggaaagaccatcacccttgaggtggaaagctctgacaccatcgacaacgtcaaggccaaatccaggacaaggaaggaattcccccggatcagcaacgtctcatcttcgccggaaagcagctcgaggacggccgtaccctcgccgactacaacatccagaaggagtcaacccttcaccttgtccttcgtctccgtggtggcatgcagatcttcgtcaagact

SEQ ID NO: 171129 - DNA, 275 bp, Glycine max
aagatgtgcatgtggaccacacagatgttagaatgctcatacttgcttggaaattgaaagctgaaaaacaaggttatttttccaaggatgagtggcgaaaagggctcaaagtttaggggctgacactcttccaaaattaagaaaggctattaatggactgaagaaagaggtgacggtaccagagtgctttgaggatttttattcctatgcatttcaatactgtttaacagaagaaaagcaaaggagtatagatattgagaccatctgtgagctgt

SEQ ID NO: 171130 - DNA, 270 bp, Glycine max
atttgggagaaatttattcagctctcatcttcggcagctttctcttctgtgttttcttgtacatcaagggtcatttggcaccgtcttctacagattctggctcattggaaacttaatcattgatttttactgggggatggaactttatccacgcattggaaaacattttgacataaaagtcttcacaaactgcagatttggaatgatgtcatgggctgttcttgcactgacctactgcataaagcagtatgaagaaaatggaaaagtagc

SEQ ID NO: 171131 - DNA, 262 bp, Glycine max
caccaatcctgaagtcagggtgaccaaacagaacagaactgcaggaattcttgagaattttgcagagggagagaaatattcacaacatagcctgaggaagtatttcgcggcaagcagcctcagattatgccatccgtcaacaacttcttctctgatccatcaaactaaagcaaatgccaaactttttgttcttgagatttgatttctgggattaattttttgctttccagtattgggaattgagaattaggacaacgggttt

SEQ ID NO: 171132 - DNA, 261 bp, Glycine max
gtcgaattgttttcacaaacatggtcatcatgttaagtgctatacgtcaaacaaccctttcatgatcctctttgcctgcattcaaatcgtgcttagccagatccaaatttccataagctctggtggctctccattgttgcagcagttatgtcttttgcttattcttccattggcctcgggctctcagtagctaaagtggcaggtggtggagagcctgtacggacaaccttaacgggggtgcaagttggggtagacgttaca

SEQ ID NO: 171133 - DNA, 261 bp, Glycine max
gagagaagaagaaacttaatcgatcatcacttcacttcactaatacatcatggcagacgagacccagaacaagtatgagagctctgaggttgaggtccaggatcgtggtgtttttgactttctcggtaagaaaaaggatgaagaagacaagcctcatcctcaggaggaggtcatcgccaccgagtttcaaaaagtcactgtctcagaccaaggagagaacaagcacagcctcttagaaaagcttcaccgatctgacagcag

SEQ ID NO: 171134 - DNA, 261 bp, Glycine max
ctggcattaacattagtggcatcaatggagaggttatgcctggccagtgggaatttcaagttggtccttctgttggtatctctgctggagatgaggtgtgggtgctcgctacattttggagaggattacagagatagctggagcaattgtttcatttgatcccaagcctattccgggagattggaatggagctggagctcactcaaactacagcaccaagtccatgagagaagagggtggttatgaggtgatcaagaaggc

SEQ ID NO: 171135 - DNA, 161 bp, Glycine max
gtcgctgctccgtaccagtttcactgcataaatttgagagaaaactctgcaaacatgttggtttatcaggacctccttacaggtgatgagcttctctcggacccttccgttacaatgaaattgagaatggaatgctgtgggaagttgaggggaagtgggtt

SEQ ID NO: 171136 - DNA, 260 bp, Glycine max
gtagtattattcttccattccgttctacatataatcattcataatgggtgttttcacattcgaggatgaaatcaactcccctgtggctcctgctactctttaaaggccctagttacagatgccgacaacgtcatcccaaaggctcttgattccttcaagagtgttgaaaacgttgagggaaatggtggcccaggaaccatcaagaagatcactttccttgaggatggagaaaccaagtttgtgctgcacaaaatagaaag

SEQ ID NO: 171137 - DNA, 263 bp, Glycine max
ctggtttgcggcgtagaggcatgaccccaactgcaatcaatgcttatgtccgaggaattggaataactagaagtgatggcactttgatttctgtggaacgccttaatatcatgttagggaagaattgaacaaaacagcacctcgtgcaatggttgtcctacatccactcaaggttgtcattactaatcttgaagccaactcagcaattgaggttgatgcaaagaaatggcctgatgctcaagctgatgatgcttctgctttct

SEQ ID NO: 171138 - DNA, 251 bp, Glycine max
caacaagcagatcaatctctctctctctctcaaccataatagtcatgggtttgaaggaggattttgagcagtatgctgagaaagcaaaaactttgccaccgactcatcaaacgaagacttgcttatcctttatggattgtacaaacaggccaccgttggacctgtcaacaccagccgtcctggaatgttcaacatgagggacagagctaaatgggatgcatggaaggctgttgaagggaaatcgaaggacg

SEQ ID NO: 171139 - DNA, 270 bp, Glycine max
ctcttgtgggcctgaaccacctaaccccatctcagatctctcagatccaggcccaaatccagatccagaatcacagcaacacgctgagcttcctggggccgaagcccatcctatgaagcacgtgggcatgcctccgaagcccacgaagctatacagaggggttcgacagaggaactgggggaagtgggtggctgagattagactcccgaagaaccggaccaggctatggctgggaaccttcgacaccgctgaggaagccgctctggcgta

SEQ ID NO: 171140 - DNA, 217 bp, Glycine max
gtcagttgcaggaaaaatggtttcgctgaaactgcagaagcggctcgcagccagcgtcctcaagtgtggcagaggaaaggtttggcttgaccccaatgaagtcacgaaatctccatggctaattctcgccaaaacataaggaagctggttaaggatgggtttattatcaggaagcccaccaagattcactctcgctcacgtgcccgccgattgaagg

SEQ ID NO: 171141 - DNA, 263 bp, Glycine max
  unsure (1)..(263): unsure at all n locations
ggacattgagggagagacatctatgaatgacaacacggaccctgctgatgtaaaacgagtaaggaggatgctatccaatagggagtcagcccgacgctctanaagaagaaagcaggctcatttaactgacctagaaacacaggtttctcaattaagaggtgaaaattctaccttgttaaagcgccttactgatgttagtcagaaatacagcgactctgctgtgacaacagattttaaaagctgccgtggaaccttaagnacna

SEQ ID NO: 171142 - DNA, 259 bp, Glycine max
ggacattgagggagagacatctatgaatgacaacacggaccctgctgatgtaaaacgagtaaggaggatgctatccaatagggagtcagcccgacgctctgaagaagaaagcaggctcatttaactgacctagaaacacaggtttctcaattaagaggtgaaaattctaccttgttaaagcgccttactgatgttagtcagaaatacagcgactctgctgttgacaacagagttttaaaagctgacgttgaaacttaag

SEQ ID NO: 171143 - DNA, 257 bp, Glycine max
gcggcggacatcaggcgctggaccccaccgccgtccacggcgtcacgcagttctccgatctcaccgaggacgagtttgagaagctctacactggcgtcaaggcggcttcccgtcatcgaataatgccgccggcggtattgcgccgccgttggaggtggacgggctgccggagaattttgattggagagagaaaggagctgtcaccgaagttaagttacagggtagatgtggatcatgcgggtgtttcagcaccacag

SEQ ID NO: 171144 - DNA, 261 bp, Glycine max
tgttccttgaaggaaaaaaaacgcagttgaaagattgaagctcgagatgtcggggaaaggcgcaaagggtttgataactgctaagaacccttcttcctctaggacaaagacaagaaaaaacccatttctcgctcctcaagagccggtcttcagttccctgttggacgcattcatcgtcttctgaagtcaagggtgacagcacatggaagagttggggcaacagctgcagtttattctgctgccatcctggagtatttaact

SEQ ID NO: 171145 - DNA, 266 bp, Glycine max
gaagcatctgtctctgacctttctcgatttattccaaagatgcctctatccccttcggcacctcatgttatcagcattggacaacttatggaatcggcattaaggtagctggtcaagtggcaggaacagctatctccacttcgccccttccgtacaacaccatggctagccagtgtgaatcactcggtacatgtgcaaggacaaagctttcaaattggctggcctttgagaatcattacagccaagcacttgatgataaatcgttt

SEQ ID NO: 171146 - DNA, 252 bp, Glycine max
cttgaatcttcgttatccttctttttttctccttgaactcgaatattcactatggcagatgaggtggttctgctagatttctggccaagtccatttgggatgagggtcaggattgcacttgctgaaaagggtatcaaatatgagtccaaagaagaggacttgcagaacaagagccctttgctcctcaaaatgaacccggttcacaagaaaatcccggttctcatccacaatggcaaacccatttgtgaatct

SEQ ID NO: 171147 - DNA, 259 bp, Glycine max
tgacgaaagaagcaagcatgtgtggcggagcaatcatcgcagatttcatacctcggcagcgtccccgcaccctcacagcctccgaactctggcccaagcgcacgatacctcaacctcaacctcctcctcctccagttaagaggcagaggaaaaacctctacagagggatcaggcagcggccctggggcaaatgggccgcggagattcgcgatccacgtaaaggagttcgtgtctggcttggcaccttcaacaccgccga

SEQ ID NO: 171148 - DNA, 257 bp, Glycine max
tgcagattggtgtgaggtatgccgggaattagctcctgacgtctacaaagtagagcagcaattcaaggatcgagttaattttgtgatgttgaatgttgataacacaaagtgggagcaagagcttgacgagtttggcgtggagggtattccacactttgcattcctggataaagaaggaaatgaggagggcaatgtggtcggtaggctaccaagacagtacttgcttgaaaatgtggatgcccttgctcgtggagaag

SEQ ID NO: 171149 - DNA, 260 bp, Glycine max
  unsure (1)..(260): unsure at all n locations
cttaaagcttgaaactttcactaagcagagaagcatggtgtcaaaaaatccgaacccctctgaggctttttacttggacccctccggcatgtcgctccccggaatccttcccttcgccgccgcagccaccgccaccgcagattcctttgaggaccctgctaagaagactcgcaagccttacactattaccaagtctagggagagttggaccgaacctgagcacgacaagttcctcgaagctcttcagttatttgangtga

SEQ ID NO: 171150 - DNA, 228 bp, Glycine max
aaagcaagctcatcctagagttttaaaaatggcagcagcctcctccatggctctctcttccccatccttggctggcaaggccgtgaagctgggcccatcagcccccgaagtcgggagggtcagcatgaggaagaccgtcaccaagcaggcctcctccggaagcccatggtacggcccagaccgcgtcaagtacttgggcccattctctggcgagcccccgtcctacct

SEQ ID NO: 171151 - DNA, 259 bp, Glycine max
  unsure (1)..(259): unsure at all n locations
ttctctgtgactgcctctgttccgccaagcgcanattttcccaccgttcaggccaccggctgagttaggtttccggcgaggatgggtgctgctctgctgtcggagcttgcgacggagatagtcgtgccagtgtgcgccgtcatcgggatcgtgttctcgctggtgcagtggttcctcgtgtcgcgcgtcaagctcactcccgaccgcaacggaacgacgtcgtcgccgcgcaacaacaaaaacggctacggcgacttcc

SEQ ID NO: 171152 - DNA, 258 bp, Glycine max
tgttggaccaacatattgcaaagggagaggtcatccaacgacttttgaggggccaaatggtgccatctgttgcagatggcaaggaagcagatgaccagaaagttgctaatggggaggagactggcaaggtcaagaaaaacaatcacgttgaaagcgacaatctgagcagcaaagaaaacgtgggtagttgttgccagggtgttaatggagtttcttgttgcagaagtgcaagtcttgagcaaaacaaggagattgaag

SEQ ID NO: 171153 - DNA, 262 bp, Glycine max
aagagagtgagataagaaggaagaagaagaagaagagatggcaaatgaactacccgtcaaagcttttggttgggctgcttcagacacttctggcacccttgccccttttcatttctccagaagggaaaatggcgtcgatgacgtcactctcaagattctcttctgcggggtttgccactctgatctccacactctcaaaaacgactggggtttcaccacctaccctgtcgttcctgggcatgaaattgttggtgttgtgaca

SEQ ID NO: 171154 - DNA, 257 bp, Glycine max
gttgctgcttcttcagccactccgcacctcgcagcctctgtgccctcaacaaccatggctgaaatcgaaactaccgttccagatcccacccaaatcgacgtcaaactcttcaatcgctggagcttcgaggatgttgaggttaatgatatgtctctggctgattacattggagtgtccccatcaaagcatgctacatatgttcctcacactgctggtaggtactcagtgaagaggttcaggaaagcgcagtgccccat

SEQ ID NO: 171155 - DNA, 255 bp, Glycine max
tatcatccgcagctgcttttattcgcaccgcaaacagtgagccatggccgtcggaaagaacaagcgcatctccaaggggaagaagggtggcaagaagaaggcagctgatccctttgccaagaaggattggtatgacattaaggctccttctgtttttcaagtgaaaaatgttggcaaaaccctcgtctctcgtactcagggtaccaagattgcttctgaaggactcaagcatagagtgtttgaggtctccttggc

SEQ ID NO: 171156 - DNA, 255 bp, Glycine max
acgaatttcattgcagagtgttattttgagtatcagcatcaatggctccaattgcagtgggaaacgtgattccagacggcattttggcttacttggatgaagaaaacaaaccccaaactgtctccattcactctctcgccaccggcaagaaagtcatcatctttggggttcccggtgccttcactcctacttgcagcttgaagcacgttcctggcttcattgagagagcagaagagctgaaagggaagggtgtgg

SEQ ID NO: 171157 - DNA, 256 bp, Glycine max
tgagaacttccgcctgctctatgacactaaaggccgattccgtcttcattccatcagggatgatgaggcaaagttcaagctctgcaaggttaggtcagtacagtttggccagaaaggtatcccatacctgaacacctatgatggtcgcaccatccgttacccagaccctctcatcagggccaatgacactgttaagctggatctggaggaaaacaagattgtcgattttatcaaatttgatgttgggaatgtagtt

SEQ ID NO: 171158 - DNA, 258 bp, Glycine max
atccaactctctttctccctatcccaacaatctcactcatacctcttcaatctaacaaacttaatttcttttgttttgagtttcttagagaatggatgaaaaaggagcaagaagtagcaacacccttttaagttgtgaggacgagatggaccttcgaagaggccctggaccgtcgatgaagacctcactcttatcaattacattgccactcatggcgaaggtcgctggaacacgctcgccctctctgctgggctgaaa

SEQ ID NO: 171159 - DNA, 255 bp, Glycine max
cttcctcaaccgaatccctgagatttgaaatccaatccgggcacaccaaatgcatctccgaggatatcaagagcaattccatgaccgttggcaagtaccaaatcgttagccccaacgagggtcaacctctgccagatgcccacagattcaccgtcagggtgacttcgtcttatgggaacaactatcactacggggatcgcgttcagacggggcagtttgcgtttgctgcagtggaggctggagattacatgactt

SEQ ID NO: 171160 - DNA, 239 bp, Glycine max
ggcgcagagtagagcagcagagaagagagaaaacggcactgcagccgtagaaggaaaaccgaccatggtgcacgtctccttttacaggaactatggtaagacgtttaagatgccccgccgtccgtacgagaaggagcgtctagacgcggagctgaagctggtgggggagtacgggctgcggtgcaagagggagctgtggagggtgcagtacgcgctcagccgcatccgcaacaacgcgc

SEQ ID NO: 171161 - DNA, 207 bp, Glycine max
gcaaaaaaaaaaaaccacaatggcagcgagggctcccattccacgcgaagagttcgtgtacatggcgaactgtccggaacaggccgagcgctacgaggagatggtggagttcatggaaaaggtctccgcctccgccgaaagcgaggagctgcccgtggaggagcgaaacttcttctcggtggctaaaaaaaacgtattgggcgctcg

SEQ ID NO: 171162 - DNA, 251 bp, Glycine max
aacacaacccatggccaccacctccgcattcctcctccttctcctcctcctgctgctccacctcgccatcgccgctcacggcatcggcatcaactacggcacgctcggcgacaaccttccaccgcccgcggggtggcgaacttcctgaagacgaagacgaccatcgaccgcgtgaagatctacgacgtgaacccggacatcctgcgggccttcgccggcagcggcatctccgtgacggtgaccgcccccaa

SEQ ID NO: 171163 - DNA, 237 bp, Glycine max
ctttctctctgttttctggtaattcatcaattgattcaaaatgcagagtctcaaactgcaactagtgctattcctctcaatctcaacttctcacgctgttttctccttcacagatgggttgttgccaaatgggaacttcgagcagggcccaaagccatcacaattgaaagggtccgtagtgactggccacgatgccattccgaattggacgatttcggggttcgttgaatacataaa

SEQ ID NO: 171164 - DNA, 244 bp, Glycine max
gttcctggaaatactgttgctgtccaagcagacatgccatttagtggtcttacaacttttggcacagcatttttgtcaaaatttgtgtgttcacagatgcctcatcctctactggaacacatcacatttgttgacactccgggagttctatctggagaaaagcaacgcacacaacgagcatatgattttacgggtgtaacatcttggtttgctgctaagtgtgatttgattctccttctgtttg

SEQ ID NO: 171165 - DNA, 246 bp, Glycine max
tttctacttgaaaggtttgaaacttgttactgtggaccgtccttttgctgagaagcactatgctgatttgtctgccaagcctttctttagtggtttggtggattacattatctctggccctgttgttgccatgatctgggagggcaagaatgttgttacaactggccgaaagattatcggagccacaaacccagctcaatctgagcctggaactatccgtggtgactttgccattgacattggaag

SEQ ID NO: 171166 - DNA, 254 bp, Glycine max
cataaatctagctccaattcctaatcacctggttaatttcttcacatagagctatcaagatccaacgttaacatgaagaatgttttagtaaggtcagctgcgcgagctctgcttggcggcggtgggcggactactaccgccagctctcaacggcggcgatcgtggaacagagacaccagcacggtggcggcgcgtttggaagcttccacttgcggaggatgtccactcttccagaggtaaaggatcagcactca

SEQ ID NO: 171167 - DNA, 259 bp, Glycine max
gagaaaccagtgactgacttttcgagaaagaaaaacaaaaatgagtttccgtcattccatcatgaacgctcttcccattctcctcttcttcctcttcgtttctgcattagtttctgcgaagaaaactggtgatgtgacggagctgcaaattggcgtgaagcataaaccagtatcatgtgaagttcaggcacacaaaggtgacagagtcaaagtacactataggggaaaactcactgatggaactgttttcgattctagc

SEQ ID NO: 171168 - DNA, 124 bp, Glycine max
ccatggtacggtattgaacaagaatacaccttgttgcagaaagatatccaatggcctcttagggtggcctgttcggtggtattccctgagacctcaggggtccatcagctactgatgcgtgttg

SEQ ID NO: 171169 - DNA, 257 bp, Glycine max
aaatagctttcctcggttataaccttcaaggtggaaagaaaaacccacccactatcccaattccaataaataccttcctctctatattttcgcacaataccctctcacccttcaacgatgagttactacaatcagcagcaaccacccgtcggtgttcctcctccccaaggttacccaccgccggattcttacggaaaggacgcgtaccctccgccagggtacccgccgcaaggaggataccctccgcaggcgtatcc

SEQ ID NO: 171170 - DNA, 248 bp, Glycine max
gccgaagaaggttcatccaatccccgaagcccttcaccgcattgcaaccatgtcgaggagaaaggtcagagagccaaaggaagaaaacgtgactctgggcccagctgttagagatggtgaacatgtctttggcgtcgctcgcatctttgcctccttcaatgataccttcattcatgtcactgatttgtctgggagggaaacgcttgtccgcatcactggtggaatgaaggttaaggctgacagagatg

SEQ ID NO: 171171 - DNA, 256 bp, Glycine max
agcagttacagcactcaaaaacctagagcgaagagcgtgaaggcaccggccgccggccatgacattcaagcgcaggaacggaggtcgcaacaaacacggccgtggccatgtcaaattcatccgatgctccaactgcggcaaatgctgccccaaggacaaggccatcaagaggtttcttgtgaggaacattgttgaacaggctgcagtcagagatgtgcaggaagcctgtgtctatgaacaatacacgcttccgaaa

SEQ ID NO: 171172 - DNA, 252 bp, Glycine max
gttcgacttttgattaaggactatccttatgcttctgatgggctagagatatgggatgccatcaagtcctgggtgcaagaatatgtctcattctactacaagtcagatgaggaactccaagaagatgctgaactccaagcttggtggaaagaacttgtagaggtgggtcatggtgatttgaaagatctgccatggtggcaaaagatgctgactcgtgaagagttggttgacacttccgctatcctcatatgg

SEQ ID NO: 171173 - DNA, 260 bp, Glycine max
ttcggctcattcgacgaatcggctcaggggatggaccacagttgtacattgttgaaccttccgatgtttcctatagatatttcggtgctgcaattgggaagggcaggcaggctgctaaaacagagattgaaaagttaaagcttgctgatatgacatgtcgacaaggggttattgaagtggctaaaattatatatggagttcatgatgaggcaaaggacaaagattttgagctagaaatgagctgggtgtgtgatgagtca

SEQ ID NO: 171174 - DNA, 254 bp, Glycine max
ggcaaattaacttgaggtcaagtgaaacaatggaatcagaaccttatcctgagcatccaggagaaccagattgttcatactacattaggactggcctttgtagatttggagcaacatgtcgatttaatcatcctcctaacaggaagctggctattgccgctgcaaggatgaaaggtgaattcccagaaaggataggacagccagaatgccagtactatttgaagacaggaacttgcaaatttggagccacatgc

SEQ ID NO: 171175 - DNA, 248 bp, Glycine max
ggtttatcagccctctgaagaagaactaaggagctatattgatccatatgaatatgttatttgttcagagtgtcatcaaggtggagatgatggcctcatgctactctgtgatatctgtgattcccctgcacacacatattgtgttggtttggggcgggaagtacctgaaggtaactggtattgtgatggatgtagaccagttgctttgggatcttcaagctcccaagttcaagaaggtgtggctgatc

SEQ ID NO: 171176 - DNA, 252 bp, Glycine max
ggggaagtgggttgttaaaggagcagttgatgtagacattggtgcaaacccttctgctgagggtggaggagaagatgagggagttgatgatgcagctgttaaggttgttgacattgttgacacattcagacttcaggagcaacccgcattcgataagaagcagtttgttaccttcatgaagaggtttatcaagaatttgactcccaagctcgatgcagagcaacaggagttgtttaagaagcacatcgaggg

SEQ ID NO: 171177 - DNA, 253 bp, Glycine max
cttgcatttcctgatggcctccttattaatggtcaggctcatacaaccttcactggtaacccggggaaaacctatatgttcagaatctcaaatgtaggcttttcaacctcaattaacttcagaattcagggtcacaccctaaaattagttgaggttgaaggatcacacactgttcagaacctttacgattcacttgatgtccatgttggccaatcggttgctgtgttagtaaccttaaaccagcctccaaagg

SEQ ID NO: 171178 - DNA, 250 bp, Glycine max
cacaattcacaaccgaaacagtttccatctctctcacaaaatgacaacaatatcaaattgctcccttctcttcctcttcctcttcctctccaccctccacatagcttccaccctctcaacccccaccaacttcatcaagtcctcctgcagcaccacccagtacccagccctctgcatccagtccctctccgtctacgcctccaccatccagcaagacccccacgagctcgtccagacagccctctccctc

SEQ ID NO: 171179 - DNA, 287 bp, Glycine max
cttcctttctctgctctttgtcttctctgacacatttggggccttgttgagtgtgtttttgcaagagggtatggcgaaggacgttgaggttgctgagcgtggctccttctctgggaaggactaccaggaccctccaccagcaccactcatgatgctgaggagctcacaaagtggtccttttacagggctcttattgctgagttcattgccactttgctcttcctctacattactgtgctcacagttatagggtacaagcaccagacggatcatgctgatgcgtgtgg

SEQ ID NO: 171180 - DNA, 274 bp, Glycine max
gcacgtttaagaagcaatggcacgcaagaagatcagagagtataacaactttcattgttgaaccttttatccctcacaatgaggagttttaccttaacattgtctcagagagactagggaacagtataagcttttctgaatgtggaggattgaaattgaggagaattgggataaggtcaagactgtatttatgccaacaggagtgtctcttacatcagagagtattgccccacttgttgcaacacttcccttagagatcaagggagaaattgag

SEQ ID NO: 171181 - DNA, 264 bp, Glycine max
cgaaaataaccaaataagaagaaagaaacaatgaacgacttgttctcaggttccttctctcgcttccgcagcgaccagtcatccccggaccgccaccacgacatcgagatgggcgccgccgccggtggcccccgcggcggcgaggtgacctcgacaagttcttcgaggacgtggaaggcgtgaatgaggaactaaaggaattagaaggcttagcgcagagtttaagaagcagccacgagcagagcaagacgctgcacaacgcga

SEQ ID NO: 171182 - DNA, 280 bp, Glycine max
gcttccggcgccatatcgcgtatctttctctgttctattcctacgatggagttttggggtgccgaggttaaggttggtgagtctgttaaggtagatccagccgaattcgaggcatgcatacacctttctcaggctgctcttggtgagcaaagaaagacaaatcaaatgaaccagttgttctctacttgaaagttggtcaacagaaatttgtcttgggaaccctttccagggagaaaattcctcaaatacctctggaattggttttggaaaaggagtttga

SEQ ID NO: 171183 - DNA, 280 bp, Glycine max
agccgagcagcgagagagagaaaccctagcaaaaatgccggctggtcacggtttgagatcccgcaccagagattccttctctcgtcccttcaggaagaagggtaccatcgccctcaccacatacctcagaacctaccacgtcggcgatatgtcgacgtcaaggttaacggcgccgtccacaagggaatgcctcacaagttctaccatggccgcaccggtcgcgtctggaatgtcaccaaacgtgctgttggggtcgaagtcaacaagcaggtcggcaaca

SEQ ID NO: 171184 - DNA, 284 bp, Glycine max
ttcagagtcatgagattcccaacaacagttctgactcatttgttcagagtcatgagattcccaacaacagttctgacacacttgttcagagttatggtgtgattctaaaacccaatgtttcaatggacacatgcaatgtgtttgaaggagttgggtgagggatgatagctaccctttgtatgatgcttctcactgcccttttgctgaaaggggttttaattgccttgctaatgggagaaaagatagaggttacacaaaatggaggtggaaacctaagaactgtg

SEQ ID NO: 171185 - DNA, 189 bp, Glycine max
  unsure (1)..(189): unsure at all n locations
ttcttaactcaacttctgctacccactctcttcttccaagtccaaccacgcttttctctacagtcatgggcaaggtcaagatcggaatcaacggatttggaagaattggccgtttggttgccagantcgctctgcaaagagacgatgtgggctcgttgccgttaacgaccctttcattaccaccgatta

SEQ ID NO: 171186 - DNA, 272 bp, Glycine max
tgacgatgaagcaaatcatctcttaatgcacaggaacttgccagctgttagatgggttggtggtgtagagttggaattgatagctatagcaactggtggaagaattgttcctaggtttcaggagttatctccagaaaagttgggaaggctggtatggttcgagaaaagtcctttggtacaacaaaagaccgaatgctgtacattgaacattgtgcaaactcaagggctgtaactatattcattcgtggaggtaacaaaatgatcattgagga

SEQ ID NO: 171187 - DNA, 159 bp, Glycine max
cagttgtgtattttaggagagcccttaaattgaacaaaaactttttatcggcttggacacttatggggcatgagtttgtagagatgaaaaacactcctgctgctgtggatgcctatcgtcgggcagtagatatagacccacgtattatcgtgcttggta

SEQ ID NO: 171188 - DNA, 272 bp, Glycine max
accgtgatggatttttcatgggtgaaggggctggagttttgcttttagaggaactggagcatgctaaggaaagaggtgcaaccatatatgctgaattccttggtggaagtttcacctgtgatgcatatcatgtgactgagccggtcctgatggggctggtgttatactgtgcattgaaaaggcattagctcagtctggagtatcaaaagaggatgtgaattacataaatgcacatgccacatccacaccagctggagatcttaaggagtacc

SEQ ID NO: 171189 - DNA, 171 bp, Glycine max
ctccgcaccagtttcaccgcacgaatatcttgttgtttggagcgatccgagaaaaactctgtaaacatgttggtttaccaggacctccttacaggtgatgagcttctctctgactccttccgttacaaggaaattgagaatggatgctgtgggaagttgaggggaagtggg

SEQ ID NO: 171190 - DNA, 282 bp, Glycine max
caacctcttaccgtgcgaatctctcaattcatcaaaactaacaacatcatcaccatcgtcgcaccgaaatcaatcgccacaacctcgggatctcagattcgacgcgccaaatcatgtcgaaggcgcgtgtctacaccgatgtcaatgccttcgccccaaggagtattcggattacgagtctctcacccttcaatggggtgatcaagatgattatgaggttgtgcgaaaagtgggcaggggtaaatatagtgaagtttttgaaggcataaatgtcaatagcaa

SEQ ID NO: 171191 - DNA, 280 bp, Glycine max
acttgatcaccttttttgagaaaagatatatatcaatggcaactccgagtgtgttagaagtccgccctcctgctttaacttccatctctgaaccacttccattttttgatggaaccacaaggttatacatttgctatctgtgccctttgcacaacgcgcatggataactaggaactgtaagggactgcaagacaagatcgaattggttcctattgatcttaaaaacaggcctgcttggtataaggaaaaagtttatcccacgaataaggtaccttcgttg

SEQ ID NO: 171192 - DNA, 278 bp, Glycine max
ttccctgtctctcagaaagatgaaggtggtcgctgcgtatctgctcgccgtcctcggtggcaacaacaccccctccgccgatgacatcaaggaaatcctcggctccgttggaatagaggcagatgaagataggattgaatcgttctgtctgaagttaagggtaaggatatagttgagctaattgctgccggtaaggaaaagctggcctcggtgccttctggtggcggtggtgccgttgccgtcgccgctgctcctggtggaggtggcggtggtgctgc

SEQ ID NO: 171193 - DNA, 280 bp, Glycine max
ctcacgcagtcgcagtgagtgaaaaggaaaaccctaattgcggtattctcagtgccttcgagagaaagaaaaaatggcagataatcttgttctccgtggcaccatgcgcgcccacaccgacgttgtgacggcgattgccactcccacgacaactccgacatgatcgtcaccgcctcacgcgacaaatccatcatcctctggcatcttaccaaggaggacaagacttacggtgtcccccgccgccgcctcaccggccattctcattttgtccaggacgtcg

SEQ ID NO: 171194 - DNA, 283 bp, Glycine max
ggacaatttcagagctactcaagaatccaagggtgatgaagaaactccaaagggaattggaaactgtggtgggtatgaagaggaaggtgggggaatcagacctggacaagttgaagtatttggagatggttgtaaaggaaggcttgagctccatccagtggcaccgttactattaccacaccactcgagggaagattgcatggttggagaatatttcatacctaaaaattcaagggtgatagtaaatgcatggacaattatgagagacccaagtgcttgggat

SEQ ID NO: 171195 - DNA, 269 bp, Glycine max
ctacggcgtcgtttgaagggcttcgaccttccgctgttcagttagcttccacgggcagaattagaattggcaatctctcccaaaggtccttccggggcctggttgtcaaagccgccaccgttgttgcccccaaatacactgcgtaaagcctctgggagatagagtgctaataaaaattaaggaagcagaggagaaaactgagggtgggattttgcttccatcaactgctcaaacgaagcctcaagggggtgaggtggttgctgttgggg

SEQ ID NO: 171196 - DNA, 276 bp, Glycine max
atatttaatattttctaccctgatcttgtagacaagacaaaagccccaacctacaccattgagaaggatggcagcaatggggagacttgcattataagattccacgcagggccaccatatgaagacatagctttccgcattgtaacaaagaatgggagtattctcataagaaaggttttaagtgtgcatttgaacgtggaattctgcatgtgtacttcaatttcaaacgccaccgctaccgaagataatttcacacaaggcaatggttcactttct

SEQ ID NO: 171197 - DNA, 272 bp, Glycine max
cgcttgagatctgcgagatcttgagtcgccgatttgaaaagatgagtaagcttcagagtgatgctttgcgtgaagccatctcaggaatcatggccgattccaaggagaagaatcgcaaatttgtggagaccatcgaactccaatcggtttgaagaactacgatccacagaaggacaagcgtttcagtggctccgtcaagttgccccacatccctcgccccaagatgaaaatttgcatgcttggtgatgctcagcatgttgaagaggcagaga

SEQ ID NO: 171198 - DNA, 277 bp, Glycine max
caacaacaccacaatgggaagaagaccggcgaggtgttaccggcagataaagaacaaaccgtacccgaaatcccgtttctgccgcggcgtgccggagccgaagatccgaatctacgacgtgggaatgaagaagaaaggcgtggcgagttcccgttctgcgtgcacctggtctcgtgggagaaggagaacgtctccagcgaggctttggaggcggcgcgcatcgcatgcaacaagtacatggccaagttcgccggaaaagatgccttccacctgcgcg

SEQ ID NO: 171199 - DNA, 274 bp, Glycine max
attttatttggggcaggcttaaagccatttgtcacgctgtttcattgggacctcccacaagctcttgaagatgaatatgggggatttctcaaacctgaaatagtggaggacttccgtaactatgctgacttttgcttcaagaatttggtgatcgggtgaagcactgggtaaccctaaatgaaccatatggctacagcgtgaatggctacagtggtggaaattttgcaccaggtagatgttctaactacgttggaaaatgccctgctggtgattc

SEQ ID NO: 171200 - DNA, 276 bp, Glycine max
gatctatccactcacctgcctcttcctcacccctttctccatctaacgagtaaggaaaaatggcgcgtaagaagatcagagagtatgactcaaagaggttgttgaaggagcactttaagagactttctggcaaggagttgccatcaagtctgcacaaattactgcatcaactgatttcactgagctacaagagaaggaaccctggctttcatcttctaaattggttgtgaaacctgacatgttatttggaaagcgtggcaaaagtggtttggttgc

SEQ ID NO: 171201 - DNA, 275 bp, Glycine max
cttcctccctctccctcctcccccaatcatgcccttctctcttccaatttctcttctctgtgccaatcaatcgattagtttagctttcgcggacagttcagggatcatggctagggttttagttcagtctactggtatgcctgcctactgagtgggcaaaggcacgggaagcataagggatcaggaaaatcgaaaagatctgtcaaaatgatgagcaccttacgaatgcctgctttaagaatgtcgagtttctccggattacgtactcttaatcc

SEQ ID NO: 171202 - DNA, 263 bp, Glycine max
catgttatgcctaatgatttggtatccaaatatgttatagacccaagttattaagattgtggtagttgttcagttggagctcctgctcgtgttggtttggttgctccaattgatgtcgttgttcctcctgcaacacagggctcgatccctctcagacctctttcttccaggtgcttaacattcctaccaagattaacaagggtactgtggaaatcattacacctgtggaactcattaggaagggagacaaggttggatcttct

SEQ ID NO: 171203 - DNA, 273 bp, Glycine max
ttttgcaacaaaattcaattttgagcactaaccagcaccacttccaatggcttcaaatcatgaagaagtgatacttttgggcaagtgggccagcccatttagcaacagagtagaccttgctctcaagctcaagggagttcctacaaatactccgaggaagatcttgctaacaagagtgctgatcttctcaggtacaaccccgtgcacaagaaggttccggttttggtccacaatgggaacccattacccgagtcacttatcattgttgaatac

SEQ ID NO: 171204 - DNA, 273 bp, Glycine max
aattaacctcactcaaactcgggatcacagaaaccaacaacagttcttgcactgaggtttcacgatgttgctggaacttgcacttggtttgtttgtgttagctttgtttctgcacttgcgtcccacaccaagtgcaaaacaaaagcacttcgccacctcccaaaccctccaagcccaaagcctcgtcttcccttcattggccaccttcacctcttaaaagataaacttctccactatgcactcatcgatctctccaaaaagcatggcccctta

SEQ ID NO: 171205 - DNA, 267 bp, Glycine max
tagagagccttgactgttcttattcagttggaatgaggttcaggatgcgttttgaaactgaagatgcggcagatcgaagattcactggattaattgctggaattagtgatgttgatcctgttagatggcccggatcaaatggagatgcctactggtaaggtgggatgacatagaagctgctaggcacaatagggtttccccatgggaaattgagccatctggttctgcttcaaattccagtaacttgatggcagctggtttgaagag

SEQ ID NO: 171206 - DNA, 273 bp, Glycine max
ggaggaatcagagggcaagttgaagggaattcttggttacactgaagatgatgtggtctccactgactttatcggcgatagcagatcaagtatttttgatgcaaaggctggaattgcattgaataagaactttgtgaagctgtttcttggtacgacaacgagtggggatacagctcacgtgtcattgatcttcttgtattcgttgccaagaagtctctttaaggtgttacttcaaagtagctgtcttcacattattaccgtatgtttatgttc

SEQ ID NO: 171207 - DNA, 275 bp, Glycine max
ctcgagccgctttagccgaggtcaggaggagcactagctaagttcacaatttcaaaatggctaggggactaaagaagcatttgaaaaggctcaatgctcctaagcattggatgcttgacaaactgggtggtgcatttgcgccaaaccctcatctggaccacacaaatcgagggagtgcctccccctcattcttattctgcgaaaccggctgaagtatgctctgacataccgtgaagtcattgctattctgatgcagcgccatgttcttgttgatg

SEQ ID NO: 171208 - DNA, 275 bp, Glycine max
gttagcaccaaaaatgtcgaagttaatcttcgtgttccttgcactaattcctcttctctgcacctccttctcgccagagaaaccctcagatcggcgcgtcctcgttttgctcgatgacttcgccatcaaatcctctcacttctcttcttcaactccctcaaatctcgcggcttcgatctccaattccacctcgccgacgaccccaaaattgcgctccagagatacggccagtacctctacgacgccctaattctcttttcccccaccattgaacg

SEQ ID NO: 171209 - DNA, 273 bp, Glycine max
agataagaacgcagaaactgaaataaaaaatggcagaacccaaggttaaatacgatcgtcaactcagaatatggggtgaacaaggacaggcagcccttgagaagtctagtatttgcttacttaactgtggtcctactggtctgaaacacttaagaatcttgttcttggtggggttggaagcatcactgtagttgatggatctaaagttgaagcgggagacctcggaaacaattttttggtggatgaagcaagtcttgggaagtcaaaggcaaa

SEQ ID NO: 171210 - DNA, 273 bp, Glycine max
atatgacatgtctcatgtctattgtccagtttatatgttatctgcctactatgaaaaacatccacttatgtggcatttccccccggttcaagaggccatttttcttgcttaacaatttgtatgttttcacaggcgtcaactgaagcagagttgaaattaatagaagaagagactgcaaagagagttgaagaagcaatacgtaagagagttgaagaaagcgtgaaatctgaggacgttcaggtggagattgacaggcggttggaagatggacgg

SEQ ID NO: 171211 - DNA, 245 bp, Glycine max
gcgagagagagagagagaatggcagcacttggtggcaatcgtgatgtggcaggaagccagaacagccttgagatcgatggtttagctcgctttgctgttgaagaacacaacaaaaaacagaatgcccttttggagtttgaaaaggagtaagtgcaaaacagcaagtggtttctggtaccttgtacaccatcactttggaggcaaaagatggtgggcaaaagaaggtttatgaagccaaagtttgg

SEQ ID NO: 171212 - DNA, 278 bp, Glycine max
gccatagtgaaagtgagataaaataaaaatcaaagagcataatgtcagggatcattcacaagattggggagacccttcatgtgggagggcacaagaaggaggaggagcataagggtgagcaccatgctggagaatacaaaggggagcacatggtgaacacagtagtgagtacaaaggagagcatcatggtgaacacaaagctggagagtaccatggtgagcacaagccagagcacaaagagggggttctagacaaagtcaaggacaagatccatggtg

SEQ ID NO: 171213 - DNA, 270 bp, Glycine max
gccaaacgacagcgttctgagtcttttcttcttcgttaccctcttcacatgccttctctctgctacttcccacgatgaccatattttcctaccgagtcaactccatgacgatgactcagtgagttgcactgcaaccgaccaagccttaactacaagccggtgatcggaatcctgacccaccccggcgacggtgcctctggccggctcagcaacgccaccggggtttcttacatcgccgcctcctacgttaaattcgtggagtccggtggt

SEQ ID NO: 171214 - DNA, 274 bp, Glycine max
  unsure (1)..(274): unsure at all n locations
ctctcatgcttttttccacttgcaaantcnaanttcactctgacagtttttgcagcttnattaagaagaacttaacagacatataaacatagtgatcgttatgtctacgcaaccaaagcttggtcggattcccagtatcaagaccgagttgaagacactctctctgctcaccgtaacgaactcatttctctcctctccaggtatgtggctcaggggagagggattttgcaaccccanaatttgattgatgaacttgacaacatccctggcgatg

SEQ ID NO: 171215 - DNA, 269 bp, Glycine max
tcttagtcccaattttctagggttttattcattttccgatggcttctgcagatgttgagtaccgttgctttgtcggtgggctcgcttgggccactgacgaccatgccctcgagagagccttctctcagtacggcgaatcgttgaaacgaaggtctgtttgttgcaggcatcacatctgatctcacacgattcggattcggaattttctcgatcccgttctgatctgtgatctctgatctgtttgcgatacttgatcttatgatacttgt

SEQ ID NO: 171216 - DNA, 266 bp, Glycine max
cacctactaagcgacgtcgttgggaggcgtaataatgtcgatgacgatggttatggaggaagatgaagaagacgtagaaatagagcacgtgtttattgctcatgaaattgacctcgattacgagttcgacgctgcaagttcttcgatttcactcgcccggagactccctcggaagctcacgaagcccaactctggtttcaaaatgccgctggttaccctccttcgccttttgtgagaaggctgctagtggcgagagaggatttgtt

SEQ ID NO: 171217 - DNA, 275 bp, Glycine max
gcctctactctcgaagaagatcgtgaagaagagggtgaagaagttcaagaggcctcagagtgacaggaaaatttctgtcaagacaaactggcgcagaccaaagggtatcgattcccgtgttaggagaaagttcaagggatcactttgatgccaaacattggttatggttcagacaagaagacccgccactatctccctaatggttttaagaaatttgttgttcacaatgtgaaggacttggaactgctcatgatgcacaacaggacttactgtgc

SEQ ID NO: 171218 - DNA, 253 bp, Glycine max
gtgagcgtcactacaacgcaacgcaatggtttacataacttcgtgggatgaattcgtggagcgatcggttcagttgttccgtgccgatcctgattctacgcggtatttgatgaagtaccggcattgtgagggcaattggtactcaaggtcaccgataatcgacagtgtctgaagtataagacagaccaagcacaagaagccaagaagatggaaaaacttaataatatattctttactttgatggctcggggac

SEQ ID NO: 171219 - DNA, 267 bp, Glycine max
gtagaatgtgaagctgttgatccagttgatgtggaaaagttagcaactactgtaaagagagcccttggaacctatggtaccccagccatgacacaaatgatccagaactgcatggcccaagacttttcatggaaggaccagccaaacaatgggaaaaggtgctgttgagcctagaggttgcaggcagtgagcctggaattgatggtgatgagattgctcctcttgcaaaggaaaacgtcgccaatccttgagcataaccattgataa

SEQ ID NO: 171220 - DNA, 198 bp, Glycine max
ctcgagccgaatcggctcgagaaaccctagaaggaggaagaagaagaggaaggatgagaccattagacgagaaggagacgagcgcggtgttcgagaagctgttcaaattcgtcggaaacaacctgaagaacatcgggagaacccctcacacgaaggtcctgattcgaaccctggccgctactgcttccgcctccacaa

SEQ ID NO: 171221 - DNA, 268 bp, Glycine max
gataactagaaacagtgtgatgaaaatgaaggtccttgttttcttcgttgctacaattttggtagcatggcaatgccatgcgtacgatatgttccctctccgaatgaacactggctatggtgcccgtactccggggtgaaatgcgcaagttggaggcttgctgtggaagcacacaacatctttggctttgagaccattcctgaagagtgcgttgaagcaacaaaggaatacatccatggcgaacaatatagatcagactccaaaacag

SEQ ID NO: 171222 - DNA, 267 bp, Glycine max
gccccaagcccgttcctatgaagcacgttggtgggccggcgaagccacgaagctgtaccggggcgtgaggcagaggcattgggggaagtgggtggcggagataaggctaccgaagaaccgaaccaggctttggctggaaccttcgacacagccgaggaagccgctttggcttacgacaaagccgcgtacaggctccgaggcgacttggcgaggctgaacttcccgaacctgaaaggctcgtgccccggcgaggagtacaagcctatg

SEQ ID NO: 171223 - DNA, 270 bp, Glycine max
acagtgtgttactcagatctggtgctgtgtggaacgaaaagctaagggcacatcacaatgaaggcattgattctggttggggggtttggaacaaggctgaggccactgacactcagttttcctaagcctcttgttgttttgctaacaaacctatgattctgcatcagatagaggcccttaaggccattggagttactgaggtggtgctagccatcaactaccaaccagaggttatgttgaatttcttgaaggattttgaaacaagctcgg

SEQ ID NO: 171224 - DNA, 267 bp, Glycine max
atcctcttctgctttgccctacaaaaggacaccccctagctggctcaagatctcttcgcaagatgtggaagaaaatatctgcaagtttgcgaagaagggtttgaccccgtctcagattggtgtcattcttcgagatctcacggtattgctcaggtcaacagcgtcactggcagcaaaatccttcgcatcctcaaagctcacgggcttgcgcctgaacttccagaggatctttaccatttgattaagaaggcagtttcaattaggaag

SEQ ID NO: 171225 - DNA, 261 bp, Glycine max
gattagctaagcaactgtctcctaaggtggtgactctggttgagcaggaatttagcaccaacaatgcgccgttcttgcagcgcttcgttgagacaatgaactactacttggctgtttttgaatcaatcgatactgtcttccaagggagcacaaagagaggattaatgtggagcagcattgtttggctcgcgaagttgtcaacttaatagcatgtgaaggagaagaaagagttgaacgtcacgagcttctgaataagtggag

SEQ ID NO: 171226 - DNA, 271 bp, Glycine max
caagattggaggtattggaactgtgccagtgggacgtgttgagaccggtgtcttgaagcctggaatggtggtgacttttgcaccaactggactgacaactgaagtcaagtctgtggagatgcaccatgaatctcttaagaggcacatcctggtgacaatgtgggattcaatgttaagaatgttgctgttaaggatttgaagcgtggttatgttgcctcaaactcaaaggatgaccctgcaaaggaggctgctaacttcacagcccaagtca

SEQ ID NO: 171227 - DNA, 258 bp, Glycine max
cgccaattcagatcgcagacagacacagagagtgagagagggagatggggagcgacacgatggcagagaagtcggtgcagaaagagaaggagaagaagaagatgttggccctggctcccattgctaaacctcttgctgggagaagctttgcaagcgaaccctaaaacttgttcgtagagctgccgaacacaaatgcttgaaaagaggagtgaaggaggtcgttaaaagtataaggagaggtcataaaggattgtgtgt

SEQ ID NO: 171228 - DNA, 288 bp, Glycine max
gttttattggctaatccgttggatgaagcaactttttaatcgggaaattgaactgagactaaagcatgggccttcaatttggtttcttgaggataagtacttcaaaccctaatttgtcagtggacattctagattgtcaagttgtatgagagatgtgtcattgcatgtgccaattatcctgagtattggatacgctatgttttgtgtatggaagccagtggaagcatggatcttgcaaataatgttcttgctcgggcaacccaagtctttgttaagagacaaccagag

SEQ ID NO: 171229 - DNA, 161 bp, Glycine max
tgtgtccttgaagcttcagaagctgctcgccgctagcgtcctaaagtgtggcagaggcaaggtctggctcgatccaaatgaagtcaatgaaatctccatggccaattctcgacaaaacataagaaagttggttaaggatgggtttattatcaggaagccaa

SEQ ID NO: 171230 - DNA, 158 bp, Glycine max
atacgaatatcttgttgtttggagcgatccgagaaaaactctgtaaacatgttggtttaccaggacctccttacaggtgatgagcttctctctgactccttccgttacaaggaaattgagaatggaatgctgtgggaagttgaggggaagtgggttgt

SEQ ID NO: 171231 - DNA, 161 bp, Glycine max
tctggtggggatgaagaagaatctgagaagtctgtatctgaggtgaatgatgaagatgatgatgaggaaggcagtggcgaggaagaggatgacgattagagaatggactgataattgcatttatgtaggttctgatgattttgatcacctgttgtaggtgg

SEQ ID NO: 171232 - DNA, 162 bp, Glycine max
tagtgtatccaaatttgttccgaatgaatacttctactggggcacctccagattattttgataaaaatggccagaattggggtttccctacatataattgggaagaaatgtcaaaggacaactatggttggtggagagctcgattgacacagatggcaaaat

SEQ ID NO: 171233 - DNA, 286 bp, Glycine max
gtgaggtagaacccttccacggtggtgactgcgcgatgggtgcctacaagtatgtttcagagctatggcgcaagaagcagtctgatgtcatgcgcttcttgcagcgggtgaggtgctgggagtataggcagcaaccttccattgttcgcttgacaaggtcgacccgccctgacaaggctcgtcgcttgggcttcaaggctaagcagggctatgtgatgtaccgtgttcgtgttaggaggggtggccgaaagaggccagttcccaaaggtattgtttatgggaagcc

SEQ ID NO: 171234 - DNA, 160 bp, Glycine max
acatcggataaacaagctgtttaattggcttcctctggcagctttaattgaggaaagaattgtttgcatgcacggtggtattggtcgttcaataaatcatgtagaacagattgaaaacattcagcgtccaattccaatggaagcaggatcaattgtgctt

SEQ ID NO: 171235 - DNA, 158 bp, Glycine max
atttggacaaggcaatcgatcacaaggctttgtttgatacattttcggcttttgggaatattctatcttgcaagattgcgacggatgcttctggccagtctaaaggccatggttttgtgcagtttgagagtgaagaatctgcacaaaatgcaattgac

SEQ ID NO: 171236 - DNA, 159 bp, Glycine max
tacacgaatatcttgttgtttggagcgatccgagaaaaactctgtaaacatgttggtttaccaggacctccttacaggtgatgagcttctctctgactccttccgttacaaggaaattgagaatggaatgctgtgggaagttgaggggaagtgggttgt

SEQ ID NO: 171237 - DNA, 158 bp, Glycine max
cacacacacacacactgtgtttgtgaaactctcacacagacaagtcacaacaacaagtttctgttgttccaatggcatcagcaacaccccttttgaaagatgagctggacatcgtgatcccaacgatcaggaacctggatttcttggagatgtggagg

SEQ ID NO: 171238 - DNA, 104 bp, Glycine max
aaccctgcaaaggaggctgctaacttcacagcccaagtcatcatcatggaccaccctggtcagattggaaatggctatgcccctgtcctcgactgccacacttc

SEQ ID NO: 171239 - DNA, 161 bp, Glycine max
  unsure (1)..(161): unsure at all n locations
agtacagagcttaaccgagcttcacaaagatgaatcgggaaaagttgatgaagatggccggttcggttagaactgggggaaagggtaccatgagaagaaagaagaaggctgtccacaagacaacaaccacagatgacaaaaggcttcagagccnccctgng

SEQ ID NO: 171240 - DNA, 161 bp, Glycine max
gtttttcgaaaccagtgcaaagacaaacatgaatgtggaggaggttttcttttcaatagcaagagatatcaagcaaaggcttgctgacacagattctaaggctgaacctcagactatcaagattaaccaacccgaccagacagctacagggggtcttgcgg

SEQ ID NO: 171241 - DNA, 286 bp, Glycine max
  unsure (1)..(286): unsure at all n locations
attctgttttccgctgcttgtttgtgcctgcgtagttacaaagtaaaaagagggaggactaggacaaaagttgttggcagtcatcatgtncgagcgcttcgttgaaggagatgaggaacggtggtgaggattatagcaannnnnnnnnnnnnnnnnnnntgagggacttgtatggagaggattgtgccactgaggaccagcttatcactccatggactttctctgtggccagtggatgcagtttactgagagatccacgctacaacaaagggctggcctttaccga

SEQ ID NO: 171242 - DNA, 286 bp, Glycine max
atgcatttgtggtcatatcaaatggttataccgacacaacccaggatgaaattaagcagtttatctccaaacaggtggtgttttacaaaagaataaaccgagtattcttcattgatgcaattcccaagtcaccgtcaggcaaaatcttgcgcaaggatctaagagcaaagctaacagcaactgttccaacatgaaattaaagcagacccacccttcacccatcatatcgtcatatagatgatgtacgatgcccgctcgagcttcagcagaaaaggaagaggcgctg

SEQ ID NO: 171243 - DNA, 285 bp, Glycine max
gcacaacatgtaccggaaagaccactctttcgaccgatcacaataggtatctaatcggagatgatgaacactgttggggtgacaatggtgtctccaacattgaaggtggttgctatgccaaatgcattgacctctcacgggagaaagagccagatatttggaatgcaatcaggtttggcacagattgccagtgttggaaaacgtggtgttttgatgagcacgaccgagaagttgattactctggacaaatcagttacagaaaatactcgtgctgcttatcctata

SEQ ID NO: 171244 - DNA, 156 bp, Glycine max
tatcgagccgaatcggctcgagctcttccgtgcacagcttgaacacatcgcgtttcggagagatacgtcgcaatggggaggaattctgcaaggtgttatcggcagataaaaaacaagccataccccaaatcacgcttttgccgtggtgttcctgat

SEQ ID NO: 171245 - DNA, 281 bp, Glycine max
gcaactgcgattttggatcggaacctcttctgcggcgtacaatgggacactccaacgtttggaattctcacccaaaaaactacggtcctggttctcgcacttgccgagtgtgtgggaatccacatggattgatcaggaagtatggccttatgtgctgcaggcagtgcttccgtagcaatgccaaggaaattggcttcatcaagtatcgctaaaagagctgttgtcacctacggaccaatattatgttctggcactaggatgttttgaagatgtaatgtttg

SEQ ID NO: 171246 - DNA, 274 bp, Glycine max
attgcgactaagagttgctgcttcttccgccactcagcacttcgctccctctgtgcttcaccaaccatggccgaaatcgaagctaccgttccagatccctctcaaatcgacgtcaaacttttcaaccgctcgagcttcgacgacgttgaggttactgatatgtctctggctgattacattggagtgtccccgtcaaagcatgctacatatgttcctcacactgctggtaggtactcagtgaagaggttcaggaaggcgcagtgccccattgttg

SEQ ID NO: 171247 - DNA, 147 bp, Glycine max
aagtaccaagagttggaaaaatggatcagtgaagaagggtttgaggaaaggaccaaagggagaggccttataattcgaggttgggctccacaggtactaatgatatcgcaccctgccattggaggattcataacacattgtggttgg

SEQ ID NO: 171248 - DNA, 274 bp, Glycine max
ctccttgaagtcgagtgttcactatggcagatgaggtggttctgctagatttctggccaagtccatttgggatgagggtcaggattgcacttgctgaaaagggtatcgaatatgagtccaaagaagaggacttgcagaacaagagccctttgctcctcaaaatgaacccggttcacaagaaaatcccggttctcatccacaatggcaaacccatttgtgaatctctcgttgctgttcagtacattgaggaggtctggaatgacagaaatccctt

SEQ ID NO: 171249 - DNA, 253 bp, Glycine max
attcatcggaaccgaaacccttcgccgcaaaaaatgcctcccaaatctgccaaatccaaggaagctccagctgagcgacccatcctcggtcgattctcttgtcacctcaaaattggcattgttggcttgccaaatgttggaaaatctactctctttaatactctcaccaagttggcaatacctgctgagaacttccccttttgcaccattgagcctaatgaggcgcgggtcaatgtacccgatgaacggtttg

SEQ ID NO: 171250 - DNA, 153 bp, Glycine max
gtttcgggggaagagatccagcagcaatggtgtacgtcaaggctcagaaatcaaaagcctacttcaagagatgtcaagtcaagttcaagagaagaagagagggaaaaaccgattaccgtgccaggattcggttgattaatcaggacaagaaca

SEQ ID NO: 171251 - DNA, 150 bp, Glycine max
tataggatccaagtatcaaggagatggctgaacagatagcaaaacatccatcattcaaccagatggctgagcagcttcagagaacttttcaaggagctccacaggatgctatgcctagctttgataatcaacagtatttttcaaccatgc

SEQ ID NO: 171252 - DNA, 149 bp, Glycine max
atttggaaggcaagggcttgtgttgtcacaatccaagatagaagtaatggcgaacatagacatcgaagggatcttgaagcagcagcagccttatgatgggcgcgttccgaagacgaagatagtgtgtactttgggcccttcttctcgat

SEQ ID NO: 171253 - DNA, 151 bp, Glycine max
caccagcgtgagaagctgcccagcacgcaaacacgtggagcgtgctgtggacgattccaacatgctcgttgtcacctacgaaggagaacataatcactcgcaaatcgcttctgaggtggcaaatgttatccttgaatcatcttagtcaacc

SEQ ID NO: 171254 - DNA, 275 bp, Glycine max
  unsure (1)..(275): unsure at all n locations
tganttctagaggagttcatgcgcgcagttaagcagaattatggggagaaagttctcgtacagtttgaggattcgccaatcataatgcatttgatctgctggaaaaatacagctcatctcatcttgttttcaacgatgatatacagggtacagcatctgtggtattagcaggattgcttgcatccctgaaattagttggggggaccttagctgaccataccttcttattcctgggtgctggagngnntggactnntanancngnntgtanctctt

SEQ ID NO: 171255 - DNA, 271 bp, Glycine max
cacactctctgctcctagggtttctccttcgagtgagggaaatggctcccaaaccgcctagtacgggtctgtttgttggactgaacaagggtcacgtcgtcaccaagaaggaattgcccccacgcccctcagatcgtaaggggaaaacaagcaagatggtgcactttgtgaggaacctcataagataggttgctggttttgcaccctatgaaaagcgtataactgagttgctgaaggttgggaaggataagagggcactgaaggttgcaaa

SEQ ID NO: 171256 - DNA, 247 bp, Glycine max
catgaacagagaaaataaactgagggagaagcatgttgttgatgttgggagtatggttcctattgttctctgcatttccacttgggatctctgagagatgccacccacaagacaagaaagcgttgctccaactccagaaggacctcggcaacccttatcacatcgtatcctggaacgcaaaggaggattgctgcgagtggttctgctgcgttaagtgtgacgagaaaacaaaccgcgtcgatagcgt

SEQ ID NO: 171257 - DNA, 145 bp, Glycine max
tgaggattacgattatttgttcaaggtggtactgattggggactcaggtgttggaaaatcgaaccttttgtcgaggttcaccaagaacggattcagccttgagtcaaagtccaccattggggttgagtttgccaccagaagcatt

SEQ ID NO: 171258 - DNA, 145 bp, Glycine max
tgcaaaatgagttctacctcaagtctctagttctcgaagacattccaaaccacggaaccattcagttcgtatgcaactcctgggtttacaattcaagaaactacaagactggtcgcattttctttgccaacaatacatgtgttcc

SEQ ID NO: 171259 - DNA, 91 bp, Glycine max
atttgttcaacatgacgggatcccagtagaaaaagaccattagttgattggatattgtatgtatttgcacgaattgggagttgacggcacc

SEQ ID NO: 171260 - DNA, 206 bp, Glycine max
cattcttctccgtcagaagcagagagtaagaatgctctcaggggatatacctccaaatcagaccatttacataaaaaatatcaatgagatggtcaagaaagatgaattgaagagatctctgtattgcttattctctcaatatggaagaattttggatgttattgctctgaagacacccaagcttcggggacaggcgtgggtttgtt

SEQ ID NO: 171261 - DNA, 199 bp, Glycine max
ttgacgctcgccacgcgcgtcttaaacgcgccatcgatctttccatgaagcacgagtacctccctgacaatctgcagtcaatgcaaacaccattcaggggctaccttcaggatatgctgactcttgtgaagagagagagagcagaacgtgaagcattgggaggtttgcccctatatcaacgatccattccttgagtgca

SEQ ID NO: 171262 - DNA, 197 bp, Glycine max
tcaacaacactctctcttctcgctcttggcttttcgctcttcactcactctcattcattcatttccaccgttcatggatccagtaagcgtgtggggtaacacgcccttggcgacggtggatcccgagatccatgacctcatcgagaaggagaagcgccgtcaatgccgcggaatcgagctcatcgcctccgagaact

SEQ ID NO: 171263 - DNA, 194 bp, Glycine max
ttctctgtctctctctctctctctcgatcaatcatggctttgcccaatcagcaaaccgtcgattaccctagtttcaaactcgtcatcgtcggtgacggtggtacaggaaagacaacgttcgtgaaaaggcatcttaccggtgaatttgagaagaaatacgaaccgaccattggagtggaggttcacccattgga

SEQ ID NO: 171264 - DNA, 192 bp, Glycine max
gcattttcagaggaacaatggcgggtagggtttcgacgtgcttcttcttcgtgtttgctctttctctccttcttccttttcagatctccgctgaggaatcatcggagaaagagttcgtactcacattggatcactctaactttcacgacactgtcagcaagcacgatttcatcgtcgtcgagttctacgctc

SEQ ID NO: 171265 - DNA, 199 bp, Glycine max
tcaagttaatagcattccgcaaaatggctgccaccaccttagtctctgaagtcactctcccctcctcctccggccagcggaagatgccgctgatgggcctcggcaccgcgccggaagcaaccagcgcggttaccacaaaagatgctgttcttgaggccatcaagcagggctacaggcactttgatgctgcttctgctta

SEQ ID NO: 171266 - DNA, 193 bp, Glycine max
  unsure (1)..(193): unsure at all n locations
gtttcagctaactctgcttcacttggtaattgagtggttctagtaatccggtgctgctagaggatgggaactagtgaatggcatatcgagcgaagatctagcttcggcactgaatcccccttagcaagatatgcaggaantgtgcctgaaactgggtcactctctattgttgtgcttggcgcttctggggatc

SEQ ID NO: 171267 - DNA, 190 bp, Glycine max
attctcaggaaatgttggaaagaagacggcaaatgccttatcatatgcacatcaatcttgagctcctggagacagtacatcttgtatctgctatgctgctggaagttcctaatatggcagccaatgttcatgatgcaaaacgcaaactcatatctaagactttccgtcgcttgcttgaggtgagtgacag

SEQ ID NO: 171268 - DNA, 192 bp, Glycine max
  unsure (1)..(192): unsure at all n locations
anaaaatcatggncagaaaattcttcgtcggtggcaactggaaatgcaatgggaccactgaggaggtgaagaagattgttactactttaaatgaagctaaagtccctggagaagatgttgtagaagttgttgtgagccctccttttgtgttccttgccttttgtaaaaagtttgctggcgccctgatttcca

SEQ ID NO: 171269 - DNA, 134 bp, Glycine max
acgtgaacatgctctgctttcattcacccttggtgtgaaacagatgatttgctgctgtaacaaaatggatgctactacacccaagtattccaaggccaggtatgatgaaattgtgaaggaagtctcttcctact

SEQ ID NO: 171270 - DNA, 195 bp, Glycine max
atcgagcgctcgagccgctcgagccgttcttgtcttgcggctagggttttagcgcagttgcacttgagatttaaggaagatgggtaaggaaaaggttcacatcagtattgtggtcattggccatgtcgactctgggaaatccactaccactggtcacctgatttacaagcttggaggcattgacaagcgtgttat

SEQ ID NO: 171271 - DNA, 192 bp, Glycine max
ttcaaatacttttcaaaattgagcaaaccgatgttccgctttcatattatactggtattcttggtatgccgggaatgactgcatatgcaggtttctttgaagtaggctctcccaagaaaggagagaatgtttttgtttcagctgcctctggtgctgttggtcaacttgttggccaatttgctaaattgactg

SEQ ID NO: 171272 - DNA, 189 bp, Glycine max
ctttgctctctgtgaggcttcaatttctaattagggttacgcttagagtaaccaataaccatgggagtcttcacctttgtcgtccgcaaatccggcagcgaatggagcgccaagcaacattccggcgacatcgaggcctccgccgattccaccttcgatctccaacggaagctcgtgcaagccgctctc

SEQ ID NO: 171273 - DNA, 187 bp, Glycine max
gtaattgctagtatattatcggattcattaaaaagggagagggtttatcactctgtgatgcttcagatgttcttcgagaagcattttctcaaacagaagcacacatgaataactattatgagggatgtacagcaacagtgcttctggtgtggactgatggtgatgaaaatttctttgcacaatgtgc

SEQ ID NO: 171274 - DNA, 189 bp, Glycine max
cacagacaaggatatagcagcaagagttattgccaaagagattagtcttgaagagacaccagtttccaaagtcatgactaggaatccggtatttgttgcttctgaaactcttgctgcagaagccctccaaaagatggtgcaagggaaattcagacatttacctgtggtggagaatggagaagttttggc

SEQ ID NO: 171275 - DNA, 193 bp, Glycine max
tcgagttgtaacctctctcttcaaccctaacttagggtttatgttctaaaacccttttcagtgtctcttttagaaaaggttgattggaggagataaaaatgctcgtgttgtttgaaacccctgcgggttttgccctgtttaaagtgctggatgaaggcaagctttctaaagttgaggacttgtggaagaactt

SEQ ID NO: 171276 - DNA, 191 bp, Glycine max
tcttcgccaatcgcctgcgtctctctctgaattgactagcataaatggctggtcctaggattgcccatgctaccttgaaaggtccgagtgtggttaaggagatcataattggaataacacttggcttagctgctggtggtgtgtggaagatgcaccactggaatgaacagaggaaaaccaggaccttctac

SEQ ID NO: 171277 - DNA, 193 bp, Glycine max
tccagatgtgcccttccggtcgcaccctcctcccttcctccgtctccgatttccgaccggcattcgacgtcctcgatgccgaccgcgacggcaaaatcagccgcgacgacctccgcgccttctacgccggagtcggcggcggaggagatgacgtgatcggggcaatgatgacagtggctgacaccaataagga

SEQ ID NO: 171278 - DNA, 190 bp, Glycine max
agtaaaatcaaaatgtgggcaagcgccgcagaaggtggtgctccggaggtgactcaggaaacttccatgggttgcttcacctttgagctgtactacaagcatgcgccgaggacttgtaggaacttcattgaactgtctcgccgaggttactacgacaacgttaaattccataggatcattaaggacttca

SEQ ID NO: 171279 - DNA, 192 bp, Glycine max
tagccattcgaattcccagtctaaaaccctaataccttcaaagaacgaagtagtggatcagtgatggcacctaaggcagagaagaagccagcggagaagaagcccgcggaggagaagaagtcgacggtgggagacaaggctccggcggagaagaagccgaagccggaaagaagcttccgaaggagggaggag

SEQ ID NO: 171280 - DNA, 193 bp, Glycine max
atgaacggaagatcaccgacgcaccttccctgaggcttctcttgtctgtcgcgagtgaccatggtgagggttagtgtgctgaacgatgctctgaagagcatgtacaatgctgagaaaaggggaaagcgccaagtcatgattcggccatcctccaaagtcattatcaaattccttttggtgatgcagaagcacg

SEQ ID NO: 171281 - DNA, 187 bp, Glycine max
cttcgccacaagtccctgccaacatgggtatgtccagagattctatgcacaagatgcgtgccactggtggcaagaagaaggcatggaggaagaagagaaagtatgagcttggtcgccagcctgctgacactaagctgtcaagcaacaagacagtcaggaggatccgggttagaggtggaaatgtgaa

SEQ ID NO: 171282 - DNA, 188 bp, Glycine max
ctgtactttcactagccgcagcagcctcaggaggagaataaggatgtctcacaggaagttcgagcacccaaggcacgggtcactgggatttctccccaggaagcgtgctgctcgtcacaggggaaaagtgaaggcattccccaaggatgacccattcaaggcacccaagctcactgcattcttgggtt

SEQ ID NO: 171283 - DNA, 190 bp, Glycine max
gtgacacgtatcttcatcaataatcgcagaagcagtttccggtgcatctcatcgtcttccaaaatgaacgacgcagatgtctcgaagcaaatccagcagatggtgcgtttcatccgccaggaagctgaggagaaagccaacgagatctctgtatctgccgaagaggaattcaatatcgagaagcagcagt

SEQ ID NO: 171284 - DNA, 190 bp, Glycine max
ttgctagccacaatgcagatattcgtgaagagcctaacggggaagacgataaccctagaggtagagtcttcggacacgatcgacaatgtgaaggcgaagatccaggacaaggagggcatcccgccggatcagcagcgcctgatcttcgccggaaagcagctggaggacgggcgcacccttgccgactaca

SEQ ID NO: 171285 - DNA, 190 bp, Glycine max
caatttaccagctatacttgttccttttgaaggttagaagtgctacaatacaaacaatggcagctactcaggaagatgtgaagcttttgggtattgtgggaagcccatttgtgtgcagggtccagattgcccttaagttgaagggagttgaatacagatttttggaagaaaatttgggcaacaagagtga

SEQ ID NO: 171286 - DNA, 189 bp, Glycine max
ataagtattattattcttccatttccattaaaaagaaaatatcataaatgggtattttcacattcgaggacgaaatcacctcccctgtggctcctgctactctttacaaagctctagttacagatgccgacaacatcatcccaaaggctcttgattccttcaagagtgttgaaaacgttgagggaaatg

SEQ ID NO: 171287 - DNA, 188 bp, Glycine max
gtactcaagaatcgtggagaagcttctggaagtggaccccaccggggcaagtggtggccatagggaacatgatggagaagaagatcacgatgccggcgcaccttatgtacgatggggatgaccccaggctattcgagcactactccgctgtggcgcacgcataggcgtgtacaccgccaacgactacg

SEQ ID NO: 171288 - DNA, 195 bp, Glycine max
tcagcatatttgttgcaaacagaagcaagcttcttagacttttgggtgacttaaaaaccgataaagaggatgaacagttcgaagctgataaagctcaagttataaaagaaattgcggctcttgaacctagggacctcgcttgagcttcagtttgtgtcgagtaacaagttgcattgtggcattttaccttattta

SEQ ID NO: 171289 - DNA, 195 bp, Glycine max
actcaacattttacactcttttcttcttctcgttgttgcttcgctgttgaatcatggatcagaaggtcgatttcagcgctccccattccatgggaaccactatcatcggcgttacttacaacggcggtgtcgttctcggagccgactctcgaaccagcaccggagtgtatgttgccaaccgagcatcggacaaaa

SEQ ID NO: 171290 - DNA, 194 bp, Glycine max
gtttattggaggtgtttcatattctactgacgagcaaagcttgagggaagctttttcaaaatatggtgaagttgttgatgctcggataattatggatcgtgaaactggtagatccagaggatttggctttattacatacacttcggttgaggaggcatcaagtgccattcaggccttggatggtcaggatcttc

SEQ ID NO: 171291 - DNA, 197 bp, Glycine max
caaatcttaaaaatattcagtgaagatcaacctcaatggcatctcttggcgtgcgaccagttcttccccctccattaacttccatctccgacccacctcctcttttcgatggcaccaccaggttgtacatcagttattcttgcccctatgcacaacgtgtgtggatcgctaggaactacaaggggctacaagataag

SEQ ID NO: 171292 - DNA, 204 bp, Glycine max
tcagctgtctgctgttagatctgtacccgcctagccattgatttggaaaagtccaacttcaaggatgagtaagcttcagagtgatgctctaagagaagctatctcaggaatcatggctgattccaaggaaaagaacaggaaatttgtggagaccattgaactccaaattgggttgaaaaattatgatccccagaaggacaagcg

SEQ ID NO: 171293 - DNA, 198 bp, Glycine max
caacactctctcttctcgctcttggcttttcgctcttcactcactctcattcattcatttccaccgttcatggatccagtaagcgtgtggggtaacacgcccttggcgacggtggatcccgagatccatgacctcatcgagaaggagaagcgccgtcaatgccgcggaatcgagctcatcgcctccgagaacttcacc

SEQ ID NO: 171294 - DNA, 196 bp, Glycine max
tatttgacaaggcggcttcaaagtttcaggaggtggctgctttggctttcttcaactggggtaatgttcacatgtgcgcactatggaagcggattcccctggatgagtccgctgggcaagtggtagtggcagagcagcttcaagtggcttatgaatgggtcaaggaaaagtattctttagcaagagagaagtatgt

SEQ ID NO: 171295 - DNA, 193 bp, Glycine max
gtgcactgtgttgccaactttgagaagcgctggactgatatgcctgttgtggactcaccagctgccagcccaaatggtggaaacccctttaaggatttctcttatgtgaggcctgcagcctcttttcttcaaaggaataaccctgcttactagccagcttgaaatggcgttggcttaagatgccaacatgaaa

SEQ ID NO: 171296 - DNA, 195 bp, Glycine max
ttttacttgaattttcttcatccttctctgttctcctagaacttgattacttgaacattccctatgacagatgaggtggttcttctggatttctggccaagtccatttgggatgagggtcaggattgcacttgctgaaaagggtatcgaatatgagtacaaagaagaggacttgaggaacaagagtcctcttctc

SEQ ID NO: 171297 - DNA, 196 bp, Glycine max
atatctccatttccatttcctctctctcagtttccaagaatcttaagctatgggaaagtcttacccaaccgtgagcgctgattaccagaaggccgttgagaaggcgaagaagaagctcagaggcttcatcgctgagaagagatgcgctcctctaatgctccgtttggcatggcactctgctggaacttacgacgtg

SEQ ID NO: 171298 - DNA, 192 bp, Glycine max
tttcccctagattcagccacagtttcggaggagaagaaaatagtcgttcgagatggcccgtacgaagcaaactgctcgtaagtccacaggaggaaaggctcctaggaagcagcttgcaaccaaggctgcacgtagtctgcaccaactactggtggtgtgaagaagccacatcgttaccgtcctggtaccgtt

SEQ ID NO: 171299 - DNA, 195 bp, Glycine max
gggtgaggtagaacccttccactgtggtgactctgcgatgggtgcctacaagtatgtttcagagctatggcgcaagaagcagtctgatgtcatgcgcttcttgcagcgggtgaggtgctgggagtataggcagcaaccttccattgttcgtttgacaaggtctacccgccctgacaaggctcgtcgcttgggctt

SEQ ID NO: 171300 - DNA, 200 bp, Glycine max
tcaaagctgaagtgtctgcttcttccgattccggcacgcccccatcaccatggtgaacgttccgaaaacaaagaagacatactgcaagagtaaggtgtgcaggaagcacaccctgcacaaggttacccaatacaagacgggtaaagatagcattgctgcccaaggaaaacgccgttacgatcgcaaacaatctggttatg

SEQ ID NO: 171301 - DNA, 199 bp, Glycine max
tagggtttgccgattgagagagaaagagaaatgggagaacgaaaaggaatcccaatggctttggggctcttggcgatgatcctcttcttcattgcttcctcttcctctcacctcgttcgcgcttccgatgacgccgacgacgcgatcttctacgagtcgttcgacgaggattttgatggacggtggattgtatccgaca

SEQ ID NO: 171302 - DNA, 198 bp, Glycine max
ggggacgcagtgctatcgagtttttttttcttaatgccatggctgctctgcaatacttggaatcgctgcgcaacgcgcatcctgagctctccgattggtacaattcgctggcggatctataccagaacaagctctggcaccagcttaccctcaagcttgagcagttcgtggctctcgccgtcttccaggccggtgatg

SEQ ID NO: 171303 - DNA, 195 bp, Glycine max
atttcctctcaaaccctaaccctaaccctaaccctccccgtcacaaaagaaaaccctctttgtccgatcatcgtcgtcaagatgttggaactccgtctcgtgcaaggctccctcctgaagaaggttttggaatccgtcaaggagctcgtgaacgacgcgaacttcgactgctcctccaccgggttctccctccag

SEQ ID NO: 171304 - DNA, 192 bp, Glycine max
taggactcaaacatcgggtttttgaggtctcattggctgatctccaaggggatgaagaccactccttcaagaagattcgtttgagagctgaggacgttcaagggaagaatgttctgacaaacttctggggaatggatttcacaactgacaagttgaggtctttggtgcgaaaatggcaaactttaattgaag

SEQ ID NO: 171305 - DNA, 197 bp, Glycine max
gcattttcagaggaacaatggcgggtagggtttcgacgtgcttcttcttcgtgtttgctctttctctccttcttccttttcagatctccgctgaggaatcatcggagaaagagttcgtactcacattggatcactctaactttcacgacactgtcagcaagcacgatttcatcgtcgtcgagttctacgctccatgg

SEQ ID NO: 171306 - DNA, 195 bp, Glycine max
gttgagaccaagacacactcgttcatatatctctctgctcttctcttctcttctacctctcaagtttttgaagtataaagatggcagagacattcctattcacctcggagtcagtgaacgagggacaccctgataagctctgcgaccaaatctccgatgctgtcctcgacgcttgcctcgaacaggacccagaca

SEQ ID NO: 171307 - DNA, 201 bp, Glycine max
tgtttggggaaacttgcatttgacattgattttcatccctcagataatcttgttgccgccggtctaattaccggccaccttcacctataccgttatagccctcatactgtccctgtgaggctgttggaagttcatgctcacactgagtcttgcagggctgctcgattcatcaacggtggacgtgcactcttaacgggttct

SEQ ID NO: 171308 - DNA, 190 bp, Glycine max
ggttaacactcttcttcatcgtcgtcgcaatgggacgtgtgatccgtgcgcagcgtaagggagcaggctcggtcttcaagtcccacacgcaccaccgcaagggccctgcacgcttccggagcctggacttcggggagcgcaacggctacctcaagggcgtggtcaccgacgtcatccatgaccctggccg

SEQ ID NO: 171309 - DNA, 191 bp, Glycine max
ctgtagattcgttcccatggttcgatccttcccagtaaaacgcggcgtgttcgaattctgatcgcttttacgcgagaaagggggaccaccctctaagcctaagtattcctcaatgaccgatagcgtacaagtaccgtgagggaaaggtgaaaagaaccctatttagggagtgcaatagagaacctgagatc

SEQ ID NO: 171310 - DNA, 193 bp, Glycine max
cttccatttccattaaaaagaaaatatcataaatgggtattatcacattcgaggacgaaatcacctcccctgtggctcctgctactctttacaaagctctagttacagatgccgacaacatcatcccaaaggctcttgattccttcaagagtgttgaaaacgttgagggaaatggtggccctggaacaatcaa

SEQ ID NO: 171311 - DNA, 101 bp, Glycine max
actagctctgtgcattcttctctcgctctctgccttccatcacactcggcatttcctttcccaagatagtagaagatggcagacactgaggatattcaacc

SEQ ID NO: 171312 - DNA, 193 bp, Glycine max
tgcaggcagtgtcatctctcctttgacgacaagatgagcatcccaattccccatcggcagttattcatagacggagactggaaagtccccgtcctcaagaatcggattcccatcatcaacccttccacccaacacatcatctgggatatcccagcagctactaaggaagacgttgatctcgctgtcgctgccg

SEQ ID NO: 171313 - DNA, 193 bp, Glycine max
gtttcgttccgtttcaatggggagcgaagagcagaacggcgaattctacctgcgttactacgtcggtcacaagggcaagtttggtcacgagttcctggagttcgagttccgcccagacggcaagctccgctacgccaacaactccaactacaaaaacgacaccatcatccgcaaggaggtttacctaaccccc

SEQ ID NO: 171314 - DNA, 189 bp, Glycine max
  unsure (1)..(189): unsure at all n locations
aggtaggttaacactcttcttcatcgtcgtcgcaatgggacgtgtgatccgtgcgcacgtnaagggagcaggctcggtcttcaagtcccacacgcaccaccgcaagggccctgcacgcttccggagcctggacttcggggagcgcaacggctacctcaagggcgtggtcaccgacgtcatccatgaccc

SEQ ID NO: 171315 - DNA, 188 bp, Glycine max
ctggggggggtatcactatgcaatcgacgccgggaagctcaggatacttggatttgtatccagagcggaagatgtcctttttcaaaaatccttacattctcggactggctgctgtcgccggcatcggtggtctcctcttcggctacgacactggtgtgatatcaggggctcttttatacattaaggat

SEQ ID NO: 171316 - DNA, 191 bp, Glycine max
tagggtttgccgattgagagagaaagagaaatgggagaacgaaaaggaatcccaatggctttggggctcttggcgatgatcctcttcttcattgcttcctcttcctctcacctcgttcgcgcttccgatgacgccgacgacgcgatcttctacgagtcgttcgacgaggattttgatggacggtggattgt

SEQ ID NO: 171317 - DNA, 188 bp, Glycine max
ctctctttcacagcacactcctcccagggtttctccaccaagagggaaatggctcccaaaccgcctagtacgggtctgtttgttggactgaacaagggacatgtcgtcaccaagaaggaattgcccccacgcccctcggatcgtaaggggaaaacaagcaagagggtgcactttgtgaggaacctcat

SEQ ID NO: 171318 - DNA, 187 bp, Glycine max
gtttgtcattagcacttcttcttttcacactgccgctgcaacaatggcttcagagaagaaactttcgaacccaatgagggagataaaagtgcagaagctcgttctcaatatctctgttggcgagagtggagatcgtctcaccagagccgccaaggtgttggaacaacttagtggccaaaccccagtg

SEQ ID NO: 171319 - DNA, 187 bp, Glycine max
gtgggattcaatgttaagaatgttgctgttaaggatttgaagcgtggttatgttgcctcaaactcaaaggatgaccctgcaaaggaggctgctaacttcacagcccaagtcatcatcatgaaccacctggtcagattggaaatggctatgcccctgtcctcgactgccacacttctcacattgctgt

SEQ ID NO: 171320 - DNA, 193 bp, Glycine max
ctttctctctcccttagtcaaagggactcattgttcttctccacatgttatttagaaaagcaacatggtgaagatttgctgcattggtgctggatatgtggggggtcctactatggcagtcattgcacttaagtgcccatccattgaagttgctgttgttgatatctctaaatcccgcattgcagcctggaac

SEQ ID NO: 171321 - DNA, 197 bp, Glycine max
ccatctgccacaagacgttttcgacaggacaggccttgggaggacacaaacgttgtcactacgaaggcggtaacagcgccgtaaccgcctctgagggagtggggtccactcacacaggaagccaccgcgatttcgatctcaacctcccggcttttccggacttctcagcaaggttcttcgtcgatgacgaggttacc

SEQ ID NO: 171322 - DNA, 193 bp, Glycine max
cgccacttctgaatctattgaatcaacaatcatgtcggacgaagagcaccatttcgagtccaaggccgacgccggagcctccaaaacctaccctcagcaagccggtaccatccgcaagaacggctacatcgtcatcaaaggccgcccctgcaaggttgtggaagtttcgacttccaaaactggaaagcacggt

SEQ ID NO: 171323 - DNA, 188 bp, Glycine max
cacacatagtagctattatactctctagagtaattgcggaatctgctagaattttctaataatggcgaaagacgttgagcaggtcacagagcaaggtgaatactccgcgaaggactaccatgaccctctccggcaccgttgatcgacccagatgagctcacaaagtggtccttgtacagagccgccat

SEQ ID NO: 171324 - DNA, 191 bp, Glycine max
gtaagggattatggacaagattaaggagaagcttcctggaggacacagtgacaagtagatgcatcgtgcatcatgcatgcatgcatatatataatattgttgtctttgaataaatttgctgcatatgtacttacgtacgtacagtgtcttgtcatgtatgtggaggatatagtatatggttatagtttatg

SEQ ID NO: 171325 - DNA, 193 bp, Glycine max
gctgaggattccgaacgagtgaccttcttcgtttctcgcaaagtttaagtaatcatgggtaaggaaaaggttcacatcaacattgtcgtcattggacatgccgactctgggaagtcaactaccactggtcattgatctacaagcttggaggtattgacaagcgtgtgattgagaggttcgagaaggaggctgc

SEQ ID NO: 171326 - DNA, 285 bp, Glycine max
ggcaaagatagtggcagagctccaagctgtgaagcacaacagtggcaagtcctacaatcagttagcggaggagactggactcaccaacgtctatgttgctcagcttctcaggagacaggctcagctcaatccccaaactgcccctctacttcgggcagcgctgcccgacctgccccaagaccttgtttctgagatgatgagaccccctttgaggtcttatgaccctaatctcatccaagaccccactgtctataggttgaatgaagctgttatgcattttgggga

SEQ ID NO: 171327 - DNA, 285 bp, Glycine max
attatcctaagtctttgggaatagtgctgcaatggcttcaagtcaggaggaggtgacccttttgggagctactggaagcccatttgtgtgcagggttcatattgccctcaagttgaagggagttcaatacaaatatgtcgaagaaaatttgaggaacaagagtgaactgcttctcaaatccaacccagttcacaagaaggttccagtgtttattcacaatgagaagcccatagcagagtctcttgtgattgttgaatacattgatgagacatggaagaacaaccc

SEQ ID NO: 171328 - DNA, 284 bp, Glycine max
cacccctcctctctctcttttgctcatttcctttgactcctcattatcaaagaaaatggctctcattgggttgctcttgatgggttttctcacaatgttctcctctgctcatgcctatggtggagggtggactaatgctcatgccaccttctatggagggagtgatgcatctgggacaatgggtggggcatgtgggtatgggaatctctacagccaagggtatggaacaaacactgctgctctaagcactgcactgttcaacaatggcttgagctgtggctctt

SEQ ID NO: 171329 - DNA, 283 bp, Glycine max
attcataatgggtgttttcacatttgaggatgaaaccacctccccggtggctcctgctaccctttacaaagctctagttacagatgccgacaacgtcatcccaaaggctgttgatgccttcaggagtgttgaaaaccttgaggggaacggtggccctggaaccatcaagaagatcactttcgttgaggatggagaaagcaagtttgtgttgcacaaaatagaatcagttgatgaggcaaacttgggatacagctatagcgtagttggtggagttgggttgcca

SEQ ID NO: 171330 - DNA, 285 bp, Glycine max
attccattctctctgtgtatttccctacctctcccttcaagatgcagatcttcgtcaagactctcaccggcaagaccatcacccttgaggtggaaagctctgacaccatcgacaacgtcaaggccaagatccaggacaaggaaggaatccccccggaccagcaacgtctcattttcgccggaaagcaacttgaggacggccgtacccttgctgactacaacattcagaaggagagtactcttcacctcgtcctccgtctccgtggtggcatgcagatcttcgtta

SEQ ID NO: 171331 - DNA, 277 bp, Glycine max
aagcgaactaatgttatacccattattgaagatgctagacatccagctaagtacaggatgttggttggaatggttgatgtcatattttctgatgttgctcagcctgatcaggcaaggattttggggctgaatgcttcatattatctaaaagcagggggtcattttgttatttcaatcaaggctaactgcatagactccacagtcccggctgaggcagtgtttgaaagcgaagtgaacaagttaaaggctgatcaattcaaaccattcgagcaagtca

SEQ ID NO: 171332 - DNA, 283 bp, Glycine max
agttaacaagggcgacgcaccggcattgccagagactcttaaaaattacaacaagctgttgtctcttggcttcaagattgtattcttgtcaggaagatatcttgacaaaatggccgtaacagaagcaaacctaaagaaggctggcttccacacatgggagcagttaattctcaaggatccacatcttatcactccaaatgcactttcatacaaatcagcaatgagagagaatctgttgaggcagggatacagaattgttggaatcattggagaccaatggagc

SEQ ID NO: 171333 - DNA, 284 bp, Glycine max
actcgagccgaatcggctcgaggacgatccaagtgatagacactcactcgcgatggaacgtgtagctgaatccgagcgaacactgtacccatacgtgactggatcctctgtagtcgctatcaaatacaaagatgggattctaatggccgctgacatgggaggttcgtatggatctaccctgcggtacaagagtgttgagcgtatcaagcctattggaaagcattctcttcttggtgctagcggggagataagtgactttcaggagattctgcgttaccttgatg

SEQ ID NO: 171334 - DNA, 285 bp, Glycine max
actcgagccgaatcggctcgaggacgatccaagtgatagacactcactcgcgatggaacgtgtagctgaatccgagcgaactctgtacccatacgtgactggatcctctgtagtcgctatcaaatacaaagatgggattctaatggccgctgacatgggaggttcgtatggatctaccctgcggtacaagagtgttgagcgtatcaagcctattggaaagcattctcttcttggtgctagcggggagataagtgactttcaggagattctgcgttaccttgatga

SEQ ID NO: 171335 - DNA, 286 bp, Glycine max
accgttgatgtgctttctaagatctttgacgttgctcgcttagaagacgaagtcgatttcctcactgctcaatccgagcaagagcgccaaagaaggtcaaatatcaaattctgggatgtttttagatccaaagaaatcagactggcattcctcgtcggtgccgtacttctggcttttcagcagttcacgggtattaacacagtcatgtactacagcccgacaattgtccaaatggcagggttccatgctaatgaattggctcttcttctatcccttatagttgccg

SEQ ID NO: 171336 - DNA, 283 bp, Glycine max
cccgattcaagaagaaccgcaagaagcgcggccacgtgagcgccggtcatggccgtatcggaaagcaccgtaagcaccccggcggccggggaaacgccggtggcatgcatcaccacaggatcctgttcgacaagtaccatccgggcttcttcggtaaggtgggaatgaggtacttccataagcttcgcaataaattctactcccccatcgtcaacgtcgaaaagctatggtctctcataccccaagacgcgaaggaaaaagccctaaaatcgaaggacactgc

SEQ ID NO: 171337 - DNA, 285 bp, Glycine max
ctttgttgcttccaactgatgttgtcatagcagacaagtttgctgctgatgctaacagcaagactgtgccggcatcaagcatcccagatgggtggatggggttggatattggtcctgattccatcaagacatttggtgaagcattggatacgactcagaccattatttggaatggaccaatgggtgtttttgagtttgataagtttgccacaggaacagaggctatagccaagaaactggcagagctgagtgggaagggagtgacaaccatcattggaggaggtg

SEQ ID NO: 171338 - DNA, 280 bp, Glycine max
cttatactcaccggcgagtccatctcgcgccacgatcgtagccgatccggccaccgcctttggttccctcactttctcgtccttcttcttctcagaaatatgccttctcaaaaagttgaaacgggtcatcaagacacggtccatgatgttgcaatggattactatggtaagaggctggccacggcttcatcagatcacacaattaagataattggggtgagtaatacggcctctcagcatctcgcaacattgactggtcaccaaggacctgtttggcaag

SEQ ID NO: 171339 - DNA, 280 bp, Glycine max
atctacacggctctgcggattcatccttttcttctgcagagcaaagaaccaaccaacacttgtttcttccgccatggccgatcaacctgaatcatcggacgctaagggcaccaagagagatttcagcaccgcgattttggagcgtaagaaggctctgaatcggcttgtggttgatgaggccgtcaacgatgacaactctgtcgtcgctcttcatcctgataccatggagaaacttcaactctttcgtggtgacaccatcttgatcaagggaaagaaaagg

SEQ ID NO: 171340 - DNA, 279 bp, Glycine max
gtccaagcagcctccaattcgtgccactctcttcaaaatggccgttaccttctcaaatctccacacagaatcaggtctcaagtccctcgacgacttcctctctgggaaggtctacgtttctggggatcagttcacaaaggacgacatcaaagtgtatggtgctgttttggagaagccaggtgactcttttcccaatgctgccaagtggtacgaggttgtctcatctcagcttgctgcaagcttccccggcaatgctcaaggggtgagattcagtggcaa

SEQ ID NO: 171341 - DNA, 284 bp, Glycine max
aagaagggttggttggtcccattccataggaagagatcaaagagaagagaaaagatgtttgagccgcagcagctatacactcgagcgaagaccgaggaattcgacctcgaatcaggggaaaccctctacccagggctgagcgtcggcgagaaccagctccgatggggcttcatccgcaaggtctacggcatcctctccgcccagatcgtcctcaccaccctcgtctctgtcaccaccgttttctatactccaatcaatgacctcctcaagggcaattccaccct

SEQ ID NO: 171342 - DNA, 282 bp, Glycine max
aaagttttggccgggaaactgaagccgaacttgggtcgattcactaatccccctgattggcaggaaattttgacctattttcgaggatctgaactgcagaattattttactcggattctagaggatgatttgaaggctatcatcaagcctcagtatgttgaccatattccaaaagctgtgcaagggaatgtggggcaggtgctagaccagaaagatgagagagagaagaaggaggagctttgtgctgatcttgagcttaatcaagttatagatcgtaatgtt

SEQ ID NO: 171343 - DNA, 283 bp, Glycine max
ccctgctgcataggaagaaaccctagcctctcaccctccctgcgacacgatgcagatcttcgtgaaaaccctaacgggtaagacgatcacccttgaggtggagtcttctgacaccatcgacaacgtgaaggccaagatccaggacaaggaaggcatccctccggaccagcagcgcctcatcttcgccggaaagcagctggaggacggccgcaccctcgccgactacaacatccagaaggagtccaccctccacctcgtcctccgtctccgcggtggcgccaag

SEQ ID NO: 171344 - DNA, 276 bp, Glycine max
  unsure (1)..(276): unsure at all n locations
caccatcgcgcccaagagagagagagagagagagaggcgcgaaaatgagcggacganaggggaagaagaagggagcgagctttgtgatcgattgcgcgaaccggtggaggataaaattatggacattgcttctctggagaagttccttcaggagaggattaaggttggcggcaaggccggtgcactcggcgattccattactgtcactagggacaagagcaagatcaccgtcacctccgacagcaacttctctaaacggtatctgaaatatttgac

SEQ ID NO: 171345 - DNA, 278 bp, Glycine max
tgagagcaacagtcagaaggtccatcctcaaccaatagaagaggccatgaatcagaatccagaagcaatggaaaccctaatatctaaagtttttatgaatatctcttccttgaagtcagcttatattgagcttcaagctgctcatactccctacgaccctgataaaattcacactgctgataaacttgttattagtgagctgaaaaatctgtctgaactcaagcatttctacagggagaacaacccaaaaccagtgtgtgtttctccccaagactcac

SEQ ID NO: 171346 - DNA, 277 bp, Glycine max
cctagctctgtcgttccgtcgttgacgatggcgtttcgggtgcgaaccctgacctccgctctctctttcttctctctctcttgtccatcgcttccgccaatgtcttcttcgaagagcgtttcgatgacgggtgggaaaatcgatgggttaaatcagattggaaaaaagatgagaacgtggctggggagtggaaccacacctctggtcaatggaatggagacgctaatgacaaaggtattcaaaccagtgaggattacagattctatgctatttcagc

SEQ ID NO: 171347 - DNA, 282 bp, Glycine max
ttctgggttgcaaaaatgaattcggacacgacttcctattggtgctacagctgcacgcgcttcgttcacatacaagaacagaacgacgtcgtttgcccgcgctgccacggcggcttcgtcgaaaaggtcaccgccccccaatcgtcaaggcaaggcttccgccgccgacgccgcaacgccgggaaccactcggcgttcaacccggtgatcgtgctccgcggaccgggagaggacgaggagagcagctttgagttatactacgacggcttcgacggcgagggg

SEQ ID NO: 171348 - DNA, 279 bp, Glycine max
tcctcattaagccgccactttctctctctttccttttcgtcttctttttcttcttcgttgggtttgttgccacttagtaagaaagagggtgtgaagagagtggggagaagatttggtgttgtggccatggcggagtctaagagtactgtgcttgttacgggagcgggtggtcgcacaggacaaatagtttacaaaaaattaagagagaggccaaaccaatatgtggctagaggtctggttagaacagatgaaagcaaacagaacattggtgctgcagat

SEQ ID NO: 171349 - DNA, 229 bp, Glycine max
gaaggttgctgagcaaagaggagaaagttgggaagagaagctttcacaacttaagaagaacaaacaatggcatgttgaagtctattgagattctctagtgcaggatttgcagagtagtagtccccttctgtctctgaaaggaaacaaaacaaaaaagaacattttgcgtttggtgcatttagtcaataaaattcattaagcagctgagtaactgtagctgttctgcatt

SEQ ID NO: 171350 - DNA, 280 bp, Glycine max
ggccagccgacaattacgggaggttatgtgggtccctccacttttatatacacaacaacaacacacatactagtcatttgttgttgttgtgtttgtgtttgtgttctctcctttcattaacgttgtgttgggtttgctagtgtacttggttttcattatggcgtcttcttcagcctctcgtgagggacactacagaggagttaggaagcgaccatggggacgctacgctgcagaaataagagatccgtggaagaagacacgtgtctggctgggcacattc

SEQ ID NO: 171351 - DNA, 149 bp, Glycine max
acgactgctcgacagaggcattctcattactgaagccactggcgtctctgacacggctcaaggctatccgcaaacccctggcatatggactaaagaccatgttcaagcttggaaacccattgtcgatgccgtcaacgccaaaggcggtg

SEQ ID NO: 171352 - DNA, 274 bp, Glycine max
tttgggagttaggttctgcacgctctgcttccagcgagtgttctttcttcgtttcaacaccttaatttgcacacgctgcttcttcagcttgagaaatggcacaagaaacctttctattcacatctgaatctgtaaacgagggtcaccccgacaagctgtgcgaccagatctctgatgcagtgctcgatgcgtgccttgaacaggaccctgacagcaaggttgcctgtgagacatgcaccaagaccaacatggtcatggtctttggagagatcac

SEQ ID NO: 171353 - DNA, 276 bp, Glycine max
ctcgcactctctctacgcacgcctcaacatcccttctctgctccattcattatgtctccgtcgttggatcttccccccaagggtggcttcagttttgatctatgccgaagaaacgcaatgcttcaaaacaagggcctcaaagccccaacctttctcaaaactggcaccactattgtcggtttagttttccaggatggtgtcattcttggggctgatactagggcaactgaaggacctatagtggctgataaaaactgtgagaaaattcattatatg

SEQ ID NO: 171354 - DNA, 277 bp, Glycine max
  unsure (1)..(277): unsure at all n locations
cgttgtcttctcncttcgtcaaaaccaaccaaacccctccccaattctcaagccaaccatgtcttccttcaanagcnagtaccaagatgaactcattgccaatgctgcttacattggcaccccagggaagggtatccttgctgctgatgagtcaactggtacaattggcaagcgattggccagcattaatgtcgagaatgttgaagcaaataggcgtgctcttcgtgaactcctattcaccacacctggtgcttttgantgcctcagtggtgtgatc

SEQ ID NO: 171355 - DNA, 280 bp, Glycine max
gctgaagtgtctgcttcttccgattccggcacgcccccatcaccatggtgaacgttccgaaaacaaagaagacatactgcaagagtaaggagtgcaggaagcacaccctgcacaaggttacccaatacaagaagggtaaagatagcattgctgcccaaggaaaacgccgttacgatcgcaaacaatctagttatggcggacaaactaagcccgtcttccacaagaaggctaagaccaccaagaagattgttctgaggttgcaatgccagggttgcaagca

SEQ ID NO: 171356 - DNA, 278 bp, Glycine max
caacattttactgggtatataagtggagagtgtaactgaaattatgtggaggtgcatcaatggaagaattgccagaagatttttatccacttcttctgccagtgcccgtggttggtgggaccatgtaaggccagcaccgaaggaccccattgttcgtgtgaacgaggcatttctagctgacccttttccccataagatcaatcttggaataggtacttataagggtgatgatggcaaagctttcattcctcaaagcgttcgtgaggcagaaacaaaga

SEQ ID NO: 171357 - DNA, 277 bp, Glycine max
gaagagtgatgtatacagcttcggggttgttctgctggaaattatgtctggcaaacgagcacttgacagcaacaggccaagtggggagcacaatttaattgaatgggccaaaccttacctcagcagcaagcgcaggatcttccaagtcatggatgctcgcatagaaggccaatacatgttgcgcgaacaatgaaagtagccactcttgccattcaatgcctatctgtggaaccaagatttagaccaaagatggatgaagtggtgagagcattggagg

SEQ ID NO: 171358 - DNA, 277 bp, Glycine max
cgaagaacgaacgagagtgcagcgccacggcaatgggaaggagcactttggctttggttctcgcgattctgatctctttgcagggaaccccccacgttagatccgatgcctccgatcatcgttacaaggacggagactccgttcctctttacgccaacaaagtcggtccctttcacaaccccagtgaaacgtatcggtactttgacctgccattctgtgtaacaggtcatgagaaagataagactgaagccctcggtgaggtgttaaatggcgatcg

SEQ ID NO: 171359 - DNA, 274 bp, Glycine max
tcttctttcactttccatttccatttccattttttctggttcactttctcgatggcctccgagaaccccaccgccgacgacgccgtcaacggcttcaatcggccggaaatgttctcggaaaacctcgccggcaccgtcgacgcctacgaccgccacgtgttcctctgctacaagagtcacctgtcctggcccccgcgcatcgaggcctccgacgccgatcccttccccaagcgcgtcgccgacaccttcaaagcccgcaagaacgacttgcccc

SEQ ID NO: 171360 - DNA, 272 bp, Glycine max
ctctaattacatttctaatctcattctccttctgttcaaacactctcatggcatcagataagaagattaggatcggcatcaacggatttggaaggattggccgtttggtggccagggttgcccttcaaaggaatgatgttgaacttgttgctgtcaacgatcctttcatcaccactgattacatgacatacatgttcaagtacgacaccgttcatggccagtggaagcatttgatgtgaaggtgaaggattctaagacccttctctttggtg

SEQ ID NO: 171361 - DNA, 273 bp, Glycine max
gttgcgactaagagttgctgcttcttccgccactcagcacttcgctccctctgtgcttcaccaaccatggccgaaatcgaagctaccgttccagatccctctcaaatcgacgtcaaacttttcaaccgctggagcttcgacgacgttgaggttactgatatgtctctggctgattacattggagtgtccccgtcaaagcatgctacatatgttcctcacactgctggtaggtactcagtgaagaggttcaggaaggcgcagtgccccattgtt

SEQ ID NO: 171362 - DNA, 273 bp, Glycine max
gagagagagagagagagaggtatcacagtgaaacgaagaagccctaactacgcacgcactcattcttgagaaagctcaatattcattcgtccatggcactctcttctcgtctcttttccaaatccaaattgatctatggctgtcaaatacttctgcaaaaggagcatgctattccagttcgtcactttgctaaagagtctgcccctcctgcccttaagggagatcagatgctgaagaacatttttgtggaggtgaagaacaaatttgagactg

SEQ ID NO: 171363 - DNA, 275 bp, Glycine max
caaaacacaatggtaatgtgggtatttgggtatggttctttgatctcgaaagctgggtttcactatgacgaacgtattgttggtttcatcaaaggctatcgacgagtcttctaccaaggctctactgaccacagaggaacccctgagttccctggaagaacagtgaccctggagcctgctgaaggagaaatatgttggggagctgcttacaagatcgcaaagaaagaagatgcagaaacggcattagtgtacttggaagtaagggagaagcaata

SEQ ID NO: 171364 - DNA, 274 bp, Glycine max
agaaaattgcaatccctgggtttggaaatggcagcggcaggttgtcagaagcttctggaattgagcacgaagatcgtcgctgttggcagaaactacgctgctcatgccaaagaactaggcaacgccgttcccaaggagccggtgttgtttctgaaaccgacgtcgtcttacttgagtaacggcggaaccattcaaatcccacacaacgagggctctctgcatcacgaggttgagctcgctgtggtcatctccaagaaagcccgtgacgtctccg

SEQ ID NO: 171365 - DNA, 277 bp, Glycine max
cggttttgaaaagagttaacaatctcttctcttcgctcctgcacttgttgtttctttgcacttcatggcatctcaggctagccttctccttcaaaagcagctcaaagatctttgcaaaaaccccgtcgacggcttctctgccggtttggtcgatgaaaccaacatttttgaatggagtgtcaccataattgggccgcccgatactctctacgaggggggatttttcaatgctattatgagtttcccatccaattacccaaatagtccaccttcagtg

SEQ ID NO: 171366 - DNA, 287 bp, Glycine max
gaaccgggaaaactattactctggaggtggagagttctgatacgatcgataacgtgaaggcgaagattcaggataaggaagggattccaccggatcagcagcgtcttatcttcgctgggaagcagctcgaagacggacgcactctcgccgattacaatattcagaaggaatccacgcttcaccttgttcttaggctccgtggtggcgatttctagtttcagttgaatcttgctattgagattttctctaccttgaatgtgtatgatataacaaaatttctatgtcta

SEQ ID NO: 171367 - DNA, 279 bp, Glycine max
caaattaacaaccattgttcgttgtggcagtagcaaaacaacacctttttgaaacccgaggttcagagagaaaagaaacattttccaaattaatggggcgttggatgaaaccagaggtttaccctctattggctgcaatgacctttgttaccggcatgtgtgtgttccaactaacaagaaatgtgctcgggaaccctgatgttaggattaacaaaactcggagaagcatggcagtgttggagaacagagaagagggagagaaatatgctgagcatggcc

SEQ ID NO: 171368 - DNA, 267 bp, Glycine max
cagaagggttggttggtcccattccataggaagagatcaaagagaagagaaaagatgtttgagccgcagcagctatacactcgagcgaagaccgaggaattcgacctcgaatcaggggaaaccctctacccagggctgagcgtcggcgagaaccagctccgatggggcttcatccgcaaggtctacggcatcctctccgcccagatcgtcctcaccaccctcgtctctgtcaccaccgttttctatactccaatcaatgacctcctc

SEQ ID NO: 171369 - DNA, 281 bp, Glycine max
ctttctttagctgccaaacgaaacttcccttgttcctgttcctgtgttctccttgcagctccaaaattctatgtggtggtggagatggtgatgattactgcttggatcactgaccttttcgcttgtatgggtggttgttttggatgctgtgtgaaacccacaccaattattgccgtggatgagccagcaaagggactaagaattcaggggcagacagtaagataaccacacatatcagatggtttctggagttcgagcacttgtgatctggataacagcaa

SEQ ID NO: 171370 - DNA, 285 bp, Glycine max
gagagagagagagagagagagagagagagagatatggcttgcaggcaattgtgggcttcaagagctgtctcttacctgaggatctctgtgtttcacagaggcttttctaatgttgttaaagatttgaagtatgctgactctcatgagtgggtgaaagttgatgaaaattctgcaaccgtcggcataactgatcatgcccaagatcatttaggtgatgttgtatatgttgaattgccagatgtgggagcagctgtaacacaaggaggtagttttggtgcagttgaa

SEQ ID NO: 171371 - DNA, 284 bp, Glycine max
gcagagagtgcggtaggctcatccgagaccggaagcagcaatggggatcgatctcaaggccggaggtaaaagcaaaaaaaccaaaagaacagcacccaagtccaatgatatctatcttaagctcttggtcaagctttatcgcttccttgttcggagaactggcagcaaattcaatgccgttatactcaagagattgttcatgagcaaggttaacaagcccccattgtctttgtcaaggttgattaagtataccaaggggaaggaagataagattgctgtggtgg

SEQ ID NO: 171372 - DNA, 281 bp, Glycine max
caagtcgcatcttttgcttcactctacgcagatcgcagcaaaccagagattgaactccgacgatgcctcccgtcgctcctcgatccggcgatgccatattcgccaacgtcgaacgcgtcaatgcggagctgtttacttgacgtatggcgcaattgtgcgtcaattgctcacggatctggaagaggttgaggaggttaacgagcagcttgatcaaatgggttacaatattggaatccgattgattgatgagtttttagctaagtctaatgtctcaagatgca

SEQ ID NO: 171373 - DNA, 279 bp, Glycine max
gtttgcaaagaagttggcttctcttgctgatctctacgtgaatgatgctttcggcactgcccacagagctcatgcttctacagaaggagtggccaaatacttgaagccctctgttgcaggattccttatgcagaaggaacttgactatctagttggagctgtgtcaaaccccaagagaccatttgctgctatcgttggtgggtcaaaggtgtcttccaagattggagttattgagtccttgttggagaaagttaacgttctcttgcttggtggaggatg

SEQ ID NO: 171374 - DNA, 281 bp, Glycine max
cacagcgtgtcccctcctcgctggtgttcaagctggccattctctaggcctacatgtcggaggtacaggcccagcaggtggagcccaaggcccgtgaaagcccaacccgcaaaatcccaaccctcaaaaccttccaaatctatcgctggaaccccaaaaacccttcaaagcacaaggtcaaggactaccagatcaacctaaaggagggtgggccgatggtcctcgatgcgctcaacaacatccagaataagattgacccgagcctcacgttccgccgctca

SEQ ID NO: 171375 - DNA, 280 bp, Glycine max
ttcttgaagggcacagaagagggtttcttttcgtttcgtttcaatggggagcgaagaggagaacggcgaattctacctgcgatactacgtcgggcacaagggcaagttcggtcacgagttcttggagttcgagttccgccccgacgggaagctccgctacgccaacaactccaactacaaaaacgacaccatcatccgcaaggaggtttacctcacccccgccgttctccgcgagtgccgtcgcatcatctccgagagcgagattatgaaggaagatgat

SEQ ID NO: 171376 - DNA, 276 bp, Glycine max
cttcgcctcactctcttttatgtcgttcctctattcgctacgtcgtcgttagggtcgtcttcggatcggtggaacttgactgcgccggcgtgaattccgacgctgcgagtggcaccgaattgcgatagcggtgacgaatatgaaggttttcgttaagactctcaaaggcactcacttcgaaatcgaagtgacgccgcaagacacggtttctgaagtgaagacaaatatagaaactgttcagggtgcagatgtctatcctgctgcacagcaaatgct

SEQ ID NO: 171377 - DNA, 277 bp, Glycine max
cgatatccgcagctgctgttattcgcaccgcaaacaaacagtgagccatggccgtcggaaagaacaagcgcatctccaaagggaaaaagggtggcaagaagaaggcagctgatccctttgccaagaaggattggtatgacattaaggccccttctctttttcaagtgaaaaatgttggcaaaaccctcgtctctcgtacgcagggtaccaagattgcttctgaaggacttaaacatagagtgtttgaggtctccttggctgatcttcaaggggatga

SEQ ID NO: 171378 - DNA, 260 bp, Glycine max
tcccattctctcgcatctcaatacccttttgatttgtgaaaggaaagcaaacatgcttgatcaggtccaacaccctacaatcatggacaaggttgctggccagctccatctccgttctggtgtttctggtattaggagttatgaaggagcctactgccaccccacaatgtaccaaagaccctcttttgggaattactcgaatgctgcattgcagtatcctgtgatgacctcatgcaaagctactatggatttgtctgctg

SEQ ID NO: 171379 - DNA, 279 bp, Glycine max
cgcttttgcttctcgatttttaaaccctaaatctatctatctgtctaatagataagatagggcaaaaacaaaacaaaacaaaataaaaccctagccaaagaaagaccttgttgagcagcagcagcagagagagagaggcttatggaaggagtaccgcacccaatacccagaactgtcgaagaggttttcaccgattttaagggcagacgcgctggtttgattaaggctctcactactgacgttgagaagtattaccagcagtgcgatctcgagaaggag

SEQ ID NO: 171380 - DNA, 278 bp, Glycine max
cttccacaaccctatcgcacatctttctcagttctacgatggagttttggggtgccgaggttaaggttggagagtctgttaaggtagatccatttgaattttatgcatgcatacaccttttttatgctgctcttggtgaggcaaagatagatttgcctgaaccggtggttctctacatgaatattggtgaacagaaatttgtcttgggaaccctttccagggagaaaatccctcaaatatctctggaattggttttggaaaaggagtttgagctttcc

SEQ ID NO: 171381 - DNA, 276 bp, Glycine max
ccaaccttcaacgtctcttcactctcttccttttttccctaattgcaccctctttggctcaacaatccttcagacccagagccctcgttgtcccagttaaaaaagacgcttccaccctccaatatattactcaaatcaaacaaagaacaccactcgtcccagaaaacctagtacttgacatcggtggccaattcctgtgggtcgattgcgacaacaactacgtctcctccacttaccgccccgcacggtgtggctccgcccagtgctccctcgcca

SEQ ID NO: 171382 - DNA, 276 bp, Glycine max
ggcggtgaaagtgacagaggaggcatattcacccatcacaattacgcacatcccaagcggagaccagcacgaagaacaaaactagctcggttggaccaattcgaagcgaacttagacggagagagtgacagagaatgatgttggacggaaccgaagacgaagagaagtttctcgccgccggaatcgccggccttcagcagaattcctactacatgcaccgtgcattggactcgaacaatctcagggatgctttgaagtattcggctcagatgctct

SEQ ID NO: 171383 - DNA, 277 bp, Glycine max
cgtcgagccgaatcggctcgaggatgaagctctcaagagttttaagggagagcgcaatgggacatgagtatcttattaatcacattgactcccctgggcacgttgacttctcttctgaggttactgctgcacttcgtattaccgatggagctcttgttgtggtcgattgtgtggaaggagtttgtgtccaaaccgaaactgttctacgacaagcccttggagaaaggattaggcctgttctgactgtcaataagatggacaggtgcttccttgaact

SEQ ID NO: 171384 - DNA, 274 bp, Glycine max
tgggaagcctgtaattgtgaaactgaagtggggaatggagtacaagggctatctcgtttccgttgattcctatatgaacttgcagctggccaacaccgaggcgtacattgagggacaatttactggcaatttgggagagcttttaatcagatgtaacaatgttctctaccttcgaggagtaccggaggatgaggcaatcgagatgctgctgaagactacagagtcatagatactgctaatggctatgacataagctgaatcgaatttctactgt

SEQ ID NO: 171385 - DNA, 161 bp, Glycine max
cattacatgattatgatagcattattaaaaacattgaaagacgggaggcaagactatcccggaaagatgagatcatgaaagctattgggaagaagttggaccgctacaagaatccttggcttgaattgaagatacaatatggacacaacaaagggaagtta

SEQ ID NO: 171386 - DNA, 276 bp, Glycine max
gccatttgggagttaggttctgcacgctctgcttccagcgagtgttctttcttcgtttcaacaccttaatttgcacacgctgcttcttcagcttgagaaatggcacaagaaacctttctattcacatctgaatctgtaaacgagggtcaccccgacaagctgtgcgaccagatctctgatgcagtgctcgatgcgtgccttgaacaggaccctgacagcaaggttgcctgtgagacatgcaccaagaccaacatggtcatggtctttggagagatc

SEQ ID NO: 171387 - DNA, 274 bp, Glycine max
cgccgtcgtcgctgtttgtgtgtgtatcaggtgcagctaccaacgatggtgaagggtcgtcaaggagagcgcgtcagactctacgtgaggggtacaatccttggatacaaaaggtccaagtccaaccagtacccaaacacatccctgatccaaattgagggagtgaacaccaaagaagaagtaggatggtatgctggcaagaaaatggcctatatctacaaggctaaggtgaaaaaggatggaagccattaccgctgcatatggggcaaggtta

SEQ ID NO: 171388 - DNA, 137 bp, Glycine max
catttaccagctatacttgttccttttgaaggttagaagtgctacaatacaaacaatggcagctactcaggaagatgtgaagcttttgggtattgtgggaagcccatttgtgtgcagggtccagattgcccttaagt

SEQ ID NO: 171389 - DNA, 276 bp, Glycine max
cttgtttgttgttgttgttggaagccaaaaccctagcagccggcgagaatggcagacgttgaggttgatgtggcggcggcggcggcggcggcggctgcagggcagccaaagaagagaacgttcaagaagttcagcttcaggggggtggatctggacgcgcttctggacatgtccactgacgaactcgtgaagatgttcagtgctcgcgcacgcagaaggttccagagaggtctcaccagaaagcccatggccttgattaaaaagctccgcaaagcg

SEQ ID NO: 171390 - DNA, 268 bp, Glycine max
  unsure (1)..(268): unsure at all n locations
cctggcacaaacgctggcaatgcccgtggcaccttcgctagctatcatctccaattctcgcctctccaacacactctccgttcccgttctgaacaaaccacaggttcaagggtcaagcatcaagtgcgttcgtgttagtggtgtggagattccgaacaacaagcgaatcgagtactcgctgcagtacattcatggcgttggcaggaccagagcgaaacagattctctgtgatatccanatggataatacaatcacgaaggaactcact

SEQ ID NO: 171391 - DNA, 139 bp, Glycine max
cattgtttgcctaaatacaattaggtaagcgtaagggtacaagggaggcaaggcttcccaccaaaatcctttggatgaggaggatgcgtgtcctcaggcgcttgcttcgcaagtacagggaatcaaagaagattgacag

SEQ ID NO: 171392 - DNA, 275 bp, Glycine max
tcttcctctgcgcaggaattaggaatattcgacaggtagagtttcttcaatggctcctaaagttgataagaagaatgatccaaaggcccaagccttgaagactgctaaggcagttaagtcaggtgctacctttaagaagaaggtaaagaagatccgaacttctgtcactttccacaggccgaagaccttgaagaaggacaggaaccccaagtaccctcgcattagcgccccgccgaggaacaagcttgatcattatcagatcctgaaataccccc

SEQ ID NO: 171393 - DNA, 273 bp, Glycine max
gggagtcagagaaaccctaggtaagaagaaaagatgccggctggtcatggtttgagatcccgcaccagagattccttctctcgtcctttcaggaagaagggaaccatcgccctcaccacatacctgagaacctaccacgtcggcgactatgttgacgtcaaggttaacggtgccgttcacaagggaatgccccacaaattctaccatggccgcaccggacgcgtctggaatgtcaccaaacgtgctgttggcgtcgaagtcaacaagcaggtt

SEQ ID NO: 171394 - DNA, 273 bp, Glycine max
gattgagttccctttgcctgatagacgtcaaaagaggctcgtatttcaggtttgcacagccaagatgaacttgagtgatgaggtagacctggaggattatgtttctcgtcccgacaaaatcagtgctgctgagatatcagctatttgtcaagaagctggaatgcatgctgttcgcaagaatagatatgtcatactgcccaaggacttcgagaagggttacaggacaaacgtgaagaagcctgatactgacttcgaattttacaagtgatgatg

SEQ ID NO: 171395 - DNA, 256 bp, Glycine max
cttcatccttctctgttctcctagaacttgattacttgaacattccctatgacagatgaggtggttcttctggatttctggccaagtccatttgggatgagggtcaggattgcacttgctgaaaagggtatcgaatatgagtacaaagatgaggacttgaggaacaagagtcctctactcttacaaatgaacccggttcacaagaagattccggatctcatccacaatggcaaacgcatttccgaatccctcattg

SEQ ID NO: 171396 - DNA, 236 bp, Glycine max
agattatcctaagtctttgggaatagtgctgcaatggcttcaagtcaggaggaggtgacccttttgggagctactggaagcccatttgtgtgcagggttcatattgccctcaagttgaagggagttcaatacaaatatgtcgaagaaaatttgaggaacaagagtgaactgcttctcaaatccaacccagttcacaagaaggttccagtgtttattcacaatgagaagcccatagc

SEQ ID NO: 171397 - DNA, 232 bp, Glycine max
gtaattgagttcgatcaaatagctcccagtactttaattgatttctgaatatcatcacttaatttgaaggaaagatggtgagcgtagctgagatccgccaggcacaaagggcagaaggcccagcaaccatccttgccattggaactgcaaacccaccaaactgtgttgatcagagcacctatcctgactactacttcagaatcaccaacagtgagcacatgaccgagctcaa

SEQ ID NO: 171398 - DNA, 232 bp, Glycine max
ctgttttccgctgcttgtttgtgcctgcgtagttacaaagtaaaaagagggaggactaggacaaaagtagttggcagtcatcatgtcgagcgcttcgttgaaggagatgaggaacggtggtgaggattatagcaatggtcatggtggtggtggtgtgagggacttgtatggagaggattgtgccactgaggaccagcttatcactccatggactttctctgtggccagtgga

SEQ ID NO: 171399 - DNA, 232 bp, Glycine max
agcgagcttaggagaatagaagaggagcaggaggcatcaccattgacacaatggttaaaggtcgccaaggagaacgtgtaagactctacgtcaggggttcaattcttggatacaagaggtccaagtcaaatcaatacccaagcacctccctaatccagattgagaatgtaaactctaaggaagaagttgcgtggtactgtgggaagcgcatggcttacatctacaaagcgag

SEQ ID NO: 171400 - DNA, 231 bp, Glycine max
gccaccctctctggccacagttgtcatcatgagctcgaaactgcaaggatcaatggattgctgggtaatattgatgcaaacactggtgatcctcaagttggttgggacactgatcagtttcttgtagatattcaagaggcgacactgattatgctcagtgtgatcagaaatggaggacttgcacccggtggattcaacttcgatgcgaaattgcggagagagagcacagat

SEQ ID NO: 171401 - DNA, 230 bp, Glycine max
gcactcatcattcttcgtttgtctaagatccgccttctctgaattgtaaaaatgtcgctcggagaaactgcttgttcatacgcagctctcatccttcatgaagatggaatcagtgtaactgccgacaagatcagcaccttgttggaaactgcaaaggttcaagtagatacctattggccaaccttatttgctaaacttgctgagaagaaaaatcttggcgatttgatagc

SEQ ID NO: 171402 - DNA, 228 bp, Glycine max
gaagaagtgaacgagcttgtttatgatgacccgccagtgatttacacccgctcacattctttggttggcccttctacttgtgttagtcaatcacttaagcttggcaagctcactattcatgagaccgaggattcattggaactagtggatcatgtcaatggagagaccattaaagacatcaaagattcttcatttgtcgacaaatcattgaaagatgaagatgggaat

SEQ ID NO: 171403 - DNA, 230 bp, Glycine max
cggagtcagagaaaccctaggtaagaagaaaagatgccggctggtcatggtttgagatcccgcaccagagattgccttctctcgtcctttcaggaagaagggaaccatcgccctcaccacatacctgagaacctaccacgtcggcgactatgttgacgtcaaggttaacggtgccgttcacaagggaatgccccacaaattctaccatggccgcaccggacgcgtctgga

SEQ ID NO: 171404 - DNA, 234 bp, Glycine max
ttttgttaccattgcagaaagaaagagaagaatacgaagtaatagttgaaaatggaaagctagtttacaaaaaggatggtaggcttgtggacactgatgagaaatccaaatggatatttgttcttagcaccacaagggccttgtatgtggggagaaaacaaaagggtacgtttcaacactcaagctttctttctggcggtgcaaccacagcagctggcagattagtggcccatc

SEQ ID NO: 171405 - DNA, 234 bp, Glycine max
gaaaaatgaagtctttccatctcacagtgacagctttgtgctgtgtagtggttgtgcttggagtgcttccactctccctagatgcacaactagatccctccttttacagagacacttgtcccagggttcactccattgttcgtgaagtcgtcaggaacgtttcaaagaaagatccccgtatgcttgctagtctcattagacttcactttcatgactgctttgttcaaggatgtg

SEQ ID NO: 171406 - DNA, 230 bp, Glycine max
ggaaaacccacaggcacgctgagcatggaacacagaaccctagaactcaacctggcttcagcaaaggatctcaaagacttgaatatattctcaaagatggatgtatatgctgtgctttcactctccggcgatcaaaagaccaagactcccgtccacagaaacggcggcaccaacccaacatggaattttccggtcaagttcacttttgatgaatcggtggcgcggcagaa

SEQ ID NO: 171407 - DNA, 230 bp, Glycine max
atttttgtgtcaaaatagggaactgtagttcttgttttccaaccagcagaggaaggaggtggaggggctaagaaaattttagatgctggagccttagaaaatgtcgcagctatttttgggttgcatgtgacacctaactttccaataggtgaagtggcctctaggtctggtccattgttggcaggaagtggtttctttgaagcaataataagtggaaaaggaggtcatgc

SEQ ID NO: 171408 - DNA, 229 bp, Glycine max
cggcaacagactaagttgtttctctctctagccctagggtttcgttctctactaccgttctttcatcagatcgctgccgtttctggcgtcattccgataattcggcggcatgaagctaacagtgaagactttgaaagggagccatttcgaaatcagggttcaaccctccgatactgttatggctgtcaagaagaatattgaagatgtacaaggaccagataattaccca

SEQ ID NO: 171409 - DNA, 226 bp, Glycine max
cttggtggtagtagcaaatattcaaatgagaactttgaaggccgaagaggggaaaggttccatgtgaacggcacttgcacatgggttagtcgatcctaagggacgggggaagcccgtctgatagcgctctgtgcgcgtactccgaaagggaatcgggttaaaattcctgaaccgggacgtggcggctgacggcaacgttagggagtccggagacgtcggcgggggc

SEQ ID NO: 171410 - DNA, 224 bp, Glycine max
ccagatctgtagacaatatgggaagcactggtttgctacatttgatatgccttgtcattgctttagtaagtgtgtcgcttgtgcaagcagaagatgcgtataagtatttcacatggacggtgacttatgggactctttatcccttggctagtccccagcaggttattcttatcaatggtcagtttcctgggcctagacttgacttggtaactaatgaaaatgta

SEQ ID NO: 171411 - DNA, 230 bp, Glycine max
gaaatgcagaaagaagatcttttgtcaaaaccagagcagataagatcaaagattgttgaagggcggataagaaaaagacttgaggagctggcattgctcgagcagtcctacattaaggatgataaggtagcagtaaaggacttcatcaagcaaactattgcaactattggagaaaatattaaagttaagaggtttgtgcggttcaaccttggagagggtttagagaagaa

SEQ ID NO: 171412 - DNA, 229 bp, Glycine max
tgaaatcttagtttctgcccgaaactgaaactgaatcgaaattcaatacaatgagttcctcaactacagtgaggaagttgcaggtggtgtcccctgttcctgcggacatagacattgcaaactccgttgaacccgttcatatctcccagattgccaaagacctcaaccttagtcccaatcactatgacctttacggtaaatacaaggctaaggttttgttgtcggttct

SEQ ID NO: 171413 - DNA, 226 bp, Glycine max
aatatcctaaagtgtttttcttcttcttcatcaccatgtctttactttcagacctcatcaacctcaatctctcagaatccacagaaaagatcattgctgagtacatatgggttggtggatctggtatggacctcagaagcaaagccaggactcttcctgggccagtgagtgaccctgcaaaacttccgaagtggaactatgatgggtctagcacagatcaagctcc

SEQ ID NO: 171414 - DNA, 228 bp, Glycine max
ctcctcagcagtcgtcagaaagactccataacccaaaaatgcctttcaagaggtacgttgagattggaagggttgctcagatcaactatggcaaagagtacgggcggctcgtgatcattgtcgatgtcattgaccagaatagggctcttgttgatgctcccgacatggtgaggtcccaagtgaacttcaagaggctctcgctcactgacatcaagattgatattaaga

SEQ ID NO: 171415 - DNA, 227 bp, Glycine max
agattttgctgctgttgctgttggtactaatcagtgtaaaaatggttatccttgtccaccatttaagattattgttctagacgaggcagattcaatgactgaagatgctcagaatgccctgaggcgtacaatggaaacttactctaaagttacaaggttcttttttatatgcaactatgttagcaggattatagaaccacttgcttcaaggtgtgcaaaattcaggt

SEQ ID NO: 171416 - DNA, 225 bp, Glycine max
agcaatttatcaagcctgtcattcctgagaagtacctggatgagaagaccatcttccaccttaacccttctggccgttttgtcattggtggccctcatggtgatgctggtctcactggaagaaagatcatcattgatacctatggtgggtggggtgctcatggtggaggtgccttttcagggaaggaccctaccaaggttgacagaagtggtgcctatatcgtga

SEQ ID NO: 171417 - DNA, 224 bp, Glycine max
gaggcaggctctgtatgcttccaagatttgtagttatgctcaggggatgaatttgttgagggctaagagtaatgagaaaggatggaacttgaatttgggggagttagctaggatttggaagggagggtgcatcataagggccgtgttcttggaccggatcaagaaggcttatcagaggaaccctaatttggcgagtttgattgtggacccggagtttgcaaggg

SEQ ID NO: 171418 - DNA, 224 bp, Glycine max
gtgagtttgttgatcgagataactagaaacagtgtgatgaaaatgaaggtccttgttttcttcgttgctacaattttagtagcatggcaatgccatgcgtacgatatgttccctctccgaatgaacactggctatggtgcccgtactccggaggtgaaatgcgcaagttggaggcttgctgtggaagcacacaacatctttggctttgagaccattcctgaaga

SEQ ID NO: 171419 - DNA, 222 bp, Glycine max
cgagcttgctggaactaatggagaaaccaccactcagggtctagatcgccttggtcagcgttgtgccaagtactacgaagctggtgcacgttttgccaaatggcgtgcagtgctgaagattggtcccaacgagccatctgagctgtctatccatgagaacgcctatggcttggctagatacgctgtcatatgccaggagaatggcctggttcccattgttga

SEQ ID NO: 171420 - DNA, 227 bp, Glycine max
gaagaccaagcgcaccatggacagcaaaaacgtcgtcgtttgcgacaacggaaccgggtatgtgaagtgtggttttgctggggagaatttccccacatcggtttttccctgtgtggtgggaaggccaatgctccgttacgaagaatcactcaccgagcaggcgcttaaggatattgttgttggagaagggtgtgcagacttgcggcatcagcttgatatatcttatc

SEQ ID NO: 171421 - DNA, 229 bp, Glycine max
caagaaagctaaaactgctactcctgaaaagactaatggtaagaaaaatgtacatgtagcaacaccccatccttcgaagaaaggtggaaagacacccaacagtacaaaaggccagtctcccagttctgctggacaactatcttgcgcaagttgtaaaaagtctttcaccaacgaagtcggtctgcaacaacataagaaggctaagcatggtggtcagtgaatattgata

SEQ ID NO: 171422 - DNA, 225 bp, Glycine max
gcaaaaattggagctgcttttgactgctggcattggttctgatcacgttgatctcaaagctgcagctgctgctggtttaactgtggcagaggtcacgggaagcaatgtcgtgtcggttgcggaggatgaactcatgagaatcctcattctaatgaggaatttcttgcctgggtaccatcaggctgttaagggtgaatggaatgttgctggcattgcacatagagc

SEQ ID NO: 171423 - DNA, 227 bp, Glycine max
cgccaacgccggcaacagcaaacgcaagctcgaggacgacttcgacgccttcacggcgtcgaaggcacgcggatctcgcgaagcgtacgagagaatcgcaaattccgttcaagatccatattgtgaaggatcacgacatgaaggagaggctgtgcttggaggtggagaggcttgggttgagcgcggtgattatggggagtagagggtttggcgctgtgaggcgtggc

SEQ ID NO: 171424 - DNA, 220 bp, Glycine max
ggtgatattcatgggcaattccatgatcttgcagagctttttcgcattggagggaagtgtccagatacaaattacttgtttatgggagattatgttgatcgttgctattattctgttgatactgttacgcttttggttgcccttaaagtgcgttatcgtcagcgtatcactattctgaggggaaatcatgaaagtcgccagattactcaagtttatgggt

SEQ ID NO: 171425 - DNA, 223 bp, Glycine max
gtttgttgttgtaactcgttcttcttcttttgttgttctgtgtttgtgtttgttttttctctcacctgaaaatgtcttgctgcggtggtaactgtggttgcggaagctcctgcaagtgcggcaacggctgcggaggctgcaagatgtacccagacttgagctacactgagtcaaccaccaccgagaccttggtcatgggagtggcacctgttaaggctcaatt

SEQ ID NO: 171426 - DNA, 224 bp, Glycine max
cgttattctctctccgagcttcactctcttttcgcctctgctaaagggagaaaaatggggttctcctcctttctgggtcgtgttctctttgcctccctcttcatcctctccgcatggcagatgtttaatgaatttgatgccaatggtggacccatctcgaaagagttgattcccaaactcagtgtggtgaagaataatttatcctctaaattgggggtagcgct

SEQ ID NO: 171427 - DNA, 227 bp, Glycine max
agtctttgcacttggagaatgggctagtttgtgtaagattgattcagagggaaaggctaggaaggtaactggttgctcatgtgtggttgtcaaggatttcggggaggaacatgaagcctataatgttgttctacagcatgtgaaagccaactgagttgctgcaggcatgcctagatttgtgggttttatttagcttgaagttattgtatgaggaatatttttgcctc

SEQ ID NO: 171428 - DNA, 227 bp, Glycine max
gtcattagcacttcttcttttcacactgccgctgcaacaatggcttcagagaagaaactttcgaacccaatgagggagataaaagtgcagaagctcgttctcaatatctctgttggcgagagtggagatcgtctcaccagagccgccaaggtgttggaacaacttagtggccaaaccccagtgttttccaaagcaaggtacactgttcgttcctttgggattagaag

SEQ ID NO: 171429 - DNA, 224 bp, Glycine max
cacagtcggttcttccttctcaaatattcttgagatccccattttctccgaagcaaagccatggctaagggtcctggtctctactctgacatcggcaagaaagctagggatctgctgttcaaggactaccacagtgaccagaagttcaccatcaccacctactcaccgactggagtggctattacagcatcaggaaccaggaaaagtgaactgtttctggctga

SEQ ID NO: 171430 - DNA, 222 bp, Glycine max
cgcactgcggagagagaaattgagtttccgagataaccagttttctctttgattcatcaatggcaactgcgaggaccgtgaaggatgtttcgcctcacgatttcgtgaaggcttatgcttcccacctcaagcgttccggcaagatggagcttcctgagtggaccgatattgtaaaaacagcaaaatttaaggagttggctccatatgatcctgactggtact

SEQ ID NO: 171431 - DNA, 222 bp, Glycine max
aatgaatggtctagttggaagaaattaggtgatagcgtgcttcacattgagcttcgcaaatgggctgatatcatggtcatcgctccattatcagcaaacacccttggcaagattgctggagggttgtgtgacaatctactgacatgcatcgttcgagcctgggactacagcaagccattctttgttgcaccagccatgaacacttttatgtggaacaatcct

SEQ ID NO: 171432 - DNA, 223 bp, Glycine max
tccagccacacgcttcagaagacatggcctcattgggtgggttacaaaatgtgagcggcatcaattttcttatcaaagagacaggcgtttaagtgcacttagagtgatgccatggaaatcaaactgtttgcttcctgatgcctaagcacaaggaacctgatgcttaagtgccagatgtttttcctctttgccaacttcttgcttgtgacgctcaagcgccaac

SEQ ID NO: 171433 - DNA, 223 bp, Glycine max
ccctactcattctccatacctcaacgaagaggttaaagagacggcaacactttgctgtccgccttgaccgagcagagcttcgtcttggccctcgattttgccctaaagtactctcagtcacaacagacaccgtcgtcgtcgtcgtcgtcatcaatggcaccgaagcagaccaaggctgagaagaagatcgcttacgatgcgaactgtgcgacctaatggagga

SEQ ID NO: 171434 - DNA, 222 bp, Glycine max
ctttagggatgatgctgaaatccctaacctaaaattcccctcactgatggctttaccagaggttgggttgagactgctcctttcacccgttacttccaaccttcttctccgcacagcatgctgttcaatagggcttgcgcttcccgtgtattccacgtttaaagctattgagaacaatgacccatatgagcaacaaaggtgcctattgtattgggcagctta

SEQ ID NO: 171435 - DNA, 220 bp, Glycine max
gaacaatccaactcttataatcttcttccttgttattttctccgtcttcttcgcggcgtcggcggacggcggcgacgatgagccgctgatcatgcaggtggtggagggcagcggcgtccggttgggagcagagcaccactttttggacttcaagcgcaggttcgggaaggcgtacgcttcccaggaggagcacaattacaggttcgaggtgttcaaggct

SEQ ID NO: 171436 - DNA, 220 bp, Glycine max
gttaccatttgctcccagcactgagcttaaccgagcttcacaaagatgaatcgggaaaaattgatgaagatggccggttcggttagaactgggggaaagggcaccgtgagaagaaagaagaaggctgtccacaagacaacaaccacagatgacaaaaggcttcagagcaccctgaagagaataggggtgaatgccatcccggctattgaggaggtcaata

SEQ ID NO: 171437 - DNA, 218 bp, Glycine max
actcgagcgaatcggctcacggctcgagattaagacaagaacgacagtccaagccatggaattggaaatgaaggatgataaaataggactgcagaggagtgagcaactgaaggaactgtacaagtttcttcttgcaggtgaagctgatccacaaactaaaaggccttctgctgcattagctccagaggacctctcagatttggagtggtattacttgg

SEQ ID NO: 171438 - DNA, 221 bp, Glycine max
gcgaaaatagaggacttgagctctcagttgcagacacaggctgctcaacagttcaggatgccagatatgggatctgtaacggcaaaacaagaagatgctgcagctgcagcagtgcaacctgaagaagaggaggaggttgatgaaactggtgtggagccccatgacattgatttggtgatgacgcaggcaggagtgtcaagaagcaaggccgtcaaggctct

SEQ ID NO: 171439 - DNA, 223 bp, Glycine max
gctaagatgaacaggactattattgttaggaggaattatctccattttatcaagaagtaccagaggtacgagaaaaggcactccaacattcctgctcatatatcacctgctttccgtgtgaaggaaggagatcacgttattattggtcaatgcaggccactttctaagactgtgaggttcaatgtgttgaaagtgatcccagctggatcttctagcggtgcaa

SEQ ID NO: 171440 - DNA, 227 bp, Glycine max
ctatcaaaactagtaatattattcttcgaatccattttattattcataatgggtattttcacatttgaggatgaaaccacctcccctgtggctcctgctaccctttacaaagctctagttacagatgccgacaacgtcatcccaaaggctgtcgaagccttcaggagtgttgaaaaccttgaggggaacggtggccctggaaccatcaagaagatcactttcgttga

SEQ ID NO: 171441 - DNA, 226 bp, Glycine max
agcatcacctccttttacactctcgaattcgcattctcttcactcattttccaatccatggccaagggagagaaaaaacctgcagagaagaagcccgcggcggagaaggctccggcggagaaaacaaaagccgagaagaagatcccgaaggacgcagcctccggcgagaagaagaagaagaggacgaagaagagcgtggagacgtacaagatctacatcttcaagg

SEQ ID NO: 171442 - DNA, 223 bp, Glycine max
ggacttactagaaacagtccttatctgacacaccctatctttaacacgtaccacactgagcatgaggttctcaggtacattcataggcttcaatcaaaagatctttcattgtgccacagtatgatcccgctgggatcttgtacaatgaagctgaatgctacaactgaaatgatgcctgtgacatggcctagctttgctaacattcacccttttgcaccaattg

SEQ ID NO: 171443 - DNA, 221 bp, Glycine max
aaagctgggaaagaggttctcggatatgcctccaaggtggtgctcaccaaggatacaaccacaattgttggtgatggaagtacccaggaagcagtgaacaagagagttgcacaaattaggaacctaattgaggctgctgagcaagagtatgagaaagaaaagctgaatgagagaattgctaaattgtctggtggtgtggctgtgatacaggttggcgcaca

SEQ ID NO: 171444 - DNA, 222 bp, Glycine max
cggctcgagcttctttccaaatcccaactactactcacactcactgcagatctcaatccatggctaccatcgttagcatcaaggcccgccagatctttgacagtcgtggcaatccaaccgtcgaggtggatttgacatgctccgatggtacttttgctagagctgctgttccaagtggtgcatccactgggatttatgaggcccttgaattgagagatggag

SEQ ID NO: 171445 - DNA, 218 bp, Glycine max
caaagcaagagaagtagggtttttgtgcttggcaaaagaaagagaagagaagatggtgtcaggttcggggatctgcgcgaacgtgggctggtggacgcccggcaccacatgctgggtcggctcgcctcgattgtggcaaaggagctgctgaacggacaaaaagtggtggtcgtgcgatgcgaagagatttgcatctccggtggtctggtgaggcagaa

SEQ ID NO: 171446 - DNA, 217 bp, Glycine max
tgactcctttgaacctaacgtaacctgatccgtggctctggttctggctctggctctgccctttttggttttctctcgttaccgaaaccagaagaaccatttgtggtggacatggatctggaccagtggatctccaaggtcaaagatggccagcatcttcttgaagacgagcttcaacttctctgcgaatttgtaaaagagatccttattgaggagt

SEQ ID NO: 171447 - DNA, 216 bp, Glycine max
gggcggtgcagtgcttcaaacccctttttctcttctcatttcctttcatcactctcttgcttcttttcttcttctcgcaattttccattttcacacttttagcgtaagaacatcttttaatggcgtcccaaatccgtgagtggtctggaatcaatacattcgcacctgctacccagactaagttgcttgaactcttgggaaatcttaaacaagaga

SEQ ID NO: 171448 - DNA, 161 bp, Glycine max
atctcttaccaagatgttgtccaactatgggaaaatctcaagttcaatcttgtctcagtgactctatgttctagccttatagtgttccttgtcaccttttacttcatgagccgtccaaggggtgtttacttggtggattttgcgtgctacaagccagagcc

SEQ ID NO: 171449 - DNA, 220 bp, Glycine max
gcaagatgagggtctggttgctggtattagagggatagagtgggatgctgttgagttaccttctcagttcatggaaaactggtgttaccatagagaaactttaatgggtattgcaaagcattttgaaactggggagagtcttcctgaagaagtatatttgaagcttgttgctgctaggacatttcgagctggctctctaagtcttcgacagttaaaattc

SEQ ID NO: 171450 - DNA, 260 bp, Glycine max
ctcagttacttctctctctcccggtgactgggttattccctctccaccatctttcgggacgtggcagacttatattgtgaatgatgagaaagtttggcacaagatagagaagggtgtgcctatggaatatgctgctacaattacagttaatcccttgactgcacttctcatgcttgaacactgcgttactttgaactcaggagatgctattgtgcaaaatggggctaccagcatggttggccagtgtgtcattcagattg

SEQ ID NO: 171451 - DNA, 259 bp, Glycine max
tcgagcaaagatgagaattttaatttgtctcacactggaccgggagttgtcagcatggcaaatgcaggtcccaacacaaatgggagtcagttttttatatgcactgtcaagacaccttggctggatcagaggcatgtggtatttggccaagttttggaaggcatggccattgttaggttgatcgaatcacaggagacagataggggtgaccgtcctagaaagaaggtgaccattagtgactgtggtgagcttccaattg

SEQ ID NO: 171452 - DNA, 232 bp, Glycine max
gcgtggcctcacttctgctgggaaaagcaataggggtttacgtggcagaggacatctctaccacaaaaatcgtccatcacgcagggcaacctggaagagaaacaataccctctcccttcgtcgctaccgttgattttgttgcagttatcgtatgttgcttcattttctgagtatttggaggaaaatcgtcagttttggatccctgaatcatgccttttttccccgataatgt

SEQ ID NO: 171453 - DNA, 270 bp, Glycine max
cgccagacaagcccaaagaagaagcagaagaggaggctcccaagcctaaagccaagaatccccttgatcttctccctaccaagtccgatgatactggatgagtggaaaagactctactcaaacactaaaaccaacttcagggaggttgctatcaaaggattttgggacatgtatgatcccgagggatactctctctggttttgtgattacaaatacaatcaggagaatactgtttcttttgtgacattgaacaaggttggtggatttctt

SEQ ID NO: 171454 - DNA, 264 bp, Glycine max
tccaattcaaccatggcttcgagactcacggtaacagccttggtgctgatagctttggcaacagtttctctccaaacctcagcttcatcagtgggtaaattcaacgacgaaaccatcacttcccacaagatcgtcattttttccaagacctattgcccgtactgtagaagggcaaaagctgttttcaaagagttgaaccaagttccacatgttgttgagctcgacgagagagaggatggttcaaagattcaggatatcatgatt

SEQ ID NO: 171455 - DNA, 267 bp, Glycine max
cgtctcaatttactagggttttattcattttccgatggcttctgcagatgttgagtaccgttgctttgtcggtgggctcgcttgggccactgacgaccatgccctcgagagagccttctctcagtacggcgatctcgttgaaacgaagattatcaacgatcgtgagactggcagatccaagggttttggctttgtgacctacgcctcggagcagtccatgaaagatgcgatcggagcgatgaatggacagaacttggacggccgtaa

SEQ ID NO: 171456 - DNA, 266 bp, Glycine max
cgtttttggatcggaacctcttctgcggcgtagaactgggacactccaacgtttggaactctcacccaaaaaactacggtcctggttctcgcacttgccgtgtgtgtgggaatccacatggactgatcaggaagtatggccttatgtgctgcaggcagtgcttccgtagcaatgccaaggaaactggcttcatcaagtatcgctaaaagagcagttgtcaactacggaccaatattgtgttctggcactaggatgttttgaggatg

SEQ ID NO: 171457 - DNA, 261 bp, Glycine max
cggctcgagagaagggttttttcttacctgagcagattcagagtgcaaagtgtgagagaaagacaatgccgaagtctcaatttcgaaccccatttctggtttcttttccccttttgttattcatcttcaacctcaccccttcgcacgcactctatggagcatcctcacccgtgcttcaactcactccctctaacttcaagtccaaggttctgacttcacatggcgttgttcttgttgaattctttgctccatggtgtggac

SEQ ID NO: 171458 - DNA, 261 bp, Glycine max
cgggcaacgttcagtcacctcccaacaatgatcctcgatatgtttcagcaaccagagcttttactcaaaaggaacttgaagacttgaggtctctgttcatcaatctggcaaatcaatcccagagcaacgggaaatacatctctccctccgtttttcagtcatattttggacttcatggccctcttggggagaggatgtttgatttagttactcaggagcgcaaggatcagaggctaacctttgaagacctcgtggatgcta

SEQ ID NO: 171459 - DNA, 262 bp, Glycine max
attcgcagaactttgtttcccaatttccattgcctccgcttccacctcgcaaccatgatcatcccggagaagaaccgcaaggagatctgcaaatacctcttccaagagggagtttgcttcgcgaagaaggacttcaatttggccaagcaccctgagatcgacgtgccgaatctgcaggtgattaagctgatgcagagtttcaagtctcgcgagtacgtgagagaaacttttgcttggatgcactattactggttcctcacca

SEQ ID NO: 171460 - DNA, 115 bp, Glycine max
cagaaatcgtttggcaaaactgctcagatttgagagcaccaagtctgagggtaaattgacatctctggatcagtacatatctagaatgaaaactgggcagaaggatatcttttac

SEQ ID NO: 171461 - DNA, 272 bp, Glycine max
gctgcttcatttaacatcattcctagcagcactggagctgccaaggctgttggaaaagtccttcctgctttgaacggaaaattgactggtatggcattccgtgttcccaccgtggatgtctctgttgttgacctcacagtgaggctggagaaggaagcctcctacgatgaaattaaaaatgctatcaaggaggaatcagagggcaagttgaagggaattcttggttacactgaagatgatgtggtctccaccgactttgtgggcgatagcag

SEQ ID NO: 171462 - DNA, 266 bp, Glycine max
ctcgagcgaattcggctcgatgcaagtcaaattggattacgtcatggatctgtactcatctcaatctaacatggatgctgatgacaaaatcaccccacaagtttttaagggacacaggaattgtgagacagtgaagggtgttaacttttttggacctaaatgtgagtatgtggtgagtgggtctgattgtggtcggattttcatatggaaaaagacaggtggtcagcttattcgtgtcatggaagcagataagcatgttgtgaact

SEQ ID NO: 171463 - DNA, 263 bp, Glycine max
caatttattccaggagttcccactaagtagcaagctagatactcaagcctatggtgatcatacctgtataatagcaaaagaacatttggagcctaacttaggtgggctcactgttgagcaggctatccaaaacaagaagttgttcatcttagatcaccatgactatctcattccttatttgaggaaaataaatgcaaataccacaaagacttatgctacaagaaccatatttttcttgaaagatgatggaactttgacaccat

SEQ ID NO: 171464 - DNA, 256 bp, Glycine max
caaccctgacactccttcttctccgcttcctcttcgatcatcgcttcagaatgccgccgaagttcgacccctcccagatcgtcgacgtcttcgtacgcgtcaccggcggtgaggtcggcgcggcgagttccctcgccccgaagatcggtcccctcggtctctcccccaagaagatcggagaagatatcgccaaggaaaccgccaaggactggaagggcctccgcgtcaccgtcaagctcaccgtgcagaaccgtca

SEQ ID NO: 171465 - DNA, 258 bp, Glycine max
ggaagaactgtatgaaattgatattcctctgagattcatagcctctgtgggcaccagagtgcatgggttggcatgttggtttgatgtgctattcaatggaagtactgtgcaaaggtggcttaccactgctcctgggtcaccgacaacccattggtaccagttgcgctgtgttctctctcagccaatttatgtcatggcaggacaagaaattactggcaggcttcacttgattgcccacaatgcacaaagctatacaat

SEQ ID NO: 171466 - DNA, 261 bp, Glycine max
catatctccatttccatttcctctctctcagtttccaagaatcttaagctatgggaaagtcttacccaaccgtgagcgctgattaccagaaggccgttgagaaggcgaagaagaagctcagaggcttcatcgctgagaagagatgcgctcctctaatgctccgtttggcatggcactctgctggaacttacgacgtgagctcgaagaccggtggtcccttcggaaccataaagcacccctccgaactcgctcacggcgcta

SEQ ID NO: 171467 - DNA, 264 bp, Glycine max
gaagaagcagagggagtagcggcattaaaaatgcagatcttcgtgaaaactctgacagggaagactataaccctcgaggtcgagagcagcgacaccatcgacaatgtcaaggccaagattcaagacaaggaaggcattcctccggatcagcagcgtttgattttcgccggaaagcagcttgaagatggaaggaccctggccgattacaacatccagaaggaatcaacccttcatctcgtcctcaggcttcgtggtggcatcatt

SEQ ID NO: 171468 - DNA, 264 bp, Glycine max
acattatattatagagcaataataataataataatatgggtaacagcttaaggtgttgtttggcttgcattcttccgtgtggagccctagacttgatccgcatagtgcacttgaacgggtacgtggaagaaatcacgcgtccaatcacggctggggaggttctgaaggcaaatccaaaccatgtcttgagcaaacctagctcccaaggcgtggttcgccggattctgatcctcgcaccggagaccgagctcaagagaggaggca

SEQ ID NO: 171469 - DNA, 263 bp, Glycine max
gagagttgcagtttgcactttgtaggatcatctcctagcattgatcgattgagatggcagacgaagctaacagaactgctttccttgaaattcaaagtcgcatgatcgatactactggaaaaataaaacaggtgcaaacccagatgcgttccaaagaagcagaaaaaaagcgtgcttttctgaccatggaggagctgaagcaagttcctgatgatacgaatgtttacaaatccattggaagaatgtttgtattggagaccaag

SEQ ID NO: 171470 - DNA, 259 bp, Glycine max
gttgattccaagtttcttcggcaccgggcgaagaaccaacgtcttcgaccccttctccctcgacgtgtgggacccattccatggcttccccggcaccaccgccctctccgctccgcgctccgagacggcggccttcgccaacacgcgtatcgactggaaggagacggcggaggcgcacgtgttcaaggcagacctgccggggctgaagaaggaagaggtgaaggtggagatcgaggaggagggaagggtgctgcagata

SEQ ID NO: 171471 - DNA, 258 bp, Glycine max
gcatggccatggtaggcggaaccatgatggctgcgtatttgcgtgtatccatgcccacttccccacagtcccccaccactacgaggaggagatgcagaaatctgaaaacttcttgctccgttaacagacccaaaattccaatgccccctctcaaccctaaagacccctttctctccaagctcgcttccgtcgctgcttcttcccctgaaacgctcctcaacactcccaaaaactccgacacccttccttatctcgaca

SEQ ID NO: 171472 - DNA, 257 bp, Glycine max
gggaagggaacagggagttttggtaagagaaggaacaagactcacactctctgtgtgaggtgtggccgccgcagcttccatctccagaagagtcgttgcgccgcttgtgctttccccgccgcacgcactaggaaatataactggagcgtcaaggcaatccgcagaaagaccaccggaactggcaggatgaggtacttgcgtaacgtgcctcgccgattcaagagtggcttcagagaaggtaccgaagctgcacctag

SEQ ID NO: 171473 - DNA, 256 bp, Glycine max
cacagaagcagaaggaggagaagcagaaagaggagacgaagcaatggcgccgaagaagccccgaaccacgtcgaggaaccctgatttggtcaggggaattggcaaatattcgaggtcgcagatgtaccacaagaggggcatctgggccatcaaggccaaaaacggcggtgttttgcccctccacgatcccaagcccaaacccgaggccccggcccagaagccgcccaagttctacccggccgatgacgtgaagaag

SEQ ID NO: 171474 - DNA, 258 bp, Glycine max
cacatgtgccaagcttgtctgtcatccacttgatgttgtcaaaaaaagatttcagattgaagggcttcaaaggcatccaagatatggagctcgagtcgagcatcgtgcatacaggaatatgcttgatgccatgcaacggatactgcaattagagggttgggctggtctgtacaaggggataattccgtccactgtcaaagctgcacctgctggtgctgtgacatttgttgcttatgaattgacatcagattggttaga

SEQ ID NO: 171475 - DNA, 253 bp, Glycine max
accctactcattctccatacctcaacgaagaggttaaagagacggcaacactttgctgtccgccttgaccgagcagagcttcgtcttggccctcgattttgccctaaagtactctcagtcacaacagacaccgtcgtcgtcgtcgtcgtcatcaatggcaccgaagcagaccaaggctgagaagaagatcgcttacgatgcgaagtgtgcgacctaatggaggagtacggccaaatcctcgttgtgcactccg

SEQ ID NO: 171476 - DNA, 264 bp, Glycine max
agaactgaagcggaacccttcttctgcgccagttccagtgtcccactgtgtgcagagtgcagtgatagaaatctagctacctagttagggtacggggttctgcgtttctgcgaagatgactaagttcaggaaattgggtcgacccaccggtcaccgaatgtccatgctccgaaccatggtctcgcagttggtgaagcacgagcgcatcgaaactactgttgccaaggcgaaagagatcagaagactcgcggataatatggtgca

SEQ ID NO: 171477 - DNA, 253 bp, Glycine max
cagaaacgaaaaagggttcggtgttctgttcgcgatgagagccaagtggaagaagaagcgtatgaggaggttgaagaggaagcgccgaaagatgagacagagatccaagtagtgcgttaaacctagtttgtttctgttgcttttacaattgcttatgttgtcgaatgggacacccagttgttagtggcactggtttctcctttttgatgtttgatacattttgttggattcaagtagtttatgttcgacttat

SEQ ID NO: 171478 - DNA, 254 bp, Glycine max
caagagtcaccgacaactaggatcaattggtgctggaaccacgcctggtcgtgtttacaaggggaagaagatgcctggtaggatgggaggaaccaagaggaagatcagaaagcttaagattgtcaaaattgataaagatcttaatgtcctcatgatcaaaggtgctctccctggtaagccaggcaatcttctaaggataactcctgacaagattgtcggcaagaacattccaaagaattagcacatcttttctg

SEQ ID NO: 171479 - DNA, 254 bp, Glycine max
gtgattttttccgaaaaccctcgtcttcgaaatcagcaacaaaaacgcgaagtgtactaagcgaaccattgcagcgtgagaatggggaagaaggcaaaagggtcaaggaagggtaagaaggcatggagagctaacatcagcaccgaagagatcgaagatttcttcgagaaatcaacgaaggacgctctttctggtggctctctacaagccgtttcttccgattctctcttctatgaagacaagtccaaagatct

SEQ ID NO: 171480 - DNA, 257 bp, Glycine max
ctttgcgtgagaacgaaaaaagataaaaaaaaccctaacgcactcgagaccctgagatttttcatcttcgtttctcattctctttttgatcatggacgtcgaggtgcggcagatcttcaacaagttcgacaagaacggcgacggaaaaatctcggtaacggagctgaaggacatgctcgcggccctcggatccaaaacgacggacgaggagttgaaacgcatgatggaggagctcgaccagaacggcgacggtttcc

SEQ ID NO: 171481 - DNA, 259 bp, Glycine max
agcaggcgtcttcataaacgcctttcttctccgtttccgtttcctcgttcgaattcgctttttgatctgcgaaaatgagagcgtgcatctcgatccacattggtcaggctggtatccaggtcggaaatgcttgctgggagctctactgcctcgagcacggcatcgggcccgatgggcaaatgccaagtgacaagacagttggcggtggtgatgatgctttcaatactttcttcagcgagactggtgctggaaagcacgt

SEQ ID NO: 171482 - DNA, 260 bp, Glycine max
tgcttgttgtgactcgttcttcttcgtcgttatcttcttcttttgttgtttgtgtgtttgttttttctctcacctgaaaatgtcttgctgcggtggtaactgtggttgcggaagcgcctgcaagtgcggcaacggctgcggaggctgcaagatgtacccagacttgagctacaccgagtcaaccaccaccgagaccttggtcatgggagtggcaccagttaaggctcaattcgagagtgctgaaatgggtgttcccgctg

SEQ ID NO: 171483 - DNA, 263 bp, Glycine max
cgtcaaagcaccgtctccgtctccactctcggcttcttcttcgttgcgctttttcccaaaaccaattgcatcactctcgtccgttaccgccgctgccctagaccaccgcaagcgacgtcgcacaccgccttcatccgttagggcaaaaatgagtcgaggaagtggaggtggatacgatcgtcacatcactattttctcccctgaaggacgtctctttcaagtggagtatgctttcaaggctgtgaaggctgcaggaatcacct

SEQ ID NO: 171484 - DNA, 120 bp, Glycine max
ggcttatggaaggagtaccgcacccaatacccagaactgtcgaagaggttttcaccgattttaagggcagacgcgctggtttgattaaggccctcactactgacgttgaaaagttttacc

SEQ ID NO: 171485 - DNA, 262 bp, Glycine max
cgcttgtgctgccttcgtttgcgtttttatcacagaggaattaacatatatatagcaagcatggcagtcacactctacgaccttagctcttcctctgggttgaagaaacttgatgagtaccttctcccacgcagttacatcaccgggtaccaagctacaaaggatgatcttactgtttatgcagctttgccaactgctccatcagatgaatatggaaatgtttccaggtggtacaagcacattgatgctttgttgagaatct

SEQ ID NO: 171486 - DNA, 260 bp, Glycine max
cgcggcggttgcagaagaagattgcaagatgaagttcaacatcgcgagtcccaccactggatgccagaagaagctcgagatcgacgacgatcagaaactacgagcattttgggacaagaggatctcacaggaggtcagcggagatgcacttggtgaggaatttaagggctatgtctctcaaaattactggaggttgtgacaaacaaggattcccgatgaaacagggagtgcttactcctggtcgtgttcgacttttgctt

SEQ ID NO: 171487 - DNA, 256 bp, Glycine max
caacctccctccaccgccacccctccctaaatcctccgtctccgccgtccctccgccccctcccccgccgcgcgccgacatctcctcctccgggttcggctccgcccccaacacgctcactgagcccgtctgggacaccgtgaagcgcgatctctcgagaatcgtgagcaatctgaagctcgttgtgttccccaaccctttccgcgaggaccccggtaaggccctcagggattgggatctgtggggccctttcttc

SEQ ID NO: 171488 - DNA, 103 bp, Glycine max
gctcgtgcctctagggttatcatatctccatttccatttcctctctctcagtttccaagaatcttaagctatgggaaagtcttacccaaccgtgagcgctgat

SEQ ID NO: 171489 - DNA, 253 bp, Glycine max
ctcgagcgacacacttgggtggtgatgactttgataagagaattgttgattggctcggcttctaacttcaagagggatgaaggcatagaccttttgaaagataaacaagctcttcagcgtctcactgagacagccgagaaagcacaagatggagctctcaacattgactcaaactaacatcagtttgccattcataactgccacggcagatggacccaaacatattgagaccaccatcacaagggctaaattt

SEQ ID NO: 171490 - DNA, 254 bp, Glycine max
ggtgaactaattcggagaccttgcaagacttcatcaatggctgtcaaagtttatattgtgtactactccatgtatgggcatgttgagaaactagcagaagaaataaagaaaggggcttcctctgtggaaggtgttgaggccaagttatggcaggtacctgagacactgctggatgaggtgcttggtaagatgagtgcaccacccaagagtgacgtaccagtcattacccccaatgaactatccgaggctgatgg

SEQ ID NO: 171491 - DNA, 257 bp, Glycine max
cctcgaccgattcggctcaggcatcctactcctcccattacccacttttctgctcccccttgagaaagaatttgactcatcaaaattaaaaactcgcaccaacaatggccccaagagacagccgagccaccgcgttcgccggaccaggcccaggcccatcaccggcccacaaagagatccgctaccgaggcgtccggaaacgcccctggggccgctacgacgccgagatccgcgaccccggcaagaaaagcgcgtct

SEQ ID NO: 171492 - DNA, 268 bp, Glycine max
ctgaagaagagaagaagtggcgacagtgggtggataatcacttggtgcatgtcttgtcaccgaatatatatcggaatgttcctgaagctcttgaatcatttgattacatcaccacccaaggaaatttcagtttttctgagagattagtggcaaagtatggtggggctgcagctatgtattttgtgtcaaagaaattgaagaagagacacatcgtcactgatgagcgtgcagcactgtatggagctgccgaacaatgggttgatgcttt

SEQ ID NO: 171493 - DNA, 264 bp, Glycine max
gttccttcttctcgttcgtcgctttgtgatctctctctgcaaccatgtccgtcgagaaagagagagagacccaggtttacttggccaagcttgccgagcaggccgagagatacgaagaaatggttgagtgtatgaagaaagtagcaaaacttgatcttgatctgactgtggaagaaaggaaccttctctcagtgggatacaaaaatgtgattggtgcacgaagggcctcttggcgcataatgtcctcaattgagcagaaggaag

SEQ ID NO: 171494 - DNA, 262 bp, Glycine max
tctcgctcttgcaattattcctcttctcgcaatccgcactaaaattctagggttccgaaatggacgctgacggaaagatcaagaagggcgccggcggaagatagggcggcggcccaaagaagaagccggtttcaaggtccgtcaaagccggtctccaattccccgtcggaagaattgaccgttatttgaagaaaggaaggtacgctcagcgtgtcggtaccggtgctcccgtatacttggctgctgttctcgaatacctagc

SEQ ID NO: 171495 - DNA, 260 bp, Glycine max
gtcaggcggggctacccgctgagtttaagcatatcaataagcggaggaaaagaacctcattcttgaagtcacctctctcggtgtcgtcgccttcgtattcctcctcgtcgtcgtcgattagggaaaccacaattcaagaagatgaatgtgaagagaggctgaatgtttcatcatcacctatggctgcagggtgccctggttgcttatcatatgtaatgatcatgaagaacaaccctaagtgtcctaggtgtaactctctt

SEQ ID NO: 171496 - DNA, 260 bp, Glycine max
aagacaaagagactgacatgaaccataagaataaaaaagataattttggtagtgatgcaccacattttcagagtggagttctccgtactaactgcattgactgcttggaccgtacaaatgttgcccagtatgcatatggtcttcaagctttaggacgccagctccatgcaatgggtttgactgatgttccaaaagtggatcctgatagtagtattgctgcagctctaatggatatgtatcaaagtatgggagatgctctt

SEQ ID NO: 171497 - DNA, 259 bp, Glycine max
gacgaagatgccttcttcgctgattacgctgaggctcaccaaaagctttctgagcttgggtttgctgaagcctaagcaacgttttggggattgttggagaggcacggtgcccataatatttctctcataaattctatggtcatggtttctaatgcgccactgtgggttcctcaaatttttagatagcttttgaatgtattttgctggacgtggtgatgatgattggagttgggttgtttttatttgtggtcgatccttt

SEQ ID NO: 171498 - DNA, 258 bp, Glycine max
gtttgttgttgtaactcgttcttcttcttttgttgttctgtgtttgtgtttgttttttctctcacctgaaaatgtcttgctgcggtggtaactgtggttgcggaagctcctgcaagtgcggcaacggctgcggaggctgcaagatgtacccagacttgagctacactgagtcaaccaccaccgagaccttggtcatgggagtggcacctgttaaggctcaatttgagggtgctgaaatgggtgtgcccgctgagaacg

SEQ ID NO: 171499 - DNA, 259 bp, Glycine max
ggactcgaccctaatgtttcagatgaagatctcaggcagccattctcccagtatggtgagatagtctctgttaagatacctgttggaaagggctgtggttttgtccaattcgcaaacagaaataatgctgaagaggccttgcagaagctaaacgggacatcgattggcaagcaaacagtccgtctttcttggggccgtaatccagcaaataagcagtttagaatggatttcggcaacccctggactggggcatattatg

SEQ ID NO: 171500 - DNA, 257 bp, Glycine max
ctcttcttctcttgcggctagggttttagcgcacttcttctagatttaaggaagatgggtaaggaaaaggttcacatcagtattgtggttattggccatgttgactctgggaagtccactaccactggccacctgatctacaagcttggaggcattgacaagcgtgttattgagagatttgagaaggaagctgctgagatgaacaagaggtctttcaagtatgcctgggtgcttgataagcttaaggctgagcgtga

SEQ ID NO: 171501 - DNA, 257 bp, Glycine max
gccacttcagagaaaatggcggtacctctgctctcgaagaagatcgtgaagaagagggtgaagaagttcaagaggcctcagagtgacaggaaaatttccgtcaagacaaactggcgtagaccaaagggtatagattcccgtgttaggagaaagttcaagggatgcactttgatgccaaacatcggttatggttctgacaagaagacccgccactatctccctaatggttttaagacatttgttgttcacaatgtgaa

SEQ ID NO: 171502 - DNA, 262 bp, Glycine max
gctgtttgcaacttcaaatgattcagagactttggtcccagcatttaaagaagcagcaaagtctttcaagggaaagttgatctttgtatatgtggaaatggataacgaagatgttggaaagcctgtttcagaatactttggtatcagtgggaatgctccaaaagtacttggatacactgggaatgatgatggaaaaaaatttgtgcttgatggagaggtgactactgacaaaattaaggcatttggggaagatttcgttgaa

SEQ ID NO: 171503 - DNA, 260 bp, Glycine max
gttttcttcagaaatttgccatcgttgagagaagcgtgagagccttagtcgttcaagatgagagctaagtggaagaagaagcgcatgaggaggttgaagaggaagcgccgaaagatgagacaaagatctaagtaggtgcttgagcaggagttgagatgagctttccatctgctaccagcctcatgacattttaggctgttatggctcttatgatcttgaggtctagtcgctaggggagcttcactcttgacttagtttgc

SEQ ID NO: 171504 - DNA, 258 bp, Glycine max
caaagtccatgaagtctgctccatttcgccgccacaagaaaccccaccaacaactcttcccttcaccctcttcgacgtcctatggcttcggttccccccagtggagcgtctcttcttctattccttcccaaacccaacaacaacatcatttttcgacaccaccgttctcccaaatctcaaacactccctctccctcactctccaccacttccctcctctcgccggcaccatcacatggcccaatcactcacccctccc

SEQ ID NO: 171505 - DNA, 257 bp, Glycine max
caaagagaaaaaagagagaagaaaagcgaatcccctgtgatctctcacacaattccaattcctctggatctcgtctcgatcgatagatctcgaacatgagcactggggagcttctcaacatcgaacctctcgaactcaagttcccctttgagctgaagaagcagatctcatgttctcttcaattgtccaataagaccgatagctatgtagccttcaaggtgaaaacaaccaatccgaagaagtattgtgttcgtccg

SEQ ID NO: 171506 - DNA, 254 bp, Glycine max
caaacctaacgcagcatcgctattctcttcattccatggctttgcccaaccagcaaaccgtggattaccctagtttcaaactcgttatcgtcggcgatggtggcacaggacagacaacctttgtgaaaaggcatctcaccggagaattcgagcagcaatatgagccaaccatcggtgtggaggttcacccattggattttttcacaaactgtggaaagattcgattttactgctgggatactgctggacaggag

SEQ ID NO: 171507 - DNA, 255 bp, Glycine max
ccctaacgcgtgcagagcagagagagacgcagccatggggcgaagacccgcgaggtgttataggcaaattaagaacaaaccataccccaagtcacggttttgccgtggtgttcctgatcccaagatcaggatttacgatgttggtatgaagaagaagggtgttgatgaatttcctttctgtgtccatctggttagttgggagaaggaaaacgtttctagtgaggccctggaagctgctcgtattgcttgcaacaa

SEQ ID NO: 171508 - DNA, 255 bp, Glycine max
ttcccaattacccttcccaattttcaccaaaacctaatactcccacaccaatcttcgatcatggacgccgattcacaacctcaacaactcgaagagagaacagaggagcaagaactgaagtacctggaattcgtgcaattcgcgaccatacaggctctgatgcgctgcgccatcctctactcatacgccaaggagcgcgcgggtcctctgaagcccggtgtcgacaccgtggaggaggccgtgaagaccgtcgtg

SEQ ID NO: 171509 - DNA, 255 bp, Glycine max
aagcgaagaaagattcgaaacgaagaaagaaagcgttgtgaagaatggcggaagagggacaagtgatcggtgtccacagcgtagaggagtggaaggaacatctcaagaagggagaagagtccaagaaattgattgtggtggattttactgcttcttggtgcggtccatgccgtttcattgccccaattcttgcagagtttgctaaaaagttgccgaatgtcaccttcctcaaggtggatgtggatgaattggaga

SEQ ID NO: 171510 - DNA, 256 bp, Glycine max
gaagcagagggagtagcggcattaaaaatgcagatcttcgtgaaaactctgacagggaagactataaccctcgaggtcgagagcagcgacaccatcgacaatgtcaaggccaagattcaagacaaggaaggcattcctccggatcagcagcgtttgattttcgccggaaagcagcttgaagatggaaggaccctggccgattacaacatccagaaggaatcaacccttcatctcgtcctcaggcttcgtggtggca

SEQ ID NO: 171511 - DNA, 253 bp, Glycine max
acagccaaacaccatttcattaattcttgcagaatattgcttagttttgttttatctgaatttggaaacagcttttgaatggctttttcaagagttgcactgctaatatgcacggtcgggtattttgtgattgcctctgccggcaatttccaccaagattttgatatcacatggggagatggtcgggctaagatactcaacaatggagagcttctcactctgtcacttgacaaagcctctggctcgggtttcc

SEQ ID NO: 171512 - DNA, 253 bp, Glycine max
attggctttccaagatcattgggttttcttgttgcattcatgaccttctactccttgggtttggcattgtccaaggatatacctgacgttgaaggagataaagagcacggcattgattcttttgcagtacgtctaggtcagaaacgggcattttggatttgcgtttccttttttgaaatggctttcggagttggtatcctggccggagcatcatgctcacacttttggactaaaattttcacgggtatgggaa

SEQ ID NO: 171513 - DNA, 252 bp, Glycine max
gtttcgaatagattatcctaagtctttgggaatagtgctgcaatggcttcaagtcaagaagaggtgacccttttaggagctactggaagcccatttgtgtgcagggttcatattgccctcaagttgaagggagttcaatacaaatatgtcgaagaaaatttgaggaacaagagtgaactgcttctcaaatccaacccagttcacaagaaggctccagtgtttattcacaatgagaagcccatagcagagtct

SEQ ID NO: 171514 - DNA, 255 bp, Glycine max
agtgcacattatgggattagtattttgtgatgctgatatgtattgtatccttcttattaaatatggtatgaaagctaacaattttgcttgatctgatgcttctgtcctctccacatgagtctttttggctacttttagatactgggatacaaggcagtcaaatccagtgcacacacagcaactcccagagcgctgctatgctatgacagtgagacatcctctgatggttgttggcactgctgatagaaatcttat

SEQ ID NO: 171515 - DNA, 253 bp, Glycine max
agaattttcaaccagattagccaaaaatttggagcagctgattctgaaagagggaccagagacaattgctgcatttattgctgaacctgtaatgggggcaggaggtgtaatagttccaccatcaacttattttgagaaggtccaagccgttgtcaagaagtatgacattctttttattgcagatgaggtacttccctaattcttaacatactgttatataaggtattctgtggtcgagttttccattctaatt

SEQ ID NO: 171516 - DNA, 252 bp, Glycine max
ctagttctagatcgcgatctagaactagtccaacctcaaaaactcaatattctcaacaacacactactttccttcttccaataatgacttcttcattctctgttcgttttcttgctcctccatcatcatgcttccccagctctcggcccaagacatggctctgcgccgccaccaccccaacggtggctccggcaactgcctcctcggaggtggaggcttcaaggttggagcctagagtggaggagagagatg

SEQ ID NO: 171517 - DNA, 255 bp, Glycine max
gtcttgatgctgacaactgcaaggtcctcgtcaacattgagcaacagagtcctgatattgctcaaggtgtgcacggccacctcacaaagaggcctgaggagattggtgctggtgaccaaggtcatatgttcggctatgccactgacgagactcccgagctcatgcccttgagccatgtccttgccacgaagctcggtgccaagctcaccgaggttcggaagaacgggacatgcccttggctgagacctgatggca

SEQ ID NO: 171518 - DNA, 252 bp, Glycine max
ggtgtctttgatccgagccatcatgtacatggtggctcagtgcttaggtgctatctgtggagttggactggttaaggctttccaaaagtcttacttcaacaagtatggaggtggggctaattccctcgctgctgggtacagcacaggtactggattgggtgctgagattattggaacctttgttttggtctacactgtcttctctgccactgaccccaagaggaatgccagagattcccatgtgccggtttt

SEQ ID NO: 171519 - DNA, 252 bp, Glycine max
catttggtgagaacatggtgatgtctgagctagtggagtgctgcaaggagttggatgaagtgcatcatgctttggccgggcataagaaggaggcagcatggcggttaagcagggtggagctgcagttggagtctgagaaggccgggcgaaggagggagaagatggaggaaatcgaagcgaaaatcaaagctctgagggaggagcaaacggctgcattggatagaattgaagcagaatatagggagcagttgg

SEQ ID NO: 171520 - DNA, 251 bp, Glycine max
aaagaaatgctttaatggtgagttatgtttttgctatggcttttttggtgtctgtgtcatgtcgtgcgaactatgttgtcatggataagaggtgggataggattggagggtatattcggagagcttgatgtatcatatattgtgtggcatccctctggatgtggcgggcacagaattgttgagaagcatttttcatcttggaattcatctgtcttcgtaagtaggtttgtctgtagcaaaggagtggtgat

SEQ ID NO: 171521 - DNA, 249 bp, Glycine max
tcaatccccatcactttgtggctgtcactggctcctgttgttattggtgtgtccatggcatctttgactgagctctcgttcaactgggtcggcttcataagtgctatgatttcaaacatctccttcacataccgaagcatctattcaaagaaagccatgactgatatggacagtaccaatatctatgcctacatttccatcattgctctaattgtctgtataccacctgccgtaattttggaagggcct

SEQ ID NO: 171522 - DNA, 249 bp, Glycine max
ctgccaaagaaggtcttaatgttgaagaagcattccaatgcatagcaaagaatgccctgaaaagtggagaagaagaagaattgtaagttcttaaatctgggcatctctttcatatatgtgaactgaccaactgaactcactaagacataaatacaataagctacatctctcagatttatgagattgcgttcattggttgagggagtgtagtttggttttgtcagagttctaattcataattttcatgtt

SEQ ID NO: 171523 - DNA, 251 bp, Glycine max
gtttcactcacactgtgtttggagcagaatcagatcgtgtgttccgtacgttcgttcgttcatttccagtgtcaaacatggcgtctcagatgagcaagaagagaaagtttgttgcggacggagtgttcttcgccgaactgaacgaggttctgacacgtgaattggcggaggacggttactccggcgtggaagttagggttacgccgatgcgcaccgagatcatcatcagagccaccagaacccaggctgtt

SEQ ID NO: 171524 - DNA, 250 bp, Glycine max
ctctctgagactctcgctatcgtcacagccatggaggacgccaatcttcagaggctccattgctccgtcaagaactacgattggggtctgccaggtcacgtctccgaggttgccagactccacgcgctcaattccgcgtctcaattacacgcggaggaccctttcgccgagctttggatgggtacccacgattcaggcccttcctttttggcctcctccaacaggaatgggaatggggtctcccttaagg

SEQ ID NO: 171525 - DNA, 247 bp, Glycine max
atggatcgcatcctaaggcctgaaggagcaatcatcatccgggatgaagttgatgttcttaaccaggttaagaaaattgttgggggcatgagatgggatgccaaactggtggatcatgaggatggccctcttgtgcctgagaagatattggttgctctcaaagtgtattgggttggcaccagcaaaaacaaaacatccaatgaggaataaaaccactattgttcgggtgtgaatcttgtacttcagc

SEQ ID NO: 171526 - DNA, 251 bp, Glycine max
tgtggtggtcgcggtggtggagggggatacaaccgtagcggtggcggtggaggctattggcggcggcggtggatatggcggtggcggtggcggtggctatggcggtggcagagaccgtggttatggtggtggtggtgaccgtggttactctcgtggtggtgacggtggtgatggaggctggagaaactagggcttgatgtcgttgattagggtttatgattatgctcagtaattttagttgtgtttgagtt

SEQ ID NO: 171527 - DNA, 252 bp, Glycine max
caaacctaacgcagcatcgctattctcttcattccatggctttgcccaaccagcaaaccgtggattaccctagtttcaaactcgttatcgtcggcgatggtggcacaggaaagacaacctttgtgaaaaggcatctcaccggagaattcgagaagaaatatgagccaaccatcggtgtggaggttcacccattggattttttcacaaactgtggaaagattcgattttactgctgggatactgctggacagg

SEQ ID NO: 171528 - DNA, 247 bp, Glycine max
cgaatagattatcctaagtctttgggaatagtgctgcaatggcttcaagtcaggaggaggtgacccttttgggagctactggaagcccatttgtgtgcagggttcatattgccctcaagttgaagggagttcaatacaaatatgtcgaagaaaatttgaggaacaagagtgaactgcttctcaaatccaacccagttcacaagaaggttccagtgtttattcacaatgagaagcccatagcagagtc

SEQ ID NO: 171529 - DNA, 246 bp, Glycine max
ctgttggataatcatcaagaacaaggtatatgatgttacctcatatgtggaagaacatccaggtggtgattccattcttgcacatgcaggagatgattcaactgaagggttttttggaccacagcatgcaactcgagtctttgacatgattgaagacttctacattggagatttggagcaatagcttagtcagttactccaggaatgtattgttcaagagatgtatgatttgagaatttcaacatt

SEQ ID NO: 171530 - DNA, 275 bp, Glycine max
ctcctcggtcgccaccgcttcgccggcgtggacatgcgcatccgcgtgaagggcggcggtcacacctcccagatatacgccatcaggcagagcatagccaaggctctcgtcgcttactaccagaagtacgtcgacgagcagtccaagaaggagatcaaggacatcctcgtcaggtacgaccgcaccctcctcgtcgccgatccccgccgctgcgagcccaagaagttcggtggtcgcggtgctcgcgccaggtttcagaagtcctacgttgattt

SEQ ID NO: 171531 - DNA, 271 bp, Glycine max
ctagtgcaccgtaagggttgtgaagcaggcagagaagagccatggtgcacgtttctttctaccgaaactatgggaaaacgttcaagaagcctcgtcgtccctacgagaaggagcgtttggacgccgagttgaagctggtcggtgagtacgggcttcgctgcaagagggagttatggagggtccagtacgccctgagccgcatccgtaacaacgccagaaacctattgacccttgatgagaagaaccctcgccgtatcttcgagggtgaagc

SEQ ID NO: 171532 - DNA, 266 bp, Glycine max
ggcgaaagagaagatggccacgttccagggcagctcgtgtgggagatcgtgaagaaaaacaactcctttttggtcaagcagttcggaagggggacccagagcgtcgaattcagcagagagagcaacaatctctacaacctcaattcgttcaagtactctggtttggcaaacaagaaaactgttacggtacagcctgagggtaaagatcaggctgtgttgttggctacaacaaagacaaagaagcaaaacaagcctgctgcattgct

SEQ ID NO: 171533 - DNA, 267 bp, Glycine max
gttgttgttggaagccaaaaccctagcagccggcgagaatggcagacgttgaggttgatgtggcggcggcggcggcggcggcggctgcagggcagccaaagaagagaacgttcaagaagttcagcttcaggggggtggatctggacgcgcttctggacatgtccactgacgaactcgtgaagatgttcagtgctcgcgcacgcagaaggttccagagaggtctcaccagaaagcccatggccttgattaaaaagctccgcaaagcga

SEQ ID NO: 171534 - DNA, 271 bp, Glycine max
aacgcgtgcagagcagagagagacgcagccatggggcgaagacccgcgaggtgttataggcaaattaagaacaaaccataccccaagtcacggttttgccgtggtgttcctgatcccaagatcaggatttacgatgttggtatgaagaagaagggtgttgatgaatttcctttctgtgtccatctggttagttgggagaaggaaaacgtttctagtgaggccctggaagctgctcgtattgcttgcaacaagtacatggccaaatttgctg

SEQ ID NO: 171535 - DNA, 273 bp, Glycine max
aaaaaacccttctttctttcaggttcattacttgatcagtgtcaaaagggtagttgcaaattgcaatggctaagcatgatgttgagggtggttccttctcagcaaaggactaccatgatcctcctccagcacctttgattgatgctgaggaactcacacagtggtccttctacagggctttgattgctgaattcattgccacattacttttcctttacatcacagtgctcactgtgattggttacaagagccagagtgatgtcaaggccgggg

SEQ ID NO: 171536 - DNA, 270 bp, Glycine max
ccccatacctactttcagctcctaagagcacgcatcactgttgcacttcttactcgttctccctcttttttttcttcttcttcttcttcgctaaaccccccctttatttttcctatctcactaacatcgatgggagacgagaataagaccaagtcccctgcttccggcgtgtggtccaccatcaagcctttcgtcaatggcggagcctccggcatgctcgccacctgcgtcattcaacccatcgatatgatcaaggtgaggattcaactt

SEQ ID NO: 171537 - DNA, 269 bp, Glycine max
gcaataatgtacatggtggctcagtgcttgggagccatatgtggagttgggttggttaaggccttccaaaaggcttactacaacaggtatggtggtggggccaatgagctcagtgaagggtacagcacgggtgttggattgggtgctgagatcattggaacctttgttttggtttacactgtgttctctgcaactgatcccaagaggaatgctagagattctcatgtgccggttttggctccacttccaattggctttgctgtgttcat

SEQ ID NO: 171538 - DNA, 266 bp, Glycine max
caagcatttgaagatttctgctccaacttgaatgtgtcaccccgtcacaggcaaataataaaggaatatggtcaagcaattcatgacttggcatcaaatttatcacaaaaaatggctgagtctttgggtataatggataatgatttcaaggactggccattcattttgaggactattaaatatagttttaccccagatgttataggctccacgggagcacaattgcactcagatacaggatttatcactctacttcaagatgatga

SEQ ID NO: 171539 - DNA, 258 bp, Glycine max
tgaggaggcacaccttcacgagcagtcatggttctcaaaaccgagctgtgccgattcagcggtgccaagatctacccagggaaaggcatcagatttgttcgtggtgattctcaggttttcctgtttgctaactcaaaatgtaagaggtatttccacaacaggttgaagccgtcaaagctcacgtggactgcaatgtaccgaaagcagcataagaaggatattgctcaagaagctgtgaagaagagaagacgtgctacc

SEQ ID NO: 171540 - DNA, 270 bp, Glycine max
taagagttgctgcttcttcagccactccgcatctcgcagcctctgtgccctcaacaaccatggctgaaatcgaaactaccgttccagatcccacccaaatcgacgtcaaactcttcaatcgctggagcttcgaggatgttgaggttaatgatatgtctctggctgattacattggagtgtccccatcaaagcatgctacatatgttcctcacactgctggtaggtactcagtgaagaggttcaggaaagcgcagtgccccattgttgaga

SEQ ID NO: 171541 - DNA, 269 bp, Glycine max
agagagagagggagtcagagaaccctaggtaagaagaaaagatgccggctggtcatggtttgagatcccgcaccagagattccttctctcgtcctttcaggaagaagggaaccatcgccctcaccacatacctgagaacctaccacgtcggcgactatgttgacgtcaaggttaacggtgccgttcacaagggaatgccccacaaattctaccatggccgcaccggacgcgtctggaatgtcaccaaacgtgctgttggctcgaagtca

SEQ ID NO: 171542 - DNA, 271 bp, Glycine max
tagaagagcaaagagagtgagaaaagaaggaagaagaagaagaagagatggcaaatgaactacccgtcaaagcttttggttgggctgcttcagacacttctggcacccttgccccttttcatttctccagaagggaaaatggcgtcgatgacgtcactctcaagattctcttctgcggggtttgccactctgatctccacactctcaaaaacgactggggtttcaccacctaccctgtcgttcctgggcatgaaattgttgtgttgtgaca

SEQ ID NO: 171543 - DNA, 268 bp, Glycine max
attgtttgttgttgtaactcgttcttcttcttttgttgttctgtgtttgtgtttgttttttctctcacctgaaaatgtcttgctgcggtggtaactgtggttgcggaagctcctgcaagtgcggcaacggctgcggaggctgcaagatgtacccagacttgagctacactgagtcaaccaccaccgagaccttggtcatgggagtggcacctgttaaggctcaatttgagggtgctgaaatgggtgtgcccgctgagaacgatggctg

SEQ ID NO: 171544 - DNA, 267 bp, Glycine max
ctcttgcagtcgcagaggaaaaccctagctagtagtctcagttcgtttgagagagaaaaaatggcagagggtctcgttctccgcggaaccatgcgcgcccacaccgacgtcgtgacggcgattgccactcccatcgacaactccgacatgatcgtgacggcgtcgcgcgacaaatccatcattctctggcacctcaccaaggaggacaagacctacggtgtcccccgccgccgcctcaccggacattctcacttcgtccaggacgtc

SEQ ID NO: 171545 - DNA, 267 bp, Glycine max
tgcagaagaagaagaagcaaagatggtgggaccagtgagacctcagtttgtgctctttggttcttccattgttcagctcagttactctctccaaggttggggcgctattcttgctcatttgtatgctcgcaaggcggatataattctgcgaggatactctggttggaattcaaggcgtgctgtgcaagttctggatgaaattttccctaagaacgccactgagcaaccagatttggtaattgtgtactttggtggtaatgattctct

SEQ ID NO: 171546 - DNA, 264 bp, Glycine max
atcgcgatcccgcgagggtgagctaactccaaaaacccgtcctcagttcggattgtaggctgcaactcgcctgcatgaagccggaatcgctagtaatcgccggtcagccatacggcggtgaattcgttcccgggccttgtacacaccgcccgtcacactatgggagctggccatgcccgaagtcgttaccttaaccgcaaggagggggatgccgaagcagggctagtgactggagtgaagtcgtaacaaggtaccgtactggaa

SEQ ID NO: 171547 - DNA, 252 bp, Glycine max
tttgtgttttcgtcagcgctgattgatctggccatcaagaggaacagtttgattggaggagatgactttaagagtggtcagaccaaaatgaaatctgtgttggtggatttccttgtgggggccggcatcaaggtacaacttttgttgttgttgttgaactgttcgtttttcacgatatcagttgtgccacgaaaatttgtttggctagaatttagtccggctttctcttatgacaagttttgtataggctaa

SEQ ID NO: 171548 - DNA, 263 bp, Glycine max
cggctcgagcgcttctcatctgaagaagaacagcaagagctacaagttcgcctacatctgggtgggaaactccgaaacccaatgcccggggcaatgcgcgtggccattccaccaacccatttatgggccccagagcccacccttggttgctcccaacaacgatgtgggacttgacggaatggtcataaacctcgccagcctccttgccggaaccgccaccaaccccttcggaaacggctacttccagggtccgcggaggctcc

SEQ ID NO: 171549 - DNA, 263 bp, Glycine max
tattattcttccatttcattaaaaagaaaatatcataaatgggtattttcacattcgaggacgaaatcacctcccctgtggctcctgctactctttacaaagctctagttacagatgccgacaacatcatcccaaaggctcttgattccttcaagagtgttgaaaacgttgagggaaatggtggccctggaacaatcaagaagataactttcgttgaggatggagaaaccaagtttgtactgcacaagatagaacagttgatg

SEQ ID NO: 171550 - DNA, 268 bp, Glycine max
tgagtattctgatcgctccctgagagagctcgtcgcggcggttgcagaagaagattgcaagatgaagttcaacatcgcgaatcccaccactggatgccagaagaagctcgagatcgacgacgatctgaaactgcgagcattttgggacaagaggatctcacaggaggtcatcggagatgcactcggtgaggaatttaagggctatgtcttcaaaattaccggaggttgtgacaaacaaggatttccaatgaagcagggatgctgactc

SEQ ID NO: 171551 - DNA, 264 bp, Glycine max
gcgagaaagtgagaggagagagaaagtagctgatcctccatggcctccaccaaggaacgcgaaaactttgtctacaccgccaagctcgccgaacaagccgaacgctatgaagaaatggtggaagcaatgaagaatgtggcgaactgaacgtggaattgacggtcgaggagcggaaccttctgtcggtagggtacaagaacgtggtgggtgctcgtagggcttcgtggaggattctatcgtcgattgaacagaaagagaagctaa

SEQ ID NO: 171552 - DNA, 262 bp, Glycine max
gtttcaagcagtggcacaacacatgccccctctttgtggtgcaagagaagcttgaagtctcaaagggcaccccagttaccttcacaccctacaatgccgaaagtggtgtcattctaacctcaaccgatctcagcatcaagtcctatgtgaaaagcaccacttgtgataaacctccagtgtggaagctcctcaaggtgctaactggggtgtggtttttgagcactggtggtgttgaaggcaatccaggggttaacctgttgtc

SEQ ID NO: 171553 - DNA, 264 bp, Glycine max
aaccctagttcgcttgcagtcacacaagaggccaatcctattcatagctcgagatgggtgaagaagtgaaggtagttgttccagaatcagtgttgaagaagcgcaagagggaggaggaatgggcgttggccaagaagcaagaactcgatgctgccaagaagaagagagccgagagccgcaaactcatctacaacagagctaagcagtacgctaaggagtacgatcaccaggagaaggaattgattcggttgaaagcgaggccaa

SEQ ID NO: 171554 - DNA, 258 bp, Glycine max
attttcttctttctctctcccttagtcaaagggactcattgttcttctcccaggttatttagaaaagcaaaatggtgaagatttgctgcattggtgctggatatgtggggggtcctactatggcagtcattgcacttaagtgcccatccattgaagttgctgttgttgatatctctaaatcccgcattgcagcctggaacagtgaccagcttcctatctatgaacctggccttgatggtgttgtgaagcatgccgtgg

SEQ ID NO: 171555 - DNA, 262 bp, Glycine max
cttcattcacgaccaaaatcaactgttggaactccagcttatatagcaccagaggttctttccaggagggagtatgatggcaagttggctgatgtatggtcatgtggagtgactctttatgtcatgctggttggagcttatccctttgaggatcaggatgaccctaggaattttaggaaaacaattcagcgtataatggctgttcaatacaaaatccctgattatgttcacatatctcaagactgcagacactcctttctcg

SEQ ID NO: 171556 - DNA, 267 bp, Glycine max
gctgaagcaaagcaatggctacttcaaagttgaaaacccagaatgtggttgtatctctctccctaaccttaaccttggtactggtgctactgaccagcaaggcaaactcagcggaaactgtttctttcagctggaacaagttcgtgccgaagcaaccaaacatgatcctccaaggagacgctattgtgacctcctcgggaaagttacaactcaataaggttgacgaaaacggcaccccaaaaccctcgtctcttggtcgcgccctct

SEQ ID NO: 171557 - DNA, 265 bp, Glycine max
aagagatggcttctctcttcttactccttacaagatgggcaaattcaatctgtcccatagagttgttttggcaccgctgaccagacagaggtcttacgacaacgtcccacaaccccatgccatcctctactactcccagagaacttccaacggaggccttctcattactgaagccactggcgtctctgacacggctcaaggctatccgcaaacccctggcatatggactaaagaccatgttcaagcttggaaacccatgtcgatg

SEQ ID NO: 171558 - DNA, 263 bp, Glycine max
gttgaaaagcgactttttctctctgcaactctcccttttcttccttcgtagatcgaaagggaatcttcttccatggcctccaagcggattctgaaggagcttaaggacctccagaaagaccctccaacctcttgcagcgccggtcctgtagcggaagatatgtttcattggcaagcgactataatgggtccccctgatagcccttatgctgggggtgtttttctagttactattcattttcctccggattatcattcaagcca

SEQ ID NO: 171559 - DNA, 262 bp, Glycine max
aatcgtgagaggggcagtagccgagattccgtgagttgcaaaaatgaagacgattctttccaccgagaccatgaacatcccggacggcgtgagcatcaaagttcatgccaaggtcatcgaagtcgagggcccccgcggaaaattggtgcgagacttcaagcatttgaatctcgattttcagctcattactgacgaaaacggtaaaagaaagctgaaaatcgacgcgtggtttggttctcggaaaacatccgcgccattcgca

SEQ ID NO: 171560 - DNA, 258 bp, Glycine max
cggggatgacttgtggctaggggtgaaaggccaaccaagatcggatatagctggttttccgcgaaatctatttcagtagagcgtatgatgtcgatggcccgaggtagagcactcaatgggctagggtggccccatttcgccttaccaaccccagggaaactccgaatacaggcctagatcgtttgtacagacagacttttagggtgctaagatccaaagtcgagagggaaacagcccagatcgtacgctaagtcccta

SEQ ID NO: 171561 - DNA, 261 bp, Glycine max
cttgtttctcaacaaggagagattgccatcaggattgatgaaaacatggatgatacattggcaaatgtagagggggcgcaaggggctttgttgaagtatctgaacaacatatcttctaataggtggctgatgatcaagattttctttatattaatattttttcttatggttttcttattttttgtggcatagtcattctaatgacagaaaaatgataacgaggacacacatgacgcccttattgctggtgataagcgtttt

SEQ ID NO: 171562 - DNA, 257 bp, Glycine max
agggttttagcgcagttcttctagatttaaggaagatgggtaaggaaaaggttcacatcagtattgtggtcattggccatgtcgactctgggaaatccactaccactggtcacctgatttacaagcttggaggcattgacaagcgtgttattgagaggtttgagaaggaagctgctgagatgaacaagaggtctttcaagtatgcctgggtgctggacaaacttaaggctgagcgtgaaagaggaataccattgata

SEQ ID NO: 171563 - DNA, 261 bp, Glycine max
ataaaccctcgcttcgttgtgtgctctctctttcttctgcatcactttccattctcttcaacctaacgcagcatcgctatactcttcattccatggctttgcccaatcagcaaaccgtggattaccctagtttcaaactcgttatcgtcggtgatggtggcacaggaaagacaacctttgtgaaaaggcatctcaccggagaattcgagaagaaatatgagccaaccatcggtgtggaggttcacccattggattttttca

SEQ ID NO: 171564 - DNA, 266 bp, Glycine max
tagcacaccacacaaaaaagcaaaacagagagaacaactgttactcacacacgccatgggtatgtaaatgaatggtttttgagcaacagcagttaaaagagaaaagggattcagcgaagatgacatcggttggtgtggcaccaacttcgggtttgagagaagccagtgggcatggagcagcagctgcggatagattgccagaggagatgaacgatatgaaaattagggatgatagagaaatggaagccacagttgttgatggcaac

SEQ ID NO: 171565 - DNA, 263 bp, Glycine max
  unsure (1)..(263): unsure at all n locations
cactttctatctcattttcgttcggttcaaacactctcatggcatcagacaagaagattaggatcggcatcaacggatttggaaggattggccgtttggtggccagggttgctcttcagaggaatgacgttgaacttgttgctgtcaacgatcctttcatcaccactgattacatgacatacatgntcaagtacgacaccgttcatgggcantggaagcattttgatgtgaagctgaaggactctaagacccttctcttcggt

SEQ ID NO: 171566 - DNA, 259 bp, Glycine max
accagtttcactgcataaatttgagagaaaactctgcaaacatgttggtttatcaggacctccttacaggtgatgagcttctctcggactccttccgttacaatgaaattgagaatggaatgctgtgggaagttgaggggaagtgggttgttaagggagcagttgatgttgacattggtgcaaacccttctgctgagggtggagaagatgagggagtcgatgacgcagctgttaaggttgttgacattgtcgatacatt

SEQ ID NO: 171567 - DNA, 259 bp, Glycine max
ggaaacctctacaaacattgcctccaaggtgcgcgctacgtatactattgtttcctcaactttgtttcctcgatgaattttaacaacgtgaatgctccaaaggttcctggtggcggagtcgctgctttgcttaaagttggcattattggtgggcttgttgtatatggggctgcaaacagcttgtacaatgttgagggaggtcatcgagccattgtcttcaatcgtgttgtcggtgtcaaagataaggttatcctgaagg

SEQ ID NO: 171568 - DNA, 258 bp, Glycine max
cattcattcgcatctttctctcttctctctccacccaaaccctaactcccgaccctgttcccctctcgtatccgtcatgaaaggaggaaagtccaagaccgaatctaagagagccgatcccaaacttgctgtgaataagaagggagccgccaccaaggctaggaaacccgccggcaaggggaaggcagcgaaagaccctaacaagccaaagaggcctccaagtgctttcttcgttttcatggaggagttaggaaggta

SEQ ID NO: 171569 - DNA, 250 bp, Glycine max
ctttcatatcaaggtgaaagcaacaaatggtgacactttcttgagaggagaggattttgacaatgccttgttggattttctggtgaatgaattcaaaagaactgagagtattgaccttgcaaaggacaggcttgcactgcagaggcttcgtgaagctgctgagaaagctaagatcgagctgtcttcaacgtctcaaactgagatcaacctgcctttcatcactgctgatgcatctgggtgcaaagcatct

SEQ ID NO: 171570 - DNA, 257 bp, Glycine max
gtttatgtggttgcgcctctgcctgtaagagtgaaaaaaccttctcttttccttctctcaagtctcaagagatttcatcatggctccaaagaaggacaaggctccaccaccttcctccaagcccgccaaatctggcggtggcaagcagaagaagaagaagtggagcaagggaaagcaaaaggagaaggtgaataacatggtgctgtttgatcagggcacctatgataagctcctttctgaagctcccaattcaagct

SEQ ID NO: 171571 - DNA, 258 bp, Glycine max
ccctttcctctccgaaccctcgatcactctcacgcgctcctatattcgctcctccaccgtcgctctctcgaacaaccacaacaccatcttcatcacatggcaaacgcagcatctggtatggcagtccatgatgactgcaagttgaggtttttggagctgaaggcaaaaaggacacaccgtttcatagtttttaagattgaggagcagcagaagcaggtcattgtggagaagcttggtgagcctgcccaggctatgaag

SEQ ID NO: 171572 - DNA, 276 bp, Glycine max
cccgtaaccatgtctcagactgttgtcctcaaagttggtatgtcatgtgaaggatgtgttggagcagtgaagagagttctaggaaaattggatggtgtggaatcatatgacattgatttgaaggaacaaaaggtggtagtgaaaggaaatgtccagccagacacagttctgcagaccgtttccaaaactgggaagaagactaccttctgggaaggtgaagcagcaacatctgaaactagcacagcaactgcctaaaacatttgcctctattctgtg

SEQ ID NO: 171573 - DNA, 269 bp, Glycine max
tgagcgatatcttcgactgtgggaagcttctttttctgatcttttacgtgtcaatataaattcccttcaaagaaataagctttccactctttttcaatcaatcaccaatggctccttctttcacttacgtcaaaatcttctcttctctcgtcgcagaggattctccaacgctctcaccagacgcgggtacgctgttgcatcacaaagtgcaacaaagggaggagtggcctcaatgagcggcaagatggcaccaaagtcaggggaagata

SEQ ID NO: 171574 - DNA, 268 bp, Glycine max
tatcgagcgaatcggctcagtgttgttgctgctcatcctcacgtaacctccgagcactgcaccgaagaacgaagccatggggaagacacatggaatgggatctgctcgcaagctcaagtcccaccgcaggaggcaaaggtgggctgacaagtcatacaagaaatcacatcttggaaatgaatggaagaaaccttttgctggttcatcccatgccaagggaattgtccttgaaaagataggtattgaggctaagcagcccaactctgcc

SEQ ID NO: 171575 - DNA, 267 bp, Glycine max
atcaatcttctgagagtgtttggttgaaagtagcaaagatgtttcctttcgggcaaaagggtcaaaagataaaggggactatggtggttatgcagaagaatgtgttggatatcaacagcatcaccagtgttggagggatcgttgaccaaggcttaggcttcataggcagtgcagtcgatgcacttacttttgcagccaccaaaatctccatccagttgattagtgctaccaaggctgatggtgggaaaggacaaattggaaagagta

SEQ ID NO: 171576 - DNA, 271 bp, Glycine max
gtcgagctgagaataccagttgctccagtagccggcactaaacaacatggcggacaaggcagtcaccatccgaaccaggaagtttatgacaaacaggcttctctccagaaagcagttcgtcgttgatgtccttcatccagggagggctaatgtttccaaggctgaactgaaggagaagctgggaagaatgtatgacgtgaaagacaccaacactgtatttgtcttcaagttccgaactcattttggtggtggcaagtccactgggtttggt

SEQ ID NO: 171577 - DNA, 271 bp, Glycine max
accggatcttcacgattaggagatggctaagtcgaagaaccacaccgctcacaaccagtcctacaaggcccacaagaatggcatcaaaaagccaaagaggcaccgccacacttccaccaaagggatggatccaaagtttctgaggaaccaaaggtacgcgaggaagcataacaagaagagcggtgaaacagccacggaagaagagtaaagtgtcactctcaaatggggctattaggatttgatttgctattcaagtcccatatgttttgtg

SEQ ID NO: 171578 - DNA, 274 bp, Glycine max
gcaaacgataagaaatgttatcagaaacattggccatccctgcagtactccttgcaatactcattttgattctatcctctgtcttgttccatcttcaagatgaaagaacaaatccaccaggtcctaaacccctcccaattattggtaaccttcacatgctggggaaactcccccatcgctcccttcaagcccttgccaaaaattatggacccataatgttcatcaagttgggacaagtcccaaccgttgtagtttcctcccctgaaactgcaga

SEQ ID NO: 171579 - DNA, 277 bp, Glycine max
  unsure (1)..(277): unsure at all n locations
ggcanttgtaactgcttctctgaatttgtctgagtctgagctgttaattctcccaacacaattataaaaagaagaaaaacttagagtgatagttgtaggaaagtaaaaacagtaagtgttctcttaattcagtgaggtnctgaattgtncaacttgagatgatggcatcatttgcagggactactcagaagtgcaaagcatgtgagaagactgtgtatttggtggatcagctcactgctgacaacaagatctatcacaaatcatgtttcagatgcta

SEQ ID NO: 171580 - DNA, 275 bp, Glycine max
cactgaattcgatcaatcaatccatcttcaattgctttgtttcgatcggaggaaaatggccgatcagttatcgaagggagaggaattcgagaaaaaggctgagaagaagctcagcggttggggcttgtttggctccaagtatgaagatgccgccgatctcttcgataaagccgccaattgcttcaagctcgccaaatcatgggacaaggctggagcgacatacctgaagttggcaagttgtcatttgaagttggaaagcaagcatgaagctgcac

SEQ ID NO: 171581 - DNA, 284 bp, Glycine max
ttcggctctcgagcaccttcttcttcgttcacctcattcccgtcgcaacacaaagctacgctgcagcaatccactactgcagtgttttccaagtccaatctcagttcacttctcgccagggtttaatctgaatttcttttgtgttgccactgaggttattattatttttcttccaaaatggcgacggtgatgcaaaaaatcaaagacatcgaagatgagatggcaaggacccaaaaaaacaaggctactgctcatcatttgggcttgctgaaggctaaactagc

SEQ ID NO: 171582 - DNA, 273 bp, Glycine max
tcccatacctactttcagctcctaagagcacgcatcactgttgcacttcttactcgatctccctctggatatcccgacttctgcttcttcgctaaaccccctcctttattcatcctatctcactagcatcgatgggagaccgagaataagaccaagtcacctgcttccggcgtgtggtccatcatcaagcctatcgtcaatggcggagctgccggcatgctcgccacctgcgtcattcaacccatcgatatcatcaacgtgaagattcaactt

SEQ ID NO: 171583 - DNA, 270 bp, Glycine max
gttcacagagaaagatggctgcggaaaacgttgtagagttcacagacttacccgtcaagagacctagagaagaagaagaagaagaacaaaccaatggagtctccaacgacgccgtttcaacgctacccaatgaccctcaataccctggtatctctgctgttattcccggttggttctcagaaatcagcccaatgtggcctggggaggcgcactccttgaaggtggaaaagattttgtttcaagggaagtctgacttatataatgtcatgg

SEQ ID NO: 171584 - DNA, 268 bp, Glycine max
ggtttacaccgagcagccacacctcccgcagcagccatggttctcaaaactgaactatgccgattcagtggtgccaagatctacccaggaaagggcatcagatttgttcgtggtgattctcaggttttcctgtttgcaaactcaaaatgtaagaggtatttccacaatcgcctgaagccttcaaagctcacctggactgcaatgtacagaaagcaacacaaaaaggacattgctcaagaagctgtgaggaagaggagacgtgctgcca

SEQ ID NO: 171585 - DNA, 271 bp, Glycine max
cactttccacttgtctccgaattagttatcttgagaaacattattcccattgctatatattatggctagcatgaaggttacatgggtggttgtgatcatgtgcatggccgtggtgggtgcaccgatgatggcgcaagccatgacatgcaatgatgtgacggtgaacatggcacagtgcctatcctacctgatgcagggaggaacaccttcaacactttgctgcagcggagtcaagaacattcttggctctgctgtcaccaccgttgacaaa

SEQ ID NO: 171586 - DNA, 276 bp, Glycine max
aagaaattttatttttttttagacgggtctttgtgaacctatgatcttgtgaaaacccagaaagcgatctttgatgcactcataggattggccgattcagtcgcgtgttcggtggccgttgatttcgtgacaaatgaacggtggcgatgaggtagtggcagctccggcggctccaccgcaccctctggagtggaaattctcgcaggtcttcggagaacgcacggcaggggaagaggttcaggaagtggacataatttctgctattgaatttgacaa

SEQ ID NO: 171587 - DNA, 270 bp, Glycine max
cgagagaacaagaacataagggaaccacagcggcggtaacagaagaacaagcagagaatgggtcgagtgagaacgaagacggtgaagaaatcctctcggcaggtgatagagcgtcactactcgcgcatgaccctggacttccacacgaacaagaagcttctggaggaagtggcgataatcccgtcgaagaggctaaggaacaagatcgcggggttctcgacgcacctgatgaagcgcatccagaagggccctgtgcgcggcatctccctc

SEQ ID NO: 171588 - DNA, 264 bp, Glycine max
agagactgtgcctcttcgaactgtcaatcggcagtgttcatctggacttcaggcggtttctgacgtagctgcctatataaaagccgggttctatgacattggtattggggctggactggagtctatgacagtagatcgtgtgaataggcttcccaacattaacccaaaggtagagacctttgcagaagcccgggattgtcttcttccaatgggaatcacttctgagaatgtagcacaacgttatggtgtgacaaggctagagca

SEQ ID NO: 171589 - DNA, 264 bp, Glycine max
cgcaacacaacaaaaaaagacaacccagagagcgcgtcttaataaacgctcttctctgaaaacccccatttcttttcttctttcttcttctctttcgcttcttcgatcttcgatcttcgtcgctgaaaatgagagagtgcatttcaatccacatcggccaggccgggattcaggttggaaacgcctgctgggagctttactgcctcgaacacggcattcagcctgatgggcagatgccaagtgacaagaccgttggtggaggtg

SEQ ID NO: 171590 - DNA, 262 bp, Glycine max
gtttgcagtcactgctttgtttagatcagaaccagatcgtgttctcttcttccattggcaaacatggcaactcaaatgagcaagaagagaaagtttgtggcggatggagtgttcttcgccgaactgaacgaggttctgacacgtgagttggcggaggacggttactccggcgtggaggttagggttacgccgatgcgcaccgagattatcatcagagccaccagaacccaagccgttctcggtgagaagggaaggagaatta

SEQ ID NO: 171591 - DNA, 263 bp, Glycine max
attactaaattatatcagataacatgacgttatactcaatgtgcataagcaaaaccctaacaccaaaaccagaagcgaaatcgcaatcgcaatccagcgaatatgaaggtcgtcgctgcatacttgctcgcagtgttgggagggaatccttccccttctgccgatgacatcaaacacatcctcggcgcagttggagctgaggctgagaatgagttgattgagtcgctcttgactgaagtcaaaggaaaagacttcaatgagct

SEQ ID NO: 171592 - DNA, 268 bp, Glycine max
ctctttcttcctcttcctcagtagtgcgattttcgattctcttctctgcaactatgcctaaccctaaggtcttcttcgacatgaccatcggcggtcaacctgccggccgcatcgtgatggagctctatgccgacgtgactcccagcaccgccgagaacttccgcgcgctctgcaccggcgagaagggcgccgggcggagcggcaagcccctccactacaaaggctcgtccttccaccgcgtgatcccgaacttcatgtgccagggcgg

SEQ ID NO: 171593 - DNA, 269 bp, Glycine max
gcgatgggagaagaagagccagaggtgcttgaatcggaatccaatgtagtcaacgccaacggtaacagcagcaacagcaacgaagaatattccttccccgttcttcgtttcgatgtctctcctcacagaacctaccatttccaccgccagttcatcactccttccaaccctaacaatttcttcaaggccgttaaatggtcacccgatggttcctgtttcctcacctcttccgacgacaacactctccgcctcttcgcgcaaccgggaac

SEQ ID NO: 171594 - DNA, 272 bp, Glycine max
gctggaatcaaggtatgtgccatcaaagctcctggttttggtgaaaaccgtaaatctggtctccaggatcttgctgttcttacaggaggtcaacttatcactgaagagcttggcttgaatcttgaaaaagtagatctggaggtgtttggctcttgcaagaagataacaatttctaaggatgacactgtcatccttgatggagctggtgataagaaagcaattgaagaaagaagtgagcagattagatcagcaattgaaaatagcacttcaga

SEQ ID NO: 171595 - DNA, 273 bp, Glycine max
gttttagaagctaaagctaagcaagctgctgagaaggaaaagagaaaaactgaaaaggatctggaggatgagaatggtggggcgggtgtatactcaatgaacttgaggaagaattacattttagccgatgatgaatggaaagaggatgtgctgccagaaattttggatggacacaatgtgtatgatttcattgatcctgatattctgcatagggttgaagagttggaaagagaagaagggatgagacaggaagaagctgaggatgatgatttt

SEQ ID NO: 171596 - DNA, 270 bp, Glycine max
cggtcgactcgagcgaatcggctcgacccaattttctagggttttatacattttccgatggcacctgcagatgttgagtaacgttgctttgtcggtgggctcgcttgggccactgacgaccatgccctcgagagagccttctctcagtacggcgaaatcgttgaaacgaagattatcaacgatcgtgagactggcagatccaggggttttggatttgtgaccttcgcctcggagcagtccatgaaagatgcgatcggagcgatgaatgga

SEQ ID NO: 171597 - DNA, 267 bp, Glycine max
ggcatcaacaccgctaacactctgttcattcattcttctccgtcagaagcagagagtaagaatgctctcaggggatatacctccaaatcagaccatttacataaaaaatatcaatgagaaggtcaagaaagatgaattgaagagatctctgtattgcttattctctcaatatggaagaattttggatgttattgctctgaagacacccaagcttcggggacaggcgtgggtttgtttcagtgaagtcactgctgcaagcaatgcagt

SEQ ID NO: 171598 - DNA, 265 bp, Glycine max
atctgcagcaaggatagttaaacgtgtttttgctaatgacttaaatccttatgcagttgagtatctggaaagaaattgtgttctaaacaaacttgacaggaagattaaggtctttaacatggatggaagaaggttcattaaatctatgtatgacagtgatatatctcagtccatcacacaggtggttatgaacttgccaagtgaagctgcagaatttctagatgcatttcggggaatatacaaaaatagacccaaggatggggaa

SEQ ID NO: 171599 - DNA, 264 bp, Glycine max
gatcgagataactagaaacagtgtgatgaaaatgaaggtccttgttttcttcgttgctacaattttggtagcatggcaatgccatgcgtacgatatgttccctctccgaatgaacactggctatggtgcccgtactccggaggtgaaatgcgcaagttggaggcttgctgtggaagcacacaacatctttggctttgagaccattcctgaagagtgcgttgaagcaacaaaggaatacatccatggcgaacaatatagatcaga

SEQ ID NO: 171600 - DNA, 267 bp, Glycine max
gaagaaacgaagatagaatgtgcacagccctaaagacgaattaccagcttagcgaggagatcggtcgcggtcgtttcggcaccatcttccgctgcttccacccactctccaacgaaccctacgcctgcaaactcatcgacaaatccctcctccatgactccaccgaccgcgactgcctccagaacgaacccaaattcatgaccctcctttcacctcacccaaacatccttcaaatcttccatgttttcgaggacgaccaatatctct

SEQ ID NO: 171601 - DNA, 270 bp, Glycine max
atctcaaggaaattcaatgttatgtctgcaagagacttggccatctatgctgtgtcaatactgatgatgcaacagcaggagaaatttcttgttacaaatgtggtcagctgggtcatatgggtttggcatgtttaaggttgcaggatgagattgcaagtggagccacacctagttcatgcttcaaatgtggtgaagaaggacattttgcccgggagtgcacaagttctataaattttcctccacagtcagggaaggggaattgggaatcat

SEQ ID NO: 171602 - DNA, 264 bp, Glycine max
atctgcagcaaggatagttaaacgtgtttttgctaatgacttaaatccttatgcagttgagtatctggaaagaaattgtgttctaaacaaacttgacaggaagattaaggtctttaacatggatggaagaaggttcattaaatctatgtatgacagtgatatatctcagtccatcacacaggtggttatgaacttgccaagtgaagctgcagaatttctagatgcatttcggggaatatacaaaaatagacccaaggatgggga

SEQ ID NO: 171603 - DNA, 138 bp, Glycine max
ctctgtgctcaacttaagttgccttacaatgtatccagtctttcctttcttctttccttttcccatataatcgtgagacttatgatatatctgtgtctcacttcatcaataataaattataataaagaagagcaaaaa

SEQ ID NO: 171604 - DNA, 258 bp, Glycine max
cagatctgggagaggattttctctcgaagagttgaaggctgcgggaattcccaagaaacttggtccaactattgggatttctgttgatcaccggagaaagaatcgttctttggagagtctgcaggccaatgtgcagaggctcaaaacctacaaggctaagttggttgtgttcccaagaagggcacacaaggtcaaggctggtgattctacccctgaagagctggctaatgccactcaagttcagggttcattcttgcc

SEQ ID NO: 171605 - DNA, 259 bp, Glycine max
gtgctgtgcaggtcaaggcccttttacttgttcgtccggttgttcccatcttctctctcgtaccaatcaaatcacacttttgtgttgtgttgggaaaccctaaaccccgttttcggtgagatcgagatcgatcgaacatggatgaggagtacgatgtgatcgtgttgggcacgggtctcaaggagtgcattctcagcggtcttctctccgtcgatggcctcaaggttctgcatatggataggaacgactattacggagg

SEQ ID NO: 171606 - DNA, 264 bp, Glycine max
ggcgaacgaagagttgggtagttggactgatctgctacattcttccagcaagcttctcgaacaagctgctccgtctgctcagttccctcgacttcagaggaacttagatcaactggaagcattatccaagaagcttaaatccaagacagtaaggactgaagcaccttctcaatctattgctgcaacaaggctccttgctcgtgaggggataaatgcagagcagcttgcaagggatctgaagtcatttgaactgaagacaacttt

SEQ ID NO: 171607 - DNA, 267 bp, Glycine max
  unsure (1)..(267): unsure at all n locations
ggcgcgaaaatgagcggacgnatggggaagaagaagggagcgagctttgtgatcgattgcgcgaaccggtggaggataaaattatggacattgcttctctggagaagttccttcaggagaggattaaggttggcggcaaggccggtgcactcggcgattccattactgtcactagggacaagagcaagatcaccgtcacctccgacagcaacttctctaaacggtatctgaaatatttgaccaagaagtacttgaaaaagcacaatg

SEQ ID NO: 171608 - DNA, 261 bp, Glycine max
gcagcctatgatggcagcctactaccccaacaacgtcactactgatcacattcagcagtatctggatgagaacaagtccttaattctgaagattgttgaaagccagaattcaggcaagcttagcgagtgtgccgagaaccaagcaaggcttcagagaaatctcatgtacttagctgcaatagctgattctcaaccccaaccacccaccatgcctggtcagtaccctccgagtgggatgatgcagcagggagcacactacat

SEQ ID NO: 171609 - DNA, 258 bp, Glycine max
ggttatcaatgacaggtttggcattgttgagggtttgatgaccactgttcattccatcaccgctacccagaagactgttgatggaccatcagccaaggactggagaggtggaagagctgcttcatttaacatcattcctagcagcactggagctgccaaggctgttgggaaagtcctccctgctttgaatggaaaattgactggtatggcattccgtgttcccaccgtggatgtctctgttgttgacctcacagtgag

SEQ ID NO: 171610 - DNA, 257 bp, Glycine max
tccactttcactggaatcacaatcctgaaacaaaaacatcttagcatttaacatactactagacaacatgaccaccacattggaaagaggtttctcggaagagcaagaagctctggtggtgaagtcatggaatgtcatgaagaagaattctggagagttgggtctcaaggttttcttgaaaatatttgagattgctccatcagctcagaaattgatctcattcttgagagattcaacgggtccgttggagccaaatc

SEQ ID NO: 171611 - DNA, 261 bp, Glycine max
atatcgtatacgctgcagtttgattgcattttacttcaaccatgtcgggtgatttagcatacaagagcattctccagagttcagcacttatgaagtacatctttgaaacgagtgcctatccaaaagagcatgaacaattaaagctactcagagagaccacggtacagaagtgccaggaaaattcggaatatatcatgaatgtgccagtggatgaagcgcagttcgtatctattctgcttaaaatcatgaatgcgaagaaaa

SEQ ID NO: 171612 - DNA, 206 bp, Glycine max
ctgatatcgttaccattgctgctcgtgactctgttgcaattcttggagggccaaattggaaggttaaacttggtagaagggattccacgactggctttttcaaccttgcaaacagtggtgtgcttccaggaccgaattcttccctcagcagccttatccaaagatttgttgatgaggttcttgaagtattcctagttctagatcgc

SEQ ID NO: 171613 - DNA, 261 bp, Glycine max
ctctaactttcacacgcagcggcttcttcttccgttttcctgaatcggtgtgaacaatggcgacgtacgctgcgatgaaacccaccaagcccgggttagaggagtcccaggaacagatccataagataaggatcaccctttcttccaagcacgtcaaaaacctcgagaaggtttgtgcggacttggttcgtggtgcaaaggacaagcgcctcagggttaagggacctgttaggatgcccactaaggttcttcacatcacta

SEQ ID NO: 171614 - DNA, 261 bp, Glycine max
gctttcttcctcctcattaaggcgcaactctctctctctctttctttttctttgttaggtttggtgacacttagttagaaagagcgtgcgaagagggtggggagaagatttagtgttgtggccatggcggagtctgagaagagtactgtgcttgttacgggagccggtggtcgcacaggacaaatagtttacaaaaaattaaaagagaggccaaaccaatatgtggctagaggtctggttagaacagatgaaagcaaacag

SEQ ID NO: 171615 - DNA, 262 bp, Glycine max
gtggggtctcagtacccatttgaacctttaaagtatctgcggaagacactacggcttacatatgaagaagggattcagatgctcaaggatgttggagtagaaattgaaccttatggtgacttgaatactgaagcggaaaggaaattgggtcagctagtcttggagaaatatggcacggagttctatatccttcatcggtaccctttggctataaggccattttatacaatgccttgctatgacaatccagcatacagcaact

SEQ ID NO: 171616 - DNA, 279 bp, Glycine max
cttttagcaagttaacaacacttttgtcttcgttccattatctagttctcaattctcttcaccctttggctctgaaagaaatgggtagtcttgaagcggaaagaacaacagtaggattggcagcaagagacccttcagggattctctccccatacacctacaatctaagaaacacaggccctgatgatgtttacattaaagttcactactgtggagtttgccattctgatctccaacagattaaaaatgatcttggcatgtccaactatcccatggtcc

SEQ ID NO: 171617 - DNA, 269 bp, Glycine max
aattctctctactactgctagctgtgacttgttttgagttcaatcaaatcgcattggtatctgaaatcaggaaagatggttagcgtactgagatcaggcaggcacaaagggcagaaggcccagcaaccatccttgccattggaactgcaaacccaccaaaccgtgttgatcagagcacctatcctgattactacttcagaatcaccaacagtgaccacatgaccgagctcaaagagaaatttcagcgcatgtgtgacaagtctatgatc

SEQ ID NO: 171618 - DNA, 277 bp, Glycine max; identical to SEQ ID NO: 105349

SEQ ID NO: 171619 - DNA, 267 bp, Glycine max
ctaacctaaaccctactcattctccatacctcaacgaagaggttaaagagacggcaacactttgctgtccgccttgaccgagcagagcttcgtcttggccctcgattttgccctaaagtactctcagtcacaacagacaccgtcgtcgtcgtcgtcgtcatcaatggcaccgaagcagaccaaggctgagaagaagatcgcttacgatgcgaactgtgcgacctaatggaggagtacggccagatcctcgttgtgaactccgataac

SEQ ID NO: 171620 - DNA, 263 bp, Glycine max
gcacaacaaatgtaccagatctgcaaggttatgctgatgcagaaaattcatggcctctgtacacatctgcccttcccgttgtttctggtgttggtgcttcccggtctgaggagttaattgttagaatgttgtgtccctctgacaagattgggcgggtcattgggaaaggtggtagtacaattaaaagtatgaggcaggcaagtggtgctcgtattgaggttgatgattccaaggctaattatgatgagtgtttaatcattata

SEQ ID NO: 171621 - DNA, 266 bp, Glycine max
gaaaaatacaaaatttgaggaacatttgtctctcatcaatggctgccacgagaccggtgcagtgtttgttacgaagggtttgcagaggaagtaggactattggggttgccacagaagttaatgcttcttcttcttctcagaaaatcatcgacaaggaatatgaacacagtgctcacaattaccatcctcttccgattgtatttgctcaagcaaagggaacctctgtttgggatccagagggaaacaaatatcttgattttctatca

SEQ ID NO: 171622 - DNA, 266 bp, Glycine max
gggcaccggcaacaccaaaaccaccaccgcctctcctacctcccggagccatggccgccaccgactcctccgctgcttcgtcacgccagctttcgcagagggagacggacatccagatgatgctcgcagccgacgttcacctcggcaccaaaaactgctactttcagatggaacgctacgtcttcaagcgccgcaccgatggtatttacataattaaccttggaaagacatgggagaagcttcagcttgctgctaggattatagtc

SEQ ID NO: 171623 - DNA, 272 bp, Glycine max
gttctgagtattctgatcgctccctgagagagctcgtcgcggcggttgcagaagaagattgcaagatgaagttcaacatcgcgaatcccaccactggatgccagaagaagctcgagatcgacgacgatctgaaactgcgagcattttgggacaagaggatctcacaggaggtcatcggagatgcactcggtgaggaatttaagggctatgtcttcaaaattaccggagttgtgacaaacaaggatttccaatgaagcagggagtgctgactc

SEQ ID NO: 171624 - DNA, 275 bp, Glycine max
gagagatcagagagaatcaaaataccactttcttagtttcaaactcaactttttgagggtcttttctgtattaaaaacacaagagttagtcttagctaacagtgttcatatgatgaatgcttcaaagttcattaaatgtgttactgttggagatggagctgttgggaaaacctgcatgctcatttgctacaccagcaacaagttccccactgattacataccaacagtatttgataattttagtgccaatgttgctgtggatggaagcattgtca

SEQ ID NO: 171625 - DNA, 297 bp, Glycine max
cggaattcggatcgagaaaacctacaaccctgaaaagccagagatgacaatacccccaaaatatctgatcgctctgaaaccggcatggatttgcagcagagcgagttcgatcgcctcttgttcttcgagcacgctcgcaaggccgcagaagctgaatacgagaagaaccctctcgatgccgataacttaacaagatggggtggagcactattagagttgtctcagtttcagagttttcctgaatcgaagaaaatgacccaagaggctgtttcgaagctagaggaggcgcttgcagtg

SEQ ID NO: 171626 - DNA, 271 bp, Glycine max
ccggatagcggtgataaatatgcacgccccgttcttggtggttcagccttaccttaccctcgcagagaagaaccggaagaggaaaaactagaaaagatcccaacagtgagaagccgagcgattttgtttaccttccaagagatgaagcatttggtcacttgaagtcatcagattttctcgcttatggaatcaaatctgtatcccaagatgtcttgcctgtcttgactgatgcattcgatggaaatattttgagccttgagtttgataattt

SEQ ID NO: 171627 - DNA, 267 bp, Glycine max
caacaatgtcgaagcgaggtcgcggaggatcggcagggaacaagttccgcatgtcactgggtctgccggtggcggcgacggtgaactgcgccgacaacaccggcgcgaagaatctctacatcatatcagtgaaggggatcaagggaaggctgaaccggttgccgtcagcttgcgtgggtgacatgattatggccaccgtcaagaagggaaagcctgatctccgtaaaaaggtgctccccgctgtcatcgtccgtcagcgcaagcgtg

SEQ ID NO: 171628 - DNA, 266 bp, Glycine max
cacgactccttcggagatctctctctcgcccataatccaaccatggcaaatacgggaaatttagacgcggcgatagagcaattgctgaacgtggagaagcagatgaggctcgccggtgacgtggcaggtaccagaaaggcggctaccgatattttgcagctctgcttcgatgcacgagcctggaaaaccctcaatgaccagattgtcgttttgtcaaaacgacgtggccagctcaaacaggccgtaacagctatggtgcaacaagc

SEQ ID NO: 171629 - DNA, 264 bp, Glycine max
ctcctatagccggcgctcaacaacatggcggacaaggcagtcaccatccgaaccagaaagttcatgatgaacaggcttctctccagaaagcaattcatcgttgatgtccttcatccagggagggctaatgtttccaaggctgaactgaaggagaaattgtggcagaatgtatgacgtgaaagacactaacactgtatttgtcttcaagtttcgaactcattttggtggtggcaagtccactgggtgtggattgatctatgattc

SEQ ID NO: 171630 - DNA, 264 bp, Glycine max
attgagaagaaaagtaaaaaaagggaacgtgaagaaaattagaataagaaaaaggaaacgagtaaaaagttaatcacaatcagaaaatggaaaagaaataggtaggaaaaatgtctaaaaggaaaatctccaaaaatgtgagcaatgacaaaaaaaaatgtgagtacaataatgaaagacaagagatgagaagaagaaaagaaaaaaagaaaaaagattagtgaaggagaaccaacaatataaaagaaaaacggtaaggggcaa

SEQ ID NO: 171631 - DNA, 264 bp, Glycine max
agaagatgaagaagcaggtgaaggtgccgaagataggaacgtgacgtgggatgctgaggaagaggaggaaaacaagaagaggttgctgaagggtgttgccaagaacgtgaaatggacggctgagatcacgggaaaaggggagaagagtgggagctcgagaaagtacacgtttcaggtgcagagtggggatgctgagaagaaaaaggagaaggagaaggagaaggagaagaagaagggaaatggatcgcgcattgtggagattca

SEQ ID NO: 171632 - DNA, 275 bp, Glycine max
agcacagaaggataaacatttgaccaagcctgaagtgggtcattttagggctcaaggagttccaatgaagaggaagcttaaggagtttccagtgacggaagatgcactacttcctgtgggaacatcacttaatgttcgccattttgttccaggccagtatgttgatatcacaggaataacaaaaggaaaaggttttcagggtgtgatgaagcggcatggatttagtggagggccagcatcccatggtaattcattggcccatcgaacacttggtt

SEQ ID NO: 171633 - DNA, 276 bp, Glycine max
aaggtatggcttctagtagtcttcgttgcattgcttttgcacatgtagaagtagctgaggaggagcttgtagatgaagaagggaatgcaatggcgaaagtgaaagaaaatggtttaacattgttggggcttgtgggtattaaggatccatgtcgtcaaggggtgaagaatgccgtggaagcatgccaaaatgctggtgtgaatatcaaaatgatcacaggtgacaatgttttcactgcaaaggccatagcaaccgaatgcggcatacttcggccta

SEQ ID NO: 171634 - DNA, 271 bp, Glycine max
gagtagtagaagagcggtctggtccaagtgctgcaatatgcaaggcaaagaaatggaagggttgtcgtcttcgtcggcgatcgcgcagaaaacatgggaactcgagaacaacatcatcccgatggacactccgggcggcgccgccatctcctccacaaccaccacgacaagcgccgacgactcgatcttctactacgacgaggcgggccagaacgagttccagcgcgacaagccctgggccaacgacccccactacttcaagcgcgtgaag

SEQ ID NO: 171635 - DNA, 264 bp, Glycine max
cttgggtgcgattccttcactcacaacaacaacacatcactatggctcttctgagtcgagcctcttcacgcttccctcagctggtttcccctcaaagggtagtttcactccacacaacgctcccatctctgaacgcatccccatccacagccacgcctacaccatatgccccgccaccgcctccgtccgcttcctctcccgccggcgtttcgaaggcggcggagttcgtgatctcgaaggtggacgatctgatgaactgggccc

SEQ ID NO: 171636 - DNA, 261 bp, Glycine max
gagaaagtgaagtggaagagaaaaaggtgaagaacaacggtggctctggaattatgagcaccgagtcatttgaatctctgggattgtctgaacctacttataaagccattatggatatgggattccaccacatgactcagtggtaattgcatgcaacgcatcagaattgatgctaaatcaagaatgcagattcaagcgagggcaattccgccacttttgattggaaaagatgttcttggtgctgcaaggactggttctggg

SEQ ID NO: 171637 - DNA, 261 bp, Glycine max
gccgaggtcaggaggagcactagctaagttcacaatttcaaaatggctaggggactaaagaagcatttgaaaaggctcaatgctcctaagcattggatgcttgacaaactgggtggtgcatttgcgcctaaaccctcatctggaccacacaaatcgagggagtgcctccccctcattcttattctgcgaaaccggctgaagtatgctctgacataccgtgaagtcattgctattctgatgcagcgccatgttcttgttgat

SEQ ID NO: 171638 - DNA, 263 bp, Glycine max
cggctcgagcacatcttaaccttgttcttaccagatggctgcctcagttaaactcttatttttgtcctttctctcgttgttcatctctttctccatagctcaaacctctttcagaccaaaggcacttgttcttcctgtaaccaaagatgtttctgcctcagttcctcagtatgtcacacaaatcaaacaaagaaccccacttgtggcagtgaaactaactgttgatcttggtggtggctacttgtgggtgaattgtgaaaagg

SEQ ID NO: 171639 - DNA, 264 bp, Glycine max
aacacaacaaaaaaagacaacccagagagcgcgtcttaataaacgctcttctctgaaaacccccatttcttttcttctttcttcttctctttcgcttcttcgatcttcgatcttcgtcgctgaaaatgagagagtgcatttcaatccacatcggccaggccgggattcaggttggaaacgcctgctgggagctttactgcctcgaacacggcattcagcctgatgggcagatgccaagtgacaagaccgttggtggatgtgatg

SEQ ID NO: 171640 - DNA, 266 bp, Glycine max
actcgaccgattcggctcagggcgtaaccctccaacaacaacacttcctcgtcagaaaatgtctctggtggcgaaataggatttccagcacattctgcgtgtgctgaacaccaacgtggatgggaagcagaagataatgttcgcaatgacctccatcaagggtattggaaggagattcgccaacatcgcttgcaagaaggctgatgttgacatgaacaaaagggctggtgagttgactgctgctgagttggacagtgtgatgactg

SEQ ID NO: 171641 - DNA, 271 bp, Glycine max
aagaggccttctttcctcatttcggacgcacgctccccatccatgtctacttgtgtaaaatcccgagatgtttgtattgttggtgttgcacggacgccaataggtggtttacttggcaccctatcatctctttctgccacagagttaggctcaattgctattaagactgctctcaagagagcaaatgttgatccatcactcgtgcaagacgtgttttttgggaatgttcttagtgccaatttagggcaggctcctgccagacaggctgcat

SEQ ID NO: 171642 - DNA, 277 bp, Glycine max
actcatcaagggttgtgaaagcagagaagtgagatacactaagttatcctcataaatacactctaattaggtggcaagataagtgtctaaccttagtaacattgccacatattgtgttcattttggaattgtgccactaaaattctattcaattcatctatggctgcctcttcttatgctatgcaatcaatcctggcaaaccctttgatccgcatttccagcgggtctagggtgaaccaatttggcgttcctgctttgcacatgagaaggaatgttg

SEQ ID NO: 171643 - DNA, 257 bp, Glycine max
aagtttttgatgttaaaccatttgtcagtcgtctactaggcatgggagactggtctgggttcatggataaaattcatgaagttgttcctatggatcaacaacctgaactgcttcaaaagctgtcagaaggaaacttcaccttgaggattatgtatgagcagtttcagaacttacttaaaatgggtcccaacagccaggtcttttctatgctaccaggatttagtgctgaattaatgccaaaaggccgtgagaaggaa

SEQ ID NO: 171644 - DNA, 259 bp, Glycine max
ctaagtttcactttctttgcatagggcaacctcctttctctgtgactctgagtatcgtatcgttttattattatttctaattctctcttatcatgtccattgaatatgtctccgtcgttggatcttcctctcaagggtggcttcagttttgatctatgccgaagaaacgcaatgcttcaatacaagggcctcaaagccccaacctttctcaaaactggcaccactattgtcggtttagttttccaggatggtgtcattc

SEQ ID NO: 171645 - DNA, 262 bp, Glycine max
aagtgaactttgcaactttgagcagaaaatctcacagtcgaaggaagaaataatcaccaatggcaattgaacacgaagacgatctcaaagacgagaagaaccctcgacccctcgacgaggatgacatcgccctcctcaaaacctacggtttgggaccttattccacaagcataaaaaaggcggagaaggaaatcagagatatggccaagaaagtgaatgacttatgtggtatcaaggagtctgatactggattagcagcacc

SEQ ID NO: 171646 - DNA, 261 bp, Glycine max
ttctgtcttatccaaaatgttgccacttgtgtacatactcatagctcttcctgcagtagtgtagctattgatcctcttcatagccaacaaatacaatccgccacgtccaccaggtccaagatgtcttcccataatcggcaaccttcaccaactcgacgcttcgaagctcaatctccaactagggcagctctcaaagacctacggtccccttttctccctccgaatcggcttcaagccagccatcgtcgtttcctctccaaa

SEQ ID NO: 171647 - DNA, 261 bp, Glycine max
gtgattgttgtgactcgttcttcttcgtcgttatcttcttcttttgttgtttgtgtgtttgttttttctctcacctgaaaatgtcttgctgcggtggtaactgtggttgcggaagcgcctgcaagtgcggcaacggctgcggaggctgcaagatgtacccagacttgagctacaccgagtcaaccaccaccgagaccttggtcatgggagtggcaccagttaaggctcaattcgagagtgctgaaatgggtgttcccgctg

SEQ ID NO: 171648 - DNA, 266 bp, Glycine max
gaaaagcctgaaaaaactggactcaaatttaaaatcatgagcttgaaggtgaaaggattaattgattacgtccctgaactgtttgatgagcagaaggaccaagtagcagtggagcagattttgcgagttgtttttctagatccagagcgtccctgtcctgctttggaaaaactgaaccgacagctggatgatgctgatgctgcccttgaggcacgcaagaaacctgcagaagatgcaggtcctaaaattatcggggaaggacttgt

SEQ ID NO: 171649 - DNA, 271 bp, Glycine max
gtttctctttcgaggaatggggtggtggagaaggtggcaaatgacaattcaagtgaataatggagaacaacaacaacaaccacaacctcatcgtccctaatcctcaagattcactgtggatgatgaatttgaggactggggaaacaatggattctggatcttatccggagcgtccaggggagccggattgttcatattacatgagaacaggcctttgtagatttggtgcaacgtgtcgatttaatcatcctcctaacaggaagctggctat

SEQ ID NO: 171650 - DNA, 183 bp, Glycine max
tctcgagtcgaatcggctcgagtgttgttgctgctcatcctccgacacctccgagctctgcaccgaagaacgaagccatggggaagacacatggaatgggatctgctcgcaagctcaagtcccaccgcaggaggcaaaggtgggctgacaagtcatacaagaaatcacatcttggagatgaat

SEQ ID NO: 171651 - DNA, 264 bp, Glycine max
tgggaaaaatggtgtcgctgaaactgcagaagcgcctctccgcaagcgtgctcaagtgcggcagaggaaaggtttggcttgaccccaatgaagtcaacgaaatctccatggccaattctcggcaaaacatcaggaagttggttaaggatgggtttatcatcaggaagccaaccaagattcactcccgctcacgtgctcgtaggatgaaggaggcaaagaggaagggccgccactccggttatggtaaacgtaagggtacaaggg

SEQ ID NO: 171652 - DNA, 261 bp, Glycine max
cagtcgcaaccctaatcagaagaagcgcagtgtcaagcgagtgacagccaccagccatgggtcgtatgcacagccgcggtaagggtatatcctcttctgctttgccctacaaaaggacacctcctagctggctcaagatctcttcgcaagatgtcgaagaaaatatctgcaagtttgcgaagaaaggtttgaccccgtctcagattggtgtcattctcagagattctcacggtattgctcaggtcaatagcgtcactggca

SEQ ID NO: 171653 - DNA, 260 bp, Glycine max
ccagagccaaggtaggttaaacactcttcttcatcgtcgtcgcaatgggacgtgtgatccgtgcgcacgtgaagggagcaggctcggtcttcaagtcccacacgcaccaccgcaagggccctgcccgcttccggagcctggatttcggagagcgcaacggctacctgaagggtgtcgtcactgacgtcatccacgatcctggccgtggcgcgcctctcgctaaggtcgccttccgccacccgttccgctacaagaagcag

SEQ ID NO: 171654 - DNA, 259 bp, Glycine max
agaagagtgaagtaaactcagggtttttctactcaagtgcggaacagagagaagctatggttgcagctgaaagacggcaggttgatgaaaaagtcaaaagaatcattgaactgaagaataaggtttgttctggtaatgatagcaattttgttgtcatcaaccaaaaaggaattgatcccccatctctggacctgcttgcaagggaaggaataattgcccttcggagagcaaagaggagaaacatggaaagattggtttt

SEQ ID NO: 171655 - DNA, 264 bp, Glycine max
ctgagtctctgtccgaagccacttgagagaaaatggcggtgcctctgctctcaaagaagatcgtgaagaagagggtaaagaagttcaagaggcctcagagtgacaggaaaatttccgtcaagactaactggcgcagaccaaagggtatcgattctcgtgttaggagaaagttcaagggatgcactttgatgccaaacattggttatggttcagacaagaagacccgccactatctccctaatggtttcaagaaatttgttgttc

SEQ ID NO: 171656 - DNA, 265 bp, Glycine max
ccactccgcacctcgcagcctctgtgccctcaacaaccatggctgaaatcgaaactaccgttccagatcccacccagatcgacgtcaaactcttcaatcgctggagcttcgaggatgttgaggttaatgatatgtctctggctgattacattggagtgtccccatcaaagcatggtacatatgttcctcacactgctggtaggtactcagtgaagaggttcaggaaagcgcagtgccccattgttgagaggctcaccaactctct

SEQ ID NO: 171657 - DNA, 269 bp, Glycine max
catctctcttcccagttctcacctcaccgctgcatcttcacgtcgtctctaacgagggaaaatgagtcgaggaggtgcagcagcagcgaagggaaagaagaagggtgctacattcaccattgactgtgcaaagccagtagaagacaagatcatggacattgcttctctcgagaagtttcttcaagacaggatcaaggttggtggcaaagctggtgctcatggtgactctgttaccgttacacgtgagaagactaagattattctcacct

SEQ ID NO: 171658 - DNA, 263 bp, Glycine max
cgggatcttatcaacatactggaggatgctattagaagtggacaccctatattgattattgctgaggatattgaacaagaggctttagcaactcttgtggtgaacaaacttagaggatcactgaagattgcagcactgaaggaccctgggttttgagagcgcaagagccagtaccttgatgatattgccatcttgactggaggtactgtaatcagagaagaggttggccttactttggacaaagctgggaaagaggttctcgg

SEQ ID NO: 171659 - DNA, 259 bp, Glycine max
atccactttcactggaatcacaatcctgaaacaaaaacatcttagcatttaacatactactagacaacatgaccaccacattggaaagaggtttctcggaagagcaagaagctctggtggtgaagtcatggaatgtcatgaagaagaattctggagagttgggtctcaagtttttcttgaaaatatttgagattgctccatcagctcagaaattgttctcattcttgagagattcaacggttcctttggagcaaaatcc

SEQ ID NO: 171660 - DNA, 258 bp, Glycine max
ctctaacctacctctttttcttctctctcaacaacttcaccttcttcctcctcgatcatgtctcacttcaagggcaagtaccatgatgagcttatcgccaatgctgcgtacattggcactcctggaaagggtattcttgctgctgatgagtcaacagggacaattggcaagcgtttggccagcatcagtgtagagaacattgaatccaacaggcgagctcttagggagctgcttttcactgctcctggtgttcttcaa

SEQ ID NO: 171661 - DNA, 256 bp, Glycine max
  unsure (1)..(256): unsure at all n locations
tttttatttctctcttctctctgcatcgcttcaggttcttctgaaaagatgtctcgcgtgtatgttggtaacttggattcacgagtcaccgagagagatctcgaagacgaattccgtgttttcggagttattcggagtgtttgggttgcacgtagaccacctggtnaatgcttttattgactttgatgaccgcagagatgcacaggatgctatccgtgaattggatggcaagaatggttggagggttgagctttct

SEQ ID NO: 171662 - DNA, 254 bp, Glycine max
gagaaattgagtttccgagataaccagttttctctttgattcatcaatggcaactgcgaggaccgtgaaggatgtttcgcctcacgatttcgtgaaggcttatgcttcccacctcaagcgttccggcaagatggagcttcctgagtggaccgatattgtaaaaacagcaaaatttaaggagttggctccatatgatcctgactggtactacattagggctgcctcaatggcaagaaagatctatttgagaggtg

SEQ ID NO: 171663 - DNA, 253 bp, Glycine max
gtggaactatgatggttccagcacaggccaagctcctggagaagacagtgaagtgattatatacccacaagccattttcagggatccattcagaaggggcaacaatatcttggttatctgtgatacttacactccagctggagaacccattcccactaacaagaggcacgatgctgccaaggttttcagccatcctgatgttgttgctgaagagacatggtatggtattgagcaggaatacaccttgttgcag

SEQ ID NO: 171664 - DNA, 262 bp, Glycine max
gctaaacacagagaaaggcacagcacgatgacgatgaagataatggtagcgattaagcgagtggtggactacgccgtgaaaatcagggtgaagggcgacaagacaggggtggtgacccataacgtgaaaatgtcgatgaaccccttctgcgagatcgcgctggaagaggccctccgcatcagggagtctggcatggcctccgaggttgtcgccgtcaccatgggaccctctcaatctgtagacactctccgaaccggtcttg

SEQ ID NO: 171665 - DNA, 265 bp, Glycine max
  unsure (1)..(265): unsure at all n locations
actttctatctcattttcgttcggttcaaacactctcatgggcatcagacaagaagattaggatcggcatcaacggatttggaaggattggccgtttggtggncagggttgctcttcagaggaatgacgttgaacttgttgctgtcaacgatccttcatcaccactgattacatgacatacatgttcaagtacgacaccgttcatgggcagtggaagcatttgatgtgaagctgaaggactctaagacccttctcttcggtgaga

SEQ ID NO: 171666 - DNA, 284 bp, Glycine max
gaaaaacagatagtgtgggagagagaagagcggaagagaaaatgacgaccaggttcaagaagaacaggaagaagagaggtcacgtcagcgccggacacggccgtatcggaaagcaccgcaagcatcccggaggtcgcggtaacgccggtggcatgcatcaccaccgtatcctcttcgacaagtaccatcctggtttcttcgggaaggtaggcatgcgctacttccacaaacttcgcaacaaattctacaatccgatcatcaacatcgacaagctgtggtccctc

SEQ ID NO: 171667 - DNA, 282 bp, Glycine max
ctttgcagtgcgcctagtgattctagtgacgcaactcgacaacagagtgaataaaaaaagcgtttcaacgtcgtcgttttacttctcctttgtttgattagggttttttcgcttcttctattcactctgttacggtgcaacctagcagcctccaaatccaatggcttcagagaagaaactttcgaacccaatgagggagataaaagtgcagaagctcgtcctcaatatctctgttggcgagagtggagatcgtctcaccagagccgccaaggtgttggaaca

SEQ ID NO: 171668 - DNA, 278 bp, Glycine max
tgaaaagcgactttttctctctgcaactctcccttttcttccttcgtagatcgaaagggaatcttcttccatggcctccaagcggattctgaaggagcttaaggacctccagaaagaccctccaacctcttgcagcgccggtcctgtagcggaagatatgtttcattggcaagcgactataatgggtccccctgatagcccttatgctgggggtgtttttctagttactattcattttcctccggattatccattcaagccacccaaggttgcattta

SEQ ID NO: 171669 - DNA, 274 bp, Glycine max
ggtctacttctccaatcttcaggttaagaagggcttgcttcagagtgatcaagagctgttctcgacacctggtgccgataccatccccattgtcaacaggttcagcagtgaccagaaagttttctttgacgcctttgaggcttcaatgattaagatgggtaacattggtgtgctcactgggaagaaaggagaaatcagaaaacattgtaactttgttaacaagaaatctgttgaagttgatattgctagtgtggcctcagaagaatcatcaaca

SEQ ID NO: 171670 - DNA, 272 bp, Glycine max
atccctaacgcgtgcatagcagagtcagagacagagacgcagccatggggcggagacctgcgaggtgttataggcaaattaagaacaagccataccccaagtcacgtttctgccgtggtgttcctgatcccaagatcaggatttatgatgttggtatgaagaagaagggtgttgatgagtttcctttctgtgtccatctggttagttgggagaaggaaaatgtttcaagtgaggccctggaagctgctcgcattgcttgcaacaagtacatg

SEQ ID NO: 171671 - DNA, 271 bp, Glycine max
ttttcttaatgccatggctgctctgcaatacttggaatcgctgcgcaacgcgcatcctgagctctccgattggtacaattcgctggcggatctataccagaacaagctctggcaccagcttaccctcaagcttgagcagttcgtggctctcgccgtcttccaggccggtgatgcattaatacaattatatcacaatttcatcacagactttgagaccaaaatcaaccttctcaagcttgcgcatttcgctgttatagtttctcggcagtat

SEQ ID NO: 171672 - DNA, 270 bp, Glycine max
gtctggggaaatttgcgttgtttttcgcggtacagctcacacacactgaacggtaagtatggcggacaaggctgttacaatccgaacccgaaagttcatgaccaacaggcttctttccaggaagcagtttgtcgttgatgttcttcatccagggagggcaaatgtttccaaggctgaacttaaggagaagctagctaggatgtatgatgtgaaagaccctaatactgtatttgtcttcaaattccgaacacattttggaggtggcaaatc

SEQ ID NO: 171673 - DNA, 116 bp, Glycine max
cttcatccttctctgttctcctagaacttgattacttgaacattccctatgacagatgaggtggttcttctggatttctggccaagtccatttgggatgagggtcaggattgcact

SEQ ID NO: 171674 - DNA, 271 bp, Glycine max
aaacacggggcactggtttcgaaccctcgttgtggttaggtcttcttcacctttcgaattttggaatccatgggtcagggaactccgggcggcatgaaccggcagggcgaccggaagccggacggcggcgacaagaaggagaagaagttcgagccgtcggctccgccggcgcgcgtggggcggaaacagcggaagcagaaaggtccggaggcggcggcgcggttgccgacagtgactccggtgacgaatgcaaatgcggcttctgaagctg

SEQ ID NO: 171675 - DNA, 273 bp, Glycine max
cagctgtctgctgttagatctgtacccgcctagccattgatttggaaaagtccaacttcaaggatgagtaagcttcagagtgatgctctaagagaagctatctcaggaatcatggctgattccaaggaaaagaacaggaaatttgtggagaccattgaactccaaattgggttgaaaaattatgatccccagaaggacaagcgtttcagtggctctgttaagttgcctcatattcgtcgccccaagatgaagatttgtatgcttggagatgcc

SEQ ID NO: 171676 - DNA, 286 bp, Glycine max
ggcattcggctcgagtgctccttacaggcagtggtaccttcagcactatggtgttgaaattggtagaaaaaagaaagtggcagccaagaaggattctactgaggaaggtgaggctgctgctgaagaaactgagaaaagtaaccatgtgcagagaaaacttgagaaacgccagaaagatcgtaatcttgactcccacattgaagagcaatttggtggtgggcgattgttggcctgtatttcttctcgtcccggacaatgtggcagggctgatgggtacattcttgaa

SEQ ID NO: 171677 - DNA, 281 bp, Glycine max
gggctgacaactgaggttaagtctgttgagatgcaccatgaggctctcacagaggctcttccaggtgacaatgttggatttaatgtgaagaatgttgcagtcaaggatctcaagcgtggttttgttgcatccaactccaaggacgaccctgccaaggaagctgccaacttcacatcccaagtcattatcatgaaccatcctggccagattggtaatggatacgcaccagtccttgactgccacacttctcacattgctgtgaagttttctgaaatcttgac

SEQ ID NO: 171678 - DNA, 279 bp, Glycine max
acaggaccagcagacctgtttttcgatagaaagcctacttctgtgaagggccttcaacttatctttgatagtgggagctcctacacatacttcaattccaaagctcataaagctcttgttaatctggtaactaatgatttaaggggaaagccattgagtagagcaactgaggattcatcactaccaatttgttggaggggtccaaagcctttcaaatctctgcatgatgtcactagcaattttaagccactattactgagcttcacaaaatcaaagaat

SEQ ID NO: 171679 - DNA, 278 bp, Glycine max
cttgtttctcctgcaatcaacgacaccccccccaaaaatgaacggagagacagtgaacccaaaagcttaccctttggccgatgcgcaactcgcaataacaatactggatcttgtgcaacaagctgccaactacaagcaactcaaaaagggtgctaatgaagcgaccaagacactgaacagaggcatctctgagttcgttgtgatggccgcggacactgagcctcttgagattcttctccatcttcctctcctagctgaggataagaatgttccctatg

SEQ ID NO: 171680 - DNA, 272 bp, Glycine max
ctccaattaacctcctctctcactattccatcttcttaattactcatcactcttcttagaaactagtctaacaattaggttttgaagggcacacaaatatattccaaggttgtgtgaaaatgcgaatgagttgtaacggatgtcgtgttttgcgcaaagggtgtagcgaagattgtagcataagaccgtgtttgcaatggatcaagaacccggagtcgcaagctaatgccactgtgtttcttgctaagttctatggccgtgctggcctcatg

SEQ ID NO: 171681 - DNA, 273 bp, Glycine max
atcattgctatgcccacataacaacaccaaaaaaaatggcacttgtgagccacgtttgtgtgagatgtgtagccacacccacttccccagagtccccaaattcggcacccttgccagacccaaggcaaaccaaggttctccttccgaagaagaagcctcagaaatggtccaccggggtggctcccggggagtacggtggccctcccaccaccaccaaactccgcaaatactggggcggcgatgacgaagaccctttggcctctgatgactata

SEQ ID NO: 171682 - DNA, 146 bp, Glycine max
ctctaatcactctagctgttgcaaatttctactatttttcaatggcttctgcagatgttgagttccgttgctttgttggtgggcttgcttgggtcaccggcaacgatgccctcgagaaagccttttcaatctacggcgacatcgtt

SEQ ID NO: 171683 - DNA, 270 bp, Glycine max
cttttctcagctgctgttcctgcgcgtgaacaagcctcaggacagccaaagccatggttaagcataacaatgttatccccaatggacacttccgtaagcactggcagaactatgtgaagacctggttcaatcagccagcacggaagacaagaagacggttggctcgtcagaagaaagctgtgaagattttccccagacctacagctggacctcttagacccattgtacatggtcaaactttgaaatacaacatgaaagtgagagctggaa

SEQ ID NO: 171684 - DNA, 266 bp, Glycine max
ttaactctttcttctcataactctgccgccgcaacagccccaaatccaatggcttcagagaagaaactttcgaacccaatgagggagataaaggtgcagaagctcgtcctcaatatctccgttggcgagagtggagatcgtcttaccagagccgctaaggtgttggaacagcttagtggccaagcccctgtgttttccaaagcaaggtacacggttcgttcctttgggattagaagacatgagaggattgcatgctatgtcactgt

SEQ ID NO: 171685 - DNA, 181 bp, Glycine max
gaattttcttcatccttctctgttctcctagaacttgattacttgaacattccctatgacagatgaggtggttcttctggatttctggccaagtccatttgggatgagggtcaggattgcacttgctgaaaagggtatcgaacatgagtacaaagaagaggacttgaggaacaagagtcct

SEQ ID NO: 171686 - DNA, 282 bp, Glycine max
aaaaaaaaaccctagtaatgccgccgatggggaggaagcgaaaggtagcacccaaatcttctctatccaccgagccacctctcaagcagcaacaaccaaaacccgaaaatccccctcaagaatacgaagaagtcgaagaggaagttgaggaagaagaggtagaggaagaggtcgaagaggaagaagaagaagaagaggaggacgaggaagaagaggaggaggaagaagaagaagaagaagaaaacgacgtcgtcaaacaacagcagcagcaacagcaagacg

SEQ ID NO: 171687 - DNA, 268 bp, Glycine max
ctaagagctgtgggaaatcttacgcaccattccccaaaggatttttcttttcaacatccggaggtttgagcagttttgagcatccactgaatgaggtgaagcctgtaccaagggttgacagttccggacaggtgtgtggtgcaactttcaaggtggatgctgaggctaagaaggaagcaactggcatgccaagggttgggagtgctgctaactggtcaaataatatctgattgcgactctattctgtttgaattatgggcttttattt

SEQ ID NO: 171688 - DNA, 264 bp, Glycine max
gctgttgcaaatttctactatttttcaatggcttctgcagatgttgagttccgttgctttgttggtgggcttgcttgggtcaccggcaacgatgccctcgagaaagccttttcaatctacggcgacatcgttgaatcgaaggttatcaacgaccgtgagactggaaggtccagaggattcggatttgtgaccttcgcctcagagcagtcaatgaaagatgcgatcgcaggaatgaacggccaggaccttgacggccgtaacatc

SEQ ID NO: 171689 - DNA, 144 bp, Glycine max
ctcaaatctcttcgttccttcgattcgttccatttcttccaaaatggccaaagacccagttcgcgttctcgtcactggagctgcagggcaaattgggtatgctcttgtccctatgattgctaggggagtgatgttgggtcctga

SEQ ID NO: 171690 - DNA, 266 bp, Glycine max
caagaggcttttcaatttcaaaaaggataaagatgggtactggaaatggtttgctgggaatttagcatctggtggggctgctggggcttcctctctgttgtttgtctattctttggactatgcccgaacacgtttagcaaatgatgcaaaggctgcaaagaagggtggtgagaggcagttcaatggcttggttgatgtttacaggaaaactatcaagtctgatggtattgctggcctttatcgtggtttcaacatctcatgtgttg

SEQ ID NO: 171691 - DNA, 268 bp, Glycine max
gcgtcaaactgttgctgtgggagtcatcaagaacgttgagaagaaggatcctaccggagccaaggtcaccaaggctgcccagaagaagaagtgaatcgtgcgggctggttcatcaggggatgttggttacaataaatgttggtttcttttctgtactcttgtgtcttcttttctaggtagcttgtttttcggacaaagtttgaagtctccaccatcatctcgcaactgttgttcccagaactgggttcttgatcgacggtggcaaaat

SEQ ID NO: 171692 - DNA, 277 bp, Glycine max
ctcagatcgaaatcgaaaccatgtggcggagactcttctcttcttcaaacctcaaatccctacacacagcactctctccttctcgtccccgactcgccgcccctctcctcacccgccacgtgaccgctcattcaggtgcttcttccgtcaaaaggagggttgaagatgtcgtgccaattgctaccggccacgagcgtgaggagattcaggctgatcttgagggaagggatattcttgaaataaaccatcccgtcggcccttttggcacaaaggaagc

SEQ ID NO: 171693 - DNA, 275 bp, Glycine max
  unsure (1)..(275): unsure at all n locations
ctatctctcaccaacttccgctacttcctactccaaccacttncttttttcccgcagtcatgggcaaggtcaagatcggaatcaacggatttggaagaattggccgtttggtggccanggtggctctgcagagagacgatgttgaactcgttgccgttaacgatcctttcattaccaccgattacatgacatacatgtttaantacgacagtgttcagggcactggaagcatcacgatgtcaccgttaaggatgagaagacccttctcttcggtg

SEQ ID NO: 171694 - DNA, 274 bp, Glycine max
  unsure (1)..(274): unsure at all n locations
gtcttctcacttcgtcaaaaccaaccaaacccctccccaattctcaagccaaccatgtcttccttcaagagcaagtaccaagatgaactcattgccaatgctgcttacattggcaccccagggaagggtatccttgctgctgatgagtcaactggtacaattggcaagcgattggccagcattaatgtcgagaatgttgaagcaaataggcgtgctcttcgtgaactcctattcaccacacctggtgctttngagtgcctcagtggtgtgatct

SEQ ID NO: 171695 - DNA, 272 bp, Glycine max
gcgtctgtgtaattgtaggtgccaaacatatggttgccgagatgaatgtccgtgaattttccatctctaagaatgaccgtacttcaaattccaattccaaatttcttaccttgcccaccattttgactcttggccgtgtcgccgctgtacctcttcttgttgccaccttctacatggatggttggcgaggaacagttgttactacaagtatcttcactgctgcagcagttacagattggcttgatggttatattgctcgtaagatgaaaatg

SEQ ID NO: 171696 - DNA, 263 bp, Glycine max
gttctctcttcgcttaaaccctatcgttcttctcgttttcgccgattctcgccatgccgaaagctaaatccgacgccaaagccgccgatagcaggttgaagcggaagggcgctggtgctgggaggaagcaatcgaggaaagctgctaaggaccctaacaagccgaagagacctccaagcgctttcttcgttttcatgtccgagttcagagagcagttcaagaaggagcatcctaacaacaaatccgtcgctgttgtcggcaaa

SEQ ID NO: 171697 - DNA, 266 bp, Glycine max
aatttatccattcaccacagagtttcttcaatggcccagcctcaaccagagtcccacgccaccaatggctcacacgagccattgctcaaaatcccaaagctccaccaaaacggcgacgtttccgcaaccgctccctttctccgcgtcaagaagctctccgacaaggccgttttgccctctagggcttccactctctccgccggttacgatctctctagcgcggtggagacgaaggtcccggcgagagggaaggctctggtggccac

SEQ ID NO: 171698 - DNA, 266 bp, Glycine max; identical to SEQ ID NO: 128673

SEQ ID NO: 171699 - DNA, 264 bp, Glycine max
attaaaagcaatatagtttgtttaattgttgcttcatttctattgtgtgaatggcatttgggaagttcattatgaatataggggtagtggcaatggttctgggtttatggattcgggttggatttgcacaacaagtaccttgctactttatttttggagactctttggtggataatgggaacaacaaccagcttaactcactggctaaggctaattatctcccttatgggattgacttcgctggtggcccaactggaaggtttt

SEQ ID NO: 171700 - DNA, 265 bp, Glycine max
gtggaattattagtttttcatgggatatatgtggaaagtcacatccttcattgagtggtacaagcctgatgtaattaaaggagacatggattcaatcaggacagaagtacttgacttctatgcaaagctgggaactaagataattgatgagtctcatgatcaggacaccacagatttacacaaatgtgtggcatacatacgtgacctcaccccaaatgttgatggatcagaactatgcattcttgttgctggagcacttggtggg

SEQ ID NO: 171701 - DNA, 264 bp, Glycine max
aaagcacagaacagttgaagtgaatggcataaaaatgcatgttgcagagaaaggagagggtccagtggtgttgttcctccacggcttccctgagctctggtactcatggcgccatcagattctctctctcagctccctcggctaccgcgccgtcgctcccgatctccgtggctacggtgacaccgaagcaccaccttcaatcagcagctacaactgcttccacatagtgggtgatctcgttgcgcttattgactctctgggtgt

SEQ ID NO: 171702 - DNA, 266 bp, Glycine max
ttggccgggtggtccgaagcaattgggccatcagggttatccgatgacactaggaaaactcagttcaacatcatgtcaggtacatctatgtcttgtccacacataagtggattggctgccttgttgaaagctgcacatccgcaatggagtcctagtgcgataaaatcagcactaatgacaacggcagatgtacacgtcaacaccaagtcccaactccgtgatgcggcagggggtgcattttccaacccatgggctcatggtgcggg

SEQ ID NO: 171703 - DNA, 271 bp, Glycine max
ggcttggcgtggaagcaaacaacgtagtcaagtggcaaactgttcctgcagcttgcggagagtacatagctgactacgttctaggagaccaatatagatcagattccaaaacagttaaccaacaagcttatttctatgctaaatccctcaaactcaccaacaaagatgtctttgtcttggacgttgacgacactactctctctaatctccagtattttgctaaccatggatttggtgtggaaccacacaatacaacggcgtttaagaactg

SEQ ID NO: 171704 - DNA, 269 bp, Glycine max
cgacgatccaagtgatagacactcgttgcgatggaacttgtagctgaatccgagcgaactctgtacccatacgtgactggatcctctgtagtcgctatcaaatacaaagatgggattctaatggccgctgacatgggaggttcgtatggatctaccctgcggtataagagtgttgagcgtatcaagcctattggaaagcattctcttcttggtgctagcggggagataagtgactttcaggaaattttgcgctaccttgacgagcttat

SEQ ID NO: 171705 - DNA, 270 bp, Glycine max
gcagattcttcgctcctttccattgattcaaaacatggctaccaccaccactcctgctagatcttttctccaagtcgccgctacagaggaggccgcgccgcctctcagagtcgttcagattgaaggactggttattctgaagataattaagcattgtaaggaccactcgccttctttagtcactggacaacttcttgggttggatgttggcagtgttcttgaagttaccaactgcttcccctttccaatgagggaagaggatgaggaaat

SEQ ID NO: 171706 - DNA, 266 bp, Glycine max
gaaacagtgaattatctgaacaggaaagatgtgcagtcagctttgcatgctcatcttgttggagtccaaagatggtctgcatgcagcaatgtcctggattatgagctgcgtgacttggagataccaacaatcacggttgtggggaagctagtcaaggagggaataccagtattggtttacagtggtgatcaggactcagttatcccactgactggaagtagaacattagtacataaattggcaaaagaactaggattgaacaccac

SEQ ID NO: 171707 - DNA, 258 bp, Glycine max
cagcattcacataggtcaggccgggatccaggttggcaactcctgctgggaactctactgcctggaacatggcatccagcccgatggcatgatgccaagtgactcctccttcggtgtagcccacgacgccttcaacaccttcttcagcgaaaccggatccggcaagcacgtccctcgcgccgtcttcgtcgatctcgagcccaccgtcatcgacgaatccgttgtggcattaccgtcaatcttccacccgaaaactca

SEQ ID NO: 171708 - DNA, 266 bp, Glycine max
cttctttgagaagtgcaagcttgacccaactcactgggacaagctctcaaaggctggtctccagcgtattgaagagaagtacacatggcaaatttactctcagaggcttctcactctcaccggtgtctatggcttctggaagcatgtgtctaaccttgaccgccgtgagagccgccgctatctcgagatgttctatgctctcaagtaccgcaaattggctgagtctgtgccccttgctgctgagtaaactgaggataaagagttgg

SEQ ID NO: 171709 - DNA, 171 bp, Glycine max
gattatcctaagtctttgggaatagtgctgcaatggcttcaagtcaggaggaggtgacccttttgggagctactggaagcccatttgtgtgcagggttcatattgccctcaagttgaagggagttcaatacaaatatgtcgaagaaaatttgaggaacaagagtgaactgc

SEQ ID NO: 171710 - DNA, 266 bp, Glycine max
gacaaaggctcgtgaagttctgcaaagggaagatgacctgaatgaaattgttcagcttgtgggcaaggatgctttagctgaaggagataagatcaccttagaaactgcaaagcttttgagagaggattatcttgctcaaaatgcctttacaccatatgacaaattctgccccgtctacaagtctgtttggatgatgcgcaacattatccatttctacaatttggcaaatcaggcagtagagaggggagctggttcagatggtcaga

SEQ ID NO: 171711 - DNA, 266 bp, Glycine max
ctcaggtgcggaatcagtcatcatggcggtgatcaacaaagaaataatcgatgagccctacgaacaagaggagtgcatcgactacgagcagctgaagaaacgcatgtggaaggaccgtgtgcttttgcagaagctgaaggagaagcgcgagaagcaagaacccgacgtggaagcgaaacaagaggcgtcaaggaggaagaagatgtcacgcgcacaagactcggtgctcaagtacatggtgaagatcatggaggactgtaacgcgc

SEQ ID NO: 171712 - DNA, 270 bp, Glycine max
tttctcagttctctcacacactcattcggtgctccgaatctcagattctagggttagggttcccaatttctccaccgatcagaaaatgagttcaactggtggttctaccaagggcggaaggggcaagcccaaagcctccaaatccgtttcaagatcgcagaaagctggtctccaattccccgttggaagaatcgctcgattccttaaggctgggaaatacgccgagcgtgttggtgctggtgctcctgtgtacctctctgcagtgctcga

SEQ ID NO: 171713 - DNA, 262 bp, Glycine max
gattgttggagaggcacggtgcccataatatttctctcataaattctatggtcatggtttctaatgcgccactgtgggttcctcaaatttttagatagcttttgaatgtattttgctggacgtggtgatgatgattggagttgggttgtttttatttgtggtcgatccttttgttaaataacattgttcagcgattgcgatattattaccctttgtagtatgtgaccatttaccgtaataactagtaatttgtctattatta

SEQ ID NO: 171714 - DNA, 261 bp, Glycine max
ctagcttggacgagtgaattagattcatcatcaagatgtcgtctctgatagcagaagatgtgaagagcagatcagaggtgtaccacggggacgaaatgtgccaagtgaagtccaaggagcttctcaaggaaatcgccctccccaacggccttcttcccctcaaggacatggaggagtgcggctacgacagacaaaccggcttcgtctggctcaaacaaaagaagagttacacccacaagttcgacaagatcggaaagcttg

SEQ ID NO: 171715 - DNA, 262 bp, Glycine max
ctagggtttacagagaagcgaagaggcgcagcgtagcagtaaatcgtggaattgctagcaatggcgaggatcaaggtttacgagctgaggcagaagacgaaggctgatctgttgaatcagctgaaggacctcaaggccgagcttgccttgcttcgtgttgctaaggtcaccggcggtgcacctaacaagctctctaagatcaaggtggtgaggttgaacattgcccaggttttgacggtgatttctcagaagcagaaggccg

SEQ ID NO: 171716 - DNA, 260 bp, Glycine max
cgcatcgcaccttcaacttaacctattccacttgtaatcgtaaacgctttgctagaagaagagacaaagtgtgtctgtgtgtgtgagagagagagcaatggctggctcgtgggcacgccgttctctgattgttctagccatcatttccttcggatgtctatttgcgatttccattgctaaggaggaagccaccaagttagggacggtcatcggcattgatcttggaacaacctattcatgtgtcggtgtttacaagaatg

SEQ ID NO: 171717 - DNA, 257 bp, Glycine max
gaccgtggcacccccatgattctagacaacaattactacagaaatatattggacaacaagggcttgttgatagtggatcaccaactagccaatgacaagaggaccaagccttatgtgaagaaaatggccaagagccaggactatttcttcaaggagttttctagagccattactttgctctctgagaacaaccctctcactggcacaaagggtgagatcagaaagcagtgcaatgctgccaacaagcaccatgagga

SEQ ID NO: 171718 - DNA, 140 bp, Glycine max
agggtttgtaagagaaagaaaaaagaggcgcaagatgagtggtagggcttctgggaaggtgaagtggttcaacgatcagaaggggtttggattcataacccctgacgatggcagcgaggaactcttcgttcaccaatctc

SEQ ID NO: 171719 - DNA, 206 bp, Glycine max
gtgcctgcaggcttcagaaatttggagcatgatatcacaaggagcttacatttatgtgtgtggtgatgccaagggcatggccagggatgtacaccgcgccctgcacacaattttgcaagagcaggtatatgtttttaaataataaaatcttgaattgccttaaattgatggcatgggtgattgcgaatttggtgccttatattagt

SEQ ID NO: 171720 - DNA, 205 bp, Glycine max
tttgtaattgaggtgctgcaatggcttcaagtcaggaagaggtgactcttttgggagtaattggaagcccatttgcttgcagggtgaagattgcccttaagttgaagggagttgaatacaaatatgtggaagaaaatttggccaacaagagtgatttgcttctcaaatccaacccagttcacaagaaagttccagtttttattca

SEQ ID NO: 171721 - DNA, 212 bp, Glycine max
ctaattactgctattacgagacgacgcagatttagttcggattgttcgattgcgatggctaggaagatgcttatcgatggtgaagctgaattggctcaaggtggtggagaagaagtgtcgaattttgacttcgacttgtttattattggggctggaagtggtggcgttcgtgccgctagattttcatccaattttggagctaaggtggggat

SEQ ID NO: 171722 - DNA, 207 bp, Glycine max
tggagtttggagcgactgaactaatcattaatttgcactcgctgtttcagcttcatcacccttcttttgcatcatttatatctcttgagaaatggcacaagaaacctttctattcacatctgaatctgtaaacgagggtcaccccgacatgctgtgcgaccagatctctgatgcagtacttgatgcgtgccttgaacaggaccctga

SEQ ID NO: 171723 - DNA, 203 bp, Glycine max
ctcgagcgccacactcctctctctctctccgcttccttctcttctcacacctccatagcccacacttcccttccctccgccgatgccggcatggacgctgtccagcgccgtctcatgttcgaagacgaatgcattttggtggatgagaatgaccgtgtggttggtcatgattcaaaatacaattgtcacttgatggaaaagat

SEQ ID NO: 171724 - DNA, 204 bp, Glycine max
gttttacaagttctagcaagtgttgcaatggaagcagagtcggataccaagcagcagcagacgatggaaggaagttattcccaaactatgcaaattgatccgaaaagggctcgatttccatgctccgttgtgtggtcaccacttcctgtgatctcgtggttcattccttgcatcggtcacattggcatctgcagagaggatgga

SEQ ID NO: 171725 - DNA, 202 bp, Glycine max
gcgggtgaggtagaacccttccactgtggtgactctgcgatgggtgcctacaagtatgtttcagagctatggcgcaagaagcagtctgatgtcatgcgcttcttgcagcgggtgaggtgctgggagtataggcagcaaccttccattgttcgtttgacaaggtctacccgccctgacaaggctcgtcgcttgggcttcaagg

SEQ ID NO: 171726 - DNA, 203 bp, Glycine max
gaggtcaggaggagcactagctaagttcacaatttcaaaatggctaggggactaaagaagcatttgaaaaggctcaatgctcctaagcattggatgcttgacaaactgggtggtgcatttgcgcctaaaccctcatctggaccacacaaatcgagggagtgcctccccctcattcttattctgcgaaaccggctgaagtatgc

SEQ ID NO: 171727 - DNA, 212 bp, Glycine max
gatccatcgatcaattaatttccaatggccgatcagctcaccgacgaacagatctctgagttcaaggaagcctttagcctcttcgacaaggacggcgatggttgtattaccaccaaggaacttgggactgtgatgcggtcgcttgggcagaacccaactgaggctgagctgcaggacatgataaatgaggttgatgctgatgggaatggtac

SEQ ID NO: 171728 - DNA, 210 bp, Glycine max
ctttcaacctaacccatcgttcgcacggagccgtggtggttatggctctgtccttttttcctttctctcgttaccagaaccagaagaaccatttgtggccaacatggatttggaccagtggatctccaaggtcaaagagggccagcatcttcttgaagacgagcttcaacttctctgcgaatatgtaaaagagatccttatcgaggagtc

SEQ ID NO: 171729 - DNA, 207 bp, Glycine max
caagaacaagcacaaaggctgactgtgagctctcgagccttctacaatgatcgctttccagtctttgctgagtatgtgacaaacatgtttcgttatgatatggtacttcctatgaatactggtgctgaaggtgtggaaacagcactgaaattagcacgaaagtggggttatgaaaagaaaagaattcccaaagacgaggctattatt

SEQ ID NO: 171730 - DNA, 206 bp, Glycine max
  unsure (1)..(206): unsure at all n locations
ctatctctcaccaacttccgctacttcctactccaaccacttncttttttcccgcagtcatgggcaaggtcaagatcggaatcaacggatttggaagaattggccgtttggtggccagggtggctctgcagagagacgatgttgaactcgttgccgttaacgatcctttcattaccaccgattacatgacatacatgtttaaatac

SEQ ID NO: 171731 - DNA, 202 bp, Glycine max
atctcttgctagttgccacactacaccgatatttccaccaaacccgtttgcgttgttgtttgcgaataaatggcgactaagaggagcgtgggaacgttgaaggagggtgatttgaaggggaagagggtattcgtgagggtcgatctgaacgtgcctttggatgacaaccttaacatcaccgatgacactagagtccgtgctg

SEQ ID NO: 171732 - DNA, 204 bp, Glycine max
caaaaatgagagaaatcatcagcattcacataggtcaggccgggatccaggttggcaactcctgctgggaactctactgcctggaacatggcatccagcccgatggcatgatgccaagtgactcctccttcggtgtagcccacgacgccttcaacaccttcttcagcgaaaccggatccggcaagcacgtccctcgcgccgtct

SEQ ID NO: 171733 - DNA, 204 bp, Glycine max
gtaacacttcttgagtactcaatgaatgcagtcacggaaggcatcgatgcaattgccactacccgggttgtgattcgtggggagagtgaaacaagtactagtactactcatgctttaactggagaagctgttcttcgaacatttagtgggactggagcgggaatggatgtcgttgtttccagtgtcaaggcctatattgctgca

SEQ ID NO: 171734 - DNA, 211 bp, Glycine max
atccatatctcctgattagcaagaagagatatgctggtttgttttggacaaaaccagacaactttgacaaaatggacactaaaggtattgaaacagttcgaagagacaattgtttattggtcaaaaacctggtgaacgattgccttcacaaaatattgattgacagggacattcctggggcagtccagtatgtcaagaatgcaatttcaga

SEQ ID NO: 171735 - DNA, 207 bp, Glycine max
agaagctgatccgagaagatggtgcagcgtctcacctaccgcaaacgccacagctatgctaccaaatccaaccagcacagagtcgtcaagactcccggtggcaagcttgtttatcagaccacgaagaagagggccagcggacccaagtgccctgtcactggaaagaggattcaagggattccacatttaaggccagcagagtataat

SEQ ID NO: 171736 - DNA, 206 bp, Glycine max
ccacgatgagtttcttaggccgtccatggaaggtgtattcgaggactgtctatctgcagtcatacattggaaatgtaattcaacctgctgggtggctagagtggaatggaacagttggattagacactctcttttatggtgaattcaacaactatggacctggttctaacactagcaatagagtaacatggcctggttactctctg

SEQ ID NO: 171737 - DNA, 205 bp, Glycine max
aaaaaaacctaccaatggctcccgcaaaggcagagaagaagcccgcggagaagaagccggcagagaaggccccagcggagaagaagccgaagggtagaagaagatatcgaaggaaggaggaagcgagaagaagaagaagagaacaaagaagagcgttgagacctacaagatctacatcttcaaggtgttgaagcaagtgcacccc

SEQ ID NO: 171738 - DNA, 202 bp, Glycine max
tctcatcctcacaaatacaattatacaaacacatattcattctcctcacataccaaaaataaattatttttcttgttattttccctttgctaacggaaagccatgaaattcgggaagagcctgagcagccagatcgagaaaaccctgccagagtggcgcgacaagttcctctcctacaaggagctcaagaagaagctcaagc

SEQ ID NO: 171739 - DNA, 200 bp, Glycine max
ctcgagcgcacttcccttctccaacatgccaaacgacagcgttctgagtcttttcttcttcgttaccctcttcacatgccttctctctgctacttcccacgatgaccatattttcctaccgagtcaactccatgacgatgactcagtgagttgcactgcaaccgacccaagccttaactacaagccggtgatcggaatcc

SEQ ID NO: 171740 - DNA, 206 bp, Glycine max
cttgaaactcagaccaactgacacacagagaaagagagagagacagagagagagagaagcatagcagacatgggaagagctccttgctgtgacaaagccaacgtgaagaaaggtccatggtcacctgaagaagatgccaaactcaagtcttatattgagcagcatggcactggtggaaactggattgccttgccccagaaaatagg

SEQ ID NO: 171741 - DNA, 204 bp, Glycine max
gtagctgaaggccatgctgacttggtatcctatggtcgacttttcatctccaatccagacttggttttaaggcttaagcttaatgcacctcttaccaagtataacaggaagacattttacacccaggatcctgttataggatacacagattatcctttcctaagcaaagaaagtgagacaaaggagccaagggcacgcctttaa

SEQ ID NO: 171742 - DNA, 203 bp, Glycine max
catcaaccaaacaaacaaataaagcaaaaggcctttttattccaaagcaaggaaggaagaaataaaccgaatgagagcattaacctcttcttcttccactttcattccaaagcgttattccttcttcttcttcctctccattctcttcgctcttcgatcctcgtccgggggctgctccgaataccaccaccaccacgcgccga

SEQ ID NO: 171743 - DNA, 200 bp, Glycine max
ggaaggagccgtagcagcagcggaagctctagcttgggcagcgaatcacaatggcgagaggattgaagaagcatttgaagaggcttaatgccccaaagcattggatgcttgacaaactgggtggtgcatttgctcctaagccctcatctggaccacacaaatccagggaatgcctgccactcatactcattttgcgaaac

SEQ ID NO: 171744 - DNA, 202 bp, Glycine max
gtgaagctcagtgcatcaagatctctctctctgtaatcgaaaatgagcaagggaccgggtctctttaccgatatcggcaaaaaatccaaagatcttttgactaaggactacaactccgatcagaaactcaccatttcctcatacagcatctccggagtggccctcacttcaacatctgtcaagaaaggaggactctccactg

SEQ ID NO: 171745 - DNA, 199 bp, Glycine max
ctcaaacattgtttgttgtaggaagaggaatcttgagaaatggcaggggacagcaagagcaagattctgttcatcggagggactggttacatcggaaaattcatcgtggaagccagcgccaaagctggccacccaactttccttttggtgagggagtccactctctccaaccccgcaaaatcacccctcatcgacaatt

SEQ ID NO: 171746 - DNA, 209 bp, Glycine max
gggttatcatatctccatttccatttcctctctctcagtttccaagaatcttaagctatgggaaagtcttacccaaccgtgagcgctgattaccagaaggccgttgagaaggcgaagaagaagctcagaggcttcatcgctgagaagagatgcgctcctctaatgctccgtttggcatggcactctgctggaacttacgacgtgagctc

SEQ ID NO: 171747 - DNA, 205 bp, Glycine max
gggagaactgagaagcctcttctcaaggctggaaatgcttaccacaagtttagagtgaagaggaactgctggcccaaggttcgtggtgttgctatgaaccctgttgagcatccccacggaggaggtaaccaccagcatatcggtcatgctagtactgtcaggcgtgatgctcctcctggacagaaggttggtctcattgccgcaa

SEQ ID NO: 171748 - DNA, 204 bp, Glycine max
gtcgtttctttctctctcctcaaccggagacagcgtcgccttcttttctgaatctcgcggtgttgttagttctgcggcggttgtagttccggcggcgatgggacagcaatcgttgatctacagcttcgtcgctcgcggcaccgtgatcctagcggagtacaccgagttcaccggaaacttcaccagcgtggcggcgcagtgcct

SEQ ID NO: 171749 - DNA, 205 bp, Glycine max
ggacactagcaatgatgctgcctgggtcccttgcactgcctgtgttggttgctcaacaaccacaccctttgctcctcccaagtccaccactttcaagaaagttggatgtggtgcttctcagtgcaaacaggtacggaatcccacttgcgacggaagcgcgtgtgcattcaacttcacctatggcacttcctctgtggcagctagc

SEQ ID NO: 171750 - DNA, 202 bp, Glycine max
cgtgcctctagggttatcatatctccatttccatttcctctctctcagtttccaagaatcttaagctatgggaaagtcttacccaaccgtgagcgctgattaccagaaggccgttgagaaggcgaagaagaagctcagaggcttcatcgctgagaagagatgcgctcctctaatgctccgtttggcatggcactctgctgga

SEQ ID NO: 171751 - DNA, 201 bp, Glycine max
ataagaacctacacaaagcagctactacttggactcgagtacttgcacaaaaatggaatcatgcacagagacattaagggggccaatattcttgtagataataaaggatgcataaaacttgcagactttggggcatccaaacaagtcgttgagctggcaaccatttctggtgccaagtccatgaagggtactccatattgg

SEQ ID NO: 171752 - DNA, 201 bp, Glycine max
cgaaagggatattcgatttgaacttctggctcggctttgcccaaattccactggagctgatataaggagtgtatgcacagaagctggtatgtatgctatccgtgcccggaggaagactgtaacagagaaagacttccttgatgcagtaaataaagtcatcaaaggataccagaagttcagtgcaactcccaagtatatggt

SEQ ID NO: 171753 - DNA, 201 bp, Glycine max
ctcgtttctggtccaaattcattgatgataaggtttttggtgctgcatggaaatccgttttcacagctgatgagaaagagcgtgagaagaatgttgaggaagcaattgaggctctgcagtttcttgagaatgagataaaggacaagaagttctttggaggagaggagattgggttggtagatattgctgctgtctacatag

SEQ ID NO: 171754 - DNA, 271 bp, Glycine max
tatttgttcattttgttgttcgaagccaaaaccctagcagccggcgagaatggcagacgttgaggttgatgcggcggcacggcaggggcagcgcaccgaagaagagaacgttcaagaaattcagcttcaggggcgtggatctggacgcgcttctggacatgtccaccgacgaactggtgaagatgttcagtgcgcgtgcacgtagaaggttccagagaggtctgacgaggaagcccatggccttgattaagaagctccgcaaagctaaaag

SEQ ID NO: 171755 - DNA, 269 bp, Glycine max
  unsure (1)..(269): unsure at all n locations
gaacctgtctcaatgatcttatgtactttcctacccgtaatgcatatggtctctnctagtgttgctggaaacatgggaaaaactagcagctttgcagaatgagtttgagaatgtgagaaacaaattggatgatggtaaggagaagatggtacggcttgagaagaaggtgatggttctcacgcaaggttatgagatgagagtaaagaaaagcctgtggccacaaattgaggccactttcaagcagatggatgtagctgcaactgagttag

SEQ ID NO: 171756 - DNA, 265 bp, Glycine max
tctcgagccgattcggctcgagggtaagccacatagagacacaataccgagtgagttgttgacccttcgccacaactctcagccaacatgggtatctccagagattctatgcacaagaggcgtgccactggtggcaagaagaaggcctggaggaaaaagagaaagtatgagcttggtcgccagcctgctaacactaagctgtcaagcaacaagacagtcaggaggatccgtgttagaggtggaaatgtgaaatggagggcattga

SEQ ID NO: 171757 - DNA, 263 bp, Glycine max
cctttccgcttcaggttcagcttcaacttcaaattctcagtgaaaccaattcagctgagtccaaatcccaaatccgaatcaaaatccgaagtgagatttgcgatggagaggcttcagcgaatgtttgcaggtgcaggtggagcgctagggcaccctcccccagattccccaactctcgattcctccgagcaggtctacatctcctcactcgctctcctcaagatgcttaagcacggaagggctggggttcccatggaggtgat

SEQ ID NO: 171758 - DNA, 257 bp, Glycine max
caataagcaatgggatggggagaaatgtattatcttgacttgcagctttactcctggttcttgttctttaactgcatataagctcactccatctggttacgaatgggggcgtgtaaataaggatacgggaagcaatccacatggttaccttcccacccattatgagaaggttcagatgctccttagtgatcgcttccttggtttctacatggttcctgataatggtccatggaattacaacttcatgggggtgagac

SEQ ID NO: 171759 - DNA, 255 bp, Glycine max
gtcggcgacacgaactacttccgtgtaatggcgacctccgtcgcagtcgccggcgctttgacggcgcatgatcgccggattctgacagcggtgaacgtcggagcgtcgagcctgtcgttggccggttccagcttcattgtagtgtgctacctcctcttcaaggagctccgcaagttctccttcaagctcgtcttctacctcgctctctctgatatgctttgcagtttcttcggcataataggggacccgtccaaa

SEQ ID NO: 171760 - DNA, 258 bp, Glycine max
  unsure (1)..(258): unsure at all n locations
tctcacttcgtcaaaaccaaccaaacccctccccaattctcaagccaaccatgtcttccttcaagagcaagtaccaagatgaactcattgccaatgctgcttacattggcaccccagggaagggtatccttgctgctgatgagtcaactggtacaattggcaagcgattggccagcattaatgtcgagaatgttgaagcaaataggcgtgctcttcgtgaatcctattcaccacacntggngtttgnggtgctcngng

SEQ ID NO: 171761 - DNA, 261 bp, Glycine max
cacgtatccttaaaaagcacttcaggggaaagccatattacgttgatcttcttgatttgtttaatgaggttgagttccagactgcttcaggacagatgatagatctgatcaccacactggaaggagaaaaagacctgtctaaatacacattaacactgcatcgacgtattgttcagtacaagactgcatattattccttttaccttccggttgcatgtgcattgctcatggcgggtgaggatcttgacaaccatgttgatg

SEQ ID NO: 171762 - DNA, 262 bp, Glycine max
cgggtgaaggcgaaaaccaaatcaagatgctgagagtgggcgcaaagaggcttttgggaacgacgtcgttgggcgttagggttccggcgaggctgtaccacgagagggttgtggatcactacgacaacccccggaacgttggatcgttagacaagaacgacccgagcgtggggacgggtttggtgggggcgccggcgtgcggcgacgtgatgaagctccagattaaggtcgacgacaaaaccggaaaaatcgtcgatgctcg

SEQ ID NO: 171763 - DNA, 265 bp, Glycine max
tttcaattttaatttcctctcaaaccctaaccctaaccctaaccctccccgtcacaaaagaaaaccctctttgtccgatcatcgtcgtcaagatgttggaactccgtctcgtgcaaggctccctcctgaagaaggttttggaatccgtcaaggagctcgtgaacgacgcgaacttcgactgctcctccaccgggttctccctccaggccatggactccagccacgtcgccctcgtcgctctcctcctccgatccgagggcttcga

SEQ ID NO: 171764 - DNA, 259 bp, Glycine max
ctgatcttctgtgaagggttcgagtgagagcatacctgtcgggacccgaaagatggtgaactatgcctgagcggggcgaagcagaggaaactctggtggaggcccgcagcgatactgacgtgcaaatcgttcgtctgacttgggtataggggcgaaagactaatcgaaccgtctagtagctggttccctccgaagtttccctcaggatagctggagcccgcgggcgagttctatcgggtaaagccaatgattagaggca

SEQ ID NO: 171765 - DNA, 260 bp, Glycine max
ctttctagttcgtgttcttcgtcgcaaatccgaagtaggatctctcttgttttttctctaggtttttcgcgatggcgtcgaagcgaattttgaaggagcttaaggatttgcagaaggatcctccaacatcttgcagtgccggtatatttttatttttttgttttgatattcttttcctattttattgttgagaatttggttgtgtttgtttaaacaatttggatttaaattttggtaaggaagaagctgcgcgattctga

SEQ ID NO: 171766 - DNA, 257 bp, Glycine max
tggtgatgctggttttgttaagatgattccgaccaaacccatggtggttgaaactttctctgagtaccccccacttggtcgctttgctgtcagggatatgcgtcaaactgttgctgtgggagtcatcaagaacgtggagaagaaggatcctactggagccaaggtcaccaaggctgcccagaagaagaagtgaatcgtgcggtttggttcatcaggggatgtcgtttcttatggttacaataaatgttggtttcttg

SEQ ID NO: 171767 - DNA, 257 bp, Glycine max
gcagcagcggcaagcaactccatccgcaatgggaatcgatttgaaggcaggaggtaagtccaagaagaccaaacgtacagcccccaaatccaatgatatttacctcaagctcctcgtcaagctgtaccgttttcttgttcggaggactggtagtaacttcaatgccgtcatcctcaaacgccttttcatgagcaaggtcaacaagcccccgctatccctctctagattgattcgttacaccaagggaaaggaggata

SEQ ID NO: 171768 - DNA, 260 bp, Glycine max
aaaaaggagctattttgattcccctctctcctcaaggcttttgcctaaccagccacaacactttggatggaactaccttcagatgggtttgggaagaaaaatagaccctgagccaggtaggtgtagaagaactgatggcaagaaatggagatgctcaaaagaagcatacccagattctaagtactgtgagaggcacatgcacagagggaagaatcgttcaagaaagcctgtggaagttttgaaaacaacaacaccatcat

SEQ ID NO: 171769 - DNA, 260 bp, Glycine max
gcctcaagagcagtgttattgttggctatgtgtgtgcttccggcgatggttgtggccattcgcccagcaaagaaccctttttgcgtgaagggtcgtgtctactgtgacccttgccgtgctggttttgagacctcagctaccacctacattgctggtgctgagattatgttgcaatgcaagagcagggttagcaacgaggttgtgtacacgaagaaggggtacaccgactcaaccggagcatacacaatcgtacgtggatg

SEQ ID NO: 171770 - DNA, 261 bp, Glycine max
gggtgttttcacattcgaggatgaaatcaactcccctgtggctcctgctactctttacaaggccctagttacagatgccgacaacgtcatcccaaaggctcttgattccttcaagagtgttgaaaacgttgagggaaatggtggcccaggaaccatcaagaagatcactttcgttgaggatggagaaaccaagtttgtgctgcacaaaatagaaagcattgatgaggcgaacttgggatacagctacagcgtggttggggg

SEQ ID NO: 171771 - DNA, 261 bp, Glycine max
cactcctcttcctcttcgatcatcacctctccacaatgccgccgaagttcgacccctcccagatagtcgacgtcttcgtccgcgttaccggcggcgaagtcggcgcggcgagttccctggccccgaagatcggtcccctcggtctctcccccaagaagatcggagaagacatcgccaaagaaaccgccaaggactggaagggcctccgcgtcaccgtcaagctcaccgttcagaatcgtcaggcgaaggtcacggtggtcc

SEQ ID NO: 171772 - DNA, 257 bp, Glycine max
gtcgacgatccgccggagaattgcctccacttctctgtcctctcggaggcgaacgagagcgacgtgccagaggtggagatccacccggacgacgcggtggcgatgccgttctcctccggcacgacgggtttacctaaaggagtgattctcacgacacaagagtttaaccacgagtgtggcgcacaagttgacggagagaaccctaacctctacctcaccaccgaggacgtgctcctctgcgtgcttccgctctttca

SEQ ID NO: 171773 - DNA, 248 bp, Glycine max
ctctgtggggattgtcagtctcggaaactaatagtgttgccattggacgagaaggaggtgttgcacctctgattgcacttgcacggtctgaagcagaggatgttcatgaaactgccgcaggagcactatggaatctggctttcaatgctagcaatgctctaagaatagtagaggaaggtggagtatccgcacttgttgatctctgctcttcatcagtttcaaaaatggcacgattcatggctgcgttg

SEQ ID NO: 171774 - DNA, 243 bp, Glycine max
  unsure (1)..(243): unsure at all n locations
ctcttctcactgcatcgcttcaggttcttctgaaaagatgtctcgcgtgtatgttggtaacttggattcacgagtcaccgagagagatctcgaagacgaattccgcgttttcggagttattcggagtgtttgggttgcacgtagaccacctggtncatgcttttattgactttgatgaccgcagagacgcacaggatgctatccgtgaattggatggcaagaatggttggagggttgagcttt

SEQ ID NO: 171775 - DNA, 257 bp, Glycine max
gggagattctttgtttgctaccttctctcggaaaaatggttacgttcaggtttcaccagtaccaggtggttgggagggctcttcccacggaagcagatcagcaccccaagatctaccgaatgaagctctgggccaccaacgaggttcgcgccaagtccaagttctggtattttctgaggaaactgaaaaaggtgaagaagagcaatggccaagtgcttgccatcaacgagatttttgagaagaacccaaccaaaatt

SEQ ID NO: 171776 - DNA, 259 bp, Glycine max
gccgtcgtttcggtgaataagtgtcgtttaaagatgcagagtctgcaacagaaggcttccgaatggagcggtgtttccatagacgacgctttcggcatcgacgacaccaatctcttccagaaactcggcctccaaaccttcattaacctctccaccaatttctacaacagggtttacgatgacgaggaagaatggtttcgttcaatattcgcgaattctgagaaggagaatgccattcaaaaccaatacgagttcttcg

SEQ ID NO: 171777 - DNA, 252 bp, Glycine max
catcaatctcgtttgttctcactaactattacttcatcatgtcgtcgagcacagttggtcaagtcatcaaatgcaaagctgcggtttcatgggaggcagggaagccacttgtgattgaagaagtagaggtggcaccaccacaagctggtgaagtgcgtttgaagatcctctacacctctctttgtcacactgatgtttacttctgggaagccaagggccaaactccattgtttcctcgtatatttggtcatg

SEQ ID NO: 171778 - DNA, 245 bp, Glycine max
cttagatacttcttatgcaactatagtgaggctaagagttggtgcataattaatcaaaatgttggccatattccacaaagcttttgctcatccacctgaagagctgaacagtcctgcatcttacaaaggttccaagaagcctaaggttcctgaggaaactctcaaagatttcctttcccaccatcctcacaacacttgctccatgagctttggtgaagctgctgtgctagcttatgttcgtcctg

SEQ ID NO: 171779 - DNA, 257 bp, Glycine max
gttggtctcctacgctgcccggtcggaatcagcgctgggcggctggagccccatcaaggacgtaaacgacagccacgtggcggagatcgccaactacgcgctgagcgagtacgacaagcgttctggggccaagctcacccttgtcaaggtcgtcaagggcgagactcaggtcgtttccggcaccaactaccgtctcgtcctcaaagccaaggatggatccgccacggccagttacgaagccatcgtctgggagaagc

SEQ ID NO: 171780 - DNA, 252 bp, Glycine max
cgcattcaacctttctcttcctcctcactcaaacttcccctctctacgccgttcctcccaaatggatgcaccaatggagttttggggtgttgaggttaaggttggtcagaccgtgacagttgacccaatggatcctgtggattcatacatacacatatctcaggttgcgctcggagaggcgaaaaaggagaaacctaatgagtctgtggttttgtatttgaaagttggtgaacagaagattgtcttgggaac

SEQ ID NO: 171781 - DNA, 255 bp, Glycine max
ccaacgtcgcccgcactgccttcggcctgggcgcggcggccaccgccgtctcctcttccctctacaccgtcgacggcggccagcgcgccgtcctcttcgaccgcttccgcggcatcctggactccaccgtcggcgaagggacccacttcctcatcccctgggtccagaaaccctacatcttcgacatccgcactcgtccccacaccttctcctccgtctccggcaccaaggacctccagatggttaacctaaccc

SEQ ID NO: 171782 - DNA, 254 bp, Glycine max
ggaaggcacactcccggtaccttcaccaatcagcttcagacttcgttcagtgagcctcgtctccttatcctcactgatccaagaacagatcaccagcctattaaggaagctgctcttgggaatattcccaccattgctttctgtgacactgattcgcctatgaggtatgtggacattggaattcctgccaacaacaagggaaaacacagcattggttgtctcttttggctccttgcaaggatggtattgcagat

SEQ ID NO: 171783 - DNA, 254 bp, Glycine max
attttcagaggaacaatggcgggtagggtttcgacgtgcttcttcttcgtgtttgctctttctctccttcttccttttcagatctccgctgaggaatcatcggagaaagagttcgtactcacattggatcactctaactttcacgacactgtcagcaagcacgatttcatcgtcgtcgagttctacgctccatggtgtggccactgtaagaagcttgctcccgagtatgacgaagctgcttctatcttgagtag

SEQ ID NO: 171784 - DNA, 250 bp, Glycine max
gtggtgccttatcgctgtggttttcatcgtcttccttctcttatatttctttttgtgttggtctgcgccgcacgccgaaacaatggccggaaaaggagagggtcctgctatcggaatcgatctcggaaccacctactcttgtgtcggtgtgtggcaacatgaccgagttgaaatcatcgccaacgaccaagggaacagaacgacgccgtcttacgtcggcttcactgataccgagggtctcaccggtaat

SEQ ID NO: 171785 - DNA, 261 bp, Glycine max
actagttctagatcgcgagcgttgtaattgagttcgatcaaatagctcccagtactttaattgatttctgaatatcatcacttaatttgaaggaaagatggtgagcgtagctgagatccgccaggcacaaagggcagaaggcccagcaaccatccttgccattggaactgcaaacccaccaaactgtgttgatcagagcacctatcctgactactacttcagaatcaccaacagtgagcacatgaccgagctcaaagagaa

SEQ ID NO: 171786 - DNA, 256 bp, Glycine max
caagaatgagggagatattgcacgtgcaaggtgggcaatgcgggaaccaaatcggttccaagttctgggaagtgatatgcgacgaacacggcatcgaccccaccggaaagtacaccggcgacgaggcctccgatctccaactggagaggatcaacgtctactacaatgaggcctccggcggaaggtacgttccccgggccgtcctcatggatctggagcccggcaccatggacagcatcagatccggcccatacgg

SEQ ID NO: 171787 - DNA, 253 bp, Glycine max
ttccagagccaaggtaggttaaacactcttcttcatcgtcgtcgcaatgggacgtgtgatccgtgcgcacgtaagggagcaggctcggtcttcaagtcccacacgcaccaccgcaagggccctgcccgcttccggagcctggatttcggagagcgcaacggctacctgaagggtgtcgtcactgacgtcatccacgatcctggccgtggcgcgcctctcgctaaggtcgccttccgccacccgttccgctaca

SEQ ID NO: 171788 - DNA, 250 bp, Glycine max
aaagaagatggcaggaaagaaaatcccagatgtgttgctgaattcaggacacaaaatgccagttataggcatgggaacttcagtggagaatcgtccatcaaatgagacccttgcttctatctatgttgaagccattgaggtgggttaccgtcattttgacactgctgcagtgtatggaacagaggaagccataggcctagccgtggccaaagccatagacaaaggccttataaagagtagagatgaagtt

SEQ ID NO: 171789 - DNA, 249 bp, Glycine max
cttcttcccaaccactactactcactcactgcagatctcaattgcatcgctgtccatggctaccatcgttagcatcaaggcccgccagatcttcgacagtcgtggcaatccaactgtcgaggtggatttgacttgctccgatggtacttttgccagagctgctgttccaagtggtgcatccactgggatttatgaggcccttgaattgagagatggaggatctgactaccttggaaagggtgtatcaaa

SEQ ID NO: 171790 - DNA, 249 bp, Glycine max
aagaaggcctccctcaacagactcaagtccggcgccgaaagggtctccgtcaccatcgacatcttcaaccaaggaacctcgacggcctatgatgtaagcttatcagacgatagctggccaagtgatgcttttgatgtaatcagcggtagcacttcaaagtcatgggaaaggcttgatgctggtggcatcctttctcacacatttgagctggaggcaaaatcaaagggagtatttgccggtgaaccagct

SEQ ID NO: 171791 - DNA, 250 bp, Glycine max
gtgaaagtgagaaaaaataaaaatcaaagagcataatgtcagggatcattcacaagattggggagacccttcatgtgggagggcacaagaaggaggaggagcataagggtgagcaccatgctggagaatacaaaggggagcaccatggtgaacacagtagtgagtacaaaggagagcatcatggtgaacacaaagctggagagtaccatggtgagcacaagccagagcacaaagaggggttcctagacaa

SEQ ID NO: 171792 - DNA, 247 bp, Glycine max
gccaaacaccatttcattaattcttgcagaatattgcttagttttgttttatctgaatttggaaacagcttttgaatggctttttcaagagttgcactgctaatatgcacggtcgggtattttgtgattgcctctgccggcaatttccaccaagattttgatatcacatggggagatggtcgggctaagatactcaacaatggagagcttctcactctgtcacttgacaagcttctggctcgggttc

SEQ ID NO: 171793 - DNA, 260 bp, Glycine max
aaaccagtgactgacttttcgagaaagaaaaacaaaaatgagtttccgtcattccatcatgaacgctcttcccattctcctcttcttcctcttcgtttctgcattagtttctgcgaagaaaactggtgatgtgacggagctgcaaattggcgtgaagcataaaccagtatcatgtgaagttcaggcacacaaaggtgacagagtcaaagtacactataggggaaaactcactgatggaactgttttcgattctagctttg

SEQ ID NO: 171794 - DNA, 255 bp, Glycine max
acatgacttccttaagctccttagtgctgctccttgcagctctaattctattccctcaagttactgctgactatgagaaggccccggtgtacaagcctcccattgagaagccaccactttacaagcccccaattgagaaacctcctgtttataaacctccagttgagaaaccccccatttataagcccccagtagagaagccaccagtgtacaagcctccagtagagaaacccccagtttacaagcccccagttg

SEQ ID NO: 171795 - DNA, 247 bp, Glycine max
cggcattggaggtggaattggaaaaggtggaggttttggcggtggtgtcggtggtggatttggtggtggcgccggtggaggcggtggcggaggcggaggcggtggaggaggaggtgctggtggcgggtttggcggaggagcaggaggcgggtttggtgcaggaggtggatttggcggtggtggaattggacaccactagagcgttgcgaacgttgcatgcatgacaaagttatattttaacgtcctt

SEQ ID NO: 171796 - DNA, 246 bp, Glycine max
gttttcctcttctgaatccaccgccaccgcagcgtggacggaatcagagtgcagccatagcagcagcagcagcagcagcagcagcagtcattgaagtgctgctctagtttgaggcacaatgagattggagaaatgctggttttgctcttcaaccgtataccctggacatggaatccagtttgttcgtaatgatgcaaagatttttcggttttgtagatcaaaatgccacaagaactttaaaatgaa

SEQ ID NO: 171797 - DNA, 248 bp, Glycine max
catttgtcttgcaaactttctgtcgcacaaataactctaaactaagcacttccatacacaaattttctctcccagaagaaatattttcatttcatttcgagtaaaagtaaaacacagttcctgatccatggcatctcgccgccgcatgttgttgaaggtcataatcctcggagacagcggggttggtaaaacatcactgatgaatcagtatgtgaatcgtaaatttagtaatcagtataaggcaacca

SEQ ID NO: 171798 - DNA, 251 bp, Glycine max
tgttgaagagttcgttttgattgatgtagtctcttcaacaagttagtatttacctattaggtttctatttgacatcttaaatattatggttctatgttctcattattattctgctgtttctttgtgaaccgagaaatgtagtaaccagcagcctccacattgaaaaagatgggatgccattggagatgataataaaaaaaaaaaaaaaaaaaaaaaaaaaaaaaaaaaaaaaaaaaaaaaaaaaggggggg

SEQ ID NO: 171799 - DNA, 129 bp, Glycine max
tgggaagaagatggtgtcaggttctggaatctgcgcaaagcgagtggtggtggacgctcgccaccacatgttgggtcggctagcgtccatcgtggcgaaagagcttctgaatgggcagaaggttgcggt

SEQ ID NO: 171800 - DNA, 274 bp, Glycine max
  unsure (1)..(274): unsure at all n locations
cctcttttncgttcannctgntntcatagtgnngnncttctgaaganntggcnnatcatcctttgacacactctcactctttccgcganangcttgaancnnagggnaanggnatcctgcaacatcaccaagtggttgcagagtttgaagaaatccctnnggagagcagagagaaactccaagntggtgtcnttggagaagntttgagatccacacangnagccanagtgctgccancanttgtagctcttgctgttcgaccaaggccnggtgt

SEQ ID NO: 171801 - DNA, 272 bp, Glycine max
caccactaccttatccatttccactcctcaccaagccacaccatggcctcaaccaacgccctctcttcagcttccattctacgctctcccaaccgccagtctctgaccagaagagcgaaccacaacggaagagtaaattaccgtcaaccgaatagccgtttctccgtcaaagcctccgccaaagagattgcactttgaccagcattcccgctctgctatgcaggccggcattgacaagctcgccgacgccgtcgggctcactcttgggccca

SEQ ID NO: 171802 - DNA, 266 bp, Glycine max
gattgccttcaaatcacacactctcttcaatttctagggttttgctattgctttgcctccgttccccctttctcacaaaaacaacgccttttctcttctccttcgtatctattctttgcgtttggtttttggttgattgaaggcattcacagcgtaatttgttgctgcattttaatcgatttatctaaccaggactgaatgacctaatggagtctaaaggtgggaaaaagaagtctagtagtagtagtagtaaatcaattttctac

SEQ ID NO: 171803 - DNA, 269 bp, Glycine max
ggaagaacccttgctgattacaatattcagaaggagtctaccttacacttggttcttcgtttaagaggtggcatgcagattttcgtcaagactttgacgggaaagaccatcaccttggaggtggagagttcagataccatagacaatgtgaaagccaagattcaagataaggagggtatccccccagaccagcagaggcttatctttgctggtaaacagcttgaagatggacgaacccttgcagattataacatccagaaggaatctac

SEQ ID NO: 171804 - DNA, 270 bp, Glycine max
  unsure (1)..(270): unsure at all n locations
acttctgctacttcctactccaaccgcacttctgctccgcaattatcatgggcaaggtcaagatcggaatcaacggatttggaagaattggccgtttggtagccagantggctctgcagagagacgntgnngaactcgttgccgttaacgaccctttcatcaccagccgattacatgncatacatgtttaaatacgacagngntcatgggnnctggaagcancangangtcaccgntanggacgagangacctnctnntnggnganangc

SEQ ID NO: 171805 - DNA, 269 bp, Glycine max
aagcatcccaaaaccctagctcgcgttctgctttcgtcttttacatcaggatggagtctcaggtgaagcacgcacttgttgtcaaagttatgggtcgtactggatccagaggacaagtaacccaggttagagtgaaatttttggatgatcagaaccgtcacatcatgaggaatgtgaaaggacctgtgcgagaaggagacattctcaccctactcgagtctgaaagggaagcaagaagattgcgctagatggtttcttttggcttgcct

SEQ ID NO: 171806 - DNA, 259 bp, Glycine max
atgaggttgaaaggggatggtgagagtaagcaaagaggctctgcaaaaagcagccaaaaccctatccgaaatcctcgtgtgccctctctctaagcagcctttgaggtattgtgaggaatcaaattccttaatcagcgatgctattggcgttgccttccccataaaaaatgggataccatgcttggttccaagagatgggaagatacttgaggaagaagatgcctcaaaacctgataatgataccaatttatctgcagta

SEQ ID NO: 171807 - DNA, 263 bp, Glycine max
aacactcataacacaaagcacaaagcaaagctcatccttgagttaaaaaatggcagcagcttcttccatggctctctcatccccatccttggctggcaaggccgtgaagctgggcccatcagccccagaagtgggaagggtgagcatgaggaagaccgtcaccaagcaggtctcctcaggaagcccatggtacggcccagaccgagtcaagtacttgggcccattctctggcgagcccccgtcctacctaaccggtgagttcc

SEQ ID NO: 171808 - DNA, 268 bp, Glycine max
ggagtgagtcactcttcttgcataacccagatctgcagacaatatgcgaagaactggcttgttacatttgttatgccttgtcattgctttagtaagtgtgcaagcagaagatgcgtataagtattacacatggacggtgacttatggaactatttctccattgggtagtccccagcaggttattcttatcaatggtcagtttcctgggcctagacttgacttggtgactaatgagaatgtaattctcaaccttatcaacaagctggac

SEQ ID NO: 171809 - DNA, 270 bp, Glycine max
atagtttgttgtgagctataagctagtttatcgtgaggagaatatgaagttgtttgttttcattgttgctgcagtagttttggtagcatggccatgccatggcgcaggctaccaaaggttccctctccgaatgaaaactggctatggtgagcgttcttcggaggtaaaatgcgcaagttttaggcttgctgtggaagcacacaacatccgagcctttaaaaccattcctgaagagtgcgttgaaccaactcaggactacattaatggcga

SEQ ID NO: 171810 - DNA, 268 bp, Glycine max
caacatttctatttcctcttcttcatcacttgaatccaccaagtccttctcctcacacacataaaaacaaatatcctccacttcttctacccccagcagtagaacaagaggtgccggagcaagtttcgtcacgccggaacgatgaccggcggcggatccacggggaggttgccgacgtggaaggagagagagaacaacaagaggagagagagaagacgaagagcgattgcagctaagatctacactggccttcgagcccaggggaact

SEQ ID NO: 171811 - DNA, 264 bp, Glycine max
tgattcttgccacagtggtggcctacttgaagaagctaaggagcagataggagatagcacaaagggagaggaggaacaatctagctctggctttggattttcaagttttctacatcggactgtggaagatgccattgagtctcgcggattccatatcccttcagcgttgcgccacaacagaggcagggatgatgatggtgatgaagctcaaaatagggatattgaacttccggatgggggctatgtaaagaacaggtctttgcc

SEQ ID NO: 171812 - DNA, 264 bp, Glycine max
tgatgctgctcatcctccgtaacctccgagctctgcaccgaagaacgaagccatggggaagacacatggaatgggatctgctcgcaagctcaagtcccaccgcaggaggcaaaggtgggctgacaagtcatacaagaaatcacatcttggaaatgaatggaagaaaccttttgctggttcatcccatgccaagggaattgtccttgaaaagataggtattgaggctaagcagcccaactctgccattcgtaagtgtgccagggt

SEQ ID NO: 171813 - DNA, 271 bp, Glycine max
ctagaagtattattattcttccatttccattaaaaagaaaatatcataaatgggtattttcacattcgaggacgaaatcacctcccctgtggctcctgctactctttacaaagctctagttacagatgccgacaacatcatcccaaaggctcttgattacttcaagagtgttgaaaacgttgagggaaatggtggccctggaacaatcaagaagataactttcgttgaggatggagaaaccaagtttgtactgcacaagatagaagcagtt

SEQ ID NO: 171814 - DNA, 267 bp, Glycine max
  unsure (1)..(267): unsure at all n locations
cctngtcgatctcgagccgcgttcacctcctcaacctctgcagcgccttcgatccactaaacatgactaagactacaaagaaggctggcattgttggaaaatacggtacccgttatggcgccagtctgcgtaacagattaagaagatggaagttagtcaacacagcaagtttttctgtgaattttgtggaaagtatgctgtgaagaggaaagctgtgggaatatggggatgcaaggactgtggtaaagtgaaagctggcggtgctta

SEQ ID NO: 171815 - DNA, 267 bp, Glycine max
aactctctctcaccaaagccttcctagaacgaaaaaaaaaaagaagagcaattttccctcaccaaagaagaagaagcaaacaatggccgatcaacttaccgatgaacagatctccgagttcaaggaagccttcagcttgttcgacaaggacggcgatggttgcatcacaaccaaggagcttggaactgttatgcgttcattggggcaaaacccaactgaggcagagctccaggatatgatcaatgaagtggatgctgatgggaatgg

SEQ ID NO: 171816 - DNA, 263 bp, Glycine max
catatctattcttacaagttacatccattgagaaacatgaaggtctcccccttagcattttcaatcctttttttgtccttcaccatagaactcttcattggcattgcttcagcagcacaagaaccagtgcttgacacctcaggccagaagctgagaacaggtgtcaagtactacattctaccagtcttcagaggcagaggtggaggcctaacagtttcaagcagtggcaacaacacatgccccctctttgtggtgcaagagaa

SEQ ID NO: 171817 - DNA, 260 bp, Glycine max
tggtagagagagcgagagaacaagaacataagggaaccacagcggcggtaacagaagaacaagcagagaatgggtcgagtgagaacgaagacggtgaagaaatcctctcggcaggtgatagagcgtcactactcgcgcatgaccctggacttccacacgaacaagaagcttctggaggaagtggcgataatcccgtcgaagaggctaaggaacaagatcgcggggttctcgacgcacctgatgaagcgcatccagaaggg

SEQ ID NO: 171818 - DNA, 260 bp, Glycine max
cggatttgatccattgcatattgcagctagtcaaggccaccaccccattgttcaggttttgctagattatgactcaggattgagcaaaactattggtccctccaactccactccgcttataaccgcagcaacaagagggcacacggaagtggtgaatgagctgctgtcaaaggattgtagcttgttagagattgctagatccaatggcaaaaatgcgttgcatttagcagctcgtcagggtcatgtggagattgtgaaag

SEQ ID NO: 171819 - DNA, 262 bp, Glycine max
attgttgtagagagaagtaatggcgaacatagacatcgaagggatcttgaagcagcagcagccttatgatgggcgcgttccgaagacgaagatagtgtgtactttgggccctgcttctcgatccgtagaaatgaccgagaagcttctgagggcagggatgaacgttgctcgtttcaatttctctcatggcacccacgactatcaccaggaaaccctcaacaatctcaagactgccatgcacaacactggcatactctgtgcc

SEQ ID NO: 171820 - DNA, 264 bp, Glycine max
atttgaaaaattgttctctcaccgtgaaagagagagagaggttaggctatggctgatgagagcgttgttgagtccccagtgaagaggcagagagatgatggtgaagaaaatggtgtctctgtttccatggacgcggagggtggcaaagaccctcttagtaacggtttatcatctgtgattcctgggtggttctctgaaatcagtgcaatgtggcctggagaggctcactccttgaaggtggaaaatattttgtttcaaggaaat

SEQ ID NO: 171821 - DNA, 260 bp, Glycine max
aaacgtatcacgaagttattgatgagatctacaatcaagttgatcacgtggagccatggatgacggggaattgtcgtggtccttcaactgcattctgtcttctgtacaagttttttactatgaagctcaccgtcaagcaaatgcatgggctgttaaaacacctcgattctccttacataagagcggttggatttctctatctgagatattgtgctgatccaaagacactatggaattggtttgagccatatgtaaaagat

SEQ ID NO: 171822 - DNA, 222 bp, Glycine max
atttatcaactcactcatcaatctcgtttgttctcactaactattacttcatcatgtcgtcgagcacagttggtcaagtcatcaaatgcaaagctgcggtttcatgggaggcagggaagccacttgtgattgaagaagtagacgtggcaccaccacaagctggtgcagtgcgtttgaagctcctctacacctctctttgccacactgatgttcacttctggg

SEQ ID NO: 171823 - DNA, 266 bp, Glycine max
actcgagccgaatcggctcgagaaaaaaaaaaaaatccgcgattcgaccttctcttggaaaaacttaaaccagaagtacgaaacaaagagaagagcgatttagaagtgagagaagatggggttgtcgttcacgaagctgttcagcaggttttttgcgaagaaggaaatgaggattctgatggtaggcctcgatgctgctggaaagacaaccatcttgtacaagctcaagcttggagaaatcgtcaccactatccccaccatgggtt

SEQ ID NO: 171824 - DNA, 260 bp, Glycine max
tgtgtttggagcagaatcagatcgtgtgttccgtacgttcgttcgttcatttccagtgtcaaacatggcgtctcagatgagcaagaagagaaagtttgttgcggacggagtgttcttcgccgaactgaacgaggttctgacacgtgaattggcggaggacggttactccggcgtggaagttagggttacgccgatgcgcaccgagatcatcatcagagccaccagaacccaggctgttctaggtgagaagggaaggagaa

SEQ ID NO: 171825 - DNA, 263 bp, Glycine max
actcgctatcatatcacagtatatatcttcttatttgtttaatttttatgtttcttaggtgaattactcaagagggctcgacaatcccacaaagtagaaaaagaggttatgttatggcgggcaaaggtgttagttcggtggctaaggcggtagcagaatatcagtatccttggcgtgagaagttggggaaatataaggatgagcttgccaagggtgtgtggggatactgggagctgggggcatggaagccgctgagtatcagt

SEQ ID NO: 171826 - DNA, 264 bp, Glycine max
tctcgagccgaatcggctcgagtcgcatcaatggagttggacggcgctctcctcggcatgtgcaaccctctcctcgacatctactgccgtcgtcgacgacgctttcttgcaaaaatacggtatcaagttgaacgatgcgattctcgccgaggataaacacaaacctatgtatgaagaattggctaacaatcctaatgtggagtacattgctggaggtgctactcagaattcaatcagggttgctcagtggatgcttcaagcaca

SEQ ID NO: 171827 - DNA, 259 bp, Glycine max
atttttggttgggggtttccggataaatccttcctcttataaattttgcggcggaaaaagcccaaattcaattggtttaagggaggaacctttcgaacccaatgagggagataaagttgcagaagctcgtcttcaatacctccgttggcgaaattggagatcgtctcaccagagctgctaaggttttggaacagcttagtggccaaacccctgtgttttccaaagcaaggtacacggttcgttcctttgggattagaag

SEQ ID NO: 171828 - DNA, 254 bp, Glycine max
atgtcgatctagaaaatggcgaggataaaggtttacgagcttaggaacaagacgaaggcggagctgctgaaccagctgaaggatctcaaggcggagcttgccctgctccgcgtcgccaaggtcaccggcggcgcccccaacaagctctccaaaatcaaggtggtgaggctttcgatagcgcaggttttgacggttatttcccaaaagcagaaagcggcgctgagagaggcttacaagaagaagaagtatttgcc

SEQ ID NO: 171829 - DNA, 260 bp, Glycine max
cctcaatcttttgaactcgtcaagtgcgtgcaacactgtacaataatcttcatcgtccttgaaattcccaatcccctgtagtggtagtaagttgctagcaatcgagaatgggagggcacggaggtctcaacattctcccccaaaagcgatggaacgtttacaatttcgacaacagagagaaggtccgtcgcgacgaagagcaagccgccagggaggagcagctcaagcgtgaagagacccggaagcgcgacgccgagctc

SEQ ID NO: 171830 - DNA, 256 bp, Glycine max
aagttaatagcattccgcaaaatggctgccaccaccttagtctctgaagtcactctcccctcctcctccggccagcggaagatgccgctgatgggcctcggcaccgcgccggaagcaaccagcgcggttaccacaaaagatgctgttcttgaggccatcaagcagggctacaggcactttgatgctgcttctgcttatggtgtggaacagtctgtgggagaagccatagctgaagcacttaagcaaggactaattg

SEQ ID NO: 171831 - DNA, 257 bp, Glycine max
caagcatatctcatttgaatacattccttgtagtttatactgaaagatgggtttgaagatggcgttactgatcctaggcctttccctcatgctccttttggtctcctctgaggtggcatccacgaatacaaaagaggaggcaaatggagtggatgatgccaaatatcccggtggaagctatggagggggttacccaggtcatggcggtggcggttatcctggccatggcggtggcggttatcctggccatggcggtg

SEQ ID NO: 171832 - DNA, 256 bp, Glycine max
aaaaatgaaaacccaaagtgcttctctcctctgtctttttctctctcttgctatccttttggctagttgcactgctgcaagtgcaactccaagaagcgcagtgccaagccaccatgtttcaacattcaacagaagcctttttccttccacttttctctttggaattggttcttctgcttaccaggcagaaggagcagcaagtgtagatgggagaggaccaagcatatgggacacctacactagacagcatactgaa

SEQ ID NO: 171833 - DNA, 255 bp, Glycine max
cgcacgcaggaggaggagattgatcgagagaagagaagatgactacacgcttcaagaagaacaggaagaagagaggccacgtgagtgccggccatggccgcatcgggaagcaccggaagcaccctggaggacgcggtaatgccggaggatgcaccaccaccggatcctctttgacaagtaccaccctgggttcttcggcaaggtcggaatgcgctattttcacaagctccgcaacaaattctactctccgatcct

SEQ ID NO: 171834 - DNA, 254 bp, Glycine max
ataaaacatcaaaagagacatggctgagcaaaccttcatcatgatcaagcctgatggcgtccaaagatgccttattggcgagatcattagcagatttgagaagaaaggtttctacttgaaaggtttgaaacttgttactgtggaccgtccttttgctgagaagcactatgctgatttgtctgccaagcctttctttagtggtttggtggattacattatctctggccctgttgttgccatgatctgggagggca

SEQ ID NO: 171835 - DNA, 216 bp, Glycine max
ccctaacttgaagttcaacgtctattacttcgatccgaacatcgtcgctcacttgatctcctcctccgtgcggcaggcgttggagcagcctctcaattacgcgagaaattacctcgttgaccttctggagagttgcgtggagagggtgatctacttggactccgatctggtggtagtggatgacgtggcgaaactgtggagcgcgagtctggactc

SEQ ID NO: 171836 - DNA, 254 bp, Glycine max
gtttctcttcagatcaaacgcacacagttacgctcttcaaatcaatctcttctcagaaatgggtgtggctcaaaacattcccgatgcggaggagggaaccttggagattggaatggaatacagaactgtgtctggagttgctgggccattggtcattcttgataaagttaagggacctaagtttcaagagattgttaatattcgcttgggcagatggactactcggcgtggacaagtgctagaagttgatggtg

SEQ ID NO: 171837 - DNA, 236 bp, Glycine max
ggcaacattagcaccacccgtaaaagggaagatgctcaagggactatgtgtttgttatcttgttcttatagttaccttctttagtgtatctgtatccggttattgggcatttggtaatgaatcagaaggcctcatcttaagcaacttcgtggacaatgggaagctctggtgcccaagtggttcatttacatgaccaacattttcactataacacaattatctgcgagttgtgtggt

SEQ ID NO: 171838 - DNA, 246 bp, Glycine max
ctaagatacaacatagttggaaaacaaactatcaagcaattcagttggaaataatataaataaaacttcaccacgttgtggctatgtaaactcaactcagcatacagtctgagcagaaaacattacatttattaggaaaatcctgattggttcaaatacagtaatctaaattctagactgtttggcaagcttgaaccactcagtatggtaagacccctctatgtcaaccattcatatgtatgagca

SEQ ID NO: 171839 - DNA, 288 bp, Glycine max
aagaaacacccaaaatggcatcctcagcctcgaccacgctgtcttctcccttcctgcgactagaattcccctcctcaaccaaacaacgctcttcaatctccatcagagcctcggtctccgagaaacccccgctaccggctgtgtcggtgacctccccggagcccagcaagcttccgatccgcaaaatccccggcgactgcgggttcccggtgatcggtcccttcaaggaccgccaagactatttctacaagcaagggcgcgacgagttcttcaagtcccgcatccaaa

SEQ ID NO: 171840 - DNA, 277 bp, Glycine max
gttaggttctgcacgctctgcttccagcgagtgttctttcttcgtttcaacaccttaatttgcacacgctgcttcttcagcttgagaaatggcacaagaaacctttctattcacatctgaatctgtaaacgagggtcaccccgacaagctgtgcgaccagatctctgatgcagtgctcgatgcgtgccttgaacaggaccctgacagcaaggttgcctgtgagacatgcaccaagaccaacatggtcatggtctttggagagatcacaaccaaggcc

SEQ ID NO: 171841 - DNA, 275 bp, Glycine max
ccaatggggagaagcacaagatcagctgtgcaatggatcacatcatagatgctcagatgaagggagaaatcagcgaagagaatgtgatctacatagtagaaaacatcaacgttgcagcaattgagacaacactatggtccatagagtgggcagtagcagagttggtgaaccatccaaccgtccaaagcaagattcgtgatgagatatcaaaagtgctaaaaggggagccagttacagaatccaacctacacgagctaccatacttacaagccacg

SEQ ID NO: 171842 - DNA, 275 bp, Glycine max
gtctctctctcactcgcgccctcccactccttccaaaacctagcctccttcaaatccaccatctccgccaaccccctccacgcccttctctccctcggcccctaccgccctcgtgactccttcaatgtcgccgccctctgccgtgccgcaatagcttggttccgcaacaacctatggctcgtcgaaaatgagcatccgtagaactgatgcaatggatgtattggatgcttgcagtctggtaaaaatcgaagaccagggagagatgacattgattt

SEQ ID NO: 171843 - DNA, 279 bp, Glycine max
gaagaggttaaagagacggcaacactttgctgtccgccttgaccgagcagagcttcgtcttggccctcgattttgccctaaagtactctcagtcacaacagacaccgtcgtcgtcgtcgtcgtcatcaatggcaccgaagcagaccaaggctgagaagaagatcgcttacgatgcgaagctgtgcgacctaatggaggagtacggccagatcctcgttgtgaactccgataacgtgggatcgaaccagctccagaacattcgcaagggtctccgtggcg

SEQ ID NO: 171844 - DNA, 299 bp, Glycine max
ttctcctcgagtggcacgtgagcttagaccctagccgctcttctcttcattcttcactttggaaacaatcataatggcgttctgtaataaggttggaaatgtcttgaggcagggtgctgctcgcagcacacatgcccctgttgcgtccatgcttaattacatccgctgcatgtcttcaagcaagcttttcattggaggcctttcatatggagttgatgaccagtctcttaaggatgcattttctggctttggagatgtggttgatgcaaaagttataactgatagagacagtggaagat

SEQ ID NO: 171845 - DNA, 283 bp, Glycine max
aaggaattgtctcatgctgatgaccaggggagaatgtcttacccttctgctgaagaagctttgaagcatcttttgtggttagctgactctgatgctgtatatgaagctgctttgggtctttatgatttaaatcttgcagctattgtggcattgaatgctcagaaagatccaaaagagtttcttcctttcttacaggaattggagcgtatgccaactctattaatgcaatataatattgaccttaggctgaaaaggtttgaaaaggctctcagacacattgctt

SEQ ID NO: 171846 - DNA, 281 bp, Glycine max
aaaaaccctctctttctctctcttccaaaacctaattttcattttttctcttcaaacaaattttcaaaatgcgtgagatccttcacatccagggtggccaatgcggcaaccagatcggcgccaagttctgggaggtggtttgcgcggagcacgggatcgaccccactggaaggtacggtggggactcagagcttcagctcgagaggatcaatgtctactacaacgaagccagctgcggccggttcgtgccgcgcgcggttctaatggacctcgaaccgggc

SEQ ID NO: 171847 - DNA, 276 bp, Glycine max
ctatcttctccgccacttctgaatctattgaatcaacaatcatgtcggacgaagagcaccatttcgagtccaaggccgacgccggagcctccaaaacctaccctcagcaagccggtaccatccgcaagaacggctacatcgtcatcaaaggccgcccctgcaaggttgtggaagtttcgacttccaaaactggaaagcacggtcacgctaagtgtcactttgttggaattgatattttcactgccaagaaacttgaggatattgtgccctcttctc

SEQ ID NO: 171848 - DNA, 262 bp, Glycine max
gaattaagagttgagaattcacgtgccccagttggttgatctaccttgcagcttgagatagtaaagttgcaaactttgaagcaattagtgtagaagatgagtacgttggatgcaacaagggctgaacttggtcttcttgttttatatttgggcaaggctgaagcaagggacaaaatatgcagggcaatacaatatggttccaaatttttgagtaacggggaacctggtactgctcagaatgtcgacaaaacaaccagcttgg

SEQ ID NO: 171849 - DNA, 275 bp, Glycine max
caaatcttctgttctgcttgacgttaagccttgggatgatgaaacagacatgaagaagctggaagaggctgttcgcagtgttgagatgcctggtctattgtggggagcatccaaactggttcctgttggttatgggatcaagaagttgcagatcatgttaactattgtcgatgaccttgtatctgtggacacccttgttgaggagactctcacagttgagcccatcaatgagtatgtccaaagctgtgacattgttgcattcaacaaaatctaag

SEQ ID NO: 171850 - DNA, 243 bp, Glycine max
aaaaacgaagatgttttgagccatggttatgaggatgtgaatgatgttctcaggacaaatgaagaactggttgtgaagagtggcacaaaattgttgcagggacatcttgaatactcgagacttgtggatgcaaatattcaggatcctgataatggtcccataaattcagtccagttccatcctaatgcacagttgtttcttgaagccggattggaccggaagcttagattctttcaaattgat

SEQ ID NO: 171851 - DNA, 273 bp, Glycine max
gaaaaatggggtgtttccatctcacagtgactagtctgtgctttgtagtggttgtggttggagtgcttccactctccttagatgcacaactagatccctcgttttacagagacacgtgtcccaaggttcactccattgttcgcgaagtggtgaggaacgtttccaagaaagatccccgcatgcttgccagtctcattagacttcactttcatgactgttttgttcaaggatgtgacgcatcagttttgttgaacaacactgccaccatagaga

SEQ ID NO: 171852 - DNA, 269 bp, Glycine max
gtagtgcatcatgatctacgaataaaggtgccgatgataaaacgtaaggctatcagatagcccgtattgatcaaggggaatcgggcagtactcgaggtctcaaatgtaccacaagagcgggcagttcggctatctaggccacaaacggctgcgttttcactcgccacggcgctaaatcccagcctgaaactcccgctgagaagtcaccccctttttaccctgctgtcgatggcacgaaactccttgtcaactagcataaattctaaccc

SEQ ID NO: 171853 - DNA, 273 bp, Glycine max
gtggatacctaggcacccagagacgaggaagggcgtagtaagcgacgaaatgcttcggggagttgaaaataagcgtagatccggggattcccgatataggtcaacctttcgaactgctgctgaatccacgggcaggcaagagacaacctggtgaactgaaacatcttagtagccagaggaaaagaaagcaaaagcgattcccgtagtagcggcgagcgaaatgggagcagcctaaaccgtgaaaacggggttgtgggagagctatacaagtgt

SEQ ID NO: 171854 - DNA, 256 bp, Glycine max
gcagacttaacaacagcacaaagcgggttactgtctgttcaagctaccatctctctctctctttcttagtgcctccttgccagaagttaaaatggcccaagaaactttcctattcacatctgaatcagtgaacgaggggcaccctgacaagctctgtgaccagatctccgatgctgtgctcgatgcatgcttggagcaggaccctgacagcaaggttgcctgtgaaacctgcaccaagaccaacatggtgatggtt

SEQ ID NO: 171855 - DNA, 280 bp, Glycine max
  unsure (1)..(280): unsure at all n locations
ggcgcgtccttgtcacgcgccgccacggtcttctctccttccatttctcggaagcgctggaggtagcctttgagaggctccacgtagtcctcgaagcccagagtggtcatcgcccagagcaggtcgtcgccgttgatcgtcttgcgcttctcgcgctggcacttgtcggaggcctcgccggtgatgaagctgatgaactctgacacgcactcctgcaccgtctccttcgcgtcttcgagatcttngcgttcncnggaagcgcnttctnnaggaggggccc

SEQ ID NO: 171856 - DNA, 280 bp, Glycine max
tgggtactaaccctaacccgcttcgaaccgtggcttcctcaggctcgcagaacctctctcgaagaaaaccttcttcttcttcgtcttcgtcttctcaacaaacacccgggtcgacccggatcgtttaccgagaatctcggatcccatcggaatccgatttcccgatctggcagcagaactggttcatcgcattgctcttcgtcatggctctcggattcttcgccctcgccattttcctcttcctcactctcgactctgacatcgctccttcttccaccgc

SEQ ID NO: 171857 - DNA, 274 bp, Glycine max
ggactgtagcatatacaaaccatactgttcttccggaggcattagagaaatggagcttggatcttatgcaaaaactgcttccacgccatattgagattatagaaatgattgatgaggagctgattcggaccataattgcagaatatggcacagagaattcagacttgctggagaaaaaattgaaggaaatgagaatactagaaaatgttgaattgcctgcagaatttgcagatatagtggttaagtccaaagaggccattgatattcctagtga

SEQ ID NO: 171858 - DNA, 272 bp, Glycine max
agctgctgttcttgcgcgtgaacaagcctcaggtaagccaaaaccatggttaagcataacaatgttatcccaaacggacacttccgtaagcactggcagaactatgtgaagacttggttcaatcagccagcacggaagacaaggagacgattggctcgtcagaagaaagctgtgaagatattccccagacctacggctggacctctcaggcccattgtacatggtcaaactttgaaatacaacatgaaagtgagaggtggaaggggattttc

SEQ ID NO: 171859 - DNA, 270 bp, Glycine max
tcgcattcaacctttctcttcctcctcactcaaacttcccctctctacgccgttcctcccaaatggatgcaccaatggagttttggggtgttgaggttaaggttggtcagaccgtgacagttgacccaatggatcctgtggattcatacatacacatatctcaggttgcgctcggagaggcgaaaaaggagaaacctaatgagtctgtggttttgtatttgaaagttggtgaacagaagattgtcttgggaaccctttctagggatggca

SEQ ID NO: 171860 - DNA, 270 bp, Glycine max
ctcgagccgctcgagccgattcggctcgagctcgagcagcatttactcatccaaagcactattataaagaaatcaatcagcgctataaaaacttgaaacttataatacctaatgacactgggtcagcaatggtacacggatttgctggttattttgatgcaactctttacaaggatgtgcatcttggaattgaaccttcaactgcaacaccaaacatgttcagttggtttgcaatatttttcccattaaggacacccatttgtgtggatc

SEQ ID NO: 171861 - DNA, 271 bp, Glycine max
cagatccaagcttgggagacagagaaagagaaagagaatggacgccattgattctgtgttcgatccgctgagagaattcgcaaaggacagcgtgaggctcgtgaagcgctgccacaaacccgatcgcaaagaattctccaaggttgccgtccgtactgcaattggtttcgtcgtgatgggattcgtcggtttcttcgtgaagatcattttcattccaattaacaacatcatcgtcggatctggttaggatgaagggaactacaattgcctc

SEQ ID NO: 171862 - DNA, 269 bp, Glycine max
caattacaaattacactctttgcctcgcaccttcaacttaaccttttctactcataatcttaacaacttgctagaagaagataaagaaagagaaaaagtgtgtgtgtgtgagagagagcaatggctggctcgtgggcacgccgttctctgattgttctggctatcatttccttcggatgtttatttgcaatttccattgctaaggaggaagccacaaaattggggacggtcatcgggattgatcttggaacgacctattcatgtgttgg

SEQ ID NO: 171863 - DNA, 269 bp, Glycine max
ctctctctctttctctttctctctcatccagatcttgcaaaaaaaaaaaaacacaatggcagcgagcgctccaactccacgcgaagatttcgtgtaaatggcgaatctggcggaaaggccgagcgctacgaggaaatggtggagttcatggaaaaggtctccgcctccgccgagagcgaggagctgaccgtggaggagcgaaacctcctctcggtcgcctacaagaacgtaatcggtgctcgcagggcttcctggcgcatcatctcctc

SEQ ID NO: 171864 - DNA, 281 bp, Glycine max
attcattcatcttcgttctaagagccatgtctagcaccgttggccagaccatcaagtgcaaagctgcgattgcatgggaggctgggaagccgctggtgattgaagaagtggaggttgcgccaccgcaagccggtgaagtccgtttgaagatcctctacacctctctttgccacactgatgtttacttctgggatgcgaagggccagactccattgtttcctcgcatttttggccatgaagcttcggggattgtggagagcgtaggcgagggtgtgactcat

SEQ ID NO: 171865 - DNA, 277 bp, Glycine max
  unsure (1)..(277): unsure at all n locations
cgtcgctccgcaccagtttcaccgcacgaatatcttgttgtntggagcgatccgagaaaaactctgtaaacatgttggtttaccaggacctccttacaggtgatgagcttctctctgactccttccgttacaaggaaattgagaatggaatgctgtgggaagttgaggggaagtgggttgttaaaggagcagttgatgtagacattggtgcaaacccttctgctgagggtggaggagaagatgagggagttgatgatgcagctgttaaggttgttga

SEQ ID NO: 171866 - DNA, 274 bp, Glycine max
ctgacactcagcacttgttcttgaatgaactgacaaaatataatcttggagaagactgccctgtatttgacaacttatttgaattttgtcagatttatgctggtggaactatagatgctgcacgtcgattaaacaatcaactgtgtgatattgctatcaactgggccggtggactacatcatgccaagaaatgcgaggcatctggattttgttacatcaatgacttggttttaggaatcttggagcttcttaaatatcatgctcgtgttttgta

SEQ ID NO: 171867 - DNA, 266 bp, Glycine max
tgttcttcttctttgtcttccatttccaattctctgtgtagaagccatgtctaagggtcctggtctctactctgacattggcaagaaagccagagatctcctgttcaaggactaccacagtgaccagaagtttaccatcactacctactcacccactggagttgctataacatcctcggggaccaagaaaggtgacctttttgtggcggatgttaacacccagttgaagaacaagaacatcaccactgatatcaaagtggacaccg

SEQ ID NO: 171868 - DNA, 269 bp, Glycine max
gaagatggagatgtatcagatctggagcaggagaatagcgttgggagcgttcgcgtttgttctgcttttcctatcggcctcagcagacgacgtcgttgtgctctctgaagataacttcgagaaggaagttggtcaggacagaggagctctcgttgagttctatgctccttggtgtggacactgcaaaaagcttgctccagaatatgaaaagcttggtagcagcttcaagaaagccaaatctgttttaatcggcaggttgactgtgatga

SEQ ID NO: 171869 - DNA, 275 bp, Glycine max
ggagcctactgccaccccacaatgtaccaaagaccctcttttgggaattactcgaatgctgcattgcagtatcctgtgatgccctcatgcaaagctactatggatttgtctgctgctgcaacaactgcctcccccgtctttgttgctgctccagcagagaaaggccattttcttatagactttctcatgggaggtgtttcagcagctgtctcaaaaactgctgctgctcccattgaacgtgttaagcttttgatccagaaccaggatgagatgat

SEQ ID NO: 171870 - DNA, 222 bp, Glycine max
ctacaccaaattcaagatcgatgtaatctctggtgtaggagggaatttacatcggtcttgcatttggtgatgcttatggctatcaggtttatgttccaagactggatgatcctggttcaggtacattcgacatgtgctctacggatacatttgagatatacggtccatgtacgtaccagacatgttatctgtatctataccggaatggatacgacggttgga

SEQ ID NO: 171871 - DNA, 296 bp, Glycine max
tcctcaattcggctcgagcttgttgagagaaatagaaaatgtggaggcgtgcaacccttttccatcgcgtcctggaacctcctatacacatcaacgcttcgctttcccaaacatttaccactggattccccttccacttccaggaaaaggatggcatttgccccaaaccgcttataacttttgttttaggaggccctggtagtggaaaaggtacacagtgtggaaaaattgttgaaacctttggatttaagcatctgagtgctggagatcttttgagaagggagatggtttctgat

SEQ ID NO: 171872 - DNA, 276 bp, Glycine max
ggaagttacagaaatatcagaaaaacaggaaaccaaaagtcgccctgttggtctaaacacagtgaatcttctgaaggttgcttcaagtgctcttggatttgggcctcagatggctatgcaactagctgaacggttgtatactcaaggttttatcagctatccacgcacggaaagcacagcataccctccttcatttgactttcgtggtgtactctctgcacaaacaaataatccaacttggggtaattatgtacaagggctacttaccaatggtta

SEQ ID NO: 171873 - DNA, 273 bp, Glycine max
  unsure (1)..(273): unsure at all n locations
atgaatttgctgatggagagaatgttggatcactggattgtgggcatgagttccatagtggctgcatcaagcagtggctaatgcagaagaacctctgccctatttgcaaaacaaccgccttagctacttgatagggagaacctctatcctcttaagctggttctacctatagcttcttttattttttaaactttatgaacttctttgaactggacctctcatttgtcatgattggggacgataacatgtcccctaaanagaagtnaacnangg

SEQ ID NO: 171874 - DNA, 271 bp, Glycine max
tgcgtgtccaactttgaacgcactttgatactgccactttctccaccacaaagagaaaaaagagagaagaaaagcgaatcccctgtgatctctcacacaattccaattcctctggatctcgtctcgatcgatagatctcgaacatgagcactggggagcttctcaacatcgaacctctcgaactcaagttcccctttgagctgaagaagcagatctcatgttctcttcaattgtccaataagaccgatagctatgtagccttcaaggtgaa

SEQ ID NO: 171875 - DNA, 265 bp, Glycine max
ctcgttcttactttgacggtttctagagagagaaagtgatggccggagttaatccaaacggcgtcgccgattttgcggcggttccgacgcatggcggacagttcattcagtacaacatatttggaaacctcttcgaggttacgacgaagtaccgtcctccgatcatgcctatcggacgcggcgcgtacggaatcgtttgctcactgttgaataccgagacgaacgagctggtggctgtgaagaagatagcgaacgctttcgacaa

SEQ ID NO: 171876 - DNA, 265 bp, Glycine max
gcggcagagcgaagagaaggggcaaaagagaaagaagcgcttatcgaactcggacggaagcactgagttgactcggagggagtggaaagtgttgttgcgtaatgtctggtggtatcgctcgtggacgcctcaccgaggagcgcaagtcgtggcggaagaaccatccccatggttttgttgcgaaccggagacgctgcccgatggaaccgtgaatttgatggtgtggcattgcactattcccgggaagactgggactgattgggag

SEQ ID NO: 171877 - DNA, 265 bp, Glycine max
atccgcatccgctagctcgcgcaggcaccagcaggtgaggttattgtgatttgaatggagggaagtggaggtggcggtgcttcaccgtctgcaccgttgaagcaatacttacaggaattctcgaagctgtttcagtactatctggataaatccactccccatcccccctacaggtggattgggactttcgtcattgcatccatctacgttttgcgtgttgtttatgtgcaggggttttacattgtctcttatggcctcggaatct

SEQ ID NO: 171878 - DNA, 211 bp, Glycine max
gtggtgccttatcgctgtggttatcatcttcttcttcctctttcttagatctcttctttctctacgccgcacgccgaaaccatggccggaaaaggagagggtcctgctatcggaatcgatctcggaaccacctactcttgcgtcggtgtgtggcaacatgaccgcgttgaaatcatcgccaacgaccaggggaacataaccacgccgtctt

SEQ ID NO: 171879 - DNA, 246 bp, Glycine max
aatggcttggttgatgtttacaggaaaactatcaagtctgatggtattgctggcctttatcgtggtttcaacatctcatgtgttggaatcatagtgtaccgtggtctttactttggaatgtatgattctctgaaaccagtggtcttggttggtggattgcaggatagtttctttgctagttttcttttgggatgggggatcacaataggtgccggcttggcctcttaccccattgatactgtgcgt

SEQ ID NO: 171880 - DNA, 292 bp, Glycine max
cttctcaggctcgacatggaatccacagtctgtgacattcccccaaccggcttgaagatggcttcaacattcattggcaactctacctccattcaggagatgttccgtagagtgagtgagcaattcactgctatgttcaggaggaaggccttcttgcattggtataccggggaaggcatggacgagatggagttcactgaggctgagagcaacatgaacgatcttgtgtcagagtatcaacagtaccaggatgccactgctgatgaggatgagtatgaggaggaagaggagg

SEQ ID NO: 171881 - DNA, 271 bp, Glycine max
gctgtttggacggtcacacgcagttgtattgtagaactgaacaagggtttctctttctctttctctgtctgcttcttcactttctctcgtttcaatcgaaaaaaatcatgggcagaaaattcttcgtcggtggcaactggaaatgcaatgggaccactgaggaggtgaagaagattgttactactttaaatgaagctaaagtccctggagaagatgttgtagaagttgttgtgagccctccttttgtgttccttccttttgtaaaaagttt

SEQ ID NO: 171882 - DNA, 274 bp, Glycine max
tgtgtctctccgcagcagccacacttcttcgccgtttcagctgaagagccatccgcaggtaagcaatggttaagcataataatgttatccccaatgggcacttccggaaacactggcaaaactatgtgaagacttggtttaatcaaccagcccgaaagaccagaagacggttggctcggcagaagaaggctgtcaagattttccccaggcctactgctggatctctcaggcctattgttcatggccagactctgaaatacaacatgaaagtcag

SEQ ID NO: 171883 - DNA, 270 bp, Glycine max
gcagcggcaacagaggagagaagatgaagttcaatccacgagtgtcgagcagccgccgcaagagccgaaaggctcacttcacggcgccgtcgagcgtgcggagggtgctgatgagcgcccctctgtcggcggagctccggtcgaagtacaacgtgcggtcgatcccagtccgcaaggaggacgaggtgcaggtggtgcgcggaacatacaagggtcgcgaggggaaggtgacgcaggtgtaccgtcgcaagtgggtcatccacatcgagc

SEQ ID NO: 171884 - DNA, 264 bp, Glycine max
gagactttcaatgtgcctgccatgtatgttgcaattcaggctgtcttgtctctgtatgccagtggaagaactacaggtattgtgcttgattctggtgatggtgtgagccacacagttcccatatatgaagggtatgctcttcctcatgcaattcttcggttggaccttgctggccgtgatttaacggagtacttggtgaaaatccttactgagagaggatactccttcagcacctctgctgaaaaggaaattgtccgtgatgtg

SEQ ID NO: 171885 - DNA, 267 bp, Glycine max
gttgctccttcgccacaactctctgccaacatgggtatctccagagattctatgcacaagaggcgtgccactggtggcaagaagaaggcctggaggaaaaagagaaagtatgagcttggtcgccagcctgctaacactaagctgtcaagcaacaagacagtcaggaggatccgtgttagaggtggaaatgtgaaatggagggcattgagattggatactggaaattactcctggggaagtgaagctgtaactcgcaagactcgtgta

SEQ ID NO: 171886 - DNA, 259 bp, Glycine max
gttcttaggatcagcaaaatgctttcatgtgctggagctgataggcttcagactggaatgagaggtgcatttggtaagccacagggatcatgtgctagagtcgccattggtcaagttcttctttctgtccgctgcaaggacagcagcagtcatcatgcacaggaggctcttcgtcgtgctaagtttaagttccctggtcgtcagtagatcatagttagccggaaatggggtttcaccaagtttagccgtgctgattatc

SEQ ID NO: 171887 - DNA, 272 bp, Glycine max
cctaaacaggttggtaaccggaagctgctggaggaaaatggcataaatatttctacagaagtcgaaaattttgtagtagagcttgaagaaagtgcaaagacagggatactagttgcatatgatgatatattaattggagtcttagggattgcagacccactaaagagagaagctgctgttgttatagagggcctacagaaaatgggagtcatacctgtgatggttacaggagataactggagaacagctcgagctgtagccaaagaggttgg

SEQ ID NO: 171888 - DNA, 270 bp, Glycine max
ttcacatttagcaacttcacagaagctcaagctgagtgtctagttcagagggcacctgtgaggggatttcatgtggagagaaagccttcatcacttgttctatgctggcaaaggaaagaactcatctcagtttctacttggagatgctgaggagcagcagcagaagctaattaccttatatttttaaaggtgcatggtaacttacattgcagtttatgtaattgtttgtgtaatttttaggcttattgatgagatccacacccaaatgtt

SEQ ID NO: 171889 - DNA, 267 bp, Glycine max
ggatagcacaaagaaaagtaaacactgccacagcaagagtgttcaaatgggagagggaaaaggaagaatttgtgtcactggaggcacaggattccttggttcatggataatcaagagcctccttgaacatggatatgctgttaataccactataagatctgacccaggacgcaagagagatgttagcttcctcacaaacctacctggtgcatcagaaaagcttaaaattttcaacgctgatctcagcgacccagagagttttggtcc

SEQ ID NO: 171890 - DNA, 265 bp, Glycine max
ctctttcttctcataactctgccgccgcaacagccccaaatccaatggcttcagagaagaaactttcgaacccaatgagggagataaaggtgcagaagctcgtcctcaatatctccgttggcgagagtggagatcgtctcaccagagccgctaaggttttggaacagcttagtggccaaacccctgtgttttccaaagcaaggtacacggttcgttccttttgggattagaagaaatgagaagattgcatgctatgtcactgtca

SEQ ID NO: 171891 - DNA, 263 bp, Glycine max
ggaaggagccgtagcagcagcggaagctctagcttgggcagcgaatcacaatggcgagaggattgaagaagcatttgaagaggcttaatgccccaaagcattggatgcttgacaaactgggtggtgcatttgctcctaagccctcatctggaccacacaaatccagggaatgcctgccactcatactcattttgcgaaaccggctgaagtatgctctgacataccgtgaagtcattgctattctgatgcagcgacatgtcctt

SEQ ID NO: 171892 - DNA, 266 bp, Glycine max
ctacaacaagaattcatctattcatttcagcccatcagcatggcgaaggagaagaaaaacttgtccaacaagaacaagaagccaagcaatgcagacgaggttcacttccgcggagtccggaagcgcccctggggccgctatgccgccgagatccgcgaccctggaaagaagacccgcgtctggctcggcaccttcgacaccgccgaggatgccgcccgcgcctacgacgtcgccgcccgaaacttccgtggccccaaagccaaaac

SEQ ID NO: 171893 - DNA, 264 bp, Glycine max
  unsure (1)..(264): unsure at all n locations
catgctcctctcattcanttttcttcttggatgggtggagatcgtgatggnaatccaagagtaaactacctgaagtgaccagagatgtttgcttattggctagantgatggctgctaacttgtactactcccanatagaggatcttntgtttgagctgtcaatgtggcgctgcaatgccganctacgtgtccgtgcagatgaacttaacaggtcttccaagaaaaattcagtcgcaaaacactacatagattttggaaagccat

SEQ ID NO: 171894 - DNA, 264 bp, Glycine max
ctttcgttcacttccgtttccctctcactcacacacttctccccaaaacccaaaaccctaactctctttcgcgctcgttctctcgctcgctgcaaccatgaattgctccatctaccggcgaagttccggaagatacccgtcgtgacccggaactaccggtctacctcttcgagaagcgtttgattgagcgacacatctcggattatgggaagtgtccaattactggagaaccacttactatggatgacattgtaccaatcaaga

SEQ ID NO: 171895 - DNA, 261 bp, Glycine max
gtctcttcctcctctctccgcatagctgcgttttccgaatcgaaaggtgacgttagtaagtaacaatggtggagaaggccaagggtaggaaggaggaggttgtcactcgagagtacaccatcaacctccacaaacgcttgcatggctgcacatttaagaagaaggctcctaaagcaattaaggagataaggaagtttgctcagaaagcgatggggacgaatgatgtaagagtggatgtgaagctcaacaaggctgtgtgga

SEQ ID NO: 171896 - DNA, 263 bp, Glycine max
gtaccttcaaaatttgaagaaatttttaacaagcatgcacatacacatccaaatgctttgacatatgatgagttaacggagatgataaaggcaaatagagagcctaaagatttctcaggaaggattggtagtgtggttgaatggaaaattctttacaaacttgctaaagataagagtggattactgcagaaagaaacaatccgaggtgtttacgatggaagtttatttgaacaactgaaaaaacaacactcttcaggcaaaga

SEQ ID NO: 171897 - DNA, 227 bp, Glycine max
cgcattttccctcttctttctctctcacgttttccgcttcagttttctcgggaaaatcatggtgaaaggtccaggcctctactctgacattggcaagagagctcgcgatcttctgttcaaggattatcagaatgaccacaagttcaccatcaccacttacacttccaccggagtggaaatcacttcaactggagtcaggaaaggtgagatatatttggcggatgtca

SEQ ID NO: 171898 - DNA, 264 bp, Glycine max
atagcccaagccctatacaaccaaaccctaacacacacccatttgattcagtttccatggctagcctcaaggttgcatttttggctgcagtgctctgcatggttgtggtgagtgcacccatggcacatgcagctatcacgtgcgggcaggtgacgagtagcctggccaattgcatcggttacctccagaagggaggaacgccgtcgtcgggatgctgcaacggagtgaagagcctcaatgccgccgccaagaccaccgccgacc

SEQ ID NO: 171899 - DNA, 292 bp, Glycine max
tcacctccgaattctcgctcgtacgaatatcaaattggtctcttgtcttcctcctcatctctacactactccacatagagcccagcctctcaagcccaagcccaagcccaagcccaagcccgttcataaaatcctcctgcagcagcacccagtacccagccctctgcgtctcatccctctccgtctacgcctccagcatccaacaggaccctcaccaactggttcagacagcactctccctctccctgaaccgcacccaagccaccaaaaccttcgtggctaactgcaacaa

SEQ ID NO: 171900 - DNA, 263 bp, Glycine max
caaatctgaatcatgtcgtggcaagcgtatgtcgacgatcaccttctgtgtgacatcgaaggtaaccacctcactcacgctgctatcatcggccaagacggcagcgtttgggctcagagtaccgacttccctcagttcaaacctgaggagataactgccatcatgaatgactttaatgagcctggatcacttgctccaactggattgtatctcggtggcaccaaatatatggtcatccagggtgaacccggtgctgtcattcg

SEQ ID NO: 171901 - DNA, 256 bp, Glycine max
ctcacactctccaaaccctagcggcactacatactagttctatcgctatctcaccaagatgtcgcacgtcgatcccgagcgcagagacgtggaggatgcacccgccgttggctacgacaacgacaccgtagctcacgtcgctgtagtcgtcagatacgccgaggttgctgtcaccactgacgaggaggacgaagatgcaatcctggatatcaaatcggagctttaccggtctcgataaggacgggaaccagtagca

SEQ ID NO: 171902 - DNA, 261 bp, Glycine max
gctaatgtgttcttcacctctccaaaacttgtagctgaggatattattactcagcaaaaattcatggaagttccaatcaagtatccggcaaaactcacccttagggtggttcttacttgtatcatggcggccaccggtgggttgatttttggctatgaccatggtgtttcaggtggagtgacctccatggattccttcctgaagaagttcttcccatctgtatatgaaaaggagtctaacgtgaagccttcttcaaaccag

SEQ ID NO: 171903 - DNA, 201 bp, Glycine max
ctctcttctccaccacttcttaatctcttcaatcaacaatcatgtcggacgatgagcaccatttcgagtccaaggccgacgccggagcctccaaaacctacactcaacatgctggtaccatccgctctatcgggtacatcgtcatcaaaggtggcccctgcagagttatggtcgtttcgactcccaaaactggaacgcacg

SEQ ID NO: 171904 - DNA, 259 bp, Glycine max
gggaagaagaacttagctacaagctaaggaaggatcaaagagaatggctcaagcaatggcatcaatgactagcttacgtggttcctctcaggctgtgttggaaggtagccttggctccacacgcttgaatgtggggagtggaagcagggtggcctcagtcacacgtgcagggttcacagttagagcacagcaacaacaagtgaatggtggtgaggtacaaagtagccgtagggcagtgctttcacttgttgctgctggt

SEQ ID NO: 171905 - DNA, 265 bp, Glycine max
ggaacaatggcgggtagggtttcgacgtgcttcttcttcgtgtttgctctttctctccttcttccttttcagatctccgctgaggaatcatcggagaaagagttcgtactcacattggatcactctaactttcacgacactgtcagcaagcacgatttcatcgtcgtcgagttctacgctccatggtgtggccactgtaagaagcttgctcccgagtatgagcaagctgcttctatcttgagtagtcatgatcctccggttgttt

SEQ ID NO: 171906 - DNA, 265 bp, Glycine max
gcttccggcgccatatcgcgtatctttctctgttctattcctacgatggagttttggggtgccgaggttaaggttggtgagtctgttaaggtagatccagccgaattcgaggcatgcatacacctttctcaggctgctcttggtgaggcaaagaaagacaaatcaaatgaaccagttgttctctacttgaaagttggtcaacagaaatttgtcttgggaaccctttccagggagaaattcctcaaatacctctggaattggtttt

SEQ ID NO: 171907 - DNA, 257 bp, Glycine max
cttctttgcctgccgaattggggggccttgctagcttagttgaccttgatcttagtgagaattcttacgttggtggtggattgcctcctgatttcacccgattgaggaacttgaggaggatgatacttgccaacagcatgctcactggagctctgccggggagattgtttagtgattcgttgcagttcctagtgctgaggcaaaacaactttagtggttctctgcctgttgagttgtggtctctgccaagattgagc

SEQ ID NO: 171908 - DNA, 254 bp, Glycine max
ctcttctctcttccttttcagatcacacgcacacagttacgctcttcaaatctatctcttctcagcgattcttgcttcaagttccagaaatgggtgtggctcaaaacattcccgatgcggaggagggaaccttggagattggaatggaatacagaactgtttctggagttgctgggccattggtcattcttgataaagttaagggacccaagtttcaagagattgttaacattcgcttaggaagtggtactact

SEQ ID NO: 171909 - DNA, 258 bp, Glycine max
aacacaaagaagagtgacccttcttcttgttattccacttgcgttagttgttgtgggattcaggtattggtgtgattgtttgtaccatccggtggtggagcttgttggaaattggagatgagtcagaggggtttaatatatagctttgttgccaaaggaactgttgttttagcagagcacacgcaatataccgggaatttcagtaccattgccgttcagtgcctgcagaagctgccatcaaatagcagcaaatacacg

SEQ ID NO: 171910 - DNA, 259 bp, Glycine max
cgtcgctccgcaccagtttcaccgcacgaatatcttgttgtttggagcgatccgagaaaaactctgtaaacatgttggtttaccaggacctccttacaggtgatgagcttctctctgactccttccgttacaaggaaattgagaatggaatgctgtgggaagttgaggggaagtgggttgttaaaggagcagttgatgtagacattggtgcaaacccttctgctgagggtggaggagaagatgagggagttgatgatgc

SEQ ID NO: 171911 - DNA, 258 bp, Glycine max
gaaacgcaggagagacagacagagaagagaatggacgctattgattctgtgttcgatccgctcagggaattcgccaaggacagcgtcaggctcgtcaagcgatgccacaagcccgatcgcaaagaattctccaaggttgctgtgcgtaccgcgatcggtttcgttgtgatgggattcgtgggttttttcgttaagctcatcttcattccaattaacaacatcatcgtcggatctggttaggatgaggggaatcgcaat

SEQ ID NO: 171912 - DNA, 255 bp, Glycine max
aacgctgctgccgaaacccttccggaaccctaaggtaagtgagtaatcagtggttgagaatggtggagaaggcgaagggtagaaaggaggaggtggttacccgtgagtacaccattaacctccacaagcgcctccatggctgcacatttaagaagaaagctcctaaagctattaaggagataaggaaatttgcccaaaaggccatggggaccaatgatgtgagggtggatgtgaagttgaacaagtttgtctgga

SEQ ID NO: 171913 - DNA, 257 bp, Glycine max
ctagggtttacagagaagcgaagaggcgcagcgcagcagtaactcgtggaattgctagcaatggcgaggatcaaggtttacgagctgaggcagaagacgaaggctgatctgttgaatcagctgaaggacctcaaggccgagcttgccttgcttcgtgttgctaaggtcaccggcggtgcacctaacaagctctctaagatcaaggtggtgaggttgaacattgcccaggttttgacggtgatttctcagaagcagaa

SEQ ID NO: 171914 - DNA, 258 bp, Glycine max
gatttttggcatgctgtttggccaaacactcccattccaagttcattgcgagatcttctaaagcctggccctgcaagtgttgaaatcgatgatcaccctatgcaaattgaagaaacacagtacccgaaaaccttcttctataaagaagaccttcatccaggcaaaacaatgaaagtacaattcagcaagcctccctttcaacaaccatggggtgttggtacatggttaaaggaatttaaggacactactaaggagggt

SEQ ID NO: 171915 - DNA, 260 bp, Glycine max
tgcggccttgtggccgcgcaggaagtgaacagccccttcgagtattgcgacattgtgaccaccaccacgcataagagcttgcggggtacacgggcggggatgatcttttaccggaagggcccgaagccgccgaagaaggggcagccggagaacgcggtttatgatttcgaggacaagatcaactttgcggtgttcccttcgctgcagggtgggccccacaaccaccagatcggggctcttgccgtggcgctgaagcaggc

SEQ ID NO: 171916 - DNA, 262 bp, Glycine max
gtttgtgagaacaagataaagaggcgcaagatgagtggtagggtttctgggaaggtgaagtggttcaatgatcagaaggggtttggattcataagccctgacgatggcagcgacgatctcttcgttcaccaatctcagatcaaatctgacggttaccgaagcctcgccgaaggagagtccgtcgagttcgccattgaatctgaatctgacggacgcgcgaaggctgttgatgtcactggccccgacggcgccagtgtccagg

SEQ ID NO: 171917 - DNA, 261 bp, Glycine max
attacaaattacactctttgcctcgcaccttcaacttaaccttttctactcataatcttaacaacttgctagaagaagatacagacagagaaaaagtgtgtgtgtgtgagagagagcaatggctggctcgtaggcacgccgttctctgattgttctggctatcatttccttcggatgtttatttgcaatttccattgctaaggaggaagccacaaaattggggacggtcatcgggattgatcttggaacgacctattcatg

SEQ ID NO: 171918 - DNA, 259 bp, Glycine max
ggatgtcagaggctttatcaagcgcgatgagtttgagcaactgagtcttccaattttggaacgggtgaagggacctttggagaaggcacttgcagaggcaggtcttacagttgagaatgtacacatggttgaggtggttggttctggatctcgtgtgccagctataaacaaaattttgacagagttctttaaaaaggagcctaggcggacaatgaatgctagtgagtgtgttgccaggggctgtgcattgcagtgtgca

SEQ ID NO: 171919 - DNA, 257 bp, Glycine max
cctttgtatggctgcagaaaatatgagcgaggtggaagaggagcatggatatgtcttcaaagaagagatccatctcacggtgttcaaaacttctctgttcttcgcgggcgatggcttcaccgtctacgattgcaaaggtcaacttgtgttcagagttgactcttatgggcccgacacccgcgacagagacgaactcgttctcatggatcctaacggacgttgtctcctcaccgttcgtcgaaagaggccgagtttgc

SEQ ID NO: 171920 - DNA, 258 bp, Glycine max
aatatctttcgcgttgccactgaggttgttatctttcttccaaaatggcgacggtgatgcagaagatcaaagatatcgaagatgagatggcaaagacccaaaaaaacaaggctactgctcatcatctgggcttgctgaaggctaaattagcaaagttgcggagggaactccttacaccttcatcaaaaggagctggaggtgctggtgaaggttttgatgttactaaaagtggggattcaagagttggtcttgtgggct

SEQ ID NO: 171921 - DNA, 256 bp, Glycine max
cacaatacagtcacagaaacagagaaaaaacaaagaaaatggatgcagaaacggagtctccggcgccggaaacatcgccggcggtgatccacccggcagtggcaccaatctcctaccttctgggcacatggagaggccaaggagaaggaggcttccccactatcaattccttctcctatggcgaagagcttcacttctcacatatcccccaacaagcccgtgatagggtacactcagaagacatggaaactcagct

SEQ ID NO: 171922 - DNA, 252 bp, Glycine max
attaatttaatcaccaatggctcgttctatcgctaacgccaagactttctccgctctcgtgctagacggattctccagacgtggctactctcaaagcgcaacaaggggaggagtggcctccatagcacccaaatcaggggaagacaaaggtgtctcatcatacaaggtttcctgggtgccagatcccgtcaccggttactacaaaccggaaaacatcaaggaggttgatgttgccgatttgcgtgctaccct

SEQ ID NO: 171923 - DNA, 256 bp, Glycine max
caaaacagatagtgtgggagagagaagagcggaagagaaaatgacgaccaggttcaagaagaacaggaagaagagaggtcacgtcagcgccggacacggccgtatcggaaagcaccgcaagcatcccggaggtcgcggtaacgccggtggcatgcatcaccaccgtatcctcttcgacaagtaccatcctggtttcttcgggaaggtaggcatgcgctacttccacaaacttcgcaacaaattctacaatccgatc

SEQ ID NO: 171924 - DNA, 258 bp, Glycine max
cttataatttgtgaggggtaagaaaatcagagaagttaaaatatggtttctgtccttccgaagaggataatactgatgcggcatggggagtcacaggggaacctaaatacagcggcttacactaccacacccgatcacagcattcagttaacggcgcagggcatgacccaggcccgccacgccggcgagcagctccgccgcgtgatgggcggcgatgggtgttctcctgactggcgggtacaattctatgtgtctccc

SEQ ID NO: 171925 - DNA, 174 bp, Glycine max
cttttaagttcttgatctatggtagaacagggtggattgggggtttgcttgggaaattgtgtgaaaagcaaggaattccatacgaatatggaaagggtcgcctagaggaccgctcctcactcatggctgatcttcagaatgtgaagccgacacatgtttttaatgctgcaggag

SEQ ID NO: 171926 - DNA, 261 bp, Glycine max
ctcgagccgaatcggctcgacggactcgagctcgaacgaatcgactcgagttcaactctttacttctcataactctgccgcagcaacagccgcggatccaatggcttcagagcagaaactttcgaacccaatgagggagctacaggtgcagaagctcgtcctcaatatctccgttggcgacagtggagatcgtcttaccagagccgctaaggtgttggaacagcttagtggccaagcccctgtgttttccacagcaaggta

SEQ ID NO: 171927 - DNA, 248 bp, Glycine max
accaaacactcttcttcatattcttcttcttcttgttcttgttctatctgtgacgagcatcatggcctcgagagcagtgctattgttggctatgtgtgtgcttccggccatggttgtggccattcgcccagcaaagaaccctttttgcgtgaagggtcgcgtctactgtgacccttgccgtgctggttttgagacctcagcaaccacctacattgccggtgctgagattatgttgcaatgccagagca

SEQ ID NO: 171928 - DNA, 253 bp, Glycine max
gcagaagttgcttgagtggaactcgagcttggttggataatatattcttttaaagttcagacatcgtgtttccatttttcttaaatttgagtattttgaatttttaggaggatggttttgctcgcatcctcctcttgctgaaaactttgtaggtaggaatgatataattttgcatgctaggttctctacatgccattgtcaaacgggaatactcatttgttttcttgtctgtgcataagcacagacgcatttg

SEQ ID NO: 171929 - DNA, 257 bp, Glycine max
ggctgcaccaacaccgattcagaaaactgaagaggagtggaaggtcattctctcccccgagcagtttcggatccttcgccagaaaggaactgaattgaagggtacaggagaatataacaagttttatgaagaaggaatttacaactgtgctggctgtgggactcctctttacaagtcttcaaccaagtttgattctggttgtggttggcctgctttctttgagggttttcccggtgccatcgatcgatcccctgacc

SEQ ID NO: 171930 - DNA, 255 bp, Glycine max
gaacgtcataagcaacaactccagtccatcagtgcatccctggcatcactgactagagaaactggaccgaatctggtgaagggagacccagctcggaagtcagatacccagaaggttactcacgtgcaccaccatcatgtcagtactcccaccattgctgtcagcgacagtgctttgaaatttactcatgtcctctacaatctctccccagctgaactttatgaacaggcgattaagtatgagaaaggatcgttc

SEQ ID NO: 171931 - DNA, 255 bp, Glycine max
gcgaagagaatggctcccaagggtttaatctttttggctgtgttatgcttctcagcactgtcactgagtcgttgtcttgcggaggataatggacttgttatgaacttctacaaggaatcatgccctcaggctgaagacatcatcaaagaacaagtcaagcttctctacaagcgccacaagaacactgctttctcctggctcagaaacatcttccatgactgtgctgttcagagttgtgatgcttcactgttgctg

SEQ ID NO: 171932 - DNA, 253 bp, Glycine max
caaaaaaccctctctttctctctcttccaaaacctaattttcattatttctcttcaaacaaattttcaaaatgcgtgagatccttcacatccagggtggccaatgcggcaaccagatcggcgccaagttctgggaggtggtttgcgcggacacgggatcgaccccactggaaggtacggtggggactcagagcttcagctcgagaggatcaatgtctactacaacgaagccagctgcggccggttcgtgccgc

SEQ ID NO: 171933 - DNA, 253 bp, Glycine max
caagattctaagagagattttgctgctctttgaagaagggtgtttgcttgattttggagatgtcgctgctctcagatctcatcaaccttaacctctcagacactactgagaaggtgatcgcagagtacatatggatcggtggatcaggaatggacctgaggagcaaagcaaggactctcccaggaccagttagcgacccttcaaagcttcccaagtggaactatgatggttccagcacaggccaatctcctgg

SEQ ID NO: 171934 - DNA, 253 bp, Glycine max
cacaaacacctcgtccctcacaatgcagctagcaatggcggccaacgctgtcgtttcaccgtcgccgttccgacctcagccctttctccggtcatccttctccggcgtctccgtcaagctcactccccaatccataacgctttcacgctccaagcccctcaccgtcttcgccgccaccaagaaggccgtcgccgtcctcaaggggacctccgccgtcgaaggcgtcgccactctcatccaagaagacgatggc

SEQ ID NO: 171935 - DNA, 252 bp, Glycine max
cgcttcagcacaatgggtgcctacaagtatgtttcggagctatggcgcaagaagcagtctgatgttatgagattcttgcagcgggtgaggtgctgggagtatcgccagcaaccttctattgtccgtttgacaaggtctactcgcccagataaggctcgtcgcttgggtttcaaggctaagcagggttacgtgatttaccgtgttcgcgtacgaaggggtggccgtaagagaccagttccaaagggtattgtt

SEQ ID NO: 171936 - DNA, 238 bp, Glycine max
ttctcgagccgctcgagccgctcgagccgcaacacaacaaaaaaagacaacacagagagaagcgtcttaataaacgctcttctctgaaaaacctgatttcttctcttcttctcttctctttcgtttcgatcttcgatctctgaaaatgagagagtgcatttcaatccacatcggtcaggccggtattcaggtcggaaacgcctgctgggagctctactgcctcgaacacggcattcag

SEQ ID NO: 171937 - DNA, 248 bp, Glycine max
gttgaaattgttgtttcttcctctgagttccaactttcacctcagccaaatacacaacaaaatggggtttcagaagataagggtgggcaaccccatcgtcgaaatggatggggatgaaatgacccgagtgatttggaaactgataaaagataagcttattttcccttatttggagctggatattaagtattttgaccttggccttcctcatcgcgatgccactaatgatagagttactattgaaagcg

SEQ ID NO: 171938 - DNA, 246 bp, Glycine max
gtggtcatggaagcttttcaaacaactccaaattgaacagtgttgttggacatctgctgcattcttcaattctagtgccatatcatggatggagaatcagtcataggactcatcaccaacatcatggtcatgctgaaaatgatgaatcatggcatccgttgcctgaaaaattgttcagaagcttggacactgtaactcgtatgttaagattcacagcaccttttccacttcttgcattacctgtgt

SEQ ID NO: 171939 - DNA, 254 bp, Glycine max
tttggctaagatcaagtgtagtatctgttcttatcagtttaatatctgatatgtgggccattggtccacacgatattaaatgtattttttgagggggatggttcaccgcagtggcttgctactggaatcatcaagtgtcgcctaagcgttgcactatagcttgggcctggcactcctcagcacaacagttttcaggttttggctttcattgttcactgcattttgtttatataggttaaggttttttgattaag

SEQ ID NO: 171940 - DNA, 296 bp, Glycine max
caacagcacaaagcgggttactgtctgttcaagctaccatctctctctctctttcttagtgcctccttgccagaagttaaaatggcccaagaaactttcctattcacatctgaatcagtgaacgaggggcaccctgacaagctctgtgaccagatctccgatgctgtgtcgatgcatgcttggagcaggaccctgacagcaagttgctgtgaaactgcaccaagaccaacatggtgatggttttcggagagatcacaaccaaggccaacgtggactatgagaagattgtgcgtgac

SEQ ID NO: 171941 - DNA, 301 bp, Glycine max
tgaccaacaaaggactacattaatggcgaacaatttagatcagactccaaaaccagttaaccaacaagctttcttttatgctagtgaacgcgaagtccatcacaacgacatattaatattcggcatagataacacggtactctctattatcccatactatgaaaaacatgatatggggtggaggattttaatgaaaccttatatgatgaatgggttaacaagggcgacgcaccggcattgccagagactcttaaaaattacaacaagctgttgtctcttggcttcaagattgtattcttgt

SEQ ID NO: 171942 - DNA, 295 bp, Glycine max
gaacccgtttcgctttcaatcgaagggaagaacaaacattcaattcatggcaactgcaaagcttcaagctttatggaatcacccagctgggcctaaaaccattcacttctgggcacctacctttaagtggggcatcagcattgccaacattgctgatttctcaaaaccaccgagaaactttcctatcctcagcaaatagcggtcacagctactggaattatctggtctcgttacagcactgtaatcaccccaaaaaattggaacctgtttagtgtaacattgcaatggcagggac

SEQ ID NO: 171943 - DNA, 169 bp, Glycine max
gagatggcttctcctcttcttactccttacaagatgggcaaattcaatctgtcccatagagttggtttgggcaccggtgaccagacagaggtcttacgacaacgtcccacaaccccatgccatcctctactactcccagagatattccaacggaggccttctcatactg

SEQ ID NO: 171944 - DNA, 156 bp, Glycine max
tctctctcccgaattattgttcgttcgacccttttacttagtattccctgtttccggtattcgctccctttgattctgcattctggttttacttagatctctgtcccgcaccagatctggtgcagggtgagagggttgggttcattaattttgtat

SEQ ID NO: 171945 - DNA, 294 bp, Glycine max
attttcacatctcatttttctaaattcttttttacacactctcattaattaattacattccatattgtaattaattctaggtacgttagccatgaagagacagagagatttcgaggggtttgagagcatagatttggcaaattgtctaatgatgctctctcatcccaacaaaataagaaactgattcaaacaaaaattgaggctgtgaaatttgagtgcaagacatgcaaccgcaaattctcttcctttcaagcattgggtggccatagggctagccacaaaaggtcgaaactt

SEQ ID NO: 171946 - DNA, 248 bp, Glycine max
tgtccaagcagcctccaattcgtgccactctcttcaaaatggccgttaccttctccaattctccacacagaatcaggtctcaagtccctcgacgacttcctctctgggaaggtctacgtttctggggatcagttcacaaaggacgacatcaaagtgtatggtgctgttttgagaagccaggtgactcttttcccaatgctgccaagtggtacgaggttgtctcatctcacttgctgcaagcttccccg

SEQ ID NO: 171947 - DNA, 283 bp, Glycine max
tgcagaagacgtatcttccgcccgcaatcttgagtttgccgccgcgaccgtgcatggcggcggccagggaagaagcttaaccaagtcatgtttggagcaattgaccagctgctggcaaagactggtgtgaaggctaaggatattgggatcttggtggtcaattgagcttgttcaaccccacaccttcactctctgccatgattgtcaatcactacaagttgagagggaatgttttcagttataaatcttggtggcatgggttgcagtgctggccttatctcta

SEQ ID NO: 171948 - DNA, 161 bp, Glycine max
aattggagggttcttgactcattgtggatggaattcaactatagaaagtgtttgctctgggggtgccaatgataacatggcctttgtttgctgagcaatttttgaatgaaaaatgcattgttgaagttttgaagattggagtcaggataggggtcgaggta

SEQ ID NO: 171949 - DNA, 267 bp, Glycine max
cgaagtaacaacaatggtggcgggaactgcaaccttgaagcttagcctctccgctttttcttctccaatgtcaaatttcagcgcttcctcttcattcccctctcgtctcccaatgcgaaccccttcttcttctaaacctcgatttctcaggatttacgcctgaccagcaacgacatcaaggtcggcaccaacctcgaagtcgatggtgctccttggcgtgtgttagagtttcttcacgttaagccgggtaaaggcgcggcgtttgtc

SEQ ID NO: 171950 - DNA, 290 bp, Glycine max
attttaggtcggtaaagctggtggtgacaaatggaaatcgctgtctgatgctgtgagtattaagattttgagaattcttttttcattattagtttttgcgtatggttctatatgatttaatttattgaccatatctacttatttgtaacctagtttgcgtcatttaatgtttcaggaaaaggcccccttcgttgccacggccgaaaagaagaaacaagagtatgagaaaactattttggcttacaataagaaattggtgaatactttttaccctatactacttactctta

SEQ ID NO: 171951 - DNA, 265 bp, Glycine max
tgagaggaagtggatgatgatgatgacgatgaggatgatgaccatgacgaaggactagaaggtgatgcatctggtaggtcgaagcagaccagaagtgaaaagaagagtcgcaaggcaatgcttaaacttggaatgaaacctgtcacaggtgtcagtcgagtgacagtcaagaagagcaagaatatcctgttcgtaatctcaaaaccagacgttttcaagagtccaacatctgacacgtacattatatttggggaagccaagattg

SEQ ID NO: 171952 - DNA, 293 bp, Glycine max
catcactagaagtgttggatgcatttctatttctaactaattattgtgcttattattattgttgagaaaggaaagaatggcaaggttattaaaattctttgagttgaacacaggggccaagattccttctgttgggttaggcacttggcaagctgagcctggtgttgtagccaaagctgtcaccacagccattctggttggatacaggcatattgattgtgctcaagcgtataacaatcaagcagagattggttctgctcttaagaagctttttgatgatggtgtggtgaagc

SEQ ID NO: 171953 - DNA, 293 bp, Glycine max
gcgaacgtggtgaagtgtcacgagatgtacgatcagaacagcgaaatccaggtgctgctggagttcatggacggaggttctctggaggggaaacacatcacgcaggagcagcagctggcagatctgtctcggcagattcttagggggctggcgtacctgcacggcggcacatcgtccacagggacatcaagccgtcgaatctgcttataaactcgcggaagcaggtgaagatcgctgacttcggggtgggtcggatactgaatcagacgatggatccgtgcaattcgtcggtg

SEQ ID NO: 171954 - DNA, 293 bp, Glycine max
accaccacgagtttctctatctgctttcttcacaaagagtaactcagtcttctaaaaattttctcaaaaccattattattctctaatctttcgtttcttcaattaattaattggtttcttgctatggctgtggactctgcgatttcgtccccattgggtcccccgcctgtgagaaggacgcaaaggcgttgcggttcatcgaagaaatgactcgcaacgccgacgccgtccaggagagagtcctggaggagattctcacacgcaacgcccagacagagtaccttaaacgcttc

SEQ ID NO: 171955 - DNA, 148 bp, Glycine max
ctctgaaaaacctgatttcttctcttcttctcttctctttcgtttcgatcttcgatctctgaaaatgagagagttgacattcaatcaacatcggtcaggccggtattcaggtcggaaacgcctgctgggagctctactgcctcgaaca

SEQ ID NO: 171956 - DNA, 153 bp, Glycine max
gtttccactacttttcttcccttctttccagaacaacaccacaacacaaacagagcaaaaaagctccaccaatgggcgggttacagagccgacgacgactacgactacctcttcaaggtggtcctgatcggcgattccggcgtgggcaagtcc

SEQ ID NO: 171957 - DNA, 289 bp, Glycine max
aaaattttcaaaggctttcaaagagttggttgccacctgcttagtaaaagacccaaaaaagcgtccaagttcagaaaagcttttaaaacaccacttctttaaacaagcacgtgccagcaaatatttagctcgcaccattttagaaggccttgctcctttaggagatcgttttagaatgctgaaggctaaagaggcggatttattggtgcagaacaaggctctttatgaagataaagatcaattatctcagaaagaatatattcgaggcatcagtgcctggacttttaac

SEQ ID NO: 171958 - DNA, 289 bp, Glycine max
  unsure (1)..(289): unsure at all n locations
ttgccacatgcaatggtggtcctgctgagatcattgtgcatggaaaatctggttaccacattgatcctttacccatggtgaccatgctgctgagatccttgttgagttctttgagaagagcaaggctgatccatctcactgggacaaaatctcccagggtgactcaagcgtattcatgagaagtacacatggcaaatttactcggacaggctcttgacactcactggtgtgtatggcttctggaagcacgtgaccantcttgaacgccgtgagagcaaacgttacttcg

SEQ ID NO: 171959 - DNA, 288 bp, Glycine max
cagatgatgccttcttcgattccccagtatgtgactgaagccttcactgggcccatgccggacccacccgggcctcaagctcaagaaggaagggctcaaggtgaagcaccctgtggtttttgtgccagggattgtcactggtgggcttgaacactgggaggtcaccagtgtgctgaagggttgttcaggaaacgcttgtggggtggtacttttggagaagtctataaaagaccttcatgctgggtggatcacatgtcactggacaatgaaacaggattggatccacca

SEQ ID NO: 171960 - DNA, 291 bp, Glycine max
gtagaatggctcgttatcttgcaaacaaatgctcaattgcaataacggattgactgcttttctgaaaagggtactactgtttttgggcagaaactccgtgagcaagttgaggaacgacttgacttttatgacaagggagttgcccctcgcaagaacatagatgtcatgcaggctgctattgaaagtgctgaaaacaaagatacagagatggaaacagaagcacctgctgaagtttcaggcaagaaaaccaaaaagaagaaacaaaaagctgctgatgctgaagatgacgtg

SEQ ID NO: 171961 - DNA, 295 bp, Glycine max
gttactacaaatgcgtagcccgggttgtccagtgagaaaacatgttgagagagcttcacatgacattaaaagctgtgattacgacttatgaagggaaacatatccatgatgtaccattaggacgaggaaactcaagctatagcatgaacagaaattctctaaacaacacctccaacaacaccaacaccagcaatgtaacagctcctgctcctataaggccctcagcactgactaactattctaactcagcaagtttcacaaactcacttcatgacacaaagcaaccaacatctgc

SEQ ID NO: 171962 - DNA, 271 bp, Glycine max
cggagacctctcttcaggtcgccatctagactgcaatcatggctgatggaccacagcatccatcagttgttcaagagctagctggaaagtcttacctggtgtccaggctaagccccaactttaactctgggaattattcctcgactggttcttactcaatggaggactgcactcttctgggttggctgttgtgtcgcctggatctccagttactgtgcatgctccagcagagaaaggagtgagtggatttctagtggattttctgatgggt

SEQ ID NO: 171963 - DNA, 149 bp, Glycine max
ggagggagcgtagcagcggaactctagcttgggtagcgaatcacaatggcgagaggattaaagaagcatctgaagaggcttaatgccccaaagcattggatgcttgacaaactgggtggtgcatttgctcctaagccctcatctggacc

SEQ ID NO: 171964 - DNA, 241 bp, Glycine max
catgatgactgttgaagagaagccagatgtaacatataatgatgttggcggttgtaaggagcagattgaaaaagtgccgagaagttgttgaacttcccatgcttcatccagagaaatttgtcaagcttgggattgatcctccaaagggtgttctttgttatggccccccaggaactgggaaaacacttttagccagggctgtggctaataggactgatgcttgttttataagggttattgg

SEQ ID NO: 171965 - DNA, 279 bp, Glycine max
tctctctctctttatcataacatgatgatgctgattcatgtgaatttatgcaggtatctctcgtgattccatgcacaagaggcgcgccaccggcggcaagaagaaagcttggaggaagaagagaaagtatgagcttgggaggcagccagcaaacacaagctatcaagcaccaagacggttaggggattagggttcgcggtgggaacgtggagtggcgcgctttgaggcttgatactgggaactactcttgggggagtgaggctgcaacccgcaagacaa

SEQ ID NO: 171966 - DNA, 287 bp, Glycine max
aaatggtaatgcctggacaccgtgagtcaaacttgcagaaagagctgaaccgatacatttcccacggccgcagcatttggaggcatctgtatcggtgctctgacagtgttggcagacttcatgggggccatcggttcaggaaccggaatattgcttgcgtaacaatcatctatcagtactttgagacatttgagaaggagagagctagtgagcttggcttcttcggtttctaagttctgccaagcaaataatgttggttggtgactccaacgagctctcccacaccc

SEQ ID NO: 171967 - DNA, 160 bp, Glycine max
ggcatctggaacttcacaaatcctggggccgtgagccacaatgagattcttgagatgtacagggattacatcgattccaagcttcaagtgggctaacttcaatcttgaagagcaagccaaggtgataattgctgcacggagcaacaacgagatggatcat

SEQ ID NO: 171968 - DNA, 275 bp, Glycine max
ctcatatccttatcctgtttctttcaatggaagtcatttctgcttctagcttgaatcccaacgctccgatgttcgtgccactcgcctatcggacggtggaggatttctccgaccagtggtggaacctcgttcactcctccccctggttccgcgactactggctccgcgagtgcttccaagatccccagttccaaaacgacgacgctttcgacttcgactttgacctagatctccaagatgaagatgaaaaggaccgaaaggaagggaaggaggtg

SEQ ID NO: 171969 - DNA, 149 bp, Glycine max
gtgagggtggggagaggaaaagaggcgcacgtttatgctgcgtgtgcaagaaatcaagagcttcggtgaagaggccgaaaaccctagagcagatatgcagggagtgcttctacgatgcttttgagtctgagatccatcaggtaattctt

SEQ ID NO: 171970 - DNA, 285 bp, Glycine max
ctagcatgtgatcaacatgttcagacggatactctgttggacgatgaatgtcaggagacaagaagccctgggatggtatcggaatcttcgaaggcaaaggttgcaaaactggtggatggataccttgctgagattgcacgtgatccaaatttaccctttcaaaatttgttaatcttgctgaattagtatcaagctttccaagagcatttcatgatggcctttatcgtgcgattgacatgtatttaaaggagcaccctggaatcagcaaaagcgaaaagaaaagat

SEQ ID NO: 171971 - DNA, 159 bp, Glycine max
ctcataacacaacagcgacaaagcataagctgcatcctctgaagttaaagaaattggcaagcagctttccttccattggttctctcatccccatccttggctggcaaggccgtgaagctgggcccatcagccccagaagtgggaagggtgagcatgagg

SEQ ID NO: 171972 - DNA, 273 bp, Glycine max
atcctcttctttcatctttctccctaacggtatcgagggaaaaatatggcggaagaacacagatgccaggcaccgcgcttctgcgccaacaattgcggtttctttggcagccctgccacgcagaatatgtgctccaagtgctaccgcgatttccagctcaaggagcagcaatcttccaacgccaagatggttctcaatcagtcgctggttccttcaccgccaccggggtgatttctcagccgtcgtcttcttcttcggcagcggtagatccgt

SEQ ID NO: 171973 - DNA, 214 bp, Glycine max
gccaagctagcccactccgaaaaatgtttgccgtggcgtccatcgccgccggcatacagttcgggtgggctctccagctctctcttctaaccccctacgttcagcttttaggagtcccccacgcggcggcctccttcatctggctctgcgggcccatttccgggctcgtggtacagcccattgtgggatactacagcgacaactgtacttcccg

SEQ ID NO: 171974 - DNA, 168 bp, Glycine max
attctcttgcggctagggttttagcgcagcttcttctagatataaggaagatgggtaaggaaaaagttcacatcagtattgtggttattggccatgttgactctgggaagtccactaccactggacacctgatctacaagattggaggaattgacaagcgtgttattg

SEQ ID NO: 171975 - DNA, 255 bp, Glycine max
gaacaatatacacttccaaaactctatgtgaagatgcagtactgtgtttcctgtgctatccactctcatgttgtgagggttcgatcccgcaccgacaggaggaagcgtgagcctccacagagattcatcaggcgcagggatgatgcaccaagacctggtcagcccggtcaaggacctcgtcctgcgggcacagcagcagcacctgtccgaaccgacaagcaagtcctaaggaataagccttgatgttatgctgga

SEQ ID NO: 171976 - DNA, 274 bp, Glycine max
tgcagcatctcttggctgctgctgatctctataatcttgatcggctcaaactgctttgtgaatcaaaattatgtgaagaaatcaatactgacaatgtggccacaacacttgcgctggcagagcaacaccactgtccacagcttaaggcaatctgtttaaaatttattgcaaatcctgcaaacttgggagctgtaatgcagtcggaagcttttgtgcatttgaaagagagctgcccctcaatgctgttggaattgctggagacatttgcatcagt

SEQ ID NO: 171977 - DNA, 211 bp, Glycine max
taaagacgtgaaaataatggtgaacatgaggatatgcgtaaaatgaagaatgaattcatggataattgggatggtttgagaacacaagataaagagcgtatacttgttcatgatgatacaaatagacattttgatcatgatgaggcagttattaggagacatcacacgagattgatggtaaatttgcaagatgctcaatatagaggaaaaa

SEQ ID NO: 171978 - DNA, 229 bp, Glycine max
tatccggtgctgatagaggatgggaactagtgaatggcatatcgagcgaagatctagcttcggcactgaatcccccatagcaagagatgcaggaaatgtgcctgaaaatgggtcactctctattgttgtgcttggcgcttctggggatcttgctaagaagaagacatttcctgcacttttccatctataccggcagggattcttaccagcagatgaagttcacattttt

SEQ ID NO: 171979 - DNA, 263 bp, Glycine max
tgtggattccaatcctaaggaaaatatgttggtacttggttctagcgccctatgatccaatgcagtcaagccttctcaattccaccttggaggataagaatatatctgagattccaaacttcaagttacttttgaaacagctggttaccatggaggttatccaatggaccactctatgggatacatataagagtgattttgagaatgagaaggcctctgggaaatctttgggtgaaaaagcagcagaagatctgaggcaaaga

SEQ ID NO: 171980 - DNA, 269 bp, Glycine max
tgattatcctaagtctttgggaatagtgctgcaatggcttcaagtcaggaggaggtgacccttttgggagctactggaagcccatttgtgtgcagggttcatattgccctcaagttgaagggagttcaatacaaatatgtcgaagaaaatttgaggaacaagagtgaactgattctcaaatccaacccagttcacaagaaggttccagtgtttattcacaatgagaggcccatagcagggtctcttgtgattgttgaatacattgatga

SEQ ID NO: 171981 - DNA, 280 bp, Glycine max
cttcaatttccctttggatttcattcattaggtgagtacgtacgattacgatggattcgagttcggggcatcaagaattcgattatttgtttaagttgttgatgattggagactctggggttggcaagagtagtcttcttctcagtttcacctccgatgcttttgaagatctctcccccactattggtgttgattttaaggtcaaatatgtgacgatggggggtaaaaagctgaagcttgcaatttgggatactgctggccaggagaggttcagaacact

SEQ ID NO: 171982 - DNA, 277 bp, Glycine max
gaacaagatggaaagcactgtcacatttgagactgatctcaacctcaaggcaaccgagcttagattggggcttccaggaacagaagaaattgttgaaaaaccacttcctgcaagtgctagaattaccaacaaaaggcctttgtctgaaacctctgaggagtgtgcttcaaagggttctagtgctccacatgtggaaactgaagcagcccctcctgccaaggctaagatagtggggtggccaccaatcagatcctacagaaagaacagccttcaggag

SEQ ID NO: 171983 - DNA, 284 bp, Glycine max
  unsure (1)..(284): unsure at all n locations
ttcaatccctaatgcgccttctgcgttcaattctcagagctacgttggtctcagagcgccactgaggaccttcaacttttcttctcctcaagctgcnaaaattcctcgctcccaacgcctttncgtcgtcagagcctccgattcggagttcgaagccgccgttgtcgccggtaaggttcngcnggcgcctcccgtnccgcccagaccggcggctccggttggaacaccggtggttccntcacttccattcaccggcgtcctcgtcggaaccggaagtngccggc

SEQ ID NO: 171984 - DNA, 236 bp, Glycine max
gttgtgttgtgttgagcagagagagagagtgagggataagaagagaatagggttagggttagggtttgattgaggatgccgaagaacaagggaaagggaggtaagaacaggaagaggggaaagaacgaggcggacgacgagaagcgggagctggtgttcaaggaggacgggcaggagtacgcgcaggtgctccggatgctggggaacgggcggtgcgaggcgatgtgcaatcgacg

SEQ ID NO: 171985 - DNA, 277 bp, Glycine max
acctctctttgccacactgatgtttacttctgggatgcgaagggccagactccattgtttcctcgcatttttggccatgaagcttcggggattgtggagagcgtaggcgagggtgtgactcatctgaaaccaggtgaccatgccctccctgtgttcacaggagagtgtggagattgcgcccattgcaagtcagaggagagcaacatgtgtgagctactcaggatcaacaccgataggggtgtcatgatccatgatggccaatcaaggttctctaaga

SEQ ID NO: 171986 - DNA, 282 bp, Glycine max
atcgggagaagtaatcgagcttcagcaatggtgtacgtcaaggctcagaaatcaaaagcctacttcaagagatatcaagtcaagttcaagagaagaagagagggaaaaaccgattaccgtgccaggattcggttgattaatcaggacaagaacaaatataacactccgaaataccgatttgtggttcgctttagcaacaaggacattgttgcacaaataatatctgctagcattgccggcgatttagttcttgctacagcatattcacatgagctgccacga

SEQ ID NO: 171987 - DNA, 277 bp, Glycine max
caggcacaaaatggaaaagaatgtggggattctcgccattgacatctacttccatcgacgttgcgttcagcaggaagcattggagactcatgatggtgccagtaaagggaagtataccattggacttggccaagactgcatgtcattctgtaccgaagtagaagatgtcatctcaatgagtttgacagtggttacttctcatcttgagaagtatgggattgatcctaaacaaatcggtcgtcatggagttggaagcgagaccgtgatagacaaaagc

SEQ ID NO: 171988 - DNA, 271 bp, Glycine max
cgactgcgcttcagcacaatgggtgcctacaagtatgtttcggagctatggcgcaagaagcagtctgatgttatgagattcttgcagcgggtgaggtgctgggagtatcgccagcaaccttctattgtccgtttgacaaggtctactcgcccagataaggctcgtcgcttgggtttcaaggctaagcagggttacgtgatttaccgtgttcgcgtacgaaggggtggccgtaagagaccagttccaaagggtattgtttatggtaagccca

SEQ ID NO: 171989 - DNA, 276 bp, Glycine max
cagaggctacgtacgatcaaattaattaagatggcggaagtgaggaacaaacaagtggttctgagggactatgtgagtggttttcctaaggaatccgacatgaacatagttgaaggaaccacaatattgaagcttccacaaggttccaatgatgtgcttctaaaaaatctctacctttcctgtgacccttacatgagaatgctcatgaccaaggtggaaggcctcgacgtgtttggcacctatacacctggctctccattaacagggtatggagtg

SEQ ID NO: 171990 - DNA, 280 bp, Glycine max
ggagaattaggtttttagggtttacaccgagcagccacacctcccgcagcagccatggttctcaaaactgaactatgccgattcagtggtgccaagatctacccaggaaagggcatcagatttgttcgttgtgattcttaggttttcctgtttgcaaactcaaaatgtaagaggtatttccacaatcgcctgaagccttcaaagctcacctggactgcaatgtacagaaagcaacacaaaaaggacattgctcaagaagctgtgaggaagaggagacgtg

SEQ ID NO: 171991 - DNA, 269 bp, Glycine max
atcaccgttgagcaggctatccagagcaagaagttgttcatcttagatcaccatgactatctcattccatatttgaggaaaataaatgcaactaccacaaagacttacgctacaagaaccatatttttcttgaaaagtgatggaaccttgacgccattggccattgagttaagtaagccgcatcctcagggtgaaggatatggtcctgttagcgaagtctacgtgccatcgagcgagggagttgaagcttacatttggttactggcaaa

SEQ ID NO: 171992 - DNA, 257 bp, Glycine max
cttctttttactctctctctgtctctctctacgctttctcgttcgagatccctcaagggatccactaactgaaggagaaatggggttgacattcaccaagcttttcagccggcttttcgccaagaaggaaatgcgaattctgatggtgggtctcgatgcagctggtaagaccaccatcctgtacaagctcaaacttggagagatcgttaccacaattcccaccattgggttcaatgtggagactgtggaatacaaga

SEQ ID NO: 171993 - DNA, 171 bp, Glycine max
aactaacgcacgctgaattcagaaacatcgaaagaaagaagactggccgagcaaaccatcatcatgatcacgccagatggcgttcaaagaggccttattggcgagattattagcagatttgagaggaagggtttttacttgaaagggttgaaactcgttaatgtggaccgt

SEQ ID NO: 171994 - DNA, 231 bp, Glycine max
acaccatcaatggcaggcgtttctctcaagtgcggtgactgaagtgctctgctgagaaccgtagaagaagcgctagagcacgctgaactcacctcccactccaacttctccgaatccaccgaaccggttctcaacctcatctgcaccgcttgctccaaaccctgccgatccaaaccgagagtggtttgcacacgaaaagaaccggccataccgagttcgttgacaagactt

SEQ ID NO: 171995 - DNA, 272 bp, Glycine max
cgagaatttcctcgagcgccgccttcagacgctcgtcttcaaatccgggatggccaagtccattcaccacgcacatggttctcatcaagcagagacatatcagggttgggaggcaagtggtgaacatcccatctttcttggtgagggttgactcacagaagcacattgacttctcacttacaagtccccttggtggcggacgccctggaagagtgaagagaagaaaccaaagggctgctgctaagaaggccgcaggtggagacggagacgag

SEQ ID NO: 171996 - DNA, 248 bp, Glycine max
tgtaacgaaggtcacccgacaagctgtgcgaccagatctctgatgcagtgctcgatgcgtgcactgaacaggaccctgacagcaaggttgcctgtgagacatgcaccaagaccaacatggtcatggtctttggagagatcacaaccaaggccaacgtagactatgagaagattgtccgtgacacatgccgcgaaattggattcatctctgatgatgttggtcatgatgctgacaaatgcaaggtgttg

SEQ ID NO: 171997 - DNA, 277 bp, Glycine max
aaataaggcgtcttcataaacgcctttcttctccgtttccgtttcctcgttcgaattcgctttttgatctgcgaaaatgagagagtgcatctcgatccacattggtcaggctggtatccaggtcggaaatgcttgctgggagctctactgcctcgagcacggcatcgggcccgatgggcaaatgccaagtgacaagacagttggcggtggtgatgatgctttcaatactttcttcagcgagactggtgctggaaagcacgtgccacgtgcagtgttt

SEQ ID NO: 171998 - DNA, 283 bp, Glycine max
atttctcgttataacaaagtggtcatgctgtttggaatgttgaccactttggatgaacttctgcctatttcaattgagatggcaaagcgaaacttgaggggcatctggaacttcacaaatcctggggccgtgagccacaatgagattcttgagatgtacagggattacatcgatccaagcttcaagtgggctaacttcaatcttgaagagcaagccaaggtgataattgctgcacggagcaacaacgagatggatgcatccaaactgaagaacgagttccctg

SEQ ID NO: 171999 - DNA, 280 bp, Glycine max
ggaaaaatggtttcgctgaaactgcagaagcggctcgccgcgagcgtgctcaagtgtggcagaggaaaggtttggcttgaccccaatgaagtcaacgaaatctccatggccaattctcgccaaaacataaggaagctggttaaggatgggtttatcatcaggaagcccaccaagattcactctcgctcacgtgctcgtcgaatgaaggaagccaagaggaaaggacgtcactctggatacggtaagcgtaagggtacaagggaggcaaggcttcccacta

SEQ ID NO: 172000 - DNA, 259 bp, Glycine max
aagaatgaatgagaactaattataaattttctgtttatctgagacggtaaatggtcaccggacacaagtagaggagaccatgaacattgttagagaggagatgaacctcttggttgaagcagatcaaccagggaatcagctggatgattacataacaagactaaatgccattctttctcagaaggctgctggcatcctgcagttgcaaacccgtttggctcattttcagaaacgtttaaaggaacataatgttttggtt

SEQ ID NO: 172001 - DNA, 276 bp, Glycine max
atcggcggcgacagtcactctccgacaacaacacttccgcggcgaaaaatgtctctggtggcgaacgaggatttccagcacattctgcgtgtgctgaacaccaacgtggatgggaagcagaagataatgttcgctatgacctccatcaagggtattggaaggagattcgccaacatcgcttgcaagaaggccgatgttgacatgaacaaaagggctggtgagttgagtgctgcagagttggatagtgtgatgactgtggtggcgaaccctaggcaa

SEQ ID NO: 172002 - DNA, 273 bp, Glycine max
aattattatcatgtactactaattaaagggcagcaactgggagttcaatgaacctggctagaacactgggtccagcaattgctgcacacaactacaagggcatgtggatctatctcacagctccaatacttggatctctatgtggggcaggtgcctacactgtgctcaagctgcctgatcacatcaggaagagtgatagcaacactgcaagagtgatagcaagactttacccagaatgagtgatttttgcacatgcacttatcatgcatgcat

SEQ ID NO: 172003 - DNA, 273 bp, Glycine max
ctggtgtctatgacatccactccccaagaataccaccaactgaagaaattgctgacagaatcaacaagatgctggcagtgctcgagaagaacatcttgtgggtgaaccctgactgtgggctcaagacccgtaagtacactgaggtgaagccagccctcacaaacatggttgccgcagcaaaactcatccgcaacgaacttgccaagtgaatggtataagaaagtagaatcttccaagtcatttggttctgctttatattataatacaccaaag

SEQ ID NO: 172004 - DNA, 269 bp, Glycine max
gacagacagaggcggcacaaataagaatggcttcaaatcccaaacctttgacttttgaggaggtggctaatcacaacaacaaaaaggattgctggattattatcaatggaaaggtgtatgatatcacgccatttctggatgagcatcctggaggagatgaagttttggtaacgtcaacagggaaggatgccaccattgattttgaagatgtgggccacagtgattctgccatagaaatgatggaaaaatacttcgtcgggaaggttgac

SEQ ID NO: 172005 - DNA, 278 bp, Glycine max
gttttattcattttccgatggcttctgcagatgttgagtaccgttgctttgtcggtgggctcgcttgggccactgacgaccatgccctcgagagagccttctctcagtacggcgaaatcgttgaaacgaagattatcaacgatcgtgagactggcagatccaggggttttggatttgtgaccttcgcctcggagcagtccatgaaagatgcgatcggagcgatgaatggacagaacttggacggccgtaacatcactgtcaatgaagctcagtcccgc

SEQ ID NO: 172006 - DNA, 281 bp, Glycine max
ctcgagccgctcattcgttcactgtcactttacccaatcctaacactttcttctctctgtattccttcttcctcgcatcaatggagttggacggcgttctcctcggcatgtgcaaccctctcctcgacatctctgccgtcgtcgacgacgctttcttgcaaaaatacggtatcaagttgaacgatgcgattctcgccgaggataaacacaaacctatgtatgaagaattggctaacaatcctaatgtggagtacattgctggaggtgctactcagaattca

SEQ ID NO: 172007 - DNA, 275 bp, Glycine max
gtgtctctctttgacggtggtgctgtcagcattgacctcagcttgagcagtaaaacatcatcagcactactacggtaccatggctgtgctgcaatctttcgtttcggtccacccagattctcacttccccatacagaacctcccttacggagtcttcaagccccaatccgcttcgcctcctcgtcccggcgtcgccatcggcgacttcgtcctcgacctctccgaaatatcttccgctggtctcttcgacggtcctctcctcaaaaactccgatg

SEQ ID NO: 172008 - DNA, 274 bp, Glycine max
cggctcgaggtaattttgtttgttcatcttgtgttgttcactgttctttcccagacccacctcaaagttgaaagcagccatgggttttttcttgaaatgggtcaacttgtttgtcttttttcatttccttgctgcaacacccatcttctcagattactcctccagctcaaatgcaatcgccaccaccaagttccttgatttagccaaggatcctcgggtttttgattggatggttggtatcaggaggaagattcatgagaatccagaactgggt

SEQ ID NO: 172009 - DNA, 273 bp, Glycine max
gattttacagtactttgaaacatacattttaatctgtttaggagataaacggcggtggagcaagagagagcaagagagagagagaaggtttggaagaatcgcgatggagggtgaggaaggaggaggcataaggctgagcaagcgaatcgcaaacggagaggttgactacaagacgaaatccggcaccgcatggagccactcctatctcaaccagaagccatggcaccctctttcttaccccaaccaacgccgcaagtggatcgccgaacagac

SEQ ID NO: 172010 - DNA, 271 bp, Glycine max
tctgcacccaccattactcagcactgccactcttcaatcacactaatggctgtcaccttctcagatcctcacaccgaagagggcatcaaatccctcgatcaattcctttctgggaaaacctatatctctggggatcaattgacaaaggatgatatcaaagtgtatgcagctgttgtggaaaagccaggagactcttttcctaatgctgctaagtggtacgatgccgtctcttctcaacttgctccaagcttccctgggcacgctcaagggg

SEQ ID NO: 172011 - DNA, 268 bp, Glycine max
gtgcaggggctcaattatggagaaagcaattcaaagacagagagttctgcttgaacatcttcaacccatttcttcaagttcaaatttttcctctcaaacccatcaatctacggatctctcagcttcattatgttttgctgggaattcttcgcatggtcaaacaggtggatcagatgatgacgtggtgattgtagctgcatatcgtactgccatctgcaaagcaaagcgtgggggctttaaggatacccttccagatgaccttcttgcc

SEQ ID NO: 172012 - DNA, 272 bp, Glycine max
agtttagctacctacccatgggaaagattgccctagccaatgtcctcttggtccttctcttgaacttgagcactttgctcaatgttcttgcttgtccctattgcccttacccatctcccaagcctcctccaaaaaagcctcccattgtgaaaccaccagttcacaaacaaccaaaaccatgtccaccacccaagtcatctccaaatccaccccatgtacacccagcctatgtcccaaaacctcctcactaccctaaaccaccagttcatcca

SEQ ID NO: 172013 - DNA, 272 bp, Glycine max
gtgaagctcagtgcatcaagatctctctctctgtaatcgaaaatgagcaagggaccgggtctctttaccgatatcggcaaaaaatccaaagatcttttgactaaggactacaactccgatcagaaactcaccatttcctcatacagcatctccggagtggccctcacttcaacatctgtcaagaaaggaggactctccactggggatgtggcagcactgtacaagtataagaacactattattgatgttaaactggacaccgcatcaactat

SEQ ID NO: 172014 - DNA, 272 bp, Glycine max
ctaagtatctagtctagtacaaagatggagatccctgtgatagattttagtaagctcaatggggacaagaggggtgacacaatggccctattgcacgaagcttgtgaaaaatggggctgctttatggttgagaaccatgaaattgacacacaactgatggggaaggtgaagcagttgatcaatgcatactatgaggaaaacctgaaggaaagcttctaccagtctgagatagccaagaggttggagaaacagcagaacacctctgatataga

SEQ ID NO: 172015 - DNA, 284 bp, Glycine max
tgagacgccaaatggaaagccaaagaataagcgtcctcttcctcaggaggatcctgtaattgatcctgttgctgctctagacaaaagcaggctgaggaaggtcactgaacgtgttatgccccccagagcaccaaaggaagatggaagagaatcactgttagaaatgataagatcgaagtcattcaacttgaggcctgctgcggttcaacgaccacccaggattcagggtccaaaaacgaacttgagggtcgctgccatcctggaaaaagcaaatgcaatccgcc

SEQ ID NO: 172016 - DNA, 282 bp, Glycine max
gttcagttgaggcaatgtacaatgagatggcttctcgccacagggtcaggagcccatgcatccaaattatcaagactgcaaccatcccagctaagctttgcaagagggagagcaccaagcaattccacaactccaaaatcaagttcccattggtcttccagaaagttagaccacctaccaggaagctgaagaccacatacaaggccaaaaagcccaatttgtttatgtaatgtggttgatgaatgtatcagaaatacttaagggtgtcttccaggcgttttc

SEQ ID NO: 172017 - DNA, 273 bp, Glycine max
  unsure (1)..(273): unsure at all n locations
cgtgtttcgctgtctctcccatcctttcgcattctcaatacccttttgatttgtgaaaggaaagcaaacatggttgaacaggtccaacaccctacaatcatggacaacgttgctggttctctccatctccgntctggtcactcatctcgtattagaagttatgatggagcctaccgccacccagctatgtaccaaagaccctcttttgggaattactcgaatgcagcattgcagtatcctatgatgcccacatgcaatgctaccatggatttg

SEQ ID NO: 172018 - DNA, 273 bp, Glycine max
gtttgttgttgtaactcgttcttcttcttttgttgttctgtgtttgtgtttgttttttctctcacctgaaaatgtcttgctgcggtggtaactgtggttgcggaagctcctgcaagtgcggcaacggctgcggaggctgcaagatgtacccagacttgagctacactgagtcaaccaccaccgagaccttggtcatgggagtggcacctgttaaggctcaatttgagggtgctgaaatgggtgtgcccgctgagaacgatggctgcaaatgtg

SEQ ID NO: 172019 - DNA, 270 bp, Glycine max
caactttactgaagttgagggtcgggttttacaattgcgtagcaattatggttctgaaccaatgctacgcaattgtggaatctctataagccccaactttactgaagttgagggtcgggttttacaagctccacggttgaaatttggtaatggggaggacttcaatcctagaaatcggaggtggaacttcaataacaagaaaattgtcaagccaactaaaatagaaagatgggctgtggttaacttctctgcacgctgtgatatacgagg

SEQ ID NO: 172020 - DNA, 271 bp, Glycine max
gtaacccagagctccttcgcctcatcgatagtttcaagtctcgttttgacaatggtgagggttagtgtgttgaatgatgctctgaagagcatgtacaacgccgagaagcgcgggaagcgccaggtcatgattaggccatcctccaaggtcatcataaaattcctattggtcatgcagaagcacggtattgatttgttatgtaatatgaatttggccttgaattgaatataataggaattgttttagtgttgttggcatgttttgttatggt

SEQ ID NO: 172021 - DNA, 266 bp, Glycine max
ggctaaataaagagagtgaagaagaagagagggtttgggttttggtgtttgttgttgaatcgtgaaaatgttcagaaaccagtacgacacggacgtgaccacatggagccctgcggggaggctgttccaggtggagtacgctatggaggcggtgaagcagggctcggcggcgatagggctccgatcgaagacccacgtggtcctcgcatgcgtcaacaaggccaactccgaactctcctcgcaccagaagaagatcttcaaggtcg

SEQ ID NO: 172022 - DNA, 271 bp, Glycine max
agattatcctaagtctttgggaatagtgctgcaatggcttcaagtcaggaggaggtgacccttttgggagctactggaagcccatttgtgtgcagggttcatattgccctcaagttgaagggagttcaatacaaatatgtcgaagaaaatttgaggaacaagagtgaactgcttctcaaatccaacccagttcacaagaaggttccagtgtttattcacaatgagaagcccatagcagagtctcttgtgattgttgaatacattgatgaga

SEQ ID NO: 172023 - DNA, 278 bp, Glycine max
agacattgtttggtttggttacttgctcgaatttcctcgaatcgcttaatttgtatttgattagttaaaccgcaacgcggaatctcttttctcgaactggctaactctcaggcaagtggttcggacgctgattccagcaacaagcggctggtgctcgcactgtatgacgccctaaactccggcgactccgacgccgtcgtcaagatcgtcgccgccgacctcgagtggtggttccatggtccgccctcacaccagtttttgatgcgcatgctcaccgg

SEQ ID NO: 172024 - DNA, 276 bp, Glycine max
caacaatgtcgaagcgaggtcgcggaggatcggcagggaacaagttccgcatgtcactgggtctgccggtggcggcgacggtgaactgcgccgacaacaccggcgcgaagaatctctacatcatatcagtgaaggggatcaagggaaggctgaaccggttgccgtcagcttgcgtgggtgacatggttatggccaccgtcaagaagggaaagcctgatctccgtaaaaaggtgctccccgctgtcatcgtccgtcagcgcaaccgtggcgccgaaa

SEQ ID NO: 172025 - DNA, 276 bp, Glycine max
gttctagatggcaaaaccaactactataaagatctgcacatggcttctagtcctaccattagctgaacttggcggctcgagctttctctctctctctcttaattcctgaaaagcaagtagctaaggaaaacaaaaacatcatcacagaaactcacaaaggaaaaacaaacaaacaaacaaaatgtcttctccaagcaagcggcgagaaatggacttgatgaaactgatgatgagtgactacaaggtggagatgattaatgatggaatgcaagagtt

SEQ ID NO: 172026 - DNA, 273 bp, Glycine max
tgcggctgaagatctcgattagccgaaaattgcaagaacggcttcaggctcttgcgatcaacaaacgcagcgttttgatctcagatttgagggggagaggtaccgtcgttgcataatggcaacaacagtgagaagtctgaagataaagacaagtacgtgcaaacgtatagtgaaggagctgcattcttatgagaaggaagttgagagagaagctgccaaaacagctgatatgaaggaaaaaggagccgatccctatgatctcaagcaacagga

SEQ ID NO: 172027 - DNA, 273 bp, Glycine max
caagaagatgccttctgcagaagcttcctccgaaaccatttgtgtcaccggcgctggtggcttcatcgcctcttggatggtcaaactcctcttggaaaaaggctacactgtccgaggaaccctcagaaatccagatgatcccaagaacgggcacttgaaggagtttgaaggagcctccgagaggttaactctgcataaggttgacctccttcatcttgactccgttagatcagttattaacggttgccatggtgtcattcacactgcttctcc

SEQ ID NO: 172028 - DNA, 272 bp, Glycine max
  unsure (1)..(272): unsure at all n locations
ttacattttttctctcggagcaaaggttttgaatttcagttatngccttttgctgtcttttgttttttattcttttgaaatttggatattttttcagggtattggagtggttaaacaaccgatggaaggttcaaagnnnnnnnnnnnnnnnnnctcctcctatgttggagagaagggcaaggcctcaaaaggatcaagctttgaactgcccaaggtgcaattcaacaaacaccaaattctgctactacaacaactatagcctctctcagcca

SEQ ID NO: 172029 - DNA, 270 bp, Glycine max
ctcgagccgtcagtctaaaccgctccaagaccgagttgcaatcgtcaccggctcgtcccgcagaatcggccgagaaatcgcgcttcacctcgcctcactcggcgcgcgactcgtcgtcaactacacctccaactcggcccaagccgactcagtcgcggcgcagatcaacgccggttccgccaccacgacaccgcgcgccgtcgtggtccaagccgacgtgtccgatccggctcaggtgaagtcgctcttcgactcggccgagcgcgcctt

SEQ ID NO: 172030 - DNA, 264 bp, Glycine max
caggcaagccccactcaaccaccacacctctcctcgttcacgctacccctttctgctcttcttctacctttcaagttttaaaagtataaagatggcagagacattcctatttacctcagagtcggtgaacgagggacaccctgacaagctctgcgaccaaatctccgatgctgtcctcgacgcttgcctcgagcaggacccagacagcaaagttgcctgcgaaacatgcatcaaaaccaacttggtcatggtcttcggagaaat

SEQ ID NO: 172031 - DNA, 265 bp, Glycine max
gtggtgctgcaccctatcacaagtcctccctcagaatttgagcattcggaaaaaggggatgccttgtatgccatggaactagctctttctttggagaagttgacaaatgagaaacttctgcatgttcacagtgtggcagatcgtaacaatgatcctcaactagcagacttcattgagagcgagttcttgtatgagcaggttaaatcaattaaaaagattgcagagtatgtgactcaactgagattagttggaaagggtcatggtg

SEQ ID NO: 172032 - DNA, 267 bp, Glycine max
agacactcctctgtagcattttcttgaagaaaggaaaggaaacggcatcagttcagagagatcagagatgtgtgggagagcacgttgtactctgagagcggatgatgtcccaagggcttgtcaccgcagcacttcccctactcgcactcttcatatcgaccggccagcgtataatgtgtcaccaggattcgacgtgccagtagttcgtagagatgacgcgtctggtcgtgaaggctatgttactcaatgcatgatatggggtttaat

SEQ ID NO: 172033 - DNA, 266 bp, Glycine max
atggcttctagttcagaatctcaatctcagtctaaaccgctccaagaccgagttgcaatcgtcaccggctcgtcccgcggaatcggccgagaaatcgcgcttcacctcgcctcactcggcgcgcgactcgtcgtcaactacacctccaactcggcccaagccgactcagtcgcggcgcagatcaacgccggttccgccaccacgacaccgcgcgccgtcgtggtccaagccgacgtgtccgatccggctcaggtgaagtcgctctt

SEQ ID NO: 172034 - DNA, 280 bp, Glycine max
tattcattttaatcctaattttgcacttcttgatcattcgatttttctcctcaagatgcagatattcgtaaaaactttgaccggcaagaccatcacccttgaggtggaatcctccgacaccattgacaacgtaaaagctaagattcaagacaaggaagggatcccacctgaccagcagagacttatctttgcgggtaaacaacttgaggatggtcgcacccttgccgattacaacatccaaaaggaatcaaccctccatctcgtgcttcgcctcaggggt

SEQ ID NO: 172035 - DNA, 278 bp, Glycine max
tacactaagttatcctcataaatacactctaattaggtggcaagataagtgtctaaccttagtaacattgccacatattgtgttcattttggaattgtgccactaaaattctattcaattcatctatggctgcctcttcttatgctatgcaatcaatcctggcaaaccctttgatccgcatttccagcgggtctagggtgaaccaatttggcgttcctgctttgcacatgagaaggaatgttggcctgagagttaggtccatggctaaggaagaacaa

SEQ ID NO: 172036 - DNA, 276 bp, Glycine max
aaagatcttcctggaaagaggattttcttttccaataagccttatttacccggggatacacctgctggacttagattattgagggacaaagagctgagaaatcttagaggtgatggcaaaggagttagaaacttatctgacagaatatatgactatgatatatacaatgatttggggaatccagataaaggaattgaacttgccagaccaaatcttggaggatcagatatgtatccatacccaagacggtgtcgtactggccgcgaaccaagtgat

SEQ ID NO: 172037 - DNA, 270 bp, Glycine max
tacatatcttcataccagcccccaaccaggtttgggtcgcattgctggaattttgtctcttcaagtggacgatggtcaaactcaactccaagctcttcaacgtgttggatccgaattggctatgcatgtagtcgcagcaaagccattgtttttaactaaggaacttgtaccttcagatgccttagaaaatgagcgcgaaattcttaaatctcaggcagaagcctctggtaagcctaagatggccatagagaaaatggttgaaggacgtct

SEQ ID NO: 172038 - DNA, 270 bp, Glycine max
ggggaatcttgccataagaggaagggagccactgtttactccttgtactccaaagggctgtattgagttattgatcagatcaggagtcgagattatgggaaaaaaagccgtagtgattggaacaagtaatattgtgggtttgccagcatccttgttattgcagagacaccatgcaacagtcactgtcatacatgccttcacacaaaaccctgaacagatcacctcagaagctgatattgtagtttcagctgctggagtgcctaatttggt

SEQ ID NO: 172039 - DNA, 267 bp, Glycine max
atcggccagcaccaacagcatcggcggcgacagtcactctccgacaacaacacttccgcggcgaaaaatgtctctggtggcgaacgaggatttccagcacattctgcgtgtgctgaacaccaacgtggatgggaagcagaagataatgttcgctatgacctccatcaagggtattggaaggagattcgccaacatcgcttgcaagaaggccgatgttgacatgaacaaaagggctggtgagttgagtgctgcagagttggatagtgt

SEQ ID NO: 172040 - DNA, 257 bp, Glycine max
agggtttctctcgctaaccaagaaggaactagggttttacagaatacaagctctctctctctctcgtcggttttcgtcaatcaaatccaatccaatatcaaatatgagtcgtcatcccgaggttaagtgggctcagaggcttgacaaggtctatatcacggtgcaattggctgattcaaaaaatgcaaaagtggatcttacgccagatggtatttttaccttctccggtagtgctggtgctgaagaccatcagtgtg

SEQ ID NO: 172041 - DNA, 264 bp, Glycine max
cactctcttcgacctcgcatcgcaccttcaacttaacctattccacttgtaatcgtaaacgctttgctagaagaagagacaaagtgtgtctgtgtgtgtgagagagagagcaatggctggctcgtgggcacgccgttctctgattgttctagccatcatttccttcggatgtctatttgcgatttccattgctaaggaggaagccaccaagttagggacggtcatcggcattgatcttggaacaacctattcatgtgtcggtgt

SEQ ID NO: 172042 - DNA, 270 bp, Glycine max
gccaaacccaaacacaacaacacaaagaaaaaaagagcacaaacagaccaattccaacggttgaattttttggctgaagacaccccaccgacgttagtcaaataaaacatgtcttgctccgtcgcggtttccaattcgccggtgttctctccttcttcttccctcttctgctcgaagccctccatcatctcttcttcgccggaatccctctcgctctctctctcgcatctcaaaccttccaactcttctacgacgtcgtcttgttcttca

SEQ ID NO: 172043 - DNA, 268 bp, Glycine max
ggaggagcaggaggcatcaccgttaccaaacatggtgaaagggcgacaaggagagcgtgttagactttacgtcaggggttcaatacttggatacaagaggtccaagtcaaatcaatacccaaacacctcattaatccagattgagaatgtaaacactaaggaagaagttgcgtggtactgtgggaagcgtatggcttacatttacaaagccaaggtaaagaaggacggaagccactatcgctgcatttggggtaaggtcaccaggcct

SEQ ID NO: 172044 - DNA, 269 bp, Glycine max
cctaactacgcacgcattcgtgagaaaactcaatattcgtcgctcatggcactctcttctcgtctcttttccaaatccaaattgatctatggcagtcaaatacttctacaaaaggagcatgctattccagttcgtcactttgctaaagagtctgcccctcctgcccttaagggagacgagatgctgaagaacatttttgtggaggtgaagaacaaatttgagaccgccataggaatattaaagaaggagaaaatcaccattgacccaga

SEQ ID NO: 172045 - DNA, 266 bp, Glycine max
gagagatcgaaaatggcgttggctttcgacgagttcggaaggccgttcataatcctgaaggagcaggagcagaagagcagactccgaggattggacgctcagaaagccaacatctccgccggcaaagccgtggctcgcatcctccgaacctccctcggccccaaaggcatggacaagatgctccagagccccgacggcgacgtcaccatcacgaacgatggagccacgatccttgaccagatggacgtggacaaccaaatcgcgaa

SEQ ID NO: 172046 - DNA, 261 bp, Glycine max
attttggcatcgaggttgaatctcatcggagagagaaaaaccataaccatgtctggaagaagaaagggaggcaagggtctcggaaagggaggagcgaaacgacaccgtaaggttctgagggataacattcagggcataacgaagcccgcaattcgccgtctcgcgagacgtggcggcgtgaagcgtatcagtggtctcatctacgaagaaacccgcggtgttctcaagatcttcctcgagaacgtcattcgcgacgctgtc

SEQ ID NO: 172047 - DNA, 259 bp, Glycine max
gaaatcggccacattaaaattaccttctggggaggtccgtttgatatccaaaaactgctcggcaacagtcggacaagtgggaaatgttggagtaaaccagaaaaatttaggtagagccggatctaaatgttggctaggtaagcgtcctgtagtaagaggagtagttatgaaccccgtagaccatccgcatgggggtggtgaagggagggccccaattggaaaaaaaaaacccgcaactccttggggttttcctgcactt

SEQ ID NO: 172048 - DNA, 262 bp, Glycine max
tgcggtaggctcatccgagaccggaagcagcaatggggatcgatctcaaggccggaggtaaaagcaagaaaaaccagaagaacagcacccaagtccaatgatatctatcttaagctcttggtcaagctttatcgcttccttgttcggagaactggcagcaaattcaatgccgttatactcaagagattgttcatgagcaaggttaacaagcccccattgtctttgtcaaggttgattaagtataccaaggggaaggaagata

SEQ ID NO: 172049 - DNA, 260 bp, Glycine max
tgctacctaaaccctagtctccatacatcaacttgggaggttaaagagacggcaacgttgtgctgtccgccttgaccgagccagagcttcgtcttggccctcgattttgccctgtaaaactaatcccagtaacaacagaaataatcaatggcaccgaaacagaccaaggctgagaagaagatcgcttacgatgcgaactgtgcgacctaatggaggagtacggccaaatcctcgttgtaaactccgacaacgtgggatcg

SEQ ID NO: 172050 - DNA, 280 bp, Glycine max
  unsure (1)..(280): unsure at all n locations
cggcacacacagacacacacatttcgtcggaatgggaagggtgattcgcgcacncgtaagggtgcggggtcggtgttcaagtcccacacccaccaccgcaagggtccggcgaggttccgcagcctcgacttcggcgagcgcaacggctacctcaaaggggtcgtcaccgatatcatccacgaccctggtcgcggtgctcctctagccaaggtggcgttccgcaacccctccgctacaagaagcagatggagctcttcgtcgccgccgagggcctctacac

SEQ ID NO: 172051 - DNA, 274 bp, Glycine max
ctttccattctcttcaacctaacgcagcatcgctatactcttcattccatggctttgcccaatcagcaaaccgtggattaccctagtttcaaactcgttatcgtcggtgatggtggcacaggaaagacaacctttgtgaaaaggcatctcaccggagaattcgagaagaaatatgagccaaccatcggtgtggaggttcacccattggattttttcacaaactgtggaaagattcgattctactgctgggatactgctggacaggagaattttg

SEQ ID NO: 172052 - DNA, 271 bp, Glycine max
gcgagatcttcattcgccgattttaaaagatgagtaagcttcagagtgatgctttgcgtgaagccatttcaggaatcatggccgattccaaggagaagaatcgcaaatttgtggagaccatcgaactccaaatcgggttgaaaaactacgatccacagaaggacaagcgtttcagtggctctgtcaagctgccccacatccctcgccccaagatgaaaatttcatgcttggtgatgctcagcatgttgaagaggcggagaagataggactg

SEQ ID NO: 172053 - DNA, 270 bp, Glycine max
ctcgagccgctcattcgttcactgtcactttacccaatcctaacactttcttctctctgttttccttcttcctcgcatcaatggagttggacggcgttctcctcggcatgtgcaaccctctcctcgacatctctgccgtcgtcgacgacgctttcttgcaaaaatacggtatcaagttgaacgatgcgattctcgccgaggataaacacaaacctatgtatgaagaattggctaacaatcctaatgtggagtacattgctggaggtgcta

SEQ ID NO: 172054 - DNA, 265 bp, Glycine max
gttgttctgtttttttttgttattgttaatggacctttgccatgtcaggtgcgcttgcatggcgggtccgaaaagcgctaataaaaattaatattgttttttgttttggggagggaaggtttcgggggtgtttttttttctttttggccccgattctcttctctctctatggtgttgttgtgttttttcctttcctttcttttcctttctctcttctatgtcctgtgaatttttctatactctagttcgcgtcgtaagggctcaa

SEQ ID NO: 172055 - DNA, 267 bp, Glycine max
cacaatgtgaaggatttggaactgctcatgatgcacaacaggacttactgtgctgagattgcccacaatatatccacaagaaagagaaaagatatagtcgagagagccgcgcagcttgatgttgttgtgacaaataaaacggccagattacgtagccaggaggatgaatagtctaaatgactgaaatttacttatttgtagtgaacctggtgacactagtgtgacattgtattttgatcatcttttattctcgtataaattgtagga

SEQ ID NO: 172056 - DNA, 269 bp, Glycine max
ccaaaacaaaagaaaacgaaaatccccaatcctgcgttgtgttgcgacttgcgagccatgagaggggtcgtgaaagcgtttgcggggaatctgttgttccatggaagaaagactcagactcagtgcattcgctcctacagtctgatcccaatggtgatagagcactcttcccgaggtgagagggcatacgacatcttctcgcgccttctgaaggagcgcatatctgcatcaacggacccatctccgaggactatgcccacgtcgtcgtt

SEQ ID NO: 172057 - DNA, 272 bp, Glycine max
tgcagcagggagctctgccgcctccaacaaaacagagttcagaacacaaaccctcgaaccgaacgtttttgagggttgatagagcacgatggttcagtacaattttaagaagattaccgtggtgccaaatgggaaggatgtggtcgacattatcctctctcgcacccagcgtcagacaccaaccgttgtgcacaaaggatatgcgatttcacggctgcgccaatttacatgcgcaaagtgaagtatactcagcagaattttcacgacaagct

SEQ ID NO: 172058 - DNA, 273 bp, Glycine max
ctcaccttgttctttttcttcttcttcttcttcactgcaatctctctctctctctctctcttcgctttccagaaaatggtgaaccctagatgcttcctcgacatcaccatcggcggcgagttagaaggcaggatcgtcgtcgagctcttccacgacgttgttcccaaaaccgccgagaatttccgcgccctctgcaccggcgaaaagggcatcggccccaacacggcgtccccctccactacaagggcatgtgtctccaccgcgtgatcaaag

SEQ ID NO: 172059 - DNA, 268 bp, Glycine max
gggttttctgctgggaaatctatccttgtgcttggaggtgctggtggagttggaacccatgttattcagcttgccaagcatgtttatggagcatccaaggtagcagctactgctagcactaggaaactggaactattaaggaatttgggagctgactggcctattgattatacaaaggagaattttgaagacctgtctgaaaagtttgatgtggtgtatatacagtagggcaaactgaacaggcattcaaggttttgaaagaaggagg

SEQ ID NO: 172060 - DNA, 268 bp, Glycine max
ctctctttctctagtcctgttatttctcagcgcgtaaagcatggctttgttggtggagaaaaccacgagtggtcgcgagtacaaggtcaaggacctttcccaggccgacttcggccgcctcgagatcgagctggccgaggtcgagatgcccggcctcatggcctgtcggaccgagttcggcccctcccagcccttcaagggggcccgcatcaccggctcctccacatgaccatccagaccgccgttctcattgagaccctcaccgccc

SEQ ID NO: 172061 - DNA, 265 bp, Glycine max
gtcattagcacttcttcttttcacactgccgctgcaacaatggcttcagagaagaaactttcgaacccaatgagggagataaaagtgcagaagctcgttctcaatatctctgttggcgagagtggagatcgtctcaccagagccgccaaggtgttggaacaacttagtggccaaaccccagtgttttccaaagcaaggtacactgttcgttcctttggattagaagaaatgagaagattgcatgctatgtcactgtcagaggtga

SEQ ID NO: 172062 - DNA, 267 bp, Glycine max
atcttcttctcttttcacgtcattatcctaaacttgcagattttcacatcccaagcaacatgaaggggaggttcatgtttctgtcggtgctcctttgtgccacctttcatgtctccttctccattactgacggcttagtagcaaacggcaacttcgagctgggtccgaagccctccgccctgaaaggaactgtggtgattggtggcagccactcgatccagaatgggagatctctggcttcgtggagtacataaagtccggccagaa

SEQ ID NO: 172063 - DNA, 216 bp, Glycine max
ctcggcagaagaaggctgtcaagattttcccaaggcctactgctggacctctcaggccaattgttcatggccagactctgaaatacaacatgaaagtcagatctgggagaggattttctctcgaagagttgaaggctgcgggaattcccaagaaacttggtccaatatggattcgtgacacggagaaatcgttcttgaatccagcatgtgaagtca

SEQ ID NO: 172064 - DNA, 176 bp, Glycine max
cgtcgttatcttcttcttttgttgtttgtgtgtctgtattttctctcacctgaaaatgtcttgctgcggtggtaactgtggttgcggaacgcctgcaagtgcggcaacggctgcggaggctgcaagatgtacccagacttgagctacaccgagtcaaccaccaccgagaccttggt

SEQ ID NO: 172065 - DNA, 178 bp, Glycine max
  unsure (1)..(178): unsure at all n locations
aaagactgctacctgtttaagattagtgaagaagtggtggtagatgccactgataaagggaatatagctcggctgattaatcatncttgtatgccaaattggctatgcaaggatcatgagtgtcggtgatgaggagacccggattgtactcatcgctaagactaacgtggctgccggt

SEQ ID NO: 172066 - DNA, 265 bp, Glycine max
gttagctttgaaaaaggctgttgcaaatcagcccgtcagtgtagctattgaaggagggggcagggaatttcaattatatgtatctggtgtattcactgggagatgtggcacagcactagatcatggtgtcgtggctgttgggtatggtacagctaatggtcatgattattggatcgtaaggaattcatggggtcctagctggggagaagatggctaatcaggttagaaagaaatcttgctaacagcagatcaggcaagtgtggat

SEQ ID NO: 172067 - DNA, 175 bp, Glycine max
tatacttgttccttttgaaggttagaagtgctacaatacaaacaatggcagctactcaggaagatgtgaagcttttgggtattgtgggaagcccatgtgtgtgcagggtccagattgcccttaagttgaagggagttgaatacaaatttttggaagctcatttgggcaacaagag

SEQ ID NO: 172068 - DNA, 255 bp, Glycine max
aaaaatttctagagcgagaaagtgagaggagagagaaagtagctgatcctccatggcctccaccaaggaacgcgaaaactttgtctacaccgccaagctcgccgaacaagccgaacgctatgaagaaatggtggaagcaatgaagaatgtggcgaactgaacgtggaattgacggtcgaggagcggaaccttctgtcggtagggtacaagaacgggtgggtgctcgtagggcttcgtggaggattctatcgtcga

SEQ ID NO: 172069 - DNA, 262 bp, Glycine max
gcaagagcagatggtggctgggacactgtgagaattgatcaggctcatccagttggtgtcacttcggtgtcatgggcgccatccatggcacccggagcccttgtcggtgcagggttgcttgatccagtacagaagctgtgctctggtggttgtgataatactgtgaaggtatggaagctaaacaatggactctggaagatggactgctatccctctcttcagatgcacacagattgggttcgagatgttgcttgggcaccca

SEQ ID NO: 172070 - DNA, 175 bp, Glycine max
gggtagtgagggtaccggctataagcttgaagatggctgatattccaccagatgattattcttggagaaagtatggacagaaaccaattaaaggatcacctcatccaaggggttactacaagtgcagtagtgtgagagggtgtccagcgcgaaaacatgtggaacgacctttgga

SEQ ID NO: 172071 - DNA, 250 bp, Glycine max
gaagcccacgaagctatacagaggggttcgacagaggcactgggggaagtgggtggctgagattagactcccgaagaaccggaccaggctatggctgggaaccttcgacaccgccgaggaagccgctctggcgtacgacaaggccgcgtacaagctccgaggtgacttcgccaggctcaacttccccaacctccgacaccagggttcctccgtcgtggtgacttcggggagtataagcctcttcattccg

SEQ ID NO: 172072 - DNA, 264 bp, Glycine max
atcatagatggttacttggatcttgaaatggctgagttcactctgcatgaagttctggttacctcacttagtcaggtcatgacaaaaagtaatggaaagagtatccgaatagtcaatgatgttgcagagcagattgtgatggaaactttatatggtgatagtcttaggcttcagcaggtattggctgactttttacttatttccatacaatttcacccaaatggaggtcaggttgttgtagcaggcactctaaccaaagaacag

SEQ ID NO: 172073 - DNA, 261 bp, Glycine max
agcttctctcggctcggctcggcgtggctacgggaaggcacttagccgaactctgcagagaagagtatcccacatgggctaggattgttctgtggttgatgactgagattgctcttattggcgctgacatacaagaggttattgggagcgctattgctatcaggattcttagtaacggcgtcgttccactctgggctggtgtcgtcattacagcgttgattgttttatctttctctttcttgagaactacggtgtgaggaa

SEQ ID NO: 172074 - DNA, 268 bp, Glycine max
atgaagggccacgcactgctgattcacttgctgagtttgtaaatacggaaggaggaacaaatgtgaagattgctacagctccttccaatgtagtggtgcttacatctgaaaattttaatgaggttgtcttagatgaaaccaaagatgtcttggttgagttttatgcaccctggtgtggacattgcaaaagtcttgctcctacttacgagaaagttgccacgcatttaaattggaggacgatgtagtaattgcaaatctggatgctgat

SEQ ID NO: 172075 - DNA, 260 bp, Glycine max
ggcatccatcggcagttagagacagagagagagagaaacaaaaccctaattggtgagtggcgaaaatggcgcaccggcggcggcagcagcagcaacaggagcagcagtaatcgagcaagtgcagtgcttcgggcggaagaagacagcggtggcagtgacctactgcaagcgtggtcgaggcctcatcaagatcaatggctgcccgatcgagctggtggaccggagatcctccgtttcaaggccttcgagcaaatcctcct

SEQ ID NO: 172076 - DNA, 268 bp, Glycine max
gtttgcgagatagaagcgtaagcagcggctaccctaacctcgtcttcctctctactaatttcagctatggccgacgaagctgtggttgttccagatcccacccagatcgatgtcaagctctttaaccgctggagcttcgaggatattgaggttactgacatttcactggctgattacattggagttgcggcatccaagcacgccacatatgttcctcaaccgccggaaggtactccgtgaagcggttcaggaaggcgcagtgccccat

SEQ ID NO: 172077 - DNA, 259 bp, Glycine max
cgcgggtgaggtagaacccttccactgtggtgactctgcgatgggtgcctacaagtatgtttcagagctatggcgcaagaagcagtctgatgtcatgcgcttcttgcagcgggtgaggtgctgggagtataggcagcaaccttccattgttcgtttgacaaggtctacccgccctgacaaggctcgtcgcttgggcttcaaggctaagcagggctagtgatttaccgtgctcgtgttaggaggggtggccgaaagagac

SEQ ID NO: 172078 - DNA, 263 bp, Glycine max
gcttggttgcagcttcagcagcagcggcaagcaactccatccgcaatgggaatcgatttgaaggcaggaggtaagtccaagaagaccaaacgtacagcccccaaatccaatgatatttacctcaagctcctcgtcaagctgtaccgttttcttgttcggaggactggtagtaacttcaatgccgtcatcctcaaacgccttttcatgagcaaggtcacaagcccccgctatccctctctagattgattcgttacaccaaggga

SEQ ID NO: 172079 - DNA, 263 bp, Glycine max
ctctaattacactttctatctcattttcgttcggttcaaacactctcatggcatcagacaagaagattaggatcggcatcaacggatttggaaggattggccgtttggtggccagggttgctcttcagaggaatgacgttgaacttgttgctgtcaacgatcctttcatcaccactgattacatgacatacatgttcaagtacgacaccgttcatggcagtggaagcattttgatgtgaagctgaaggactctaagacccttc

SEQ ID NO: 172080 - DNA, 261 bp, Glycine max
caacttacggctaaattctcaaagatttaaactttgtctcagagtttccaaattcacccaaccccagagagaaaatgtctctaatcccaaatttcttcggtggcagaaggagcaacgttttcgatcctttttccctcgacgtctgggaccccttcaaggattttcctttcccaaacactctttcttcagcttcctttcctgaattttctcgggaaaattctgcattcgtgagcactcgtgtggattggaaggagaccccag

SEQ ID NO: 172081 - DNA, 128 bp, Glycine max
accatttatcaactcactcatcaatctcgtttgttctcactaactattacttcatcatgtcgtcgagcacagttggtcaagtcatcaaatgcaaagctgcggtttcatgggaggcagggaagccactt

SEQ ID NO: 172082 - DNA, 261 bp, Glycine max
gtcttcatcgtcgaaggcgatgtcaacgacgcgaaactcttggcgaactcttcgatgtggttgctttcactcacgtgatgcacctcgcggcgcaggctggggttcgctacgccatggagaatccccactcgtacgtccacagcaacatcgcgggcctcgtcacgcttctcgaggcctgcaaaaccgcgaaccctcagcccgctatcgtctgggcctgtccagctccgtctaggggctcaacgagaaggctcctttttccga

SEQ ID NO: 172083 - DNA, 261 bp, Glycine max
gtttgcgagatagaagcgtaacacgcggctaccctaacctcgtcttcctctctactaatttcagctatggccgacgaagctgtggttgttccagatcccacccagatcgatgtcaagctctttaaccgctggagcttcgaggatattgaggttactgacatttcactggctgattacattggagttgcggcatccaagcacgccacatatgttctcacaccgccggaaggtactccgtgaagcggttcaggaaggcgcagt

SEQ ID NO: 172084 - DNA, 259 bp, Glycine max
  unsure (1)..(259): unsure at all n locations
ctccccatggttactttgcccaagataatgtcttggggtacctgancactggtggacaggttgtttacatcttggatcaagttcgtgccttggagaatgagatgctcaaccgcatcaagnaacaaggccttgatatcacccctcgtaatctcattattactcgtcttctccctgatgcagtaggaactacctgtggccaacgtctagagaggnatatgatactgaatattgngacattctccgagttccttcagaaccg

SEQ ID NO: 172085 - DNA, 256 bp, Glycine max
agcaacctcatcaacgaagcaatggcatgtgatgctaagcttgttatgcctatcatcattcaaagttgcagcgaggcatttcatggcctcaagtccttggtggatgtcggtgggggcaacggcaccgccatgcgcatcctggctaaggcttgcccttccattcgacccatcaattttgatcttcctcatgtcattgccctctgcgatggcgtggcgatggcgtcaaacacgtgtcaggcaaaatgttccaaagtgt

SEQ ID NO: 172086 - DNA, 254 bp, Glycine max
actaattattgtgcttattattattgttgagaaagaaaagaatggcaaagttaataaaattctttgagttgaacacaggggccaagattccttctgttgggttaggcacttggcaagctgagcctggtgttgtagccaaagctgtcaccacagccattctggttggatacaggcatattgattgtgctcaagcgtataacaatcaagcaagattggttctgctcttaagaagctttttgatgatggtgtggtga

SEQ ID NO: 172087 - DNA, 257 bp, Glycine max
ctacgacgcacgcagcagcatcagcttctactcgtgtaatctctgcgtgggctacaatggattccggtgtccaaggttgcatcttagccactttaattctccacgacgaggaaatcccagtcaccgctgagaagatcaacgctctgttgaaggcttctaatgtctccgccgagtcttactggcgcagcctcttcgccaagctcgcccagataagaacatcgaagacctcattttgaacgccggcggtggtggggccg

SEQ ID NO: 172088 - DNA, 258 bp, Glycine max
gcagtcgtcagaaagactccataacccaaaaatgcctttcaagaggtacgttgagattggaagggttgctcagatcaactatggcaaagagtacgggcggctcgtgatcattgtcgatgtcattgaccagaatagggctcttgttgatgctcccgacatggtgaggtcccaagtgaacttcaagaggctctcgctcactgacatcaagatgatattaagaggattcccaagaagaaggatctcattcaagccatggag

SEQ ID NO: 172089 - DNA, 259 bp, Glycine max
gccctttgaaaatcgttcaaaaccaatctatctatctatttggtataagcatggagctttgttggcaaaaatccatccatggctcttaaagaagcttggaggattttgtgtgagagggttctcacccttcacactccacctcctacagtttgcttatgctttagccattggtttctctaatcaatcaccacaaaagggtatacatggaggacataattctctgagtggcatgaagcagagaagctatggccacatctta

SEQ ID NO: 172090 - DNA, 174 bp, Glycine max
cgatcttcgagtacaacggaagcgccgtggtggctatggtcggcaagaactgcttcgccattgccagcgaccgaatgctcggcgttcagctccaaactatagccacggattttcaacgcatttccaagattcacgacaagctcttcatcgctctctctggcctcgccaccgatg

SEQ ID NO: 172091 - DNA, 263 bp, Glycine max
ctccgcagcagccacacttcttcgccgtttcagctgaagagccatccgcaggtaagcaatggttaagcataataatgttatccccaatgggcacttccggaaacactggcaaaactatgtgaagacttggtttaatcaaccagcccgaaagaccagaagacggttggctcggcagaagaaggctgtcaagattttccccaggcctactgctggatctctcaggcctattgttcatggccagactctgaaatacaacatgaaag

SEQ ID NO: 172092 - DNA, 241 bp, Glycine max
cttcatccttctctgttctcctagaacttgattacttgaacattccctatgacagatgaggtggttcttctggatttctggccaagtccatttgggatgagggtcaggattgcacttgctgaaaagggtatcgaatatgagtacaaagaagaggacttgaggaacaagagtcctcttctcttacaaatgaaccggttcacaagaagattccggttctcatccacaatggcaaacccatttc

SEQ ID NO: 172093 - DNA, 257 bp, Glycine max
aacacaacccatggccaccacctccgcattcctcctccttcacctcctcctgctgctccacctcgccatcgccgctcacggcatcggcatcaactacggcacgctcggcgacaaccttccaccgcccgcggcggtggcgaacttcctgaagacgaagacgaccatcgaccgcgtgaagatctacgacgtgaacccggacatcctgcgggcttcgccggcagcggcatctccgtgacggtgaccgcccccaacggcga

SEQ ID NO: 172094 - DNA, 122 bp, Glycine max
agaaactcagagacccgaaggcagatttcaagatgaagttcaacattgcgaatcccaccaccggttgtcagaagaagctggagatcgatgatgacctgaagctgcgagcattttgggacaag

SEQ ID NO: 172095 - DNA, 250 bp, Glycine max
gtttccgatatgaagagcatgaaatcttctgcgaggaaaagggtgtcaattatcaggaactcaaatcctggccaagatattgctgaacttcaacctgcatccccaggaagccctcttttggttcctaggcaaaagtattgtgaatcattgcacaaacccatcaggagaaaaacaagcacagtaatggttggtaacgtggctattggtagcgagcatcctataagttttcagaccatgtactactactgct

SEQ ID NO: 172096 - DNA, 132 bp, Glycine max
aatgttttgggaacacatccaacatttgaagaactttgatgtttaatgggtctgtaataatgtcccttgaaaataagttcggtttgtgttgaactcaattgtgtcccattaataatagtactctaatatccc

SEQ ID NO: 172097 - DNA, 97 bp, Glycine max
aacgaatcgaaaaaagaaagatcatggcgatggcaaacttggctcgacggaagggttacgccgtcgttttgtcgtcgaggtcgtcgctttgtctgac

SEQ ID NO: 172098 - DNA, 144 bp, Glycine max
gtccgatgtgggatctttggttaccaagacagcctctacactcacaccatgcgccaattctacagagagtgcaaaatcagtggcacagtggacttcatcttcggtgatgccacagcaattttccaaaactgccacatctcagcc

SEQ ID NO: 172099 - DNA, 272 bp, Glycine max
attccattaaaagccaccatggccgtatctccaattttgttgttgttggctatcttctctctcatttatggcaatggtattcttcccattgaagctacccaccatgtttacagaaatcttcagactctatcttctgattcctctgatcaaacctaaaaaacggctaacaatttccaacttcccaaaaattggataaatgaccctaatggaccaatgaggtacaaaggccttaatcacttcttctaccaatacgatccaaaagtgctgtttgg

SEQ ID NO: 172100 - DNA, 290 bp, Glycine max
tagtgaggtggggagaggaaaagaggcgcacgtttatgctgcgtgtgcaagaaatcaagagcttcggtgaagaggccgaaaaccctagagcagatatgcagggagtgcttctacgatgcttttgagtctgagatccatcaggtaattcttgagaatcactcttcagccctggtgaacgcgtcgcaatcggcgcttctggcggaaaaggattccaccgtccttgcctacgtcctctccaagctcaaccgcctccacaattacggcctccatctcttcctgctctccgtcga

SEQ ID NO: 172101 - DNA, 286 bp, Glycine max
ccaagccctatacaaccaaaccctaacacacacccatttgattcagtttccatggctagcctcaaggttgcatttttggctgcagtgctctgcatggttgtggtgagtgcacccatggcacatgcagctatcacgtgcgggcaggtgacgagtgcctggccaattgcatcggttacctccagaagggaggaacgccgtcgtcgggatgctgcaacggagtgaagagcctcaatgccgccgccaagaccaccgccgaccgccagacggcgtgcaactgcctcaagtc

SEQ ID NO: 172102 - DNA, 221 bp, Glycine max
taaggtttttggtgctgcatggaaatccgttttcacagctgatgagaaagagcgtgagaagaatgttgaggaagcaattgaggctctgcagtttcttgagaatgagataaaggacaagaagttctttggaggagaggagattgggttggtagatattgctgctgtctacatagcattttgggtccctatggttcaagaaattgcagggttggagttattca

SEQ ID NO: 172103 - DNA, 98 bp, Glycine max
ctttcattctttgcttcagaaaattaactagctaggatggtcagtgttgaagagatccgtaatgcacaacgtgcagaggggcctgccactgtcatggc

SEQ ID NO: 172104 - DNA, 127 bp, Glycine max
caacaaggcatggaagttccctacgcttgtgactcaccaagaatctctcgagtcaaaggttaatgagaccaaggccatggtgaagttccagcttaagaaggtgctttgcatgggagtagccgtgggg

SEQ ID NO: 172105 - DNA, 88 bp, Glycine max
ggcagcagcaccagcagctaccttcgctattggaaccaccggttccctcggccaaagaggaagctcgcttcctcaatcaaagtccttt

SEQ ID NO: 172106 - DNA, 277 bp, Glycine max
gctgtctgctgttagatctgtacccgcctagccattgatttggaaaagtccaacttcaaggatgagtaagcttcagagtgatgctctaagagaagctatctcaggaatcatggctgattccaaggaaaagaacaggaaatttgtgggaccattgaactccaaattgggttgaaaaattatgatccccagaaggacaagcgtttcagtggctctgttaagttgcctcatattcctcgccccaagatgaagatttgtatgcttggagatgcccagcacg

SEQ ID NO: 172107 - DNA, 278 bp, Glycine max
tgaaaccaattacaaattacactctttgcctcgcaccttcaacttaaccttttctactcataatcttaacaacttgctagaagaagataaagaaagagaaaaagtgtgtgtgtgtgagagagagcaatggctggctcgtgggcacgcgttctctgattgttctggctatcatttccttcggatgtttatttgcaatttccattgctaaggaggaagccacaaaattggggacggtcatcgggattgatcttggaacgacctattcatgtgttggtgtt

SEQ ID NO: 172108 - DNA, 272 bp, Glycine max
caacattctcataatcaaataccatttcattcattcttacatattgcttaattttatctgaattttgaaacaccttctgaatggctttttcaagagttgcattgttaatatgcacggtaattgggtattttgtgattgcctctgcggcaatttttaccaagattttgatatcacttggggagatgggcgtgctaagatactcaacaatggcgagcttctcactctgtctcttgacaaagcctctggctcgggtttccaatccagaacgaata

SEQ ID NO: 172109 - DNA, 273 bp, Glycine max
ctcgcttgtgctgccttcgtttgcgtttttatcacagaggaattaacatatatatagcaagcatggcagtcacactctacgaccttagctcttcctctgggttgaagaaacttgatgagtaccttctcccacgcagttacatcaccggtaccaagctacaaaggatgatcttactgtttatgcagcttgccaactgctccatcagatgaatatggaaatgtttccaggtggtacaagcacattgatgctttgttgagaatctctggtgttact

SEQ ID NO: 172110 - DNA, 273 bp, Glycine max
tttcttagtcagctctgatatttaacatggcctcatcatctccctctccctctccctctccaatgttcacagtgcgaaggttgcaacccgagttggtggctcctgccatccccactccccatgaacttaaaccattatccgacatgatgatcaagaaggtcttcgtttccacattcctatgatacaagtttatcgtaaccaaccatcaatggcagagaaagacccagttcaagtgattcggaaagcactggcaaaaacacttgtgttctatta

SEQ ID NO: 172111 - DNA, 278 bp, Glycine max
agagacaactcttcggtctgcctccacgatacagagattctgttcgggccattactccggggttgccccttttcctttacaactattctactcaccaacttcatggaatctttgaggctgcaagttttggagggacaaatattgtccatcagcttgggaggataagaagtgccctggtgaatctcgtttccccgctcaggtacgagtgataactaggaaaacttgtgaaccactggaggaagattccttcaggccaatccttcaccactatgatggtc

SEQ ID NO: 172112 - DNA, 246 bp, Glycine max
  unsure (1)..(246): unsure at all n locations
cgcgggtgaggtagaacccttccacggtggtgactgcgcgatgggtgcctacaagtatgtttcagagctatggcgcaagaagcagtctgatgtcatgcgcttcttgcagcgggtgaggtgctgggagtataggcagcaaccttcattgttcgcttgacaaggtcgacccgccctgacaaggctcgtcgcttgggcttcagggctaagcagggctatgtgatataccgtgttcgtgttangaggggt

SEQ ID NO: 172113 - DNA, 276 bp, Glycine max
tggaaagattggttttggcctgtggaggggaggcagtaaactctgtagatgatttgactcctgaatgtctgggttgggcaggattggtatatgaacatgtccttggtgaagagaaatatacattcgtagaaaatgttaaagaatcttttcctgcacaatcttgattaaaggtcctaatgaccataccatagctcagataaagatgctgttcgtgatggtttgagggctgttaagaatacccttgaagatgaatctgttgtcttaggtgctggtgca

SEQ ID NO: 172114 - DNA, 259 bp, Glycine max
ccctagcccctcttctcttcattcttcactcaggaaacaagcataatggccttctgtaataaggttggaaatgtcttgaggcagggtgctgctcgcagcacacaagcacctgtttcatccatgcttaattacattcgctgcatgccttcaagcaagctgtttatttggaggcctttcatatggaagttgacgatcagtctcttaaggatgccatttctggctttggagatgtggttggtgccaaagttataactggcag

SEQ ID NO: 172115 - DNA, 94 bp, Glycine max
ctggcctgcgcggggctgaaggccgacgcacgcgtgctcataaacagggcacgtgtggtgtgccagagtcacaggctcaccgtggaggatcccg

SEQ ID NO: 172116 - DNA, 71 bp, Glycine max
caagggaccaactctccttgaggctcttgaccaaatcaatgagcccaagaggccctcagacaagccactca

SEQ ID NO: 172117 - DNA, 91 bp, Glycine max
ctccagaacagattcttaatctcgcacacaataaatcagacattgagcgtagagttcatggagttatagatgagtttgccgagcgtggttt

SEQ ID NO: 172118 - DNA, 92 bp, Glycine max
gcttcggggacaggcgtgggtttgtttcagtgaagtcactgctgcaagcaatgcagtgcgacaaatgcaaaacttcccctttctatgacaaa

SEQ ID NO: 172119 - DNA, 88 bp, Glycine max
ctgttttgttcaaggatgtgacgcatcagttttgttgaacaacactgccaccatagagagtgagcaacaagctctgccaaacaacaac

SEQ ID NO: 172120 - DNA, 75 bp, Glycine max
ttaagaactacgggatatggttgcggtatcagagtaggactggttaccacaacatgtacaaggagtaccgtgaca

SEQ ID NO: 172121 - DNA, 276 bp, Glycine max
aacaaaatcgggagatctgtatcagaagctgtaggttcccttcccaaattgtccccatcagtttttgataagcttgtgaatgacagtttgcaggatcacttgcttttgctgtatttatctagtatcacaagaacgcagcttagcttggctgaaaaattgaacacagctgctcagattctgtgattcttccgcttgtttatcgccgaagtcaaatttttctgagtttcttttcttgtcttatctccagaaacgtggaatgtcagcgttttatacttc

SEQ ID NO: 172122 - DNA, 269 bp, Glycine max
atagaactagggtttcatctttgccatcagaaacaacaatgatttacgacgttaactctccccttttccgatccttcctcagccagaagggaggctcctccgataagaggaaaacggatgaacagaagccaaaagagcagaaacccaaagccagcgagaacaaacctatgatgacagagtgacaacaaatttgctgcattgagttgtagaatgataataggtggtagatattgcatttggttctacgaaattgggatcattggggctgt

SEQ ID NO: 172123 - DNA, 186 bp, Glycine max
tagcactcgtctttggttctggtttatagatctctgtgaagtcgctttataacactcaacctaagatgcagaacgaggaaggacagatcaccgagctttacattcctaggaagtgctctgccacaaaccgattgattaccgctaaggaccatgcttcggttcaggttaacattgggcatgtggatg

SEQ ID NO: 172124 - DNA, 266 bp, Glycine max
atccgaaggaggaccgaggattcaagaggcggcgatgaagctctacgtttcgaagagcgagttcgagaaggttcacttgttgcaggcgatgcaggcgattgaggcggcgatgaagagattcttctacgcgtataagcaggtgttggcggtggtgatgggaagttcagaggctaacggtaaccgagttgggttgagttgcgactcggctgactcgttgactcagattttccttgaaccgacgtattttccaagcttggatgccgcca

SEQ ID NO: 172125 - DNA, 267 bp, Glycine max
accgtgttcatctactctgagccgcataacttcccggaatcgtgcatacctacgttcaatatgtcgctggtggcaaacgaggatttccagcacatacttcgtgttttgaacacgaacgtagatgggaagcagaagataatgttcgctcttacctcaatcaaaggtattgggaggcgattttctaacatttgctgcaagaaggctgatgttgacatgaacaaaagagctggtgaactgagtgctgctgagttggatagtgtgatgact

SEQ ID NO: 172126 - DNA, 264 bp, Glycine max
cttcttcatattcttcttcttcttgttcttgttctatctgtgacgagcatcatggcctcgagagcagtgctattgttggctatgtgtgtgcttccggccatggttgtggccattcgcccagcaaagaaccctttttgcgtgaagggtcgcgtctactgtgacccttgccgtgctggttttgagacctcagcaaccacctacattgccggtgctgagattatgttgcaatgcaagagcagggttagcaacgaggttgtgtacacc

SEQ ID NO: 172127 - DNA, 266 bp, Glycine max
  unsure (1)..(266): unsure at all n locations
atcgagccgtcncgaccctgttcccctctcgtatccgtcatgaaaggaggaaagtccaagaccgaatctaagagagccgatcccaaacttgctgtgaataagaagggagccgccaccaaggctaggaaacccgccggcaaggggaaggcagcgaaagaccctaacaagccaaagaggcctccaagtgctttcttcgttttcatggaggagttcaggaaggtattcaacaaagaacatcctgaaaacaaagcagtgtctgctgtggg

SEQ ID NO: 172128 - DNA, 254 bp, Glycine max
gcaccgtttggctcttcaagacttgcttctttagcatttcattcctaaaaccctattcttcttcgctcattcatcagcactgccatcagccccaacctccccacaaggtcacagggactaaagaggtgtaccaccatgtcggacgatgaaagggaggagaaggagttggatctctcttctgcagaagttgtaaccaaatacaaaaccgcggctgagatcgttaacaaggccttgaagctagttatttcagaatg

SEQ ID NO: 172129 - DNA, 256 bp, Glycine max
tgccagacgcagtgactaaaccaaacctctcactcgccgtcgtagggtttctcctttcgtttagcaacaacaacaatggttgcagccaagaaaaccaagaagacccatgagagcatcaacaacaggctcgctcttgtcatgaagagtggaaaattcaccctcggttacaagacggttctcaaatcacttaggagctccaaagggaaattgattatcattgctaacaactgcccccctttgaggaaatcagagattg

SEQ ID NO: 172130 - DNA, 269 bp, Glycine max
tggctccaatattggacgaagttgctatctcatatcaaagtgatgctgatgttgttattgcaaaactggatgcaactgccaacgatatcccaagtgaaacctttgatgtccaaggttatccaaccgtgtacttcaggtcagcaagtggaaagttgtcacaatacgaagggggtaggaccaaggaagacatcatagaattcatcgaaaagaaccgggacaaacctgctcagcaagaacaaggacaagataaacctgctcagcaagaacaa

SEQ ID NO: 172131 - DNA, 194 bp, Glycine max
gttctggtattttttgaggaagctgaagaaggtaaagaagagcaatggtcaagttcttgctatcaacgagatttttgagaagaacccaaccaagattaagaactacgggatatggttgcggtatcagagtaggactggttaccacaacatgtacaaggagtaccgtgacaccactctaaacggttcagttgagg

SEQ ID NO: 172132 - DNA, 262 bp, Glycine max
gaatggttacatatccttatgtggtggagaaccttgccctgctatttttaggtctcctattgcaagcatggaagatatcatggacaatcatgttatatgtgcaatatgtagactcccagatgcacataaacatattacccgaccaccacaaggagttaaatttccaaaaaagattgttgaaattggggatctaaaacctgaacctgttttgtggcatgaagattcaggcaggagacaccattctgaaaatgggaggaaaaac

SEQ ID NO: 172133 - DNA, 268 bp, Glycine max
gctaacatgatcaattcaagctcatttagggatcctaccactgcttgggctaggcaaagatgggtactggagggtgctgattggaagcaaaatacacactaggggtatggcaattttgtacaagagcaaaaactttgttaattgggttcaagccaaacaacccctacattcagctgaaggcactggaatgtgggagtgccctgatttctatccagtgctgaataataaaccatcatcaactattggtcttgacacatctgtgaatggt

SEQ ID NO: 172134 - DNA, 256 bp, Glycine max
ctttagccgaggtcaggaggagcactagctaagttcacaatttcaaaatggctaggggactaaagaagcatttgaaaaggctcaatgctcctaagcattggatgcttgacaaactgggtggtgcatttgcgcctaaaccctcatctggaccacacaaatcgagggagtgcctccccctcattcttattctgcgaaaccggctgaagtatgctctgacataccgtgaagtcattgctattctgatgcagcgccatgt

SEQ ID NO: 172135 - DNA, 265 bp, Glycine max
gtagccataaaaattattcgtagtaatgacaccatgtacaaggctggtatggatgaattggtcatattgaagaaattagtaggtgcagatccagatgataagcgtcattgtgttcgtttcctttcaagttttagatacaggaatcatctttgtttagtttttgaatctctaaatatgaatctgcgagaggttttaaagaagtttggtcgcaatattggccttaggctaacagctgtgagagcatacgcaaaacagctttttattg

SEQ ID NO: 172136 - DNA, 266 bp, Glycine max
ctgagaatatgtctgcagaagagatccaaggtttgaaggcaatgtttacaaacatggacactgacaagagtggtgcaatcacctatgaagaactaaaggcaggattgcatagacttggctcaaagcttacagaggctgaagtgaagcagcttatggaagctgctgatgtagatggaaatggctcaattgactacatagaattcatcactgctacaatgcatagacacaaattagaaagagatgaccaacttttcaaggccttccaa

SEQ ID NO: 172137 - DNA, 269 bp, Glycine max
caaaattgttatttgaacacaacatatgtcccataattgatactccacatacaaaaaaagaaaagaaatggattcactacttcatatccaaaagcctcatgttgtatgtgtaccatttccagcacaaggccatgtaaacccctttatgcaactagccaaactccttcattgtgtgggtttccacataacctttgtgaacactgagttcaaccacaaccgttatgtcaagtcccatggaccagactttgttaagggtctccctgatttca

SEQ ID NO: 172138 - DNA, 215 bp, Glycine max
gcaaattcaatggcttcagagaagaaactatcgaacccaatgagggaaataaaggtgcagaaactcgtcctcaatatctccgttggtgagagtggagatcgtctcaccagagccgccaaggtgttggaacagcttagtggccaaaccccagtgttttccaaagcaaggtacactgttcggtcctttgggattagaagaaatgagaagattgcatg

SEQ ID NO: 172139 - DNA, 180 bp, Glycine max
gttttccgctgcttgtttgtgcctgcgtagtacaaagtaaaagagggactagtacaaaagttgttggcagtgaccatgtcgagcacttcgttgaaggagatgaggaacggtggtgaggattatagcaatggtcatggtggtggtgtaagggacttgtatggagaggattgtgccacagag

SEQ ID NO: 172140 - DNA, 263 bp, Glycine max
tccatggaaagttttaaatcaggctagatctaagcttcggcatcatagtgctgcaatacaagttccaataggtttggaagatgattttaagggactggttgatcttgtgcagttgaaggccttctattttcatggttcaaatggtgaaaatgttgttgctgaagaagttcctgctgacatggaagccttggtggaagaaaaaagacgtgaactcatagaaaccgtgtcagaggttgacgataaacttgctgaagcttttcttg

SEQ ID NO: 172141 - DNA, 260 bp, Glycine max
tgttgttgtaactcgttcttcttcttttgttgttctgtgtttgtgtttgttttttctctcacctgaaaatgtcttgctgcggtggtaactgtggttgcggaagctcctgcaagtgcggcaacggctgcggaggctgcaagatgtacccagacttgagctacactgagtcaaccaccaccgagaccttggtcatgggagtggcacctgttaaggctcaatttgagggtgctgaaatgggtgtgcccgctgagaacgatggc

SEQ ID NO: 172142 - DNA, 187 bp, Glycine max
ggctgttgcggggagttttatgtgttcaatcacgggaattgactctctgggtggtttccatctatcgttagatgccattttggaagggcttggatatgcagctcctccaattatggcacttttgtttatactcgatgatgaagttgtgaagctatcaccccatgcccgtgccatcagagatgtagag

SEQ ID NO: 172143 - DNA, 263 bp, Glycine max
attatcatccgcagctgcttttattcgcaccgcaaacagtgagccatggccgtcggaaagaacaagcgcatctccaaggggaagaagggtggcaagaagaaggcagctgatccctttgccaagaaggattggtatgacattaaggctccttctgtttttcaagtgaaaaatgttggcaaaaccctcgtctctcgtactcagggtaccaagattgcttctgaaggactcaagcatagagtgtttgaggtctccttggctgatct

SEQ ID NO: 172144 - DNA, 261 bp, Glycine max
ccgccaccattatcgatctgatctgtacgcggaggagagtgaagggaacgatgatttcagggcggagtttctatgccctttctgcgccgaggattacgacgtcgtttccctctgttgccacattgacgaccaccaccctatccaagccaaaaacggggtgtgtcccatttgtgggaagaaggtgggagtggatctcgttggacattttactacacaacatgggaacttcttgagggtgcagcgcaaaaggagggtcaggaa

SEQ ID NO: 172145 - DNA, 271 bp, Glycine max
atctgcgcaggaattaggaatattcgacaggtagagtttcttcaatggctcctaaagttgataagaagaatgatccaaaggcccaggccttgaagactgctaaggcagttaagtcaggtgctacctttaagaagaaggtaaagaagatccgaacttctgtcactttccacaggccgaagaccttgaagaaggacaggaaccccaagtaccctcgcattagcgccccgccgaggaacaagcttgatcattatcagatcctgaaataccccct

SEQ ID NO: 172146 - DNA, 266 bp, Glycine max
gctccatcgacctctccatcaacaccgaccccaactccgacgaggatgccgtcagcgccgtcaacaacagcaacgaccacaacagcaagcgcaagctggaggacgacttcgacgcctttacggcgtccaaggcggcggatctcgcgaaaccgttacgggaattgcagattccgttcaagatccatatcgtgaaggatcatgacatgaaggagaggctttgcttggaggtggagaggcttgggctgagtgctgttattatggggagt

SEQ ID NO: 172147 - DNA, 263 bp, Glycine max
tgtgtgtgttgttgcacactctccacacttacacagagagaaaagagagagaaagaaaaggatcaaatagttaaaacctttggttctttccctccatagttccatttttccattcaacaacacaacacctcagacagacatcatggaggcaggttacaatcctcgtaccgtcgaagaggtctttagggatttcaagggtcgcagagctgctttgattaaagccctcaccaccgatgttgaagagttctaccagcagtgcgatc

SEQ ID NO: 172148 - DNA, 255 bp, Glycine max
gttaagaaaaatgttgttgagaagtctcatgaaacaactttgcacacagaagatttggaggactctgtcacaatggttcaatcaatgaaagagtgtggatttcccatagctgataagatgatcagagagattaaaaaatctctgataactatggaaacaaaacaaccgaaaagagggttaatccatccagcatcaagttctcattcagaaagagctagtttcttgggtaacgctgcattttatgctcaggagggc

SEQ ID NO: 172149 - DNA, 260 bp, Glycine max
cctgttggaatgaggagctgaatttcactctgacagaacccttgggagttctgaatttggaagtgtttgataaagatcttctgaaggctgatgacaagatggggaatgctttcctgaaccttcaaccaatagtctctgcagccagattaagagacatcttaagagtgtcctctggtgagacgacattaaggaaggtcatacctgatggtgaaaactgtcttgtccgtgaaagcagtatcaactgtgtgaatggtgaggtg

SEQ ID NO: 172150 - DNA, 261 bp, Glycine max
gttcgtcaccatgacttttaagcgcaggaatggaggtcgcaacaaacacggccgtggccacgtcaagttcattcgatgctccaactgcggcaaatgctgtcctaaggacaaggctatcaagaggtttctggtgaggaacattgttgaacaggctgcagtcagagatgttcaggaggcttgtgtctatgaacaatacacgcttccgaagctttatgtgaagatgcagtattgtgtttcctgtgctatccactctcatgttgt

SEQ ID NO: 172151 - DNA, 268 bp, Glycine max
ggaataaaaaaacaagtttagttactattatggcgccgagggatcataagacaagcaacgctaaggctaacggtaacggtaacagcggggtgaaggaggtgcattttcgtggagtgagaaagaggccgtgggggagatacgccgcggagatcagagatcccggcaagaagagccgcgtctggctcggaaccttcgacacggcggaggaggcagcgcgtgcctacgacgccgcagcacgagagtttcgcggccctaaggccaagacaaa

SEQ ID NO: 172152 - DNA, 261 bp, Glycine max
agcaatgatgagcttagaacacttttggacttgaaatctagtttggatccagaagggcactttctgtcctcatggactattgatggcaccccatgtggtggttcctttgagggagtggcttgcaatgagaagggtcaagtggcaaatgtgtctttgcagggaaaaggactctctgggaagctctcaccagccattgctggactcaagcacttgacaggactctacttggactgcagctctttgtatggagagattccaagg

SEQ ID NO: 172153 - DNA, 263 bp, Glycine max
aagactattaccctagaagtcgaaagctccgacaccatcgacaacgtcaaggctaagattcaggacaaggagggaatccccccagaccagcagaggctgatcttcgccgggaagcagctcgaggacggacgcacccttgctgactacaacatccagaaggagtcaactctccacttggtgttgcgtcttcgtggtggtatgcagattttcgtgaagactcttgcgggtaagactattaccctcgaggtggagagctctgacac

SEQ ID NO: 172154 - DNA, 259 bp, Glycine max
cttattttttctgtcatttgcttcaaatttcaggagattaattatagctcaacccacaacaagaataggccttgctggattggctgttatgggccaaaatctggcactcaatattgctgagaaaggctttcccatttctgtttacaaccgaaccacttccaaggttgatgagacagtagaacgagcaaaacaagaaggaaatcttccagtttatggctaccatgaccctgaagcttttgttcattccattcaaaagcct

SEQ ID NO: 172155 - DNA, 260 bp, Glycine max
ccatcatccaatacagctcttcttcttcttcatctcatgcgatcatcactacatatgatgtgtttgtcagcttccgcggtgaagacacgcgcaacaacttcactgcttttctctttgatgctctctttgaaaatggcatccatgccttcaaagatgatacacatcttcagaaaggcgaatccatagcacccgagctgctactggccattcaagagtctcgccttttccttgtggtcttctctaagaactatggttcctca

SEQ ID NO: 172156 - DNA, 151 bp, Glycine max
aggggtcagagtgagaaagagaaagagagaattcgtaaaccctaatttcggaaagatcggcgatgactgcctccaaggatcgcgagaacttcgtctacatcgccaaactcgccgagcaggccgagcgttacgaagagatggtggaatcaat

SEQ ID NO: 172157 - DNA, 254 bp, Glycine max
gagccctctcttcaggtcaccatctagactgcaatcatggctgatggaccacagcatccatcagttgttcagaagctagctggacagtcttacctggtgtccaggcttagccccaactttaactctaggaattattctgcaactggttcttacgtcaatggcggaatgcactcgcctgggttggctgttgtgtcacctgtatctccagttactgtgcatgctccagcagagaaagagtgagtggatttctagtg

SEQ ID NO: 172158 - DNA, 235 bp, Glycine max
cttcatccttctctgttctcctagaacttgattacttgaacattcactatgacagatgaggtggttcttctggatttctggccaagtccatttgggatgagggtcaggattgcacttgctgaaaagggtatcgaatatgagtacaaagaagaggacttgaggaacaagagtcctcttctcttacaaatgaacccggttcacaagaagattccggttctcatccacaatggcaaac

SEQ ID NO: 172159 - DNA, 259 bp, Glycine max
actgaatcctccaaatgggtggcgtttgtggacaatgaaatccaaaaggcatgtgtgggtattggtggtcctgaaggtcatcctggtcaacaaacatttagtggcacatttagcattcagaaatataaatttggatacaaacttgtgttctgtatcactggctcaggcacttgtttagatattggaaggtttgatgccaaaaatggtgagggaggaagacgtttgaatctcactgagcatgaggccttcgacattgttt

SEQ ID NO: 172160 - DNA, 259 bp, Glycine max
cggctcgagccgctgcgtctctcgtaatcatgcctaagcaaatccacgagattaaggatttccttatcactgccagaaggaaggatgcgaggtcagtgaagatcaagaggagcagagatgtggttaagttcaaggtcagatgctccaagtacctctacacactttgtgtgtttgacccagagaaagctgataaattgaagcaatctcttcctccaggtttgagtgttcaagacctgtaaaggtactgggcgagagatca

SEQ ID NO: 172161 - DNA, 257 bp, Glycine max
attctcttcttcttcaagattgcgacgacgatccaagtgatagacactcgttgcgatggaacttgtagctgaatccgagcgaactctgtacccatacgtgactggatcctctgtagtcgctatcaaatacaaagatgggattctaatggccgctgacatgggaggttcgtatggatctaccctgcggtataagagtgttgagcgtatcaagcctattggagagcattctcttcttggtgctagcggggagataagtt

SEQ ID NO: 172162 - DNA, 257 bp, Glycine max
acctcttccgtgcacagcttgaacacaccgcgtttcggagagagacgtcgcaatggggaggaggcctgcaaggtgttatcggcagataaaaaacaagccataccccaaatcacgcttttgccgtggtgttcctgatcctaagatcagaatttatgatgttggtatgaagaagaaaggtgttgatgagtttcccttctgtgttcatctggttagctgggaaaaagaaaatgtttcaagtgaagcattggaagctgcta

SEQ ID NO: 172163 - DNA, 245 bp, Glycine max
caaactgcaaaagccactggaatagagggcaggatcataaatctgtcatcaattgcccataactacacttacagaaaggggattagatttaataagatcaatgaacggaaaggttacggtaacaagaaggcgtatggacagtccaagttagcaaacatgttacatacaaatgagctttctcgtcgcctgcaggaagagggtgtgaacattacagcaaactcagtccacccaggagtgataatgac

SEQ ID NO: 172164 - DNA, 249 bp, Glycine max
ttgggattggagggattgacgctgcgtctcttcctcttctctttcgatccatccctcattcctaatcctccaatccaaccacctcagcctcacactcacatgtacacatatctgaacgcgtatcgtccctcctatggcttcaaagcgcatcctcaaggagctcaaggacttgcagaaagacccaccaacttcttgcagcgctggtccagtagctgaggacatgttccattggcaagcaacaataatggg

SEQ ID NO: 172165 - DNA, 254 bp, Glycine max
gttcaattcttaaatcactttcgagcctttcatgtttgaagctggataacaatcccctcaaacagatacctttggatggctttgaagtggtgcctaagcttcagatcctggatctaagtggtaatgcagcttcattactagatgtacctgcattttctagtttgccatacctgcaagagctttacctaaggagaatgaggctcagtgaagtcccatcagatatagtggggctgcaacagctacggatccttgac

SEQ ID NO: 172166 - DNA, 258 bp, Glycine max
tagcagcaattcacactggtctttgcttctcgttactcatttctcacctaactttctattcttctcagtctcagatcagaaccttggccatggcagcgttccagaagatcaacgtcgccaaccccatcgtcgagatggacggagatgaaatgactagggttatctggaagtcaatcaaggacaagctcattttgcccttcttggagttggacatcaagtattatgacttaggccttccttaccgtgatgagaccgatg

SEQ ID NO: 172167 - DNA, 258 bp, Glycine max
ctttgctttcgccccatcttctccgccgttaccggtaatcgccgccgccaagctcgccggaatctctccctcgattgatacctctctctctcctgactcacctcccgcatttatcttctccgatgggctcaagttgcatggagcatatgctcttctacgttatatcggccgatttgccagccttcccaatttctatgggcaaaatgcattagaatctagccagattgatgaatggctggactatgctcctatcctctc

SEQ ID NO: 172168 - DNA, 281 bp, Glycine max
acttcatctggtggttttacaaaatacactgctgggattagtgtcacgagacccgattcttctgcttcaataatccttggtgacaagggtgacagcattaaagcatcatacctccatcatctggatctattgaagaagagtgccgcagttgcagagatcacgagaaagttctcaacaaatgagaacacttttacagtaggagggtcttttgctgttgaccctctgacacaggtcaaagcaaggctcaacaatcatggaaagctcggggccctcctgcagca

SEQ ID NO: 172169 - DNA, 276 bp, Glycine max
ctcactcatcaatctcgtttgttctcactaactattacttcatcatgtcgtcgagcacagttggtcaagtcatcaaatgcaaagctgcggtttcatgggaggcagggaagccacttgtgattgaagaagtagaggtggcaccaccacaagctggtgaagtgcgtttgaagatcctctacacctctctttgccacactgatgtttacttctgggaagccaagggccaaactccattgtttcctcgtatatttggtcatgaagctggagggattgtgg

SEQ ID NO: 172170 - DNA, 161 bp, Glycine max
tagagatcgagtggttgaggcaagggatgagctgcacagaatgttgaatgaggatgaacttagagatgctgttttgcttgtttttgccaacaagcaagatcttcctaatgcaatgaatgctgcagaaataactgacaagcttggacttcattcactccgtc

SEQ ID NO: 172171 - DNA, 161 bp, Glycine max
cggcttccctccctcctttgaagaaacaaattagaagagtgtgttgtgttgtgttgaagtatcaagctagcaaagatgtttggcatcttaggaggcaataaggggcacaagatcaagggtactgtggtgttgatgagcaagaatgtgttggacttcaacga

SEQ ID NO: 172172 - DNA, 161 bp, Glycine max
catatctccatttccatttcctctctctcagtttccaagaatcttaagctatgggaaagtcttacccaaccgtgagcgctgattaccagaaggccgttgagaaggcgaagaagaagctcagaggcttcatcgctgagaagagatgcgctcctctaatgctc

SEQ ID NO: 172173 - DNA, 220 bp, Glycine max
attaactctttcttctcataactctgccgccgcaacagccccaaatccaatggcttcagagaagaaactttcgaacccaatgagggagataaaggtgcagaagctcgtcctcaatatctccgttggcgagagtggagatcgtcttaccagagccgctaaggtgttggaacagcttagtggccaagcccctgtgttttccaaagcaaggtacacggttcgt

SEQ ID NO: 172174 - DNA, 161 bp, Glycine max
acgatgatgaacacaaatgttggttccttcaagattcctcctgcttccctctcaagttttgatgtgataagtgttattgtctgggtccctgtctatgacaggattattgttcccattgcaaggaaatttacaggcaatgaaaggggcttttcagagttgca

SEQ ID NO: 172175 - DNA, 274 bp, Glycine max
attcccatttcttaacgtatgattcttttaaaatgtgtaaatactctgattatttcttctatgatccaaacaatcagattgattcagatcaatttgagaaaatactgaggtacatcagatctggtgttgaaagtggggcaacccttgaaaccggaggagacaagcttggcaacaagggcttctacattcaacctacagtcttctcaaatgttaaggtatatctttttagtttcatttttgcactttatcgaatgagtctgaaaaatgaaaatac

SEQ ID NO: 172176 - DNA, 273 bp, Glycine max
gaaggtttcctttagaagacctttttgggaggaaacatgcttatctagaaaacaagaatagtgaaacagaggacgacgacgaggatggagatgaggatgatgaagatggacatgatcaggatgatgatggagaggacgaagaattctcaggtgaagaaggcgatgaagaaggggatcctgaagatgatcctgaggctaatggtggaggaagtgatgatgacgacgacgacaacgacaatgaagaagatgatgacgacggggaagatgaggagg

SEQ ID NO: 172177 - DNA, 160 bp, Glycine max
gccagactgagaggaagagagagggagattctttgtttgctaccttctctcggaaaaatggttacgttcaggtttcaccagtaccaggtggttgggagggctcttcccacggaagcagatcagcaccccaagatctaccgaatgaagctctgggccacca

SEQ ID NO: 172178 - DNA, 265 bp, Glycine max
cggctcgagcagatttgcatcaatgaattgaatattaccagagccattagtatgtcatcagacggcccaactcacaacgaatttgatttcgagtttttgggcaacaccactggtgaaccttactcagtccaaaccaacgtgtatgtgaatggcgttggcaacagggagcaaagactcaacctctggttcgaccccaccaaggacttccacacctactccatcttctggaaccagcgccaagttgttttcctggtggatgagacgc

SEQ ID NO: 172179 - DNA, 264 bp, Glycine max
attaagacaaaattaggagctcaccgcatcttaatgggtgctgagatggattgctgtgattcgactaatgagggaaagagattttatgtggagttaaagacaagttgtgagttaaattatcacaccgaggaaagattcgagagggagaaactgttgaagttttggattcagtcatttctggctggtgttccatatattgtcataggatttagggatgatgcaggtcgtcttgttcggacagaaagacttagaaccaaagatata

SEQ ID NO: 172180 - DNA, 270 bp, Glycine max
tgttgattcccagaaacacaaccattcccaccaagaaggagcaggtgttctcaacctactctgacaaccagcccggtgtgttgattcaggtctatgaaggtgaacgaacgaggactcgtgacaacaatttgcttggcaaatttgagttatctggaattcctcctgctcccagaggtgttcctcagatcactgtttgcttcgacattgatgccaacggtatattgaacgtgtctgcggaggacaaaaccactggacagaagaacaagatta

SEQ ID NO: 172181 - DNA, 270 bp, Glycine max
gctgacttgttggaatggtcaaagcaagataagaaacgaatgcttcatgtcgtctaccgtgttggtgaccttgatcgcaccatcaaattttacacagaatgtttaggaatgaagcttttgaggcaaagagatatcccagaggagaaatatgctaatgcttttcttggatttggccctgaagaatcccattttgttgttgaattaacatataattatggggttacctcgtatgacattggcgatggctttggacattttgcaattgcaact

SEQ ID NO: 172182 - DNA, 277 bp, Glycine max
ctcgagccgaatcggctcgacgtgctcgagcggctcgagcggctcgagatcatggttcgagctcagcaacaacgtgatcagactcctgaacttcctgaccttcctcctctccatcccgatcctggtggccggagtgtggctgagcaagcagggcgccaccgagtgcgagcggtggctggagaagccggtgatcgcactcggcgtcttcctcatgctcgtctcactcgccggcctcgtcggcgcgtgctgtcgcgtgtcgtggctcctctggctctac

SEQ ID NO: 172183 - DNA, 276 bp, Glycine max
ctttggagaaagaattgcttctcatgatgacaggtttctactacacttagcggacaaaactggtggcataattgtgacaaatgataatttcagagaatttgtgaatgagtcagtctcttggagagaaattattacaaaaaggctgctgcagtacacgttcgtgggggacatatttatggttcccgatgatcctctgggaagaagtggacctcgattagaggagtttcttcagaaggaagtctgtcttagagatatgcagcccctactcagtgccct

SEQ ID NO: 172184 - DNA, 273 bp, Glycine max
ttcggatctagagtcttcagtttctcctcgttgttcttcgctttcctgttttcaatttcgattctttcgttaatttaataagatgtttgggagggcaccgaagaagagcgataatacgaggtactacgaaatcctcggcgtctccaagaacgcttcgcaggatgatctgaagaaggcttacaagaaagccgccattaagaatcaccccgacaagggcggtgatcccgagaagtttaaagagctggcgcaagcttatgaggttctgagtgaccc

SEQ ID NO: 172185 - DNA, 269 bp, Glycine max
tcagattcgcaaaaatccctttctgcgtcgtcgcattgtatgagcctcgaattccgatcccgataggcatggccggagcggcgttatcgccgacgacgagttcgaagtcggtgacgcagacggtgaacgggtcgcacaagttcgtgatcgagggatactccctggcgaaagggatgggagtggggaagcacattgcgagcgacgtgttcacggtgggagggttccactgggcgatctacttctaccccgatggcaagaatcccgaggac

SEQ ID NO: 172186 - DNA, 158 bp, Glycine max
ctcttctacctagggaaaattcggacaattcagctggagtataccgatgcaaaagagtctctcctgcaggccgcccggaaagctcctgttgctgcacggggttttcgaattcaatgtaacaagtgggctgtgatagtgcgtttactgttgggagaaat

SEQ ID NO: 172187 - DNA, 271 bp, Glycine max
cttcaccttctgctctagaaaattcagtgctgaaacatggcttcggctactctctctgtagccaaaccagcccttcaggcaaatgggaaaggcttctctgaattctctggcctccgaagctcatcaggcttccttcccttttctagaaaatcttcagaggatttccattctgtcattgccttccagacctatgcagttggaagcagtggaggatacaagaagggtgtgacagaagcaaaactgaaggttgccataaacgggtttggaagga

SEQ ID NO: 172188 - DNA, 261 bp, Glycine max
gctactgcaatctccaagtgtatgattacgggtggagcagcagcgacagttttctacaatttgaagcaaaaacatccaacacttgacatgccagtgatcgactacgacttggcacttcttttccaaccagtgctggtgcttggaatcagcattggagttgccttcaatgtgatttttgctgattggatgatcacagtcttgctactaataattttcgtaggaattgcaaccaaggcattcttaaaaggagttgagacatgg

SEQ ID NO: 172189 - DNA, 156 bp, Glycine max
gttacgccgtcgtcgctgtttgtgtgtgtatcaggtgcagctaccaacgatggtgaagggtcgtcaaggagagcgcgtcagactctacgtgaggggtacaatccttggatacaaaaggtccaagtccaaccagtacccaaacacatccctgatcca

SEQ ID NO: 172190 - DNA, 154 bp, Glycine max
caaatgcaaagctgcggtttcatgggaggcagggaagccacttgtgattgaagaagtagaggtggcaccaccacaagctggtgaagtgcgtatgaagatcctctacacctctctttgccacactgatgtttacttctgggaagccaagggccaa

SEQ ID NO: 172191 - DNA, 257 bp, Glycine max
ggagatagaccccagaagtggtttctgcagctccaattcaatcttctacagcaagcgtaagcccctcccactccctcccaacaacgccttagacgtcaccaccttcatctcctcccgcgcccaccgcgccaccacagccttcgtcgacgccgccaccgcccgccgcctcacctacacccagctatggcgttccgtggagggcgtggcagcctctctctccgtggacatggggatccgaaagggcaacgtggtcctca

SEQ ID NO: 172192 - DNA, 173 bp, Glycine max
tgttattatagtttcctaaggcacgcagcgagtttaggcgcggcgggatcatcacgagattgcaaaatgaagttcaacattgcaaatcccaccactgggtgccagaagaagctggaaatcgatgacgacctgaagcttcgggcattttgggacaagaggatctcccaggaggt

SEQ ID NO: 172193 - DNA, 179 bp, Glycine max
tcaagattcaggtactgcgtttcggaagcagacacagatggctcgtacgaagcaaaccgctcgtaagtccacaggaggaaaggctcctaggaagcagcttgcaaccaaggctgcacgtaagtctgcaccaactactggtggtgtgaagaagccccaccgttatcgtcctggtaccgttg

SEQ ID NO: 172194 - DNA, 271 bp, Glycine max
cttctcttgcggctagggttttagcgcacttcttctagatttaaggaagatgagtaaggaaaaggttcacatcagtattgtagtcattggccatgtcgactctgggaaatccactaccactggtcacctgatttacaagcttggaggcattgacaagcgtgttattgagaggtttgagaaggaagctgctgagatgaacaagaggtctttcaagtatgcctgggtgctggacaaacttaaggctgagcgtgaaagaggaatcaccattgat

SEQ ID NO: 172195 - DNA, 270 bp, Glycine max
atttcacccaaatataaatagcaatggaagcatttgccttgacatattgaaggagcagtggagccctgcgctaactatttcaaaggtgttgctctcaatttgttccctgttgacggaccctaatcctgacgatcctttggtccctgaaattgcccacatgtacaagacagacaggaacaagtacgagtcaactgccagaagctggacccagaaatatgccatgggttaagtgaccttgtggtatgtttgagggagagcctttctactctc

SEQ ID NO: 172196 - DNA, 179 bp, Glycine max
tgacaaaatgcaaggaggttcagaaaattgtatgctgacaaggaagatatctttgttcctgatattttctgggactatacaagtgctaaagtactaacaatggagtgggttgatggagtcaaactaaatgagcaacaagcaattgagagacaaggattaaaagtcttggatctggtaaa

SEQ ID NO: 172197 - DNA, 259 bp, Glycine max
  unsure (1)..(259): unsure at all n locations
aanatatctctcgctctgaaaccggcatggatttgcagcagagcgagttcgatcgcctcttgttcttcgagcacgctcgcaaggccgcagaagctgaatacgagaagaaccctctcgatgccgataacttaacaagatggggtggagctctattagagttgtctcagtttcagagttttcctgaatcgaagaaaatgacccaagaggctgtttcgaagctagaggaggcgcttgcagtgaatcccaagaagcatgacac

SEQ ID NO: 172198 - DNA, 264 bp, Glycine max
gtaacttcttgttgcttttcacttatagttaacaactttcatcactaccattacgtgcattacagatccatcattcatcccaagttggtggaaggcgttggcttcgatctttttgatatggatttagagtttgaatatcaagaagaatacaggaggaactcaaggggagtgcaactcttcacttgcaaatggttgcctttctcttctccgaagggcctggttttcctttgccatggttatggtatggaatgcagtggcttcatg

SEQ ID NO: 172199 - DNA, 175 bp, Glycine max
tggatacttcggccaagagtaccgggtcgggtgggaagaaacggggacccgctccgtatagaatatttaacctggggaacacgtcgccggttactgttcccactcttgtcagtatattggagcgccatttgaaggtgaaggccaagaggaatattgtggacatgcctggaaacgg

SEQ ID NO: 172200 - DNA, 265 bp, Glycine max
tctcatcattcattcatcttcgttctaagagccatgtctagcaccgttggccagaccatcaagtgcaaagctgcgattgcatgggaggctgggaagccgctggtgattgaagaagtggaggttgcgccaccgcaagccggtgaagtccgtttgaagatcctctacacctctctttgccacactgatgtttacttctgggatgcgaagggccagactccattgtttcctcgcatttttggccatgaagcttcggggattgtggaga

SEQ ID NO: 172201 - DNA, 175 bp, Glycine max
tggccgacgaagctgtggttgttccagatcccacccagatcgatgtcaagctctttaaccgctggagcttcgacgatattgagattactgacatttctctggctgattatatcggagtggcgacatccaagcacgccacgtatgtgcctcacaccgccggcaggtactcggtgaa

SEQ ID NO: 172202 - DNA, 173 bp, Glycine max
tcttcctctgcgcaggaattaggaatattcgacaggtagagtttcttcaatggctcctaaagttgataagaagaatgatccaaaggcccaggccttgaagactgctaaggcagttaagtcaggtgctacctttaagaagaaggtaaagaagatccgaacttctgtcactttcc

SEQ ID NO: 172203 - DNA, 258 bp, Glycine max
gtttgctacctaaaccctagtctccatacatcaacttgggaggttaaagagacggcaacgttgtgctgtccgccttgaccgagccagagcttcgtcttggccctcgattttgccctgtaaaactaatcccagtaacaacagaaataatcaatggcaccgaaacagaccaaggctgagaagaagatcgcttacgatgcgaactgtgcgacctaatggaggagtacggccaaatcctcgttgtaaactccgacaacgtgg

SEQ ID NO: 172204 - DNA, 253 bp, Glycine max
ctcatttatagtttactattgaaagatgggtttgaaaatggcaatactgatcctaggcctgctggccatgttccttttggtctcctcagaggtggcatccgcgaattcaaaagaggtgacaaatggagttgaagatgccaaatatcctggtggaggctatggtgggggttacccaggcaatggcggtggtggctatcctggccgtggtggtggctaccctggtcgtggtggtggctatccaggtcgcggtggt

SEQ ID NO: 172205 - DNA, 186 bp, Glycine max
ccacgttagtttcctggtacctgatgatcctgcattggatcatgaagttaagcaggagcttcttgatttagctcaagctatggaggctggggttgcatatataatggggcacacacatgtgaaggcaaggaaatcatcctcattattgaaaaggcttgtgatcaatgttgggtatgcatttcttcg

SEQ ID NO: 172206 - DNA, 139 bp, Glycine max
ggagatctctcgacatcgagaggcccacctacaccaacctcaacaggctcatttcccagatcatttcgtcgctaaccacttccttgaggtttgatggcgctatccatgtggatatcactgagtttcagaccaaccttgt

SEQ ID NO: 172207 - DNA, 143 bp, Glycine max
ctgaccaccaccagagggtcgcttgcccgatgccactaagggttctgaccatttgagagatgtgtttggcaaagctatggggcttagtgaccgagatatcgttgctctgtctgggggtcacactattggagctgcgcacaagg

SEQ ID NO: 172208 - DNA, 144 bp, Glycine max
cggctgtatatgatggagtggatatactcaacctttcagttggacccgacagtcctccagcagccaccagaactacatttttgaacccttttgatgccacacttcttggagccgtgaaagctggtgtatttgttgcacaggctg

SEQ ID NO: 172209 - DNA, 143 bp, Glycine max
cagggaagttggtgtgtgtcaccggtgctgccggttatattgcttcatggattgtcaagttcctacttgaacgtggttacactgtcagggccactgttcgaaacccaaatgatcacacgaaggtagaacatttgctaaaactt

SEQ ID NO: 172210 - DNA, 144 bp, Glycine max
gtcgccgcgtatttgctcgccgtcctcggtggcaacaacagcccctccgccgatgtcatcaaggaaatccttggctccgttggagtagaagcagatgaagataggattgaatcgtttttgtctgaagttaagggtacggatata

SEQ ID NO: 172211 - DNA, 150 bp, Glycine max
tctatattccattctctctgtgtatttccctacctctcccttcaagatgcagatcttcgtcaagaccctcaccggcaagaccatcacccttgaggtggaaagctctgacaccatcgacaacgtcaaggcccagatccaagacaaggaagg

SEQ ID NO: 172212 - DNA, 140 bp, Glycine max
cagatgttttggaagagaaatgtggttctgctgcaatctgttttgttgccttccttcctgacattttggattccaaggctgagggaagacacagatatcttcagcagttattatcagttgccgagaagtttaacaggagt

SEQ ID NO: 172213 - DNA, 134 bp, Glycine max
tggttactggaggcgacaatggcagcatgtggttctgggattggaagagtggtcaccatttccagcaatcccagacaattgtccagcctggttcattggccagtgaagctggtatttatgcttgtacctatgat

SEQ ID NO: 172214 - DNA, 135 bp, Glycine max
tacccctcttagtcccaattttctagggttttattcattttccgatggcttctgcagatgttgagtaccgttgctttgtcggtgggctcgcttgggccactgacgaccatggcctcgagagagccttctctcagt

SEQ ID NO: 172215 - DNA, 141 bp, Glycine max
tgcggttgccattttgataaactgtaccatttattgtagtcctgttttaggaaggacgacgctagagaatgttgtacacgcaggaaaagcatgttcccttaataaaccatgacctatgagatgaggcatggaccatggaat

SEQ ID NO: 172216 - DNA, 139 bp, Glycine max
cctgcgaccgaatcggctcgagagaccgatgataaagttacaattctcagtgcggaagcaaacctcaagtataatgtggcaattaagtgcgcaactattactccagatgaagctcgtgtgaaggcgtttggtctgaagt

SEQ ID NO: 172217 - DNA, 138 bp, Glycine max
ctttctccatttccattttctctctcacttttcaagaatcgtaagctctgggaaagtcttagccaactgtgagtgctgattaccagaaggccgttgagaaggcgaagacgaagctcagaggcttcatcgctgagaaga

SEQ ID NO: 172218 - DNA, 135 bp, Glycine max
tgcaagatttttttacttcttatgacgaacgtttgtgacagctttgatgctatgggattgcaggagaaccttctgaggggtatttatgcatatggttttgagaagccctctgcacttcaacaaagggggattgtt

SEQ ID NO: 172219 - DNA, 205 bp, Glycine max
aacaaaatcgggagatttatatcagaagctgtaggttcccttcccaaattgtccccatcagtttttgataagcttgtgaatgacagtttgcaggatcacttgcttttgctgtatttatctagtatcacaagaacgcagcttagcttggctgaaaaattgaacacagctgctcagattctgtgattcttccgcttgtttatcgccg

SEQ ID NO: 172220 - DNA, 209 bp, Glycine max
gctcgagacggcttgttcagtctttcttggaactttgttactctcacacatgtctcgctccgtgccctttggtttcaaccatttttgtcttgcttctgcttctggtggccactgagatgatggggccaacaatggtggcagaagcaagaacttgtgagtctcagagccaccgtttcaaggggccatgtttgagtgacaccaactgtggc

SEQ ID NO: 172221 - DNA, 199 bp, Glycine max
gctcgataggatactgctttgtgtgtactatggtttatactactcttgttggggtgtgtcatttcctcagaatctaagtatataaggtacaacacaacatcgaccattgttcctgggcaactcaacgttcacttggtccctcacactcacgatgatgttggatggttgaagaccattgaccagtactatgttggttcca

SEQ ID NO: 172222 - DNA, 214 bp, Glycine max
gctcggctaagattgtagacaaccattttgagctaaatgttgcagagtatgaaaagcaaggtagaattcatctcagtgtgtttttcgctctcacttacggctttggatttgccaccatagcatccaccctcacacatgttgtctgcttctatggaagggagattatggagtcgtatcgtgcttcttccaaaggcaaagaagatatccacacaaa

SEQ ID NO: 172223 - DNA, 195 bp, Glycine max
atttttctctctcccttagtcaaagggattcatcgttcttcttcccaggttatttagaaaagcaaaatggtgaagatttgctgcattggtgctggatatgtggggggtcctactatggcagtcattgcacttaagtgcccatccattgaagtcgctgttgttgatatctctaaatcccgcattgcagcctggaac

SEQ ID NO: 172224 - DNA, 195 bp, Glycine max
gaagaagaagaaatagagggttttggtgtttggtgtttgaatcgtgaaaatgttcagaaaccagtatgacacggacgtgacgacatggagcccggcggggaggctgttccaggtggagtacgcgatggaggcggtgaagcagggctcggctgcgatagggctccgatccaagacccacgtggtcctcgcatgcgt

SEQ ID NO: 172225 - DNA, 196 bp, Glycine max
caatttaccagctatacttgttccttttgaaggttagaagtgctacaatacaaacaatggcagctactcaggaagatgtgaagcttttgggtattgtgggaagcccatttgtgtgcagggtccagattgcccttaagttgaagggagttgaatacaaatttttggaagaaaatttgggcaacaagagtgatttgct

SEQ ID NO: 172226 - DNA, 196 bp, Glycine max
gtagccagagagtgatacaatacagagtgcgttgttgctccttcgccacaactccctgccaacatgggtatctccagagattctatgcacaagaggcgtgccactggtggcaagaagaaggcatggaggaagaagagaaagtatgagcttggtcgccagcctgctaacactaagctgtcaagcaacaagacagtca

SEQ ID NO: 172227 - DNA, 191 bp, Glycine max
gttagaaggtcggctgcatcaaatcttgggaaatttgctgcaactgttgaatatgctcatttgaaggctgatgtcatgtcaatttttgacgatcttactcaagatgatcaagattctgtcagattgttggctgtggagggctgtgctgctcttggcaagctgttggagccacaagattgtgttgcacatat

SEQ ID NO: 172228 - DNA, 191 bp, Glycine max
ggaaaatctttgcctttatggatttccaagtgagcagtgggaagtcaatctgccagctgaggaggtgccccctgagcttccagagccagcattgggcattaactttgccagagacgggatgcaagaaaaggactggctgtctttggttgctgtacacagtgatgcttggttgcttgctgtggctttttatt

SEQ ID NO: 172229 - DNA, 190 bp, Glycine max
  unsure (1)..(190): unsure at all n locations
ggtgctttcgttcagcctgctttctatgaagcttttggacttacagttgtggaggccatgaattgtggactccccacttttgctacttgccatggtggtccggctgagatcattgagcatggtatntcaggattccacattgatccttatcnccctgatcaagcttcacagctattagttgaatttttcc

SEQ ID NO: 172230 - DNA, 192 bp, Glycine max
gtgagtttgttgatcgagataactagaaacagtgtgatgaaaatgaaggtccttgttttcttcgttgctacaattttggtagcatggcaatgccatgcgtacgatatgttccctctccgaatgaacactggctatggtgcccgtactccggaggtgaaatgcgcaagttggaggcttgctgtggaagcacac

SEQ ID NO: 172231 - DNA, 192 bp, Glycine max
cttagtcagacttaccccttgctaccaacactgagcttaaccgagcttcgcaaagatgaatcgggaaaagttaatgaagatggccggttcggttagaactggaggaaagggtactgtgagaagaaagaagaaggctgtccacaagacaacaaccacagatgacaaaaggcttcagagcaccctgaagagaat

SEQ ID NO: 172232 - DNA, 202 bp, Glycine max
ttcggctcgagctcttcgttcttcgactgtctacgatctgctttctctgaattgtgaaaatgtcgctcggagaaactgcttgttcatacgcagctctcatccttcatgaagatggaattagtgtaactgctgacaagatcagcaccttgttgaaaactgcaaaggttccagtagactcttattggccaaccttgtttgctaa

SEQ ID NO: 172233 - DNA, 196 bp, Glycine max
aagctagtttatcgtgaggagaatatgaagttgtttgttttctttgttgctgcagtagttttggtagcatggccatgccatggcgcaggctaccaaaggttccctctccgaatgaaaactggctatggtgagcgttcttcggaggtaaaatgcgcaagttttaggcttgctgtggaagcacacaacatccgagcct

SEQ ID NO: 172234 - DNA, 195 bp, Glycine max
accctagtctccatacatcaacttgggaggttaaagagacggcaacgttgtgctgtccgcccttgaccgagccagagcttcgtcttggccctcgattttgccctgtaaaactaatcccagtaacaacagaaataatcaatggcaccgaaacagaccaaggctgagaagaagatcgcttacgatgcgaactgtgcg

SEQ ID NO: 172235 - DNA, 191 bp, Glycine max
gcaaaaggccatataatttttttttatttgaaataatgtccgggatcatccacaagattgaggagaccctccatgtgggagggcacaagaaagaggagcacaaaggagaacaccatggtgagcacaaaggtgaacacaaaggagaacaccatggtgagcacaaaggtgaacacaaaggagaacaacaccat

SEQ ID NO: 172236 - DNA, 188 bp, Glycine max
gtaattaacctcactcaaactcgggatcacagaaaccaacaacagttcttgcactgaggtttcacgatgttgctggaacttgcacttggtttgtttgtgttagctttgtttctgcacttgcgtcccacaccaagtgcaaaatcaaaagcacttcgccacctcccaaaccctccaagcccaaagcctcg

SEQ ID NO: 172237 - DNA, 190 bp, Glycine max
cttcaagcgagtgacatccaccagccatgggtcgtatgcacagccgcggtaagggtatatccccctctgctttgccctacaaaaggacaccccctagctggctcaagatctcttcgcaagatgtggaagaaaatatctgcaagtttgcgaagaagggtttgaccccgtctcagattggtgtcattcttcg

SEQ ID NO: 172238 - DNA, 187 bp, Glycine max
tggaactgtgctttgtgttcatggtggcctttctccagacattcgatcaatagatcagataaaggttcattgagaggaactgtgaaattcctcatgagggaccattttgtgatctgatgtggagtgatcctgaagatatcgaaacatgggcagtcagtcctcgtggagctggttggctttttggatc

SEQ ID NO: 172239 - DNA, 188 bp, Glycine max
aagagggggtcagagtgagaaagagaaagagagaattcgtaaaccctaatttcggaaagatcggcgatgactgcctccaaggatcgcgagaacttcgtctacatcgccaaactcgccgagcaggccgagcgttacgaagagatggtggaatcaatgaagaacgttgcgaatctcgacgttgaactgac

SEQ ID NO: 172240 - DNA, 187 bp, Glycine max
atcaaaccctgaattccttgcagagggaactgcaatcaaagatctctttaacccagaccgtgttcttattggaggcagggaaaccccagagggccaaaaagctattcaaacattgaaggatgtttatgctcaatgggtccccgaagaaagaatactgaccacaaatctttggtcggcagaactgtct

SEQ ID NO: 172241 - DNA, 186 bp, Glycine max
ggccaaacagccaccatagttcttcgtggtggagctgatcagttcatagaggaagcagagcgaagtttgcatgatgcaatcatgattgttaggagggctttgaagaattcaacagtggttgctgggggaggtgcaatagatatggagataagccggtacctgaggcagcatgcacgtacaatagct

SEQ ID NO: 172242 - DNA, 182 bp, Glycine max
gattatcctaagtctttgggaatagtgctgcaatggcttcaagtcaggaggaggtgaccttttgggagctactggaagcccatttgtgtgcagggttcatattgccctcaagttgaagggagttcaatacaaatatgtcgaagaaaatttgaggaacaagagtgaactgcttctcaaatcca

SEQ ID NO: 172243 - DNA, 182 bp, Glycine max
caagtctggtgatcatcttgctactggtgatcgtggtggtcgagtagttctctttgagcggacagatacataagatcatcacggatcaagaagggacttagagaggatggactattctattagtagacatcctgagttccgttatggaacagagtttcagagtcatgagcctgagtttgact

SEQ ID NO: 172244 - DNA, 187 bp, Glycine max
tcctcaacctctgcagcgccttcgatccagaaaacatgactaagagaacaaagaagggtggcattgttggaaaatacggtacccgttatggcgccagtctgcgtaagcagattaagaagatggaagttagtcaacacagcaagtttttctgtgaattttgtggaaagtatgctgtgaagaggaaagc

SEQ ID NO: 172245 - DNA, 184 bp, Glycine max
gccgttgaggtcaccggtggacctgaagttcccttccatcctggaagagaggacaaacctgaagccaccaccagagggtcgcttgcccgatgccactaagggttctgaccatttgagagatgtgtttggcaaagctatggggcttagtgaccgagatatcgttgctctgtctgggggtcacact

SEQ ID NO: 172246 - DNA, 183 bp, Glycine max
ccaaacacaacacaaggagaagaaccagatctctctttctcaaatcaccaagaatagttgaacatggggctgtctttcacgaagctgttcagccggctctttgcgaagaaggagatgcgtattcttatggtgggtctcgacgccgccggtaagaccaccattctctacaaactcaagctagga

SEQ ID NO: 172247 - DNA, 180 bp, Glycine max
agcagttcttcttgcaatgtgctccaaaacttttacttccaaagtcatcatcttcagtggaacaaagcaagctgcgcatagattgaagattatatttggattagctggctcaaaagctgctgagcttcatggaaatcttactcaagcccagcgccttgaggctttggaacagttcaggaa

SEQ ID NO: 172248 - DNA, 181 bp, Glycine max
cccaactaattccctcagaattgaccgtttcctccgtccatttaccctaaaagcagtgcaagaacttcttggtaagactgggaatgtcagcagcttctggatggaccaaataaagacccattgctatgttacttactcatctgtggaagaagctattgagacacggaatgctgtatataat

SEQ ID NO: 172249 - DNA, 122 bp, Glycine max
caagtgttccttgtggctcatgactggggagccatcataggttggtatctatgcatcgttcgccctgacaaagttaaggcctatgtctgcctcagtgtccctctcctccgcagagacccaaa

SEQ ID NO: 172250 - DNA, 181 bp, Glycine max
atcaaaccctgaattccttgcagagggaactgcaatcaaagatctctttaacccagaccgtgttcttattggaggcagggaaaccccagagggccaaaaagctattcaaacattgaaggatgtttatgctcaatgggtccccgaagaaagaatactgaccacaaatctttggtcggcagaa

SEQ ID NO: 172251 - DNA, 181 bp, Glycine max
gagatggaggaagcaaagggagtagtgaagcacgtgctcctagctaagttcaaggacgacgtcactccagagcggattgaagagctcatcaaggactatgccaatctggtcaatctcatcccacccatgaagtcattccattggggcaaggatgtaagtgctgaaaacctgcatcaaggct

SEQ ID NO: 172252 - DNA, 179 bp, Glycine max
aagaggaaccctagctagggtttggaagaagctgatccgagaagatggtgcagcgtctcacctaccgcaaacgccacagctatgctaccaaatccaaccagcacagagtcgtcaagactcccggtggcaagcttgtttatcagaccacgaagaagagggccagcggacccaagtgccct

SEQ ID NO: 172253 - DNA, 278 bp, Glycine max
caagcatatctcatttgaatacattccttgtagtttatactgaaagatgggtttgaagatggcgttactgatcctaggcctttccctcatgctccttttggtctcctctgaggtggcatccacgaatacaaaagaggaggcaaatggagtggatgatgccaaatatcccggtggaagctatggagggggttacccaggtcatggcggtggcggttatcctggccatggcggtggcggttatcctggccatggcggtggtggtggctatcctggtcatg

SEQ ID NO: 172254 - DNA, 271 bp, Glycine max
attagaaccttttgccagtgaagccccaaaacaggatccttctccacttccatacttgactgagaaagaacccaaaatctatgatatttccctagaggctcacataaaacctgctgggcatgaagattcgggtgtggtgtcacggactaatctaaagcacttatattggacattgacccaacaacttgctcaccatacaatcaacggttgcaaccttaggccaggcgatctccttggaactgggacagttagtggtcctgagccagagtcc

SEQ ID NO: 172255 - DNA, 272 bp, Glycine max
ccaggatcaaaacggtgccttgaaggcgggtgaagtggacgcgacttcagtagccggtaacaagttacccgaacaaacggcgaaacctagttcttccgagcagccacctaagcaagactatatacacgtgcgagctagaagaggccaagccaccgatagccacagtctcgctgagagagctaggagagaaaagatcagtgagaggatgaaaattcttcaagatatagttcccggctgcaacaaggtaattggtaaagcacttgtgctggatg

SEQ ID NO: 172256 - DNA, 275 bp, Glycine max
gtcctgaaacttgggtgcgattccttcactcacaacaacaacacatcactatggctcttctgagtcgagcctcttcacgcttccctcagctggtttcccctcaaagggtagtttcactccacacaacgctcccatctctgaacgcatccccatccacagccacgcctacaccatatgccccgccaccgcctccgtccgcttcctctcccgccggcgtttcgaaggcggcggagttcgtgatctcgaaggtggacgatctgatgaactgggcccgc

SEQ ID NO: 172257 - DNA, 277 bp, Glycine max
caattctgttcatcctttgcttcccaaagaaagagaaaataaaaagcaatgggtagccttgaagcggaaagaacaacagtaggattggcagcaagagacccttcagggattctctccccatacacctacaatctaagaaacacaggccctgatgatgtttacataaaagttcactactgtggaatttgccattctgatctccaccagattaaaaatgatcttggcatgtccaactatcccatggtcccaggacatgaagtggttggtgaggtactgg

SEQ ID NO: 172258 - DNA, 273 bp, Glycine max
gacggccgcaccctcgccgactacaacatccagaaggagtccacgattcatctcgtcctccgcctacgtggcggcgccaagaagcgcaagaagaagacctacaccaagcccaggaagatcacgcacaaggacaagaaggtcaagctcggcattcttcagttctacaaggtcgacgattctggagaagaccacaggctccgcaaggagtgccccaacgccgagtgcggcgccggcagcttcatggccaaccacttcgagcgccactactggggc

SEQ ID NO: 172259 - DNA, 271 bp, Glycine max
tgctttctccactgcctaaaccgactctctctctctgcctctgcaagcttgttacttggctttgtttgattgattgccccaatggccgcgtgtggctatatatctgctgccaacttcaatcatcttgttggcgccagaaacttatccaaattcagttcttcggatgccacaatttcgttatcatttggcgggagcgattcaatgggtcttagtttgcgacccgctccaattcgtgctcctaagaggaaccatttctctcccttgcgtgtcg

SEQ ID NO: 172260 - DNA, 272 bp, Glycine max
aaaagcgcaagaaaacaaaatccccaaaatatctctcgctctgaaaccgccatggatttgcagcagagcgagttcgatcgcctcctgttcttcgagcacgctcgtaaggccgcagaagccgaatacgagaagaaccctctcgacgctgataacttaacaagatggggtggagctttattagagttgtctcagtttcagagttttcctgaatcgaagaaaatgacccaagaggctgtttcaaagctagaggaggcgcttgcggtgaatcccaa

SEQ ID NO: 172261 - DNA, 269 bp, Glycine max
gtgtctactatctgactacacatgtgctgtttacattgtctttcaattgggtgaagtctgactgaagagcaatgcagaaggataccagtaccactgccccatcaaccacaagcggtcgggttaggcaccgaaaacgctcaaatgaggttattccggaggttagcaaagcaaatgggacccagttactggttaatgacaaaagcaaatacaaatccatgctaattcgagcatattcatccgtatggatgattggcggctttgtattgatc

SEQ ID NO: 172262 - DNA, 269 bp, Glycine max
tgacgagcatcatggcctcaagagcagtgttattgttggctatgtgtgtgcttccggcgatggttgtggccattcgcccagcaaagaaccctttttgcgtgaagggtcgtgtctactgtgacccttgccgtgctggttttgagacctcagctaccacctacattgctggtgctgagattatgttgcaatgcaagagcagggttagcaacgaggttgtgtacacgaagaaggggtacaccgactcaaccggagcatacacaatgtacgtg

SEQ ID NO: 172263 - DNA, 270 bp, Glycine max
atggtttacaccgagcagccacacctcccgcagcagccatggttctcaaaactgaactatgccgattcagtggtgccaagatctacccaggaaagggcatcatatttgttcgtggtgattcttaggttttcctgtttgcaaactcaaaatgtaagatgtatttccacaatcgcctgaagccttcaaagctcacctggactgcaatgtacagaaagcaactcaaaaaggacattgctcaagaagctgtgaggaagaggagacgtgctgcca

SEQ ID NO: 172264 - DNA, 271 bp, Glycine max
ctggtacggacaaggggaatccgactgtttaattaaaacaaagcattgcgatggtccctgcggatgttgacgcaatgtgatttctgcccagtgctctgaatgtcaaagtgaagaaattcaaccaagcgcgggtaaacggcgggagtaactatgactctcttaaggtagccaaatgcctcgtcatctaattagtgacgcgcatgaatggattaacgagattcccactgtccctgtctactatccagcgaaaccacagccaagggaacgggct

SEQ ID NO: 172265 - DNA, 269 bp, Glycine max
ttgagagtgagagagagagtgagagagtgagtgagatagagagagacgcttcgcaaatctcaatcgaatctcagaaaaatgagagagatcatcagcattcacataggtcaggccgggatccaggtcggaaactcctgctgggaactctactgcctcgaacatggcatccagcccgacggcatgatgccttctgactccaccttcggtgtagcccacgacgccttcaacaccttcttcagcgaaaccggatctggcaagcacgtcccccg

SEQ ID NO: 172266 - DNA, 268 bp, Glycine max
aattaaactgcgtcctctctctctctcactattcgttttcttctccacggttactttcggtgatgatggaggacccgacaacgttgttgaacagcgaatattcgaggctgttcggcgaagacacggacttgtacaaccgcattgtgttgggcgccctattgccgcactctgtgtggggcccactcccgcgcttcctccagacgtggcttcgcaattacctcggcggcgttctcctctacctcctctctgggctcttgtggtgcttcta

SEQ ID NO: 172267 - DNA, 270 bp, Glycine max
gctagaagcaataagatgaaaatgaaagtgcttgttttgtatgttgctacagttttggtagcatatgaatgccatggctcagactaccaaaagttccctctccaaatgaaaactgggtttggtgggcaatacagcaatgaggtggcatgtgccagttggaggcttggcgtggaagcaaacaacgtagtcaagtggcaaactgttcctgcagcttgcggagagtacatagctgactacgttctaggagaccaatatagatcagattccaaa

SEQ ID NO: 172268 - DNA, 273 bp, Glycine max
attcagattacattgcaaaaatggcatcattcaccatgacagcttccatccttggcagcccagccgtcaccaaccggtcggcagtagcaacgcagaggagatcactcgtagtgaatgctgccaaagctgttgaagcagaaaaggtcagttatgacaatgacatggatggtagcaatggaaggaggaacttgatgttcgccgcggcggcggctgctgtttgctctgttgctgggatggcagtggcagatgagcctaaaccaggaaccccagaag

SEQ ID NO: 172269 - DNA, 273 bp, Glycine max
ctcgagccgtatccctctaatcactctagctgttgcaaatttctactatttttcaatggcttctgcagatgttgagttccgttgctttgttggtgggcttgcttgggtcaccggcaacgatgccctcgagaaagccttttcaatctacggcgacatcgttgaatcgaaggttatcaacgaccgtgagactggaaggtccagaggattcggatttgtgaccttcgcctcagagcagtcaatgaaagatgcgatcgcaggaatgaacggccagga

SEQ ID NO: 172270 - DNA, 274 bp, Glycine max
cagaactttgtttcccaacctccattgcctccgcttctacctcgctaccatgatcattcctgagaagaaccgcaaggagatctgcaaatacctcttccaagagggagtttgctttgcgaagaaggacttcaatttggcgaacaccctgagattgacgtgccgaatctgcaggtgattaagctgatgcagagtttcaagtctcgcgagtatgtgagggagacttttgcttggatgcactattactggttcctcaccaacgatggaatcgagtttc

SEQ ID NO: 172271 - DNA, 269 bp, Glycine max
ggcataacctaaacttacccttcttctctctgtgtgtgtgcgcatcaaacgcaaccagaagcagccatggccactgcaagaactgtgaaggacgtttctcctcatgagttcgtcaaagcttactcttctcacctcaagcgatctggcaagatggagctgccagagtggactgatattgtgaaaactgcaagatttaaggagttggctccttatgatcctgactggtactatgtcagagctgcttccatggcaagaaagatctacttgag

SEQ ID NO: 172272 - DNA, 268 bp, Glycine max
  unsure (1)..(268): unsure at all n locations
atgaagttcaatccacgtgtgtcgagcagccgccgcaagagccgaaaggctcantttcacggcgccgtcgagcgtgcggcgggtgcttatgagcgcccctctgtcggcggagctgcggtccaagtacaacgtgaggtcgatcccagtacggaaggaggacgaggtgcaggtggtgcgaggaacatacaagggtcgcgaggggaaggtgactcaggtctaccgtcgaaagtgggtgattcacattgagcgcataacccgcgagaaggtg

SEQ ID NO: 172273 - DNA, 267 bp, Glycine max
gtcaggaggagcactagctaagttcacaatttcaaaatggctaggggactaaagaagcatttgaaaaggctcaatgctcctaagcattggatgcttgacaaactgggtggtgcatttgcgcctaaaccctcatctggaccacacaaatcgagggagtgcctccccctcattcttattctgcgaaaccggctgaagtatgctctgacataccgtgaagtcattgctattctgatgcagcgccatgttcttgttgatggcaaagtcagg

SEQ ID NO: 172274 - DNA, 271 bp, Glycine max
ctctctcagaatttctatctatctcttgtttcaatttcaacaacggttactcctttttcgttttgagtttcaatcaagccatcatcatgtctaccgcatcgcaacccaaggccaagaaaacggcgtcgtccaagaagcccctctcccaccctcccttcgccgtgatgatagcagaggcgattgcgagtctgaaagagagaaccggttcgagccaatacgcgataaccaaatacatcgaagggaagcacaaggagttgcctgcaacctacaa

SEQ ID NO: 172275 - DNA, 267 bp, Glycine max
gtaaagagggttagagaaataaaaagagaaagccgacagcacatagatagagagaggaaaacgacttaatattctttttccttgagacctgaaggggctaaggaaaattagaaggacacacaagtataaaggcggtgaaataaaagagaaagacaagaagacgacatgggaagaccaccttgttgtgacaaagaaggggtcaagaaagggccttggactcctgaagaagacatcatattggtgtcttatattcaggaacatggtcct

SEQ ID NO: 172276 - DNA, 265 bp, Glycine max
gtggttacgaggataaaactgattggggaagtgagataggatggatttatggttctgtcacagaagatattcttaccggatttaagatgcatgcccggggttggcggtctatatactgcatgcctaagcgcccagcgtttaaaggttctgctcccatcaatctttcggatcgtctaaaccaagtgcttcgatgggctttaggttccgtggaaattcttttcagccgacactgtcccatctggtatggttatggtggaaggttaaa

SEQ ID NO: 172277 - DNA, 267 bp, Glycine max
catcatcttcctcttcctctccaccctccacatagcttccaccctctcaacccccatcaacttcatcaagtcctcctgcagcaccacccagtacccagccctctgcatccagtccctctccgtctacgcctccaccatccagcaagacccccacgagctcgtccagacagccctctccctctccctcaaccacaccgaggccaccaaaaccttcgtcgcatgatgcaacaaattcagaggcctcaaaccgagagaatacgctgcctt

SEQ ID NO: 172278 - DNA, 268 bp, Glycine max
gtttctctttctctctctctctcttaattcctgaaaagcaagtagctaaggaaaacaagaacatcatcacagaaactcacaaaggaaaaacaaacaaacaaacaaaatgtcttctccaagcaagcggcgagaaatggacttgatgaaactgatgatgagtgactacaaggtggagatgattaatgatggaatgcaagagttttatgtgcacttccatggacccaatgagagtccttatcatggaggtgtatggaaagtaagagttgag

SEQ ID NO: 172279 - DNA, 267 bp, Glycine max
caagacaaagagcagaagctttggctgccttaaataatgcattcaattcatctcctgagacaacgtccagtgcggataagttgaatgggttaaatcgaggtggaccgagacaaagggcagaagccttagcagccttaaactctgcatttaattcatcatctggaaccaaagtttatactccaaggccatctggaagaggtcaaggatcacaaagagcagcagcagtagctgctctctcttcagttcttactgctgaaaagaagaaaa

SEQ ID NO: 172280 - DNA, 269 bp, Glycine max
gagagggagtcagagaaaccctaggtaagaagaaaagatgccggctggtcatggtttgagatcccgcaccagagattccttctctcgtcctttcaggaagaagggaaccatcgccctcaccacatacctgagaacctaccacgtcggcgactatgttgacgtcaaggttaacggtgccgttcacaagggaatgccccacaaattctaccatggccgcaccggacgcgtctggaatgtcaccaaacgtgctgttggcgtcgaagtcaaca

SEQ ID NO: 172281 - DNA, 268 bp, Glycine max
cgttgtcgttcagttctgaacggaaaagcaccgtcgcaccttccctgaggcttctcttgtctgtcgcgagtgaccatggtgagggttagtgtgctgaacgatgctctgaagagcatgtacaatgctgagaaaaggggaaagcgccaagtcatgattcggccatcctccaaagtcattatcaaattccttttggtgatgcagaagcacggatacattggagagtttgagtatgttgatgaccacagggctggtaaaatcgtggttgaat

SEQ ID NO: 172282 - DNA, 270 bp, Glycine max
  unsure (1)..(270): unsure at all n locations
ctctctgctctgcattggtgttcccatntttcagaatcacaacttcagctttctccaaatgtggcatcagggcttccattgccgttgagcaacaaacttcgcagactaaggttgctctcctcaaaattggtaccagaggaagtccactagctctggctcaggcatatgagaccagagacaagctcatggcatcacatccagagctagcggaagaaggggctattcagattgtgataataaaaacaactggtgacaaaatactatcacagc

SEQ ID NO: 172283 - DNA, 262 bp, Glycine max
gcaattttcagttctctctctcgcttagtcaaagggattcatcgttcttcttcccaggttctttagacgagcctaatggtgaagacttgctgcataggtgctggatatgtggggggtcctactatggcagtcattgcacttaagtgcccatccattgaagtcgctgttgtagatatctctaaatcccgcattgcagcctggaacagcgaccagcttcctatctatgaacctggccttgatggtgtcgtgaagcaatgccgtg

SEQ ID NO: 172284 - DNA, 265 bp, Glycine max
ctctgctcgtagggtttctccacctagagggaaatggctcccaaaccgcctagtacgggtctgtttgttggactgaacaagggtcacgtcgtcaccaagaaggaattgcctccacgcccctcagatcgtaaggggaaaacaagcaagagggtgcactttgtgaggaacctcataagagaggtagccggttttgcaccctatgaaaagcgtataactgagttgctgaaggttgggaaggataagagggcactgaaggttgcaaaga

SEQ ID NO: 172285 - DNA, 264 bp, Glycine max
ccttcttctccgcttcctcttcgatcatcgcttcagaatgccgccgaagttcgacccctcccagatcgtcgacgtcttcgtacgcgtcaccggcggtgaggtcggcgcggcgagttccctcgccccgaagatcggtcccctcggtctctcccccaagaagatcggagaagatatcgccaaggaaaccgccaaggactggaagggcctccgcgtcaccgtcaagctcaccgtgcagaaccgtcatgccaaggtcacggtggtccc

SEQ ID NO: 172286 - DNA, 264 bp, Glycine max
agcagttgctaccatggtcaccttcaggtttcaccagtaccaggttgttgggagggctcttcccactgaaactgatgtgcatcctaagatctacaggatgaagctgtgggccaccaatgaggtccgtgccaaatccaagttctggtatttcttgagaaagctaaagaaggtcaagaaaagcaatggccaaatgctagccatcaatgagatttttgagaaaaatcctaccaagatcaagaattatggaatttggctgcgatatca

SEQ ID NO: 172287 - DNA, 263 bp, Glycine max
gcttctcattgttgaaaagaaaccctagcaagtggagcaatggcagacgttgaagtcgatgtggcggcagcagcagcagcagggctgccgaagaagagaacgttcaagaagttcagttttcgaggcgtggatctcgatgcacttctcgacatgtccaccgatgaactcgtcaagatgttcagtgcccgcgctcgtagaaggttccagagaggcctcactagaaagcccatggccttgatcaagaagctccgtaaagcgaaaag

SEQ ID NO: 172288 - DNA, 264 bp, Glycine max
gaacaatgggaggtacattgttcagaagaccaaagatagtgaattgggaaccctcttgggagaagattggatcagaaaacacgctgcaaaagttaggcaattccatgtgcactatcaaagaagctcgtggaataagctattagggattctgaagttggatagtaatgggtcaatgccccatattaacttggcaaagtcaatgaaggagaaactcaagtcgtttaacacagtttttgaggagatatgcaaggaacagtcttcatg

SEQ ID NO: 172289 - DNA, 266 bp, Glycine max
tgcttttctcacccttcctcactctcactttcttcctcctcttctcttcttccgttgctgagataccgcagcgacagaatctccataacggacttcggtggtgtcggcgacggccgcacgctgaacacgaaagcgttcagagcggccgtgtaccgcattcagcacctgagaaggcgcggcggcacggtactttacgtgcctccgggggtttacttaacggagagcttctacctcactagccacatgacgctttatctggctgctgg

SEQ ID NO: 172290 - DNA, 269 bp, Glycine max
tagtaagccactatcgtttctctctaacagcaaaaaagttctaacctcaccaaacccacactaccatgggtaatgagaatcgcgagcttcacgtattattcttccccttcccagctaatgggcacataataccaagcattgacttagccagagtctttgcttcaagaggaatcaaaaccaccgtagtcaccactcccctcaacgttccactcatttcaagaaccataggaaaagccaacatcaaaatcaaaacaatcaagtttccttct

SEQ ID NO: 172291 - DNA, 263 bp, Glycine max
gttgaagctttgaaagctgggaaagtcattgcagtaccaactgatacactctatggatttgcttgtgatgcttgctcaatggaagcagttaacagaatttatgagattaaaggccgtagacatacaagcccagtggctatttgtgtcggtgacgtatcagatatagcccgttttgctgtcactgaccatttacctcatggtctgcttgattccctcctacctggggcctgttacagttgttctaaaaacgagggattcaagta

SEQ ID NO: 172292 - DNA, 262 bp, Glycine max
caacatcgaaacgaggtcgttttgtgttccgccgaaggaccggaggttgtagcaggctagcagctatggatttggcatccaatctcggtggcaagattgacaaagccgaagttctctctgccgttcagaagtatgagaagtatcatgtttgctatggaggtcaagaggaagagaggaaagctaattataccgatatggttaataaatactacgatcttgttaccagcttttatgagtttggctggggggaatctttccattt

SEQ ID NO: 172293 - DNA, 263 bp, Glycine max
catcttcaccctttccctgtctctcagaaagatgaaggtggtcgctgcgtatctgctcgccgtcctcggtggcaacaacaccccctccgccgatgacatcaaggaaatcctcggctccgttggaatagaggcagatgaagataggattgaatcgttcttgtctgaagttaagggtaaggatatagttgagctaattgctgccggtaaggaaaagctggcctcggtgccttctggtggcggtggtgccgttgccgtcgccgctg

SEQ ID NO: 172294 - DNA, 260 bp, Glycine max
gcagtccttactaatggacctttcttattgaatcttgattgtgatcactacataaacaacagtaaagccttgagggaagctatgtgctttatgatggatcccaaccttgggaaaaatgtttgctatgtccagtttccacagaggtttgatggtattgataggaatgatcgatatgccaatcgcaatactgttttctttgatataaacttgagaggtttggatggcattcaaggtcctgtttatgtgggtactggatgtgt

SEQ ID NO: 172295 - DNA, 261 bp, Glycine max
agcaaacacaaacacttgaagtactaagttagtgtttttgagcaaactatggcttcgttttgttctagattgaccatttgtttggctctgtttgtcctcatattggggagtgccaatgcccaactttctacaaacttctactaccattcgtgtccaaacctcttctccactgtgaaatccacagtgcaatctgccatatcaaaggagacccgcatgggtgcttctctcctccgcctgttcttccacgattgctttgtcaat

SEQ ID NO: 172296 - DNA, 265 bp, Glycine max
gattattaatcgtatcagtgaaagaagtaagaagagagagaagtgaagttagtagtataaatgtacaaactctcctctattcagtgtgtggcgccgtttacgatctcactctgcactctctccttctcatcctcttctcttcgcttctctgttcgtgccacttcttctcgagcaatggcatctcatattgttggttatccacgcatgggacccaagagagaacttaagtttgctttggaatctttttgggatggaaagagtagtg

SEQ ID NO: 172297 - DNA, 270 bp, Glycine max
ggttatttcgctgccactgccttctcttgtttgttgttgttgttggaagccaaaaccctagcagccggcgagaatggcagacgttgaggttgatgtggcggcggcggcggcggcggcggctgcagggcagccaaagaagagaacgttcaagaagttcagcttcaggggggtggatctggacgcgcttctggacatgtccactgacgaactcgtgaagatgttcagtgctcggcacgcagaaggttccagagaggtctcaccagaaagccc

SEQ ID NO: 172298 - DNA, 267 bp, Glycine max
cttcattcactgccgttacgccaaacaccattttttcttccttccttttttgtttcctattccttcttcaattctctctcttcatttagtagtaaacatttttttggcctcgttgaagcaatggtggggggtggcaattccaaatccgatatctcctttgctggcacttacgctagcagtgctttcgctgcatgtttcgccgaggtgtgcactcttcctttggacactgtaaagttaggcttcagcttcaaaaacaggctgtacttg

SEQ ID NO: 172299 - DNA, 263 bp, Glycine max
aaaagacactgtctcgcgagtgaacacaggttacagcaatggctttctttggtagaattgggaatttattaagacagacagcaagcaggcaggttagttcagaattgcgatcatccccttcgttttttcaggctatacgcagtatgtcatctgctccaagcacaaagctgtttatcggaggtgtttcatattctactgacgagcaaagtttgagggaagctttttcaaatatggtgaagttgttgatgctaggataattatgg

SEQ ID NO: 172300 - DNA, 260 bp, Glycine max
aactttagccgaggtcaggaggagcactagctaagttcacaatttcaaaatggctaggggactaaagaagcatttgaaaaggctcaatgctcctaagcattggatgcttgacaaactgggtggtgcatttgcgcctaaaccctcatctggaccacacaaatcgagggagtgcctccccctcattcttattctgcgaaaccggctgaagtatgctctgacatacgtgaagtcattgctattctgatgcagcgccatgttct

SEQ ID NO: 172301 - DNA, 259 bp, Glycine max
tgggaaacaaatcaagatgtcagaagatcacaagtttacgaattattctgaaagactcagaatcgaagagacaggtgaaccattaaaagatggggaaacacgtctatatggtataaatctggcaagaatgcttggggacaaattcctgaaacagcaggattcccggttcagttcagaaccttatattagtcaagttgtgcatattgatcaagcaagcaaggctttgctattctagctagtgatgggttatggaatgtca

SEQ ID NO: 172302 - DNA, 259 bp, Glycine max
aagaaaaagaggcgcaagatgagtggtagggtttctgggaaggtgaagtggttcaatgatcagaaggggtttggattcataagccctgacgatggcagcgacgatctcttcgttcaccaatctcagatcaaatctgacggtttccgaagcctcgccgaaggagagtccgttgagttcgccattgaatctgaatctgacggacgcgcgaaggctgttgatgtcatggccccgacggcgccagtgtccagggaaccagacg

SEQ ID NO: 172303 - DNA, 262 bp, Glycine max
tctgtttctgtctctgtgtttgcggctgaggattccgaacgagcgaccttcttcgtttctcgcaaagtttaagtcatcatgggtaaggaaaagactcacatcaacattgtcgtcattggacatgtcgactctgggaagtcaactaccactggtcatttgatctacaagcttggaggtattgacaagcgtgtgattgagaggttcgagaaggaggctgctgagataacaagaggtcattcaagtatgcctgggtgcttgacaa

SEQ ID NO: 172304 - DNA, 266 bp, Glycine max
ggaaaccctagctggataggtcaaacatcatcatgtcggacgaagagcaccatttcgagtccaaggcagacgccggtgcctccaaaacctaccctcagcaagccggtaccattcgcaagaacggctacatcgtcatcaaaggacgcccctgcaaggttgtggaagtttcgacttccaaaactggtaagcacggtcacgccaagtgccactttgttggaattgatattttactgccaagaaacttgaggatattgtgccctcttctc

SEQ ID NO: 172305 - DNA, 263 bp, Glycine max
ggaaaagaagcaggtcgtattgtgatgggtctttttggaaaggctgttccaaaaactgcagaaaactttcgagctctttgcactggggaaaagggaactggtaaaagtggcaagcctctccattacaaaggtagctcattccatagaattattcctagctttatgctccaaggaggtgattttacacatggcaatggtatgggtggagaatcaatttatggagagagtttgctgatgagaacttcaagttaaagcatactgga

SEQ ID NO: 172306 - DNA, 257 bp, Glycine max
ccgaggcgaagagaagagaaaaattaagatggaggggaaggagcaggatgtgtcgctgggagcgaacaagttcccggagagacagccgattgggacggcggcgcagagccaagacgacggcaaggactaccaagagccggcgccggcgccactggttgacccgacggagtttacgtcatggtccttttacagagcagggatagcagagtttgtggccactttctgtttctatacatcactgtcttaaccgtcatggg

SEQ ID NO: 172307 - DNA, 256 bp, Glycine max
gtgagtttgttgatcgagataactagaaacagtgtgatgaaaatgaaggtccttgttttcttcgttgctacaattttggtagcatggcaatgccatgcgtacgatatgttccctctccgaatgaacactggctatggtgcccgtactccggaggtgaaatgcgcaagttggaggcttgctgtggaagcacacaacatctttggctttgagaccattcctaagagtgcgttgaagcaacaaaggaatacatccatgg

SEQ ID NO: 172308 - DNA, 256 bp, Glycine max
ctcactgtcttccttctctagggtttttagctcccccaatttcttcgctcaacatggttcttcaaaatgatattgatttgctaaatcctccggttgagcttgagaagaggaaacacaagctcaagcgtcttgttcagtcaccaaactctttcttcatggatgttaagtgccagggttgcttcaacataaccactgtctttagccactctcagactgttgtgtatgcggaaactgccagactgtcttgtgtcaacca

SEQ ID NO: 172309 - DNA, 251 bp, Glycine max
gcctgggcacggcggtatgggggcattgcttgctggtggtgctgctgcggcagactgcgtatggggctcaccatgtttcccatggccatcatggatatggtgcatatggaggatatggacacatgccccatgggaaattcaaacatcatggcaagttcaagcatggaaagttcggcaagcatgggaaatttaagcatgggaagtttggcaagggtagttcaagaagtggaagtgatgatattatattaatt

SEQ ID NO: 172310 - DNA, 248 bp, Glycine max
gcttggaaaattagcctcacaaaagcaaagatcaaacaaaccaaggacgagaacacgatgttgcttgaacttgcacttggtttattggttttggctctgtttctgcacttgcgtcccacacccactgcaaaatcaaaagcacttcgccatctcccaaacccaccaagcccaaagcctcgtcttcccttcataggacaccttcatctcttaaaagacaacttctccactacgcactcatcgacctctcc

SEQ ID NO: 172311 - DNA, 253 bp, Glycine max
gtcgtgtcgcagcaaaaccaagccacccactaacttgtttggtccaagacatggctctgatcctgcatgctaccaaaacaaacaagaatgccttcaagactctgattgcggcagagtacagtggcgtccaagtggaattggcccctaatttcgagatgggtgtctctaacaaaactcctgaatttctcaagatgaatcctattggaaaggttcctgtttggaaacgcccgatggtccagtctttgagagcaat

SEQ ID NO: 172312 - DNA, 254 bp, Glycine max
gtgattgttgtgactcgttcttcttcgtcgttatcttcttcttttgatgtttgtgtgtatgttttttctctcacctgaaaatgtcttgctgcggtggtaactgtggttgcggaagcgcctgcaagtgcggcaacggctgcggaggctgcaagatgtacccagacttgagctacaccgagtcaaccaccaccgagaccttggtcatgggagtggcaccgttaaggctcaattcgagagtgctgaaatgggtgttc

SEQ ID NO: 172313 - DNA, 256 bp, Glycine max
tggatttgcagatttgaaggagatagcgtctcttatcgagaccggttcgtactcgaaggaagttcgtagaattgctcgcgctgttcgccttacaattgcgttgaggcggaaattgacagcatccgctatctcttcttttctcgatcatgttctcactcctggctctgaagttcacgccaaattgtctgcgtatcttcccaaggatgatgatcatgagatgaagtggacgctgcaacatctgcgattgaaaccccag

SEQ ID NO: 172314 - DNA, 256 bp, Glycine max
gccgtgtcgcagcaaaaccaaaccacatattaacttgtttgctctaagtcatggctctgatcttgcacgcaaccaaagcaaacaagaatgctttcaagactctgattgcggcagagtacagtggcgtccaagtggaattggccctcaatttcgagatgggtgtctctaatagaactcctgaattccttaaaatgaatcccataggaaaggttcctgtcttgaaacgcccgatggtccagtctttgagagcaatgcc

SEQ ID NO: 172315 - DNA, 254 bp, Glycine max
ggcaaagtggtccaggtctatcgccgcaagtgggtcatccacatcgagcgcatcacccgcgagaaggttaacggctccaccgtcaacgttggcattcacccttccaaggttgtcgtcaccaagcttcgaatggacaaggaccgcaaatccttgctcgatcggaaggccaagggtcgcgccgccgccgacaaggaaaagggtaccaagttcgctcctaggatgtcatgcagaccgtcgattaatttctctcttta

SEQ ID NO: 172316 - DNA, 255 bp, Glycine max
gggaaatcgtggtgcagttcaatgctgatattgctgatgggatgcaatggaagtttgttcccacacagagagaggttagggtcaagcctggtgaaagtgcccttgcattttatactgccgaaaacaaaagttctactccaataacaggtgtttctacgtataatgtcactcctatgaaggctgcagtgtacttcaataaaattcaatgcttctgcttgaggagcagcgacttcttcctggagagcagattgacat

SEQ ID NO: 172317 - DNA, 255 bp, Glycine max
  unsure (1)..(255): unsure at all n locations
ccttctagtgatgatagagcaaagtgtaaggcattttaaactgttcactgcggttgctcnacgtctcgtccttgttcttctgtataagctnttgttcaatctcttgaagcttctatccaaacctcttgaagactattactggcaagaaggagaccctcattgaccttacaattatagaaatcttgtcaaggcacacatctgatgagttctaccttacgggagagatggtggtgactattggacttctgatgctgg

SEQ ID NO: 172318 - DNA, 253 bp, Glycine max
cgctcacaactcgcaaaccacaatgcctaagcagatccacgagattaaggatttccttctgacggcacggaggaaggatgcgaggtcggtgaaaatcaagaggagcagggatgtcgttaagtttaaggttcgatgctccaagtatttgtacacgctttgtgtctttgatcctgagaaagccgataaattgaagcaatctcttcctcccggtttgagtttcaagacctgtagaggtgctgagtgcggcagcgtg

SEQ ID NO: 172319 - DNA, 251 bp, Glycine max
caggagtttgacatttgttgaggccaatctttggactcttaagaccctcaggactgctgctcttcaggccaggaatctcagtaacccttcttcccagaatttgttgtgggaagcttttaacactcatggatgatttttgtgaaaagattgatgatcatcaatcaagtttctctcttttttttcccacccttttgaaaagcttttaatcaacatctagttgtcaaaaaaaaaaaaaaaagggcggccgccga

SEQ ID NO: 172320 - DNA, 251 bp, Glycine max
tttgcatttcatttgagagagagagcgtcttacctttccattatcaaaatggctgtttcggctatcacaggagcgaggctaaccctagggatagggttggcgatacctctttcctctcccacgcgctctcgaaccgtcgcaatggccgtatccgtcgaccccaagaccgacaacaaactcactcttaccaagtccgaggaagctttcgctgctgcaaggagctgatgcctggaggtgtcaactccccagtt

SEQ ID NO: 172321 - DNA, 250 bp, Glycine max
gtagagaagcactcttcgttcttcgactgtctacgatctgctttctctgaattgtgaaaatgtcgctccgagaaactgcttgttcatacgcagctctcatccttcatgaagatggaattagtgtaactgctgacaagatcagcaccttgttgaaaactgcaaaggttccagtagactcttattggccaaccttgtttgctaaacttgctgagagaaaaatcttggcgatttgatagcaaatgcggcaggc

SEQ ID NO: 172322 - DNA, 250 bp, Glycine max
ggaaaacaagccttctttggccaaactgatgctgagggtggttttgattccaatgctgtggcaactgcaaacatcttggagagttcaacgcctgtcattgatgggaaacagtactacagtttgactgtgttgacaaggacagctgatggagatgaaggtggcaagcaccagctgattgcagcaactgtgaaagatggcaaactatacatttgcaggctcaagctggagacaagagatggtttaagggagc

SEQ ID NO: 172323 - DNA, 247 bp, Glycine max
agaagctaaagaaagaaaggagatgggagtggagaagcagttgttgaggtctggcaccggtccgaagccaattcccggtcagaacgtaaccgttcactgcactggtttcgggaagaacggtgacctttctcagaaattctggagcacaaaggatcctggccagaacccattcactttcaaaatcggccaaggttctgttatcaaaggatgggagaaggtgtgcttggcatgcaaattggtgaagttg

SEQ ID NO: 172324 - DNA, 251 bp, Glycine max
tgcgagcggccgctcgctatctagaacaccagaactgttgtcagtgggcttgtcaaatttataccactcgatgaaatgcagaaccgaaaggtctgtgttctttgcaacctaaagccagtaaccatgaggggcattaaatctcaagcaatggttcttgctgcttccgatggtgatcacaccaaggttgagttggttgagcctcccagttctgctcaccaggagaaagaattacattccctgggtatgaaggt

SEQ ID NO: 172325 - DNA, 253 bp, Glycine max
gaacgctgctgccgaaacccttccggaaccctaaggtaagtgagtaatcagtggttgagaatggtggagaaggcgaagggtagaaaggaggaggtggttacccgtgagtacaccattaacctccacaagcgcctccatggctgcacatttaagaagaaagctcctaaagctattaaggagataaggaaatttgcccaaaaggccatggggaccaagatgtgagggtggatgtgcagttgaacaagtttgtctg

SEQ ID NO: 172326 - DNA, 252 bp, Glycine max
atttcagaactgtcgttgatgtattgtcagaacgcacgaataaatcaaaagttttgaatctggacttgcttaatgtcacccaaatgtcaatacgcaggagagacggccatgcatctatttactatatcggaccagacagcacagcctctatgcagcggcaagactgtagccattggtgcctacctggtgtgcctgattcatggaacgagattcttatgcacttcttctcaagcgggaggatatttttgaacg

SEQ ID NO: 172327 - DNA, 247 bp, Glycine max
ggaaggcatgtgcttctttagaaccaaactatcaacctccagtaactttcatagttgtacaaaaaagacaccatacccggttgtttgcaaataaccacagggacaggaacagtacagataagagtggaaatatattgcctgggactgttgttgattccaaaatctgtcatccaacagaatttgatttttatctgtgcagtcatgctggcatcagggtacgagtcgtccagctcattatcatgttctg

SEQ ID NO: 172328 - DNA, 247 bp, Glycine max
ctcttctttgcttcggaagaaagagacaaacaaataacaatggcgttcgcttctttcctcggcagagttctcttcgcttccgtcttcatactctctgcttaccaagaatttaacgaatttggagttgatgggggacctgcagcaaaagcactcagacctaagtttgatgcctttacacatcgagtgcattctcaagttggctttcaacttccgagattgatctgaaatttttaattgctggggctat

SEQ ID NO: 172329 - DNA, 249 bp, Glycine max
ccagagagtgatacaatacagagtgcgttgttgctccttcgccacaactccctgccaacatgggtatctccagagattctatgcacaagaggcgtgccactggtggcaagaagaaggcatggaggaagaagagaaagtatgagcttggtcgccagcctgctaacactaagctgtcaagcaacaagacagtcaggaggatccgggttagaggtgaaatgtgaagtggagggcactgagattggatactgg

SEQ ID NO: 172330 - DNA, 211 bp, Glycine max
attcggctcggtgtaagtaggcgcagcgcgaggggcggcctcaggaggagaatgatgtctcacggggagttcgatgacccaaggcacggttcgctgggattgcttcccaggaagcgtgctggtcgtcacaggggaagaagtgaaggcattccccaaggatgacccatccaagggacccaagctcactgcagtctgtggttagagggccggt

SEQ ID NO: 172331 - DNA, 248 bp, Glycine max
gaacattcttggctctgctgtcaccaccgttgacaaacaaactgtgtgcaactgtctcaaggcggatgctgctaggtacaacatcaatgaccagtatgctcaggcactccctggtttctgcaaggtcaatgtcccttacaagatcagccgctccactaactgtgcaagcatcaggttctgaacaagccatggacagatttgctcatttctgagcgggatactgaggcagcagtgaagcacttactatc

SEQ ID NO: 172332 - DNA, 248 bp, Glycine max
cagatcttgaagcaagcaaatatcagatggctgagtacaggatctctgtttatggaagaaaacagagtgagtggggtcagctggctagttggtttgttaacaatgctctttatagtaagaatgccgtatggctaatccagttaccacggttatacaatgtgtacaagaatatgggaattgttacctcctttcagaatattctagataatgtgttattcctctatttgaagtcacagtggatccaaatt

SEQ ID NO: 172333 - DNA, 249 bp, Glycine max
ctcactttaaaaagcccagtagccgaaacctcaacaaaagcactgtcttccttcaaatccggctgagcgatgtagatattagggtttttgagttcggtgcggcgatcctagcactctcttctgcagctttcgccgacagcttcattcaccatggctgagcaaaccgagaaggcttgtttgaaacaaccagaagtgtttctcagctcgatgaaactgggaaggggaagagacccggaaagggtggtaacg

SEQ ID NO: 172334 - DNA, 250 bp, Glycine max
gctgaatgatcttcttgatgctctggatttcaaccaagtagttatttttgtcaaaagtgtcagcagagctgccgagttgaacaagttgcttgtggagtgtaacttcccatctatctgcatacattctgcaatgtcacaggaagagagattgaaacggtacaagggcttcaaagaagggaagcaaaggattctcgtggcaacagatttagttggagggggattgacatagaacgtgttaatatagttatta

SEQ ID NO: 172335 - DNA, 269 bp, Glycine max
tgcggcgtcgttttgtatgttcttctcgctggctttcttcctttccaacacgagaatctcatgacgatgtataacaaagttctcagagccgagtttgagtttccaccgtggttttcgcctgattcgaagaggctaatctccaagattctagtggcggatccctcgaagaggaccgcgatttccgccatagctcgcgtgtcgtggttccggaagggcttttcttcgctttccgcgccggacttgtgtcagttggagaaacaagaagatgc

SEQ ID NO: 172336 - DNA, 270 bp, Glycine max
tttgtttcattgacgcattactattactctctctgagtcattcactcactcctctctcttctctgtttcattgcttcttgttgtcaactatgaacgctcttgcagccaccaaccgcaactttcaacgtgcagctcgcattcttggtttggattccaagcttgagaagagcctcctcatacccttcagagaagtcaaagttgaatgcacgattccaaaggatgatggaactctggtttcctatgtgggattcaggatccaacatgataatg

SEQ ID NO: 172337 - DNA, 270 bp, Glycine max
ggctgatggaggttaagaagcatccctttagcatgagtgaaattaaatccttggtacggcaacttcttgaaggtgtcaagtatctccatgataattgggttatccatagggacttgaaatcatcaaacatcctgctgaaccatgatggggagctaaaatatgcgactttgggttgtcaaggcagtatggaagcccgctgaagccatatactcctgttgtggttacactatggtacagagcacctgaacttttgctgggtgctaaagaata

SEQ ID NO: 172338 - DNA, 270 bp, Glycine max
cacatcgcagagaagaacagagagagatccatccatcaattccaatggccgatcagctcaccgacgaacagatctccgagttcaaggaagccttcagcctcttcgacaaggacggggatggttgtattaccaccaaggaacttgggaccgtgatgcggtcacttggccagaacccaactgaggcagagctgcaggacatgataaatgaggttgatgctgatgggaatggtaccattgatttcccagaattcctgaatctcatggctcgca

SEQ ID NO: 172339 - DNA, 187 bp, Glycine max
cgcagagagaaattgagtttctgagataaccacttttctctttgattcatcaatggcaaccgcgaggaccgtgaaggatgtttcgcctcacgatttcgtgaaggcttacgcctcccatctcaagcgttccggcaagatggagcttcctgagtggactgatattgtaaaaacagcaaaatttaaggaa

SEQ ID NO: 172340 - DNA, 267 bp, Glycine max
caaacaccattttttcttccttccttttttgtttcctattccttcttcaattctctctcttcatttagtagtaaacatttttttggcctcgttgaagcaatggtggggggtggcaattccaaatccgatatctcctttgctggcacttacgctagcagtgctttcgctgcatgtttcgccgaggtgtgcactcttcctttggacactgctaaagttaggcttcagcttcaaaaacaggctgtacttggtgatgcagtgaccttacct

SEQ ID NO: 172341 - DNA, 267 bp, Glycine max
aaattttctcccccaaatcgtagatctacggttaaattggtgtagtgtggtaagatgggaggaggatttagagtgcttcacttagttaggccatttctctcgtttcttcctgaagttcaaactgctgacaggaaagtgccatttagagagaggtcatatacactgtgatctctcttttcattttcctggtttgtagtcagctccctctatatgggatacactcaacaacaggtgctgatccattctattggatgcgtgttattctcg

SEQ ID NO: 172342 - DNA, 267 bp, Glycine max
tgccttgcttggaagagaaaaatggcaacaaatggcaagacacctgcgataggaatcgatttgggcacgacatactcatgcgttgcagtgtggcagcgtgatcgagtggagatcatcgcgaacgaccaaggaaacagaacaacaccctcttatgttgctttcaataacacccaaaggatgattggtgatgctgccaagaaccaggctgctaccaatccaaccaacactgtctttgacgcaaagcgcctaattggtaggagatttagt

SEQ ID NO: 172343 - DNA, 270 bp, Glycine max
gagagagagagaaatggcttgcaggcaattgtgggcttcaagagctgcctcttacctgaggatctctgtgtttcacagaggcttttctaatgttattaaagatttcaagtatgttgattctcatgagtgggtgaaagttgatggaaattacgcaaccatcggcataactgatcatgcccaagatcatttgggtgatgttgtatatgttgaattgccagaagtgggagcagctgtgacacaaggaggtagttttggtgcagttgaaagtgt

SEQ ID NO: 172344 - DNA, 269 bp, Glycine max
catgatgttgctgacgcacttaactaccttcataactatactagtcctcctcacgtacacaagaatttgaagagtgggaacgtgcttttggatggcaattttagggctaaagtttcgaatttgggattggcaagagctgtggaggatcacggggatgatggggggtttcaattgacaaggcatgtggtggggactcatgggtacatggcacctgagtacattgagaatggtttgattactccaaagatggatgtttttgcgtttggggt

SEQ ID NO: 172345 - DNA, 269 bp, Glycine max
cggctcgaggccacacaacagcaactgcagcaatggctcccaaacgaggtggaaaggctccggctcttgccgctaagaagaagcctgagaaggtttcgaatccgttgttcgagaagcgtccaaagcagttcggaatcggaggggcgttgcctccgaagagagacttgactcggttcgtgaagtggccaaagaatgttcaaattcagaggaagaagaggattctgaagcagaggttgaaggttcctccagctttgaaccagttcaccaaa

SEQ ID NO: 172346 - DNA, 267 bp, Glycine max
gcaaaacttagggttgagcctttttttgaggttttcagcgcttctttctcacaatggttcttcagaatgatattgatttgctgaatcctccagctgagttggagaagagaaaacacaaactcaagcgtcttgttcagtcaccaaactctttcttcatggatgttaagtgccagggatgcttcaacataacaactgtgtttagccactctcaaactgttgtggtgtgcggaaactgccagactgttttgtgccaaccaacagggggac

SEQ ID NO: 172347 - DNA, 268 bp, Glycine max
cgtaactattactcactccaatactctcatactcacagctactttatcatttttctccctttcttttcttcttctgttcagcttagacactcatttttattagttttgttgctgagtgtgtgtgaaactgtgaaagagagttatggcaggaggtggtggagctccagcacctaagattgatgagccacaacctcatcccccgaaggatcagttaccgaatgtttcttactgcattacgagtcctcctccatggcctgaggccatactt

SEQ ID NO: 172348 - DNA, 265 bp, Glycine max
cttgtatttaggattcagccagctcttagttaagagcttcacctccgagttccctcacgtcgagaggtacttttggacattggtcaaccagcctaacttccgaaagatattaggtcaggttaagcaaactgagtctgttccacccattccatccgctgcaaagaagccttcccagcctaaggaatctaagcccaagcctaaggatgaaccaaagaaagcagctaaaccagagcctaaacaagaagcagaaccagaggaggaggca

SEQ ID NO: 172349 - DNA, 266 bp, Glycine max
tgacaatggctgaaacaaagtgggtcatgaaggacaaaagatggtctctccatggaatgacagctctagtcacaggaggcacccgaggcatagggcatgccattgttgaagagttagctgagtttggagcaactgttcatatatgtgcacgtaatcaagatgatattgataaatgtttagaagagtggaaaaacaagggacttaatgtgactggttcagtatgtgatttactatgttctgaccaacgtaaaagattaatggaaatt

SEQ ID NO: 172350 - DNA, 265 bp, Glycine max
ccagattcaaccagttaaacttggaacccaaggctttgaggtactattaactacattacttgctcttattttgataattgatacaattaatctcattctaggtttcaaaattgggattcggatgtatgggccttactggagcgtacaatgaccctctccaagaacaggatggcatatctgttatcaagtatgcgttcagtaagggaatcacattttttgatactgcggatgtttatggagccaatgctaatgaacttttggttgg

SEQ ID NO: 172351 - DNA, 266 bp, Glycine max
aacaatctcttaccaagatgttgttcagctatgggaaaatctcaagttcaatctcctctcagtgactctatgttccagtcttatagtattccttgtcaccttttactttatgagccgtccaaggggtgtttacttggtggattttgcgtgttacaagccagagccagagtgcacttgcacgagggagattttcatgaacaggtctgtggaaactggtgtgttttcagaggagaacttggcctttcagaagaagatacttgagaggt

SEQ ID NO: 172352 - DNA, 153 bp, Glycine max
ggggaaagaagctcagaatgtgcctactgctgcggttttgttcaacaaggcaaacgacgtattggggtttgatcttcttgatatatgcatcaatgggccaaaagaaaagctagattcaactgttatcagccagccagctatttatgtcacagt

SEQ ID NO: 172353 - DNA, 265 bp, Glycine max
ttggaggctagggtttccggattcttgcgttttaatctttgcaattcaaaagcatggggcactccaatgtgtggaactctcatccaaagaactacggacctggttctcgcacctgccgtgtgtgtgggaatcctcatggattgatcaggaagtatgggcttatgtgttgcaggcagtgcttccgtagcaatgccaaggaaattggcttcattaagtatcgctgaaggattagtgtccaactgccccattcggtttggattcttgc

SEQ ID NO: 172354 - DNA, 265 bp, Glycine max
aagaaaccttaaaaaacaagtagtgttccgaaaagatggctcagcaggaagtggtagaagggttcaagttcgaacagaggcacgggaaagagcgcgtgagagtggcgcgcgtgtggaagacgaggcaggggcagcacttcgttgtggagtggcgcgtgggcatcactctcttctcagactgcgtcaactcgtatctccgcgatgacaactctgacatcgttgctactgataccatgaaaaacacagtgtatgcaaaagcaaagga

SEQ ID NO: 172355 - DNA, 264 bp, Glycine max
attatcaacataagtcacaacaccaccattcttccattctctctctttcttctacactattcattcaatccatgccggtcaacgtgaggtgctgaaggtcaatcgtggtctttcgaaatggggaacgggagcagaagctactcggcgaaccggagcgactacaagcttctagaagaagtcggttacggcgccagctccaccgtctaccgtgcaatctacctcccctacaacgaggaggtcgccgtcaagtgcctggatctggat

SEQ ID NO: 172356 - DNA, 266 bp, Glycine max
gtttcttttcgtgaaacaaaagaaaacaaaagattaggttttgtgatgtcgggcatggagaggcttcagaggatgttcgcgggtgcaggtggagcgctgggccatcccccaccggattcccccaccctcgattcctccgagcaggtctacatctcctccctcgcccttctcaaaatgctcaaacacggaagagctggggtacccatggaagtgatgggtctgatgttgggggagttcgtggatgagtacaccgttcgcgttgtgga

SEQ ID NO: 172357 - DNA, 265 bp, Glycine max
ctagctagccacaatgcagatattcgtgaaaaccctaacggggaagacgataaccctgagaggtagagtcatcggacacaatcgacaatgtgaaggcgaagatccaggacaaggagggcatcccgccggaccagcagcgcctgatcttcgccggtaagcagctggaggacggccgcaccctcgccgactacaacatccagaaggagtccacgcttcacctcgtcctccgcctccgcggcggcgccaagaagcgcaagaagaagac

SEQ ID NO: 172358 - DNA, 264 bp, Glycine max
ttttcgttctgttttggcttcttcgctgcaactctctaccttccctctttttccgaatctgaatagaaatggcttcggagactgagacgttcgcttttcaggccgagatcaaccagctcctcagtctaataatcaacaccttctacagcaacaaggagatctttcttcgtgagctcatcagcaatgcctctgacgctttggacaagattcgatttgagagtcttacagacaagagcaagcttgatgctcagccagagttgttca

SEQ ID NO: 172359 - DNA, 263 bp, Glycine max
tcaagttttttctcttctctcggtttcatcgccatggatgaagaagtgcgcaagatcttcagcaagttcgacaagaacggcgacggcaagatctcgtgcgccgagctgaaggagatgatggtggcgctgggatccaaaacgacgtcggaggaggtgaagcgcatgatggcggagcttgatcggaacggcgacggctacattgacctgaaggagttcggcgagttccattgcggcggcggcgacgggagggagctccgggaggc

SEQ ID NO: 172360 - DNA, 264 bp, Glycine max
gaaaccacgacacaagtccaaagtttgattccaaaatgcgatcctcaagcattcgcagcttcaccatcttcaccctctttctcattgcgatcctcccccacggacacgcaacaactccaacctccaaacttcgcctcaaacctctctcttctcccttttcaaccgccctcgaaaccctccagaaacaactcgggtacaccttcaagagcatcgatcttcttcgtcgcgccatgacacacgcttccttctccgaagaaaacaaca

SEQ ID NO: 172361 - DNA, 261 bp, Glycine max
cttattcttccggaggcactaaagcttttgcccttgtacacacttgcattaactaagagtacagggttgcgaactgagggaaagatagatgagcggtcattttggataaactatgtatcctctatctctgctccattagcaataccacttgtgtatcctaggatgatggctatccatgatcttgactcaaaggaagatgaagactctgttattcctccctttcttcctctttctagtgaacacgtcagttatgatggaata

SEQ ID NO: 172362 - DNA, 249 bp, Glycine max
cgtcacgcatatatttgattggtaggttgcggaaagcagtaaaatgggctactttgttttcacaattgtgtgcggtcaaagctgattctagaacatccttggaagctgaggcttatgaatcctatatgaaagggagtttgttgtttgagcaagatcagaattgggacgtggctttaaagaacttcaaaagtgctagggctgtatatgaggaattggggaaatatggagatctggataaccaagttttgt

SEQ ID NO: 172363 - DNA, 258 bp, Glycine max
attatcctaagtctttgggaatagtgctgcaatggcttcaagtcaggaggaggtgacccttttgggagctactggaagcccatttgtgtgcagggttcatattgccctcaagttgaagggagttcaatacaaatatgtcgaagaaatttgaggaacaagagtgaactgcttctcaaatccaacccagttcacaagaaggttccagtgtttattcacaatgagaagcccatagcagagtctcttgtgattgttgaatac

SEQ ID NO: 172364 - DNA, 262 bp, Glycine max
gtgttcttccacccccgtaccgtctctgcctctctgcaatccacagccgaaaatgcctttcaagaggtacgttgagatcgggagggttgctcaaatcaactacggcaaggaatatggcaggctcgtcgtcatcgtcgacgtcattgaccagaacagagcacttgtcgatgcccctgatatggtgaggtcccaagtcaatttcaaaaggctttcccttaccgacatcaagattgacatcaagagggtccctaagaagaaagat

SEQ ID NO: 172365 - DNA, 261 bp, Glycine max
tccgaattgtagtctggagaagcgtcctcagtggcggaccgggcccaagtcccctggaagggggcgccagagagggtgagagccccgtcgtgcccggaccctgtcgcaccacgaggcgctgtcggcgagtcgggttgtttgggaatgcagccccaatcgggcggtaaattccgtccaaggctaaatactggcgagagaccgatagcgaacaagtaccgcgagggaaagatgaaaaggactttgaaaagagagtcaaagagt

SEQ ID NO: 172366 - DNA, 133 bp, Glycine max
gtctctactctgacatcggcaagaaagctagggatctgctgttcaaggactaccacagtgaccagaagttcaccatcaccacctactcaccgactggagtggctattacagcatcaggaaccaggaaaagtga

SEQ ID NO: 172367 - DNA, 251 bp, Glycine max
ctcttgggagaagaggtcgagtttcacagcagcaatgcttattgcactggtctcctgttggcccgaagagtcctcaaaacacttgaaatggatgaggagtatgaaggaaatgttgaggctactggagaggattattccgtggaacctgctgagagcaggaggccattccgtgctctccttgatgttggtcttattaggactacaaccggtaaccgtgtgtttggtgcccttaagggagctctggatggggg

SEQ ID NO: 172368 - DNA, 259 bp, Glycine max
aaacagactctctgatgagcactgggagcttaggaacttcagtgctaatcttgttacttcaatatgccaaagatttgggcatatttatcacaatctgcagccacgtgtgatgaagacatttcttcattctttcttggaccctacaaaagctttgcctcaacactatggtgcaattaaagggatagaagctcttggatcaagactgattcgcttgcttatacttccaaatctcgagccatatttgcatcttcttgagcca

SEQ ID NO: 172369 - DNA, 257 bp, Glycine max
ttcttctcccagaatcggtcactaaatccgcaatcatgaagctcgataccaccggtctcgaatcgtttcccacactgcttgcgcctcaaaacgacgtcgttggagaactctccgccgctccatccttcgaccttccgaattccaacgatttcgatgggtttgtgaaagaagctattcagatggtgaagcccgcgaagggtactacgactcttgcttttatatttaaggagggtgttatggtagctgctgattctcga

SEQ ID NO: 172370 - DNA, 254 bp, Glycine max
gggaagctttgagactatccatgttcaggatgctactgggcatgaatttgcaactcgaatgggcaatgtgttcaccattggcaagggaacaaaaccgtggatatctcttcccaagggtaaaggtattaagctatcaatcattgaggaagctaggaaaaggattgccgcccaacaagcaactgctgcttaaatctttaggatatgaatagactttgagtgcttggtagtttttattcaatgtttttggtttgtaa

SEQ ID NO: 172371 - DNA, 255 bp, Glycine max
catgactggggagcctccatagcctggcatttctgcttgctgaggcccgatcgtgtgaaggccctcgtcaacatgagcgtcgtgttccgccccagaaaccctaatcgaaagcccattcagagcctcagggccatcatgggcgacgattactatatctgcaggttccagaaacctggggaggttgaagaagagtttgcacgtgctggtgctgcgagaattataaggacatttattgcatctcgcgatccacgacca

SEQ ID NO: 172372 - DNA, 259 bp, Glycine max
agctttactactccattttcttcaatcttcacataaatgatgcagcaattattggaagatgcatgagttctccattgttgatggttttgtggagataagtgaatgcatggcagagatgaccaagtacgtggttaatgaaccatctgttgggcttttcttatccaacatcatgctcaaaatgaagtacccaatatcatcaaagttaaaaaaaatgttgttaagaagtctcatgaaacaattttgcacacagaagatttgg

SEQ ID NO: 172373 - DNA, 256 bp, Glycine max
gtgacagaggcagaggaaggggcggtggaggaagaggaggagacaggggcactccttcaaagctagaggaggtggcagaggtggtggtggccgtggcggaggcaggggtggtggccgtggtggtggcagaggtggaatgaagggaggtagcaaggttgtggttcagccccatagacatgatggtattttcattgccaagggtaaagaagacgctcttgttactaagaatcttgttcctggtgaagctgtttacaat

SEQ ID NO: 172374 - DNA, 258 bp, Glycine max
ccttgcaccaagcaagagcagcaaagtcacataatgatcataatgtgactcgcttgaaggggagaaaggagttaaatagatgtaatttgttcattggaagttgggttattgacccttcacaccctctctatgactcctcaagctgcccctttatagatgctgagttggattgccaaaattaggggacccccgataagcagtatctcaaatactcttggaagcctgattcatgtgccttacccaggttcgatggagtga

SEQ ID NO: 172375 - DNA, 260 bp, Glycine max
ggccaacgtagactatgagaagattgtccgtgacacatgccgcgaaattggattcatctctgatgatgttggtcttgatgctgacaaatgcaaggtgttggtcaacattgagcagcagagccctgatatcgcccagggtgtgcacggtcacttcaccaagcgcccagaggaggttggtgctggtgaccagggtcacatgtttggctatgccactgatgaaacccctgagtacatgcccctcagccatgtccttgcaacca

SEQ ID NO: 172376 - DNA, 260 bp, Glycine max
tctctctctagcttggacgagtgaattagattcatcatcaagatgtcgtctctgatagcagaagatgtgaagagcagatcagaggtgtaccacggggacgaaatgtgccaagtgaagtccaaggagcttctcaaggaaatcgccctccccaacggccttcttcccctcaaggacatggaggagtgcggctacgacagacaaaccggcttcgtctggctcaaacaaaagaagagttacacccacaagttcgacaagatcgg

SEQ ID NO: 172377 - DNA, 274 bp, Glycine max
cgcacaatggtgaacgttccgaagacaaagaagacctactgcaagagcaaggagtgcaggaagcacacgctccacaaggtcacccaatacaagaagggcaaggacagcatcgccgctcagggaaaacgccgttatgaccgcaaacagtccggttacggtggccagactaagcctgttttccacaaaaaggccaaaaccaccaagaaaattgtgttgaggctccagtgtcagggatgcaagcatgtctcgcagcacgctatcaagaggtgcaagc

SEQ ID NO: 172378 - DNA, 282 bp, Glycine max
tgtctttcggctaactaccccacatggctctcctccacaagctcgcacctttcacctctctctacaccaataccccccattccccaccaccccgccgccacgtcatcatctccttctccgtctcacccttcaccgagaagcactccacagagcgctaccagagggaccaatgggtctaccagagcaccactcaagagggtcaacctcaaacgacgccgtttcctcctctcccgtgcgattcagcgtccttaagagacgacgacatagcgttgcagctgccag

SEQ ID NO: 172379 - DNA, 152 bp, Glycine max
cacttacccacagggaggcgaacagagaaactcagagacccgaaggcagatttcaagatgaagttcaacattgcgaatcccaccaccggttgtcagaagaagctggagatcgatgatgacctgaagctgcgagcattttgggacaagaggat

SEQ ID NO: 172380 - DNA, 235 bp, Glycine max
tgggtgccaatggcgaaaatatggacaaaagatggctaagggaaacccttgtcctcgagcatactacagatgcaccatggcagttggttgcccagttcgcaaacaagttcaacgttgtgcggaggacagaacaattttgacaacaacgtacgaggggacccataaccatccactgccaccagctgcaatggctatggcatcgaccactgcagctgctgctagcatgttgttgtct

SEQ ID NO: 172381 - DNA, 275 bp, Glycine max
aattgacatggagtacaaggaattggctcttgaatctggcatcaagaattgggcacgtgtacctgcccttggtgttaccccttccttcattacagatttagcagatgcagtaatagaagctctcccatcagcaacagcaatatatgcaccgaccagaacctctgaagatgttgatcatgacccagttagatattttatcaagatgttctttggttcaatcttggcattcatcttgttcttgtcacccaaaatgatcacggcattcaggaatcatg

SEQ ID NO: 172382 - DNA, 283 bp, Glycine max
cagagtttcttcaatggcccagcctcaaccagagtcccacgccaccaatggctcacacgagccattgctcaaaatcccaaagctccaccaaaacggcgacgtttccgcaaccgctccctttctccgcgtcaagaagctctccgacaaggccgttttgccctctagggcttccactctctccgccggttacgatctctctagcgcggtggagacgaaggtcccggcgagagggaaggctctggtggccactgacatcagcatcgcgattccagagggcacatat

SEQ ID NO: 172383 - DNA, 283 bp, Glycine max
cggctcgagcacctttctcctaaaacatctccagtgggttcttcttcttctattacaacaacgtcgtccaagaccatgaccatggccatggccacgatcctgctcctgttcacggtcttcgcggtttcatcggccctagacatgtcgataatctcgtacgacaacgcccacgccgccacgtcgcgcagcacgaggagctgatgtccatgtacgagcagtggctagtaaagcacggcaaggtgtacaacgcgctcggagagaaggagaagaggttccagatctt

SEQ ID NO: 172384 - DNA, 285 bp, Glycine max
aatcttcgcctctctcattctatcgtcacccgaacccgaaattgtaaccggattcgggcggcgctggatggggatttctcggcgaaaaggagcaacaacaacgagcagagggagacgataatgttgcccggctgtgactacaaacattggctgattgtgatggagtttccaaaggaccctgcacccactcgtgaacaaatgattgacacttacctcgacactcttgccactgtcttgggaagcatggaggaagctaagaagaacatgtatgcctttagcacaacc

SEQ ID NO: 172385 - DNA, 276 bp, Glycine max
gcattatattactagttttaatttgttttgtcgtttgcttctttctttgattaatgatgactagctttaaggttgcatgtgtggttgcgatgatgtgcatggttgttgccatgagtgttacacccatggcacaggccgcaatcacgtgcgggcaggtcgccggcgacgtgtctccgtgcctcagttatcttcgaagcggcggaaaaccgtcggacgcctgctgcaacggagtgaagtcgctcagcggcgcggcgaagaccaccgccgaccgccagg

SEQ ID NO: 172386 - DNA, 270 bp, Glycine max
aagtgcggaacaactctcaagtataatgtggcaattaagtgcgcaactattactccagatgaagctcgtgtgaaggagtttggtctgaagtcaatgtggaagagtccaaatgggacaattaggaacattttgaatggaactgtcttcagagaaccaattctttgcaaaaacattccccgccttgttcctggttggacaaaggcaatatgcattggaagacatgcgtttggtgatcaatatcgggcgactgacacagtaattaaaggagct

SEQ ID NO: 172387 - DNA, 171 bp, Glycine max
  unsure (1)..(171): unsure at all n locations
ctttcttttttcccgcagtcatgggcaaggtcaagatcggaatcaacggattnggaagaattggccgtttggtggccagggtggctctgcagagagacgatgttgaactcgttgccgttaacgatcctttcattaccaccgattacatgacatacatgtttaaatacgaca

SEQ ID NO: 172388 - DNA, 285 bp, Glycine max
acactttccacttgtctccgaattagttatcttgagaaacattattcccattgctatatattatggctagcatgaaggttacatgggtggttgtgatcatgtgcatggccgtggtgggtgcaccgatgatggcgcaagccatgacatgcaatgatgtgacggtgaacatggcacagtgcctatcctacctgatgcagggaggaacaccttcaacactttgctgcagcggagtcaagaacattcttggctctgctgtcaccaccgttgacaaacaaactgtgtgca

SEQ ID NO: 172389 - DNA, 287 bp, Glycine max
gaacacaagagaaagaagaagaagaagaagaagaagaagaaaagggttttgtgtgtgtcgaagtggataattccttccttcaattaatctccgatccgaaaccgtatggggattctatacgcactggtaggtcgcggatcggtggtgctggcggagttcagcggcaccaccaccaacgccagcgcaatcgcgcgtcaaattctcgagaaaacccccggcaacaacgacatgcacgtttcttactctcaggatcgctacatcttccacgtcaaacgcaccgatggact

SEQ ID NO: 172390 - DNA, 275 bp, Glycine max
aaaaggatgtgatcaaatcactaggcaactccgcatggatggatggcctgcactctcaattcatggagataaaagtcaagcagaaagagattgggtgctctcagaatttaaatcaggcaaaagtcctattatgacggcaacagatgttgcagcccgtggtctagatgtgaaggatgtgaaatatgtaataaattatgacttcccggggtcacttgaggattatgttcatcgcattgggcggacagggagagctggtgcaaaaggaactgcataca

SEQ ID NO: 172391 - DNA, 273 bp, Glycine max
attcttacaagttacatccattgagaaacatgaaggtctcccccttagcattttcaatcctttttttgtccttcaccatagaactcttcattggcattgcttcagcagcacaagaaccagtgcttgacacctcaggccagaagctgagaacaggtgtcaagtactacattctaccagtcttcagaggcagaggtggaggcctaacagtttcaagcagtggcaacaacacatgccccctctttgtggtgcaagagaagcttgaagtctcaaagg

SEQ ID NO: 172392 - DNA, 178 bp, Glycine max
gctttatatgtacatcaatggccctggtggtgatcttacaccaagcatggctatctatgacaccatgcagagcttgcaaagtcctgtagccacccactgtgttggctatgcttatagtcttgcagcatttctccttgcagctggagaaaagggtaatcgttctgcaatgcctctatca

SEQ ID NO: 172393 - DNA, 275 bp, Glycine max
gttcaaaggtaaggtaggttaacactcttcttcatcgtcgtcgcaatgggacgtgtgatccgtgcgcacgtaagggagcaggctcggtcttcaagtcccacacgcaccaccgcaagggccctgcacgcttccggagcctggacttcggggagcgcaacggctacctcaagggcgtggtcaccgacgtcatccatgaccctggccgcggcgcgccgctcgccaaggtcgccttccgccaccctttcagatacaagaagcagaacgagctcttcatt

SEQ ID NO: 172394 - DNA, 279 bp, Glycine max
cttctttccaaatcccaactactactcacactcactgcagatctcaatccatggctaccatcgttagcatcaaggcccgccagatctttgacagtcgtggcaatccaaccgtcgaggtggatttgacatgctccgatggtacttttgctagagctgctgttccaagtggtgcatccactgggatttatgaggcccttgaattgagagatggaggatctgactaccttggaaagggtgtatcaaagcaggctgttgacaatgtgaacaccattattgccc

SEQ ID NO: 172395 - DNA, 285 bp, Glycine max
ggtgattggtacaaaaccaaccacaagacgctaaggcaaactttagaatctggaaaacctcttgcatttcctgatggcctccttattaatggtcaggctcattcaaccttcactggtaacccggggaaaacctatatgttcagaatctcaaatgtaggcttttcaacctcaattaacttcagaattcagggtcacaccctaaaattagttgaggttgaaggatcacacactgttcagaacctttacgattcacttgatgtccatgttggccaatcggttgctgtg

SEQ ID NO: 172396 - DNA, 276 bp, Glycine max
cctgtttatggtggagatcatgcacatgcggcacaaatttgatattgacacacgcttggttgacggtattgtccttgatcatggttctaggcagcctgacatgaagcgacgtgcagagaattgctatatcttgacatgtaatgtatctttggagtatgagaagagtgaagtaaactcagggtttttctactcaagtgcggaacagagagaagctatggttgcagctgaaagacggcaggttgatgaaaaattcaaaggactcattgaactgaagaa

SEQ ID NO: 172397 - DNA, 272 bp, Glycine max
gctacgtttccctccccaagtgcacacaaaaaaatgggtcttcaaatcaaggaaccgctccttttcactcttgtaacaatatcacttatttcaattacaaaactcttgcattcttatttttctatacctttctctccatccaatctttccattgctattgccaccctcatttttgttctaatctcatacaaattttcctcatcctctataaaacactcttccactactctgcccccaggtcctctatctgttccaatatttggtaactggct

SEQ ID NO: 172398 - DNA, 165 bp, Glycine max
cttccatgtcttcaggaatgtatcactacaggcttgtatgcacaaagtgcccgtagatgcatcagagcgtggatcaatctggcctgagcaatggccactgaggttggagaaaccaccttactggatagactctcaggctggtgtttatggaagagctgcatcagt

SEQ ID NO: 172399 - DNA, 143 bp, Glycine max
tgtatctcaagaacttggatgatactatcagtgatgaaaaacttaaggaaatgtttgctgaatatggtacaataacttcatgcaaggttatgcgagaccccactggaatcggtagaggatcaggatttgttgcattttcaact

SEQ ID NO: 172400 - DNA, 272 bp, Glycine max
gaaaatctttcaaagaagctaatcctgattctaaggatgttaaaagggttggtaaagaggctggtgaaaagtggaggtctatgactgatgaagagaagaagccatatcttgacaaagttgctgagcttaaggaagagtacgagaaggctatggaaagctatgaagctggtcaagatgaagaagatcaaactgtgtctgataaggaaacttctgataaggaagctgctgcaaaagaagttgcaatagaagttgaagaggagctaactgacgag

SEQ ID NO: 172401 - DNA, 279 bp, Glycine max
gcctgtgttatcaaagatcgggaacaagaaatagcctcggatggttcagcatcaaatccatggaaactctgcacagtagatcaagtagaggaactaaaagccattattaaagtgattcccttgtggtctacagggatcatgatgtcagttaacattggaggctcatttggattgctgcaagctaagtccctggacagacacatcacctcacacttccaagtgccacctggctcttttagtgtagtcatggtacttacaatatttttatggatagctctc

SEQ ID NO: 172402 - DNA, 280 bp, Glycine max
cggtgatcggtgatcagtggtttggtgttgttgatagaaaaatgcattccagccctttgcttcttgaggaacccattaggatggcatccattcttgagccatccaagcctactttctttccagctatgacaaaaattgttggcacacttggtctaaagtcacgatcagttgatacaatttcccgttgccttgatgcaggaatgtctgtggcaaggtttgacttctcatggggtgatccagaataccatcaagagacattggaaaatttgagagttgctat

SEQ ID NO: 172403 - DNA, 281 bp, Glycine max
atcgcacatctttctcagttctacgatggagttttggggtgccgaggttaaggttggagagtctgttaaggtagacccagccgaatttgaggcatgcatacacctttctcaggctgctcttggtgaggcaaagaaagataagcctgaaccggtggttctctacatgaaagttggtgaacagaaatttgtcttgggaaccctttccagggagaaaatccctcaaatatctctggaattggttttggaaaaggagtttgagctttcccacagttcaaagagtg

SEQ ID NO: 172404 - DNA, 181 bp, Glycine max
gtggtgagtgaaaatggcggtacccttgctctccaagaggatcgtgaagaagcgcgtcaagaagtttatacgcccccagagtgatcgcaagatctccgtcaagccaagctggcgcagacccaagggtattgattctcgtgtcaggagaaagttcaaaggatgcactttgatgcccaacatt

SEQ ID NO: 172405 - DNA, 272 bp, Glycine max
ctctttgagagatgctcggcacgtgtttgatgtaatgccggagaggaatgtggtgtcgtggacggctatgatatcagcttattcccagagagggtatgcctctcaagcattgagtctttttgtgcagatgctaagatcaggtacagaacctaatgagttcacttttgctaccgtgcttacttcatgtataggttcttcgggttttgtcttagggaggcaaatccactctcatatcataaaattagattacgaagcacatgtttatgttggag

SEQ ID NO: 172406 - DNA, 140 bp, Glycine max
ctgggacctcggaagcagacgtacaacaagaggagacctgttgaatgctctaggttcaatgtatactgctgttctcttccttggaatacaaaatgcttcctctgttcagccagtggtagcagttgaaaggactgtctttt

SEQ ID NO: 172407 - DNA, 267 bp, Glycine max
acttgatcaccttttttgagaaaagatatatatcaatggcaactccgagtgtgttagaagtccgccctcctgctttaacttccatctctgaaccacttccattttttgatggaaccacaaggttatacatttgctatctgtgcccttttgcacaacgcgcatggataactaggaactgtaagggactgcaagacaagatcgaattggttcctattgatcttaaaaacaggcctgcttggtataaggaaaaagtttatcccacgaata

SEQ ID NO: 172408 - DNA, 267 bp, Glycine max
ggagaaggaagcctcatatgatgaaattaaaaatgctatcaaggaggaatcagagggcaagttgaagggaattcttggttatactgaagatgatgtggtctccaccgactttgttggtgataacagatcaagtatttttgatgcaaaggctggaattgcattgaataagaattttgtgaagcttgtctcttggtatgacaacgagtggggatacagttcacgtgtcatgacctgcttgtaatcgttgccaagaagtcttttaattaa

SEQ ID NO: 172409 - DNA, 272 bp, Glycine max
gagatctctttggttgatgcatggaatgttcagagccaatggagggtgtggttatgttaaaaaaccaaattttctattggagactggtccagatgacgaggtcttcaatcctaaagctaagttacctgtgaagactactttgaaggcaagggttttatgtcaatcagctgcctcattcaagtatctctagtttaatgctaacagttatcatactcttcctattcttaggtgactgtatatatgggggaacgatggtactatgatttcaagca

SEQ ID NO: 172410 - DNA, 279 bp, Glycine max
ggcttatgttgcaagcttgtgctgttactgatctgtttgaaccctgatttggataggttatttagaaaagcaaaatggtgaagatttgctgcattggtgctggatatgtggggggtcctactatggcagtcattgcacttaagtgcccatccattgaagtcgctgttgttgatatctctaaatcccgcattgcagcctggaacagcgaccagcttcctatctatgaacctggccttgatggtgttgtgaagcaatgccgtggcaagaacctcttcttca

SEQ ID NO: 172411 - DNA, 282 bp, Glycine max
gttcattttgttgttcgaagccaaaaccctagcagccggcgagaatggcagacgttgaggttgatgcggcggcagcggcaggggcagcgcagcgaagaagagaacgttcaagaaattcagcttcaggggcgtggatctggacgcgcttctggacatgtccaccgacgaactggtgaagatgttcagtgcgcgtgcacgtagaaggttccagagaggtctgacgaggaagcccatggccttgattaagaagctccgcaaagctaaaagggaagcaccagcagg

SEQ ID NO: 172412 - DNA, 261 bp, Glycine max
  unsure (1)..(261): unsure at all n locations
aactcctcanagccaaagctgtnctcttttttcatctgggtctaaagaaccactggtgaccaaaattgtnaaaaggggttccttgattttcaccaattcatggcatttcagcactacatttcccgggatttgaaaaccatcccaaatgctgtgactgaggcagaaaaccccaatggttgttttgattgtaacatctgcttagactttgcacatnanccagtggtgacactttgtggtcacctctactgctggccatgcatc

SEQ ID NO: 172413 - DNA, 250 bp, Glycine max
agcttgcttaagctccttagtgctgctccttgcagctctaattctatcccctcaagttcttgcaaactatgagaatcccccagtgtacaagcctcccactgagaaaccaccagtatataagcccccagttgagaagcctcctgtttacaagcctccagttgaaaagcccccagtttataagcctccagtagagaagccaccagtgtacaagcccccagttgagaatcctccagtttacaagcccccagtt

SEQ ID NO: 172414 - DNA, 267 bp, Glycine max
cgaaatcggcggagatggttgccatgaggtttcaccagtaccaggtggtgggaagggctcttcctaccgaatccgatgagcatcctaagatctaccgcatgaaactctgggccaccaacgaggtccgtgccaaatccaagttctggtattttttgagaaaattgaagaaggttaagaaaagcaatggacaagtgctagccatcaatgagatttttgagaagaatcctaccaagattaggaattatggaatttggctgcgttatcaga

SEQ ID NO: 172415 - DNA, 268 bp, Glycine max
gtaaaaagatgaatctgaagaacatgaaggttccgaacgttccaggtggcggggggatctctgcgctgctgaagcttgggattgttggtggaattggtttgtatgcagctgctaacagtctctacaatgttgatggaggtcaccgagccattgttttcaaccgtctagttggtgtcaaagacaaggtctatcctgaaggaactcacttcataattccgtggtttgagaggccggttatctatgatgtccgtgcacgaccccatctagt

SEQ ID NO: 172416 - DNA, 259 bp, Glycine max
atgcagttcagtttacaggtcccgaaaatggctcctccaagaagtcgtggtggttttggtggtggcggtgggttcaggggtggtggtaggggtgacagaggcagaggaaggggcggtggaggaagaggaggagacaggggcactcccttcaaagctagaggaggtggcagaggtggtggtggccgtggcggaggcaggggtggtggccgtggtggtggcagaggtggaatgaagggaggtagcaaggttgtggttcagc

SEQ ID NO: 172417 - DNA, 257 bp, Glycine max
agctctacaagtctttccttttctatttaattcctaaaatcccattcttcttcgctcattcctctgcactgccatcatccccaacttcctcacaaggttacaaggactaaagagttgtgccaccatgtcggacgatgaaagggaggagaaagagttggatctctcttctgccgaagttgtcaccaaatacaaaaccgctgctgagatcgttaacaaggccttgaagctagttatttcagaatgtaaaccaaaggcga

SEQ ID NO: 172418 - DNA, 258 bp, Glycine max
tggagacgagccagctttttaatgttcttgccatttttcttctctcggacccttttgctgttgtgaatgcaaactctgaaggtgatgctctgttcgcgttcagaagagctgtgaaagacccaaataacgttctagagagctgggatccaactttggtggatccttgtacatggttccatattacctgtgatgatgataagcgagttacccgactagacctcggacacgcaaaactgtctggccatttggttccagagc

SEQ ID NO: 172419 - DNA, 258 bp, Glycine max
ataacctaaacctatctttcttctctctctgtgtgtgcgcatcaacggcaaccagaagcagccatggccactgcaaggactgtgaaggatgtttcacctcatgagttcgttaaggcgtactcctctcacctcaagcgatccggcaagatggagctgccagagtggactgatattgtgaaaactgcaagatttaaggagttggctccttatgatcctgactggtactatgtcagagctgcttccatggcaagaaagatc

SEQ ID NO: 172420 - DNA, 258 bp, Glycine max
tgtttatcgtgaggagaatatgaagttgtttgttttctttgttgctgcagtagttttggtagcatggccatgccatggcgcaggctaccaaaggttccctctccgaatgaaaactggctatggtgagcgttcttcggaggtaaaatgcgcaagttttaggcttgctgtggaagcacacaacatccgagcctttaaaaccattcctgaagagtgcgttgaaccaacaaaggactacattaatggcgaacaatttagatc

SEQ ID NO: 172421 - DNA, 197 bp, Glycine max
gcaaagtctgcttcttcccatgcttataagttcttgtgtcactctttgtatccatatacccctttgttgggctttggtgttccagactggaatgaataatattggtggagcattagcaatgagcatttcaatatggttaaatgtgacttttcttggattatacatgagatactctcctacttgtgcaaaaacccgtg

SEQ ID NO: 172422 - DNA, 267 bp, Glycine max
tgcttatttatgttgggtaaattagaagactgccttcaactgttggtagaaagcaatcgaattccagaggcagctttaatggctcgatcttatctcccaagtaaggtctcagagatagtggcaatttggagaaaagacctcaataaggtcaatccaaaagctgctgaatcattggctaatcctgaagaatatccagatttgtttgaagattggcaagttgcactagctgtcgaatctaaagctgtggaaacaaggaatgtgtacccc

SEQ ID NO: 172423 - DNA, 269 bp, Glycine max
cggctcgagcggctcgagcggctcgaggattatcctaagtctttgggaatagtgctgcaatggcttcaagtcaggaggaggtgacccttttgggagctactggaagcccatttgtgtgcagggttcatattgccctcaagttgaagggagttcaatacaaatatgtcgaagaaaatttgaggaacaagagtgaactgcttctcaaatccaacccagttcacaagaaggttccagtgtttattcacaatgagaagcccatagcagagtct

SEQ ID NO: 172424 - DNA, 266 bp, Glycine max
tttcctttcatttctaacctaattttcgtttccatccaaaaaatggctctatcgcgcgtggctcaatcgtcgccatcacagtcgaatcttttgaaacccctctcgtcgtacttatccctacgacgccgttcggtgtcgacctcgtcggagcccctcaccgtggagacctcggtgcccttcacctcccacaactgcgatgcgcctccacgcgccgtggagacgtcctcggcggagctcttctcgttcttccgtgacatggcgctgat

SEQ ID NO: 172425 - DNA, 257 bp, Glycine max
caagattcaggtactgcgtttcggaagcagacacagatggctcgtacgaagcaaaccgctcgtaagtccacaggaggaaaggctcctaggaagcagcttgcaaccaaggctgcacgtaagtctgcaccaactactggtggtgtgaagaagccccaccgttatcgtcctggtaccgttgctcttcgtgaaattaggaaataccagaagagtaccgagcttttgatccggaagctccccttccagaggctggttcgtga

SEQ ID NO: 172426 - DNA, 261 bp, Glycine max
cgcacacgaggagcagcctcaggaggagaaggatgtctcacaggaagttcgagcacccaaggcacggttcactgggatttcttcccaggaagcgtgctgctcgtcacaggggaaaagtgaaggcattccccaaggatgacccatccaaggcacccaagctcactgcattcttgggttacaaggccggtatgactcacattgttagagaggtcgagaagccaggatcaaagcttcacaagaaggaaacttgtgagcctgtta

SEQ ID NO: 172427 - DNA, 266 bp, Glycine max
tgtgtgtccaactcagtagtcaacactaggcactctctattcccattcattgcagaagaagatggaggctcacccctacgtcccacgcgatttgcacttacccggctacgctccctgcttcctttccatgtccaacattctttccgtcttcgcctcctcctcattgctcatcgtcactctcgtctggatcttctctggacgctttaagaaaaccaaagttgatagagtgctgatgtgctggtgggccttcacaggtctcacacaca

SEQ ID NO: 172428 - DNA, 252 bp, Glycine max
accaagcatatctcatttgaatacattccttgtagtttatactgaaagatgggtttgaagatggcgttactgatcctaggcctttccctcatgctccttttggtctcctctgaggtggcatccacgaatacaaaagaggaggcaaatggagtggatgatgccaaatatcccggtggaagctatggagggggttacccaggtcatggcggtggcggttatcctggccatggcggtggcggttatcctggccat

SEQ ID NO: 172429 - DNA, 253 bp, Glycine max
attgcgcgtatctctctatcttctctctgcacgtccaaaccctagctccctagcctattccgctttctctcgtccatcatgaaaggaggaaagtccaagaccgaatctaagagagccgatgacaaacttgctgtgaataagaagggcgccgccatcaagactaggaaacccgccgaaaaggggaatgcagcgaaagatcctaacaagccaaataggcctccaagtgctttcttcgttttcatggaggaattca

SEQ ID NO: 172430 - DNA, 262 bp, Glycine max
atttcttcctttgtcgtccatcccgtaaccatgtctcagactgttgtcctcaaagttggtatgtcatgtgaaggatgtgttggagcagtgaagagagttctaggaaaattggatggtgtggaatcatatgacattgatttgaaggaacaaaaggtggtagtgaaaggaaatgtccagccagacacagttctgcagaccgtttccaaaactgggaagaagactaccttctgggaaggtgaagcagcaacatctgaaactagca

SEQ ID NO: 172431 - DNA, 264 bp, Glycine max
tttcctaacctaaaccctactcattctccatacctcaacgaagaggttaaagagacggcaacactttgctgtccgccttgaccgagcagagcttcgtcttggccctcgattttgccctaaagtactctcagtcacaacagacaccgtcgtcgtcgtcgtcgtcatcaatggcaccgaagcagaccaaggctgagaagaagatcgcttacgatgcgaactgtgcgacctaatggaggagtacggccagatcctcgttgtgaactc

SEQ ID NO: 172432 - DNA, 260 bp, Glycine max
ctcactcactctgcactcaccactgccacacttcaatcgcactaattgatgtcaccttctcagatctacacaccgaagagggcatcaaatccctcgatcaattcctttctgggaaaacctatatttctgggggtcagttgacaaagggtgatattaaagtgtatgcagctgttgttgaaaagccaggggacacttttcctaatgctgccaagtggtacgatgctgtctcttctcaacttgctccaagcttacctggccac

SEQ ID NO: 172433 - DNA, 255 bp, Glycine max
cttcattcattctttatggatcaagaaacaacaagaagaaacaccatgcaagaatgtcatgtgatagccccaacaacaacaacggcaacatcatcgtatcgtggagttcgtcagcgaaaatggggcaaatgggtgtccgaaatccgtgagcctggaaagaagagcagaatatggttagggagctatgagtcaccagagatggctgcagcagcatatgacgtggcagcgttacaccttcggggacgagctgcaaga

SEQ ID NO: 172434 - DNA, 252 bp, Glycine max
caatcttcttgtggccaaagatggcactggcaacttcaccaccattgccgaagcagtggctgtggctcccaactccagcgcaactagatttgtgatacacataaaagccggggcatacttcgagaatgtggaggtaatcaggaagaagaccaatctgatgttcgtcggagatgggattggaaagactgttgtgaaggccagtaggaatgttgtggatggctggaccactttccaatcagccactgttgctgt

SEQ ID NO: 172435 - DNA, 250 bp, Glycine max
gcttctcattagtcgccaagggaaggtgagattgacaaaatggtactcaccttattctcagaaagaaaggagtaaggtaatccgtgagctcagtggaatgattctttcccgtgcgcccaagcaatgtaattttgtggaatggcgaggacataaagttgtttataaaaggtatgctagtctctatttctgcatgtgcattgatcaagatgacaatgaattagaagtccttgaaatgattcatcattttgtg

SEQ ID NO: 172436 - DNA, 252 bp, Glycine max
gttaggttctgcacgctctgcttccagcgagtgttctttcttcgtttcaacaccttaatttgcacacgctgcttcttcagcttgagaaatggcacaagaaacctttctattcacatctgaatctgtaaacgagggtcaccccgacaagctgtgcgaccagatctctgatgcagtgctcgatgcgtgccttgaacaggaccctgacagcaaggttgcctgtgagacatgcaccaagaccaacatggtcatggt

SEQ ID NO: 172437 - DNA, 148 bp, Glycine max
ctccctgacgatgatgatgaatcttttgagtagagggaggggctgactagcagctgcaagaagctcagcctcgtgctgttgctgtgcagctaaatcaatttgaacttctggtggagccaatgcaggagattccacaaagtgcaaatta

SEQ ID NO: 172438 - DNA, 261 bp, Glycine max
ggagtacttgtatatattccaagaagcttatgctgctgccatgcattatctttaccatgacccttggtatgtggaagtgaatatggattctgctgctattgtctggccattatttaacagcctgcaggcattttggcctggccttcaggttttagctggagatatcaatcccgcaattcgcacccatgctgccttcttgagtgtctggagaagatatggttttactcctgagggctttaatcttgctagtctcagtgttca

SEQ ID NO: 172439 - DNA, 248 bp, Glycine max
gctagaagcaataagatgaaaatgaaagtgcttgttttgtttgttgctacagttttggtagcatatgaatgccatggctcagactaccaaaagttccctctccaaatgaaaactgggtttggtgggcaatacagcaatgaggtggcatgtgccagttggaggcttggcgtggaagcaaacaacgtagtcaagtggcaaactgttcctgtagcttgcggagagtacatagctgactacgttctaggaga

SEQ ID NO: 172440 - DNA, 250 bp, Glycine max
gttgaacaatgacttgttccggaagaccatgggtccagtgaagaaggctatggaagatgctggattacagaagagtcagattgatgagattgttcttgttggtggaagcacaaggattccaaaggtacaacagcttttgaaggactactttgatggaaaggagccaaacaagggggtcaaccctgatgaagcagttgcctatggtgctgcagtgcaaggaagcattttgagtggagagggtggtgaagaa

SEQ ID NO: 172441 - DNA, 250 bp, Glycine max
gcagcatcgctattctcttcattccatggctttgcccaaccagcaaaccgtggattaccctagtttcaaactcgttatcgtcggcgatggtggcacaggaaagacaacctttgtgaaaaggcatctcaccggagaattcgagaagaaatatgagccaaccatcggtgtggaggttcacccattggattttttcacaaactgtggaaagattcgattttactgctgggatactgctggacaggagaaattt

SEQ ID NO: 172442 - DNA, 253 bp, Glycine max
tggaatgggagctgcccgcaagctgaagtctcaccgtaggagacaaaggtgggctgacaagtcatacaaaaagtctcatctgggaaatgaatggaagaagccttttgctggttcatcccatgccaagggtattgttcttgaaaagattggtattgaggctaagcagcccaactctgccattcgaaaatgtgccagggttcaactcatcaaaaatgggaagaagattgctgcatttgtgccagatgacggttgc

SEQ ID NO: 172443 - DNA, 241 bp, Glycine max
cgaggcgaacagagagacccgaagccagatttcaagatgaagttcaacattgcgaatcccaccactggttgtcagaagaagctggagatcgatgatgacctgaagctacgagcattttgggacaagaggatctcacaagaggttgttggtgatgctctgggtgaggaattcaaaggctatgtcttcaaaattactggaggttgcgacaagcaaggatttccaatgaagcaaggagtgttga

SEQ ID NO: 172444 - DNA, 177 bp, Glycine max
caagagatggcttctcctcttcttactccttacaagatgggcaaattcaatctgtcccatagagttgttttggcaccgctgaccagacagatgtcttacgacaacgtcccacaaccccatgccatcctctactactcccagagaacttccaacggaggccttctcattactgaagcc

SEQ ID NO: 172445 - DNA, 181 bp, Glycine max
ccaacctctaacctacctctttttcttctctctcaacaacttcaccttcttcctcctcgatcatgtctcacttcaagggcaagtaccatgatgagcttatcgccaatgctgcgtacattggcactcctggaaagggtattcttgctgctgatgagtcaacagggacaattggcaagcgttt

SEQ ID NO: 172446 - DNA, 246 bp, Glycine max
atcaccatgtccttcttgagggtaccctattgaagccaaacatggtcacccctggatcccaatctgctaaggtttcccctcaggtggttgccgagcacactgtcagagcccttcagagaaccgtgcctgctgcagttcctgctgtcgttttcttgtctggtggccagagtgaggaggaggcatccgtcaacctcaacgccattaaccaggtcaatgggaagaagccatggtcactctctttctcct

SEQ ID NO: 172447 - DNA, 246 bp, Glycine max
cttttggggaagaggtcgaggtttcacagcagcaatggtgtacgtcaaggctcagaaatcaaaagcctacttcaagagatatcaagtcaagttcaagagaagaagagagggaaaaaccgattaccgtgccaggattcggttgattaatcaggacaagaacaaatataacactccgaaataccgatttgttgttcgctttagcaacaaggacattgttgcacaaataatatctgctagcattgctgg

SEQ ID NO: 172448 - DNA, 244 bp, Glycine max
tgcacattcttcatcacttcattcaacatttctctctcccttagctagtttttaccaatggctgctgcggttagtgctgcagtctcttttccatccaccaagtcgacctctctcccaagcaggacctccatcattaccccagagagagttgtattcaagaaggcttcattgcaatacagagatgtttgtagcagtggaagggtagtttccatcagagctcaagtcaccactgaggctccagcca

SEQ ID NO: 172449 - DNA, 243 bp, Glycine max
aaaatttcttcctttcttcttctttttcttgtctatgtctttttgaattctcttcctttcttcttgggatccaaggttctagatggcaaaaccaagttcagctgatggtaggactagaagttctgtgcagatctttatagtagttggtctgtgctgtttcttctatattttaggtgcgtggcagagaagtggtttcggaaagggagatagcatagcattggagattactaagactaacacaga

SEQ ID NO: 172450 - DNA, 240 bp, Glycine max
gaagaatagagagtgatggagtgcgtattcggattggtgggtaatggattcgcgatcgtggtggctgattcatcggcggtgccagcatcctcgtccacaagtccaacgaggacaagatcatgcttctcgattcccacaaactcatcgccgctagcggcgagcccggagacagggttcaattcactgagtacattcagaaaaacgtcgccttgtatcagttccgtaacggcatccctctca

SEQ ID NO: 172451 - DNA, 246 bp, Glycine max
aaacactcataacacaaagcacaaagcaaagctcatccttgagttaaaaaatggcagcagcttcttccatggctctctcatccccatccttggctggcaaggccgtgaagctgggcccatcagccccagaagtgggaagggtgagcatgaggaagaccgtcaccaagcaggtctcctcaggaagcccatggtacggcccagaccgagtcaagtacttgggcccattctctggcgagcccccgtcct

SEQ ID NO: 172452 - DNA, 242 bp, Glycine max
gtgattgtatagacacacagtatcctccagatgaacttctcgtaaagtatcagtatatctcggatgtgctaattgctcttgccatttttctattcccgtggagctcatctattttgttcagaagtctgctttctttccatatagatgggtgcttatgcagtttggtgcttttattgttctctgtggagcaactcatttcataaacctgtggacattctccccacactctaaggctgttgctg

SEQ ID NO: 172453 - DNA, 242 bp, Glycine max
agctcgtggaattgctagcaatggcgaggatcaaggtttacgagctgaggcagaagacgaaggctgatctgctgaatcaactgaaggacctgaaggcggacttgccttgcttcgtgttgctaaggtcaccggtggtgcccctaacaagctttccaagataaaggtggtgaggttgaacattgcccaggttttgacggtgatttctcagaagcagaaggctgcgttgagggatgcctacaaga

SEQ ID NO: 172454 - DNA, 242 bp, Glycine max
tgcatatgcaggtttctttgaagtaggctctcccaagaaaggagagaatgtttttgtttcagctgcctctggtgctgttggtcaacttgttggccaatttgctaaattgactgattgttatgtggttggaagtgctggaagtaaagagaaggtggatcttttgaagaataaattaggatttgataaagcctttaactacaaagaagagtcagacctcaatgcaactttgaaaagatactttc

SEQ ID NO: 172455 - DNA, 242 bp, Glycine max
ccctaacctaactcctctcgtcgtcacaaaaagtcttcttctccgatcgttacgatgttggaactccgtctcgtgcaaggttccttctgaagaaggttctggaatcgatcaaggagctcgtaaacgacgcgaacttcgactgctcctccaccgggttctccctccaggccatggattccagccacgtcgccctcgttgcgctcctcctccggtccgagggctttgagcactaccgctgcgac

SEQ ID NO: 172456 - DNA, 241 bp, Glycine max
ctggtcttcgcttctcattcatcatttctcacctaaccttctcttcctctcagtctcagatcagaaacctcagccagccatggcagcgttccagaagatcaaggtcgtcaaccccatcgtcgagatggacggagatgaaatgactagggttatctggaagtcaatcaaggacaagctcattttgcccttcttggagttggacatcaagtattatgacttaggccttccttaccgtgatgag

SEQ ID NO: 172457 - DNA, 240 bp, Glycine max
gaagcgtaacagcggctaccctaacctcgtcttcctctctactaatttcagctatggccgacgaagctgtggttgttccagatcccacccagatcgatgtcaagctctttaaccgctggagcttcgaggatattgaggttactgacatttcactggctgattacattggagttgcggcatccaagcacgccacatatgttcctcacaccgccggaaggtactccgtgaagcggttcagga

SEQ ID NO: 172458 - DNA, 239 bp, Glycine max
gatggtgcagaggctcacttatcgcaagcgccatagctatgctaccaaatccaaccagcaccgggttgttaagacccctggtgggaagttggtgtaccagaccactaagaagagagcaagtggacctaagtgccctgtcactggcaagaggatccaagggattccacacttaagacctgctgaatactagaggtctagattgcctaggaaccgcaggaccgtaaaccgagcctatggag

SEQ ID NO: 172459 - DNA, 241 bp, Glycine max
aacagaagcacacactacacagttaccaaaatcaggttcaaacgcacagatctgggagaagagaagaagaagaagaagaagaggggacaggatcagaaccagagatcgctgatctacgcgttcgtgtctcgcggcacggtgattctcgccgagtacactgaattcagtggcaacttcaacacaatcgcgttccagtgcctccagaagctccctgcctccaacaacaagttcacctacaact

SEQ ID NO: 172460 - DNA, 247 bp, Glycine max
cggtggttgagaatggtggagaaggcgaagggtaggaaggaggaggtggttaccagagagtacaccattaacctccacaagcgcctccatggctgcacatttaagaagaaagctcctaaagctattaaggagataaggaaatttgcccaaaaggccatggggaccaatgatgtgagggtggatgtgaagttgaacaagtttgtctggagccagggaatcaggagtgttccaaggaggattagggtaa

SEQ ID NO: 172461 - DNA, 242 bp, Glycine max
agctgaggccaatgttttcggagttaacgttcaacattatcataaaaatggtgtgtggcaaacgctactacggcgaggaatacgatgggaccaacgccgaggaggctaagaggtttagagagatcatgaatgagatatcgcagtttgggttggggtccaaccttgcagattttgtgccgcttttcagattgtttagtagtcgcaaaaagttacgaaaggttggagagaagctagacgcgttc

SEQ ID NO: 172462 - DNA, 237 bp, Glycine max
gcaatttgttatgactatttcagctggcggtttggttgttaatgacactactttacatcttgcagttcatactttaccatttgggggagttggtgagagtggagtgggtgcataccatgggaaattcacatttgaagcttttagccacaaaaaagcagttctatatcgcagatttattggtgatgcaccagtaaggtacccaccatacacaaatacaaagatgagattgctgaaagc

SEQ ID NO: 172463 - DNA, 239 bp, Glycine max
ttcatagcattttcagaggaaaatggcgggtacggtttcgacttgtttcttcttcgtgtttcttctttctctccttcttcctttcagatctccgctgaggaatcctcggagaaggagttcgtactcacattggatcactctaactttcacgacactgtcagcaagcacgatttcatcgtcgtcgagttctacgccccatggtgtggtcactgtaagaagcttgctccggagtatgagaa

SEQ ID NO: 172464 - DNA, 223 bp, Glycine max
ggctcgagcctcaccaaaggaactaagaatttcattgaggctagagagtgtggtgatcaatatgtcaaagaatccaaaagttttctttgatattctaattggaaagatgaaagctggacgagtagtgatggagttgtttgccgatgcaaccccaaaaacagctgaaaacttcagggctctctgcactggggaaaaggggattggacgatctgggaaaccttta

SEQ ID NO: 172465 - DNA, 236 bp, Glycine max
gttcatttctacacatccctagctctgtcgttccgtcgttgacgatggcgtttcgggtgcgaaccctggacctccgctctctctttcttctctctctcttgtccatcgcttccgccaatgtcttcttcgaagagcgtttcgatgacgggtgggaaaatcgatgggttaaatcagattggaaaaaagatgagaacgtggctggggagtggaaccacacctctggtcaatggaatgga

SEQ ID NO: 172466 - DNA, 243 bp, Glycine max
cgagatcaagtcttccaccaatcgcggataatccatcgccataaaaaaattcaagcaatccaaggatggcgatggtgtctctcccaccgccatacgtgaaatcatgttactcagggagataacgcacgagaatgttgtgaagcttgtgaatgttcacattaatcatatggacatgtctctctatctggcttttgattatgcagaacacgacctttttgaaataataagacatcatagggacaa

SEQ ID NO: 172467 - DNA, 240 bp, Glycine max
gtgagtgttactattgaatcgattggattgacatggcgagcgcgatggttgaggacgccaacttcgaagatgaccagctcgccaatatgaccaccgacgacgtcgtcagagcttctcgtcttctcgacaacgagattcgcatcctcaaagaagagttgcagaggaccaatttggagttggaatcgtacaaggacaagatcaaggagaatcaggagaagattaagctcaataagcagttgc

SEQ ID NO: 172468 - DNA, 235 bp, Glycine max
gcgcacttcttctagatttaaggaagatgggtaaggaaaaggttcacatcagtattgtggttattggccatgttgactctgggaagtccactaccactggccacctgatctacaagcttggaggcattgacaagcgtgttattgagagatttgagaaggaagctgctgagatgaacaagaggtctttcaagtatgcctgggtgcttgataagcttaaggctgagcgtgaaagagg

SEQ ID NO: 172469 - DNA, 238 bp, Glycine max
ccgttccctctttcaaaccttttttttttccaccaaatcggcgatggcaacgacgtcggtggtgccggcgaaccggcgtcgcgcggcgaaccccgcggaggagatggacttcgagacgacggagggcgtgaaggccatcgcaagcttcgaggagatggggatcaaggacgatctgctccgcggaatctaccagtacggcttcgagaagccctccgccattcagcagcgggccgtcacg

SEQ ID NO: 172470 - DNA, 238 bp, Glycine max
ggcttccttaagctccttagtgctgctccttgcagctctaattctatcccctcaagttcttgcaaactatgagaatccccagtgtacaagcctcccactgagaaaccaccagtttataagcccccagttgagaagcctcctgtttacaaacctccagttgagaaccctccagtttataagcctccagtagagaagccaccagtgtacaagcccccagttgagaaacctccagtttaca

SEQ ID NO: 172471 - DNA, 241 bp, Glycine max
ctgtacccgcctagccattgatttggaaaagtccaacttcaaggatgagtaagcttcagagtgatgctctaagagaagctatctcaggaatcatggctgattccaaggaaaagaacaggaaatttgtggagaccattgaactccaaattgggttgaaaaattatgatccccagaaggacaagcgtttcagtggctctgttaagttgcctcatattcctcgccccaagatgaagatttgtat

SEQ ID NO: 172472 - DNA, 238 bp, Glycine max
aaaacagcatcgaacccgtcgtagcagaaaaacttgtcaccatggtttcttccgacaaggatccacgagaggatgtccttcaagcctggtacatggatgatagtgatgaagatcaaagactcccccaccacaaagaacccaaggagtttgtctcgttggaccaacttgctgaacttggagtccttagctggaaactagatgctgataaccatgaaaatgatccagagctgaagaagat

SEQ ID NO: 172473 - DNA, 235 bp, Glycine max
cctcaccaaacattgcctccaagatgaattttaacaatgtgaatgtcccaaaggttcctggtggcggagtcgctgctttgcttaaagttagcattattggtgggcttgttgtttatggggctgcaaacagcttgtacaatgttgagggaggtcatcgagccattgtcttcaatcgtgttgtcggtgtcaaggataaggtttatcctgaagggacacatattatgattcctttgtt

SEQ ID NO: 172474 - DNA, 235 bp, Glycine max
gaaggaggctgccgagatgaacaagaggtcattcaagtatgcctgggtgctcgacaagctcaaagctgagcgtgaaagaggaattaccattgatattgctttgtggaagtttgaaaccaccaagtactactgcacggtcattgatgctcctggacatcgtgactttatcaagaacatgattactggtacctcccaggccgactgtgctgtccttattattgactccaccactggt

SEQ ID NO: 172475 - DNA, 237 bp, Glycine max
cttcttatgcaactatagtgaggctaagagttggtgcataattaatcaaaatgttggccatattccacaaagcttttgctcatccacctgaagagctgaacagtcctgcatcttacaaaggttccaagaagcctaaggttcctgaggaaactctcaaagatttcctttcccaccatcctcacaacacttgctccatgagctttggtgaagctgctgtgctagcttatgttcgtcctg

SEQ ID NO: 172476 - DNA, 242 bp, Glycine max
aattcaactccctttcaatttcaaccctatctctgctctcttcttcttcttcttcttcattttttgggtctctctgtttacaagcttttcagttatggcatcgaaacgcatcgtcaaggagctcaaggatttgcagaaggaccctcctacttcctgcagcgcaggtcccgtggcggaggacatgtttcactggcaggcaacaatcatgggacttcctgatagcccatataccggtggtgtat

SEQ ID NO: 172477 - DNA, 236 bp, Glycine max
gccggatgggatgagacgggccctggtctatattatgttgatagtgaaggaggaagacttaaaggcactagattctcggttggatctggttcaccatatgcttatggtgtattggatagcgggtaccggtatgacctgtcagttgaggaagctgctgaacttgctcgacgagcaatttatcatgcaacatttcgtgatggggccagtggtggagttgctagcgtttactatgtggg

SEQ ID NO: 172478 - DNA, 237 bp, Glycine max
cagttattcttgcccctatgcacaacgtgtgtggatcgctaggaactacaaggggctacaagataagatcaatttggtccctattaaccttcaagacaggccagcttggtataaggagaaagtctaccctgaaaataaggtgccatccttggagcacaatggcaaggtgttgggagaaagtcttgatttgatcaaatatgtagatgcaaactttgaagggacacctttgtttcccag

SEQ ID NO: 172479 - DNA, 239 bp, Glycine max
aaagagggttagagaaataaaaagagaaagccgacagcacatagatagagagaggaaaacgacttaatattctttttccttgagacctgaaggggctaaggaaaattagaaggacacacaagtataaaggcggtgaaataaaagagaaagacaagaagacgacatgggaagaccaccttgttgtgacaaagaaggggtcaagaaagggccttggactcctgaagaagacatcatattgg

SEQ ID NO: 172480 - DNA, 237 bp, Glycine max
gcaactcacactgtcttccttctctagggtttttagctcctccaaattcttcgcccaacatggttcttcaaaatgatattgatttgctaaatcccccggctgagcttgagaagaggaaacacaagctcaagcgtcttgttcagtcaccaaactctttcttcatggatgttaagtgccagggttgcttcaacataaccactgtctttagccactctcagactgttgttgtatgcggaa

SEQ ID NO: 172481 - DNA, 236 bp, Glycine max
cttagatgagaactttgagtattgcgtgaaagtaattcgctggctaggaatgccagggtcatatcaagcaggaatttaggttgaaattgctgacatggtttagtttgaggtcgacagaacaagaacgtcgggtggtaaatactttcattcaagctctgattgatgatccaagtagtttggcagggcaactagttgactcattttctgatattatatccaacaagaggccaagaaat

SEQ ID NO: 172482 - DNA, 235 bp, Glycine max
gaaagagacctggaaaaggtgggaaccgcttttggaagtccattgggcttggatttaagactcccagggaagccatcgaaggaacctatattgacaagaagtgccccttcactggcaatgtttccatccgtggccgtatcttggctggaacatgtcacagtgctaagatgaacaggactattattgttagaaggaattatctccattttatcaagaagtaccagaggtacgagaa

SEQ ID NO: 172483 - DNA, 234 bp, Glycine max
tttttatttatcagtcaccgaaacaactatggatacaatcaagtccttcaagggctacggcaaagttgacgagttggagcagcaagcctatcagaagaagacacgtaagcgcctcataataatcacagtctcttcaatcgttctaattgcggtgatcatcgccgctatcgcaggggttgtcatacacaagcgcaacacctcatcatctccctcatccgactcgcccccgcaaac

SEQ ID NO: 172484 - DNA, 233 bp, Glycine max
atttcgtcaattccaacaacaccacaatgggaagaagaccggcgaggtgttaccggcagataaagaacaaaccgtacccgaaatcccgtttctgccgcggcgtgccggagccgaagatccgaatctacgacgtgggaatgaagaagaaaggcgtggacgagttcccgttctgcgtgcacctggtctcgtgggagaaggagaacgtctccagcgaggctttggaggcggcgcgc

SEQ ID NO: 172485 - DNA, 234 bp, Glycine max
ctctctgctcttctcttctcttctacctctcaagtttttgaagtataaagatggcagagacattcctattcacctcggagtcagtgaacgagggacaccctgataagctctgcgaccaaatctccgatgctgtcctcgacgcttgcctcgaacaggacccagacagcaaggttgcctgcgaaacatgcaccaagaccaacttggtcatggtcttcggagagatcaccaccaagg

SEQ ID NO: 172486 - DNA, 225 bp, Glycine max
gagaaaagatatatatcaatggcaactccgagtgtgttagaagtccgccctcctgctttaacttccatctctgaaccacttccattttttgatggaaccacaaggttatacatttgctatctgtgcccttttgcacaacgcgcatggataactaggaactgtaagggactgcaagacaagatcgaattggttcctattgatcttaaaaacaggcctgcttggtat

SEQ ID NO: 172487 - DNA, 235 bp, Glycine max
aattcaactccctttcaatttcaaccctatctctgctctcttcttcttcttcttcttcattttttgggtctctctgtttacaagcttttcagttatggcatcgaaacgcatcgtcaaggagctcaaggatttgcagaaggaccctcctacttcctgcagcgcaggtcccgtggcggaggacatgtttcactggcaggcaacaatcatgggacctcctgatagcccatatacggtg

SEQ ID NO: 172488 - DNA, 234 bp, Glycine max
gccggatgggatgagacgggccctggtctatattatgttgatagtgaaggaggaagacttaaaggcactagattctcggttggatctggttcaccatatgcttatggtgtattggatagcgggtaccggtatgacctgtcagttgaggaagctgctgaacttgctcgacgagcaatttatcatgcaacatttcgtgatggggccagtggtggagttgctagcgtttactatgtg

SEQ ID NO: 172489 - DNA, 235 bp, Glycine max
cagttattcttgcccctatgcacaacgtgtgtggatcgctaggaactacaaggggctacaagataagatcaatttggtccctattaaccttcaagacaggccagcttggtataaggagaaagtctaccctgaaaataaggtgccatccttggagcacaatggcaaggtgttgggagaaagtcttgatttgatcaaatatgtagatgcaaactttgaagggacacctttgtttccc

SEQ ID NO: 172490 - DNA, 238 bp, Glycine max
aaagagggttagagaaataaaaagagaaagccgacagcacatagatagagagaggaaaacgacttaatattctttttccttgagacctgaaggggctaaggaaaattagaaggacacacaagtataaaggcggtgaaataaaagagaaagacaagaagacgacatgggaagaccaccttgttgtgacaaagaaggggtcaagaaagggccttggactcctgaagaagacatcatattg

SEQ ID NO: 172491 - DNA, 273 bp, Glycine max
ggcagcacgcgcaaaaatggtgaagtttctgaaaccaaacaaagccgtcatcgtccttcagggacgctacgccggcaaaaaagccgtgatagtgcgaaccttcgatgaaggcacgcgcgacgcccctacgggcactgcttggtggcagggataaagaagtaccctgcgaaggtgatcaagaaggattcggccaagaagacggccaagaagtcgcgtgtgaaggcgttcgtgaagctcgtgaactaccagcacctcatgcccacgcgctacacg

SEQ ID NO: 172492 - DNA, 267 bp, Glycine max
ctaagagttgctgcttcttccgccactcagcacttcgctccctctgtgcttcaccaaccatggccgaaatcgaagctaccgttccagatccctctcaaatcgacgtcaaacttttcaaccgctggagcttcgacgacgttgaggttactgatatgtctctggctgattacattggagtgtccccgtcaaagcatgctacatatgttcctcacactgctggtaggtactcagtgaagaggttcaggaaggcgcagtgccccattgttg

SEQ ID NO: 172493 - DNA, 269 bp, Glycine max
gaacgtgtgatatcaaatttggccaattatggtaacacaagtgcagcttccattcccttggctttagatgaagcggttcgaagcggtaaggttaaggcaggccagactattgcaacggctggcttcggtgctggtcttacttggggttcagcaattcttcgttggggctgaatgcttttctttcacggcagaattgcaaatagagatgaatcagttgcaagtgcagctgtccaaataccccacattcttacacaattgtagaaaatggg

SEQ ID NO: 172494 - DNA, 270 bp, Glycine max
cagcacagaagagggaaaacggcaccgccgccgtagaagaaaacaaccatggtgcacgtctccttttacaggaactatgggaagacattcaagaagccgcgtcgtccgtacgagaaggagcgtctcgacgcggagttgaagctggttggtgagtacgggcttcggtgcaagagagagctgtggagggtgcagtacgcgctcagccgcatccgcaacaacgcgcggaacctcctacacctcgacgagaagaacccgcgccggaccttcgag

SEQ ID NO: 172495 - DNA, 275 bp, Glycine max
  unsure (1)..(275): unsure at all n locations
gttgaatcatagaaagttactggatagcatgatgcaaatatgtggtgtacctcctgaaaagtttagaacaatatgttcaagcattgacaagttagacaaacagtcttttcaacagataagaaaagaaatggtggaagaaaaaggattaactgctgagacagctgacagaattgaaacttttgttaaagaaaaaggatctcctttagcatnattatctaaatttaaacaagagggtagtgatttctcaaaacacaaaggagcttctgaagcattga

SEQ ID NO: 172496 - DNA, 236 bp, Glycine max
cggctcgagaaatttctcaaactttctctcaagatctgaaaccactctgatggagcaaagtaaggagaaaaatgctccttggttatcagtgccacagtttggggactgggatcagaagggacaagtgccagactactctctagatttctctaaaattcgggaaatgaggaagcaaaacaagacaaatatttcaagggcaagtcttggtaatgaagaggagctcatggcttcttctg

SEQ ID NO: 172497 - DNA, 159 bp, Glycine max
tgcgattttcgattctcttctctgcaactatgcctaaccctaaggtcttcttcgacatgaccatcggcggtcaacctgccggccgcatcgtgatggagctctatgccgacgtgactcccagcaccgccgagaacttccgcgagctctgcaccggcgaga

SEQ ID NO: 172498 - DNA, 201 bp, Glycine max
gagaccgtgacatttaaatttcgagtgaatagatattttagtccgtgatatttaaatttctcattcactttattattgttgcttctcttttcatttttatcaccctgccacacattcacatttccacttcctatgtacaattttatataattatatcctatcatgtcagtttctccttgaattattaattatttaatatga

SEQ ID NO: 172499 - DNA, 268 bp, Glycine max
ccaggatacataggcacctcagtgttgcaaacttctctccatgattttattgaggttattttccagaacaacgaaaacaccatgcaatcttggcatcttgatggttatgatttttgggtcattggtcatggtttcggccagtggacagatgccagcaggaaaacatataatctagtggatgccctgactagacacactacacaggtgtatccaaaatcctggactactatattggtgtctttggataaccaaggcatgtggaacttga

SEQ ID NO: 172500 - DNA, 255 bp, Glycine max
ggccaggcaagccccactcaaccaccacacctctcctcgttcacgctacccctttctgctcttcttctacctttcaagttttaaaagtataaagatggcagagacattcctatttacctcagagtcggtgaacgagggacaccctgacaagctctgcgaccaaatctccgatgctgtcctcgacgcttgcctcgagcaggacccagacagcaaagttgcctgcgaaacatgcaccataaccaacttggtcatggt

SEQ ID NO: 172501 - DNA, 262 bp, Glycine max
cgcatacggcgtttgcgaaattgcgatttcatgtcatagagaggaaaagaggagaggcggggcggacagagacgaatggcagatcagagcgagcattcgaaaacggcgttgcctccggaggaccaggaccgtcccgttcgggtatacgcggatggcatctacgatctcttccactttggccacgcccgctcccttgagcaagccaagaaatcgtttccgaatacatacttgcttgttgggtgttgcaacgatcaagtcaccc

SEQ ID NO: 172502 - DNA, 266 bp, Glycine max
taaatttccggcgagttttcctctctcgaatctgcgacaccgacgaatctcactaagcggaacttcgcattcagaaaatggctttaggtggaacagctcccccgagaggaagtgcagcggctactgccagcatgaggagaaggagaacaaccggtggtgcggcctctggaggagcagctggaactatgctccaattttacactgatgatgcccctggactcaagatctccccaaatgtggttcttgtaatgagcattggctttata

SEQ ID NO: 172503 - DNA, 264 bp, Glycine max
ccctcgctctatttctcagtctctgtgtttgcggctgaggattccgaacgagtgaccttcttcgtttctcgcaaagtttaagtaatcatgggtaaggaaaaggttcacatcaacattgtcgtcattggacatgtcgactctgggaagtcaactaccactggtcacttgatctacaagcttggaggtattgacaagcgtgtgattgagaggttcgagaaggaggctgccgagatgaacaagaggtcattcaagtatgcctgggtg

SEQ ID NO: 172504 - DNA, 178 bp, Glycine max
aaggagatggctctgggaagaggcagtgcagtggttctactactttgcttcttgctgcttcactctcagatggctcgtgctgccacctacacagttggagattctgggggttggacctttaacactgttgcctggcccaaaggaaagctctttcgggctggtgacacacttgctttca

SEQ ID NO: 172505 - DNA, 262 bp, Glycine max
agcagagggagtagcggcattaaaaatgcagatcttcgtgaaaactctgacagggaagactataaccctcgaggtcgagagcagcgacaccatcgacaatgtcaaggccaagattcaagacaaggaaggcattcctccggatcagcagcgtttgattttcgccggaaagcagcttgaagatggaaggaccctggccgattacaacatccagaaggaatcaacccttcatctcgtcctcaggcttcgtggtggcatcattgag

SEQ ID NO: 172506 - DNA, 263 bp, Glycine max
tgaggaggaagactatgatagattgcgcgagtcaattgatttgcatgataactttgaccaaataggccttgcacagaagattgaaaagcatgagcttcttgagatgagacgtgtcgctgcttatatttacaagaaggcaggtagatggaaacagtccattgccttgtcaaagaaagataacctttacaaagatgccatggagacagcctcacaatctggtgaccgtgaacttgctgaggagttgcttgtttatttcattgatc

SEQ ID NO: 172507 - DNA, 261 bp, Glycine max
catctatctattataaccaaacactcttcttcatattcttcttcttcttgttcttgttctatctgtgacgagcatcatggcctcgagagcagtgctattgttggctatgtgtgtgcttccggccatggttgtggccattcgcccagcaaagaaccctttttgcgtgaagggtcgcgtctactgtgacccttgccgtgctggttttgagacctcagcaaccacctacattgccggtgctgagattatgttgcaatgcaagag

SEQ ID NO: 172508 - DNA, 260 bp, Glycine max
gccgcctgaagttgttgctgttcgggtgccacttctaaatttgtccaattttcaaatcaacgattggcccgatatgtcagcaaaaagctatgcaatcatggttctcatcctccctactgatagtgttagaaaatggcgagaccatgagttggaacttgttgatgtggttgcagatcaggtagcagttgccctttcacatgctgctattttggaggagtctatgcgagcccgtgatcaactcttggagcagaatgtcgctt

SEQ ID NO: 172509 - DNA, 265 bp, Glycine max
gagcaccatttcgagtccaaggccgacgccggagcctccaaaacctaccctcagcaagccggtaccatccgcaagaacggctacatcgtcatcaaaggccgcccctgcaaggttgtggaagtttcgacttccaaaactggaaagcacggtcacgctaagtgtcactttgttggaattgatattttcactgccaagaaacttgaggatattgtgccctcttctcacaactgcgatgttcctcatgtgaatcgtactgattaccagc

SEQ ID NO: 172510 - DNA, 263 bp, Glycine max
gttttcatcattgtcgttctgaacggaaaagcactggcgcagctaccctgaggcttctcttctcttctcttctctgtcgtgagtcaccatggtgagggttagtgtgctgaacgatgctctgaagagcatgtacaatgctgagaaaaggggaaagcgccaagtcatgattaggccatcctccaaagtcattatcaaattccttttggtgatgcaaaagcacggatacatcggagagtttgagtatgttgatgaccacagggctg

SEQ ID NO: 172511 - DNA, 260 bp, Glycine max
  unsure (1)..(260): unsure at all n locations
acggagccctctcttcaggtcaccatctagactgcaatcatggctgatggaccacagcatccatcagttgttcagaagctagctggacagtcttacctggtgtccaggcttagccccaactttaactctaggaattattctgcaactggttcttacgtcaatggcggaatgcactcgcctgggttggctgttgtgtcacctgtatctccagttactgtgcatgctncagcagagaaaggagtgagtggatttctagtgga

SEQ ID NO: 172512 - DNA, 260 bp, Glycine max
ctacttcatgtcaggtcaaaaggcaagcagagaggtttattttaatgtactacagaggtttactagtgtgtgatgatgaaacgtgtaagcatacaacgcgaagtatcagccttcggttggttggtgattctgagagaggaactgtttgtccaaattatcctcgctgcaatgggcgtctagttagaaagtacacagaagcagacttgtacaagcagctctcgtatttttgccatgtgttcgatactgtttcttgtatagaa

SEQ ID NO: 172513 - DNA, 260 bp, Glycine max
ctttgtttttacaggaagttgttggcaattcagtaaatggtactacttatgctggtctaagagcaaggacaaccggagctcctcagaatcattggtttggtcccgctggcgacgctagaggtgcaggaattggaacaccggacgctataaaacttgtatggtcttgccacagagaagttatatatgattttggacctgtgccaaaggattggaaaactcctcagtccacttgaagaaaagtcctatcaatgatagcagga

SEQ ID NO: 172514 - DNA, 146 bp, Glycine max
tcgggttccttttactttatggagatgaacactcgtatccaggttgagcatccggtgacagaaatgatttcctcaacggatttgatagaagagcaaattcgtgtagctatgggagaaaaacttcgatacaaacaggaggatattgt

SEQ ID NO: 172515 - DNA, 261 bp, Glycine max
ctgggaaatcatctgttctgttggatgtgaaaccatgggacgatgaaactgacatgaagaagctcgaagaagcagtgagatctgttcagatggaagggttgctttggggtgcatccaaacttgtacctgttgggtacggtatcaagaaactgcaaattatgcttactattgtggatgacctagtttctgttgatactcttattgaggaacatctcacagttgagcccatcaatgaatatgtccagagttgtgacattgtgg

SEQ ID NO: 172516 - DNA, 260 bp, Glycine max
cacaaaccaacaacatagatacgttatacaaagattcattcattcatattattagatctctctctctctctttctctgaatttcactcaagttattatcaataaaataaaatagcgaagatgtgtgaaagtggtagtagagtcacatgggaaggttgcagcgtcttgctcgatatcaacgatggtgaccgtctcgttttcgctcgtctctccccctctgcgaaattgaagattgggaataagaactgctctctgcaaccg

SEQ ID NO: 172517 - DNA, 253 bp, Glycine max
cttgaaggaggctggtgttcttcctggcatcaaggttgacaagggcacagttgagcttgctggcactaatggagaaaccaccactcagggtctagatggccttggtcagcgttgcgccaagtactatgaagccggtgcacgttttgccaagtggcgtgctgtgctgaagattggtcccaacgagccatctgagctggctatccatgagaatgcctatggcttggccagatacgctgtcatatgccaggagaat

SEQ ID NO: 172518 - DNA, 258 bp, Glycine max
tctctctagagtaattgcggaatcagctagaattttctaataatggccaaagacgttgagcaggttacagagcaaggtgaatactccgcgaaggattaccatgacccacctccggcgccgttgatcgacccagatgagctcactaagtggtccttgtacagagccgccatagctgagttcatagcaacactccttttcctttacatcaccgtgttgaccattattggctacaagagacagagtgacaccaaaatcccc

SEQ ID NO: 172519 - DNA, 258 bp, Glycine max
cctaaaccctagtctccatacatcaacttgggaggttaaagagacggcaacgttgtgctgtccgccttgaccgagccagagcttcgtcttggccctcgattttgccctgtaaaactaatcccagtaacaacagaaataatcaatggcaccgaaacagaccaaggctgagaagaagatcgcttacgatgcgaactgtgcgacctaatggaggagtacggccaaatcctcgttgtaaactcaagccaagtgggatcgaac

SEQ ID NO: 172520 - DNA, 172 bp, Glycine max
cactacgatgcaacaactgtcaccgaagcaaaattactgctgaaagaggcacttcaagcagaggttggcttgcctgttgacaggaatatccctctgataggcttcattggtaggcttgaagagcagaaaggttctgatattcttgtggaagctatcccaatgttcattgacc

SEQ ID NO: 172521 - DNA, 259 bp, Glycine max
tgtgagcttggttttgattacttgagagacaatcttgccacgagtgtcgaagatcttgtcataaggggtttcaattactgtatcattgatgaggttgattcaatccttattgatgaagctagaacgccgcttattatatcaggacctgcagagaaacccagtgatcgatattataaggctgcaaagattgcagaagcctttgaacgagacatacattacactgtagacgaaaaacaaaaatcagttctactttctgagc

SEQ ID NO: 172522 - DNA, 189 bp, Glycine max
aggcttggaattgatggcaacattaggttctacacttacttccttgatgtgcgtgatggtgtatggcaagtgacctacactctatttgatagagattctgatgagagtgagtgccaattgcctgagagatgtgggaaatttgggttgtgtgaagataaccaatgtgtggcttgtccattggaaaatgga

SEQ ID NO: 172523 - DNA, 78 bp, Glycine max
aggacttgtgtttcggttgggtgcaccgtggatgggaaggaccccaaggatctgcagcaggaaatttctgatggagat

SEQ ID NO: 172524 - DNA, 252 bp, Glycine max
agcgaggtggtggtgtaggaggtggaggtgttggcggcggcggcggacgtggtggaggtggagggattggtattggcattgggattggagtaggagttggggttggagctggtgctggtgaaggtttcggcgttggtgttggtggaggaggtaggggtgggggtaacaattaagcacattgcatgcatgaggttatatatggaactttgattatgggatcaaatatataattatgtcttaattagttgacca

SEQ ID NO: 172525 - DNA, 239 bp, Glycine max
attctcataagataactaactcactttgtgtgatagagttctcattctcatggctattaccggcgatattttccggcagagcataacggaaatgcttgcggagtccccttccggtgcgccagaacttcacgttctcgccgtcgatgacagcctcgttgatcgcaaggtgatcgaacggttgcagaagatttcttcctgcaaagtgacggttgtggacagtggaacgcgcgctcttcagt

SEQ ID NO: 172526 - DNA, 256 bp, Glycine max
cgcgtcgctgctccgtaccagtttcactgcataaatttgagagaaaactctgcaaacatgttggtttatcaggacctccttacaggtgatgagcttctctcggactccttccgttacaatgaaattgagaatggaatgctgtgggaagttgaggggaagtgggttgttaagggagcagttgatgttgacattggtgcaaacccttctgctgagggtggagaagatgagggagtcgatgacgcagctgttaaggttg

SEQ ID NO: 172527 - DNA, 266 bp, Glycine max
acctactgcattattattctcttccccttaatttctatctccaatccctcagcaaaacgcagcaaatgggtcggcttaatctcctacttgtgtggtcactctcattaacactgtccctttattatctacacccaatctctgctcagctcagtccaaaccactatgctaaaacatgccccaatcttgaaagcatcgttagacaggccgttaccaagaagttccaacaaacctttgtcaccgtcccagccacccttcgtctcttcttt

SEQ ID NO: 172528 - DNA, 260 bp, Glycine max
ctggagcacaagggagtattatggcttggctattcgagaaaccagaatcaaggctgcacctgtgcatgcatcagcctactggtatctggagaatgttttgcctgtcctacagagttatggtattgctgcaatctctccattttctcaccgactgagttttgacaacttgcctgtggatattcaacacctacgttgtaaagtaaacttccaagctttaacctttgtttctcatatcagaacacttggagatgcccttatca

SEQ ID NO: 172529 - DNA, 263 bp, Glycine max
gtgcagggggagcttgtgggtatgggaatctgtatgcaactgggtatggaactagaactgcagctttaagcactgccttatttaatgatggagcttcctgtggtcagtgctacaaaattatatgtgattacaaagcagactctagatggtgcatcaaaggaagatctgtaaccattactgccacaaacttttgccctcccaatttcgcccttcctaacaacaatggaggctggtgcaacccaccactcaagcattttgatatg

SEQ ID NO: 172530 - DNA, 198 bp, Glycine max
cagggtttcccgaagatttaacacctatggctcctaaagctgatagtttaaagaaggctgatccaaaggcacaagccttgaaaactgctaaggctgttaagtcaggtgctactttaaagaaaaagaccaagaagatccgaacatctgttaccttccatcgaccaaagaccttgaaaaaggttaggaaccctaaatacc

SEQ ID NO: 172531 - DNA, 267 bp, Glycine max
  unsure (1)..(267): unsure at all n locations
gaaagagatgaccaacttttcaaggccttccaatattttgataaagacaacagtgggtttattacaagagatgaattggaatcagccatgaaagaatatggtatgggtgatgatgcaacaatcaaggaaatcatatctgaagttgatacaattatatctgaagtggatacagatcatgatggtagaatcaactatgaagaattctctgcgatgatgaagagtgggaaccaacaacaaggcaagctattctanatcacaccatctaac

SEQ ID NO: 172532 - DNA, 270 bp, Glycine max
gaagtctaaagaaaacatagaacgaagaagaagaacagatcagaaaaatggcgtccaaagttccaaagaaggccaatctcctggatcaccactccatcaagcacatccttgacgagtctgtctccgaggtcgtaacgagtcgtgggtatgtggaagacgtgagattgagcaatgcgaggcttttcattggggcaatcatcatcgtcattgctttattcgctcaattctacaagaagaagttccccgaaaatagggattttctcatcgctt

SEQ ID NO: 172533 - DNA, 196 bp, Glycine max
ggaaaggtggatcgtattcaacactatctttattgaggaaggaactacgagaaggaaatttgcaatccctttttggcggatcttcatgtatagtgtcctcatctaatgcagatccactgttgtcatcatttatattgcctttagctaatgaacatgccagttctcagcctcacttacacactgagacaagatcatc

SEQ ID NO: 172534 - DNA, 273 bp, Glycine max
gaagaatatggtgtgtaatgtgattgaagggaattttgatgaagcttgttcaggcctcaagcaactgtatgacttgggatattcccccacagatatcatcacgacactttttcgtataataaaaaattatgatatggctgagtacctgaaattggaattcatgaaggaaactgggtttgctcatatgagaatttgtgatggagttggttcttatcttcagttgtgtggtctattagctaagctttctcttgttcgtgagacagctaaagctgt

SEQ ID NO: 172535 - DNA, 268 bp, Glycine max
cttcccaggcccaagatggttaactctgatcttgccaggattattaattctgacgaggttcagtctgttgtgaggcccattaagaaggatgtgaagaaggccacgctgaagaagaaccctcttaagaacctgaactctatgctgaagctgaatccttatgccaagactgctaagaggatggctcttcttgctgaagctcagcgcgttaaggccaagaaggagaagctcgacaagaagaggaagactgtctctaaggaggaagcttctg

SEQ ID NO: 172536 - DNA, 271 bp, Glycine max
ttctgctcgatctaagacattgtttggtttggttacttgctcgaatttcctcgaatcgcttaatttgtatttgattagttaaaccgcaacgcgaatctcttttctcgaactggctaactctcaggcaagtggttcggacgctgattccagcaacaagcggctggtgctcgcactgtatgacgccctaaactccggcgactccgacgccgtcgtcaagatcgtcgccgccgacctcgagtggtggttccatggtccgccctcacaccagttt

SEQ ID NO: 172537 - DNA, 259 bp, Glycine max
gcagtcgcagcacactatattagagtttcagatcctcaatcagccagctacaacagcatcgtcggcggcgtaaccctccaacaacaacacttcctcgtcagaaaatgtctctggtggcgaacgaggatttccagcacattctgcgtgtgctgaacaccaacgtggatgggaagcagaagataatgttcgcaatgacctccatcaagggtattggaaggagattcgccaacatcgcttgcaagaaggctgatgttgacat

SEQ ID NO: 172538 - DNA, 252 bp, Glycine max
gtgcggtaggctcatccgagaccggcagcagcaatggggatcgatctcaaggccggaggtacaagcacaaaaaccaaaagaacagcacccaagtccaatgatatctatcttaagctcttggtcaagctttatcgcttccttgttcggagaactggcagcaaattcaatgccgttatactcaagagattgttcatgagcaaggttaacaagcccccattgtctttgtcaaggttgattaagtataccacgggg

SEQ ID NO: 172539 - DNA, 268 bp, Glycine max
ctttcatgtgttcatgccttgggaagagtagtcgcaatgttcagaagactcctggtggcctcatcttccgccagagatggaacaacatgcagtttgtcacaagtgcctcatttttagccactgtctactctgactaccttgcttcatctggtagaaacctgagatgcagttcagggaatgtcccccctgctgagcttctctcccttgcaaagtctcaggtggactaccttcttggggacaacccaagagctactagttacatggtggg

SEQ ID NO: 172540 - DNA, 266 bp, Glycine max
aattctgttcatcctttgcttcccaaagaaagagaaaataaaaagcaatgggtagccatgaagcggaaagaacaacagtaggattggcagcaagagacccttcagggattctctccccatacacctacaatctaagaaacacaggccctgatgatgtttacataaaagttcactactgtggaatttgccattctgatctccaccagattaaaaatgatcttggcatgtccaactatcccatggtcccaggacatgaggtggttggt

SEQ ID NO: 172541 - DNA, 268 bp, Glycine max
cctatccgagctatgaagttttctgtctcacctgttgttcgtgttgctgttcaatgtaaggttgcatcagatcttcccaagcttgttgaaggtcttaagcggttggctaagtcagatcctatggttgtttgtaccattgaggagtctggtgaacacattgttgctggtgcaggagagcttcatcttgagatctgtttgaaggacttgcaggatgatttcatgggtggagctgagattatcaaatctgaccctgttgtgtcattcaggg

SEQ ID NO: 172542 - DNA, 152 bp, Glycine max
caaacagggaatagaagagaggagaagatgggtttcataatggaatttgcggagaacttggtattaaagttgatggaagatccgaaggaaagggatcggaggttcagggagcacgtttatagagtgaaggacaggtgcgagaagacgaagga

SEQ ID NO: 172543 - DNA, 258 bp, Glycine max
cttgttctcaagggattcgattttctctgcactcacttctagggtttcctccgcgctatcagcaatcatggccgacgaaacaccaaatgagatgaaggaggaggttccagaaattgttccttttgatcctaccaagaagaagaagaagaagaagattacaattgtagatcctgctgatgaccctgtggagaaattggctgagaagacagaaaacctctcagtttctgagggggttgagactgcatttgctggtttgaa

SEQ ID NO: 172544 - DNA, 256 bp, Glycine max
ggcggcgacagtcactctccgacaacaacacttccgcggcgaaaaatgtctctggtggcgaacgaggatttccagcacattctgcgtgtgctgaacaccaacgtggatgggaagcagaagataatgttcgctatgacctccatcaagggtattggaaggagattcgccaacatcgcttgcaagaaggccgatgttgacatgaacaaaagggctggtgtgttgagtgctgcagagttggatagtgtgatgactgtgg

SEQ ID NO: 172545 - DNA, 258 bp, Glycine max
gcgggtcgtcgcgtgccggtcgggggaagtttgacgtgaagagtagcgagacgaaagtgaggcttcagggacaggagcgtgggaggaaggggaagctagcgattgcggcggatatctacgccgtgacgccgtcgtttatggtggtggaggtcaagaaggacaatggggatacgttggagtataaccagttctgcagcaaacaacttcgtcctgcgcttaaggatatcttctggaattctgcacctgccagtgcttgaa

SEQ ID NO: 172546 - DNA, 260 bp, Glycine max
ctttcagcaaaaccaaaccctagcagcactacttcaaaaagaacagcgccatagcataacccttcgaagtcgccgtttgttttcttttcgttcgcatcttctctctctctcagaaagatgaaggtggtcgccgcgtatttgctcgccgtcctcggtggcaacaacagcccctccgccgatgtcatcaaggaaatccttggctccgttggagtagaagcagatgaagataggattgaatcgtttttgtctgaagttaaggg

SEQ ID NO: 172547 - DNA, 262 bp, Glycine max
atggactcaacattgccagaacttgggccttcagtgatggtggatatcaacccctacaatactctcctggatcctacaatgaccaaatgtttcagggcttggatttcgcaatagccgaagcaagatcatatgggatcaagatggtgttgagtttggtgaataactatgagaacatgggtggaaagacacagtatgtggaatgggcaaggagtcagggacagtccataaattctgaggatgacttttttacaaatcctgtggt

SEQ ID NO: 172548 - DNA, 259 bp, Glycine max
cctcttcatcttgttctatctgtgacgagcatcatggcctcaagagcagtgttattgttggctatgtgtgtgcttccggcgatggttgtggccattcgcccagcaaagaaccctttttgcgtgaagggtcgtgtctactgtgacccttgccgtgctggttttgagacctcagctaccacctacattgctggtgctgagattatgttgcaatgcaagagcagggttagcaacgaggttgtgtacacgaagaaggggtaca

SEQ ID NO: 172549 - DNA, 261 bp, Glycine max
gttggactgagtcatctagtccaaatgtgagaggcccaccagcacttcctttcagattgtctcaattagatgaaaaactcaaagctggttacaagtcaacaactgctgggaaatttactgatgctcttcgcacttttgtcaatattcttcataccattcctttgattgttgttgagtcaaggagggaggtcgatgaagtgaaagaattgattatcatagtgaaagagtatgtcttgggtctgcagatggagctcaaaagaa

SEQ ID NO: 172550 - DNA, 191 bp, Glycine max
gaggaagaaccggaagaggaaaaactagaaaagatcccaacagtgagaagccgagcgattttgtttaccttccaagagatgaagcatttggtcacttgaagtcatcagattttctcgcttatggaatcaaatctgtatcccaagatgtcttgcctgtcttgactgatgcattcgatggaaatattttgagc

SEQ ID NO: 172551 - DNA, 252 bp, Glycine max
ttccgttcctttcttcgttccttccccaacccaatcttcgccttcgcccacaacaactcctccttcaggatcgctgccaacgttactttccatttttacccttcatcctcgagaaaaaaatggcgaacgcagcatctggtatggccgtccatgatgagtgcaagctaaagtttctggagctcaaggcgaagaggacgtaccggtatatcgtttttaagattgaggagaaatcgaagcaagttattgtggaga

SEQ ID NO: 172552 - DNA, 254 bp, Glycine max
gcagagatgacaacccgatttaagaagaaccgcaagaagcgcggccacgtcagcgccggccacggccgtattggaaagcaccgcaagcaccccggcggccggggaaatgccggcggcatgcaccaccacaggatcctcttcgacaagtaccacccggggttcttcgggaaggtagggatgaggtactttcataagctccgcaacaaattctactcccccatcgtcaacatcgacaagctatggtctctgatacc

SEQ ID NO: 172553 - DNA, 100 bp, Glycine max
cagaatattaccatccatattaacaatttacaagttataatgtcattagagcattctgtttcagatgtaactgaactggttattacaaatcaaagtgccg

SEQ ID NO: 172554 - DNA, 257 bp, Glycine max
  unsure (1)..(257): unsure at all n locations
cagctcggtgcagatgttgattgctttcttggcacaaactgtccacctgttcgtgtaaatgggaagggaggacttcctggcggaaaggtgaaactgtctggatcaattagcagtcaatacctaactgctttgcttatggcagctcctttagctcttggcgacgtggaaattgagattgttgataaactgatttctgtnccatatgttgaaatgactctgaagttgatggagcgttttggagtttctgtggaacacag

SEQ ID NO: 172555 - DNA, 259 bp, Glycine max
cgccgagaaaaccctaattcgctcgcagtcacccaagaggcgaatccttaccattgctcgagatgggtgaagaagtgaaggccgtggttccagagtctgttttgaagaagcagaagagagaggaggaatgggcgttggccaagaagcaagacctcgaggctgcgaagaagaagagagccgagagccgcaaactcatctacaacagagctaagcagtacgctaaggagtacgatcaccaggagaaggaattgattcggtt

SEQ ID NO: 172556 - DNA, 190 bp, Glycine max
aatttaatcaccattgtacaacccaattcccttcgtcgttttcgattaagagagcaatggcacgtaccaagcaaaccgctcgcaagtccaccggaggaaaggctccgaggaagcaattggcaaccaaagccgctcgcaagtcagccccggcgaccggcggagtgaagaagccccaccgcttcaggccagg

SEQ ID NO: 172557 - DNA, 263 bp, Glycine max
gccgtcaaggagctcgacgagatgaagcgccgattgaaggaaatggaagaggaagccgcagcgcttcgcgagatgcaagccaaggtcgagaaggagattggcagcgttcaagatcctgctaatgcagctgcttctcaggcaaacaaggaggaggcagatgctcggtctgtttttgttggcaatgttgattatgcatgcacaccagaagaagtgcagcaacactttcagtcctgtggtactgtaaacagggtcactatcctgac

SEQ ID NO: 172558 - DNA, 266 bp, Glycine max
gttggatgcaaggcaagacatggtggttatggaggtaccaaagttgggaaaagaggctgcaactaaggcaatcaaggaatggggtcaacccaagtccaagattacccatctcatcttttgcaccactagtggtgtcgacatgcctggtgctgattatcagctcactaaactattaggccttcgtccctccgtcaagcgttacatgatgtaccaacaaggctgctttgccggtggcacggtgcttcgtttggccaaagacctcgctg

SEQ ID NO: 172559 - DNA, 254 bp, Glycine max
gcagaacagagagagcaaaaccctagagcatccatcacaagcagaggaagaagatggtgaagttcctgaagcctaacaaggcagtgatcgtcctgcagggccgctacgccgggcgcaaggcggtgatcgtgaggaccttcgacgagggaaccagggagcgcccctacggccactgcctcgtcgccggaataaagaagtacccaagcaaggtcatcaagaaggactccgcgaagaagaccgcgaagaaatctagg

SEQ ID NO: 172560 - DNA, 252 bp, Glycine max
gtgctttcagatgcagttgcaacttctgaagacaaaggcattagctggagtaaacggggagaatgtgctcttaatgattcagactgtgtgataactattgatgacatttataaatggcttgcggctactttctttctctggtttgttctggccatttactttgacaatataatcccaaatgcatcaggtgtgaggaaatcaatattgtactttctaaatcccagttattggatgggaaaaggaggtcaaaaa

SEQ ID NO: 172561 - DNA, 187 bp, Glycine max
accaaaaaaatggctttggaaactctcaactcaccaacaacaaccgccccatctttccccttcgacgacccaactattccatgggccaaaagaaaacgttcaaagcgttgttcacgcgaccacccttcggaggaagagtacctcgctctctgcctcatcatgctcgctcgcggcggcaccacccggc

SEQ ID NO: 172562 - DNA, 259 bp, Glycine max
gcacttgataagtcatgtcaggttgatctagtgaaggatggtggtcatatctattttattcagtttcttgacagcatggacgcatatccagagcaacgcgcaatggctgcttctgtgttggctgtgattgtggatggtcatagacgaggccaagaagcttgtattgaagctggtttgattcatgtctgcttaaagcatcttcagagttcatgtcctaatgattcttgtactgaacccctattccttcagtggctttgct

SEQ ID NO: 172563 - DNA, 211 bp, Glycine max
ctacttgtatatgacataaccaagaggcaaacctttgacaatgtccaaaggtggttgcgtgaactgagggaccatgcggattctaatatagttatcatgatggctggaaataaatctgatttgagccatcttagagcagtttcggaggatgatggtcaagcattggcagagagggaaggtctctcgtttcttgagacatctgcactggaag

SEQ ID NO: 172564 - DNA, 222 bp, Glycine max
tggaaatgaaactgaagcaagaacattttctaaagctcaaggctgggagactgataatgttgaagaaatagctttaaagatttctcaattgccaaaagcatcagaaaaacataaaaggattactgttatcacccaaggtgcagatcctgtttgtgtcgctgaggatggaaaagtaaaattgtatcctgtgatactattacctaaagagaaattaattgatac

SEQ ID NO: 172565 - DNA, 232 bp, Glycine max
attttctcctctctccgattccttttattaattggagttttctcgctcctttttctttccctgaaaacatttcatcttcgtattgatgtcggaaaagggtcggccacttcccaaatttggtgaatgggatgtcaatgatccagcctcagctgaggggttcacagtgatttttaataaggccagggatgagaaaaagacaggtggcaacccagagtcaccaggaaagactgct

SEQ ID NO: 172566 - DNA, 267 bp, Glycine max
tatcagtatgtattcaaaaccctagctaggtttttggagctccctttctttctttccgatcccaccgtcaaacttgtcattctatatgctttgcagggtccattgaatatgtactccgtcgttggatcttcctcccaagggtggcttcagttttgatctatgccgaagaaacgcaatgcttcaaaacaagggcctcaaagccccaacctttctcaaaactggcaccactattgtcggtttagttttccaggatggtgtcattcttgg

SEQ ID NO: 172567 - DNA, 146 bp, Glycine max
ggtactacttctgctccctagttatcctacgtgtttgctttgttccttgtttttagtagcttcggttagctgtgtctcaccatgctttgttactctccattttcatatttattttttggttattattatgaacctagaacaattgg

SEQ ID NO: 172568 - DNA, 259 bp, Glycine max
cgtattcggctcgagacagctttgaacgacgcagaaggttcatccaatctccgaatcctttaatcgcattgcaaccatgtcgaggagaaaggtcagagagccaaaggaggaaaacgtgactcttggcccagctgttagagatggcgaacatgtctttggcgtcgctcgcatatttgcctcctttaatgataccttcattcatgtcactgatctgtctgggagggaaacgcttgtccgcatcactggtggaatgaaggtt

SEQ ID NO: 172569 - DNA, 244 bp, Glycine max
agaaggttcatccaatctccgaatcctttaatcgcattgcaaccatgtcgaggagaaaggtcagagagccaaaggaggaaaacgtgactcttggcccagctgttagagatggcgaacatgtctttggcgtcgctcgcacatttgcctcctttaatgataccttcattcatgtcactgatctgtctgggagggaaacgcttgtccgcatcactggtggaatgaaggttaaggctgacagagatga

SEQ ID NO: 172570 - DNA, 241 bp, Glycine max
tcccaacacattctggtcaccggtggtgccggtttcattggcacccacaccgtcgttcagcttctcaaagctggcttcagcgtttcaataatcgacaatttcgataactccgtcatggaagcagtggaccgcgtccgccaagtggttggccctctgctttctcagaacctccaattcacccagggcgatctccggaatagggatgacttggagaaactcttctccaaaacaacatttgatg

SEQ ID NO: 172571 - DNA, 217 bp, Glycine max
ggacaatgaggctctctatgatatctgtttccgtacattgaagcttgctacaccaacttttggggaccttaaccacctcatttctgctaccatgagtggagttacttgttgtctacgtttccctgggcagctgaactctgatcttaggaagcttgccgtgaatctgatcccattccctcgtctccatttcttcatggttggatttgcaccattgaca

SEQ ID NO: 172572 - DNA, 240 bp, Glycine max
cctaacctaaaccctactcattctccatacctcaacgaagaggttaaagagacggcaacactttgctgtccgccttgaccgagcagagcttcgtcttggccctcgattttgccctaaagtactctcagtcacaacagacaccgtcgtcgtcgtcgtcgtcatcaatggcaccgaagcagaccaaggctgagaagaagatcgcttacgatgcgaactgtgcgacctaatggaggagtacgg

SEQ ID NO: 172573 - DNA, 241 bp, Glycine max
ctcaatcgcaaattttctcccccaaatcgtagatctacggttaaattggtgtagtgtggtaagatgggaggaggatttagagtgcttcacttagttaggccatttctctcgtttcttcctgaagttcaaactgctgacaggaaagtgccatttagagagaaggtcatatacactgtgatctctcttttcattttcctggtttgtagtcagctccctctatatgggatacactcaacaacag

SEQ ID NO: 172574 - DNA, 242 bp, Glycine max
gcgagtgagactgaggttgggtttggaaggcaagggcttgtgttgtcacaatccaagagagaagtaatggcgaacatagacatcgaagggatcttgaagcagcagcagccttatgatgggcgcgttccgaagacgaagatagtgtgtactttgggccctgcttctcgatccgtagaaatgaccgagaagcttctgagggcagggatgaacgttgctcgtttcaatttctctcatggcaccca

SEQ ID NO: 172575 - DNA, 241 bp, Glycine max
ccactccagaaaaaatggcggtgcctcttctctcgaagaagatcgtgaagaagaggctgaagaagttcaagaggcctcaaagtgacaggaagatttctgtgaagacaaactggcgcagaccaaagggtatcgattcccgtgttaggagaaagttcaagggatgcactttgatgccgaacattggttatgcttcagacaagaagacccgccactatctcccgaatggtttcaagaaatttgt

SEQ ID NO: 172576 - DNA, 238 bp, Glycine max
atgttcgtgttgcatatccaaaccctaatttggaaattgaatttttgcaagatggttctggcggagttaggtgggagcatttcgcgtgctctccagcagatgagcaacgcgacggtgatcgacgagaaggtgctcaacgattgcctcaacgtcatcactcgcgctcttcttcaatccgatgttcagttcaagctcgtccgcgacctgcagaccaacatcaagaacattgtcaacctcg

SEQ ID NO: 172577 - DNA, 237 bp, Glycine max
tgttgtaactcgttcttcttcttttgttgttctgtgtttgtgtttgttttttctctcacctgaaaatgtcttgctgcggtggtaactgtggttgcggaagctcctgcaagtgcggcaacggctgcggaggctgcaagatgtacccagacttgagctacactgagtcaaccaccaccgagaccttggtcatgggagtggcacctgttaaggctcaatttgagggtgctgaaatgggtg

SEQ ID NO: 172578 - DNA, 238 bp, Glycine max
attggaaaggggcatcagggttctcagcctcttccacagccgaacaagtcactcaagggattgatggaaccgccctcaccgccatcgtcacaggagcaacaagtggccttggtctggagaccacccgggttcttgcattgcgcggtgtccatgttgttatggcagtaaggagtctggacagtggtaagaatgtcaaagaaacaatacttaaggaaatcccctcggctaaaattgatgt

SEQ ID NO: 172579 - DNA, 238 bp, Glycine max
atctcttaaaaacaatggaattgatgtgccattgttcgagctttcttcttccgccggagaatcctaacacgacgtgttcgctttctctaaagtacgctctcgttgtactcaaccaaagcctaccgagatttgctcctctgctctgggaccacgctcaagtacgagtttgcgctgatggaggtgccaatagggtgtatgatgaaatgcctcttttcttccctcatcaacaaccttccca

SEQ ID NO: 172580 - DNA, 238 bp, Glycine max
ctgaactggaaaatgcaacagaaaacttttcatcttccaacctaattggggtagggggaagtagttatgtataccttggtcggctgaaagatggtagcaatgtggcagttaaacgactaaaagaccaaggagggccagaagcagactctgcatttttcaaggagattgaactattagctagacttcaccattgtcatttggttcctttgcttggatactgctccgagttaaaaggaaa

SEQ ID NO: 172581 - DNA, 238 bp, Glycine max
tcgagctgagaataccagttgctccagtagccggcactaaacaacatggcggacaaggcagtcaccatccgaaccaggaagtttatgacaaacaggcttctctccagaaagcagttcgtcgttgatgtccttcatccagggagggctaatgtttccaaggctgaactgaaggagaagctgggaagaatgtatgacgtgaaagacaccaacactgtatttgtcttcaagttccgaactc

SEQ ID NO: 172582 - DNA, 233 bp, Glycine max
ataagaagaagaggagagggaagatgatgatgatgacaatggaggggatgatggacaagggggtgttggatgatgtgataagaaggcttctggaagggaaaggagggaaacaggtgcaactctctgagtcggagatccgtcaactctgcgtcaacgccagacaaatcttcctctctcagccaattcttctcgacctccgtgctcccatccgcatctgcggtgatatacatggt

SEQ ID NO: 172583 - DNA, 234 bp, Glycine max
gtcgtttatctctcctcgttcgcatcttcaccctttccctgtctctcagaaagatgaaggtggtcgctgcgtatctgctcgccgtcctcggtggcaacaacaccccctccgccgatgacatcaaggaaatcctcggctccgttggaatagaggcagatgaagataggattgaatcgttcttgtctgaagttaagggtaaggatatagttgagctaattgctgccggtaaggaaa

SEQ ID NO: 172584 - DNA, 235 bp, Glycine max
ctgcgcaggtagagagagcgagagaacaagaacataagggaaccacagcggcggtaacagaagaacaagcagagaatgggtcgagtgagaacgaagacggtgaagaaatcctctcggcaggtgatagagcgtcactactcgcgcatgaccctggacttccacacgaacaagaagcttctggaggaagtggcgataatcccgtcgaagaggctaaggaacaagatcgcggggttct

SEQ ID NO: 172585 - DNA, 236 bp, Glycine max
agcggctgctgttgtcaattctggcttactcttgatggctgttatgggaatactatttcctgctgtgctttactttactcactccgaagttcatcaagggaagtcagtcttgtctctttcaagatttagcagctgcataatgctactggcctatgcaagctaccttttctttcaacttagaagtcagcaaaatgtttatagtccggttggtgagggaggagagaatggtgaaaatt

SEQ ID NO: 172586 - DNA, 237 bp, Glycine max
gttttctgattaactctttcttctcataactctgccgccgcaacagccccaaatccaatggcttcagagaagaaactttcgaacccaatgagggagataaaggtgcagaagctcgtcctcaatatctccgttggcgagagtggagatcgtcttaccagagccgctaaggtgttggaacagcttagtggccaagcccctgtgttttccaaagcaaggtacacggttcgttcctttggg

SEQ ID NO: 172587 - DNA, 239 bp, Glycine max
gcacactcctcccagggtttctccaccaagagggaaatggctcccaaaccgcctagtacgggtctgtttgttggactgaacaagggacatgtcgtcaccaagaaggaattgcccccacgcccctcggatcgtaaggggaaaacaagcaagagggtgcactttgtgaggaacctcataagagaggttgctggttttgcaccctatgaaaagcgtataactgagttgctgaaggttgggaa

SEQ ID NO: 172588 - DNA, 240 bp, Glycine max
caaatcttagccgccattgatttttcctcttccatttctcttactttctcagcctttttcgattacccatttggttatttcgccctaatggctcttgctccatccaaagtttccaccttttctggtttttctcccaaacccagtgttgggggtgctcagaaaaacccaacttgctctgtttctctgagctttttgaatgagaaacttggaagcagaaaccttagggtttgtgcctcaacg

SEQ ID NO: 172589 - DNA, 236 bp, Glycine max
tagaaccgaatttcgacctccgatgtctgaggtggtgcaagcattggttcggttagtgcaaacagcaagtgtggttaaaagacgacccagtgaagaatctggttttggtcacaagaccccagaccatgaggccatggacatgccattttaaatgttagtgcctttaagtgatcttttacaattttgtgcagtagcccggctaaaaaaattactactacagaacacaggaaggaagg

SEQ ID NO: 172590 - DNA, 233 bp, Glycine max
aaaaattgaaagtgcagactctataccaaacttgcattcaattattacagcgtctgatggggccatggttgcaagaggagatcttggtgcagagctccctattgaagaggttccacttttgcaggaagagataataagcatatgccgtagcatgggaaaggctgttattgtggcaacaaatatgctggaaagcatgattgttcacccaacaccaaccagagccgaggtatccg

SEQ ID NO: 172591 - DNA, 235 bp, Glycine max
gaaaaatggggtgtttccatctcacagtgactagtctgtgctttgtagtggttgtggttggagtgcttccactctccttagatgcacaactagatccctcgttttacagagacacgtgtcccaaggttcactccattgttcgcgaagtggtgaggaacgtttccaagaaagatccccgcatgcttgccagtctcattagacttcactttcatgactgttttgttcaaggatgtga

SEQ ID NO: 172592 - DNA, 235 bp, Glycine max
ctttagccgaggtcaggaggagcactagctaagttcacaatttcaaaatggctaggggactaaagaagcatttgaaaaggctcaatgctcctaagcattggatgcttgacaaactgggtggtgcatttgcgcctaaaccctcatctggaccacacaaatcgagggagtgcctccccctcattcttattctgcgaaaccggctgaagtatgctctgacataccgtgaagtcattgc

SEQ ID NO: 172593 - DNA, 236 bp, Glycine max
agaaacagacacagtcttgcgagtgaacacaagttacaacaatggctttctttggtagaattgggaatttgttacgacagacagcgagcaggcaggttagttcaaaattgcgttcgcccccttcattttttcaggctatacgctgtatgtcatctgccccaagcacaaaactgtttattggaggtgtttcatattctactgacgagcaaagcttgagggaagctttttcaaaatat

SEQ ID NO: 172594 - DNA, 239 bp, Glycine max
ccgccacctccagaaattaaagataatattccatcacaaaagaggattggggcaaattgcatgtacacattgcttcgtacaacaacttccctactgcagcaggactggcttcatcagctgccggttttgcatgccttgcttatgcccttgggaagctaatgaatgtcaaagaagatgaaagccaactatctgctatcgcaaggcaaggatcaggtagtgcttgccgcagcttatttggg

SEQ ID NO: 172595 - DNA, 238 bp, Glycine max
ctttcttccaacctctcaagtccaacctacccctttttcttctcccaccaacttcaccgtcttcttcctcgatcatgtctcacttcaagggcaagtaccatgatgagcttattgtcaatgctgcttacattggcactcctggaaagggtattcttgctgctgatgagtcaacagggacaattggcaagcgtttggccagcatcagtgtagagaatgttgaatccaacaggcgtgctct

SEQ ID NO: 172596 - DNA, 232 bp, Glycine max
tctggactcttttatgacgcgtgcttttaatgcacatgcttctcttactttcagacttcaattacgccctctctgactgttatctggatgagaacaagtccttaattctgaagattgttgaaagccagaattctggcaagctgagcgagtgtgccgagaaccaagcaaggcttcagagaaatctcatgtacttagctgcaatagctgattctcaaccccaaccacccaccat

SEQ ID NO: 172597 - DNA, 232 bp, Glycine max
gtcttcgccaatcgcctgcgtctctctctgaattgactagcttaaatggctggtcctaggattgcccatgctaccttgaaaggtccgagtgtggttaaggagatcataattggaataacacttggcttagctgctggtggtgtgtggaagatgcaccactggaatgaacagaggaaaaccaggaccttctacgatttactggaaaagggtgagattactgttgttgcagagg

SEQ ID NO: 172598 - DNA, 173 bp, Glycine max
acaaaagtcttccgtacattcaatgcatcgatcacattggatgttatgttgaataaggaaactaaagatggagaagttggggaaaagattgttgtttatcagcatgcaaataaacaggttgctatcatttgtaatcatcaacgcagtgtttcaaaatctcatactgcacaaat

SEQ ID NO: 172599 - DNA, 233 bp, Glycine max
caattttctagggtttatacaattttcgatggcttcttcagatgttgagtaccgttgctttgtcggtgggctcgcttgggccactgacgaccaagctctcgagagagccttctctcagtacggcgaaatcgttgaaacgaagattatcaacgatcgtgagactggaagatccaggggttttggatttgtgaccttcgcctcggagcagtccatgaaagacgccatcgaaggga

SEQ ID NO: 172600 - DNA, 234 bp, Glycine max
caccttctctgcatcgagcgcgccttttactttgaactcgggagtcgagggagcagagaacaccaacaccatgtatggctccgctcaaccttcttcttctcccttcggcaccccttcttctacccctgcttttggcaccccttcttcgacccctgcttttggcaccccttcttcgaccccagcattcggtaccccttccttcgctaccccttcttctacccctgcattcggtac

SEQ ID NO: 172601 - DNA, 235 bp, Glycine max
gaaggtgcaaaagtgattgagaagcatgctgcacaactctgtgttcttgcagaagactgtgaccagcctgactatgttaaactggttaaggccctttgtgcagagcacaatgttagcctgctgacagttccgagtgcaaagacccttggagaatgggctggtttgtgcaagattgattccgaaggaaaagcaaggaaggttactggttgctcctgtgtggttgtgaaggatttcg

SEQ ID NO: 172602 - DNA, 236 bp, Glycine max
gcatctcaccctgatacaaggatgctattcctcaatgctcatatacctctatatctgtatcccttccttaatacaacaagcaagtcaagaccatttgagtacttgaggcttaccagccttggtgtcattggtgcattggtgaaggttgatgatacagaagttataagtttccttctttcaacagagataattcctctatgcttgcgaaccatggaaatgggcagtgagctatccaa

SEQ ID NO: 172603 - DNA, 278 bp, Glycine max
gaagagagaaaccctagggtttggaagaagctgatcggagaagatggtgcagcgtctcacctaccgcaagcgccacagctatgccaccaaatccaaccagcacagagtcgtcaagactcccggtggcaagcttgtttatcagaccacgaagaagagggccagcggacccaagtgccctgtcactggaaagaggattcaagggattccacatttaaggccaacagaatataagagatcaaggttacccaaaaaccgaaggactgtgaaccgtgcatatg

SEQ ID NO: 172604 - DNA, 274 bp, Glycine max
gaaaagttagggttcacaacttttccttttccttttgcttgcgaatctgaatcaaataatcaatcatccattcattattcactcatgtcgtcggcgaagaaaatcacgctgaagagttcggacggcgaggctttcgaggtggaggaggcggtggcgctggagtcgcagacgataaagcacatgatcgaggacgactgcgccgacagcggcatccctctgccgaacgtgacgagcaagatcctggcgaaggttatcgagtactgcaaaaagcacg

SEQ ID NO: 172605 - DNA, 270 bp, Glycine max
gaaaatgctaaagaattggtaaaacagatgttggatagggaccctaagaaaagaatttctgctcatgaagttttatgtaacccttgggttgttgatgacattgcacctgacaaacctctggactctgctgttttgacacgcctaaagcatttctcaggaatgagtaaacttaagaagatggcattacgggtcatagcagagaggctttcagaggaagaaataggtggattgaaagagttgtttaaaatgattgacacagacaatagtggg

SEQ ID NO: 172606 - DNA, 264 bp, Glycine max
tctcagtctccggaactcgtttctaccttcacttcgcacatctcgaaccctctctttccggcaactaggttaaagttcatcaatggcaggtcgtggcaaaaccctaggatccagcgccgccaagaaggccacctcaaggagcagcaaagccggcctccgattccccgtcggccgtatcgcccgtttcctcaaggccggaaaatacgccgagcgcgtcggcgccggtgctcccgtttacctcgccgctgtcctcgaatatctcgc

SEQ ID NO: 172607 - DNA, 263 bp, Glycine max
cccattttcccatttgctctcaaacatgccaaagtttgcatctttgagaaccccttcttcttcttctgcttcttcttcttcttcttctgtgtcttgctctctcaccaaagacccttacactgttgtgccattggaggaacatagcataatggataatgggtcggttctgcttcagagacccgattcgtttgggaggtatggcaagtttggagggaagtatgtccctgagactctgatgcatgctctcactgagcttgcggctg

SEQ ID NO: 172608 - DNA, 262 bp, Glycine max
caggctctgcctgttgctttgatgattcatgataactcgtcggatcgcacggcctttgtgccggcgacgcatcattcaaatttctgccctatcaactttcgatggtaggatagtggcctaccatggtggtgacgggtgacggagaattagggttcgattccggagagggagcctgagaaacggctaccacatccaaggaaggcagcaggcgcgcaaattacccaatcctgacacggggaggtagtgacaataaataacaata

SEQ ID NO: 172609 - DNA, 259 bp, Glycine max
ctcatctgtatgcctatgcttgtatatcattttcttactttcctctcacgctctgccacaaaactccgtctccgcaataacggaataaaaaaacaagtttaattactattatggcgccgagggatcataagacaagcaacgctaaggctaacggtaacggtaacagcggggtgaaggaggtgcattttcgtggagtgagaaagaggccgtgggggagatacgccgcggagatcagagatcccggcaagaagagccgcgt

SEQ ID NO: 172610 - DNA, 260 bp, Glycine max
cttcctactccaaccgcacttctgctccgcaattatcatgggcaaggtcaagatcggaatcaacggatttggaagaattggccgtttggtagccagagtggctctgcagagagacgatgttgaactcgttgccgttaacgaccctttcatcaccaccgattacatgacatacatgtttaaatacgacagtgttcatggacactggaagcatcacgatgtcaccgttaaggacgagaagacccttctcttcggtgacaagc

SEQ ID NO: 172611 - DNA, 260 bp, Glycine max
gcgcggcataacctaaacctatctttcttctctctctgtgtgtgcgcatcaacggcaaccagaagcagccatggccactgcaaggactgtgaaggatgtttcacctcatgagttcgttaaggcgtactcctctcacctcaagcgatccggcaagatggagctgccagagtggactgatattgtgaaaactgcaagatttaaggagttggctccttatgatcctgactggtactatgtcagagctgcttccatggcaagaa

SEQ ID NO: 172612 - DNA, 262 bp, Glycine max
ctttgtcgcaaagagaagagatctgcctccttttttttatcgaatctatctcttcttcaagaatagttgaaaatggggctgtctttcaccaagttgttcagccgactgtttgccaagaaagagatgcgtatactgatggtgggtctcgatgctgcgggtaagaccaccattctgtacaagctcaagcttggagagattgtcaccaccattcccaccattgggtttaatgtggaaactgtggaatataagaacatcagcttca

SEQ ID NO: 172613 - DNA, 166 bp, Glycine max
gtctcaactcatgaatggtgtattggtttgtgcagagcacctgaacttttgctgggtgctaaagaatactcaacatcaattgacatgtggtcagtgggttgcataatggctgaattaattgtcaaggagcctctgttcaggggtcaaagtcgaacctggaaactcg

SEQ ID NO: 172614 - DNA, 269 bp, Glycine max
gtactactctagttggtgcattagagcagtggaatcaaatagaggtaatggccagttaactgcctgtgaagtcttgctcttccatcatgaagaaatgggcattccatgggaaattgcaaagcttggagtaaggaaagggatgtggggaactgttcagaagattgaacctggtttgcgagcgtatcaagaagcaagagcttctggtgctgcactctctcattcagcctttatggcccaagtcaacacaaaaataagtcctgagtacttgc

SEQ ID NO: 172615 - DNA, 267 bp, Glycine max
ttcagttccaaacaaaacttatcaaaatctcatatactgattcagttctatacataaccatcgagatttattatcaaaccaaaaattctcaaaatctcttcacctctgtgatgaccatggaatacagaaccttagaactcaacatcatatccgcaaaggacatcaagaacgttaacctcttctccaagatggacgtatacgccgtcgttacgctctccggcgaccctctccaccctcagggcgccaccacccacgtccacaaagacg

SEQ ID NO: 172616 - DNA, 260 bp, Glycine max
gccgactacaacatccaaaaggaatccactctccacctcgtgcttcgcctcaggggtggcatgcaaatctttgtcaagactttgactggcaagaccatcaccctcgaggtcgaatcctcggacaccattgataatgtcaaggccaagatccaggacaaggagggtatccctccagatcagcagaggttgatatttgctggtaaacaacttgaggatggaagaacccttgctgattacaatattcagaaggagtctacctt

SEQ ID NO: 172617 - DNA, 257 bp, Glycine max
agatactaattacttgtttatgggtgattatgtggaccggggttattattcagttgaaactgtaacacttcttgtgtcactgaaagtgcgatatcctcagcgaattactattcttagaggaaaccatgaaagccgtcagatcactcaagtatatggattttacgatgaatgcctcagaaaatatggtagtgctagtgtttggaagatctttactgacctttttgatttctttccgttgactgcattggttgagtccg

SEQ ID NO: 172618 - DNA, 259 bp, Glycine max
agaaactgttgaatcgcgtcgattaaggttttgagatttctaggctttcatctcagacagtgaaaaaatgatagatataagtacacttaatgctgcacagattactgtgctgggatctgccttttgtgctatgctttccatgcatttcacgtcgcagttactgtctcagcatctcttttattggaagaatccgaaagagcaaaaggctattatcattatcatcctcatggctccaatctatgcagctgtctcctttgtg

SEQ ID NO: 172619 - DNA, 261 bp, Glycine max
cgacttacgctgcgatgaagcccacaaagcccggcttggaggagccccaggagcagatccacaagataaggatcaccctttcctccaagcacgtcaaaaacctcgagaaggtttgtgcggacttggttcgcggtgcaaaggacaagcgcctcagggttaagggacctgtcaggatgcccactaaggttcttctcatcactaccaggaagtccccttgtggtgaaggtaccaacacatgggacagatttgaacttcgtgtgc

SEQ ID NO: 172620 - DNA, 269 bp, Glycine max
agtgcggcggtccaaacactcttctctgcagcttttgcctacaactcccttcaccatggctgaacaaaccgagaaagcttttctgaagcaaccaaaagtgtttctcagcacaaagaagactgggaagggaaagagacctggaaaaggtgggaaccgcttttggaagtccattgggcttggatttaagactcccagggaagccatcgaaggaacctatattgacaagaagtgccccttcactggcaatgtttccatccgtggccgtatct

SEQ ID NO: 172621 - DNA, 264 bp, Glycine max
gtattattcttccattcataatgggtgttttcacattcgaggatgaaatcaactcccctgtggctcctgctactctttacaaggccctagttacagatgccgacaacgtcatcccaaaggctcttgattccttcaagagtgttgaaaacgttgagggaaatggtggcccaggaaccatcaagaagatcactttcgttgaggatggagaaaccaagtttgtgctgcacaaaatagaaagcattgatgaggcgaacttgggataca

SEQ ID NO: 172622 - DNA, 263 bp, Glycine max
caattacgtatgtgtgggagacaaagagagatggctaagtggtgtatgttggtgttggttcttgctctagctctggctgtggccacaagtgccagagatgcacccgaagatgttggtctcaaggaccagaagaacttcatcagctatgctggagttggtggctattcaggaattggaagcaatggactaccttttggaggtgccggaatagacggtggcaccaccgggataggtggattgggaggattcggaggtcccattgg

SEQ ID NO: 172623 - DNA, 261 bp, Glycine max
ctcttcttcagtggtggatgctactagaacactagtttgttgagcactgcgatgaggaagtggacggttgcttccgctctccttcttctctctctcctctttctctttgcagatcaaggtcgaaagtttcaggcgaatgccgagggagattccgacgagcttgtagatcctccgaaggtggaggacaagatcggtgctgtgcctcatggcctttccaccgattcagatgtcgtcaagagggagtcggagtcgatctcgaag

SEQ ID NO: 172624 - DNA, 259 bp, Glycine max
gggggatcctgttagtcgtcctccggcatggatgatgcgccaggccggaaggtacatggctgtttacaaaaagcttgctgagaaatatccatccttccgagagaggtcagagacaactgatctcattgtggaaatttctttgcagccttggaatgctttcaggcctgatggagtaattatcttctcggacatccttacaccacttcctgcgtttggagttgattttgacatagaagaagtaaggggacctgttatacat

SEQ ID NO: 172625 - DNA, 256 bp, Glycine max
ctttacattggttgctagcaagtggtatggggaggcaaccctgctgtgacaaacttggggtgaagaaaggtccatggactgctgaggaagacaaaaaactcataaacttcattctctccaatggccagtgctgttggcgagctgttcccaagcttgctgggcttcggcgttgtggtaagagttgtcgtcttcgttggactaattatctaaggcctgacttgaagagagggctcctcacacaggctgaagagcagct

SEQ ID NO: 172626 - DNA, 261 bp, Glycine max
gtagccgtcgcactctgtgttttcagcgccgtctccgatctccgacaatggcgacccaaatgagcaagaagagaaagttcgtagctgatggagtgttcttcgctgaactgaacgaggttctgacaagagagttggccgaggacggttactccggcgtggaagttagggttacgccgatgcgcaccgaaatcataattagagccaccagaacccaagctgttctcggtgagaagggaaggagaataagggaacttacctctg

SEQ ID NO: 172627 - DNA, 261 bp, Glycine max
cacaaacatggacgcatcaaaactcaatcaattgaagcatttcatcgaacagtgcaagtccaacccttccctcctcgctgatccttcactctccttcttccgcgactatcttcaaagtctcggcgcgaaacttcctgagtctgcttattccgaatcgacgggcgtggagagggatgaggacatagaggatcttacggaggagcacgagaaggtagaagaagaagaagaagaagaggacgatgtaattattgaatccgatgt

SEQ ID NO: 172628 - DNA, 259 bp, Glycine max
gaaaatggtatatccatggacttcaattctctctgtgaagatgctcgagcaaaaagttacataattgaagagctctcaaagattgcgaaggaaaagaagttgaaaggttttgagtttataaaagcagttcaccttgactcaattccatttgacatggaacgtgaccttatcactccaacatacaagaagaagaggccacagttgcttaaatactatcagaatgccattgacaacatgtataagagtggaagtaaaccca

SEQ ID NO: 172629 - DNA, 256 bp, Glycine max
gaaaccctagctagccacaatgcagatattcgtgaaaaccctaacggggaagacgataaccctagaggtagagtcatcggacacaatcgacaatgtgaaggcgaagatccaggacaaggagggcatcccgccggaccagcagcgcctgatcttcgccggtaagcagctggaggacggccgcaccctcgccgactacaacatccagaaggagtccacgcttcacctcgtcctccgcctccgcggcggcgccaagaag

SEQ ID NO: 172630 - DNA, 256 bp, Glycine max
caaagaaaaaaaaaaacccttagccaacacaaccatcatggccacctctgctattcagcaatcagcattcactggtcaaactgctctgaagcagctcaatgagttcgtccgcaagaccggtggcgccggcaaaggtcgcactaacatgcgccgcaccgtcaagagtgctcctcagagcatttggtatggccctgaccgtcccaagtacttgggtccattctcggagcagattccatcatacctgaccggagaattc

SEQ ID NO: 172631 - DNA, 254 bp, Glycine max
caattgagtaaactatgaagccactggacccatggctcaaagacatgcctgctgtggcataaaatagatcattgatcaagtacaatgcaatatcagtcaagtgttgaggcagtcagtttgattctttattattttttgtaagagtttttcttttcctctttaacgttctcataatagttgacataattggggtataaattgtgggaactggggagggtttatgttctatgttgttttgtactccaatcttttat

SEQ ID NO: 172632 - DNA, 250 bp, Glycine max
gcgatactccacgggcatgttgccagtgccagttttccagattgcgattttctcgaacgcttcaatggggagaaccaagtgctgcttcggaaggttgcagtgtccggcgacgctctccgcgtcggaaccgtagttcggggcgcagaaattggtggcggtgacggcgaccgtcgtgccggagatgcaccaccgccggtcgaagtcggaatcctcctcgcggcaccggacctcgaagcaggcgccgcagatc

SEQ ID NO: 172633 - DNA, 266 bp, Glycine max
acccaacccaatcttcaccttcgcccacaacaaatcccattcctgcatctcctccttcagcatcgctgcaaactttactttccatttttgtccttcctccccgagaaaaaaatggcgaacgcagcatctggtatggccgtccatgatgactgcaagctaaagtttttggagctcaaggcgaagaggacgtaccggtttatcgtttttaagattgaggagaagcagaagcaagttattgtggagaagctgggtgagcctgcaaatgg

SEQ ID NO: 172634 - DNA, 259 bp, Glycine max
ggtcgatttcgtttttccggtttggatatggattcggaggatttccgatccattctggagatcgcgggcgtggacgtttgggccctcatggacgcggtcatcgcggtggcctccgccgaccacgctcacgagttgaagcgccggagagatggaatcgttgagcgcctttacgcggccagttcaccgccgccgctgtgtcggaactgcgacgccggcgacgggggagaaatcaggacgcagagcagtccctccgcggagg

SEQ ID NO: 172635 - DNA, 260 bp, Glycine max
ctctgagttgttttgtgagataatagcacatagcataacaagggaaggagtattaacaaccgcaaacctgaagagaaaaagagcagcagaagaagaaacaccaacgatgggtgtggattactacaagatcttgcaggttgataggagcgccaaagacgatgacttgaagaaggcttataggaaacttgctatgaaatggcaccctgataagaaccccaacaacaagaaagaagctgaagctaagtttaagcaaatttccg

SEQ ID NO: 172636 - DNA, 249 bp, Glycine max
gccacatagagacacaataaaaagtgagttgttgcaaacatcaccacaactctctgaaaacatgggtatctccagagattctatgcacaagaggcgtgccactggtggcaagaagaaggcctggaggaaaaacagaaagtatgagcttggtcgccagcctgctaacactaagctgtcaagcaacaagacagtcaggaggatccgtgttagaggtggaaatgtgaaatggagggcattgagattggatac

SEQ ID NO: 172637 - DNA, 257 bp, Glycine max
cacaagccaagtgaaagtgagataaaataaaaatcaaagagcataatgtcagggatcattcacaagattggggagacccttcatgtgggagggcacaagaaggaggaggagcataagggtgagcaccatgctggagaatacaaaggggagcaccatggtgaacacagtagtgagtacaaaggagagcatcatggtgaacacaaagctggagagtaccatggtgagcacaagccagagcacaaagaggggttcctaga

SEQ ID NO: 172638 - DNA, 253 bp, Glycine max
gtaccaacactctggactcttttatgacgcgtgcttttaatgcacatgcttctcttactttcagacttcaattacgccctctctgactgttatctggatgagaacaagtccttaattctgaagattgttgaaagccagaattctggcaagctgagcgagtgtgccgagaaccaagcaaggcttcagagaaatctcatgtacttagctgcaatagctgattctcaaccccaaccacccaccatgtctggtcagt

SEQ ID NO: 172639 - DNA, 253 bp, Glycine max
ttcagttcggtggaaggagccgtagcagcagcggaagctctagcttgggcagcgaatcacaatggcgagaggattgaagaagcatttgaagaggcttaatgccccaaagcattggatgcttgacaaactgggtggtgcatttgctcctaagccctcatctggaccacacaaatccagggaatgcctgccactcatactcattttgcgaaaccggctgaagtatgctctgacataccgtgaagtcattgctatt

SEQ ID NO: 172640 - DNA, 249 bp, Glycine max
cgaagaaatagccaacgcgacgtacttcagcgccgagagccaagcggatcccttgcagttcttaccggaagggttcgtggagagaacaaaaggaagagggtttttggttcagtcttgggctccgcagcctcaggtattgggccatccatccacgggtgggttcttgacccactgcggctggaactctattctggagagcgtggtgaacggtgtgcctttcatagcctggcctctgttcgcggacagagg

SEQ ID NO: 172641 - DNA, 252 bp, Glycine max
gctagaagcaataagatgaaaatgaaagtgcttgttttgtttgttgctacagttttggtagcatatgaatgccatggctcagactaccaaaagttccctctccaaatgaaaactgggtttggtgggcaatacagcaatgaggtggcatgtgccagttggaggcttggcgtggaagcaaacaacgtagtcaagtggcaaactgttcctgcagcttgcggagagtacatagctgactacgttctaggagaccaa

SEQ ID NO: 172642 - DNA, 257 bp, Glycine max
ctttataattgatagcgggtgctttggagatttttcttttccctttctttttggttgagtatgggttcggtggactgttatccgtctcgtgtggacgatgcggccgtggtgtctctagattcgctgccgttagggttccgattccgacctaccgacgaggaactcgtcaattactacctgcgacagaagatcaacggtaatggtcgcgaggtttgggttatccgagaaattgatgtctgcaaatgggagccttggga

SEQ ID NO: 172643 - DNA, 259 bp, Glycine max
ggcagataactccattaccttattttctccatacaagatggggaaattcaacctctctcatagggtggtattggctcccatgaccagatgcagagccctcaatgggattccattgccagcgcatgctcaatactatactcaaagatcaacactaggtggattcctcatcactgaaggcaccttgatctctcccacttcttctggatttcctcatgttcccgggatatattcagatgaacaagtagaggcatggagaaat

SEQ ID NO: 172644 - DNA, 230 bp, Glycine max
ttcttcttcttctacaagactgcgacgacgatccaagtgatagacactcgtcgcgatggaacgtgtagctgaatccgagcgaactctgtaaccatacgtgactggatcctctgtagtcgctatcaaatacaaagatgggattctaatagccgctgacatgggaggttcgtatggatctaaactgcggtacaagagtgttgagcgtatcaagcctatttgaaagcattctc

SEQ ID NO: 172645 - DNA, 254 bp, Glycine max
gtttattctttctctaatgagtatcatactttataccctctttatctcttctcttgtagtttccatagcagccgacaaatcatccaattcacagtttcagtccctcagtcatgaagaaaccatagtttccccaaatggagtctttgaacttggttttttccctctgggaaattccaacaaaagctacctcgcaattcggtacaagaactattcggatgaaacctttgtttgggttgcaaacggttcctacccaa

SEQ ID NO: 172646 - DNA, 278 bp, Glycine max
ccaatctgcagcagttgctgaggtatggctttagcaggtgggttcatggaaagcagttggccacctgcaatcccacagcttaacagtgacacagatggagttctcacatgacgacaactttcttttgactgtctcaagggatcgccagttctctgtcttttctatcacaagaacaggcaccggtgaaattagttgtagtcttcttgcgagacaggaggggcacaagcggattatcgggtcatgttcttagaatccgcatggtcaggaatttgcacagg

SEQ ID NO: 172647 - DNA, 271 bp, Glycine max
tacatatcactttcttcaccgttcgctctttctttctcccctacacaaaacatggctttgcccaatcagcaaaccgtcgattaccccagcttcaagcttgtcatcgtcggcgacggtggcacaggaaagacaaccttcgtgaagaggcatctcactggtgaattcgagaagaaatatgaaccgaccattggtgtggaggttcatccgttggattttttcacgaactgtggaaagattcgcttctattgttgggatactgctgggcaaagaa

SEQ ID NO: 172648 - DNA, 269 bp, Glycine max
atttggtgctgttgaatcattgtcagatcgcttttgcattcattttgatgtaaatatctctctctctgttaatgaccttcttgcatgctgtggctttctgtgtggatctggttgtgatgggggatatcccttgtatgcgtggcaatacttagcccaccacggtgttgtcactgaagagtgcgacccatattttgatcaaattggctgttctcatcctggttgtgagccagcttaccggactcccaagtgtgttaaaaagtgtgtagtgg

SEQ ID NO: 172649 - DNA, 274 bp, Glycine max
agacattgctatattgactggtgctgagttcaagctagtgatctgggtctgcttgttgaaaacacctcagtggagcagcttggcttggctcggaaaattaccatctccaaggattctaccactatcattgctgatgctgcaacaaaggatgagctgcaagccagggttgctcagttaaagaaggagctgtcacagacagactcagtatatgatactgagaaactggctgagaggatagctaaactgtctggtggagttgcagtcatcaaggtgg

SEQ ID NO: 172650 - DNA, 275 bp, Glycine max
gtacaattcttcgttcgttctctgcagttatatcctttttgagcttcaatggcggacgctgaaaccttcgctttccaggctgagatcaaccagcttctaagtctcatcatcaacacattctacagcaacaaggagattttcttgcgtgaactcatcagcaatgcttctgatgctttggataagattcgattcgagagcttaaccgacaagagcaagctcgatgctcagccagagctcttcattcgtcttgtgcctgacaaggataacaagatctt

SEQ ID NO: 172651 - DNA, 242 bp, Glycine max
ctctcttcgacctcgcatcgcaccttcaacttaacctattccacttgtaatcgtaaacgctttgctagaagaagagacaaagtgtgtctgtgtgtgtgagagagagagcaatggctggctcgtgggcacgccgttctctgattgttctagccatcatttccttcggatgtctatttgcgatttccattgctaaggaggaagccaccatgttagggacggtcatcggaattgatcttggaaca

SEQ ID NO: 172652 - DNA, 286 bp, Glycine max
cgaaacccagccgatgtttcgaacctttctctcagatctctctcttcgttctctcactcgctgacacaacaaacgaaagcattatggctggcaaaggagagggtccagccatcggaatcgatctcggaaccacgtactcgtgcgtcggtgtctggcaacacgatcgcgtcgagatcatcgccaacgaccaaggtaacagaacgacgccgtcttacgtcgggttcaccgacaccgagcgtctcattggtgatgccgcaaaaaatcaggtcgccatgaaccccacaac

SEQ ID NO: 172653 - DNA, 270 bp, Glycine max
tcttaattaaattaaaacaaaaaatgtgcgctgccatatccgaagtggaacaagaagagttgctcgaaaaattggaggtgttcaagatcaaaggcagggacaagcatggccgcaagatccttcgcattatcgccaaattcttcccagcacggttggtgagtgttgaggttctgaaaaagtacctggaggagagggttttcccgaagctgatggggaagaggaaattcgcggtgctgtacgtgcacaccggcgtccagaggagcgagattt

SEQ ID NO: 172654 - DNA, 156 bp, Glycine max
ttctcatctccagaagcatatgctcaggatgaagaggatctaaggatatggaaagaaatgagtgaccttgtggggcgtatgtgttggaaagtagctgcttagaggaaccaaactgttgtctggcaaaaacctccaacaaatgactgctatatggaa

SEQ ID NO: 172655 - DNA, 262 bp, Glycine max
tagggattatgtggatagagggaagcaaagtttggagactatatgtttgcttttggcctacaaaataagatatccagacaaaatttatctcttgaggggaaaccatgaagaagcaaagataaaccgtatatatggtttttatgatgaatgtaaaaggaggttcaatgttaggctatggaagatatttacggactgctttaactgtttgccagtggctgcactcattgatgagaaaatactttgtatgcatgggggactctct

SEQ ID NO: 172656 - DNA, 153 bp, Glycine max
aaaaaagaggcgcaagatgagtggtagggtttctgggaaggtgaagtggttcaatgatcagaaggggtttggattcataagccctgacgatggcagcgacgatctcttcgttcaccaatctcagatcaaatctgacggtttccgaagcctcgc

SEQ ID NO: 172657 - DNA, 269 bp, Glycine max
atccttctcaaactagtagtattattcttccattccgttctacaaataatcattcataatgggtgttttcacattcgaggatgaaatcaactcccctgtggctcctgctactctttacaaggccctagttacagatgccgacaacgtcatcccaaaggctcttgattccttcaagagtgttgaaaacgttgagggaaatggtggcccaggaaccatcaagaagatcactttccttgaggatggagaaaccaagtttgtgctgcacaaat

SEQ ID NO: 172658 - DNA, 265 bp, Glycine max
gttggtgcaaagcatccttcgtttcaatttctctctctcagcgctttctgcaatcgaacctttcatctccaaagggatccacaggccgaaggagaaatggggctgacattcacaaagcttttcagtcggcttttcgcgaagaaggaaatgcgaattctgatggttggtcttgatgctgctggtaagaccactatcctgtacaagctcaagctcggagagatcgttaccacaattcctaccatcgggttcaatgttgagactggga

SEQ ID NO: 172659 - DNA, 231 bp, Glycine max
atcgtcttccttctcttatatttcttcttttttttgtcttcgccgcacgccgaaacaatggccggaaaaggagagggtcctgctatcggaatcgatctcggaaccacctactcttgtgtcggtgtgtggcaacatgaccgatttgaaatcatcgccaacgaccaagggaacagaacgacgccgtcttacgtcggcttcactgataccgagcgtctcatcggtgatgcggat

SEQ ID NO: 172660 - DNA, 140 bp, Glycine max
ggagacacaccttcagcagcagcagccatggttctcaaaaccgaactatgccgattcagcggtgccaagatctacccagggaaaggcatcagatttgttcgtggtgattctcaggttttcctgtttgctaactcgaaatg

SEQ ID NO: 172661 - DNA, 274 bp, Glycine max
gccgtagcagcggaagctctagcttgggtagcgaatcacaatggcgagaggattaaagaagcatctgaagaggcttaatgccccaaagcattggatgcttgacaaactgggtggtgcatttgctcctaagccctcatctggaccacacaaatcgagggaatgcctgccactcatactcattttgcgaaaccggctgaagtatgctctaacataccgtgaagtcattgctattctgatgcagcgacatgtccttgttgatggcaaagtcaggact

SEQ ID NO: 172662 - DNA, 147 bp, Glycine max
tgagtttgaagaagagggggttgggctccttggagagacattggtgctgtcgttgctcacacctcttctctttattttaacccttagcttcattgcttccttccttttgttgccactctttccctttcaagtttggggcgaaaatgt

SEQ ID NO: 172663 - DNA, 261 bp, Glycine max
tgtgatcacgactccttgggaacaatgttaatgggcccaatcagttccctgagaagttaattccaaagttcattctcctggctatgcaaggcaagcctcttccaatccacggggatggttctaatgtgaggagttatttgtattgtgaagatgttgcagaagcttttgaacttatccttcacaagggagaggtcgggcatgtttacaatattggtactaagaaggaaaggagggttattgatgttgccaaagatatgtgca

SEQ ID NO: 172664 - DNA, 271 bp, Glycine max
ctctcagctgtcaccaccacacacaccaaatggggtttcccagaaaatcactattccttcttctgttcctgattctcttcacaaaccttgctgaatctgcttctgactacaccaccttggtctacaagggttgctccaaggaaacattcacagatccaaatggggtatactcacaagccctttcatcactctttggctcattggtctcacaatccaccaaagccaagttcttgaaggccactgcagggagtggccaatcctccatgatggg

SEQ ID NO: 172665 - DNA, 128 bp, Glycine max
gtgtaagaaagatgtcgatcttcgagtacaacgggagtgccctagtggctatggtggggaagaactgcttcgccatcgcgagcgatcggagactcggggttcagctccagaccattgccaccgatttc

SEQ ID NO: 172666 - DNA, 269 bp, Glycine max
atcgcacatctttctcagttctacgatggagttttggggtgccgaggttaaggttggagagtctgttaaggtagacccagccgaatttgaggcatgcatacacctttctcaggctgctcttggtgaggcaaagaaagataagcctgaaccggtggttctctacatgaaagttggtgaacagaaatttgtcttgggaaccctttccagggagaaaatccctcaaatatctctggaattggttttggaaaaggagtttgagctttccacag

SEQ ID NO: 172667 - DNA, 265 bp, Glycine max
ataccactccttcaagaagattcgtttgagagctgaggacgttcaagggaagaatgttctgacaaacttctggggaatggatttcacaactgacaagttgaggtctttggtgcgaaaatggcaaactttaattgaagctcatgtggatgttaagaccactgataattatacattgaggatgttctgcattggctttactaagaggcgtagtaaccaggtgaagaggacctgttatgcacaatcgagccaaatcagacagatcgcg

SEQ ID NO: 172668 - DNA, 261 bp, Glycine max
ataagaggagtttgagaatggcaacgatcagcgcggttcaggtggagttcctggagtttccagcggtggttacttcaccagcctccggcaagacctatttcctcggcggcgcaggggagagaggattgacgattgaggggaagttcataaagttcacaggcataggagtatacttggaggataaggcggtgccatcactcgccgctaagtggaagggtaaaacttcagaggagttagttcacaccctccacttctacaggg

SEQ ID NO: 172669 - DNA, 203 bp, Glycine max
ctcgcaagcaaaaagaaagaatcccaggcgaggagaaagatggaggggaaggagcaggatgtgtcgttgggagcgaacaagttccccgagagacagccaattgggacggcggcgcagagccaagacgacggcaaggactaccaggagccggcgccggcgccgctggttgacccgacggagtttacgtcatggtcgttttacag

SEQ ID NO: 172670 - DNA, 226 bp, Glycine max
atctcatttgaatacattccttgtagtttatactgaaagatgggtttgaagatggcgttactgatcctaggcctttccctcatgctccttttggtctcctctgaggtggcatccacgaatacaaaagaggaggcaaatggagtggatgatgccaaatatcccggtggaagctatggagggggttacccaggtcatggcggtggcggttatcctggccatggaggtg

SEQ ID NO: 172671 - DNA, 143 bp, Glycine max
  unsure (1)..(143): unsure at all n locations
attacctccagaatgggtggaacaaaccgaggatagagngctattgtctagttggtgctcccgggagcaagtgtgtgctcacccttcagttgggggatttttgacacacagtggttggaagtcaacgttggaaagtatgggtg

SEQ ID NO: 172672 - DNA, 109 bp, Glycine max
cccggatcgggttcacttttgtggttccggaagggtcttcggatccatgacaaccccgctctcgaagtcgcttcgcgtggagcctctcatctctaccctgtctttgtca

SEQ ID NO: 172673 - DNA, 255 bp, Glycine max
tatggatcgttgtcatatcctgaaccccaaatgactgcaaaggatagtgctgaaaagcattctcgaacaaaacctcttactattgaagaagaacaatgtataaaggtattttatgaaaacaagctacaagaagtatgtaacaatttccgcttccctcataagatccaggcaacagcccttatctattttaaaagattctatctgcaatggtcagtgatggaacatcaaccagaacacattatgttgacctgcata

SEQ ID NO: 172674 - DNA, 190 bp, Glycine max
cttccttgaggttcgatggtgccatcaatgtggatatcactgagttccagaccaaccgttgtgcctaccctaggatccacttcatgctttcgtcctatgctccggttatctctggccgccaaggcctacgcacgagcagttgtcggtgccggagatcagcaatgccgtgttcgagcccgccagcatgatg

SEQ ID NO: 172675 - DNA, 165 bp, Glycine max
agtaagccctagattatcctaagtctttgggaatagtgctgcaatggcttcaagtcaggaggaggtgacccttttgggagctactggaagcccatttgtgtgcagggttcatattgccctcaagttgaagggagttcaatacaaatatgtcgaagaaaatttgag

SEQ ID NO: 172676 - DNA, 247 bp, Glycine max
ttctcagccgcctcggctagggttcggaaacgaagaagggttctgttttcttttcgcgatgagggccaagtggaagaagaagcgtatgaggaggctgaagaggaagcgccgaaagatgagacagagatccaagtagtgcgttaaacctagtttgtttccgttgcttttacaattgcttatgttgtcaaataggacacccagttgttagtggcactggtctctcctttttgatgtgttgatacatttt

SEQ ID NO: 172677 - DNA, 281 bp, Glycine max
cgctctctcactcacaaacacacactgaactaaaaaacatcaaaagagacatggctgagcaaaccttcatcatgatcaagcctgatggcgtccaaagaggccttattggcgagatcattagcagatttgagaagaaaggtttctacttgaaaggtttgaaacttgttactgtggaccgtccttttgctgagaagcactatgctgatttgtctgccaagcctttctttagtggtttggtggattacattatctctggccctgttgttgccatgatctgggag

SEQ ID NO: 172678 - DNA, 276 bp, Glycine max
  unsure (1)..(276): unsure at all n locations
agaggaagtcgatgagatgattcgtgaggctgacgttgatggtgatgggcagatcaactacgaggagtttgtcaaagtcatgatggccaagtgaggaccaatcaaccataacaaaaacatttgaaagcacatgaacagaaaagggacagggcagataagttttgatgaaaattctattttcattaggacaatcttcatttggggtcattagtttttgttggtcggatttgtgtntgcttttatttattggtattgctcattagtattttctacttg

SEQ ID NO: 172679 - DNA, 143 bp, Glycine max
tagacactcatctcactcgcgccatcttagggtttctccttttgtttcgcaacatggttgccgctaagaaaactaagaagacccatgagagcatcaacaacaggctcgctcttgtcatgaagagtggcaaattcaccctcggt

SEQ ID NO: 172680 - DNA, 266 bp, Glycine max
cgaaagaagaaaaagaagcgaaactaaagtcagcattcgaaaaagatgagtagcatcggtacaggttacgatctatcggtcaccactttctcccctgatggccgcgttttccagatcgagtatgccgctaaagccgtcgacaacagcgggactgttattgggatcaagtgcaaagatggggttgtgttgggcgttgagaagcttattccgtcgaatatgatgcttccgggttccatagaggatacactcggtcatcgtcactctgg

SEQ ID NO: 172681 - DNA, 272 bp, Glycine max
tagcaaatattgcctattccgcaatatggcggaaaatgcttcgattgagctgaacaagtttgtgatcttttgtttgttggtgctaatacaagtggcagtttctgaaatcatttttgaagagcgttttgatgatggatggcgaggtaggtgggtgaagtcagactggaaaagcagtgaaggcaaagcaggttcattcaagcacacagctggaaaatgggccagtgatccagatgataaaggtattcaaacatccagtgatgccaaacactttg

SEQ ID NO: 172682 - DNA, 277 bp, Glycine max
acttagtcccaattttctagggttttattcattttccgatacgcttctgcagatgttgagtaccgttgctttgtcggtgggctcgcttgggccactgacgaccatgccctcgagagagccttctctcagtacggcgaaatcgttgaaacgaagattatcaacgatcgtgagactggcagatccaggggttttggatttgtgaccttcgactcagagcagtccatgaaagatgcgatccgagcgatgaatggacagaacttggacggccgtaacatca

SEQ ID NO: 172683 - DNA, 279 bp, Glycine max
aggtatcttctacaatatcctaaagtgtttttcttcttcttcatcaccatgtctttactttcagacctcatcaacctcaatctctcagaatccacagaaaagatcattgctgagtacatatgggttggtggatctggtatggacctcagaagcaaagccaggactcttcctgggccagtgagtgaccctgcaaaacttccgaagtggaactatgatgggtctagcacagatcaagctccaggggatgacagtgaagtcattctatacccacaagctatt

SEQ ID NO: 172684 - DNA, 291 bp, Glycine max
atagaaattagggttcatatcccatttcctcagatttcatctcagatttcgcattggtttgcgttgcgtggttggttttgcggtatcgaagaagaagatggggaaacaggttgtgccggtgaaatcagtgatctacgcgctttcccctttccagcaaaagattatgccgggtctctggaaggacttgcccacgaagattcaccacaaggtctccgagaattggatcagcgccactcttttgctcggtcccctcgtcggcacctacgcgtatgttcaaaactacctggaaaa

SEQ ID NO: 172685 - DNA, 286 bp, Glycine max
atttcgggggaagagatccagcagcaatggtgtacgtcaaggctcagaaatcaaaagcctacttcaagagatatcaagtcaagttcaagagaagaagagagggaaaaaccgattaccgtgccaggattcggttgattaatcaggacaagaacaaatataacactccgaaataccgatttgtggttcgctttagcaacaaggacattgttgcacaaataatatctgctagcattgccggcgatttagttcttgctacagccatcactctgctgctgataatgatgag

SEQ ID NO: 172686 - DNA, 258 bp, Glycine max
caacccatggccaccacctccgcattcctcctccttcacctcctcctgctgctccacctcgccatcgccgctcacggcatcggcatcaactacggcacgctcggcgacaaccttccaccgcccgcggcgtggcgaacttcctgaagacgaagacgaccatcgaccgcgtgaagatctacgacgtgaacccggacatcctgcgggccttcgccggcagcggcatctccgtgacggtgaccgcccccaacggcgacatcg

SEQ ID NO: 172687 - DNA, 128 bp, Glycine max
ggcagaaagcaagctcatcctagagttttaaaaatggcagcagcctcctccatggctctctcttccccatccttggctggcaaggccgtgaagctgggcctatcagcccccgaagtcgggagggtcag

SEQ ID NO: 172688 - DNA, 169 bp, Glycine max
atcttgcttggagacttatccaatcactctgtgctcaacttaagttgccttacaatgtatccagtctttcctttcttctttccttttcccatataatcgtgagacttatgatatatctgtgtctcacttcatcaataataaattataataaagaagagcaatcattaca

SEQ ID NO: 172689 - DNA, 272 bp, Glycine max
  unsure (1)..(272): unsure at all n locations
tcagcatcacactgtgtaatggccgtgacgccctcaacccctcttctctccttcctcgaacgcctccaagaaacagccttcgaaaccttcgcccattccaacttcgatcccaaaacctacgtggacatgcctctcaagtccgccctcacggttaccgaggacgcgttccagaagcttccgaggaacgccaacgggtccgtgccggttgaggatttgaagcgtntcatagaggcctactttgaaggtgcaggggatgatctggtgtaccggga

SEQ ID NO: 172690 - DNA, 235 bp, Glycine max
agttctagatgcgacggccgcaccctcgccgactacaacatccagaaggagtccaccctccacctcgtcctccgtctccgcggtggcgccaagaagcgcaagaagaagacctacaccaagcccaagaagatcaaacacaagcacaagaaggtcaagctcggcattctccagttctacaaggtcgacgaatctggaaaagtgcagaggctccgcaaagagtgccccaacgccgagt

SEQ ID NO: 172691 - DNA, 271 bp, Glycine max
atcgagtcacagactagagctaaatcagcatagagatacaaaaatgccaaaagtaaagacaaatcgtgttaaatacccagagggctgggaattaattgagcctacactccgtgaacttcaagcaaagatgagggaagctgagaatgatccgcatgatggcaaaagaaaatgtgagaccttatggcctatatttaagattgcacaccagaagagccgctacatatttgatctataccatcggaggaaggaaatttctaaagaactgtatgaa

SEQ ID NO: 172692 - DNA, 277 bp, Glycine max
ctctagcgttgttgcattgcagaagcgtctccattttcttatcgcgatggccgcgcgatccctgttgaccagaaaaaccctagccaccgttctccgcaacgacgcgaacccataatcggagctggcatagctgcagctactcattctcgtgggttgcacgtgtacacgctccccgatctggattacgactatggcgctctggagccagccatcagcggcgaaatcatgcagctgcaccaccagaagcaccaccagacttacatcaccaacttcaaca

SEQ ID NO: 172693 - DNA, 281 bp, Glycine max
gcaagatatcatcacattgcaaagaaaatacacattacattactaagtctttgttcatttgagtagtagtgatggctagcctcaaggttgcatgtgtggttgctgtgatgtgcatggttgtggtggccatgagtgctgcacccatggcacaggccgcaatcacgtgcgggcaggtcgccggcgacatgtctccgtgcttcagttatcttcgaagcggcggaaaaccgtcgcaggcctgctgcaacggagtgaagtccctcagcagcgcggcgaagaccacg

SEQ ID NO: 172694 - DNA, 273 bp, Glycine max
accgagcagccacacctcccgcagcagccatggttctcaaaactgaactatgccgattcagtggtgccaagatctacccaggaaagggcatcatatttgttcgttgtgattcttaggttttcctgtttgcaaactcaaaatgtaagaggtatttccacaatcgcctgaagccttcaaagctcacctggtctgcaatgtacagaaagcaacacaaaaaggacattgctcaagaagctgtgaggaagaggagacgtgctgccaaaaagccttact

SEQ ID NO: 172695 - DNA, 286 bp, Glycine max
  unsure (1)..(286): unsure at all n locations
tgagttttttaatgaccaagttctcttttcagtacccggataatcctacaagacaacagaagaaggatgtaaaagaactggtacagatgttacctcgaatatacccttgcagggaatgtcgagatcactttaaagaagttcttagagcaaatcctgtactgactggatcacatgctgaattttctcagtggctatgtcaatgtgcataatgttgttaatagaagccttgccaaaccgatattcacctgtgaacgagttgatgcaaggtgnggcaaactggactgtg

SEQ ID NO: 172696 - DNA, 273 bp, Glycine max
  unsure (1)..(273): unsure at all n locations
agtggaaaaagttccattttcagagttcttagaggactctggccaattgccagtggaagactctctagaccatctgaagttgtggatgaagaggatggatctggttgtggcaacttctatgttcctcaacggccatatacatgtttgggaaccctaagggatcaaattatatatcccctttcccgtgaggaagcagaggttaaagcactgaagatgtatgggaaaggtganaagcatgctgacacaagaaatttgttgacacacggttaaaag

SEQ ID NO: 172697 - DNA, 275 bp, Glycine max
caagaatttccattgcatgcaaagcaaatacgcattatattactagttttaatttgttttgtcgtttgcttctttctttgattaatgatgactagctttaaggttgcatgtgtggttgcgatgatgtgcatggttgttgccatgagtgttacacccatggcacaggccgcaatcacgtgcgggcaggtcgccggcgacgtgtctccgtgcctcagttatcttcgaagcggcggaaaaccgtcggacgcctgctgcaacggagtgaagtcgctcag

SEQ ID NO: 172698 - DNA, 280 bp, Glycine max
agagaacaagaacataagggaaccacagcggcggtaacagaagaacaagcagagaatgggtcgagtgagaacgaagacggtgaagaaatcctctcggcaggtgatagagcgtcactactcgcgcatgaccctggacttccacacgaacaagaagcatctggaggaagtggcgataatcccgtcgaagaggctaaggaacaagatcgcggggttctcgacgcacctgatgaagcgcatccagaagggcactgtgcgcggcatctccctcaagctccaggag

SEQ ID NO: 172699 - DNA, 278 bp, Glycine max
gattaattatagtttaggcagcaaattatggattcccatgatgaggagcatgctgccaaactacttagagctcaaacccacatatggaatcacatatttagcttcataaactccatgtcccttaaatgagtggttgacttaggcataccagatatcatacacaactatggccaacccatgccactctcaaacctcattgcttcactaccaatccacccatccaaaacttgctttgtccatcgcttgatgcgaatcatgatccattctggcttcttctc

SEQ ID NO: 172700 - DNA, 265 bp, Glycine max
gaagaatttcattggctgatcaagtactcaccattgcataacgtccggagaccttgggaacagcatcccgatcagtcaattcagtacccatcaacaatgctattgactgctgatcatgatgatcgtgttgtgccattgcattcgttaaagctgttggcgaccctgcagtatgtcctcgttaccagccttgataaaagtcccaaacaacccaataattggtcgcattgaatgcaggctgggcatggagctgggcgtccacacagaa

SEQ ID NO: 172701 - DNA, 256 bp, Glycine max
catctgcttcaatggggaagggaacagggagcttcggtaagaggaggaacaagacccacactctctgtgtgaggtgtggccgccgcagcttccacctccagaagagtcgctgcgccttgtgctttccccgctgcacgcacgcggaaatataactggagcgtcaaggcaattcgcagaaagaccaccggaactggcaggatgagatacttgcgtaacgtgcctcgccgtttcaagagtggcttcagagaaggtaccg

SEQ ID NO: 172702 - DNA, 276 bp, Glycine max
tgcttgtaaccaaggtgttgaaaagattattgacttggcaaccttgactggggcttgtgttgttgctcttggaccctcaattgctggtgtgtttacaccctgtgatgacctagcaaaggaagtttttgaagcttctgatgtgagtggggagaaactatggcggctgccattagaggaaagttactgggaaacaatgaaatcaggagttgctgatatgttgaacactggtggtcgacaaggtggtgctattgttgctgctctcttcctgaaacagtt

SEQ ID NO: 172703 - DNA, 268 bp, Glycine max
ctcgagcgattcggctcgatcaaatgtcactccggtgttacgtgatgttgctggggtggatgaagccaagcaggactttatggaggtggtggagtttttaaagaagcctgagaggtttactgctgttggggctcgcattcctaaaggagttcttcttgttggtcctccagttcctggaggaccttgttagccaaggctattgctggtgaagctggtgttccatttttctctatatcaggttctgagtttgttgagatgtttgttggtg

SEQ ID NO: 172704 - DNA, 283 bp, Glycine max
cgagggtgctaaggatggaaagggtagaggaaggcaggttattagtactgcaagaacatgcaattgcattttgattgtccttgatgcaattaagccaataactcataagcgtcttatcgaaaaagagctagagggatttggtataacgttaaacaaagagccaccaaatctgacttttaggaacacagacaaaggtggactcaatctcacctcaactgtcaccacaacacatctagatcttgagactgtgaaggctatatgtagtgagtacagaattcacaat

SEQ ID NO: 172705 - DNA, 275 bp, Glycine max
gttttcttcagaaaatttgccatcgttgagggaagcgcgagagccttcgttgttcaagatgagagctaagtggaagaagaagcgcatgaggaggttgaagaggaagcgccgaaagatgagacaaagatctaagtaggtgcttgaacaaggagtggagatgatgtgcttttccatctgctaccagcttcatgacattttatgctgtcatggctcttatgatgatcttgaggtctagtggcgaggggagcttccatcttgactttagtttagcttta

SEQ ID NO: 172706 - DNA, 177 bp, Glycine max
ataacggcgagcgaaccgggaaaagcccaccatgaaaatcggtcgccctcggcgtccgaattatagtctggagaagcgtcctcagtggcggaccgggcccaagtcccctggaagggggcgccagatagggtgagagccccgtcgtgaacggaccctgtcgcaccacgaggcgctgtc

SEQ ID NO: 172707 - DNA, 272 bp, Glycine max
gcttcgggtacaaagactcagaagaaaaagaagagcagtgatctgaagtatgacatatttggatggataattctggcagtcggcattgttgcatgggtgggatttgcaaaatcaaacctgccaccgcctcccccttcccctcctcgataagtgaagccatttgatttgatctcacacattattgattattgagaatgatatttgatttcggttagtgtcgtttatttagtttgacagtagtaatgtttgtcatggtgtagccgttggcttat

SEQ ID NO: 172708 - DNA, 278 bp, Glycine max
  unsure (1)..(278): unsure at all n locations
gcctctagggttatcatatctccatttccatttcctctctctcagtttccaagaatcttaagctatgggaaagtcttacccaaccgtgagcgctgattaccagaaggccgttgagaaggcgaagaagaagctcagaggcttcatcgctgagaagagatgcgctcctctaatgctccgtttggcatggcactctgctggaacttacgacgtgagctcgaagnacggtggtcccttcggaaccataaagcaccctccgaactcgctcacggcgctaaaca

SEQ ID NO: 172709 - DNA, 277 bp, Glycine max
  unsure (1)..(277): unsure at all n locations
cttcttctttactcccaatcatttctctgtgcaaggataagtgtgttatctatctaaaaacacaagatgtcagctgggcctggacttgaatctctagtagatcagacaatttcagtcattacaaatgatggacgaaatatagtgggagtcctgaaaggttttgaccaggcaacaaatattattcttgatgagtcccatgaacgggtttattctacaaaggaaggtgtgcaacaacttgttcttggtntgtacatcatcaggggtgacaatataagtg

SEQ ID NO: 172710 - DNA, 258 bp, Glycine max
ctcagaaccttctgaggttaaagcaaaaaacaaagagagagagagagagaaaatgatgaagccatcgatgctcagatctatccactccgccgccacccgcggcgcctctcatctcttccgccgtgggtacgcctccgagccggtgccggagcgcaaggtagccgttctcggcgccgccggcgggatcgggcagcctctctcccttctcatgaagctcaatcccctcgtttcgagcctctccctttacgatatcgcggg

SEQ ID NO: 172711 - DNA, 239 bp, Glycine max
  unsure (1)..(239): unsure at all n locations
gtttgttcttcaggagccaaaatgggtgagatacctaaaattgaatcttcatagtcactatggttctgaattttattgcacactaagcgcagttgaagtttatggtgtggatgctgttgagaggatgctggaggatttgatacatactcaagataatctatatgcacctggagatggtgatgctgataaaaggacagtatcaccccatcctaatccatctgagagtngagatgttcatc

SEQ ID NO: 172712 - DNA, 271 bp, Glycine max
tctcgagcgaatcggctcgaggcagatccgaggagttaccctatcttttcttttttcacttttctctttcctcattcaacttaaaactcccaccagtgatggcaggtttggctccagagggaacacaattcgatggtcgccaatatgatgctaagatgagtgaattgctttccactgatgggcaagaattcttcacctcttatgatgaagtgtatgacagctttgatgcaatgggattgcaagagaatcttctgcgaggcatatatgctta

SEQ ID NO: 172713 - DNA, 266 bp, Glycine max
aaagcgctatgaaattgtaaatggtgttactgaagtggaaggggcagcaaatgaatcaacagatgaatcagaagagaataaagagaaaggagtgccttctttttggctcaatgcaatgaaaaataatgatgtgttagctgaagagatttcagagcgtgatgaaggtgctctcaagtttcttaaagatatcaagtggagcaggatagaaaatcctaaagggttcaagcttgatttcttctttgataccaatccttacttttcaaata

SEQ ID NO: 172714 - DNA, 186 bp, Glycine max
atcaagcctatggtgatcatacctgtataatagcaaaagaacatttggagcctaacttaggtgggctcactgttgagcaggctatccaaaacaagaagttgttcatcttagatcaccatgactatctcattccttatttgaggaaaataaatgcaaataccacaaagacttatgctacaagaacca

SEQ ID NO: 172715 - DNA, 272 bp, Glycine max
  unsure (1)..(272): unsure at all n locations
tgcaatgctgtcacactttgtttagtccttcctgagaggggaagcattgacgcattggatggtggcatgatagaaatggttttggatcctgatttgaacaaaactggggacatttggcacatatgtattgaggatcttccacgaagcaatgttctgtatggatatcgcatagatggacctcgagactggggtaaggggcatcgatttgatagcagcattgtgcttgtcgatccttatgcgaaactagttgaaggtcgaagatatntcgggga

SEQ ID NO: 172716 - DNA, 267 bp, Glycine max
gaaaatcagagaagttaaaatatggtttctgtccttccgaagaggataatactgatgcggcatggggagtcacaggggaacctaaatacagcggcttacactaccacacccgatcacagcattcagttaacggcgcagggcatgacccaggcccgccacgccggcgagcagctccgccgcgtgatgggcggcgatgggtgttctcctgactggcgggtacaattctatgtgtctccctacggacgcacccgatcaacgctccgccag

SEQ ID NO: 172717 - DNA, 271 bp, Glycine max
  unsure (1)..(271): unsure at all n locations
aggaaaaaccccagtttctctctttcactagttccgttcaagttctaaccaagcactcacagtacttttgcttctctcgaagatgtctctacgagtgctgaaccctaacgccgaagtgctgaacaaatcggcggcacttcacatgaacatcaatgccgccaagggtttgcaagatgtcctcaaaaccaacctcggtcccaaaggaaccatcaaaatgctcgttggtggtgctggtgatatcaagcttaccanagatggcaacactctcttg

SEQ ID NO: 172718 - DNA, 263 bp, Glycine max
ccgacgggaaaattgtgcttgaggctttgattttgacctccgctgtggtttcatctcttactggctatgccttttgggcgtccaagaagggcaaggattttagcttccttggcccaatattgttcacctccctcattactctcatcctcactggcatgatgcagatgttcttccctcttggacctactgcccatgctatctatggtgcaattggtgctatgatattctctggctacattgtgtatgacactgacaacctgatc

SEQ ID NO: 172719 - DNA, 266 bp, Glycine max
atttccttaaggcacttgcaaagcgcatcaagcacaacaatactgcatatgaaaattaccacaggatatttgtcactgaaggacatcctttgaaggctacacccagagagcctttgagggttaatgttcttttccaacatatacagaagatgctgtctggtgaaactgctgtaattgctgagacaggggattcctggtttaactgccaaaagctgaaattgccaaagggatgtgggtaagtgtctgatagaatgtgatgtattgta

SEQ ID NO: 172720 - DNA, 266 bp, Glycine max
ggggtaggtacgctttggaaatgtctgctgttgtttacaaggactgggttttcactgatcaagcactgcccaatgatcttgtcaagagaggagttgccgttaaggatccatctgctccccatggagttcggcttttgattgaggactatccttatgcttctgatgggctagagatatgggatgccatcaagtcctgggtgcaagaatatgtgtcattctactacaagtcagatgcagcaattcaacaagaccccgaactccaagct

SEQ ID NO: 172721 - DNA, 266 bp, Glycine max
atgaaaatgaaggtccttgttttcttcgttgctacaattttggtagcatggcaatgccatgcgtacgatatgttccctctccgaatgaacactggctatggtgcccgtactccggaggtgaaatgcgcaagtacgaggcttgctgtggaagcacacaacatctttggctttgagaccattcctgaagagtgcgttgaagcaacaaaggaatacatccgtgggcgaacaatatagatcagactccaaaacagttaaccaacaagctt

SEQ ID NO: 172722 - DNA, 240 bp, Glycine max
gtggttgtaaggagcagattgaaaagatgcgagaagttgttgagcttcccatgctccaccctgagaaattcgttaagctaggaattgatcctccaaagggtgttctttgctatggtccaccagggactggcaaaacacttttagctagggctgtggctaataggactgatgcttgttttataagagttattggaagtgagctagttcagaaatatgttggtgagggtcccgaatggttcg

SEQ ID NO: 172723 - DNA, 249 bp, Glycine max
cttcaggctcttgcgatcaacaaacgcagcgttttgatctcagatttgagggggagaggtaccgtcgttgcataatggcaacaacagtgagaagtctgaagataaagacaagtacgtgcaaacgtatagtgaaggagctgcattcttatgagaaggaagttgagagagaagctgccaaaacagctgatatgaaggaaaaaggagccgatccctatgatctcaagcaacaggaaaatgtcttggctgagt

SEQ ID NO: 172724 - DNA, 258 bp, Glycine max
agaagggaaatggcaaagaattccctggagagatacacacattattatgagcggtgggccagcaatcaatcttcaaggcaaaaagctcttgcagatctacagcagatgcaaactgttcatattgagaagcttagtgacatacagtgtcagcctgagtcacagcttaagttcataactgaagcctggctacaaataattgagtgtagaagagtgctgaaatggacatatgcatatggtttctatttgccggagcatgag

SEQ ID NO: 172725 - DNA, 258 bp, Glycine max
gaaagatgagaggggcacctggcttcaacatctcacatatggagtttttggcctaggtaacagacaatacgaacactttaataagataggtaaagttgttgatgaagatcttagtgaacaaggtgcaaagcgtcttgttacatttggattaggcgatgatgatcaatccattgaagatgattttccgcctggaaagaactttgtggctgagttggatcagttgctccgagatgagatgatgcaatactgtctctaccc

SEQ ID NO: 172726 - DNA, 264 bp, Glycine max
ccgtctccgtctccactctcggcttcttcttcgttgcgctttttcccaaaaccaattgcatcactctcgtccgttaccgccgctgccctagaccaccgcaagcgacgtcgcacaccgccttcatccgttagggcaaaaatgagtcgaggaagtggaggtggatacgatcgtcacatcactattttctcccctgaaggacgtctctttcaagtggagtatgctttcaaggctgtcgaagctgcaggaatcacctcgattggtgtc

SEQ ID NO: 172727 - DNA, 267 bp, Glycine max
caattttctagggttttattcattttccgatggcttctgcagatgttgagtaccgttgctttgtcggtgggctcgcttgggccactgacgaccatgccctcgagagagccttctctcagtacggcgaaatcgttgaaacgaagattatcaacgatcgtgagactggcagatccaggggttttggatttgtgaccttcgcctcggagcagtccataaaatgcgccgcctgcggctgccaccgcaacttccaccgccgcgagccggagg

SEQ ID NO: 172728 - DNA, 245 bp, Glycine max
gatcaaccttgcatcagggttagggaatggctgctatcttagctcggaaatcactccttgctcttcgtgcgcgccaattggctgtaagcggtcaagggctgcacagctcccaaaactatggccttcgattaagtgcacactcctactctaccaaaagagaggatgaagaaagggagcaactcgcaaaggaaatttcaaaggattggagttctgtttttgaacgtagcatcaacactctctttctc

SEQ ID NO: 172729 - DNA, 211 bp, Glycine max
ctcatttgaatacattccttgtagtttatactgaaagatgggtttgaagatggcgttactgatcctaggcctttcccccatgctccttttggtctcctctgaggtggcatccacgaatacaaaagaggaggcaaatggagtggatgatgcaaaatatcccggtggaagctattggagggggttaccaggtcatggcggtggcggttatcct

SEQ ID NO: 172730 - DNA, 262 bp, Glycine max
caacatcttcttcatctatggcgacgccggattctgacgctaccactcagcctcaagattccgacactgctcccaattccagtcctcccaacgccctcgtccccgccgctcccgccgtttgcctccttcgcttcgccaccgactccgccggcgggctctcatgggctccgtctttggatacggtgctggattgtttaagaagaaaggttttaaaggatcctttgtagaagcagggtcttatgcaaagacatttgcagttttg

SEQ ID NO: 172731 - DNA, 226 bp, Glycine max
atcgaacgctcgagcggtcgacggctcgagggagaattccgtggtgactacggatgggacactgatggattatcagctagacccggaacccttcgccaggaaccgggagctggaggtgattcacagcagatgggcaatgcttggtggccttggctgcaccttcccagagatccttgagaagaatggtgtcaaaattcgcgaagccgtgttggttcaggccggtggc

SEQ ID NO: 172732 - DNA, 243 bp, Glycine max
gaaaaccttagcccaaccggatcttcacgattaggagatggctaagtcgaagaaccacaccgctcacaaccagtcctacaaggcccacaagaatggcatcaaaaagccaaagaggcaccgccacacttccaccaaagggatggatccaaagtttctgaggaaccaaaggtacgcgaagaagcttaacaagaagagcggtgaaacaagccacgaagaagagtaaagtgtccactcccaaatggg

SEQ ID NO: 172733 - DNA, 185 bp, Glycine max
cttcatccttctctgttctcctagaacttgattacttgaacattccctatgacagatgaggtggttcttctggatttctggccaagtccattttggatgaaggtcaggattgcacttgctgaaaagggtatcgaatatgagtacaaagaagaggcttgaggaacaagatctcttctcttacaatg

SEQ ID NO: 172734 - DNA, 277 bp, Glycine max
cactcagctaatggtgctgtggcccaaggttcccattctgaaggggatataaacaacactactatatttgttggagggcttgattctgataccagtgatgaggatctcagacaaccatttttgcaatttggtgaggttgtctctgtgaaaattccagttggtaaagggtgtggattttgttcaatttgctgacagaaagaatgctgaggaagcaattcagggattgaatgggacagtaattgggaagcagacagtgcgtctttcttggggtcgcagt

SEQ ID NO: 172735 - DNA, 266 bp, Glycine max
cacaggttatcatcaatcaccaggctcttccttgccttctgaatctgttgaccaataattataaaaaaagcatcaagaaggaagcttgttggaccatatcaaacatcacagctggtaataaacagcagattcaggctgtgattgaggctaatctaattgctcctttggtcaatctgcttcaaaatgctgagtttgatatcaagaaagaagctgcttgggctatctcaaatgctacatccggtggttctcatgaacaaatcaagttc

SEQ ID NO: 172736 - DNA, 263 bp, Glycine max
cagtgaatacatttgtgaaggattcacaagatccaaatcctttaattcgtgccttagctgtacggacaatgggctgtattcgtgtcgataaaattactgagtatctatgtgatccccttcaaagatgcctaaaggacgatgatccatatgttcgtaagacagcagctatttgtgttgcaaagctttatgatataaatgcagagttagttgaggacaggggttttttggattctctgaaggatttgatatctgataacaatcca

SEQ ID NO: 172737 - DNA, 173 bp, Glycine max
gacgaggaagggcgtagtaagcgacgaaatgcttcggggagttgaaaataagcgtagatccggggattcccgatataggtcaacctttcgaactgctgctgaatccacgggcaggcaagagacaacctggtgaactgaaacatcttagtagccagaggaaaagaaagcaaaag

SEQ ID NO: 172738 - DNA, 172 bp, Glycine max
cacttgtgtatcctaggatgatcgctatccatgatcttggctcaaaggaagatgatgactctgttattcctgcctttcttcctctttctagtgaacacatcagtgatgatggaatatatcttcttgagaatggtcatgattgttctgtttgtgttggagactctgtgaatcc

SEQ ID NO: 172739 - DNA, 223 bp, Glycine max
ctcttcttcgtctcaaatctcttcgttccttcgattcgttccaattcttccaaaatggccaaagacccagttcgcgttctcgtcactggagctgcagggcaaattgggtatgctcttgtccctatgattgctaggggagtgatgttgggtcctgaacaacccgtgatcctccacatgcttgacattcctccggcagcagagtcattgaatggggttaaaatgg

SEQ ID NO: 172740 - DNA, 252 bp, Glycine max
gcaaaacctcgtactgtttttggcggttaaggatgtcggggaaaggagcgaaggggttgatcacaggcaaaacctccgccgccaacaaagacaaggacaagaagaaacccatctcgcgttcttctcgtgccggccttcagttcccagttggtcgtatccaccggcttttgaagtcaaggacaaccgctaatggtagatttggggcccagctgctgtctatctgctgctatcttggatatctcactgctgaag

SEQ ID NO: 172741 - DNA, 247 bp, Glycine max
cagagaactagtctcctactctcacccgcaagaaaaaaattgcatctcacatcgttggatacccccgtatgggtcccaagagagagctcaagttcgctctcgagtctttctgggatggcaagagcagcgccgaggatttgcagaaggtgtctactgatctcagggcatccatctggaagcagatggctgatgctgggatcaagtacatccccagcaacactttctctcactatgacaaggttctcga

SEQ ID NO: 172742 - DNA, 261 bp, Glycine max
ctctgtggcaccaccgctctctctgcgttgttggagaacaatcagaggaaaaagattggagggtgaaccgaaaaaaacaattcagaaaatggagaacaacgcattcagagatcaaatcatggaggacaatgaacatgaagaaatgcctgattcctttgtttgctgcgtttgtctggatctattatacaagcccattgtgctatcttgtggtcatctgtgctgtttctggtgtgtctataattcaatgagttgtctgcggga

SEQ ID NO: 172743 - DNA, 222 bp, Glycine max
taaatagaaaagaggagtttgagaatggcaacgatcagcgcggttcaggtggagttcctggagtttccagcggtggttacttcaccagcctccggcaagacctatttcctcggcggcgcaggggagagaggattgacgattgaggggaagttcataaagttcacaggcataggagtatacttggaggataaggcggtgccatcactcgccgctaagttggaa

SEQ ID NO: 172744 - DNA, 256 bp, Glycine max
gatggtgaactcaaggacgagcttttctgcatccgttttccttctattgaaaattgcaaaagcttcatggaaacattccaagaagttgctgaatcccagaaggcagaggatgagaaggaatcagctgatgcagctggtcttattgagaaattaagtgttgaagaaaaggctgatgcagagaagaaggatgaagagaagtctgaggacaaaactgtggagaaagaatctgcatcagggaaggaaagcaaggcggttg

SEQ ID NO: 172745 - DNA, 242 bp, Glycine max
ctagcaattcgaattcccaatccaaaaccctaataccttcaaagaacctagtagtgaatcagtgatggcacctaaggcagagaagaagccagcggagaagaagccggtggaggagaagaagtcgacggtgggagacaaggctccggcggagaagaagccgaaggcggaaagaagcttccgaagagggaagagccggcggagaaggggggaagaagataaagaggaacaggaagagcgtggag

SEQ ID NO: 172746 - DNA, 216 bp, Glycine max
gccgagcttagtgcgaggctttctgcatagacttgattcaagacaagcggaaaaaagacgttagcaacaaggagcgtgcgtgcgtctgctactctcttctattcagaagaaataagaaagggaaaaaaagcattggtccttagccccgtttccttcatttgtttgttggttgggaatgcaagggttggctgtttcttctccataatattggttgtg

SEQ ID NO: 172747 - DNA, 264 bp, Glycine max
tcactccctcctcttcacacattttcttagctctctccaacaatccctctcgttcacactttcagattgtgtgaagatgggggctggtggccgaactgctgttcctcctgccaacaggaagtcagaggctgaccctttgaagcgggtaccatttgaaaaacctcagtttagtctcagccagattaagaaggccattccacctcactgtttccagcgctctgttctccgctcattctcctatgttgtttatgacctcaccatagc

SEQ ID NO: 172748 - DNA, 263 bp, Glycine max
gattatcctaagtctttgggaatagtgctgcaatggcttcaagtcaggaggaggtgacccttttgggagctactggaagcccatttgtgtgcagggttcatattgccctcaagttgaagggagttcaatacaaatatgtcgaagaaaatttgaggaacaagagtgaactgcttctcaaatccaacccagttcacaagaaggttccagtgtttattcacaatgagaagcccatagcagagtctcttgtgattgttgaatacatt

SEQ ID NO: 172749 - DNA, 224 bp, Glycine max
aaaagcgacacgacacaacacaacacaagctttattctttttcttcgcttcttctgtacagcacccaagattgaagatgatagaccttgcgcgcgtgcagaaggagcttgtggaatgcagcaaggacgcggagggatcgggcatcaaagtcagccccaaaaacgacaaccttgttctcttgatcggcaccattcctggccccgtcggaactccatatgaagggg

SEQ ID NO: 172750 - DNA, 193 bp, Glycine max
cgcacgcattcgtgagaaaactcaatattcgtcgctcatggcactctcttctcgtctcttttccaaatccaaattgatctatggcagtcaaatacttctacaaaaggagcatgctattccagttcgtcactttgctaaagagtctgcccctcctgcccttaagggagacgagatgctgaagaacatttttgtg

SEQ ID NO: 172751 - DNA, 134 bp, Glycine max
cgtaattctcgagctaatacgtgcagcaaaccccgaattctggaagggatgcatttcttagataaaaggtcaacaaggcacaactgaatttggttctgacgattctactgcatatgagctcttcacaagtaaac

SEQ ID NO: 172752 - DNA, 205 bp, Glycine max
  unsure (1)..(205): unsure at all n locations
gttaaagaatgggaagaagctaggtgtccagtgtgcatggaacaccctcacaatgcagttctcctcatatgttcatcccatgagaagggatgccgcccttacatgtgcaacactagttatcgccactcaaattgtcttgatcagttctgcaagtcatttgcagacacctcatcaaccattcctcaagtaganagtcaaatttcag

SEQ ID NO: 172753 - DNA, 218 bp, Glycine max
aaaagattaacaataaaagtgtggagtactgttgatagcaaagatgtttgggatcttcgacaaggggcaaaagataaaggggacagtggtgttgatgccaaagaatgtgttggacttcaacgccataacctccatcggtaaaggtggtgttattgacacagccaccggcatcttaggccaaggcgtcagcttagttgggtggagtaattggttactgc

SEQ ID NO: 172754 - DNA, 264 bp, Glycine max
ggtttgtagtgtagcaggaagaagcagcaatggcgccgaagataacacgtaaggttagcagaaaccctgaattgataaggggaatcggaaagtactcgaggtcgcagatgtaccacaagaggggcatttgggctatcaaggccaaaaacggtggcgttttacctcgccacgaccctaaacccaagcctgaagctcctgctgaaaaaccacccaaattttaccctgctgatgatatcaagaagccccttgtcaacaagcacaaac

SEQ ID NO: 172755 - DNA, 263 bp, Glycine max
ctgcaatggcttcaagtcaggaggaggtgacccttttgggagctactggaagcccatttgtgtgcagggttcatattgccctcaagttgaagggagttcaatacaaatatgtcgaagaaaatttgaggaacaagagtgaactgcttctcaaatccaacccagttcacaagaaggttccagtgtttattcacaatgagaagcccatagcagagtctcttgtgattgttgaatacattgatgagacatggaagaacaaccccatc

SEQ ID NO: 172756 - DNA, 243 bp, Glycine max
cttggctagggcaccaacaccgctaacactctgttcattcattcatctccgtcagaagcagagagtaagaatgctctcaggggatatacctccaaatcagaccatttgcataaaaaatatcaatgagaaggtcaagaaagatggattgaagagatctctgtatggcgtattctctcaatatggaagaattttggatgtgattgcgctgaagacacccagcttcggaggacagcgtgggtttgt

SEQ ID NO: 172757 - DNA, 254 bp, Glycine max
ctttcattctttatagtctctcagtgggttcttctatatccggtctgtcaggattgtatacagtagttatgaaagctgcaggtgctagcagaagggtatttcaacttttggatcgtacctcatccatgcctaagtcaggagataaatgtccacttggtgatcaagatggggaagtagaactagatgatgtgtggtttgcctatccatcaggccctagtcatccggtgctcaagggcattacattgaagctgcat

SEQ ID NO: 172758 - DNA, 250 bp, Glycine max
gaagaaggcaaatcgcgaagactagatctgatctgagagaatggctcctcggtctagcagcaaggacgcccaagaccttttccgcgctctttggtctgcttatgctgcaacccccactaatctcaagatcattgatctctatgtcatctatgccgtattcaccgctttcatccaggttgtttacatggctttggttggatcatttcctttaactcctcccatcaggagtacttctgtgtaggactgctgt

SEQ ID NO: 172759 - DNA, 241 bp, Glycine max
ttcggctcgaggaaatttcttagttgttttttgttgatttggttgtggtgcagacaaaaaacaaggatcagaaccgttgaatcaagttgaggaagatggcactagtctctggaggaagatcaacactgaaccctaacgcccctctttacattcctgccgcgtttcgccaagtggaggatttctctccggaatggtggcagctggtgacgacgctgacatggtaccatgactactggctaag

SEQ ID NO: 172760 - DNA, 300 bp, Glycine max
ccaaccttcagtctcaaatacttgaagcccttggggcaactgttgaaagagtgagaccggtgtccattacccacaaagaccattttgtcaaatcgcaagaagacgggcatctgaagcaaatgagtttgcattgaagcgtacaaattcacaacaattgaatggcaaggaggacaccgagaaaataaatggttatgaatctgatggatgcagttacagctctctgtttcctgaagattgccaaggtggcttttttgctgatcagtttgagaacctagcgaacttcagggcccattatgaggg

SEQ ID NO: 172761 - DNA, 293 bp, Glycine max
ggggataacatctacaactttggagagctacttgcccatcctataattaagagccttctggggacaaaggtggaatggctttactatattctgcaggcattcaattctggtgatctggtacgatatcaagaattatgtcgggtgcataatgctgctttaagagcccaaccagcactagttcaaaatgagcaaaagttgttggaaaagatcaacattctgtgtctgatggagattatattcagtcggccttcggaagatcgaactattcccttgagtgtaattgcagagcgcac

SEQ ID NO: 172762 - DNA, 293 bp, Glycine max
gtgagatacactaagttatcctcataaatacactctaattaggtggcaagataagtgtctaaccttagtaacattgccacatattgtgttcattttggaattgtgccactaaaattctattcaattcatctatggctgcctcttcttatgctatgcaatcaatcctggcaaaccctttgatccgcatttccagcgggtctagggtgaaccaatttggcgttcctgctttgcacatgagaaggaatgttggcctgagagttaggtccatggctaaggaagaacaaccaagtgag

SEQ ID NO: 172763 - DNA, 183 bp, Glycine max
ctttctctctctctctgaagatggcttcacgcaggctcgtatcttctctgattcgatcctcccttcgtagatctcaatcgaagccctcaatttccgcatcgacatcgaggctcacgtcatccaaccgtgcctcaccgcacggatacttgctgaaccgcgtcgccgagtacgccaccgccgcgg

SEQ ID NO: 172764 - DNA, 297 bp, Glycine max
caaacctcaagacaccatagcaagccctgcggtttgttatggagagtggtgctaagggatgcgaggtcattgtgagtggaaaattgagagcccagagagccaaatctatgaagtttaaggatggttacatgatttcttctgggcaacctgtcaaagattacattgactctgcagtgagacatgtgctcctgagacagggtgttcttggcattaaggtgaagatcatgcttgattgggatcctaaggggaaacagggtcctaaaactcccctccctgatcttgtcacaatccattctc

SEQ ID NO: 172765 - DNA, 295 bp, Glycine max
atgcactattgtcacagggtaaagagtacgtgtttgttgccaattcggataacttgggagctatagttgacttgaaaatcttgaatcatttgatccagaacaagaatgaatactgtatggaggtgactcccaaaacattggctgatgtaaaggggggcactttgatttcttacgaaggaagggttcagctcctggaaattgcacaagtcccagatgaacatgtcaatgagttcaagtcaatagagaagttcaaaattttcaacacaaataatttgtgggtgacttaaacgcatta

SEQ ID NO: 172766 - DNA, 252 bp, Glycine max
acattatcaaacagattggaatgtttactttcactggattgaatgcggaacaagtttccttcatgactaaagagttccatatatacatgacatctgatgggaggattagcatggctggtctgagttccaaaactgtcccacttctggcggatgcgatacatgcagctgtaacccgagttgtctaaaacatgttgacaacagttttcaacatgctccctagtccctataggagaacttccattatttttgttt

SEQ ID NO: 172767 - DNA, 294 bp, Glycine max
agagatcacagaaagcgtcacaacaaaactaaagaaagcggtttcacagaccgagaaatcccaatcctatggcagaggaagggaaacccgatgaacagctctttcagcttctctccaatcttctccaccaggtggaatcactgacgaatcaagaagaagttgagctgcgttctaaaattgaaactcttggattagaggttacaaaagttccttcaaagtcaacgcagcaccttaacgagttggaaatagctgaggagttggataaattatcagcaagattggataatcttgatg

SEQ ID NO: 172768 - DNA, 296 bp, Glycine max
attgaacaagggtctctctgtctgcttcttcactttctctcggttcagtcgaaacctcaacaaaatcatgggcagtgaattcttcgttggtggcaactggaaatgcaatgggaccactgaggaggtaaagaagattgttactactttgaatgaggctaaagtccctggagaagatgtcgtagaagttgttgtgagccctccttttgtgttccttcctgttgtaaaaagtttgctgcgccctgatttccatgtttcggcacaaaactgttgggttcgcaaaggtggtgcttataccg

SEQ ID NO: 172769 - DNA, 291 bp, Glycine max
  unsure (1)..(291): unsure at all n locations
aagatgatcatccctgttcgttgtttcacctgcggaaaggtcattggaaacaaatgggatacctatttagaccttctgcantcagattacagtgaaggagatgccctggatgctttgggactggttcgatattgctgtaggcgcatgcttatgacccatgtcgatctcattgagaagttattgaattacaacactctggacaagtctgatcccagttaagaaggccttagggagcaaaggatgaccaagctgtttcagtggaatgacatgctatctggccaatgaacaatc

SEQ ID NO: 172770 - DNA, 155 bp, Glycine max
atgtagtcttctttatggagctgaagacccttctattgtaggaatgatgttggatagtgccttttcaaacttatatgatctcatgatggagcctgtcgatgtttataaaatttggctgcctaaattcactgtaattcctctctaactcactttct

SEQ ID NO: 172771 - DNA, 285 bp, Glycine max
cgccgtcgtcgctgtttgtgtgtgtatcaggtgcagctaccaacgatggtgaagggtcgtcaaggagagcgcgtcagactctacgtgaggggtacaatccttggatacaaaaggtccaagtccaaccagtacccaaacacatccctgatccaaattgagggagtgaacaccaaagaagaagtaggatggtatgctggcaagaaaatggcctatatctacaaggctaaggtgaaaaaggatggaagccattaccgctgcatatggggcaaggttacgaggcctcac

SEQ ID NO: 172772 - DNA, 287 bp, Glycine max
cgagaatagcttggagaagatcaagcgccactcgcttccgcttccggtagaaacctgttgcaaggaccacttctcaagagatctgaaaccctgagaaaatggaacgagcgttgggtcatcttggacccgactacggggagaatggaatacaagataagacgaaatgaaccttctgttaaaggaacaattatatttgacgccaatagcaccatcaccatatctcccgtgaatttccacgggcttccaaagtacgatgggtgctgcttttatattgggacaccacagaa

SEQ ID NO: 172773 - DNA, 201 bp, Glycine max
ctcattccctctctccctaaaatggccactcttcactcctacgaccacctcatcttcactgccttagctttcttcttatctggccttattttcttcctcaaacacaaatccaaatccaaatccagaaaattcaacctccctccaggaccccctggatggcctattgttggatacctcttccaagttgctcgttccgggaaa

SEQ ID NO: 172774 - DNA, 174 bp, Glycine max
gattatcctaagtctttgggaatagtgctgcaatggcttcaagtcaggaggaggtgacccttttgggagctactggaagcccatttgtgtgcagggttcatattgccctcaagttgaagggagttcaatacaaatatgtcgaagaaaatttgaggaacaagagtgaactgcttc

SEQ ID NO: 172775 - DNA, 176 bp, Glycine max
  unsure (1)..(176): unsure at all n locations
agggttntncntnttctcttctcactgcatcgcttcaggttcttctgaaaagatgtctcgcgtgtatgttggtaacttggattcacgagtcaccgagagagatctcgaagacgaattccgcgttttcggagttattcggagtgtttgggttgcacgtagaccacctggttatgctt

SEQ ID NO: 172776 - DNA, 266 bp, Glycine max
ctaggactcatggtgagggttttattgaactcaattcatgggtgcctagtgaagggcctccacggtgggatctacttgctagaaaacgttctggcaactttgtctataattgtgctgtgatgggatgctgaagcattgaattgtcaaagttaacaacacattttgatgcttcaagtccaaggagttgcacaacattgattcatccgttgacacaggattcttgctaattggtactttgcccccccttatttctttctataatattt

SEQ ID NO: 172777 - DNA, 195 bp, Glycine max
cttcaatggaggagcacccgaagaagaagaagaaaggctgccgaaaccccgagaccaagttccaattcgagttgaactcatgttccaaagccaaggacctccgcggcgcgatatccctctatgacgatgccgtttcgaacaacacccgcctcaaccagcaccacttcaacgccctcctctacctctgctccaact

SEQ ID NO: 172778 - DNA, 283 bp, Glycine max
aaaccctagcaagtggagcaatggcagacgttgaagtcgatgtggcggcacagcagcagcagggctgcgaagaagagaacgttcaagaagttcagttttcgaggcgtggatctcgatgcacttctcgacatgtccaccgatgaactcgtcaagatgttcagtgcccgcgctcgtagaaggttccagagaggcctcactagaaagcccatggccttgatcaagaagctccgtaaagcgaaaagggaagctccaccaggtgagaagccagaaccagtacgcaccc

SEQ ID NO: 172779 - DNA, 187 bp, Glycine max
atgacttcttctactgagcaatatgtgaatttgcagaatatctatcacgctaaagctgaggctgactttcttgtaatagaacgtctagtgagaagtactttgaagaagattggtcgagattcaaatagcatttcaaagtcaacaattaaaagcttctgtaaaaatgcaagaaaactcaaagtttgca

SEQ ID NO: 172780 - DNA, 191 bp, Glycine max
ctcgggcttattccagcttggtagtgcatacgagtgggtggtcaccaagaaatctggtcgttcctcggagggcgatttggtttcattgattgagaaaggaccaaagcatcaaagagggtcctcagcacctgatctagaggaaatgaaagaggaacttcgaaagcaggagcagcaaaaggcctctaagaaga

SEQ ID NO: 172781 - DNA, 280 bp, Glycine max
gtttttcatttcatcgtgcattcaatggccaccacagcagctctatccggaaccatggtgagcacctccttcatgaggaggcaacctatgaccaccacaagcctaaagacattccccaacgttggtgaagctctttttggtctgaaaagtggacgaggtggtcgtgtcacttgcatggcctcgtacaaggtgaagctcataaccccagaaggagaagtggagtttgaatgcccagatgatgttttcattgttgacaaggcagaggacgaaggcattgaac

SEQ ID NO: 172782 - DNA, 147 bp, Glycine max
agcagatggaattcagtctttgacaaacaatctctgttatacatatgccaggtgtacacgctctgtatctgttgttcctccagcgtattacgcacatttagcagcttttcgagcacgtttctatatggagccagacctgcagcagga

SEQ ID NO: 172783 - DNA, 281 bp, Glycine max
gtcacagacaccgacacagatctgtcttccgaagcaggaactaaatatggctgacttgttggaatggtcaaagcaagataagaaacgaatgcttcatgtcgtctaccgtgttggtgaccttgatcgcaccatcaaattttacacagaatgtttaggaatgaagcttttgaggcaaagagatatcccagaggagaaatatgctaatgcttttcttggatttggccctgaagaatcccattttgttgttgaattaacatataattatggggttacctcgtatg

SEQ ID NO: 172784 - DNA, 144 bp, Glycine max
tctgatttttggtatggtgtggagggttcatttgaagagccaatgggaagagagagtttgcagagactttggcagaaatataaagtggatattgcattttatggccatgtccataactacgaaaggacatgccccatttatcag

SEQ ID NO: 172785 - DNA, 240 bp, Glycine max
cagaactctgcttcttcggattccgatcgcacgcgccgtcaccatggtgaacgttccgaaaacaaagaagacatactgcaagagtaaggagtgcaggaagcacacgctgcacaaggttacccaatacaagaagggtaaggatagcattgctgcccaaggaaaacgccgttatgatcgcaaacaatccggttatggtggacaaactaagcccgtcttccacaagaaggctaaaaccaccaa

SEQ ID NO: 172786 - DNA, 146 bp, Glycine max
gctccatcttcttcgatctctcaaactctatcggcgcagaaccaatcctatatcactatggggaagacacatggaatgggagctgcccgcaagctgaagtctcaccgtaggagacaaaggtgggctgacaagtcatacaaaaagtc

SEQ ID NO: 172787 - DNA, 140 bp, Glycine max
acccggcgaatcggctcacggcatcgaggacgagcgtggagttagctgtgatatgttgatgcaatttgtgaaagattttaaaggtgcagcacagatattggagaaaggtggttatactcaattcacaccccattatataa

SEQ ID NO: 172788 - DNA, 189 bp, Glycine max
caaaaccctgccgtcagtcaccgtcttctctgccgccatgaagctcgtcaggtttctgatgaagctgaacaacgaaaccgtatcaatcgagctcaagaacggcacagttgttcacggcaccattacaggtgttgatatcagtatgaatacacatttgaaaacagttaaactaactctgaaagggaaaaa

SEQ ID NO: 172789 - DNA, 200 bp, Glycine max
  unsure (1)..(200): unsure at all n locations
aagatgaagttcaatccacgtgtgtcgagcagccgccgcaagagccgaaaggtcantttcacggcgccgtcgagcgtgcggcgggtgcttatgagcgcccctctgtcggcggactgcggtccaagtacaacgtgaggtcgatcccagtacggaaggaggacgaggtgcaggtggtgcgaggaacatacaagggtcgcgag

SEQ ID NO: 172790 - DNA, 277 bp, Glycine max
tcgcctttctctctcttctttttactctctctctgtctctctctacgctttctcgttcgagatccctcaagggatccactaactgaaggagaaatggggttgacattcaccaagcttttcagccggcttttcgccaagaaggaaatgcgaattctgatggtgggtctcgatgcagctggtaagaccaccatcctgtacaagctcaaacttggagagatcgttaccacaattcccaccattgggttcaatgtggagactgtggaatacaagaacatta

SEQ ID NO: 172791 - DNA, 275 bp, Glycine max
actcgttcttcttcttttgttgttctgtgtttgtgtttgttttttctctcacctgaaaatgtcttgctgcggtggtaactgtggttgcggaagctcctgcaagtgcggcaacggctgcggaggctgcaagatgtacccagacttgagctacactgagtcaaccaccaccgagaccttggtcatgggagtggcacctgttaaggctcaatttgagggtgctgaaatgggtgtgcccgctgagaacgatggctgcaaatgtggaccaaactgctcct

SEQ ID NO: 172792 - DNA, 277 bp, Glycine max
aaataagggaaaaatggtgtcgctgaaactgcagaagcgcctctccgcaagcgtgctcaagtgcggcagaggaaaggtttggcttgaccccaatgaagtcaacgaaatctccatggccaattctcggcaaaacatcaggaagttggttaaggatgggtttatcatcaggaagccaaccaagattcactcccgctcacgtgctcgtaggatgaaggaggcaaagaggaagggccgccactccggttatggtaaacgtaagggtacaagggaggcaagg

SEQ ID NO: 172793 - DNA, 201 bp, Glycine max
agcaaatccattaaggagaatatctcttaaggaaattaagaaccacccatggtttttaaagaatcttccaagagagctaacagaatcagctcaagctgtctattaccagagaggcaatccaagcttttctgttcaaagtgtggaggagatcatgaaaattgtgggagaggcaagggaccctcctccagtatctaggcttgt

SEQ ID NO: 172794 - DNA, 208 bp, Glycine max
cttaccccttgctaccaacactgagcttaaccgagcttcgcaaagatgaatcgggaaaagttaatgaagatggccggttcggttagaactggaggaaagggtactgtgagaagaaagaagaaggctgtccacaagacaacaaccacagatgacaaaaggcttcagagcaccctgaagagaataggggtgaatgccatccctgctattg

SEQ ID NO: 172795 - DNA, 184 bp, Glycine max
ctctcaagtccaacctacccctttttcttctcccaccaacttcaccgtcttcttcctcgatcatgtctcacttcaagggcaagtaccatgatgagcttattgtcaatgctgcttacattggcactcctggaaagggtattcttgctgctgatgagtcaacagggacaattggcaagcgtttggc

SEQ ID NO: 172796 - DNA, 161 bp, Glycine max
catacaaaagactccgcgtttccccttcccctcaaccacaatcaacagacactgcaccaaacaccaacaacgctttagctctctctcttctctccataaccgccaccgtggatctggcactaacagatcgccgctgctacatctgaatccgatccagccaa

SEQ ID NO: 172797 - DNA, 295 bp, Glycine max
gaaaggaaagcaaacatgcttgatcaggtccaacaccctacaatcatggacaaggttgctggccagctccatctccgttctggtgtttctggtattaggagttatgaaggagcctactgccaccccacaatgtaccaaagaccctcttttgggaattactcgaatgctgcattgcagtatcctgtgatgccctcatgcaaagctactatggatttgtctgctgctgcaacaactgcctcccccgtctttgttgctgctccagcagagaaaggccattttcttatagactttctca

SEQ ID NO: 172798 - DNA, 287 bp, Glycine max
cgaaaaccctcgtcttcgaaatcagcaacaaaaacgcgaagtgtactaagcgaagccattgcagcgtgagaatggggaagaaggcaaaagggtcaaggaagggtaagaaggcatggagagctaacatcagcaccgaagagatcgaagatttcttcgagaaatcaacgaaggacgctctttctggtggctctctacaagccgtttcttccgattctctcttctatgaagacaagtccaaagatcttgctgtgaagaagaagatcgagaaacatagggagagggtgctc

SEQ ID NO: 172799 - DNA, 254 bp, Glycine max
gctgtggttatcatcttcttcttcctctttcttagatctcttctttctctacgccgcacgccgaaaccatggccggaaaaggagagggtcctgctatcggaatcgatctcggaaccacctactcttgcgtcggtgtgtggcaacatgaccgcgttgaaatcatcgccaacgaccaggggaacagaaccacgccgtcttacgtcggattcactgacaccgagcgtctcatcggtgatgcggcaagaatcaagtcg

SEQ ID NO: 172800 - DNA, 278 bp, Glycine max
cgcagatctacgaaggaacgccaaaagcgaaggcagctctctgggtccctaccgacgctggagtgcgaaagcatggggagcgaacgggattagataccctggtagtccatgccgtaaacgatgagtgttcgcccttggtctacgtggatcaggggcccagctaacgcgtgaaacactccgcctggggagtacggtcgcaagaccgaaactcaaaggaattgacgggggcctgcacaagcggtggagcatgtggtttaattcgatacaacgcgcaaaac

SEQ ID NO: 172801 - DNA, 284 bp, Glycine max
ctcttaggcactttcttgttttctctctcaccctcatatccatcatcttccacacccatggagcgttctctgagcaatcaataatcaagttacccacagaccaaccaagggtagagaaactgacccacttgcattttttctaccacgacatcttagagggcaagaacatcacggtggtgaaaatcatcgagccatcagcgagcgaggttcgtgaagcaactgggtttggaaccactttcatgatggacaatgttttgaccgagggtccagagctgagctcgaag

SEQ ID NO: 172802 - DNA, 282 bp, Glycine max
gaagcagcagcggcggcaacagggagagaagatgaagttcaatccacgtgtgtcgagcagccgccgcaagagccgaaaggccatttcacggcgccgtcgagcgtgcggcgggtgcttatgagcgcccctctgtcggcggactgcggtccaagtacaacgtgaggtcgatcccagtacggaaggaggacgaggtgcaggtggtgcgaggaacatacaagggtcgcgaggggaaggtgactcaggtctaccgtcgaaagtgggtgattcacattgagcgcataa

SEQ ID NO: 172803 - DNA, 282 bp, Glycine max
gttttcctttactggtaagttgtaaccctataagccgttgctcccaccgccgccgcgcagatctccgtttcaacttgggttatctctaaggtcctaaacaatcctctttcaaaaacataccgagaaaagtgtggaaatgacgacaccatcattggtagagtctctagttcttcaactccatgagatctcagctgtcaaatttggcaacttcaagctcaaatctggcatcttctcaccaatctacatagacctccgcctcatcatatcttacccttctctcct

SEQ ID NO: 172804 - DNA, 281 bp, Glycine max
gtgagaatcatgtgaagtgccgccactctctctctctttctctctctatctgtctctggttcaatcaaaaaaaagcttcaatctttaacaatccaacacacaacaaaacaaccccacttctgttttgttttgcttaaattattctgagaaagtttcttcttttcttcttgttccaatggctgctgcaactgccccaagattcatcaagtgtgtgaccgttggcgatggagctgtagggaagacctgcatgctcatttgctatacgagcaacaaattcccca

SEQ ID NO: 172805 - DNA, 285 bp, Glycine max
tgtgtattgaaggaccgcaacaagccgatcatcttcaccatggcaagacttgaccgtgtgaagaacatcacgggacttgtggagtggtatggcaagaatgcgcgcctccgcgagttggtaaacctcgtggtggtggccggagacaggaggaaggagtccaaggacttggaagagaaggccgagatgaagaagatgtatggcctcatcgagacctacaagttgaacggccaattcagatggatctcctctcagatgaaccgtgtgaggaacggagagctctaccgt

SEQ ID NO: 172806 - DNA, 275 bp, Glycine max
  unsure (1)..(275): unsure at all n locations
attttgattccggtctgcgccatcattggaatagggttcgccctcttccantgggtcctcgtctccaaggttaagctctccgctgccagagacgcttcccctaacgccgccggcaaaaatggctacaacgattacctcatcgaagaagaggaaggcctcaacgatcacaacgttgtcctcaaatgcgccgaaatccaaaacgccatttccgaaggagcaacctctttccttttcactgaatacaagtatgtgggaatcttcatggtggcttttgc

SEQ ID NO: 172807 - DNA, 282 bp, Glycine max
cagctatacttgttccttttgaaggttagaagtgctacaatacaaacaatggcagctactcaggaagatgtgaagcttttgggtattgtgggaagcccatttgtgtgcagggtccagattgcccttaagttgaagggagttgaatacaaatttttggaagaaaatttgggcaacaagagtgatttgcttctcaaatacaaccctgttcaaaagaaggttccagtgtttgttcacattgagaagcccatagcagagtctcttgtgattgttgaatacattgat

SEQ ID NO: 172808 - DNA, 281 bp, Glycine max
agctgccacgcctaaacagatcagggagctgatgaaggttgatggcctaaccaatgatgaagtcaaaagtcatttacagaaatttcgtcttcacactagaagaagccccataatccacaacaatgcaagttcacaagcaggccctttatttcttgtggggaacatttttgttcagccaccagaatatgctgcagtagcaaccacctcaacagcatctggagaggaattgaccacagttactactactactgctccaactggaatatatgcacctgtggctg

SEQ ID NO: 172809 - DNA, 283 bp, Glycine max
cacgcagggtttcccgaagatttaacacctatggctcctaaagctgatagtttaaagaaggctgatccaaaggcacaagccttgaaaactgctaaggctgttaagtcaggtgctactttaaagaaaaagaccaagaagatccgaacatctgttaccttccatcgaccaaagaccttgaaaaaggataggaaccctaaatacccacgcattagtgctccacccaggaacaagcttgatcactatcagatattgaagtatcctctcacaactgagtctgcaatga

SEQ ID NO: 172810 - DNA, 280 bp, Glycine max
cgaggttgtgtacacgaagaaggggtacaccgactcaaccggagcatacacaatgtacgtggatgaggatcacgcagatcagatctgcagtgccaagcttgtaagcagccctcaccctcaatgcaaggaagtcaccccaggccgcgacgaagccgtcgtgattctcacccgctacaacggcattgcctccgacgataggttcgccaatgccatgggcttcatgtctcaggaggttgcttctggctgtgctgagatcctcaggcaataccaggagttcgac

SEQ ID NO: 172811 - DNA, 278 bp, Glycine max
ggatcttggtggacaagaaagattgaggacatcatgggcaacatattaccgaggaacgcatgctgttattgtggtgatagacagtagtgatagagccaggatctctatcataaaggatgaactttttaggttgttggggcatgaagatttacaacattctgttattcttgtcttcgctaataaacaagatatcaaggatgctatgactcctgctgagatcactgatgcactatcccttcacagcatcaaggatcatgattggcatatacaagcttgct

SEQ ID NO: 172812 - DNA, 283 bp, Glycine max
ggcatttgctcatcctccccatctctcaaccactccaccccaaaacgacgccacaccccactcctcccctccaaacctttctactctcttaggcatgaggctctcgcgccacagcaacaactaaatctctcaacactagactcgagaaggagccacacgcgctatggcggcgctacgtggtgtggctttaccagcacaaggagctgagactctacctggacgtgagccgggtctggttcaccgacgagttcgcccgtgaaatagagccccgcttgtgtttcaa

SEQ ID NO: 172813 - DNA, 284 bp, Glycine max
tgatagaccaataatctgaatctgaaacctccgtgttggtgttgcatatccaaaccctaatttggaaattgaattgttgaagggaagaagatcaagatggttctggcggagttaggtgggagcatttcgcgtgctctccagctgatgagcaatgcgacagtaatcgacgagaaggtgctcaacgattgcctcaacgacatcactcgcgctcttcttcaatccgatgttcaattcaagcttgtccgcgacatgcagaccaacatcaagaacattgtcaacctcga

SEQ ID NO: 172814 - DNA, 281 bp, Glycine max
tgctgctgcaagtcaaagtctctatccattgcaccgttgcaaaactgttcacctggttaggcatgcgcaaggagttcataatgtagcaggagagaaaaaccatgatgcatacaattcttatgagttttttgatgcacacctaacctctctcggctgggaacaggttaataatctgcgaaagcacgtgaaggcaagtggactttccaaaaatattgaacttgttgtcatttcccccttattaaggaccatgcaaacagcagttggagtctttggtggtgaag

SEQ ID NO: 172815 - DNA, 280 bp, Glycine max
ctcttcttactccttacaagatgggcaaattcaatctgtcacatagagttgttttggcaccgctgaccagacagaggtcttacgacaacgtcccacaaccccatgccatcctctactactcccagagaacttccaacggaggccttctcattactgaagccactggcgtctctgacacggctcaaggctatccgcaaacccctggcatatggactaaagaccatgttcaagcttggaaacccattgtcgatgccgtccacgccaaaggcggtgttttctt

SEQ ID NO: 172816 - DNA, 277 bp, Glycine max
aagatgtcgaagcgtggtcgtggtggttcggcggggaacaagttccgcatgtcgctgggtcttccagtggcggcgacggtgaactgcgccgacaacacgggggcgaagaacctctacatcatttcggtgaaagggatcaaaggccgtttgaaccgtcttccctcggcctgcgttggcgacatggtgatggccaccgtgaagaagggaaaacccgatctgaggaagaaggtcttgccagctgtcatcgttcgccagcgcaaccatggcgccgaaagga

SEQ ID NO: 172817 - DNA, 276 bp, Glycine max
aagaagcgaaactaaagtcagcattcgaaaaagatgagtagcatcggtacaggttacgatctatcggtcaccactttctcccctgatggccgcgttttccagatcgagtatgccgctaaagccgtcgacaacagcgggactgttattgggatcaagtgcaaagatggggttgtgttgggcgttgagaagcttattccgtcgaaaatgatgcttccgggttccaatagaagaatacactccgttcatcgtcactctgggatggctgtagcaggatta

SEQ ID NO: 172818 - DNA, 277 bp, Glycine max
ctcaacccacaagaatccctccctttctggctttctctctctaaaactatcatgtcctccaccgcggctcccgtccttcccatatccaacccccaaaccaccgccgcaagccggccgccatcgaggctccggcgaacaacccggccttccgcgccttcatcaacaacctctccgcgtccctccgacacggcctcgaccagcgccgcccgtggtcggagctcggggacgctccgcgttctcgaagcccgagtccttctccgaagccaccctccgcgtc

SEQ ID NO: 172819 - DNA, 278 bp, Glycine max
cttttctattccctcaccaacgtaccgttgttcaatttcaatttcaatttctcggcagccattgccatgttctttcacggctcaagtgagaagaagagggaaagggaaagtggtaatgagcatggaggcaggcattggagtgatgggcaccaagttgggtatgatgagctatttcgaatccgacggagagtgttgttcctgtcactgtcgtgggtttcaaagaaggcaacatcgtcacccagatcaaaactgaggccaccgatggatacgacgccgtc

SEQ ID NO: 172820 - DNA, 277 bp, Glycine max
  unsure (1)..(277): unsure at all n locations
aattaatgatccatttattgatgcaaaatatatggcatacatgtncanatatnatnctanncnnnntccantcaaggggaccnnngcgatttnggntgactcgacnttggaaagtaatgggaagcaggttaaagtggtgagcaaaagagatcctgcagagatcccatggagtgattttggggctgaatatgtcattgagtcttctggagtttttacaacagtggagaaagcttcatcacatttgaaggctggtgccaagaaagttgtaatatcagcc

SEQ ID NO: 172821 - DNA, 269 bp, Glycine max
cacaaattacaaaatcccctcatattatctctctctctcttaaaccatcatgtcctccaccgcgcctcccgtcctccccatctccaactcccaaaccaccgcgggaaccaccggtgcaggcggcggcgccatcgaggctccggccaacaacccggccttccgcgctttcatcaacaacctctccaactcgctccgacacggcctcgaccagcgacgcccctggttcgagctcgcggatcgctcagcgttctcgaaacccgagtccttct

SEQ ID NO: 172822 - DNA, 267 bp, Glycine max
gaacattttgatcactggagccactggctttcttgccaaagttttgttggagaagatattgagggtccaaccaaatgttaagaagctttaccttcttctaagagctgcagatgccaaatctgccactcatcgcttgaacaatgagatcatagggaaggatttgtttagggtactaaaggagaaattgggtgcaaattttaattcctttgtctcgaaaaagttgactctggtacccggggacatctctcgtgaagacttgggattgga

SEQ ID NO: 172823 - DNA, 279 bp, Glycine max
caaatacaaattaataaaaacaacaggttctatgatccttgtggctctcatcaggctctgaacaaacttcgatggcaaagtttagattatctccactcgtggtggttaccatatagatgctgatcatgagtggtggtgcagtgagaggccaaagagaaatggtgcctgccttgttcatatttggtgactctctcattgacaatggcaacaacaacaaccttccttcctttgctaaggccaactattacccttatggcatcgacttcaatggaggcccta

SEQ ID NO: 172824 - DNA, 283 bp, Glycine max
gggagtggccaaatacttgaagccctctgttgcaggattccttatgcagaaggaacttgactatctagttggagctgtgtcaaaccccaagagaccatttgctgctatcgttggtgggtcaaaggtgtcttccaagattggagttattgagtccttgttggagaaagttaacgttctcttgcttggtggaggaatgatctttaccttttacaaggctcagggttattcagttggttcatctcttgtggaggaagacaagcttagccttgcaactacacttctc

SEQ ID NO: 172825 - DNA, 280 bp, Glycine max
aatttctgccctatcaactttcgatggtaggatagtggcctaccatggtggtgacgggtgacggagaattagggttcgattccggagagggagcctgagaaacggctaccacatccaaggaaggcagcaggcgcgcaaattacccaatcctgacacggggaggtagtgacaataaataacaataccgggctctccacaaagccttttttgaaagcgaactctttgaattagagaatgaatgcatacctggaaatggttctgttcctgcattatcttaggg

SEQ ID NO: 172826 - DNA, 272 bp, Glycine max
gctagtttgattacctatcaaaaccagaaaaacacactgcaattgtttggactagttttaatttcttccaattccatggctgggaaagatagaatcctgattttgggacccactggagccattggaaggcacatagtctgggcaagtgtgaaggcagggaacccaacatttgtgttggtgaggaacacccctggctctaacaacagggtcaatctggtcaaagctgctaatcctgaaaccaaggaagagctcattgagagcttcaaaaattc

SEQ ID NO: 172827 - DNA, 275 bp, Glycine max
aatgcgtagaaaaggaaaataaagaaattagcgtgaaaaatgttgggtgtgttcagcagctccatagtgtcgccgccggaggagctcgttgccgccggcagccgtacaccgtcgccgaagatgacggcggcggcgctgcggaagtggttcgaggagaagaacccctccgcagtgtcggtggaggtcggagagcatgtccagctcgcttatacccaccagaacgagtcgccgtttcagcgcagatcctttgctgtgaaggatgaggtattctgctt

SEQ ID NO: 172828 - DNA, 270 bp, Glycine max
ctttacacccccctctctattttgcgttcattctgttttccagttgaagtctttccctagccaatggccactgatcgtttgacccgggttcacagtctccgtgagaggcttgatgaaaccctcactgccaacaggaacgaaattttggcccttctgtcaaggatcgaagctaagggcaaggggatcctgcaacaccaccaggtcattgctgagtttgaggaaatccctgaggagaacaggcagaagcttactgatggtgccttggagaag

SEQ ID NO: 172829 - DNA, 276 bp, Glycine max
ggtcattcctcctccggtcttcctgacaagccaatcctatgtgtaggtgctcaaccctagtaagccgcaatggtgaagtactcaagggagcctgacaatccaactaagtcttgcaaggctagaggcgccgaccttagggttcattttaagaacacaagggaaactgcctttgcaatcaggaagttgcccttggtcaaggctaaaaggtacttggaagatgttcttgcccacaagcaggcaattccattcagacgtttttgtcgaggtgttggaagg

SEQ ID NO: 172830 - DNA, 278 bp, Glycine max
gctaccttcttcgctcttcacttttgttgtctaacatggcgttggtgaatccgtttctgtctccccctcgaactcccctctctctgcgagtttcagctccgccaaaccaagcactactacgttggactctctgctcccaatattcattcaaaccatcatcactaagatcgaagcacgccatgtgtggcgccactgccgacatcaaggctgcacctttagctgatggagaagcagatcacgcggttcttgtgggccccgccagcgaggacgagagaaaa

SEQ ID NO: 172831 - DNA, 276 bp, Glycine max
ttttaatttcctctcaaaccctaaccctaaccctaaccctccccgtcacaaaagaaaaccctctttgtccgatcatcgtcgtcaagatgttggaactccgtctcgtgcaaggctccctcctgaagaaggttttggaatccgtcaaggagctcgtgaacgacgcgaacttcgactgctcctccaccgggttctccctccaggccatggactccagccacgtcgccctcgtcgctctcctcctccgatccgagggcttcgagcactaccgctgcgacc

SEQ ID NO: 172832 - DNA, 272 bp, Glycine max
aattttctagggtttatacaattttcgatggcttcttcagatgttgagtaccgttgctttgtcggtgggctcgcttgggccactgacgaccaagctctcgagagagccttctctcagtacggcgaaatcgttgaaacgaagattatcaacgatcgtgagactggaagatccaggggttttggatttgtgaccttcgcctcggagcagtccatgatagacgccatcgaagggatgaacggccaaaaccttgacggccgtaacatcactgttaa

SEQ ID NO: 172833 - DNA, 226 bp, Glycine max
gcgagagcattccattgttgttatattgtattgtagccggagaagaagagaagagatagcggcgaagaaagaaagatgacggaggcatatataaggaagaagcccgggatggcgagcgtgaaggacatgccggttctccaggacggtccaccaccaggcgggttcgctccggtccggttcgcccggcgcatccccaacaagggccccagcgccgttgccatcttcc

SEQ ID NO: 172834 - DNA, 266 bp, Glycine max
caaccttctttctttttctgtgagcctttctttcaggttcttaacttgatcagtgtgcagtgtccaaatcataagggtagttgcaaattgcaatggctaagcatgatgttgagggtggttccttctctgcaaaggactaccatgatcctcctccagcaccgttgattgatgctgaggaactcacacagtggtccttctacagggctttgattgctgagttcattgccacaatgctcttcctttacatcacagtgctcactgtgatt

SEQ ID NO: 172835 - DNA, 266 bp, Glycine max
ctcccctccgccatggctgaggataaggagatgtctacctctatcatcaatgggaatgattccctaactggtcacatcatatctacaactattggaggcaaaaatggggaacccaaacagactattagctacatggcagaacgggttgtaggaactggatcatttggaatcgttttccaggcaaaatgcttggaaactggggaggcagtggcaattaaaaaggttttacaagacagaagatacaagaatcgtgaactgcagttaat

SEQ ID NO: 172836 - DNA, 266 bp, Glycine max
gttggctaagaaccctgagaaggagtttttgaagactattactggcaagaaggagaccctcattgaccttacagttatagaaatcttgtcaaggcacgcatctgatgagttctaccttgggcagagagatggtggtgactactggacttctgatgccggtccattagaggcatttaagaggtttggaaagaagcttgaagagattgaaaagaagcttatagagaagaacaaagatgagacattgagaaaccgctatgggccagcta

SEQ ID NO: 172837 - DNA, 267 bp, Glycine max
tccacccccgtaccgtctctgcctctctgcaatccacagccgaaaatgcctttcaagaggtacgttgagatcgggagggttgctcaaatcaactacggcaaggaatatggcaggctcgtcgtcatcgtcgacgtcattgaccagaacagagcacttgtcgatgcccctgatatggtgaggtcccaagtcaatttcaaaaggctttcccttaccgacatcaagattgacatcaagagggtccctaagaagaaagatcttgtcaaagcc

SEQ ID NO: 172838 - DNA, 269 bp, Glycine max
  unsure (1)..(269): unsure at all n locations
ctctttataccccccctctcttttttgcgttcattctgttttcctgttgaagtctttccctagcaaatgggccaccgatcgtttgacccgggttcacagtctccgtgagaggcttgatgaaaccctcactgccaacaggaatgaaattttggnccttctgtcaaggatcgaagccaagggcaagggcatctgcaacaaccaaccaggtccattgctgaatttgaggaaatccctgaggagaacagacaggagtcatgatggtgcctttg

SEQ ID NO: 172839 - DNA, 198 bp, Glycine max
gcttctcaagccctccgcctccgtcgcactccaccgccactccaacgcgctcgtcgacgttcttacgccggaggcgactccagcatctcgctcctcagccagtccgagaagcctgacgtcacttataatgacattggaggatgtgatatacagaaacaggaaatccgtgaggctgtggagctaccccttacacatcat

SEQ ID NO: 172840 - DNA, 263 bp, Glycine max
attaataagtgtgatgtagacattcgaagagagttgtttagtagtatactgcttgctggtggcacagcttcaatgcaacagctaaaggaacgccttgagaaagacttgctagaggagtcccctcaagctgccagagtaaaagtattagccagcggaaatgctactgaaagaaggtttagtgtttggattgggggtagtatattggcatcacttggctccttccagcaaatgtggttctccaaatccgagtatgaagagcatgg

SEQ ID NO: 172841 - DNA, 263 bp, Glycine max
ggcaagcttagtgcaggaagcaatgcttatattttgggtggccaagacaaatcacagaactggcatgtctactctgcttctgcagattctgtaactccatgcgacaatgtttacactctagagatgtgcatgactggcctggatagagagaaagcacaggttttctacaaagaacaatctgcttcagctgccattatgactgttaattctggcattagaaaaattcttccagattctgagatttgtgactttgactttgagcc

SEQ ID NO: 172842 - DNA, 263 bp, Glycine max
attccttctctctctctctctctcccctccgccatggctgaggataaggagatgtctacctctgtcatcaatgggaatgattccctaactggacacatcatatctacaactattggaggcaaaaatggggaacccaaacagactattagttacatggcagaacgggttgtaggaactggatcatttggaattgttttccaggcaaaatgcttggaaactggggaggcagtggcaattaaaaaggttttacaagacagaagata

SEQ ID NO: 172843 - DNA, 262 bp, Glycine max
ggagacactcgaataccattgggggaagcatcataggacttatgtagataatctgaacaggcaaattgatggaacagatctagatgggaattcactggagaacactatagttattacgtacaataagggtgacattcttccagctttcaacaatgcagcgcaggcatggaaccatgacttcttctgggagtccatgaaacctggtggtggtggaaggccatctggggatcttctaaatctgattgaaagagactttggttca

SEQ ID NO: 172844 - DNA, 265 bp, Glycine max
tagagaattgtacgctaattttggtttgctatacccatatggtcatgaggaacttgctgtctgcgaggacattgatcaggttcgtgctgttatggaaaaatatcccccctatcaatctatttttgctaagctatcatatggagagagccagatgcttgacaaggcattctacgaggaggaggtgaaaaggctttgcttggcttttgagcaacagtttcattatgctgtgttcttcgcatatatgaggttaagggaacaggagatc

SEQ ID NO: 172845 - DNA, 266 bp, Glycine max
gcttttgaaagatgaggccgattctgatgaaaggtcatgagaggccattgacgttcctgaaatacaacagggacggcgatctcctcttctcctgcgccaaggaccacaaccctaccgtctggtttgccgacaacggcgaacgcttgggcacttatcgcggccacaacggcgccgtttggacctgcgacgtctcaagagattcggctggactcatcacgggaagtgccgatcagaccgccaagctatgggacgtgcaaagcggcctg

SEQ ID NO: 172846 - DNA, 268 bp, Glycine max
ggggtgtgcagaagagcgtcgcagttgtaaccctaatcagaagaagcgcagcttcaagcgagtgacagccaccagccatgggtcgtatgcacagccgcggtaagggtatatcctcttctgctttgccctacaaaaggacacctcctagctggctcaagatctcttcgcaagatgtcgaagaaaatatatgcaagtttgcgaagaaaggtttgaccccgtctcagattggtgtcattctcagagattctcacggtattgctcaggtcaa

SEQ ID NO: 172847 - DNA, 267 bp, Glycine max
gaggacgactgcgccgacagcggcatccctctgccgaacgtgacgagcaagatcctggcgaaggttatcgagtactgcaagaagcacgtcgaggccgcgaatcccgaagacaaaccctccgaggacgatctcaaggcctgggacgctgaattcgtcaaggtcgaccaggccacgctcttcgatctcatcctggctgctaactacttgaacatcaagagcctgctggaccttacatgtcaaactgtagccgacatgatcaaggggaag

SEQ ID NO: 172848 - DNA, 267 bp, Glycine max
agagagctggaatcacatggacttgtctttctctttctgggtctccattaaatttttcttctctcccttctttctctctctctctctctgaccattctcttcttcttctttttcttctcctctctctctctcccctccgccatggctgaggataaggagatgtctacctctgtcatcaatgggaatgattccctaactggtcacatcatatctacaactattggaggcaaaaatggggaacccaaacagactattagctacatggca

SEQ ID NO: 172849 - DNA, 268 bp, Glycine max
caaagaaaatacacattacattactaagtctttgttcatttgagtagtagtgatggctagcctcaaggttgcatgtgtggttgctgtgatgtgcatggttgtggtggccatgagtgctgcacccatggcacaggccgcaatcacgtgcgggcaggtcgccggcgacatgtctccgtgcttcagttatcttcgaagcggcggaaaaccgtcgcaggcctgctgcaacggagtgaagtccctcagcagcgcgtcgaagaccaccgcggac

SEQ ID NO: 172850 - DNA, 268 bp, Glycine max
atccctcgtgccatttcaaaacccagaaaccaattacaaattacactctttgcctagcaccttcaacttaaccttttctactcataatcttaacaacttgctagaagaagataaagaaagagaaaaagtgtgtgtgtgtgagagagagcaatggctggctcgtgggcacgccgtactctgattgttctggctatcatttccttcagatgtttatttgcaatttccattgctaaggaggaagccacaaaaacagggacggtcatcggga

SEQ ID NO: 172851 - DNA, 132 bp, Glycine max
ctcgttcttcttcgtcgttatcttcttcttttgttgtttgtacgtttgttttttctctcacctgaaaatgtcttgctgcggtggtaactgtggttgcggaagcgcctgcaagtgcggcaacggctgcggagg

SEQ ID NO: 172852 - DNA, 266 bp, Glycine max
agagaaataaggggaaaaaatggtgtcgctgaaactgcagaagcggctggccgcaagcgtgctcaagtgtggcagaggaaaggtgtggcttgaccccaatgaagtcaacgaaatctccatggccaattctcggcaaaacatcaggaagttggttaaggatgggtttatcatcaggaagccaaccaagattcactcacgctcgcgtgctcgtaggatgaaggaggcaaagaagaagggccggcactctggttatggtaagagaaagg

SEQ ID NO: 172853 - DNA, 268 bp, Glycine max
cctcactgtagtgggtatctccttctgcacagctattgtctgtgaggctatctcatgggttcttatctatcggaccaattcttacaaaaaccttaggtcctccattgacaaagcctccaagaaccttgagaccatgaagacagacagcaataaaatcaacatcaagaagtccaagaccaaaaaaattgaccgtgttgagacaagcctcaaagaatcgagtcgcgacttgtctctcttcaagttcaagtctgggggtgtggtggctctg

SEQ ID NO: 172854 - DNA, 267 bp, Glycine max
cagaggcatcacaactatcaggggaacaaattacaaatccccacatgggattcccattgatctgcttgaccgacttctcatcatctctacccaaccttacacagaggatgaaattcgcaagattctggatatcagatgccaagaggaagacgtagacatgagtgaaggtgcaaagtgtttgttaaccaaaataggtgtagaaacatctttgagatatgctattcatctaatcacagcagctgcattggcatgccaaaagcgaaaggg

SEQ ID NO: 172855 - DNA, 267 bp, Glycine max
ctttctattctcataagataactaactcactttgtgtgatagagttctcattctcatggctattaccggcgatattttccggcagagcataacggaaatgcttgcggagtccccttccggtgcgccagaacttcacgttctcgccgtcgatgacagcctcgttgatcgcaaggtgatcgaacggttgctgaagatttcttcctgcaaagtgacggttgtggagagtggaacgcgcgctcttcagtatcttgggttggagggagagaa

SEQ ID NO: 172856 - DNA, 262 bp, Glycine max
atcaagttgaggatgattcaccaatatttaggaacaaagagaagctattggtcacttgctctaggcgcatcaattacaggtaccggcatttgatgttgaatttggtcacacttttgcctcattgtaagaaggataacaaagttgaatcaaaggaaactaaaggagccaccctcaacgagcttgttgagctaaaaaattgttcctcttgtttattttttgagtgcaggaagcataaagatctttatctctggatggcaaaatg

SEQ ID NO: 172857 - DNA, 269 bp, Glycine max
ttctcgagcgaatcggctcgacgcagagtagagcagcagagaacagagaaaacggcactaccagccgtagaaggaaaacacgaccatggtgcacgtctccttttacaggaactatggtaagacgtttaagaagccccgccgtccgtacgagaaggagcgtctagacgcggagctgaagctggtgggggagtacgggctgcggtgcaagagggagctgtggagggtgcagtacgcgctcagccgcatccgcaacaacgcgcggaatctcc

SEQ ID NO: 172858 - DNA, 265 bp, Glycine max
cctagttagcctctttttgtctcccctgcaatcaacggcaccccccacaaaaatgacaggagagacagtgaacccaaaagcttaccctttggccgatgcgcaactcgcaataacaatcttggatcttgtgcaacaagctgccaactacaagcaactaaaaaagggtgctaatgaagcgactaagacactgaacagaggcatttctgagttcgttgtgatggccgcagacactgagcctcttgagattcttctccatcttcctctc

SEQ ID NO: 172859 - DNA, 262 bp, Glycine max
gtttgttgtgagctataagctagtttatcgtgaggagaatatgaagttgtgtgtttgctgtgttgctgcagtagtttgggtagcatggccatgccatggcgcaggctaccaaaggttccgctctccgaatgaaaactggctatggtgagcgttcttcggaggtaaaatgcgcaagttgttaggctggctgtggaagcacacaacatccgagcctttaaaaccattcctgaagagtgcattgagccaacagaggactacatta

SEQ ID NO: 172860 - DNA, 261 bp, Glycine max
gaagaagaagaagaagaagaagaagctctggattccacctcttcccgtccttcgagacggttgttgtgctgcttgctcttcaggttgacctgggattgaatctaaagaatcttgatttacattttgagatatggagggagtttgtttctggacaaattgctaccagtatcggttttttgcattccaagaagtgcttgattggcgagttttcatccttggagattttcttcgggtttcctttgttaattgcacttagggttc

SEQ ID NO: 172861 - DNA, 263 bp, Glycine max
attcatcactagaagtgttggatgcatttctatttctaactaattattgtgcttattattattgttgagaaagaaaagaatggcaaagttaataaaattctttgagttgaacacaggggccaagattccttctgttgggttaggcacttggcaagctgagcctggtgttgtagccaaagctgtcaccacagccattctggttggatacaggcatattgattgtgctcaagcgtataacaatcaagcagagattggttctgctc

SEQ ID NO: 172862 - DNA, 263 bp, Glycine max
agctagggcaattgccagtaacatagatgctaacttcttgaaggttgtttcaagtgcaataattgataaatacattggagaaagtgccaggttaattcgagaaatgtttggctatgcacgtgatcaccagccttgcatcatttttatggatgagatcgatgccattggtggtcgtcgtttcagtgagggaacaagtgctgatcgtgagattcagagaacactaatggagttgcttaatcaacttgatgggtttgatcaacttg

SEQ ID NO: 172863 - DNA, 264 bp, Glycine max
caggtgaaaggcagggacgagtcgaaatggctgaagcagagagtgtgcagattcctcaagtcaaacttggaactcaaggccttgtggtttcaaagttagggttggggtgtatgacccttagtggacgctataatgatccacttcctgaagaggaaggcatatctgttattaagcatgctttcagccaaggaatcactttttttgacacatctgatgtctatgggctcgaccatgctaacgaatttttgctcggaaaagctttga

SEQ ID NO: 172864 - DNA, 260 bp, Glycine max
gttgcgcgtagggaggacaataatatggggaaatcagggggtagaagaaagaagggtggttcgaactcaaaccaaggtggtgcggttgataattcgggttcaggtgcagcagcagccccaacggctaacggtggggtggaggtgttggattcgtcgatatttttgaagaaggcgaatgagctgaaagaagaagggaataagaggtttcagaacaaggactatgcgggtgctcttgaacagtacgagagtgctcttcgttt

SEQ ID NO: 172865 - DNA, 259 bp, Glycine max
cttgggactcgcataccgtgggatgaacagttcctagttgagactttatcggattccaccatttacatggcgtattacactgttgcacaccatttgcagagtggtgacatgtatggatccggcgagtctgccatcaaacctcatcaactgactgatgatgtctgggattatattttctgtggtggaccatatccgaagtcaaccgatatatcatcatcccttttagaaagaatgaagcaggagtttgaatattggtatc

SEQ ID NO: 172866 - DNA, 262 bp, Glycine max
caaatcccttttccgatttccaccaaaatctaaaccgaaattcccaattacccttcccaattttcaccaaaacctaatactcccacaccaatcttcgatcatggacgccgattcacaacctcaacaactcgaagagagaacagaggagcaagaactgaagtacctggaattcgtgcaattcgcgaccatacaggctctgatgcgctgcgccatcctctactcatacgccaaggagcgcgcgggtcctctgaagcccggtgtc

SEQ ID NO: 172867 - DNA, 263 bp, Glycine max
gtcgaagcgtggtcgtggtggttcggcggggaacaagttccgcatgtcgctgggtcttccagtggcggcgacggtgaactgcgccgacaacacgggggcgaagaacctctacatcatttcggtgaaagggatcaaaggccgtttgaaccgtcttccctcggcatgcgttggcgacatggtgatggccaccgtgaagaagggaaaacccgatctgaggaagaaggtcttgccagctgtcatcgttcgccagcgcaagcatggcg

SEQ ID NO: 172868 - DNA, 264 bp, Glycine max
  unsure (1)..(264): unsure at all n locations
gtttttctttttctcttctcactgcatcgcttcaggttcttctgaaaagatgtctcgcgtgtatgttggtaacttggattcacgagtcaccgagagagatctcgaagacgaattccgcgttttcggagttattcggagtgtttgggttgcacgtagaccacctggtnatgcttttattgactttgatgaccgcagagacgcacaggatgctatccgtgaattggatggcaagaatggttggagggttgagctttctcacaactc

SEQ ID NO: 172869 - DNA, 259 bp, Glycine max
atctcatgggaaaaccagggaaatttatgagaagttggaggagttgggagaggaaatggcgaaaccggttatgttgcagacacttcttttgtgttgaaagaagtggatggggatgagaaaagtcaaactataaggtatcatagtgaaaggttggccattgcgtttggacttattactttccctccagaatggcctatcagggtaatgaagaacttgcgagtttgtggtgattgccacactgccatcaagtttattagca

SEQ ID NO: 172870 - DNA, 263 bp, Glycine max
ctcctcctcttcatccgcttcccctgcttttggctcctttcccgctgatcttcctctcctacgtccccacggtggagctccctcacccttctctatcaaggctggagatgctcggtttgagggtcgtgagcgtgtgcgatatacaagggaacagcttttactgcttagagagggtgttgagatccttgatgatgttttaaagatcaaacaagatattgaagctgaactttttggtgaagatcaaagctgggcccgctcagaaa

SEQ ID NO: 172871 - DNA, 260 bp, Glycine max
gcacaaccaacacctccacagcctctcctacctcccggagccatggccgccgccgaatcctccgccgctccatcgcaccagttgtcgcagagggagacggacatccagatgatgctcgccgccgacgttcacctcggcaccaaaaactgcgactttcagatggaacgctacgtcttcaagcgcagaaccgatggtatttacataattaaccttggcaagacatgggagaagctccagctcgctgctaggattattgttgc

SEQ ID NO: 172872 - DNA, 260 bp, Glycine max
  unsure (1)..(260): unsure at all n locations
gaatagttgaaggtttgatgacaacggtacatgcaacaacagcaacacaaaagaccgtagatggtccttctatgaaggattggcgangaggaanaggggcagctcaaaatataattccaagttcaactggtgctgcgaaggccgttgggaaagttcttcctganctaaatggganactcactgggatggcattccgtgtaccgactcccaatgtttctgtggtggacttgacttgccggcttaagaagaatgcttcctat

SEQ ID NO: 172873 - DNA, 259 bp, Glycine max
acgtgcaccagctctattggacaaccttgcccaagcttttctgatggctcctttcttcgtgttgctagaggtcctccaatttgttggatatgaaccatatccaggattcaagacaagggttaaggcaaggatagatgctgatatcaaacaatggcaggccaagaaacaaaagaaacattcttagcttgaacatgttagttaaaaatgtggtgttatatatagatcacttcaaaagtaccaaaaggaaaaacgacttgtt

SEQ ID NO: 172874 - DNA, 260 bp, Glycine max
cagatgaggtggttcttctggatttctggccaagtccatttgggatgagggtcaggattgcacttgctgaaaagggtatcgaatatgagtacaaagaagaggacttgaggaacaagagtcctcttctcttacaaatgaacccggttcacaagaagattccggttctcatccacaatggcaaacccatttccgaatccctcattgctgttcagtacattgaggaggtttggaatgacagaaatcccttgttgccttcagac

SEQ ID NO: 172875 - DNA, 148 bp, Glycine max
gagataactagaaacagtgtgatgaaaatgaaggtccttgtattcttcgttgctacaattttggtagcatggcaatgccatgcgtacgatatgttccctctccgaatgaacactggctatggtgcccgtactccggaggtgaaatgcg

SEQ ID NO: 172876 - DNA, 256 bp, Glycine max
cacattttggaaggaagctcttacatcaaagctgctaagaagttgcatgagattgatcctttgcaaaagcctaaacaagaccgctatgcacttaggacttcaccacaatggcttggtcctcaaattgaagtgattagattctctaccaagtcaattgagagggagataaactcagtcaatgacaaccctttgattgatgtctcaaggaacaaggcccttcatggtggtaacttccaaggaacacctattggagtgt

SEQ ID NO: 172877 - DNA, 254 bp, Glycine max
ggagactgtggaatataagaatattagctttactgtatgggatgtgggtggccaagataagatccgtcctttatggagacactacttccaaaacactcaggggcttatctttgttgtggatagcaatgatcgtgaccgtgtagttgaggctagagatgagctccaccggatgttgaatgaggatgagttgagagatgctgttctcctggtatttgccaacaaacaagatcttccaaatgctatgaatgctgcag

SEQ ID NO: 172878 - DNA, 255 bp, Glycine max
  unsure (1)..(255): unsure at all n locations
ctttctcgtcactagctctgtgcattcttctctcgctctctgccttccatcacactcggcatttcctttcccaagatagtagaagatggcagacactgaggatattcaacctcttgtatgttacaatggaacaggaatggttaatgctggatnaactggagatgatgccccacgtgctgtgtttcccagcattgtaggtcgtcctcgtcacactggtgtgatggttggcatgggccaaaaagatgcatatgttgg

SEQ ID NO: 172879 - DNA, 252 bp, Glycine max
gtggtgaaggtggaattcttaggaatagtgagggtgagcgatttatggaacgatatgcccctactgcaaaggatcttgcatcaagagatgtagtttcaagagcaatgacgatggagattcgggaaggtcgtggtgtaggacccctgaaagatcacatctatctccacttgaatcacttgcccccagatgtgctcaaagagagacttcctggcatctctgaaactgctgctatttttgctggtgtggatgtta

SEQ ID NO: 172880 - DNA, 259 bp, Glycine max
atggaatcgaaaagagtttcattcccaaaggagcagccaatgaggatatactcaagcctatggaatgctgatgactgggcaacaagaggtggcattgtgaagactgattggagccaagctccattcacagcatcatataggaacttcaatgccaatgcctgtgtccattctggagcatcatcttgcacttccaactctgcctcctccaatgcctggttcaaccaacagttggattcaacaagccaagacagactgagtt

SEQ ID NO: 172881 - DNA, 255 bp, Glycine max
cgatttactactatgcagctcccactctatttttataatcccagagatcagcgagttgtggtttggtgggtccgctgatcaaacggctctggctgatttgacttattttgtgatgatcttgttcagtcaatgcccagtcaaagatgtgcagattctggttcatcctctccttatcgtagctctttggcacaaatgtgacaccttgttcatacaaccatctcagactcacctgggctatggatttcccatgagcct

SEQ ID NO: 172882 - DNA, 256 bp, Glycine max
atagggttttcgctgaccggtgcgcagtcgagcctccagaagacgaatcgaaaatgccgtcgcacaagacattcagaatcaagaagaagttggcgaagaagatgaggcagaacaggcccattccctactggatccgcatgaggaccgataacaccatcaggtacaacgcgaagccgtcactggcgtcgcaccaagcttggattctgaggtgtatgctctgcctaggttcaatttatccaattaattagtgttttat

SEQ ID NO: 172883 - DNA, 257 bp, Glycine max
atagtaagccgccatggtgaagtactcaagggagcctgacaatgcaaccaagtcttgcaaggctagatgcgccgaccttagggttcatgttaagaacactatggaaactgcctttgcaatcaggaagttgcccttggttaaagctaaaaggtacttggaagatgttcttgcgcacaagcaggccattccgttcagacggttctgtcgtggtgttggaaggacagctcaagcaaagaatagacactctaatggccaag

SEQ ID NO: 172884 - DNA, 177 bp, Glycine max
cccgatttaagaagaaccgcaagaagcgcggccacgtcagcgccggccacggccgtattggaaagcaccgcaagcaccccggcggccggggaaatgccggcggcatgcaccaccacaggatcctcttcgacaagtaccacccggggttcttcgggaaggtagggatgaggtactttc

SEQ ID NO: 172885 - DNA, 256 bp, Glycine max
agcaaatccattaaggagaatatctcttaaggaaattaagaaccacccatggtttttaaagaatcttccaagagagctaacagaatcagctcaagctgtctattaccagagaggcaatccaagcttttctgttcaaagtgtggaggagatcatgaaaattgtgggagaggcaagggaccctcctccagtatctaggcttgtcaaaggttttggctgggagggcaaagaagatgaaggggaagaagacgtggaggaa

SEQ ID NO: 172886 - DNA, 254 bp, Glycine max
cttctctctcacacaaaacactagtccctcccttcttccttgtcactttctcttctcaacaacatgcagatcttcgtcaagactttgactggcaagaccatcaccctcgaggtcgagagtagcgacaccatcgacaacgtcaaggccaagatccaggacaaggaaggtatccctcctgaccagcagaggttgatttttgctggtaagcagctggaagatggtcgcactcttgctgattataacatacaaaagga

SEQ ID NO: 172887 - DNA, 272 bp, Glycine max
aagcaataagatgagaatgaaagtgcttgttttgtttgttgctacagttttggtagcatatgaatgccatggctcagactaccaaaagttccctctccaaatgaaaactgggtttggtgggcaatacagcaatgaggtggcatgtgccagttggaggcttggcgtggaagcaaacaacgtagtcaagtggcaaactgttcctgcagcttgcggagagtacatagctgactacgttctaggagaccaatatagatcagattccaaaacagtta

SEQ ID NO: 172888 - DNA, 268 bp, Glycine max
tggacctccatgacttctttgtctacccatcacacctataggcgaaagcaaaaatctctcggcctcctctgcaccaattttctgagtttgtacaacaaagaaggtgtgcgcctggtcggtctcgatgacgcagcttcgcggttaggtgtagaaagacgtcggatctacgacatcgttaatgttttagagagtgtcggtgtgctaaccagaaaagctaagaatcagtatacttggaaaggattttgtgcaattcctgctgccttacaag

SEQ ID NO: 172889 - DNA, 264 bp, Glycine max
caactccatttcttcgatctggagctctccgctttcaaagctgtcaaatttccgattcgggatggacaaatacgagctcgtcaaggatataggatctgggaatttcggtgtggccaggctcatgcgtcacaaagacaccaaggagcttgttgccatgaaatacattgaacggggtcacaagattgatgagaatgttgcgagggaaatcataaaccatagaagtcttcggcaccctaatattattcggttcaaggaggtggttct

SEQ ID NO: 172890 - DNA, 264 bp, Glycine max
atcacaaccttgtttcattcatggaatttgtggacccaatagtatatgcagtcatgaacaagtaattggtagaaagtgttcgtgtcttgaagggtatagttggattgatagccaagattggactttaggttgcaagccgaatttccaacctacttgtgaccacaagacagaatatcgctttgtaccctattatgaagtggatttctatggatacgactatgggtcatctttttcaaattacacttataaacaatgtgagaaatt

SEQ ID NO: 172891 - DNA, 223 bp, Glycine max
cacaaaatccttgaaggttgaatgctcaaatccatcttgacttcctgagcctggaaaaaggaaatcaattgaggagccatttgttaagattgagatgcttacaccaaaggactacattggttcacttatggaactggcacaagaaagaagagggcagttcagagaaatgaaatttattgctgaaaatagggcatcaatcacgtatgaattaccattagcagag

SEQ ID NO: 172892 - DNA, 264 bp, Glycine max
cccgcccaaaccctaactccctaccctattccgctttctctcatccatcatgaaaggaggaaagtccaagaccgaatctaagagagccgatgccaaacttgctgtgaataagaagggcgccgccaccaagactaggaaacccgccggaaaggggaaggcagcgaaagatcctaacaagccaaagaggcctccaagtgctttcttcgttttcatggaggaattcaggaaggtgttcaacaaggaacatcccgacaacaaagcagt

SEQ ID NO: 172893 - DNA, 261 bp, Glycine max
cactgctagcatcgcttctgtgtcgaatgcgggttgggcgcacccgtacgcggcgtcgaagaacgcagtggtgggtttgatgaagaacctgtgcgtggaattggggaaacatggaatcagagttaactgtgtttcgccctatgcggtggggactccaatgctgacacgtgcgatgaggatggagaaggagaaagcagaggagatatatttggaggcggcgaacttgaagggagtggttttaaaggaaaaggatgtggcaga

SEQ ID NO: 172894 - DNA, 209 bp, Glycine max
gttcatacggtggttagatgatggaatcctgtgattgtatagacacacagtatcctccagatgaacttctcgtaaagtatcagtatatctcggatgtgctaattgctcttgcctatttttctattcccgtggagctcatctattttgttcagaagtctgctttctttccatatagatgggtgcttatgcagtttggtgcttttattgtt

SEQ ID NO: 172895 - DNA, 261 bp, Glycine max
accggagcccttctcgccggcggcctctactggttcgtctgtgttctgggccccgccgagcagaagggcaaacgcgccaccgatctatccggcggctccatctccgccgagaaagtccaagacaactacaagcagtactggtccttcttccgccgccccaaggagatcgagaccgccgacaaagttcccgacttcgtcgacaccttctacaatctagtcaccgacatctacgagtggggctggggccagtccttccacttc

SEQ ID NO: 172896 - DNA, 259 bp, Glycine max
agaagttgaaaattttggttgagtgagaggcttgtctttgttccgctaccatgtctcatgagacatgccttctgtaaagaatgtccttcttttggattccgatgggaaacgtgttgcggtcaaatacttctctgaagactggccgacaaatagtgccaaggaaaattttgagaaagttgtattcaacaagactcagaaaaccaatgcccgcacggaagaaatagcaatgtttgagaataacattgttctttacaagttt

SEQ ID NO: 172897 - DNA, 260 bp, Glycine max
tcgatcgttcttcttcgtcgttatcttcttcttttgttgtttgtgtgtttgttttttctctcacctgaaaatgtcttgctgcggtggtaactgtggttgcggaagcgcctgcaagtgcggcaacggctgcggaggctgcaagatgtacccagacttgagctacaccgagtcaaccaccaccgagaccttggtcatgggagtggcaccagttaaggctcaattcgagagtgctgaaatgggtgttcccgctgagaacgatg

SEQ ID NO: 172898 - DNA, 257 bp, Glycine max
cgttgttgttgttctaaaacgtccacacattctccgtcgccacaacaacaatggctccgaagaaaggtgtgaaaggttccgttgtagcagcgaagaagaaggttcaggagaaggtgacgaatcctttgttcgagaagcgtccgaagcagttcgggatcggaggcgcgctgccgccgaagcgggacctgacgcggttcgtgaagtggccgaagaacgtccaaatccaacgcaagaagcgcatcctcaagcagaggctc

SEQ ID NO: 172899 - DNA, 255 bp, Glycine max
tgaagctgcaggaggaggaacgcgagcgtcgcatggacttcgtccccgatgtctccgccatcaggaccgaccagatcgaggtcgacaaggagacgctcgacatgctcgccgccctcgggatgtccgaggttcctggcatcgttcaggtggatcctgttgccgtccaggcgcccctcggcttcggccgtggcggccctggaaggaggtactaactgtccgcctccttcgagcttccagtttttgtcgtgttgtcaa

SEQ ID NO: 172900 - DNA, 254 bp, Glycine max
cgctttctttattctctccttcctcttccttcttcttgtttcatctgccactgcttgtgatcgctgcttgtatcaatccaaggcttcctatttctccaaagcttctgctctttcatctggggcatgtgggtatggctctttggcactagacataagtggtggacaccttgcagctggtgtggattctctcttcaaaaatggagcaggttgtggtgcctgctttcagataagatgcaagaacccaactctatgta

SEQ ID NO: 172901 - DNA, 255 bp, Glycine max
cattgttgttgttattgtatcgtagccagagaagaagaagagaagagatcgcggcgaagaaagaaagatgacggaggcacatataaggaagaagcccgggatggcgagcgtgaaggacatgccggttctccaggacggtccaccgccgggcgggttcgctccggtccggttcgcccggcgcatcccgaacaagggccccagcgccgttgccatcttcctcaccaccttcggcgctttctcttggggcatgtacca

SEQ ID NO: 172902 - DNA, 199 bp, Glycine max
caaagaaatcatctcctcttccttttcaccttattggggaattaataaggagcttcaagactgaccattttgttagtgacaagggggatgttgtgtactatcaaactgactctgagattattggctcgtccaaatcagagtgaagattaaaattcttttttatatagacaagagagacttacacacaattcttattgct

SEQ ID NO: 172903 - DNA, 260 bp, Glycine max
ccaaaacctaagcatggctcagaaggcccagaaaaacgacactgagtttaaggtccccgaacccatcatcaacccctgcaccaccaccactaccacaaccacctcgatttccgaaccttctagattcttcgatgcaaccacccccgccacttcatcgcgctccccaaagcgatccctccctctcgacgaggaatctcagacggaccaaacgacgtcttctgagcccaaacgcgccgtgaaccgctgctccggctgccggc

SEQ ID NO: 172904 - DNA, 244 bp, Glycine max
gtttgttgttgtaactcgttcttcttcttttgttgttctgtgtttgtgtttgttttttctctcacctgaaaatgtcttgctgcggtggtaactgtggttgcggaagctcctgcaagtgcggcaacggctgcggaggctgcaagatgtacccagacttgagctatactgagtcaaccaccaccgagaccttggtcatgggagtggcacctgttaaggctcaatttgagggtgctgaaatgggtgt

SEQ ID NO: 172905 - DNA, 252 bp, Glycine max
ctttcagctcctaagagcacgcatcactgttgcacttcttactcgttctccctcttttttttcttcttcttcttcttcgctaaaccccccctttatttttcctatctcactaacatcgatgggagacgagaataagaccaagtcccctgcttccggcgtgtggtccaccatcaagcctttcgtcaatggcggacctccggcatgctcgccacctgcgtcattcaacccatcgatatgatcaaggtgaggatt

SEQ ID NO: 172906 - DNA, 258 bp, Glycine max
atttgctcaaccgatctccgcagcaatggtgaacgttccgaagacaaagaagacctactgcaagagcaaggagtgcaggaagcacacgctccacaaggtcacccaatacaagaagggcaaggacagcatcgccgctcagggaaaacgccgttatgaccgcaaacagtccggttacggtggccagaccaagcccgttttccacaaaaaggcgaaaaccaccaagaaaattgtgttgaggctccagtgccaaggatgcaa

SEQ ID NO: 172907 - DNA, 249 bp, Glycine max
cgaactgttgtttggtctcttctctcttatccatggcatcaacgtttctcaccctaccaactcccttcctacacaaaaccaatgccatcagtttctctaacaagagaccctcatttttgcagaggagctctctgaagattcatgcaattaccaaaaaatgggaacccacaaaggttgtgcctcaggctgatagagttcttattcgtttggaggagctttcagataaaacagttggtggagttttgctgc

SEQ ID NO: 172908 - DNA, 247 bp, Glycine max
attagggtttgccgattgagagagacagagaaatgggagaacgaaaaggaatcccaatggctttggggctcttggcgatgatcctcttcttcattgcttcctcttcctctcacctcgttcgcgcttccgatgacgccgacgacgcgatcttctacgagtcgttcgacgaggattttgatggacggtggattgtatccgacaaggaggattacaatggtgtctggaagcatgccaagagtgatgggca

SEQ ID NO: 172909 - DNA, 162 bp, Glycine max
gccgtagcagcggaagctctagcttgggtagcgaatcacaatggcgagaggattaaagaagcatctgaagaggcttaatgccccaaagcattggatgcttgacaaactgggtggtgcatttgctcctaagccctcatctggaccacacaaatcgagggaatg

SEQ ID NO: 172910 - DNA, 249 bp, Glycine max
cttgaattcacatttcaacaaccatagccatggctttctccttctccaaagcacttgtccttgcctgctccttctgcttatttgcgtctttggcttttggacgcgatttctccattgtgggctattcatcggaggacttaaagtccatggataagctcattgaactctttgaatcatggatgtcaaaacatggcaagatttaccaaagcattgaggagaagcttcttaggttcgagattttcaaggata

SEQ ID NO: 172911 - DNA, 162 bp, Glycine max
ccttcctacacgcagggtttcccgaagatttaacacctatggctcctaaagctgatagtttaaagaaggctgatccaaaggcacaagccttgaaaactgctaaggctgttaagtcaggtgctactttaaagagaaagaccaagaagatccgaacatctgtta

SEQ ID NO: 172912 - DNA, 201 bp, Glycine max
caacagcagctgcagcagcaatggctcccaaacgacgtggaaaggctccggctcttgccgctaagaagaagcctgagaaggtcacgaatccgttgttcgagaagcgtccgaagcagttcggaatcggaggggcgttgcctccgaagagagacttgactaggttcgtgaagtggccaaagaatgttcaaattcagaggaaga

SEQ ID NO: 172913 - DNA, 254 bp, Glycine max
cttattagccaaggattttggctctctcgattgttttgcgacagacttcttgattgatggaagtactctcagtctcatggtttcagatgataatagaaacatccagattttttactatgccccaaagatgtctgagagttggaaaggacagaagcttctttcaagagctgaatttcatgttggtgcccatgtgactaaattcttaaggttgcaaatgttatccacttcggatcgagctggtgctgtaccaggct

SEQ ID NO: 172914 - DNA, 181 bp, Glycine max
cttcagccgttgctctgcttcaaccttgcggaagaagaagacgccgcagccatggtgaagtactccagagaacccgacaatcccaccaagtcctgcaaggccagaggcgctgaccttaggatgcatttcaaggacactagggagactgcctttgccatcaggaagttgcccctggttaaag

SEQ ID NO: 172915 - DNA, 249 bp, Glycine max
ctgcgaaaacccccaactccaacctctgttcatcgtctaccgcgcattcttttcaaccagaactatgattaagctttttaaagtaaaggaaaagcagagagaacttgcagaaaatgcaagtggcggaccacctgttaagaagcaaagtgctggagagttgcgtcttcacaaagatataagtgagctgaatctaccaaaatcatgtaccatgcaattccccaatggcaaagatgatctgatgaactttga

SEQ ID NO: 172916 - DNA, 193 bp, Glycine max
tctatttgttcattttgttgttcgaagccaaaaccctagcagccggcgagaatggcagacgttgaggttgatgcggcggcagcggcaggggcagcgcaccgaagaagagaacgttcaagaaattcagcttcaggggcgtggatctggacgcgcttctggacatgtccaccgacgaactggtgaagatgttcag

SEQ ID NO: 172917 - DNA, 162 bp, Glycine max
ctttggtacagagagaaaaaggaacataagatgtctcagaacgggaagctgatgccaaatctagaccagcatagcaccaagcttctcaatctcactgttcttcaacgaatcgacccttttgtcgaggaaattctcatcaccgctgcgcatgtcaccttctac

SEQ ID NO: 172918 - DNA, 253 bp, Glycine max
cggagactcttctcttcttcaaacctcaaagccctacacacaacactctctccttctcgtccccgactcgccgcccagactctcctcgcccgccacttcaccgcccaatcaggtgcttcttccctcaaaaagagggttgaagatgtcgtgccaattgctaccggccacgagcgtgaggagattcaggccgatctcgagggaagggatattcttgaaataaaccatcccgtaggtccttttggcacaaaggaag

SEQ ID NO: 172919 - DNA, 246 bp, Glycine max
aagagacagaacaacagatgaagcattttgccttggtgtttcttttggccattttggtccctcaggagtgtttccatgtcagtgtggaagcaagggatgattttgtcagaactagaggcatccacttcacgctgaatggatacccttactatgcaaatggcttcaatgcctactggttaatgtacacagcttctgacccatctcagagattcaaggtttcaaatgcctttagagaagcagcaagtc

SEQ ID NO: 172920 - DNA, 242 bp, Glycine max
gtttgttgtttcccttcatctattttttcttcgcccccttttgtgtttctttttttgggtgtttgttctttcttctcgttcgtcgctttgtgatctctctctgcaaccatgtccgccgagaaagagagagagacccaggtttacttggccaagcttgccgagcaggccgagagatacgaagaaatggttgagtgtatgaagaaagtagcaaaacttgatcttgatctaactgtggaagacag

SEQ ID NO: 172921 - DNA, 246 bp, Glycine max
tgaactttttgttgacttccaggatttcaatgtggaagctctagagaagtttgttgaggaatctagtacccctgttgttactgtctttaacaatgaaccgagcaatcaccctttcgttgtcaaattcttcaacagtcccaacgcaaaggcaatgttgttcatcaacttcactgccgaaggtgctgaagctatcaaatcaaaataccgtgaagctgctgagcaatataaacaacagggtgtcagctt

SEQ ID NO: 172922 - DNA, 193 bp, Glycine max
tgcgaggtcattgttagtggaaaactgagagctcagagagccaagtccatgaaattcaaggatggatatatgatttcttctggacaaccagtcaaggattacattgactctgcagtgagacatgtgctactaagacagggtgttcttggtatcaaggttaagatcatgcttgattgggatcctaaagggaaac

SEQ ID NO: 172923 - DNA, 274 bp, Glycine max
gtcatttagccctcatttttgcaggttccttcaatgggaagcctgttctttttggcatccattttgcccccttttaaatggctgcatatctgagaacatagctaccgggttctggagtgtaggaatctttgttactggtgttggcacctgatgtttttagctcagctttgcattggttttgccaccatgtgtgtcttagttttctaagtttttacagctagctgtaccactgtatcagtctttgtttaccaaatgtttcatgtgtttgaactat

SEQ ID NO: 172924 - DNA, 276 bp, Glycine max
attctctttgcgcagttccctacctctcctttcaagatgcagatcttcgtcaagaccctcaccggaaagaccatcacccttgaggtggaaagctctgacaccatcgacaacgtcaaggccaagatccacgacaaggaaggaattcccccggatcagcaacgtctcatcttcgccggaaagcagctcgaggacggccgtaccctcgccgactacaacatccagaaggagtcaacccttcaccttgtccttcgtctccgtggtgggcatgcaatcttc

SEQ ID NO: 172925 - DNA, 267 bp, Glycine max
atcaaacctcaccaccgctgctaggtcaagcttctctgtcggtcattgcatctccaatctcgcttcttctctcagattcggataccaattcggtttcttccgaaccaaacttgtttttgagaaattcggcaattgattttccatggccacaatccgtcacagcttctcccatcagagttgattgaccggtgtataggttcgaaaatttgggtgataatgaagggtgacaaggagcttgttggtactcttagaggctttgatgtttat

SEQ ID NO: 172926 - DNA, 270 bp, Glycine max
tcattcataatgggtgttttcacattcgaggatgaaatcaactcccctgtggctcctgctactctttacaaggccctagttacagatgccgacaacgtcatcccaaagactcgtgattccttcaagagtgttgaaaacgttgagggaatggtggcccaggtaccatcaagaagatcacttacgttgaggatggagaaaccaagtttgtgctgcacaaaatagaaagcattgatgaggcgaacttgggatacagctacagcgtggttgggg

SEQ ID NO: 172927 - DNA, 271 bp, Glycine max
aagaaactttggtaatgtttcttataagtctgacatttatagttatggaatgttgctcttagagatggtgggaggaagaacgaatacaaatatgtcagcagaggaaagtttccaagttttgtaccctgaatggatccataatttgccaaaagcagagacgtgcaagttactattgaggatgagggagatgttagaattgccaagaaacttgccattgtaggactttgttgcattgagtggaacccaatagaccgtccatccatgaaaactg

SEQ ID NO: 172928 - DNA, 274 bp, Glycine max
ctttcgttatcaaattatttcttcgatcaaggtcgttttcgacaccttcaccaacatgagctactacgatcatcagcaacagcctccaattggtgttcctccccctcaagggtatccaggataggacgcttaccctccaccagggtacctgcacaaggttaccctccaccagggtaccctcaccaaagctatgacccacagtatgctcaacaacctcctcccaggcaagaagttggttttcttgaaggatgtttagctgcactctgctgctgtt

SEQ ID NO: 172929 - DNA, 265 bp, Glycine max
aaaaaataaaaaatggggataggggtactatttgttgggtttttcttgctatcttgtgttgtgtgtgtgaagggtgtggagccaaaagcctcacccacttgtacatttccggcagtttacaactttggggactcaaactcagacacggaggcatatcagcttcatttgtgccaattcctgcaccttatggcgagggcttctttcacaagccttctggaagggactgtaatggccgtcccattgtagatttcatagctgagaagct

SEQ ID NO: 172930 - DNA, 274 bp, Glycine max
ctaagagatgcaaatccaaaacccgacggcgattatgatcgctacaacggctgtagcgcaggatgacgctagtggtgatggcaccacttccactgtcatcttcattggcgagcttatgaaacaatcggaacgttacattgatgaaggatgcatcctcgtgtgttggttgatggttttgatattgcaaagcgagcaactctgcaattccttgaaaagtttaagactcctgttgtgatgggtggtgagcctgataaagagattctcaagatggtag

SEQ ID NO: 172931 - DNA, 272 bp, Glycine max
caattttctagggttttattcattttccgatggcttctgcagatgttgagtaccgttgctttgtcggtgggctcgcttggaccactgacgaccatgccctcgagagagccttctctcagtacggcgaaatcgttgaaacgaagattatcaacgatcgtgagactggcagatccaggggttttggatttgtgaccttcgccacggagcagtccatgaaagatgcgatacgagcgatgaatggacagaacttggacggccgtaacatcactgtc

SEQ ID NO: 172932 - DNA, 266 bp, Glycine max
gtgatgaggcccctgcgagacatagccttatattccacgggttggttcccgtgttgagtgcagcttctgctagagcttctcatgctgaaacaacagaagaagcaatagaattcgccatgcaacatgccaagtccaagggtctctgccaaacggggattcagtggtggcactgcatcgtgtgggcactgcatctatcatcaagatcttgactgtgaaatgatcacccccattacgaggaattcttctgctgtttatggcaaattttt

SEQ ID NO: 172933 - DNA, 271 bp, Glycine max
gattgttgtgactcgttcttcttcgtcgttatcttcttcttttgttgtttgtgtgtttgttttttctctcacctgaaaatgtcttgctgcggtggtaactgtggttgcggaagcgcctgcaagtgcggcaacggctgcggaggctgaagatgtacccagacttgagctacaccgagtcaaccaccaccgagaccttggtcatgggagtggcaccagttaaggctcaattcgagagtgctgaaatgggtgttcccgctgagaacgatggctg

SEQ ID NO: 172934 - DNA, 272 bp, Glycine max
atttgagagagagagagggaggagggagagtgttgacgctccatcaagatgggtatttctagggattccatgcacaagaggcgtgccactggtggcaagaagaaggcatggagaaagaagagaaagtatgagcttgggcgtcaggccgaaacaccaagttatcaagcaacaaaactatccggaggattcgtgttcgaggtggcaatgttaaatggagggcattgaggttggataccggcaattactcatggggtagtgaagcagttactcgc

SEQ ID NO: 172935 - DNA, 264 bp, Glycine max
agatgattttggacaagaagtttgctggaacattggatcaaggtgctggatgccttgtcatatttgacgatcctaagactgatgctatatatcctgctactctagagaccatttccaatgttgggaaagtcgtggacagtctttacgataggtctgccaagataatggcatgagctctctggttattttactccgatgtcacattccttgttgctgttttcttcttaatggtgactagcatgtcatttgttttttctattttta

SEQ ID NO: 172936 - DNA, 269 bp, Glycine max
atcggttccacttgtttttgtgggtagctatgttggattcaagaagcctgcaattgagaatcctgtgaaaacgaacaagatcccaagacagatcccggagcaggcatggtacatgaacccagtgttctcagttctgattggtggatactcccatttggagctgttttcattgagcttttcttcatcctcacctcaatctggttgaatcagttttactacatcttcggattcctctttttggtcttcatcatcctcattgtcacttgtgc

SEQ ID NO: 172937 - DNA, 267 bp, Glycine max
gtcctgtctataggagcatttatgctaaagatggtctcttggaggttccttctgattttaagtccccttgggatttcttcagggactctgttaagaggaaccccaacaacaatatgttgggtaggcgtcaaaaaaccgaatctaagttgggttcctatacatggctcacgtatcaagatgtttatgatgctgccatgaaaatgggttcggccataaggagccgtggtgtcaatcctggagatcgttgtggcatatatgggtccactg

SEQ ID NO: 172938 - DNA, 270 bp, Glycine max
cagagattttgtcaacaggttggtattcaggcaatgaaaagtccaagttgctgattaattgcctctttcggatgggaagtgcagcaatccttctctcaaacaagaaagaagcgaagaaaactgcaaagtacaggttggtcaggacactcagaacccagagagcctttgatgacaaatcttatttttactgccataagggaagaagattctgatggaaaacttgggctgacactgaagagggacttgtcttcaagtggctggtgagactct

SEQ ID NO: 172939 - DNA, 268 bp, Glycine max
aaatggcggtgcctcttctctcgaagaagatcgtgaagaagaggctgaagaagttcaagaggcctcaaagtgacaggaagatttctgtgaagacaaactggcgcagaccaaagggtatcgattcccgtgttaggagaaagtcaagggatgcactttgatgccgaacattggttatgcttcagacaagaagacccgccactatctcccgaatggcttcaagacatttgctgttcacaatgtgaaggatttggaactgctcatgatgcac

SEQ ID NO: 172940 - DNA, 272 bp, Glycine max
gatcctgcttcccataccatccatatttcttctgttgcatacaactcactattccttggagaattcatgcaacctgactgggacatgtttcatagtttacacccagcagcagattatcatgctgcagctcgtgcaattggtggatgtcctatttatgttagtgacaagccaggcaatcacaattttgatcttcttaagaagctggttctcccggatggttcggttctccgtgctcagttacctggcaggccaactcgtgattctctatttgt

SEQ ID NO: 172941 - DNA, 273 bp, Glycine max
tgcatctctaatacttcaactcactgtattatcttgagtaattttgcagagaagtaaaatatgagcaggccaggagactggaattgcaggtcgtgccagcacctgaactttcagaggagagactcatgccagcgatgtggggactcaaatatggagatagagttgttgattttggtggttttggaggaagaggagggtcctcatttggtttaactggctcagatgttcgccccggcgactggtactgtgctgctgctaactgtggtgcacaca

SEQ ID NO: 172942 - DNA, 239 bp, Glycine max
aaaagttagggtttgtaactttgtcttttgcttgcgaatctgaatcgaataataatcaatcaatcatcatgtcgtcggcgaagaagatcacactgaagagttcggacggcgaggctttcgaggtggacgaggcggtggcgctggagtctcagacgataaagcacatgatcgaggacgactgcgccgacagcggcatccctctgccgaacgtgacgagcaagatcctggcgagggtgatc

SEQ ID NO: 172943 - DNA, 270 bp, Glycine max
atcgttgcacaagtgagggaggatgaaggcggcgtgagaagcatgttggacatcaacctattcagagaggagaagggccacaaccctgaattcatccgcgaatcccagcgccgtcgtttcgccagcgtcgaagacgtcgacgaggtcatcaatctcgacaaagaatggcgaaagcgtcaattcgagttggagaatctccgcaaagaatttaacaagatcaacaaggaagtctccaaactcaagcgtgctggcgaagatgcaactaagttc

SEQ ID NO: 172944 - DNA, 270 bp, Glycine max
agaaaaaatggtgtcgctgaaactgcagaagcggctggccgcaagcgtgctcaagtgtggcagaggaaaggtgtggcttgaccccaatgaagtcaacgaaatctaccatggccaattctcggcaaaacatcaggaagttggttaaggatgggtgtatcatcaggaagccaaccaagattcactcacgctcgcgtgctcgtaggatgaaggaggcaaagaagaagggccggcactctggttatggtaagagaaagggtacaagggatgcga

SEQ ID NO: 172945 - DNA, 267 bp, Glycine max
ctgttctctctccccctccccgattcgttttgcccctttcgtagccctaatttcaaccatgcctcgccgtagctccggtggaagatctgcccgtcctgctcctcgtgcagcacctcgtcctgctccagttcaccatgctcctctccagcccctgctcagagcggtggcggatctatgcttggtggcattggttcaaccatagctcaaggtatggcttttggcactggaagtgcagtggcacacagggctgtggatgctgtcatgggt

SEQ ID NO: 172946 - DNA, 271 bp, Glycine max
agcggacagagttggaattaggctatcgccattcgcagaatattcagagtctggagactctaatccaaaagaattggggctttacatgatgaatgccctcaataagtatggtattctttactgtcacatggtggaaccaagaatgaagactgttggagaaaaaactgaatgccctcatagcctggtgcctatgagaaaggccttcaatggcacttttatagccgcaggaggttatgaccgccaagatgggatcaacgctgtagctgaaaac

SEQ ID NO: 172947 - DNA, 271 bp, Glycine max
  unsure (1)..(271): unsure at all n locations
caaagttcaacattgtctctcccggtgcagacatgggcatatacttcccatacactgaaactgagcgtaggttaacagaattccactctgacatcgaaganacttctttacagctcagtggagaatgaggaacacatatgcgtatgaaggaccgcaacaaaccaataatcttcaccatggcaaggcttgaccgtgtgaagaacatcacggggcttgtcgagtggtacgggaagaacgcacgcctccgcgagttggtgaaacctggtggtgg

SEQ ID NO: 172948 - DNA, 272 bp, Glycine max
aaattctagaaaggcagagatcagggttcaattcaaggatgtccctggtgatattttcaagtgtaaaaagcaggggagaaatgagtttgttatccgcctacaacctttagaagctatgtacatgaagcttacggtcaagcaacctggactggagatgtcaacagttcaaagtgagctagacttgtcatatggacaacggtatcaaggagtaaccattcctgaggcttatgaacgcctaattcttgacacaattaaaggtgatcagcagcatt

SEQ ID NO: 172949 - DNA, 264 bp, Glycine max
caaaccgaaaccctaaccctaacggagagatggcggacacttggcatcgatattcgggacggagaaggacagggtgaactgtccgttctacttcaagatcggcgcgtgcaggcacggcgaccggtgctcccggcttcacatcaagccgacaattagcccaacattggttctgtcgaacatgtaccagaggcccgacatgaatatgagcattatcaccaaccccgatcagccacaaccccaatcccttgaccccgacaaggtgca

SEQ ID NO: 172950 - DNA, 132 bp, Glycine max
ccaggctactctgaagggaaagtacgatgtcgacaaaaacggcgctgcctttgccaacatcgccgtcaacgccggcgacgtcaagttccgagcctccgtaacggacgccactttcattaacggtcccagctt

SEQ ID NO: 172951 - DNA, 270 bp, Glycine max
atgctctgatccagcacgagtggcgtcccaaatcgttctttaccatttctggtgaggtagacaccaaggccattgaaaagagtgctaaggttggattgagtttggttctcaaaccctaagaattttgatccatcctggcaagagcattgagtaggtgttaggaaccgtatagtctgtcagactaaattatttccttgaagttggttctcttcatgggtaagaagttttcatggagttgtcgttgcatttgagcaattcaaccttgtaaaa

SEQ ID NO: 172952 - DNA, 268 bp, Glycine max
ctccacccaacacgacgagactgtcaccaatgacgaaattgctgctgacctcaaagagcatgtgatcaagcctgtgatcccagagaagtaccttgatgagaagaccattttccacttgaacccttcaggccgttttgtcattggtggccctcatggcgatgctggtctcaccggccgcaagatcattatcgatacttatggaggatggggtgctcatggtggtggtgctacctccagcaaggaccctaccaaggttgataggagtggt

SEQ ID NO: 172953 - DNA, 268 bp, Glycine max
  unsure (1)..(268): unsure at all n locations
ttaggctggtgcttctgagcatgcaagaagccttggtccaaaagggtcagattgtcacaaggcagctgttattggtgacaccattggagaacctctaaagnnnacatctggaccttcacttaacatccttattaagctcatggcggttgagtctcttgtgtttgctcccttctttgctacacatggtggcctactcttcaagatctaaaggatttgatagaaaaagagtatcgtccatcatttttctacaacgacagaacaaggaana

SEQ ID NO: 172954 - DNA, 259 bp, Glycine max
ctccgcggcgacgttctcatcaaccgcctctatcgcgacgatgacgggggacatatggtggatgcttttaggacgcatgttatgcaaacgaaggagcttggtacttgccctgtgaggcagattggtggatgctctttcttttacatgaggatcagcaatgtctacattgtcattgttgttagcaacaatgccaatgtcgcttgcgctttcaagtttgttgttgaggctgttgcattgttccgatcatactttggtggag

SEQ ID NO: 172955 - DNA, 270 bp, Glycine max
gtggcccaggaaccatcaagaagatcactttccttgaggatggagaaaccaagtttgtgctgcacaaaatagaaagcattgatgaggcgaacttgggatacagctacagcgtggttgggggtgctgcattgccagacacggcggagaagatcacattcgactccaaattggttgctggtcccaatggagggtctgctgggaagctcactgtcaaatacgaaacaaaaggagatgctgagcccaaccaagacgaactcaaaactggaaaag

SEQ ID NO: 172956 - DNA, 275 bp, Glycine max
accgtagcagcagcggaagctctagcttgggcagcgaatcacaatggcgagaggattgaagaagcatttgaagaggcttaatgccccaaagcattggatgcttgacaaactgggtggtgcatttgctcctaagccctcatctggaccacacaaatccagggaatgcctgccactcatactcattttgcgaaaccggctgaagtatgctctgacataccgtgaagtcattgctattcttgcagcgacatgtccttgttgatggcaaagtcaggaca

SEQ ID NO: 172957 - DNA, 199 bp, Glycine max
ggcaattgctgtttcaaaagctatgcgtggacattccctgcaggaaaccaaaaatgatggtcgtttccatgttcataccaagacatatctggatggtgctattttaaaagaagagatggaacgttccgctgatgtgcttgctgctggattgcttgaagtgtctgacccgtctctttcaagtaaatatttcctccgccaa

SEQ ID NO: 172958 - DNA, 263 bp, Glycine max
cttctttctgtgttgacggtggcgttgatctgattggaattcaggatcaatggcaggggcagcctctgctctgttcctcctcgacatcaaaggccgcgtcctcatctggcgcgactaccgcggcgacgtctccgccctcgacgccgaacgcttcttcaccaaactcatcgaaaaacaggccgatccgcaagctcaagatccggttgtgcacgacaacggcgtgacctatgttcatccagcacagcaacgtctacctcatgata

SEQ ID NO: 172959 - DNA, 259 bp, Glycine max
gaaaatgaagaacaatgccattgtttgcaacattggtcactttgacaatgagatcgacatgctggggctggagaactaccccggcgtgatgcgcatcaccatcaagccccaaaccgacagatgggtcttccccgagaccaatgtcggcatcattgtcttggccgagggtcgtttgatgaacttgggatgcgccacaggacaccctagttttgtgatgtcctgctttcaccaaccaggtcattgctcagcttgagttgtg

SEQ ID NO: 172960 - DNA, 129 bp, Glycine max
gagagatccatcgatcaattaatttccaatggccgatcagctcaccgacgaacagatctctgagttcaaggaagcctttagcctcttcgacaaggacggcgatggttgtattaccaccaaggaacttgg

SEQ ID NO: 172961 - DNA, 264 bp, Glycine max
  unsure (1)..(264): unsure at all n locations
tgggatatggtgagaatgatatcaccttagtatcttttcaatcagtctccaaaggctatcacggggagtgtgggaaacgaggaggttatatggaggtgactgggttttctgcagaagtgagggaacaaatatataaagtggcatctgtcaacctttgctctaatatctctggtcaaattcttgcaagcttggtcatgagtccacccaaggttggagatgagtcctatganatcatggctgagaaggagatatttggcgtccctg

SEQ ID NO: 172962 - DNA, 261 bp, Glycine max
ggtgtcaaagttgatgtcctgctccaagagtttcaaggatatggtgggagggtgaaacttgcaaggaaataccaccaggcattggaggcatcaatcgctaggaacttccctgacaatggaatcatttgttgcatgagtcacaacactgatggattatacagcgcaaagcgttcagctgttattagggcatcagatgatttctggccaagagaccctgcatcccacgattcacattgcatcagtggcttacaatactatttt

SEQ ID NO: 172963 - DNA, 261 bp, Glycine max
ctcaaaaactatatatacgtggaagcagataaagaagcccatgtcagagaggcttgcaaaggtctgcgcaatatatttggccaaaaaataacacttgttccaatcagagaaatgactgatgttttgtctgttgaaagtaaagctattgatcttgctagagatacttgggtcagattgaagatcgggacatataaaggggaccttgccaaagtagtggatgttgaacgtgcggcagagggttactgtcaaattaattccaag

SEQ ID NO: 172964 - DNA, 260 bp, Glycine max
ccaggctcttcatcaatgaactccaatggttaccctgcttcctccttcaaaatccccaccgtcaagttcaccaagctcttcatcaatggacattttgttgattcactttcaggaggagaatttgagacaatagacccaagaaccggagaggtgattgcaaggattgcagagggaaccaaagaagacattgaccttgccgtcaaagcgtctcgtctggctttcgactggtccatggcctcgtatgcctgccgtagaaagag

SEQ ID NO: 172965 - DNA, 161 bp, Glycine max
gcgcaaagaaaagtaaactctgccacaacaatagtgttcaaaatggtagagggaaaaggcagaatttgtgtcactggaggcacaggattccttggttcatggatcatcaagagtctccttgaacatggatatgctgttaataccactattagatctgaccc

SEQ ID NO: 172966 - DNA, 244 bp, Glycine max
agcttgaatcccaacgctccgatgttcgtgccactcgcctatcggacggtggaggatttctccgaccagtggtggaacctcgttcactcctccccctggttccgcgactactggctccgcgagtgcttccaagatccccagttccaaaacgacgacgctttcgacttcgactttgacctagatctccaagatgaagatgaaaaggaacgaaaggaagggaaggaggtggtgtctggggggtgct

SEQ ID NO: 172967 - DNA, 124 bp, Glycine max
ggaagcgagctgatgctgacaagaatgacaaatctgtgaaggatctcgttctcctactctttgagactgctcttctaacttctgggttcagccttgatgatcccaacactttcggtaacaggat

SEQ ID NO: 172968 - DNA, 263 bp, Glycine max
gaagaacagagagagatccatccatcaattccaatggccgatcagctcaccgacgaacagatctccgagttcaaggaagccttcagcctcttcgacaaggacggggatggttgtattaccaccaaggaacttgggaccgtgatgcggtcacttggccagaacccaactgaggcagagctgcaggacatgataaatgaggttgatgctgatgggaatggtaccattgatcccagaattcctgaatctcatggctcgcaagatga

SEQ ID NO: 172969 - DNA, 251 bp, Glycine max
ctcagatccaagcttgggagacagagaaagagaaagagaatggacgccattgattctgtgttcgatccgctgagagaattcgcaaaggacagcgtgaggctcgtgaagcgctgccacaaacccgatcgcaaagaattctccaaggttgccgtccgtactgcaattggtttcgtcgtgatgggattcgtcggtttcttcgtgaagatcattttcattccaattatttatcatcgtcggatctggttaggatg

SEQ ID NO: 172970 - DNA, 258 bp, Glycine max
caagaaacagtcagaatcagaatcagaagaagcgagcaaagatgtcgggtcgtggaaagggaggcaagggtttgggtaagggaggagccaagaggcacaggaaggtgctccgcgataacatccagggaatcacaaaacccgccattcgccgtttggctcgcagaggcggcgtcaagagaatcagtggcctcatctatgaagaaacccgcggcgtccttaagcttcctcgagaacgttattcgcgacgctgttacctac

SEQ ID NO: 172971 - DNA, 260 bp, Glycine max
cagaaaccctaatttctcaaacattcagagggcacccggcaacaccaaaaccaccaccgcctctcctacctcccggagccatggccgccaccgactcctccgctgcttcgtcacgccagctttcgcagagggagacggacatccagatgatgctcgccgccgacgttcacctcggcaccaaaaactgcgacttccagatggaacgctacgtcttcaagcgccgccgatggtatttacataattaaccttggaaagacatg

SEQ ID NO: 172972 - DNA, 258 bp, Glycine max
gaaaaatggttgacactttcagtatagagagcaggcttcttataagagagtttgatgaagatagagatgttaaggtggtggggaagcttgagaagaactgtgagattgggactaaaaagggggtctccattttcaccaacatgatgggtgaccctttatctaggattaggttctatccccttcatgttatgttggtggctgagctgcttgaaagcaaggagtgtcggtgtggttcgagggtgcattaagagtatgcga

SEQ ID NO: 172973 - DNA, 139 bp, Glycine max
gtgtctagtcagcaacagttccgttacacgcagccaccgtcaaaggttcttcatttgagaaatttgccgtgggagtgtacagaggaggaactaattgagcttgggaagccatttgggaaagttgtgaacacaaagtgca

SEQ ID NO: 172974 - DNA, 136 bp, Glycine max
gttgctccttcgccacaactctctgccaacatgggtatctccagagattctatgcacaagaggcgtgccactggtggcaagaagaaggcctggaggaaaaagagaaagtatgagcttggtcgccagcctgctaaca

SEQ ID NO: 172975 - DNA, 136 bp, Glycine max
ctaacacttgaaatggatgaggagtatgaaggaaatgttgaggctactggagaggattattccgtggaacctgctgagagcaggaggccattccgtgctctccttgatgttggtcttattaggactacaaccggta

SEQ ID NO: 172976 - DNA, 125 bp, Glycine max
tgcttctcacaaggctgttgatgaatacaaggaggccaaggcgcttggagtggataccgttccggtcctcgttggccctgttacatacctgttgctctccaagcctgccaagggagttgagaaat

SEQ ID NO: 172977 - DNA, 256 bp, Glycine max
gcagagtagagcagcacagaagagggaaaacggcaccgccgccgtagaagaaaacaaccatggtgcacgtctccttttacaggaactatgggaagacattcaagaagccgcgtcgtccgtacgagaaggagcgtctcgacgcggagttgaagctggttggtgagtacgggcttcggtgcaagagagagctgtggagggtgcagtacgcgctcagccgcatcgcaacaacgcgcggaacctcctcaccctcgacgag

SEQ ID NO: 172978 - DNA, 257 bp, Glycine max
ccaattccttcttctcccagaatcggtcactaaatccgcaatcatgaagctcgataccaccggtctcgaatcgtttcccacactgcttgcgcctcaaaacgacgtcgttggagaactctccgccgctccatccttcgaccttccgaattccaacgatttcgatgggtttgtgacagaagctattcagatggtgaagcccgcgaagggtactacgactcttttttatatttaaggagggtgttatggtagctgctgat

SEQ ID NO: 172979 - DNA, 212 bp, Glycine max
gtcgagatcgagcctcggaagagggaatcgcagcgaagtccactatgccgaagcaaattcatgagattaaagacttcctcctcactgcaaggaggaaggatgcacgctctgtgaaaatcaagcggagcaaggatgtagtgaagttcaaggtccgttgctccaaagtactgtacactctgtgtgtgtttgattctgagaaggttgataagttg

SEQ ID NO: 172980 - DNA, 247 bp, Glycine max
agaaaattagggtttgcagtcactgctttgtttagatcagaaccagatcgtgttctcttcttccattggcaaacatggcaactcaaatgagcaagaagagaaagtttgtggcggatggagtgttcttcgccgaactgaacgaggttctgacacgtgagttggcggaggacggttactccggcgtggaggttagggttacgccgatgcgcaccgagattatccagagccaccagaacccaagcgttct

SEQ ID NO: 172981 - DNA, 225 bp, Glycine max
  unsure (1)..(225): unsure at all n locations
gcgacttggaagctttatggagatgctctttggtgggcgttatgtgctacttttgatgtcactattttcaatttattgtgggttaatctacaatgaattcttctctgttccttatcacatattcggtgcatctgcttataaatgccaagatagttcatgcagggatgcgcatactattggcttagtanaatacagagaaccatatccatttggtgtgacccattt

SEQ ID NO: 172982 - DNA, 252 bp, Glycine max
attctctctactactgctagctgtgacttgttttgagttcaatcaaatcgcattggtatctgaaatcaggaaagatggttagcgtagtgagatcaggcaggcacaaagggcagaaggcccagcaaccatccttgccattggaactgcaaacccaccaaaccgtgttgatcagagcacctatcctgattactacttcagaatcaccaacagtgaccacgaccgagctcaaagagaaatttcagcgcatgtgtg

SEQ ID NO: 172983 - DNA, 194 bp, Glycine max
tggtttttcgaattcccattcttccttccttccttctgcttttatcgatctccaacgaaaccaaaccatgtcgctcaggccaaatgccagaaccgagattcgccgcaaccgttacaaggtcgccgtcgacgccgacgagggccgccggagaagagaggacaacatggtcgagatccgcaagagcaagcgcgaag

SEQ ID NO: 172984 - DNA, 282 bp, Glycine max
tctggcttggcctagcgcttattctctcgcattccgtggagatctagtgcttctgctgcaagacctcgctgaaaattagggtttcgattcggaggtagacgaagatgttcggaagggctccgaagaaaagcgacagcaccaggtactacgaaatcctcggcgtttccaagaacgcttcgccggatgacttaaagaaggcttacaagaaagccgccattaagaaccatcctgacaaaggcggggatcccgagaagtttaaagagcttgctcaagcctatgagg

SEQ ID NO: 172985 - DNA, 277 bp, Glycine max
gttttcctcttctgaatccaccgccactgcagcgtggacggaatcggagtgcagccatatcagcagcagcagaagtccttgaagtgctgctctagtttgaggcacaatgagattggagaaatgctggttttgctcttcaaccatataccctggacatggaatccagtttgttcgtaatgatgcaaagatttttcggttttgtagatctaaatgccacaagacctttaaattgaggagaattctcgtaaggtaaaatggaccaaggcatatcgtcgag

SEQ ID NO: 172986 - DNA, 275 bp, Glycine max
caacgaaataactctaccgtgccctacgataaggggtttctcagagcaggagcaatgtcttccccttatctacctgccacaactgactcacttgctctcgcaactgaggccaaagacccatctgaggccatctccattctttatcgggtgcttgatgatccttcttcttcaccagatgctctgcgtatgaaagagcaagcaatcacaaacctcactaagcttctcactgatgagaataggggagaggatctgcgcagcttcttactcagttgagg

SEQ ID NO: 172987 - DNA, 274 bp, Glycine max
gttgtgtttgctttggagaaacgagttggtgttctttgttggcgaatactcactcacgcgtttgtagttgcaggctctaatcagatcccaaatgatcaactttgtgcttctcattagtcgccaagggaaggtgagattgacaaaatggtactcaccttattctcagaaagaaaggagtaaggtaatccgtgagctcagtggaatgattctttcccgtgcgcccaagcaatgtaattttgtggaatggcgaggacataaagttgtttataaaagg

SEQ ID NO: 172988 - DNA, 271 bp, Glycine max
ccagtgaaagaaaggcagcgatggaagaagacttcgacatccccggcggcgaggaaatggatctcggcgaagacgaggtcggcgaggagagggagatcggctctggcggcctcaagaagaagctcctcaaggaaggtcaaggctgggaaacccccgaagtcggtgacgaagtccaagttcattacacggggactttgctcgacgggactaagttcgattcgagccgcgacagggattctcccttcagcttcacgctcggacaagggcaagt

SEQ ID NO: 172989 - DNA, 273 bp, Glycine max
cttgagaggaacaggaaggacaaggactccaagttcaggttgattcttgttgagagcagaatccaccgacttgctcgctattacaagaagactaagaagctcccaccagtctggaagtacgaatcaacaactgctagcactctggttgcttagagaatgtatcaactttcatgggttttgctaccgtgcagtcgccgttgagctagcaatttgccatatcattttgatgtttatttgaaggctggataggttatgtggcttaattttgttcag

SEQ ID NO: 172990 - DNA, 273 bp, Glycine max
atttggagtttggagcgactgaactaatcattaatttgcactcgctgtttcagcttcatcacccttcttttgcatcatttatatctcttgagaaatggcacaagaaacctttctattcacatctgaatctgtaaacgagggtcaccccgacaagctgtgcgaccagatctctgatgcagtacttgatgcgtgccttgaacaggaccctgacagcaaggttgcctgtgagacatgcaccaagaccaacatggtcatggtcttcggagagatcac

SEQ ID NO: 172991 - DNA, 279 bp, Glycine max
ctttccctcttgttctatgctttcaagtagtaccaattgggcactttgtttagtgtcttcattttttttttcatcctcatcaaattaaccccctaaacatcatttagctagctagccaaattaattattaattaggcaaataatgggaaacccagaatccaatttgccacccggttttaggttccacccaaccgatgaggagctcattcttcactaccttagtaaaaaggtagcatcaatacccttgcccgtttccatcattgcagaggttgatatcta

SEQ ID NO: 172992 - DNA, 272 bp, Glycine max
gttaaatagaaaagaggagtttgagaatggcaacgatcagcgcggttcaggtggagttcctggagtttccagcggtggttacttcaccagcctccggcaagacctatttcctcggcggcgcaggggagagaggattgacgattgaggggaagttcataaagttcacaggcataggagtatacttggaggataaggcggtgccatcactcgccgctaagtggaagggtaaaacttcagaggagttagttcacaccctccacttctacagggat

SEQ ID NO: 172993 - DNA, 273 bp, Glycine max
ttatcatttctccatttccattttctctctcacttttcaagaatcgtaagctatgggaaagtcttacccaactgtgagtgctgattaccagaaggccgttgagaaggcgaagaagaagctcagaggcttcatcgctgagaagagatgcgctcctctaatgctccgtttggcatggcactctgctggaacctttgacaatggcacgaagaccggtggacccttcggaaccatcaagcaccctgccgaactggctcacagcgctaacaacggtct

SEQ ID NO: 172994 - DNA, 274 bp, Glycine max
gttaacacatcaatttctatctctcttatactctcactactctctttgctcattcttttctccactatggctgcacaagaaaacaacttccaagactacttgcctgtgatggccaacaagcttggtggggatggcctaattgatgaactgtgcaatgggttcgatcttttgaaggattctgataaaggggtcatcacttttgagagcctcaagaggaattcttacttgcttggtcttcagggtctcagtgatgaggatcttcgctccatggttt

SEQ ID NO: 172995 - DNA, 288 bp, Glycine max
cgaatagattatcctaagtctttgggaatagtgctgcaatggcttcaagtcaggaggaggtgacccttttgggagctactggaagcccatttgtgtgcagggttcatattgccctcaagttgaagggagttcaatacaaatatgtcgaagaaaatttgaggaacaagagtgaactgcttctcaaatccaacccagttcacaagaaggttccagtgtttattcacaatgagaagcccatagcagagtctcttgtgattgttgaatacattgatgagacatggaagaaca

SEQ ID NO: 172996 - DNA, 187 bp, Glycine max
atccgatcctctgtcctctcgaagctttcatcgttcaacatattctcaccatctcagtcatgggcctgctatcttgttttaggtctaccgtcctgagaaaatgttccaaaggaagctctggcatgtcaagattcctgtatacgaacaattttcaacgaaacttgatttcgtctggtggaaatgaatc

SEQ ID NO: 172997 - DNA, 284 bp, Glycine max
aaaaaattctctcttttctctgagtcgcagcttttacgttttcctaattctttgtccttagcatcaccatctccatggccaacaccaaacacctcacatttactttcaccatcgttctcacgctcctcttctcattcgccacagcaaaatccccaacggctttgggtgtccagaaggagaagctcagccaccttcacttcttcttccacgacatagtgagcggtccaaagcccaccgcggtgagagtggcccaggcccacatgaccaacacctcctccacgctt

SEQ ID NO: 172998 - DNA, 184 bp, Glycine max
cacaattcacaacaacatacaaatcccaaatcctatcttttctcttctcatataaaagaacccttctttcgaatccttcccgctcttttccctctgatttaattcatgcgcagatccaaaccctaatccatctctccgagctctttgatttttgagttaataaaaaaaaaaaaaaattagggtt

SEQ ID NO: 172999 - DNA, 246 bp, Glycine max
cactgccactgaacacacagcaatggcagcttcttcttctcttttctcctcttcaatgcatatggagatgtttgctccaaagacatcaaagtgtccccaaaattttgtatgctgtcatagcaaaatctcctatatagaacctaattatttaaaaccagtatgctgtcctaattcaagatctttaagtatgaatatgtcatcaaaatgggaacaaacggatcgaagagatgcattgcattgccgcgc

SEQ ID NO: 173000 - DNA, 261 bp, Glycine max
gaaattgctttgctgtaagtttctgattcctttcttcagaattccaagttttcatttcgttagggacaaaagattgtgagatagagtatggctggaaaaggcgagggtcctgctatcggaatcgatttgggaacgacgtactcttgcgtcggcgtgtggcaacacgatcgtgttgaaatcatagccaacgaccagggtaacagaactaccccatcctacgtggctttcaccgaaacagaacggttgatcggcaatgcggcg

SEQ ID NO: 173001 - DNA, 181 bp, Glycine max
gctggctaagacagtcttgacgctgaaagaagataaaaaacagaggctgcacaagctccaagaattagcttctcagttaattgatctttggaatctaatggatactcatcccgaggaaaggagactatttgaccatgttacctgtaatatgtcagcttctgttgatgaagtcactgttcct

SEQ ID NO: 173002 - DNA, 278 bp, Glycine max
caatccacacccaacattctcacaagtcacagccaaacaccatttcattaattcttgcagaatattgcttagttttgttttatctgaatttggaaacagcttttgaatggctttttcaagagttgcactgctaatatgcacggtcgggtattttgtgattgcctctgccggcaatttccaccaagattttgatatcacatggggagatggtcgggctaagatactcaacaatggagagcttctcactctgtcacttgacaaagcctctggctcgggtt

SEQ ID NO: 173003 - DNA, 273 bp, Glycine max
ccctttccctagtttagctacttacctcaatctttctcatgggaaagtttgccctagccaatatcctcttggtccttctcttgaacttgagcactttgctcaatgttcttgcttgtccctattgcccttacccttctcccaagcctccaaaaaagcctcccgttgtgaaaccaccggttcacaaaccaccaaaaccatgtccaccacccaagtcatctccaaaaccaccccatgtacaccctccctatgttccatgcataccttcactaccct

SEQ ID NO: 173004 - DNA, 266 bp, Glycine max
cttctttgtaacgcctgtgccatggaggcacttccaatttaccttgacaagatttttcatccctttgtagcagtagtgttatctgtgacttttgttctagcttttggagaggttatcccacaagctatatgcacaagatatggactctatgttggtgctaattttgtggggcttgtgcgtgtcctgatgatcatctgttatccaattgcttaccctattggaaaggttctggatgttttacttggacacgatcatgcactgtttag

SEQ ID NO: 173005 - DNA, 261 bp, Glycine max
agaaaaagaaaagcattttacgttcgaagtcgagtcgaagagttttgggagccaaatgggtcttctgagcatcataaggaaaatcaagcggaaagagaaggaaatgcgaattctaatggtcggattggacaattctgggaaaaccacaatcgttctaaagataaacggagaggacacaagcgtcatcagtcccacgctcggcttcaacatcaaaaccataacttaccaaaagtataccctaaatatatgggatgttggggg

SEQ ID NO: 173006 - DNA, 271 bp, Glycine max
ctggagatgaagaaaaacttacaatagtgatgttcccatggctagccttcggtcacatgatcccaaaccttgagttggccaaactcattgctcgaaagggccaccaagtgagtttcgtatccaccccaagaaacatacagcgtctcccaaaaccgtcaccaaatacactcatcaatttcgtgaagcttccactccccaaaatccaaaaccttccagaaaacgcagaagccaccactgacatcccctacgacgtcgttgaacacctcaaagt

SEQ ID NO: 173007 - DNA, 273 bp, Glycine max
agaacaccttagcccaaccggatcttcacgattaggagatggctaagtcgaagaaccacaccgctcacaaccagtcctacaaggcccacaagaatggcatcaaaaagccaaagaggcaccgccacacttccaccaaagggatggatccaaagtttctgaggaaccaaaggtacgcgaggacgcataacaagaagagcggtgaaacagccacggaagaagagtaaagtgtcactctcaaatggggctattaggatttgatttgctattcaagtc

SEQ ID NO: 173008 - DNA, 265 bp, Glycine max
attttcttactttcctctcacgctctgccacaaaactccgtctccgcaataacggaataaaaaaacaagtttaattactattatggcgccgagggatcataagacaagcaacgctaaggctaacggtaacggtaacagcggggtgaaggaggtgcattttcgtggagtgagaaagaggccgtgggggagatacgccgcggagatcagagatcccggcaagaagagccgcgtctggctcggaaccttcgacacggcggaggaggca

SEQ ID NO: 173009 - DNA, 261 bp, Glycine max
gagtttgttgtgagctataagctagtttatcgtgaggagaatatgaagttgtttgttttctttgttgctgcagtagttttggtagcatggccatgccatggcgcaggctaccaaaggttccctctccgaatgaaaactggctatggtgagcgttcttcggaggtaaaatgcgcaagttttaggcttgctgtggaagcacacaacatccgagcctttaaaaccattcctgaagagtgcgttgaaccaacaaaggactacatt

SEQ ID NO: 173010 - DNA, 274 bp, Glycine max
gttttggggagagttcatccaagcaaggaactcactcattcactcactagtcactaccaatgccgaaacaaaggttggagggtaaggtggctcttatcactggagcagcaagtgggattggagaagagacagtgagattgttcgctgaacatggagcacttattgttgcagcagatattcaagatgaacaaggccaccaagttgcagcttcaatagggtcagagagagtgacctaccaccattgtgatgtgagagatgaaaaccaagttgaaga

SEQ ID NO: 173011 - DNA, 272 bp, Glycine max
aaaacaatttgctcacaaaggaggaaaaatggcacctttcgtttccctctctttgttgcttctctttctcaaccaccccctcctttccctctcaaccaaccctgaagggaacgctctgcatgctttgagaagcaggctttctgatcccaacaatatgttgcagagttgggacccaacactggttaatccctgtacttggtttcatgttacctgtgactccaacaatcatgtgattcgcttagacttgggcaactctaacgtttctggaactc

SEQ ID NO: 173012 - DNA, 191 bp, Glycine max
cttttggggaagaggtcgaggtttcacagcagcaatggtgtacgtcaaggctcagaaatcaaaagcctacttcaagagatatcaagtcaagttcaagagaagaagagagggaaaaaccgattaccgtgccaggattcggttgattaatcaggacaagaacaaatataacactccgaaataccgatttgttg

SEQ ID NO: 173013 - DNA, 269 bp, Glycine max
caactttctaaaaccaaatcggtttgaatcctcatttcccgcctctcactggaaagcagcaaaatcacctttctctactatctatctgttccttttgtactctgagtgggtagaagtcatggtaaggctcactgctgacttgatttggaaaagccctcatttcttcaacacgattaaagagcgtgagttagatctcagaggcaacaagatagctgtaattgaaaacttgggtgctactgaggaccaatttgacgacatagacttatctg

SEQ ID NO: 173014 - DNA, 238 bp, Glycine max
ccctgctcttagcctcccctcttcgccgagggcacgccggatggcgtgcgcgtccgacgccgacgacatcctgatccgtcaggtggtgccagatgttggcgaagcgaagaggaggacaacctgctgaacgccgaacaccgattcgcgagcttcaaggccaagttcgccaagacctacgccaccaaggaggagcacgatcatcgcttcggcgtcttcaagtccaacctccgcagagcca

SEQ ID NO: 173015 - DNA, 267 bp, Glycine max
caaaacattgcttctatgaacttgatgtgcattgtagcaaatgtccttccgcagtattgttcgtgatgtaagggatgggtttggaagcttatcaaggaggagtcttgatgtaaggatttctggtgggggcaagttgaatagtttggtccatgatgcgcatgatcgccagctagttatacagaacagcaggtgggctagccttccgcctgagcttctttgtgatgttattaaaagattggacgatagtgagagtacatggcctgctcg

SEQ ID NO: 173016 - DNA, 259 bp, Glycine max
ctttctgattgccttcaaatcacacactctcttcaatttctagggttttgctattgctttgcctccgttccccctttctcacaaaaacaacgccttttctcttctccttcgtatctattctttgcgtttagttcttggttgattgatggcattcacagcgtaattcgttgctgcattttaatcgatttatctaaccaggactgaatgacctaatggagtctaaatgtgggataaagaagtctagtagtagtagtagtaa

SEQ ID NO: 173017 - DNA, 274 bp, Glycine max
  unsure (1)..(274): unsure at all n locations
ctgccttgcaccctttgtcaaggtccttgatcagaaattcggtatcatcaagggtaccatgaccaccactcactcctacaccggtgaccaaaggcttcttgatgcgagccaccgtgactgaggcgtgcaagggcagcagcactcaanattgtccccacttcaacaggagcagnaaaggcagtggccttgtcctcccaacnctcaaagggnaaanttcaanggtattgcatccggngccaacaccgaagtctaatggtgnacctnagnnnaaang

SEQ ID NO: 173018 - DNA, 275 bp, Glycine max
actcgagcgattcggctcgacttcttttgttgttctgtgtacgtgtttgtattttcactcacctgaaaatgtcttactgcggtggtaactgtggttgcggaagctcctgcaagtgcggcaacggctgcggaggctgcaagatgtacccagacttgagctacactgagtcaaccaccaccgagaccttggtcatgggagtggcacctgttaaggctcaatttgagggtgctgaaatgggtgtgcccgctgagaacgatggctgcaaatgtggacca

SEQ ID NO: 173019 - DNA, 270 bp, Glycine max
gtggtagcagcagctgagcttgtttccgtcgccgcttcacccaccgtagcaaccatgatcattcccgagaagaaccgtaaagagatctgcaaatacctcttccaagagggagtttgctttgcgaagaaggacttcaatctggcaaagcacccagagattgatgtgccgaatctgcaggtgataaagctgatgcagagcttcaaatccagagagtatgtgagggagacatttgcgtggatgcactattactggttcctcaccaacgatgga

SEQ ID NO: 173020 - DNA, 264 bp, Glycine max
atcactttctacttgtacacatctgcatacaaatatcttgcaagggttacgccaaacaattcttgacttaatttctgattttggggacaaaaacagtgtgaagggagtagttgaaaaaaaccacagttgtgaccaagaagaacgcctgctagaatggggtgaaagcaatggtttaatgacacagttaaaaatagcttatattgaaggagccagtcggggtgcaatagcagggaaagatctaaaagttggagacatggctttgga

SEQ ID NO: 173021 - DNA, 254 bp, Glycine max
cccatgatggctgcctactaccccaacaacgtcaccactgatcacattcaacagtacctggatgagaacaagtccttgattctgaagattgttgaaagccagaattctggcaagctgagcgagtgtgccgagaaccaatcaaggctgcagagaaatctcatgtacctagctgcaatagctgattctcaaccacaaccatctccattggctggtcagtatccttctagtggacttgtgcagcagggagcacacta

SEQ ID NO: 173022 - DNA, 230 bp, Glycine max
ctcatacctagctattcctacctaaacgaaactctgtatgacattgattgcgtggcgaggattttaggttattttttggaagaagaacgaaacgttgctgcaatcgacggccgcgctccgagatcgccggggctgatgctcgttggaaaactcatcgatggttatctctcggagatcgctaccgatgcgaatttgaagccgtcgaaattctacgatctaaccatctcagt

SEQ ID NO: 173023 - DNA, 268 bp, Glycine max
cagcgagttaggcgcggcgggatcagcacaagattgcaaaatgaagttcaacattgcaaatcccagcactcgggtgccagaagaagctggaaatcgatgacgacctgaagcttcgagcattttgggacaagaggatctcccaggaggttcttggtgatgctctgggtgaggagtttaaaggatatgttttcaaaatcaccggtgggtgtgacaaacaaggattccctatgaagcagggagtgctgacccctggtcgtgttcgactttt

SEQ ID NO: 173024 - DNA, 269 bp, Glycine max
agctgcataaaccccacaacaaccccaaacccttcactctttcgattttcgaaggtaaaaagatgaatctgaagaacatgaaggttccgaacgttccaggtggcggggggatctctgcgctgctgaagcttgggattgttggtggaattggtttgtatgcagctgctaacagtctctacaatgttgatggaggtcaccgagccattgttttcaaccgtctagttggtgtcatagacaaggtctatcctgaaggaactcacttcataatt

SEQ ID NO: 173025 - DNA, 265 bp, Glycine max
ggctccggcaagctcgaatgcgccggaaacgccgccacgccgcctgctaccttagccgagttcactctcgacggcgccggaggctcgatttcttcgacgtgagcctcgtggacggttacaacgtgccgatgctggtggctccccagggtggctccggcgataactgcacgagcactgggtgcgttggggacctgaacggcgcgtgtccttcggagcttagggttacgagcgtggatgggaaacagagcgtggcgtgtaagagcgc

SEQ ID NO: 173026 - DNA, 260 bp, Glycine max
attcccttcacaagattctcacaaacaactcttgagaaagaaagaatggctgccaacacattgatgagttctgccatctcagccttcccatctctcctttcctcctcaaaatccagatttgccgcagcagttcctctttccagctttgttgtcaccaatgcctcttcttctcgcttttccatgagtgctgattggatgcctggccagcctagacccccctaccttgatggttcagcacctggtgactttggattcgaccc

SEQ ID NO: 173027 - DNA, 187 bp, Glycine max
ctcttcttctcttgcggctagggttttagcgcacttcttctagatttaaggaagatgggtaaggaaaaggttcacatcagtattgtggtcattggccatgtcgactctgggaaatccactaccactggtcacctgatttacaagcttggaggcattgacaagcgtgttattgagaggtttgagaagg

SEQ ID NO: 173028 - DNA, 267 bp, Glycine max
cacagagagagaagagacaatgaagtttaacccaagggtttcctcaagccgtcgaaagagccgcaaggtcacttcaccgctccgtcgagcgtgcgtcgcgtcctgatgagcgcgcctctctcgaccgatctccggtcgaagtacaacgtgcggtccattccggttcgcaaggacgacgaggtgcaggtggtgaggggaacctacaagggccgcgagggcaaagtggtccaggtctatcgccgcaagtgggtcatccacatcgagcga

SEQ ID NO: 173029 - DNA, 198 bp, Glycine max
cttgaaacacaaagaagaaaaaatgggttcctctttgtggacttgtctgattttgttatcacttgcttctgcttccttcgccgccaacccaagaacaccaattgatgtgccatttggcagaaactatgtgcctacttgggcctttgatcacatcaaatacctcaatggtggttctgagattcagcttcatcttgataa

SEQ ID NO: 173030 - DNA, 264 bp, Glycine max
gtgctaaatccctagtaagccgccatggtgaagtactcaagggagcctgacaatccaaccaagtcttgcaaggctagaggcgccgaccttagggttcattttaagaacactagggaaactgcctttgcaatcaggaagttgcccttggttaaagctaaaaggtacttggaagatgttcttgcgcacaagcaggccattccgttcagacgtttctgtcgtggtgttggaaggacagctcaagcaaagaatagacactctaatggc

SEQ ID NO: 173031 - DNA, 260 bp, Glycine max
cggctcgagcggctcgagcggctcgagaacaatttaccagctatacttgttccttttgaaggttagaagtcctacaatacaaacaatggcagctactcaggaagatgtgaagcttttgggtattgtgggaagcccatttgtgtgcagggtccagattgcccttaagttgaagggagttgaatacaaatttttggaagaaaatttgggcaacaagagtgatttgcttctcaagtacaaccctgttcacaagaaggttccag

SEQ ID NO: 173032 - DNA, 255 bp, Glycine max
atttaccattttgttggtacctccacattcagtgaatacactgttgttcatgccggatgtgttgccaaagtcaaccctgctgccccacttgacaaaatttgtgttctcagttgtggaatttgcacaggtcttggggctactatcaatgttgcaaaaccaaaacctggttcttctgttgccatttttggacttggagctgttggccttgctgctgctgaaggggcaaggatttctggtgcatcaagaattattggg

SEQ ID NO: 173033 - DNA, 263 bp, Glycine max
cgcgacacgaaatattgggaaccaagcaaaatatctatggctgacgagccattatatccaatagcggtgcttatagatgagttgaaaaatgatgacatccagctgcggttaaactcaattcgtaggctatcatcaattgcacgtggctcttggggatgagcgtgcccgtcgagaattaattccatctttaattgagaataatgatgatgatgacgaagtacttcttgcaatggcagaatagttggagagtgttattccttatg

SEQ ID NO: 173034 - DNA, 262 bp, Glycine max
tgcttctggaaaagcccgtcgcgctcgacgtggcccagttcgaccgcattctcgaggcctgtgaatccagtggggtgcagttcatggataacaccatgtgggtccataacccaaggactgctgccatggcccacttcctcaacgatgctcaacgttttggtaacctcaaatcgttgcaatgcaagagttcattgagtattttgattgccatatttgcttggcctaacttctaaaaggagctgctgaataaataactcaaagg

SEQ ID NO: 173035 - DNA, 193 bp, Glycine max
ataatatctgcccgtcctgccatcatgatcttgggaatataagatgtttggctttggagaaagtggcagaatcattggagcttccttgcagatatcagagtcttggttgccatgatatattcccgtactatactaagctgaagcatgagcaaaattgtggatttcgtccatacaattgcacctatgctggatc

SEQ ID NO: 173036 - DNA, 198 bp, Glycine max
ccagaccttaatttttctctcattcgcttcaaatttcaggaaatcaattatggctcaaccctcaacaagaataggccttgctggactggctgttatgggccaaaatctagcactcaatattgctgagaaaggctttcccatttctgtttataaccgaaccacttccaaggttgatgagactgtagaccgagcaaaaca

SEQ ID NO: 173037 - DNA, 202 bp, Glycine max
gttcatcaacatcttcaatgatcgcttgttctgaccaaaggtgcaataatggaaaacaatcatcagatcccacctgttccagtcagaacaaccagtgctcctacactttccagtatggagatgggagtgggacatcaggctattatgtgtcagatatgatgcatttgaacaccatttttgagggatccatgaccacaaattc

SEQ ID NO: 173038 - DNA, 241 bp, Glycine max
aggatgcacagatggatggtggtggcgggtccccggcacaagatgagtcaatggatgcatttactagtgctcaacaaagaattgataattacttaacccaaatgaaggcgacacagagagagaaggtactcctctaatggcagatggcaagcccgtggttgtaaatgacaagcaggttgagaagtttctttacacgacgcttaagctcaattcgacaattttgagatactcgagaatggct

SEQ ID NO: 173039 - DNA, 222 bp, Glycine max
ccgagatctaaagcctagtaatttgctattgaatgccaattgtgaccttaagattgcggactttggtcttgctagaaccacatctgaaactgactttatgactgagtatgtggtcactagatggtaccgagctcccgaattgcttcttaattgttcagaatatacagcagccattgatatatggtctgttggttgcatacttggtgaaatcataacaagaca

SEQ ID NO: 173040 - DNA, 255 bp, Glycine max
gtttcctacaactataaagacatgatagcttagttcaaattcacaatttacaacattagtcaagtgtttttgtatctgttttaatggagagaaccaaatatggcaagagatttcaaggtaaggtagccattgtgacagcttccacccttggaattggctttagcatagccgagaggcttggtttggagggtgcatctgttgtcatctcttctcgcaaacagaaaaatgttgatgaggctgctggtaaactgagag

SEQ ID NO: 173041 - DNA, 258 bp, Glycine max
tgaggcggttcgagcacttcgatttccaccaaacacacacaaagagaaggaaagtgctgaaaagagaagagagagacaacagcaagagcaagagctggctaagcatattgcagaggaggatgacgatgatttctgataattgttttttttcaccctatgaattgctatctggataccttcatttccaacgtttgctcatcttttccttttgaagaactttcattatcatttcctttttcaaaaagtgaatttttcatt

SEQ ID NO: 173042 - DNA, 186 bp, Glycine max
ttatagtttactattgaaagatgggtttgaaaatggcaatactgatcctaggcctgctggccatgttccttttggtctcctcagaggtggcatccgcgaattcaaaagacgtgacaaatggagttgaagatgccagatatcctggtggaggctatggtgggggttacccaggcaatggcggtggtg

SEQ ID NO: 173043 - DNA, 184 bp, Glycine max
gcagtattgttgggtggcattcaactgttgggcaatgggctcgagtggataatatgaccatccttggagaagatgtccatgtatgtgatgaaatttacagcaatggtggtgttgttttgccgcacaaggagatcaagtcaaatattctgaagccggagattgtcatgtgagtcaggtcaatgat

SEQ ID NO: 173044 - DNA, 181 bp, Glycine max
actcgagcgaatcggctcgagttcaagatgaagttcaacattgcgaatcccaccaccggatgtcagaagaagctggagatcgatgatgacctgaagctgcgagcattttgggacaagaggatctcacaagaggttgttggtgatgctctgggtgaggaattcaaaggttatgtcttcaaaa

SEQ ID NO: 173045 - DNA, 258 bp, Glycine max
cggaaaagcactggcgcactaccctgaggcttctcttctcttctcttctctgtcgtgagtcaccatggtgagggttagtgtgctgaacgatgctctgaagagcatgtacaatgctgagaaaaggggaaagcgccaagtcatgattaggccatcctccaaagtcattatcaaattccttttggtgatgcaaaagcacggatacatcggagagtttgagtatgttgatgaccacagggctggtaaaatcgtggttgaatt

SEQ ID NO: 173046 - DNA, 193 bp, Glycine max
cgaacagccatggggatcgatctcaaggccggaggtaagagcaaaaagaccaaaagaacagcacccaagtccaatgatatctatctcaagctcttggtcaagctttatcgcttccttgttcggagaactggcagcaacttcaatgctgttatacttaagagattgttcatgagcaaggttaacaaacccccat

SEQ ID NO: 173047 - DNA, 264 bp, Glycine max
ctcgttttcgttctcgttctggtttatagatctttgcgaaggaggtttacagcgctcaaccaaagatgcagaacgaggaaggacagatcactgagctttacattcctaggaagtgctccgccacaaacagattgattaccgctaaggaccatgcatcggttcagatcaacattgggcatgtggatgagaatggcgtctacaatggccatttctccacttttgcactctgcggattcatccgtgctcagggtgatgctgacagtg

SEQ ID NO: 173048 - DNA, 265 bp, Glycine max
gatactcctgatatcagaaaaagaaaaaagaaaaaaatgtctctagtgactgcagagatcaaagccaaagcagaggtgtatcatggagatgaactctgccaagagaagtcaaagttgctgctaaaggaggtagggctacctaatgggcttttgccattgaaggacattgaggaatgtgggtatgagagggatagtgggtttgtgtggctgaagcagaagaagagcacaaaccacaagtttgagaagattgggaagctggtttcct

SEQ ID NO: 173049 - DNA, 254 bp, Glycine max
gttggccccaagacagttcacattccgactggggagaagctttatgtgtttgatgcagcccagagatacaaggctgaagggcaggacaccattgtgctggctggagctgaatatggtagtggaagttccagagattgggctgccaagggtcccatgctattgggtgtcaaagctgtgatagctaaaagttttgagagaattcatcgtagcaatttggtaggaatgggtattgttcctctttgctttaaatcggg

SEQ ID NO: 173050 - DNA, 204 bp, Glycine max
cggcgctcatcacactcttctactatgagtcttcttgatccttctttttctccttgaactcaaacatggcagatgaggtggttctgctagatttctggccaagtccatttgggatgagggtcaggattgcacttgctgaaaagggtatcaaatatgattacaaagaagaggacttgaggaacaagagtactcttctcctccaaa

SEQ ID NO: 173051 - DNA, 255 bp, Glycine max
tccatttccatttcctctctctcagtttccaagaatcttaagctatgggaaagtcttacccaaccgtgagcgctgattaccagaaggccgttgagaaggcgaagaagaagctcagaggcttcatcgctgagaagagatgcgctcctctaatgctccgtttggcatggcactctgctggaacttacgacgtgagctcgaagaccggtggtcccttcggaaccataaagcacccctccgaactcgctcacggcgcta

SEQ ID NO: 173052 - DNA, 252 bp, Glycine max
ctctccttcaaaatcgttgtcaatttcgcctctttctttctcaactcccttagattctctccatcgggtcttcaaaaatgcggatgagctgcaatggatgtcgagttctcagaaaaggttgcagtgaaaattgcagcatcagaccctgtttacaatggatcaaaagcccagaatctcaagcaaatgctactgtgtttcttgccaagttctacggccgtgctggtctaatgaacctggttaacgcaggccccg

SEQ ID NO: 173053 - DNA, 249 bp, Glycine max
agaagccaagctcagcacctccatcatccaagcgccataacgactctaggtcttcatatagcagtggtggatatggagatacttacgatggatttggtggcagctttggaatggggggtgggtataggtcaggtggtgcttatggtggtggtaggggtggtgcttatggtggctttggaagtgaatttggtgggtatggaggatatgctggtgagatggggccgtatagaggagatctctccctcgggt

SEQ ID NO: 173054 - DNA, 198 bp, Glycine max
  unsure (1)..(198): unsure at all n locations
gaagcgtgttgatagcatatgcgggtagcattggtattntcattcacgttatgtacgtttagagccatgctattgaatgagcaagtcccaaggccaagattgtcagggacagcaacggtgtctcagggttcgataagtctgatctgaagctggatgttttcatggttcagcacgacatggaaaacatgtacatgtggg

SEQ ID NO: 173055 - DNA, 189 bp, Glycine max
taagagttgctgcttcttccgccactcagcacttcgctccctctgtgcttcaccaaccatggccgaaatcgaagctaccgttccagatccctctcaaatcgacgtcaaacttttcaaccgctggagcttcgacgacgttgaggttactgatatgtctctggctgattacattggagtgtccccgtcaaa

SEQ ID NO: 173056 - DNA, 247 bp, Glycine max
tgcgcacttcttctagatttaaggaagatgggtaaggaaaaggttcacatcagtattgtggtcattggccatgtcgactctgggaaatccactaccactggtcacctgatttacaagcttggaggcattgacaagcgtgttattgagaggtttgagaaggaagctgctgagatgaacaagaggtctttcaagtatgcctgggtgctggacaacttaaggctgagcgtgaaagggaatcacattgata

SEQ ID NO: 173057 - DNA, 250 bp, Glycine max
gtagttgccatggttttgggtattgatgatgaatatggacctcagctttacaaatgtgatccagctggtcattactttggtcacaaggcaacaagtgctggattgaaggaccaagaggcaattaatttcttggaaaagaagatgaagaatgacccttcatttacatatgaggagacagttcagactgccatttctgccctgcaatcagttcttcaggaggattttaaggccactgagattgaggttggag

SEQ ID NO: 173058 - DNA, 249 bp, Glycine max
gtattttctcacttctcagcactcagcagcgatatcagttgaagaaacagatacaaacaaaagaggcagaagatgttgtgggtggacaaatatcgtcccaaaaccctcgaccaggttatggtccacaccgacatcgctcgcaatctcaagaaattggtaacggaacaggattgcccccatttactcttctatggcccatctggctccggcaagaaaaccctaatcatggctcttctccgccaaatgttc

SEQ ID NO: 173059 - DNA, 145 bp, Glycine max
gatggtcttttcaaaggttcccttgactatgaaagcttcagggatgtggacttggtgatagaggctgttattgagaatatttccttaaagcaacagatattttctgatcttgaaaagtattgtccacctcattgtatacttgcaa

SEQ ID NO: 173060 - DNA, 269 bp, Glycine max
cttcctcctctctccgcatcgctgcgttttccgaatcgaaaggtacgtaagtaacaatggtggaggccaagggtaggaaagaggaggtcgtcactcgagagttcaccatcaacctccacaaacgcttgcatggctgcacattcaagaagaaggctcctaaagcaattaaggagataaggaagtttgctcagaaagcgatggggacgaatgatgtgagagtggatgtgaagctgaacaaggctgtgtggagccaggggattcggagcgtc

SEQ ID NO: 173061 - DNA, 269 bp, Glycine max
attcctctgcgcaggaattaggaatattcgacaggtagagtttcttcaatggctcctaaagttgataagaagaatgatccaaaggcccaggccttgaagactgctaaggcagttaagtcaggtgctacctttaagaagaaggtaaagaagatccgaacttctgtcactttccacaggccgaagaccttgaagaaggacaggaaccccaagtaccctcgcattagcgccccgccgaggaacaagcttgatcattatcagatcctgaaata

SEQ ID NO: 173062 - DNA, 270 bp, Glycine max
ggaggatccgtgtgttccgcacctactggaacagaacccctccactgccacgtcagcagaagtgagaacaatgttgatagcgtttctctgtggacccttggatgcaagttggcgtacatttgggtgggtaattcagagacacagtgcccgggtcaatgcgcgtggccgttccaccaacccatttacggtccccagaatccacctttggttgcacccaacaacgatgtgggacttgacggcatgctgatcaatgtggctagtctccttgct

SEQ ID NO: 173063 - DNA, 146 bp, Glycine max
aaaggatgcgaggtcattgttagtggaaaactgagagctcagagagccaagtccatgaaattcaaggatggatacatgatttcttctggacaacctgtcaaggattacattgactcagcagtgagacatgtgctactaagacaggg

SEQ ID NO: 173064 - DNA, 268 bp, Glycine max
agccaagacaaagcacagaactggcatgtctactctgcttctgcagattctgtaactcaatgtgacaatgtttacactcttgagatgtgcatgactggcctggatagagagaaagcacaggttttctacaaagaacaatctgcttcagctgccatgatgactgttaattccggcattagaaaaattcttccagattccgagatttgtgactttgactttgaaccatgtggttattcaatgaactctgttgaaggcgctgctgtttcta

SEQ ID NO: 173065 - DNA, 161 bp, Glycine max
attcattcaagattcagcaagtgcgttttggaagcagagaccgaaatacttcgagatggcccgtacaaagcaaactgctcgtaagtcaactggaggaaaagctcccaggaagcagcttgcaaccaaggctgcacgtaagtctgcaccaacaactggtggtg

SEQ ID NO: 173066 - DNA, 155 bp, Glycine max
agaagctgttcatcttagatcaccatgactatctcattccatatttgaggaaaataaatgcaactaccacaaagacttatgctaccagaaccatatttttcttgaaaagtgatggaactttgacgccattggccattgagttaagtaagccgcat

SEQ ID NO: 173067 - DNA, 263 bp, Glycine max
ggcaaaggttggagttcatcattacaatgggaacaatgtggatttgggcactgcctgcggcaaatattacagagtgtgctgccttagcattattgatcctggtgattcggatatcattaagacactgcctggtgaacagtaaagtagtgttgaagttacttgcttgttattttctggttttagttgattcggactttgaaagaatatcttgttgagttgtagactttggtgtaaggtgcaaggtttttgtgtgttctagctag

SEQ ID NO: 173068 - DNA, 264 bp, Glycine max
gttttccaattcacagagcaacacaacgaaccaacaatggcgcacctcagccgcagtcgcagccgcagcacgggcaagcagcgctggagcaggtgcagtgcttcggtcgcaagaagaccgccgtggccgtgacctactgcaagcgcgggcgcggtctcatcaagatcaacggctgccccattgagctcgtggagccggagatcctccgcttcaaggccttcgagcctatcctcctgttgggtaagagccgcttcgccggcgtcg

SEQ ID NO: 173069 - DNA, 269 bp, Glycine max
gagacaatgaagtttaacccaagggtttcctcaagccgtcgaaagagccgcaaggctcacttcaccgctccgtcgagcgtgcgtcgcgtcctgatgagcgcgcctctctcgaccgatctccggtcgaagtacaacgtgcggtccattccggttcgcaaggacgacgaggtgcaggtggtgaggggaacctacaagggccgcgagggcaaagtggtccaggtctatcgccgcaagtgggtcatccacatcgagcgcatcacccgcgagaa

SEQ ID NO: 173070 - DNA, 197 bp, Glycine max
atccgcagctgctgttattcgcaccgcaaacaaacagtgagccatggccgtcggaaagaacaagcgcatctccaaagggaaaaagggtggcaagaagaaggcagctgatccctttgccaagaaggattggtatgacattaaggccccttctctttttcaagtgaaaaatgttggcaaaaccctcgtctctcgtacgc

SEQ ID NO: 173071 - DNA, 153 bp, Glycine max
cttccaaaccctaacactcctcttcctcttcgatcatcacctctccacaatgccgccgaagttcgacccctcccagatagtcgacgtcttcgtccgcgttaccggcggcgaagtcggcgcggcgagttccctggccccgaagatcggtcccct

SEQ ID NO: 173072 - DNA, 262 bp, Glycine max
ggcatctctctctgttttctagaatgggagctgggcgtgaagtctccatctcacttgatggagtgagggacaagaaccttatgcagctcaaaaagctcaatctcgctcttttccctgttcgttacaatgacaaatactataccgatgcactcgcttccggtgaattcaccaaactagcttactatagtgatatttgtgttggagcgattgcgtgccggctggagaagaaagaaggtggggggcagttcgggtttacatcatg

SEQ ID NO: 173073 - DNA, 266 bp, Glycine max
gtttggaatgcatttcccaagcaacgagtcttcggttcgaaaccagcagagagagagaagaagagaggaacaagaagaagaagatggtgtccttgaagcttcagaagcggctcgccgctagcgtcctaaagtgtggcagaggcaaggtctggctcgatccaaatgaagtcaatgaaatctccatggccaattctcgacaaaacataagaaagttggttaaggatgggtttattatcaggaagccaactaagattcactctcgctct

SEQ ID NO: 173074 - DNA, 260 bp, Glycine max
aaacaagcaattcctccaatggactgggaagagtatatttctgagattgcatctgacataatgaaggaacagagcccaaaaaggttgtttcaagttcgaggaaagctctatgagctgctaatcaattgcattcctccggagatcattttaaagaggcttctttatgagctattgaggaaactggatgcagaactaaagcatgaagtatgtcattgggctgcatattatgatgcgtctcggacagaaggcgatctttcaca

SEQ ID NO: 173075 - DNA, 265 bp, Glycine max
agaaacgtgaaattagggttcatcgaggaggaagaagaagaagaagatgtcgtacctgttgcctcacttgcactctggatgggccgtcgatcaagcaatcctcgccgaagaggagcgtctcgtcgtcatccgtttcggccacgactgggacgaaacctgcatgcagatggacgaggtgttggcgtcagtggcggagacgataaagaactttgcggtgatatacctggtggacataacggaggtgccggatttcaacaccatgtac

SEQ ID NO: 173076 - DNA, 143 bp, Glycine max
tggtaccacaacaactctctatcactcacaacactttcacaaacactttctgaaaaacaattcgtttcttttccctaccatggccagatcacaacagcgataccgaggcgtccgacaaaggcattggggctcttgggtctccg

SEQ ID NO: 173077 - DNA, 199 bp, Glycine max
cgagcttttgttgtttgtgtgtttgttttttctctcacctgaaaatgacttgctgcggtggtaactgtggttgcggaagcgcctgcaagtgcggcaacggctgcggaggctgcaagatgtacccagacttgagctacaccgagtcaaccaccaccgagaccttggtcatgggagtggcaccagttaaggctcaattcga

SEQ ID NO: 173078 - DNA, 262 bp, Glycine max
attgacaagcgtgttattgagaggtttgagaaggaagctgctgagatgaacaagaggtctttcaagtatgcctgggtgctggacaaacttaaggctgagcgtgaaagaggaatcaccattgatattgctttgtggaagtttgaaacaacaaagtattattgcacagttattgatgcgcctggacatagggatttcattaagaatatgattactgggacatcccaagctgactgtgctgttcttatcattgattcgaccactg

SEQ ID NO: 173079 - DNA, 263 bp, Glycine max
tctgtctcctccatggccatctccttcagtcccaaacaccctccttacgatgagatgatatacacagcaatcggagctctgaaggagagggatggttcgagcaagcgagccataggaaagtacatagaacaagtctacaaggaccttccacccactcaccctgctttgttgactcaccatctcaaccgattgaaatcctctgccctcctcgtcctcgtcaagaaatcctacaagcttcctggatctcatcatctgcctgcgct

SEQ ID NO: 173080 - DNA, 144 bp, Glycine max
cagctcgccaatatgaccaccgacgacgtcgtcagagcttctcgtcttctcgacaacgagattcgcatcctcaaagaagagttgcagaggaccaatttggagttggaatcgtacaaggacaagatcaaggagaatcaggagaag

SEQ ID NO: 173081 - DNA, 267 bp, Glycine max
caattatgttcctcttcctacacgtagcaagaagaagaaggagaagcccaagatgggaacaatggagagcattaagttcttggtgtcttcaaaatatataagggatcttgccactttagtggttgcatatggaattagcattaatcttgttgaggttacatggaaatcaaagctcaaagctcagtttccaagccccaacgagtactcatcttttatgggagacttctcaactgcaactggaattgctacattcataatgatgcttct

SEQ ID NO: 173082 - DNA, 265 bp, Glycine max
gtctggggaaatttgcgttgtttttcgcggtacagctcacacacactgaacggtaagtatggcggacaaggctgttacaatccgaacccgaaagttcatgaccaacaggcttctttccaggaagcagtttgtcgttgatgttcttcatccagggagggcaaatgtttccaaggctgaacttaaggagaagctagctaggatgtatgatgtgaaagaccctaatactgtatttgtcttcaaattccgaacacattttggaggtggc

SEQ ID NO: 173083 - DNA, 149 bp, Glycine max
ctctgtttctgtctctgtgtttgcggctgaggattccgaacgagcgaccttcttcgtttctcgcaaagtttaagtcatcatgggtaaggcaaagactcacatcaacattgtcgtcattggacatgtcgactctgggaagtcaactacca

SEQ ID NO: 173084 - DNA, 261 bp, Glycine max
gagatggcttgcagacagttgtgggcttcaagagctgcttcctacctcaggatctccgtgtttcacagaagcttctctaacgttttgaatgatctgaagtatgctgattctcatgagtgggtgaaggttgatggaaattctgcaactgttggcataactgatcatgcccaagatcatttgggtgaggttgtgtatgttgaattgcctgaagtgggagccaccgtgacacaaggagaaggttttggtgcagctgaaagtgtg

SEQ ID NO: 173085 - DNA, 266 bp, Glycine max
aatggttgtagagggaagaaataagattcatggttgaaagggacggctctgccaaagggattgtttttagccaattcacatcattcttggatcttataaactactctttgcacaagtctggagtatcttgtgttcagttgaatggaagcatgtcattggctgctcgggatgctgccattaagagattcactgaagatccagactgcaaaatttttctcatgagcttgaaggctgggggtgttgcactcaatttgacagtagcttca

SEQ ID NO: 173086 - DNA, 269 bp, Glycine max
ctttagctacctacccatgggaacgattgccctagccaatgtcctcttggtccttctcttgaacttgagcactttgctcaatgttcttgcttgtccctattgcccttacgcatctcccaagcctcctccaaaaaaagcctcccattgtgaaaccaccagttcacaaacaaccaaaaccatgtccaccacccaagtcatctccaaaaccaccccatgtacacccaccctatgtcccaaacctcctcactaccctaaaccacgagttcatc

SEQ ID NO: 173087 - DNA, 285 bp, Glycine max
ctcacactgtgtttggagcagaatcagatcgtgtgttccgtacgttcgttcgttcatttccagtgtcaaacatggcgtctcagatgagcaagaagagaaagtttgttgcggacggagtgttcttcgccgaactgaacgaggttctgacacgtgaattggcggaggacggttactccggcgtggaagttagggttacgccgatgcgcaccgagatcatcatcagagccaccagaacccaggctgttctaggtgagaagggaaggagaattagggaacttacctcag

SEQ ID NO: 173088 - DNA, 276 bp, Glycine max
aatagattatcctaagtctttgggaatagtgctgcaatggcttcaagtcaggaggaggtgacccttttgggagctactggaagcccatttgtgtgcagggttcatattgccctcaagttgaagggagttcaatacaaatatgtcgaagaaaatttgaggaacaagagtgaactgcttctcaaatccaacccagttcacaagaaggttccagtgtttattcacaatgagaagcccatagcagagtctcttgtgattgttgaatacattgatgagaca

SEQ ID NO: 173089 - DNA, 275 bp, Glycine max
atcagactagagagagtaagagtaagagaagagatggaaagagtagcatcagtatctcggccactgaaaatatacttcctcccattcttctcaccggggcacctaatccctctggtccagctggctcgcttggtggcggcacgaggccagcacgtgaccatcatcaccacccccgccaacgctcaactcttcgaccagaacatcgacaaggacaccgcctccggccaccacatccgcgtccacatcatcaagttccccaacgcccacgtagggct

SEQ ID NO: 173090 - DNA, 274 bp, Glycine max
  unsure (1)..(274): unsure at all n locations
catttgtgaccttcaggctctcatggaaggccttcaggttctgaccttggaggatgttgtttctgaggctgatatctttgtcaccaccacgggtaacaaggacatcatcatggttgaccacatgaagaaaatgaagaacaatgccattgtttgcaacattggtcactttgacaatgagatcgacatgctggggctggagaactaccccggcgtgaagcgcatcaccatcaagccccaataatanagatgggtcttccccgagaccaatgtcggc

SEQ ID NO: 173091 - DNA, 272 bp, Glycine max
cttttattaggatcctgccaagaaagagttcggtgagcaattgatatcccatgttgatacattcagcaaagacctgttcgtttcattgaaaggggatgctgtacagcaagccagtcccgcttttgaatacttggagaatgctcttggtaaatttgatgatgggccattcttgcttggccaattcagtttggtaagttaaaatttaatggtcttcaaaaaaaattgttttccttttaaattcgctggctttcaggctgattactaatgcttgt

SEQ ID NO: 173092 - DNA, 237 bp, Glycine max
agagtttgttgtgagctataagctagtttatcgtgaggagaatatgaagttgtttgttttctttgttgctgcagtagttttggtagcatggccatgccatggcgcaggctaccaaaggttccctctccgaatgaaaactggctatggtgagcgttcttcggaggtaaaatgcgcaagttttaggcttgctgtggaagcacacaacatccgagcctttaaaaccattcctgaagagtg

SEQ ID NO: 173093 - DNA, 281 bp, Glycine max
gtttcttcctttctctgctctttgtcttctctgacacatttggggccttgttgagtgtgtttttgcaagagggtatggcgaaggacgttgaggttgctgagcgtggctccttctctgggaaggactaccaggaccctccaccagcaccactcattgatgctgaggagctcacaaagtggtccttttacagggctcttattgctgagttcattgccactttgctcttcctctacattactgtgctcacagttatagggtacaagcaccagacggatcatgct

SEQ ID NO: 173094 - DNA, 270 bp, Glycine max
gagaagtttgctgctggtgtctcaatggttacttcactttcattagctatctcatacccaacacttgctgctgcaccacacatgtttgtcaatgcctacaagaatgttcttgctgttgcggttgagacagattattctttccctgaggcagacaaggtcaaggagtatctgaaggatccaagtaaatttgctgtcgctgctgttgctgctcctgctgctgagtctggtgctcctgctgcagccaaggaagaggaaaagaaggaagaacca

SEQ ID NO: 173095 - DNA, 248 bp, Glycine max
acccgacctcatcgtcgacgacggtggtgacgctacccttctcatccacgaaggcgtcaaggccgaggagctctatgagaagaccggcgaactccccgaccccaactccaccgacaacgccgagtttcagatcgtgcttaccatcatcagagatgggttgaagaccgatcccaccaggtaccgcaagatgaaggagcgtctcgttggggtttctgaggaaaccaccactggagttaagaggctctatc

SEQ ID NO: 173096 - DNA, 282 bp, Glycine max
cttgctagattgatgaacccgattgatacacatttgagtacttttgtgaatggggagtttggggatttaggttatgttgctcctgaatatacaaaaactttggtggctactcctaaaggggatatttatagcttcgggaccgtgcttcttgaattggtgacaggtgaaagacctacccatgtggctaaagctccagaaacttttaaaggaaatttggtagagtggattcaacagcaatctagcaatgcaaaactccatgaagtcattgatgaatcactagtt

SEQ ID NO: 173097 - DNA, 259 bp, Glycine max
acttcttctcttgcggctagggttttagcgcacttcttctagatttaaggaagatgggtaaggaaaaggttcacatcagtattgtggtcattggccatgtcgactctgggaaatccactaccactggtcacctgatttacaagcttggaggcattgacaagcgtgttattgagaggtttgagaaggaagctgctgagatgaacaagaggtctttcaagtatgcctgggtgctggacaaacttaaggctgagcgtgaaag

SEQ ID NO: 173098 - DNA, 274 bp, Glycine max
gttactgctgacttcaatggtgttgagggatgcactattgctggaaagaaaaatgatagggtgattaatgaagatcttctgaaagatgagattgtttcagaacagctgactaggaacgttcaattttttggctttgagtctcagcagaaagtgactgcatcatatgtagtggtcattggtcttggaggtgttggtagtcatgctgcttctatgctcttgagatcagggaatggcaagcttcttcttgtagactttgaccaggtttctgtttcat

SEQ ID NO: 173099 - DNA, 273 bp, Glycine max
atccgcagctgctgttattcgcaccgcaaacaaacagtgagccatggccgtcggaaagaacaagcgcatctccaaagggaaaaagggtggcaagaagaaggcagctgatccctttgccaagaaggattggtatgacattaaggccccttctctttttcaagtgaaaaatgttggcaaaaccctcgtctctcgtacgcagggtaccaagattgcttctgaaggacttaaacatagagtgtttgaggtctccttggctgatcttcaaggggatga

SEQ ID NO: 173100 - DNA, 255 bp, Glycine max
aacaacactctctcttctcgctcttggcttttcgctcttcactcactctcattcattcatttccaccgttcatggatccagtaagcgtgtggggtaacacgcccttggcgacggtggatcccgagatccatgacctcatcgagaaggagaagcgccgtcaatgccgcggaatcgagctcatcgcctccgagaacttcacctccttcgccgtcatcgaggccctcggcagcgctctcacgaacagatactccgagg

SEQ ID NO: 173101 - DNA, 268 bp, Glycine max
cataaacgccgcccaaaaccatttatagggttttcttttctttgccaagaaaatgagagagtgcatttcaatccacattggtcaggccggtatccaggtcggaaacgcctgctgggaactctattgccttgaacacggcattcagcccgatgggcagatgccgagtgacaagaccgttggaggaggagacgacgccttcaacacattcttcagcgagaccggcgccggaaagcacgtgcctcgcgccgtcttcgtggatcttgagccc

SEQ ID NO: 173102 - DNA, 270 bp, Glycine max
cgaattcttcaagcagcagaagtatcctgaggctgtgaagcattacacagagtatatacgaagaaatccaaaagatcctagggcttatagtaacagagcagcatgctacactaaactgggggcaatgcctgaaggtttaaaggatgcagagaagtgtattgaacttgatccaaccttcgtaaagggttataccaggaaaggtgcagtccagtatttcatgaaggaatacgagaagtctttggagacatatagggaggggttgaaatatga

SEQ ID NO: 173103 - DNA, 269 bp, Glycine max
cccggctcaataagaggagaataccttaggaatccataagaaacattaattcaccactatagttgttctgttagaagtgctacaaacaacaatggctgctaatcaggaagatgtgaagcttttgggagctactggaagcccatttgtgtgcagggttcagattgccctcaagttgaagggagttcaatacaaatttttggaagaaaatttgaggaacaagagtgaactgcttctcaaatccaacccagttcacaagaaggttccagtgt

SEQ ID NO: 173104 - DNA, 250 bp, Glycine max
cccaaacaaaggctctgcaattgcaaattcagaggatgtcgatcttcgagtacaacggaagcgccgtggtggctatggtcggcaagaactgcttcgccattgccagcgaccgaatgctcggcgttcagctccaaactatagccacggattttcaacgcatttccaagattcacgacaagctcttcatcgctctctctggcctcgccaccgatgctcaaacattgtatcagcgtctggtttccgggcaaaa

SEQ ID NO: 173105 - DNA, 270 bp, Glycine max
catacatataacaatcattcttcttcttctgcaaatacttatccctcattgattcatcatggttcggttcagcaacaatgttatcggactccttaacttcctcaccttcctcttgtccatcccgatcctggtggccggagtgtggctgagcaagcaaggcgccaccgagtgcgagcggtggctggagaagcccgtcatcgcgctcggcgtcttcctcatgctcgtctcactcgccggcctcgtcggcgcgtgctgccgcgtgtcgtggct

SEQ ID NO: 173106 - DNA, 280 bp, Glycine max
cgctgcagcgtcaatcgcgtaagtgcgagaaggaggagaaatcggagaagctgaaggtgaagaaggcgatcgagaaaggcaacatggacggcgctcgaatctacgcggagaacgcgatccgtaagcgcacggagcagatgaactacctccgcctggcctcgcgcctcgacgccgtggtcgcccgcctcgacacgcaggcgaagatgacgacgatcagcaagtcgatgggcaacatcgtgaaatcgctggagtcatcgctggccacggggaacctccagaa

SEQ ID NO: 173107 - DNA, 277 bp, Glycine max
gttgttgtaactcgttcttcttcttttgttgttctgtgtttgtgtttgttttttctctcacctgaaaatgtcttgctgcggtggtaactgtggttgcggaagctcctgcaagtgcggcaacggctgcggaggctgcaagatgtacccagacttgagctacactgagtcaaccaccaccgagaccttggtcatgggagtggcacctgttaaggctcaatttgagggtgctgaaatgggtgtgcccgctgagaacgatggctgcaaatgtggaccaaac

SEQ ID NO: 173108 - DNA, 275 bp, Glycine max
cacccaccattggatccaccaatctccaaccttcttctccattgttccgtttctctctccaacgggaagaactttttttttgtgtgtgtttttggtggtgagtttgtaagaagcaatggcacgcaagaagatcagagagtatgactccaagagattgttgaaggagcactttaagagactctctggccaggacttgcccatcaagtccgcacaagttacagaatccaccgatttcaatgagctaacagagaaggaaccctggcttttatcttcaa

SEQ ID NO: 173109 - DNA, 201 bp, Glycine max
ctctaattctatcccctcaagttcttgcaaactatgagaatcccccagtgtacaagcctcccactgagaaaccaccagtttataagcccccagttgagaagcctcctgtttacaagcctccagttgagaagcctccagtttataagcctccagtagagcagccaccagtgtacaagccaccagtagagaatcccccagttt

SEQ ID NO: 173110 - DNA, 273 bp, Glycine max
tcccagcatatcaaccattatcatactgaacttttttcttctaataatggctgcgacaacacgttcccttgcatacaactacgatgatatcctcagcttcacagggcaagacacacgccagggtttcactggctatctctacaaagctctttgtgacaggggaatctacactttcattgatgatcaggagcttcggagaggagacgaaataaaacctgcactttccaacgcaattcaagagtccaggattgctattactgtgctttctcaaaa

SEQ ID NO: 173111 - DNA, 271 bp, Glycine max
gttacagccgcaccttgattcagagcagagcgaccttgaagagctatggctgtcggaaagaataagaggatttccaagggaaagaagggtggcaagaagaaagccgctgatccctttgccaagaaggactggtacgatatcaaggccccttccgtctttcaggtcaagaatgttggcaaaaccctcgtctctcgtacccagggaaccaagattgcttctgaaggactcaaacatagagtgtttgaggtctcattggctgatctccaaggag

SEQ ID NO: 173112 - DNA, 255 bp, Glycine max
attgttggattttcttattttgcagatataaaaatcagaacgttgctgttaagattgttaataagggtgaaaccccagaacagatttctaggagagaggctcggtttgccagagagattgccatgttatctagagttcaacacaaaaatctagttaagtttattggggcctgcaaagaacctgttatggttattgtaactgaacttctcttaggtggaacattgcgcaaacacctgtggagtatccgcccaaagt

SEQ ID NO: 173113 - DNA, 270 bp, Glycine max
tctcgatcacttgtgggatgacaccctcgccggtcctcgcccggagaacggcctcggcaagctccgaaagcaccactccttcgctttccgatctgcctccgccaaggaatcagacagcggaagcgtgaaatcgtacggtgaggattcgcccaagaatgcggtgagagtgacgcgaagtataatgatcgtgaaaccacctggtaaccagagtcccagtggatccgctccggcttcccccgccggttctactcctccggtgtctccgttttc

SEQ ID NO: 173114 - DNA, 271 bp, Glycine max
gataattccaaccttcaacgtctcttcactctcttccttttttccctaattgcaccctctttggctcaacaatccttcagacccagagccctcgttgtcccagttaaaaaagacgcttccaccctccaatatattactcaaatcaaacaaagaacaccactcgtcccagaaaacctagtacttgacatcggtggccaattcctgtgggtcgattgcgacaacaactacgtctcctccacttaccgccccgcacggtgtggctccgcccagt

SEQ ID NO: 173115 - DNA, 267 bp, Glycine max
aaaccaaatcaaagcaagccaattggtctctctcttacaccatgagtgcatcaaccaaagcttggattgtggcatcaagcataggggcagtggaggccttgaaagaccaattaggtgtatgcagatggaactatgctttaaggtcactacaacaacatgcaaagaacaacatcagatcttatagtcaagctaggaaattgtcctctgcatcctctgctgcggtttccaacaaggtcaagagaaccaaagaagagcatatggggaaag

SEQ ID NO: 173116 - DNA, 271 bp, Glycine max
acaattcatcgtccatcgagaaaggaagaaaagaaacaaggtgacatcatcatggcttgctcgttttctcgcgggtctctgcttcctctcgccatcatcgtttccttaggatgtctatttgcgatttccattgcaaaggaggaagccaccaagttggggacggtcattgggattgatcttggaacgacctattcatgtgttggtgtttacaagaacggccatgttgaaatcatagccaatgaccaaggtaaccgtattcacccttcttggg

SEQ ID NO: 173117 - DNA, 274 bp, Glycine max
cgaaccagatttcaagatgaagttcaacattgcgaatcccaccactggttgtcagaagaagctggagatcgatgatgacctgaagctacgagcattttgggacaagaggatctcacaagaggttgttggtgatgctctgggtgaggaattcaaaggctatgtcttcaaaattactggagattgcgacaagcaaggatttccaatgaagcaaggagtgttgacccctggtcgtgttcgcctcttgctgcatagaggaactccttgtttccgtggt

SEQ ID NO: 173118 - DNA, 258 bp, Glycine max
ctgctgttcctgcgcgtgaacaagcctcaggtaagccaaagccatggttaagcataacaatgttatccccaatggacacttccgtaagcactggcagaactatgtgaagacctggttcaatcagccagcacggaagacaagaagacggttggctcgtcagaagaaagctgtgaagattttccccagacctacagctggacctcttagacccattgtacatggtcaaactttgaaatacaacatgaaagtgagagctgc

SEQ ID NO: 173119 - DNA, 276 bp, Glycine max
gcgagttaggcgcggcgggatcagcacaagattgcaaaatgaagttcaacattgcaaatcccaccactgggtgccagaagaagctggaaatcgatgacgacctgaagcttcgagcattttgggacaagaggatctcccaggaggttcttggtgatgctctgggtgaggagtttaaaggatatgttttcaaaatcaccggtgggtgtgacaaacaaggattccctatgaagcagggagtgctgacccctggtcgtgttcgacttttgctccatagag

SEQ ID NO: 173120 - DNA, 262 bp, Glycine max
aatcttactgctgtgcatgatatattgttaaaaacaggttataaagatgaagaaggtgcagaaaatgagctttcattccaagaatggacacaacaagtacaagatatcttgaacacaaaaaagtttggggatattgcattcagagacaaggatttcaaaaatgcaatcgagtattattctaagttggtggttatgatgtctgttccttctgctactgtgtttgcaaggagagccttctcctacttgatgaatgatcaagcag

SEQ ID NO: 173121 - DNA, 268 bp, Glycine max
ctcagttctgaacggaaaagcaccgtcgcaccttccctgaggcttctcttgtctgtcgcgagtgaccatggtgagggttagtgtgctgaacgatgctctgaagagcatgtacaatgctgagaaaaggggaaagcgccaagtcatgattcggccatcctccaaagtcattatcaaattccttttggtgatgcagaagcacggatacattggagagtttgagtatgttgatgaccacagggctggtaaaatcgtggttgaattgaacggt

SEQ ID NO: 173122 - DNA, 266 bp, Glycine max
tttgcagttcctttgggggcttggacttcgagaggatgaggcagaatgctgtgacgtttatggcttagatgaagagcttctggaaatggttccaaagcccgttcttgccgtgctttttctttatcccataaccacccagagtgaagaagagaggttgcagcaggaaaatgaaaaaaaggaatataacagtagagtctattttatgaagcaaactgtgggtaatgcttgtgggacaattgggctgcttcatgctcttggtaacttga

SEQ ID NO: 173123 - DNA, 258 bp, Glycine max
aattgctttgctgtaagtttctgattcctttcttcagaattccaagttttcatttcgttagggacaaaagattgtgagatagagtatggctggaaaaggcgagggtcctgctatcggaatcgatttgggaacgacgtactcttgcgtcggcgtgtggcaacacgatcgtgttgaaatcatagccaacgaccagggtaacagaactaccccatcctacgtggctttcaccgacacagaacggttgatcggcgatgcggc

SEQ ID NO: 173124 - DNA, 268 bp, Glycine max
ggcttctgtgcctcaaccaaaaatctcccttctaaccttattcttcttctcttccttcaccatcattgcgcatgcaattgttcctcaaaacgaaaccttcaaatttgagaactcaggtgaacttggaccctacatcgttgagtacggtgcagattacagaatgataagcatcttcaactctccattccaagttggtttctacaacaccaccccaaatgccttcactctagctttgcgtgtagggctccaacgctcggagcagctattt

SEQ ID NO: 173125 - DNA, 267 bp, Glycine max
tcttgctgtacttgttggtgtgcctagtaaagatgatgcattcaaaactgctcctattaatttcctgaacgagaggactcttaagggcaccttttatggcaactacaaaccacgcaccgatcttccatctgttgtcgagaagtacatgagtggggagctagaagtggacaaattcatcactcacacagttccattctcagagatcaacaaagcttttgatttaatgctgaagggacagtccattaggtgtatcatccgcatgcaaga

SEQ ID NO: 173126 - DNA, 277 bp, Glycine max
attttaacctgtggcatgttgttaaaccgtaaaacatggtcagaaagtgtggaaccagggaaaacatctcctccaatagcaatgccttcataaatcccatcagttacgcgggcaatagtgttgtatagttcattggacatcccaccagatttagaaacaaatccaacagatccaggcctgtagagcttgcactgaattatattgtcaattgttccagctgtgtcaccaattttaaaagcacctgcttgaatgcctccaactgtggctggggcaataa

SEQ ID NO: 173127 - DNA, 275 bp, Glycine max
gtggaaattccacagcagctttttctatggccgtgagattccttacaggtccagctgtcatggcagctgcttccattgctgttggactcaaaggcgttctcttgcacgttgctattgttcaggcagctcttcctcaaggaattgtcccatttgtctttgccaaggaatacaatgtacatcctgatattctcagtacgggtgttatttttgggatgttgattgcattgcccattacgctcgtgtactacatcttgctgggggtatgagtgaatgag

SEQ ID NO: 173128 - DNA, 204 bp, Glycine max
cttaaaagagcctttgcttttgctttaggcctttccgaattaagtacttgtatcattttctctcgaagcaagaaaaatgtgcatcgagagtttcaaggttgagagtcctaacgtgaagtacacagagactgagattcagtccgtgtacaactatgaaaccactgaacctgttcacgagaacaagaatggcacttatcagtgggt

SEQ ID NO: 173129 - DNA, 267 bp, Glycine max
aattgatgcagaaactaatgtgacaggaagcaatagggtaagatataaatcagcaccaacacgtcgtgagcaagaaaaatgggatagagctaccaaggccgcaactggaggcagtgatgtgatgttccgggaaataaggcagtctcgtgaagatccaaaagttttggctgctcaagctgaggagcagtataataagttaaagaggaagttgcaaatctttaccttgggtataggtggtgttggtctggtttcagcttatgtttctta

SEQ ID NO: 173130 - DNA, 265 bp, Glycine max
tatcttgaaatttcgcaaagtttctgatttagaattgttgatcagaaaggttgagggtgaagaaagagaggagtgaaaagcaagtattgggatggactactatgggattttggaggttgacaggaatgcctcagatgaagagttgaagagagcctacagaaagcttgcaatgaaatggcaccctgataagaaccgaaccaataagaaagaggctgagattcaattcaaacagatatctgaatcctacgaggttcttagtgatccc

SEQ ID NO: 173131 - DNA, 247 bp, Glycine max
atcgtcgctgtttgtgtgtgtatcaggtgcagctaccaacgatggtgaagggtcgtcaaggagagcgcgtcagactctacgtgaggggtacaatccttggatacaaaaggtccaagtccaaccagtacccaaacacatccctgatccaaattgagggagtgaacaccaaagaagaagtaggatggtatgctggcaagaaaatggcctatatctacaaggctaaggtggaaaaggatggaagccatta

SEQ ID NO: 173132 - DNA, 273 bp, Glycine max; identical to SEQ ID NO: 114026

SEQ ID NO: 173133 - DNA, 284 bp, Glycine max
gaagagcgtcgcagtcgcaaccctaatcagaagaagcgcagcttcaagcgagtgacagccaccagccatgggtcgtatgcacagccgcggtaagggtatatcctcttctgctttgccctacaaaaggacacctcctagctggctcaagatctcttcgcaagatgtcgaagaaaatatctgcaagtttgcgaagaaaggtttgaccccgtctcagattggtgtcattctcagagattctcacggtattgctcaggtcaatagcgtcactggcagcaaaatccttc

SEQ ID NO: 173134 - DNA, 282 bp, Glycine max
attgtttatcaagcctcagatgatccactttaccgtggctatagagcagcagttcaatcatcaagtcaagaagagtctttggtagattttgcattatgggagccacctcatggtccatacaagacattcaattatccttggagaagctatgttaaagtcagcggagctttgaggcattgtgctttcatggtcatggcaatgcatggatgcattctttcggaaatacaggcacccccagaaaagaggctggttttcagtaatgaacttcagaaggttggtact

SEQ ID NO: 173135 - DNA, 284 bp, Glycine max
tgaacgatcagtttgttcttgatgcttaccgaaagggtgataaattgaagtttgcgaaccattctcctgatccaaattgctatgcaaaggttattatggttgccggagatcatagggtaggcatttttgccaaggaacggatttgtgccggggaggagctgttctatgattatcgttatgagccagatagggctcctgcgtgggctcggaagccagaggcatctggatcaaaaaaagaggacggtgctccttcaagtggtcgtgcaaagaagcttgcttaatgg

SEQ ID NO: 173136 - DNA, 283 bp, Glycine max
agagccttatcgctgtggttatcatcttcttcttcctctttcttagatctcttctttctctacgccgcacgccgaaaccatggccggaaaaggagagggtcctgctatcggaatcgatctcggaaccacctactcttgcgtcggtgtgtggcaacatgaccgcgttgaaatcagcgccaacgaccaggggaacagaaccacgccgtattacgtcggattcactgacaccgagcgtctcatcggtgatgcggccaagaatcaagtcgccatgaaccccatcaac

SEQ ID NO: 173137 - DNA, 284 bp, Glycine max
atttcctcaaggcactcgcaaagcgcctcaagcacaacaatactgcatatgaaaattaccacaggatatttgtccctgatgggcatcctttgaaggctgcacccagagagcctttgagggttaatgttctgttccaacatatacaaaatatgctgtctggtgaaactgctgtaattgctgagacaggggactcctggtttaattgccaaaagctgaaattgccaaaggcatgtgggtatgagttccaaatgcaatatggttcaattggatggtctgttggtgct

SEQ ID NO: 173138 - DNA, 288 bp, Glycine max
atttgttgttcgaagccaaaaccctagcagccggcgagaatggcagacgttgaggttgatgcggcggcagcggcaggggcagcgcaccgaagaagagaacgttcaagaaattcagcttcaggggcgtggatctggacgcgcttctggacatgtccaccgacgaactggtgaagatgttcagtgcgcgtgcacgtagaaggttccagagaggtctgacgaggaagcccatggccttgattaagaagctccgcaaagctaaaagggaagcaccagcaggtgagaagccag

SEQ ID NO: 173139 - DNA, 292 bp, Glycine max
  unsure (1)..(292): unsure at all n locations
acaggaggaaggagtccaaggacttggaagagaaggccgagatgaagaagatgtatggcctcatcgagacctacaagttgaacggccaattcagatggatctcctctcagatgaaccgtgtgaggaacggagagctctaccgtgtcatctgtgacacaaggggtgcctttgtgcagcctgcagtttatgaggcctttgggttgactgtggttgaggccatgacttgtgggttacnaaaatttgccacatgcaatggtggtcctgctgagatcattgtgcatggaaaanccgg

SEQ ID NO: 173140 - DNA, 225 bp, Glycine max
ttcacgaggtgattatcacaaacaccattccagttgcggagaagaactattttccccagttaacgattattactgtagcaaaccttttgggtgaaactatttggcgtgttcatgatgatagttctgttagtagtatttttcagtgaacaatcagttacttttggagttaatttaatgaataaatgctaatttgaccatcttatatgataaaaaaaatttatttat

SEQ ID NO: 173141 - DNA, 279 bp, Glycine max
agagtgtgcagaagagcgtcgcagtcgcaaccctaatcagaagaagcgcagcttcaagcgagtgacagccaccagccatgggtcgtatgcacagccgcggtaagggtatatcctcttctgctttgccctacaaaaggacacctcctagctggctcaagatctcttcgcaagatgtcgaagaaaatatctgcaagtttgcgaagaaaggtttgaccccgtctcagattggtgtcattctcagagattctcacggtattgctcaggtcaatagcgtcactg

SEQ ID NO: 173142 - DNA, 279 bp, Glycine max
gtgacaacctttctctttctctttctcagtctctcaaaccgtcatcattgcctctcattcactctttcacacttccaagaaacactatcaggaagaagaacggtgctagtgtgaggcctctgttctgtgccctcaacaacaataacaacaacactgccttgcagtacagaaccctcggcgactccgacctcaacatcagcgaaatcactcttggtactatgacctttggggagcaaaacactgagaaagaagctcacgacattcttaattatgcattcg

SEQ ID NO: 173143 - DNA, 279 bp, Glycine max
gctagatccctagtaagccgccatggtgaagtactcaagggagcctgacaatccaaccaagtcttgcaacgctagaggcgccgaccttagggttcattttaagaacactagggaaactgcctttgcaatcaggaagttgcccttggttaaagctaaaaggtacttggaagatgttcttgcgcacaagcaggccattccgttcagacgtttctgtcgtggtgttggaaggacagctcaagcaaagaatagacactctaatggccaaggaaggtggcctgt

SEQ ID NO: 173144 - DNA, 282 bp, Glycine max
agagaagggaaggtgagcagtaatggtcatggatgttgcaaatcagggccaggctatgcttccccactggaagccatttctggtcccagagagtctctcatttatgtaacctctgtctacacagggaccggaatagagaagccagactatttggcgacagtggatgtggatccaaactctccaacttattccaaagtcatccataggcttcctgttccttatttaggtgacgaattgcatcacacaggctggaattcatgcagctcttgccatggagatccc

SEQ ID NO: 173145 - DNA, 281 bp, Glycine max
ctctgctcgtgcctctagggttatcatatctccatttccatttcatctctctcagtttccaagaatcttaagctatgggaaagtcttacccaaccgtgagcgctgattaccagaaggccgttgagaaggcgaagaagaagctcagaggcttcatcgctgagaagagatgcgctcctctaatgctccgtttggcatggcactctgctggaacttacgacgtgagctcgaagaccggtggtcccttcggaaccataaagcacccctccgaactcgctcacggc

SEQ ID NO: 173146 - DNA, 280 bp, Glycine max
gagacgcttcgcaaatctcaatcgaatctcagaaaaatgagagaaatcatcagcattcacataggtcaggccgggatccaggtcggaaactcctgctgggaactctactgcctcgaacatggcatccagcccgacggcatgatgccttctgactccaccttcggtgtagcccacgacgccttcaacaccttcttcagcgaaaccggatctggcaagcacgtcccccgtgctgtcttcgtcgacctcgaacccaccgtcatcgacgaggtccgctgcggca

SEQ ID NO: 173147 - DNA, 281 bp, Glycine max
accattcgtattgtcgcagagaaagaaaaccctagctcaccgtttcaagatgcaaatcttcgttaagaccctcactggtaagaccatcactctcgaagtcgagagttcagataccatagacaatgtaaaggccaaaattcaagacaaggaagggatcccaccagatcagcaacggctcatttttgctggcaagcagcttgaggatggacgtacccttgctgattataacatccaaaaggagtccactctccacttggttcttcgtctccgtggtgggatgc

SEQ ID NO: 173148 - DNA, 289 bp, Glycine max
aaatgcagccccaatcgggcggtaaattccgtccaaggctaaatactggcgagataccgatagcgaacaagtaccgcgagggaaagatgagcaccaaggaggtcgatgaacaaatgatcaatgtgcagaacaagaactcctcatactttgtggaatggattccccacaatgtgaaatccacagtctgtgacattcccccaaccggcttgaagatggcttcaacattcattggcaactctacctccattcaggagatgttccgtagagtgagtgagcaattcactgctat

SEQ ID NO: 173149 - DNA, 288 bp, Glycine max
accgtagaagagggctcgctctttcgtgtttttgttcgcgaaggaaactctatccttagctatcgcgatggatcggtaccagaaggtggagaagccaagagctgaaactccaatcgatgaaaacgagatccggattactagtcagggaaggatgcgcaattacattacttacgccatgagcttgtttcaggagaaaggttctaatgaaattgttttcaaagcaatggggagagctatcaacaaaaccgtgacaattgtggagttgatcaagaggagaattgtgggcct

SEQ ID NO: 173150 - DNA, 293 bp, Glycine max
ttggcatcttgatggttatgatttttgggtcattggtcatggtttcggccagtggacagatgctagcagaaaaacatataatctagtggatgccctgactagacacactgcacaggtgtatccagaatcctggactactatattggtgtctttggataaccaaggcatgtggaacttgaggtctgcaatatgggaaagacaatatcttgggcaacagttctatcttagagtgtggaatgcacagaaaagccttgctaatgaatatgacattcccaataatgttctgctttgtg

SEQ ID NO: 173151 - DNA, 280 bp, Glycine max
agcagagagtgcggtaggctcttccgagacccgaagcagccatggggatcgatctcaaggccggaggtaagagcaaaaagaccaaaagaacagcacccaagtccaatgatatctatctcaagctcttggtcaagctttatcgcttccttgttcggagaactggcagcaacttcaatgctgttatacttaagagattgttcatgagcaaggttaacaaacccccattgtctttgtcaaggttgattaagtatacgaaggggaaggaagataagattgcagt

SEQ ID NO: 173152 - DNA, 277 bp, Glycine max
gagagaattcgtaaaccctaatttcggaaagatcggcgatgactgcctccaaggatcgcgagaacttcgtctacatcgccaaactcgccgagcaggccgagcgttacgaagagatggtggaatcaatgaagaacgttgcgaatctcgacgttgaactgacggtggaggagcggaatttgctttctgttgggtacaagaatgtgattggtgctcgcagagcgtcctggaggatcctgtcttccattgagcagaaggaagaaacaaaagggaacgagtt

SEQ ID NO: 173153 - DNA, 282 bp, Glycine max
  unsure (1)..(282): unsure at all n locations
gctgaaccttcctctgcacaatctccttcaaaaagcttctcatccatggcgaaaacgctcatttcgtctcaatcgttcatcggcacaccgctcccctcactccctcgccaccacctcccccaccgcaccaggctcgtcgccaccaaagtcctcgtcagcctccacgaaattcccccaatccactccataagccgcaacattgacttcgccggaatcgtgactagagccgaaggctntctctacacgctcgccgatgctgcggttgcggcggaccctgcggtt

SEQ ID NO: 173154 - DNA, 281 bp, Glycine max
gttggaactactaatcatggtctttggtttaagaaaaggtctaagtttgatcttgtaggatattgtgatgtttattttgttggtgataaagtagaaaggaagagcactaggggtgcctattgatttcataaaaaatcgttggtatcttggatatccaagaagtaaacaacaatttccccattaacctctgaagttgagtatgtctcaacagtagattgttattctcaaatcatattgattaagcaacagatgttggttactcattggaatatacaaaaatt

SEQ ID NO: 173155 - DNA, 293 bp, Glycine max
atctccttctgacaacctcggcacagacagcatgcaagggccaggccttcaccgaaaacaaggttttcaccacatgccgtgatcttcctcacctatcctcgtatactcactggacctttgaccaggccacagggaagttggacatagccttcagacacacaggaatctctggaacagacaagtgggttgcaatgggctatcaatcccagcaacaacctcaattcagctatgacgggagcacaagctcctggtggctatcataccatctagcggtgccccaaatgcatatactt

SEQ ID NO: 173156 - DNA, 281 bp, Glycine max
caccatcgcgcccaagagagagagagagagagagaggcgcgaaaatgagcggacgaatggggaagaagaagggagcgagctttgtgatcgattgcgcgaagcggtggaggataaaattatggacattgcttctctggagaagttccttcaggagaggattaaggttggcggcaaggccggtgcactcggcgattccattactgtcactagggacaagagcaagatcaccgtcacctccgacagcaacttctctaaacggtatctgaaatatttgaccaaga

SEQ ID NO: 173157 - DNA, 279 bp, Glycine max
tcttgccttacagacaagggattctgggaaggttggctggtttcggaatctagttttaattaccagatcatggtgatgatgatgaggtttccttgatgaattttcgtgtatacccggttgttgtttttgttttttagtgaaaaagaaaatgttgtattcttttgttaaaaaaaaaaaaaaaaaaaaaaaaaaaaaaaaaaaaaaaaaaaaaaaaaaaaaaaaaaaaaacaaaaaaggggggggccccccatttttgccccccccccccgggtgtttttt

SEQ ID NO: 173158 - DNA, 275 bp, Glycine max
atgagagtgttcttcgtttgttaccttctctcagaaatggttacgttcaggtttcaccagtaccaggtggtcgggagggctctcccaacggaagcagatcagcatccgaagatctaccgaatgaagctctgggccaccaacgaggttcgcgccaagtctaagttctggtattttttgaggaagctgaagaaggtaaagaagagcaatggtcaagttcttgctatcaacgagatttttgagaagaacccaaccaagattaagaactacgggatatg

SEQ ID NO: 173159 - DNA, 275 bp, Glycine max
agaaggtttccttgttttggacaagggtgcatgaatcaacccatcttgtgtcatcaatggacacagctcaaagatggcacaatgcaaggggggttaagtggtacttatgatttggattctggttgtggaggtgaacacgatggtgtgtcttactatgaggtagtttgggcgaagaaagttaatgttgggagttgggtgttcaaacacaaactaaggacttcaaagaagtacccttggttgatgttgtaccttagagctgatgcaaccaaaggatt

SEQ ID NO: 173160 - DNA, 277 bp, Glycine max
agccatataatttttttttatttgaaataatgtccgggatcatccacaagattgaggagaccctccatgtgggagggcacaagaaagaggagcacaaaggagaacaccatggtgagcacaaaggtgaacacaaaggagaacaccatggtgagcacaaaggtgaacacaaaggagaacaacaccatggggagcacaaggagggacttgtggataagatcaaggacaagatccatggtgatggccatgacaagggtgagaaaaagaagaagaaggacaa

SEQ ID NO: 173161 - DNA, 278 bp, Glycine max
aatacttgttccttttgaaggttagaagtgctacaatacaaacaatggcagctactcaggaagatgtgaagcttttgggtattgtgggaagcccatttgtgtgcagggtccagattgcccttaagttgaagggagttgaatacaaatttttggaagaaaatttgggcaacaagagtgatttgcttctcaaatacaaccctgttcacaagaaggttccagtgtttgttcacaatgagcagcccatagcagagtctcttgtgattgttgaatacattgat

SEQ ID NO: 173162 - DNA, 271 bp, Glycine max
gttattagggtttttgagtgcggcggtccaaacactcttctctgcagcttttgcctacaactcccttcaccatggctgaacaaaccgagaaagcttttctgaagcaaccaaaagtgtttctcagcacaaagaagactgggaagggaaagagacctggaaaaggtgggaaccgcttttggaagtccattgggcttggatttaagactcccagggaagccatcgaaggaacctatattgacaagaagtgccccttcactggcaatgtttccat

SEQ ID NO: 173163 - DNA, 267 bp, Glycine max
aaatactgctacctgtttaagattagtgaagaagtggcggtagatgccactgataaagggaatatagctcggctgattaatcattcttgtatgccaaattgctatgcaaggatcatgagtgtcggtgatgaggagagccggattgtactcatcgctatgactaacgtggctgcaggtgatgagttaacgtatgactacttgtttgatcctgatgagccagaggcaaactaagtcccatgcctatgtacagctccaaactgccggaaa

SEQ ID NO: 173164 - DNA, 281 bp, Glycine max
tattccttgtctctttctcttctcaacaacatgcagatcttcgtcaagactttgactggcaagaccatcaccctcgaggtcgagagtagcgacaccatcgacaacgtcaaggccaagatccaggacaaggaaggtatccctcctgaccagcagaggttgatttttgctggtaagcagctggaagatggtcgcactcttgctgattataacatacaaaaggaatcaacacttcacttggtcttgaggctcaggggaggaaccatgattaaagtgaagactct

SEQ ID NO: 173165 - DNA, 279 bp, Glycine max
acttaattgccttaaggaacgttcgagaccacagaggtttctctagtcttcttctgtggagagcttgttttctcttgttcattcatctcacttccaattaaggaacaagctttccaccaatttgaatcaccaatggctcgctctttctccaacctcaaggttctctctgctcttgtcgccgacggattctccaacactctcaccaggcgtgggtacgcagtagcgacacaaagcgcaacaagaggaggagcagcctccatcagcggcaagtcaggggaa

SEQ ID NO: 173166 - DNA, 285 bp, Glycine max
atgaaaaccctaacgggtaaaacgatcacgttggaggtggagtcttcggacaccatcgacaacgtgaaggccaagatccaggacaaggaaggcatccctccggaccagcagcgcctcatcttcgccgggaagcagctggaggacggccgaaacctcgccgactacaacatccagaaggagtccacgcttcacctcgtcctccgcatccgtggcggcgcaaagaagcgcaagaagaagacctacaccaagcccaagaagatcaagcacaagcacaagaaggtcaag

SEQ ID NO: 173167 - DNA, 286 bp, Glycine max
aaagaatgcacacgaaatcagactcggaggtgacgagcaacagcatggagcagtcgtcgccggcgcgttctcctccgcggcggccactctactacgtccagagtccttcaaaccacgacgtggagaaaatgtcctacggctcaagcccaatgggttccccacaccaacatttccactactacctctcttcccccatccatcactctcgcgaatcctccacctctcgcttctccgcttccctcaaaaaccctcgcaacttctcatcctcctcctcctggaagaagct

SEQ ID NO: 173168 - DNA, 278 bp, Glycine max
atgtgattcgggtaatggccaccagtggaggcgatgaggggcagaacaaccctgccctcgacccggatttggatgctccggatgacccggatcacgagttcgctgagttcgggtcgggttgcttctggggtgctgagttggcctttcagcgaaatgtgggtgatggtgaagactgaggttggttacactcagggtcacactccggatccgaattacaaactggtttgcaccggaaccactaaccacgttgaagtggttcgggtccagttcgacccgaa

SEQ ID NO: 173169 - DNA, 275 bp, Glycine max
cggctcgagctgcaaaggattctacccgccgctcgatgggaattgcgcttcaaggcgtctcgtaaggctaatccgcctcacgagggtcaccaacggcacgtgcctttggggggccgaggccccctactgctggtcggcaaacggacggcgggcgcacgcgtcgcttctagcccggattctgacttagaggcgttcagtcataatccaacgcacggtagcttcgcgccactggcttttcaaccaagcgcgataaccaattgtgcgaatcaacggtt

SEQ ID NO: 173170 - DNA, 271 bp, Glycine max
atcttagctttgattctctgttctctgttttgttctgtttcgcgtgtaagttcccctgttcctcttttcctctttctaagattgtcttcatacaggaacttgaacaatgaagaatgcaaagggcaagggagcagcaagggcctcaaaagaatcactgaagcccgttgatgaccgaaaggttggaaagcggaaggcttccggtaagcctgggagaagtagtgcaccaaagaaggagaagaaggccaagaaagaccccaacaagcctaaaaga

SEQ ID NO: 173171 - DNA, 272 bp, Glycine max
atcggcgcggcacccacacacacagttcgtcggaatgggaagggtgattcgcgctcagcgtaagggtgctgggtcggtgttcaagtctcacactcaccaccgcaagggtccggcgaggttccgcagcctcgacttcggcgagcgcaacggctacctcaagggcgtcgtcaccgacatcatccacgaccccggtcgcggcgcccctctcgccaaggtggcattccgccaccccttccgctacaagaagcaaacggagctcttcgtcgccgccg

SEQ ID NO: 173172 - DNA, 267 bp, Glycine max
tacatctctaatctcattctccttctgttcaaacactctcatggcatcagataagaagatcacgatcggcatcaacggatttggaaggaattggcgcttggtggccatggttgcccttcaaaggattgacgttgaacttgttgctgtcaacgatcctttcatcaccactgattacatgacatacgtgttcaagtacgataccgttcatggccagtggaagcattttgatgtgaaggtgaaggactctaagtcccttctctttggtga

SEQ ID NO: 173173 - DNA, 276 bp, Glycine max
tgataggttacccaccgccggaatcttacggaaaggacgcgtaccctccgccagggtaccctccacaaggaggataccctccgcaggcgtatccagcacaggggtaccctccaccctacgcgcctcctcagtacgctcagcctccgccgcaacaacaccagaattcatctggcccgggttgcttagaaggatggtacgtttctctctctctctctctgtgttataaaatcaaaattgagtgagtgaaggtggttgtggcgactcagatcgattgat

SEQ ID NO: 173174 - DNA, 274 bp, Glycine max
taacaacacaggcgcagacgcaaacgcaaacgcaaacgcaaacgcaaacgcagagcgtgatccattgacgaagatggtgcagcgtctcacctaccgcaagcggcacagctatgccaccaagtccaaccaacacagggtcgtcaaaacccctggtgggaagctcgtttatcagactaccaagaagagggccagcggacccaagtgccccgtcactggcaagaggattcaggggattccacacttgaggcctgcagagtacaagaggtcaaggtta

SEQ ID NO: 173175 - DNA, 275 bp, Glycine max
gtcgtcagaaagactccataacccaggaatgcctttcaagaggtacgttgagattggaagggttgctcagatcaactatggcaaagagtacgggcggctcgtgatcattgtcgatgtcattgaccagaatagggctcttgttgatgctcccgacatggtgaggtcccaagtgaacttcaagaggctctcgctcactgacatcaagattgatattaagaggattcccaagaagaaggatctcattcaagccatggaggctgctgatgttaagaaca

SEQ ID NO: 173176 - DNA, 247 bp, Glycine max
gcgtccagcttcctctcattgaacgcttacctgacgttctgaagaaccggttggagtcgctccagtaggcgttcgattatgcaatccaatctggacggtacgagtctcattaccaaggagtttacaccgtcaagtgcaacaaggaccggtcagtcgtcgaggatatcgtgaaattcggttcacccatccggttcggtctggaggccgggtctaagcaggaactccttctggccatgagctgtctttg

SEQ ID NO: 173177 - DNA, 282 bp, Glycine max
gggcctcaacactcaagacctcgtcacccttgttggtgcacataccattggtactacagcttgccagttcttcagtaacagattgtacaacttcaccgcgaatggtcctgacccttccatcgacccttcatttctttcccaactacaatcactatgccctcaaaacggtgacggttcaaaacgagtagcgctagatacgggtagtcaaaccaaatttgatttatcttactatagtaatttgaggaattctcgtggaattctgcaatctgatcaagcactatg

SEQ ID NO: 173178 - DNA, 290 bp, Glycine max
tcagaattcggatcgagatggaagagcacattttgagactgtaacaacaaggtttactattttggatgcacctggtcacaaaagctatgttcctaacatcattagtggtgcatctcaagctgatattggagtgttggttatttctgctcggaagggagagtttgaaactggatacgagagaggtggacaaactcgtgaacatgtccagcttgcaaaaacgctgggtatgtctaagcttcttgttgtcgtcaataaaatggatgagcctacagtgcaatggtcgaaagaaa

SEQ ID NO: 173179 - DNA, 274 bp, Glycine max
caggcagttacacctgcaagacctacacctacaagacctgcagctcctacaaaacctgcacctgcagtaggaggtcaaaaatggtgtgtgccaaaggcagatgctagcaaccaagctttgcaagcaaacataaactatgtgtgcagccaaggagttgattgtaggccaattcaaccaggaggagattgctttgcagccaacaacgttaaggctcttgccacttatgccatgaatgcctactaccaggccaatgggcgccatgatttcaactgtg

SEQ ID NO: 173180 - DNA, 272 bp, Glycine max
tgaggctgttgagctagcacactttgcattattctttaatcagggacaatgctgctgtgctgggtctagaacatttgtacacgaacgtgtgtacgatgaatttattgagaaagcaaaggcacgtgctttgaagcgtgctgttggtgatccattcaaggggggaatagagcaaggtcctcagattgattcagaacaatttcagaaaatactgaagtatattaggtccggtgttgaaagtggagctactcttgaaactggaggagatagatttg

SEQ ID NO: 173181 - DNA, 270 bp, Glycine max
aacgaattctggaaacattttttgtgcattgcttcagccatgcaacctcacccctttccaatgtgtttcgtaactgtgcttattactggacctttggctcctatattgcttattatgtgaaccaccctttatatacccctgtaaacgacctccaaatgaagattgggtttggatttgggatactttgtcaaatttcaaatttctattgccatattattctgaagaatcttcgtagtcctggtggtgaaggtggataccaaatcccaaggg

SEQ ID NO: 173182 - DNA, 269 bp, Glycine max
attgcttcttcgagtttcacagccaagtcgtaaaagggtttcaagggatggaaaacatgcagagcttctggcaattgggtgatgaactccgtgggcactcaaaagcatcggaggatcacaagtggttaatggttgcctcgaaactggccgaacagacaagattgaagggggagcgtgtgaacaaccttgatctttcaaagggacccattgaaacaaggtcaagggataaatttgggttccaggaagagaacaaatttgattctcttaac

SEQ ID NO: 173183 - DNA, 267 bp, Glycine max
cacctttctcctaaaacatctccagtgggttcttcttcttctattacaacaacgtcctccaagaccatgaccatggccatggccacgatcctgctcctgttcacggtcttcgcggtttcatcggccctagacatgtcgataatctcgtacgacaacgcccacgccgccacgtcgcgcagcacaaggacgctgatgtccatgtacgagcagtggctagtaaagcacggcaaggtgtacaacgcgctcggagagaacgagacgaggttc

SEQ ID NO: 173184 - DNA, 272 bp, Glycine max
aaaattttcaaatggaaggcccaactagagtgatgaatcagttgcgagcattatggcatattcttgaactgttagacaaagaaatgtttgcccacctgtcaaaaattggtgctgaaagccttcattttgcatttcgtatgttgctagttctctttcgaagagagttgtctttcaatgaggctctttcaatgtgggagatgatgtgggcagctgactttgatgaatccatggcttatgatttagaagagaactgtctggaagcattggagtta

SEQ ID NO: 173185 - DNA, 287 bp, Glycine max
ggaattaggatcgaatatacctacccatgggaaatattgcactagccaatgtactcttggtccttctcttgaacttgagcactttgctcaatgttcttgcttgtacctattgcacttacccatctcccaagcatcctccaaaaaagcctcccattgtgaaaccaccagttcacaagtaaccagaaccatgtccaccacccacgtactctccagaaccaccccatgtacacccagcctatgtcccaaaacctcctcactaccctaaaccaccagttcatccacatcca

SEQ ID NO: 173186 - DNA, 267 bp, Glycine max
tccacccatccacaaacgaacacacactttgattgagaatggggcgtgttcgcacaaagacagtgaagaagtcctcgcggcaagtgatcgagaggtactactctcgcatgacgctggacttccacacgaacaagaaggttctggaagaggtggccatcattccctccaagaggctccgcaacaagatcgcgggattctccacccacctcatgaagcggatccagaagggtcccgtacgtggaatctccctcaagctgcaggaggagg

SEQ ID NO: 173187 - DNA, 278 bp, Glycine max
atcacgccacccaaagttgtctttcgacctttctctctcaaaaccttagcttttgcgtggcctatatatatataaaactaacttccccaaaacccaatcatatatcatttcatttctttttttctcagtcatcccgtaaccatgtctcagactgttgtcctcaaagttggtatgtcatgtgaaggatgtgttggagcagtgaagagagttttaggaaaattggatggtgtggaatcatatgacattgatttgaaggaacagaaggtggtagtgaaggg

SEQ ID NO: 173188 - DNA, 280 bp, Glycine max
gggtatgccagatgtttctatgcccggggttgctggaggtatgttttctgttccatatgatgtgggtgggatgccactgcgtgatgcatcaatctcccagcaaattcctgttggggctttagcaacagctctggtacatgcttctcgagagcagcagaggacgatgctgggtgagaatctctacccccttgtggaacagttagagcctgacaatgctgccaaagtgacaggcatgcttcttgagatggaccagactgaagttctgcatttgctcgagtcg

SEQ ID NO: 173189 - DNA, 271 bp, Glycine max
gcttgagaagttcaattcagtttgatgaaaaaccactgtttcctttgcatcctgctactgatgatcaccattcctcatcaaagcctgctgttttgggtaacaaaagagggttctcagatgtcatgagtggattcgccgaggagaaattgcttgttagttctgaggtcaacacaatattgtcaccaaggccttcttctaatgtggcattgaaaccaagctctatgcttgagaatgttggggctcagcaatccaaagccaaagaactcgcaac

SEQ ID NO: 173190 - DNA, 270 bp, Glycine max
agaagatggagatgtatcagatctggagcaggagaatagcgttgggagcgttcgcgtttgttctgcttttcctatcggcctcagcagacgacgtcgttgtgctctctgaagataacttcgagaaggaagttggtcaggacagaggagctctcgttgagttctatgctccttggtgtggacactgcaaaaagcttgctccagaatatgaaaagcttggtagcagcatcaagaaagccaaatctgttttaatcggcaaggttgactgtgatg

SEQ ID NO: 173191 - DNA, 270 bp, Glycine max
gcaacctttgctgtggtagtggaagcacacaaagagcacaacgttacatatagtaactatggcgagagtgggtagaatgaaacttggttcagaagggtttgaagtgtctatgcagggacttgggtgcatgggcatgtctgcattctatggtcctcctaagccagagcccgatatgattgcactcatccaccacgccgtccaaagcggtgtcacttttcttgacacttctgatgtctatggccctcacaccaatgaactccttctgggaaa

SEQ ID NO: 173192 - DNA, 273 bp, Glycine max
gaagaatcagaattggaatcggaagaagaaaggagaattagggtttgtggagatgcaagggcaaggcgttgatgaagtgaacattgaagagttggcctcgaatctttccctctacaaagatcaactgaaccaggttaggcaactcttgaacgatgaccctatcaaattctgaatatgctgacatggagagggaactttccgaggtcattgctttgactgaggaactccttgcaactgcaaagcagaatgaaatccctgctcctcctaacgctg

SEQ ID NO: 173193 - DNA, 276 bp, Glycine max
caattcccaattcccaattcccaattcgaaacccttattcctttcaaagaaccaaattgagtgatcgtgatggcaccaaaggcagagaagaagccagcggagaagaagcccgcggaggagaagaagtccacggtgggagacaaggctccggcggagaagaagccaaaggccggaaagaagcttccgaaggagggaggcgccggcggagaagggaagaagaagaagagaaacaagaagagcgtggagacatacaagatctacatcttcaaggttctg

SEQ ID NO: 173194 - DNA, 240 bp, Glycine max
gtttgttgatcgagataactagaaacagtgtgatgaaaatgaaggtccttgttttcttcgttgctacaattttggtagcatggcaatgccatgcgtacgatatgttccctctccgaatgaacactggctatggtgcccgtactccggaggtgaaatgcgcaagttggaggcttgctgtggaagcacacaacatcgttggctttgagaccattctgaagaatgcgttgaagcaacaaggga

SEQ ID NO: 173195 - DNA, 286 bp, Glycine max
agctcggacgacggctcagacgagagagagagagcatcgaaaacggcactcgctcatcggaagggagacgaacacagccagcatatctcactacactgcatgcatatgggatgttccgccaaaactcctgaggaaacaaggtaaggcagcaaagaaacctagcacatcagaggatttctggatcaccagcacgcatgatatggacaacagtgctgttcagtcacagggaagcatctcatcagccagtataacaaaccaagctgcagatcctcatggaggttcatgc

SEQ ID NO: 173196 - DNA, 267 bp, Glycine max
agcgatgggaatcgatcttaaggctgggggtaagagcaaaaagaccaaaagaacagcaccaaaatccaatgacatctacctcaaattacttgtcaagctttatcggttccttgttcgaaggactggcagcaatttcaatgctgttatactcaagcgcttgttcatgagcaaggttaacaagcctccaatttctttgtcaaggttaattaagtatacaaaggggaaggaggataaaattgctgtaatagtggggactgtaactgatga

SEQ ID NO: 173197 - DNA, 274 bp, Glycine max
ctggaaattactcctggggaagtgaagctgtaactcgcaagactcgtatactagatgtggtttacaatgcctcaaacaacgagcttgtgcgtactcagactcttgtaaaaagtgctattgttcaggttgatgctgctccattcaaacagtggtaccttcagcactatggtgttgagattggtaggaagaagaagacagctgccaagaaggaaactgcagaggagggtgctgctgctgttgctgtggaagaagccaaaaagagtaatcatctgca

SEQ ID NO: 173198 - DNA, 274 bp, Glycine max
aactactgtaaagagagcccttggaacctatggtaccccagccatgacacaaatgatccagaactgcatggcccaagacttttcatggaagggaccagccaaacaatgggaaaaggtgctgttgagcctagaggttgcaggcagtgagcctggaattgatggtgatgagattgctcctctaacaaaggaaaacgtcgccaatccttgagcataaccattgataactgtttttgaatatggccatcattgtcaagaacgttatctaatacttgca

SEQ ID NO: 173199 - DNA, 264 bp, Glycine max; identical to SEQ ID NO: 142602

SEQ ID NO: 173200 - DNA, 264 bp, Glycine max
ctttctctctcgctcgcaaacgcaaataataaaaaacaaggttttagccatggcatcgaagcggatcttgaaggaactcaaggatctccaaaaggatcctcctacctcatgcagcgccggtcctgttgctgaagacatgtttcactggcaagcaacaattatgggtcctccagacagtccttatgctggaggtgttttcctagtcactattcatttccctccagattatccctttaagccacccaaggttgcattcaggacgaa

SEQ ID NO: 173201 - DNA, 201 bp, Glycine max
ctcagcagtcgtcagaaagactccataacccaaaaatgcctttcaagaggtacgttgagattggaagggttgctcagatcaactatggcaaagagtacgggcggctcgtgatcattgtcgatgtcattgaccagaatagggctcttgttgatgctcccgacatggtgaggtcccaagtgaacttcaagaggctctcgctca

SEQ ID NO: 173202 - DNA, 201 bp, Glycine max
cggtagccgagattccgtgagttgcaaaaatgaaaacaattctttctgcagagaccatgaacatcccggacggcgtgagcgtcaaggttaatgccaaggtcatcgaagttgagggcccccgcggaaaattggtgcgagacttcaagcacttgaatctcgattttcagctcatcactgacgaaaacggtaaaaggaagctga

SEQ ID NO: 173203 - DNA, 270 bp, Glycine max
cagacgcgttggcaaaggcattcgtggagcactactacagcaccttcgacaccaaccggaacggtttagcgaatctgtatcaggagggttccatgctgaccttcgaagggcagaagatccagggcgcttccagcatcgtcgctaagctcacttccctaccctttccagcagtgccaccactccatctccaccgtcgactgccagccctccggtgtcaacgctggcatgcttgtctttgtcagcggcaacctccagctcgctggcgaacag

SEQ ID NO: 173204 - DNA, 268 bp, Glycine max
aaagaattacagttgaagaagcactagcccatccataccttgaaaaactgcatgatgtagctgatgaaccaatctgcatggagccattttcatttgattttgagcaacaacaattggatgaagagcaaataaaagagatgatctacagggaagcattagcactcaatcctgagtatgcttaaagcagaaaaactcaaggacttgaagcaggcttagaaggaaaaataataattcgttttcaatttttttaatcactttaagttcagtt

SEQ ID NO: 173205 - DNA, 266 bp, Glycine max
gttaaggatgggtttattatcaggaagccaactaagattcactctcgctctcgtgctcgtcgaatgaaggaggccaagaggaagggacgtcactctggctatggtaagcgtaagggtacaagggaggcaaggcttcccaccaaaatcctttggatgaggaggatgcgtgtcctcaggcgcttgcttcgcaagtacagggaatcaaagaagattgacaagcacatgtaccacgatatgtacatgaaggtgaaaggtaatgttttcaa

SEQ ID NO: 173206 - DNA, 271 bp, Glycine max
ctcacacaatctgggaaccacacacacaaaccattcccttttctcactacggcaatgaccacccaagcttccaccttcgccgtcgccgttccctccgtcgcaacccctttccgccgccaccggaatcccttcgttgttcgagcccaagcggaaccttcagataaatccgttgaaattatgaggaagttctcagagcaatacgcccgtaagtcaggaacatacttttgtgttgacaagggggtcacttctgttgttatcaaggggttggctg

SEQ ID NO: 173207 - DNA, 247 bp, Glycine max
tctcgagccgaatcggctcgaggtgcatgctatgcagagcgaatagacctttctgcccatggcttttatattacacctgatattggttttgattggacgataggcaaaggaaaaccttttagatatttcacttatggggctgcgtttgctgaggttgaaattgacactctgactggagattttcacaccagagtggccaacatatttttggatctaggttattcgctgaatccagcgatagatgttg

SEQ ID NO: 173208 - DNA, 234 bp, Glycine max
gaaaaccctagctcaccgtttcaagatgcaaatcttcgttaagacactcactggtaagaccatcactctcgaagtcgagagttcagataccatagacaatgtaaaggccaaaattcaagacaaggaagggatcccaccagatcagcaacggctcatttttgctggcaagcagcttgaggatggacgtacccttgctgattataccctccaaaaggagtcccatcaccacttggt

SEQ ID NO: 173209 - DNA, 272 bp, Glycine max
aacaaaggctctgcaattgcaaattcagaggatgtcgatcttcgagtacaacggaagcgccgtggtggctatggtcggcaagaactgcttcgccattgccagcgaccgatagctcggcgttcagctccaaactatagccacggattttcaacgcatttccaagattcacgacaagctcttcatcgctctctctggcctcgccaccgatgctcaaacattgtatcagcgtcttgttttccggcacaaactgtaccagctgcgtgaagagaggg

SEQ ID NO: 173210 - DNA, 266 bp, Glycine max
cacggcgcaaaggggaacaagaagaagaagatggtgtccttgaagcttcagaagcggctcgccgctagcgtcctaaagtgtggcagaggcaaggtctggctcgatccaaatgaagtcaatgaaatctccatggccaattctcgacaaaacataagaaagttggttaaggatgggtttattatcaggaagccaactaagattcactctcgctctcgtgctcgtcgaatgaaggaggccaagaggaagggacgtcactctggctatgg

SEQ ID NO: 173211 - DNA, 179 bp, Glycine max
ctcgagccgaatcggctcgaggccgtttcagctcaagagccaccagcaggtaagatatgggcaagcataacaacgttatccccaatgggcacttcaggaaacactggcaaaactatgtgaagacttggtttaatcaaccagcacggaagaccagaaggcgtttagctcggcagaagaag

SEQ ID NO: 173212 - DNA, 254 bp, Glycine max
ggagaggggtgactgtgtgaaggatgaaggagctgaggattttgttgatgttttgcttgatttggagaaggaaaacaggctcagtgaagctgacatgattgctgttctttgggaaatgatattcaggggaactgacacggtagcaattctgctagagtggattctggctcgcatggttctccaccctgaaatccaagcaaaggcacagcgcgaaatagacttcgtttgcggatcctccagctcgtatccgaagc

SEQ ID NO: 173213 - DNA, 268 bp, Glycine max
ggtagaacccttccacggtggtgactgcgcgatgggtgcctacaagtatgtttcagagctatggcgcaagaagcagtctgatgtcatgcgcttcttgcagcgggtgaggtgctgggagtataggcagcaaccttccattgttcgcttgacaaggtcgacccgccctgacaaggctcgtcgcttgggcttcaaggctaagcagggctatgtgatataccgtgttcgtgttaggaggggtggccgaaagaggccagttcccaaaggtatt

SEQ ID NO: 173214 - DNA, 267 bp, Glycine max
ctttccttcttttcactacttgtctcttccctttttctttccagaacaacagaacaacagagcaaaaagctccaccaatggcgggttacagagccgacgacgactacgactacctcttcaaggtggtcctcatcggcgactccggcgtgggcaagtccaacctcctctcgcgcttcaccaagaacgagttcaacctggagtccaagtccaccattggcgtcgagttcgccacccgcaccttgaacgtcgattccaaagtcatcaagg

SEQ ID NO: 173215 - DNA, 262 bp, Glycine max
gcgcttcacgatgggtgcttacaagtatgtttcggagctatggcgcaagaagcagtctgatgttatgagattcttgcagcgggtgaggtgctgggagtaccgccagcaaccttctattgtccgtttgacaaggtctactcgcccagacaaggctcgccgcttgggtttcaaggctaagcagggttatgtgatttaccgtgttcgtgtacgaaggggtggccggaagagaccagttccaaaaggtattgtttatggtaagccc

SEQ ID NO: 173216 - DNA, 265 bp, Glycine max
tcccaattttcaccaaaacctaatactcccaaaccaatcttcgatcatggccgccgaatcacaacctcaactaatcgaagagagaagagaggagcaagaacttaagtacctggaatttgtgcaattcgcgaccatccaggccctgatgcgctgcgccatcctctactcctacgccaaggagcgcgcgggtcctctgaagcccggcgtcaacaccgtcgatgaggccgtgaagaccgtcgtggctccggtctacgacaggttccac

SEQ ID NO: 173217 - DNA, 253 bp, Glycine max
ctagaattagggcaattacgtttactagaagtggacaatagagtggtagtgccagctaaaactcatctgcgtgttattataacatcagctgatgtacttcatagttgggcagtaccttccctgggtgtcaaatgtgatgctgtgcctggtcgtttgaatcagatctctacttttatacaaagagaaggggtttactatggtcaatgcagtgagatttgtggaactaaccatgcctttatgcctattgtcatag

SEQ ID NO: 173218 - DNA, 269 bp, Glycine max
caacacatgccgtggtttatgcccgactaattactgatggccaagatcatggagtgcatggtttcattgtccagctgcggagcctggatgatcacttacctcttccaggcataactgttggtgatattggaatgacatttggaaatggagcatataactccatggataatgggatgctaaggtttgaccatgtacggattccaagaaatcaaatgttaatgagggtttcacaggtaacaagggaaggaaaatatgtacaatccagtgtt

SEQ ID NO: 173219 - DNA, 202 bp, Glycine max
ctcggctcttgcatcgatgaagaacgtagcgaaatgcgatacttggtgtgaattgcagaatcccgtgaaccatcgagtctttgaacgcaagttgcgcccgaagccattaggccgagggcacgcctgcctgggtgtcacacatcgtttccccaacgcaaacatgtaacaatgttgctgcgcgggggtgtatgctgacctcccg

SEQ ID NO: 173220 - DNA, 262 bp, Glycine max
gacaaaaaacaaggatcagaaccgttgaatcaagttgaggaagatggcactagtctctggaggaagatcaacactgaaccctaacgcccctctttacattcctgccgcgtttcgccaagtggaggatttctctccggaatggtggcagctggtgacgacgctgacatggtaccatgactactggctaagccagcagcacgatgagggagccttctacggcgaggacgacgggtttgatggcaatgatgtcgttgatttgctt

SEQ ID NO: 173221 - DNA, 271 bp, Glycine max
tgcaacattgagcagaaaatctcacagtcgaaggaagaaataatcaccaatggcaattgaacacgaagacgatctcaaagacgagaagaaccctcgacccctcgacgaggatgacatcgccctcctcaaaacctacggtttgggaccttattccacaagcataaaaaaggcggagaaggaaatcaaagatatggccaagaaagtgaatgacttatgtggtatcaaggagtctgatactggattagcagcaccaagccagtgggatcttgtt

SEQ ID NO: 173222 - DNA, 267 bp, Glycine max
attgcaactagctaatggctatgcatggaacttcttgtttggtgccttctgttctggagctagcaaaacaacccatcatcgaagttccagaacgatatgttcatgccaatcaagatccacatattctttccaacacaatttctttaccacaagttcccatcatagacttgcatcaattgttgtctgaagatccaagtgaactagagaagctggaccatgcgtgcaaagaatggggtttctttcagcttataaaccatggagtggacc

SEQ ID NO: 173223 - DNA, 180 bp, Glycine max
ctgcgatgtgtgcagctgtaaaggtgaacttgctctggctcaccatgaatgtgcaattaaatggtttagtataaagggtaacaagacctgcgatgtgtgcaaggaggaagttcgaaacttacctgtcacactattacggatccaaagtgttcgaaatcggaatactggtggaaataggtc

SEQ ID NO: 173224 - DNA, 265 bp, Glycine max
ttcgctcttcctctgtttcctctgtttcgagatctctgtttcgtcccttcgattgcccggtttggaccaagacgccaaggccacgcatggatcggtgctaaggttgaacagaggtggctcttcagtgaagtttgatcccacacgggtcactcagctctcgtggagtcccagggcttttctgtacaaggggtttttatccgaggaagaatgtgatcatttgatagttctggccaaggacaagctggagaagtctatggtggcagat

SEQ ID NO: 173225 - DNA, 267 bp, Glycine max
ctttccattctcttcaacctaacgcagcatcgctatactcttcattccatggctttgcccaatcagcaaaccgtggattaccctagtttcaaactcgttatcgtcggtgatggtggcacaggaaagacaacctttgtgaaaaggcatctcaccggagaattcgagaagaaatatgagccaaccatcggtgtggaggttcacccattggattttttcacaaactgtggaaagattcgattctactgctgggatactgctggacaggag

SEQ ID NO: 173226 - DNA, 265 bp, Glycine max
attttctccttcctcttccttcttcttgtttcatcttccactgcttgtgatcgctgcttgcaccaatccaaggcttcctatttctccaaagcttctgctctttcatctggggcatgtgggtatggctctttggcactagacataagtggtggacaccttgcagctggtgtggcttctctcttcaaagatggagcagtttgtggtgcctgctttcagataagatgcaagaacccaactctatgcagcaaagaaggtaccagagtgg

SEQ ID NO: 173227 - DNA, 262 bp, Glycine max
aaacctctcagcccctctccgatcaaatggccaccgtaatcgacggcaaagccgttgcgcaaaccatccgatctgaaatcgccgacgaggtgcgccactctctcaaaaatacggcaaggttccgggattagcggtggtgatagtagggaacagaaaagattcacagagctatgttggaatgaagagaaaggcatgcgctgaattgggaatcaaatccttcgatgtggaccttcccgaacaagtctcccaagctgaactaatc

SEQ ID NO: 173228 - DNA, 264 bp, Glycine max
cttcgtttgcgtttttatcacagaggaattaacatatatatagcaagcatggcagtcacactctacgaccttagctcttcctctgggttgaagaaacttgatgagtaccttctcccacgcagttacatcaccgggtaccaagctacaaaggatgatcttactgtttatgcagctttgccaactgctccatcagatgaatatggaaatgtttccaggtggtacaagcacattgatgctttgttgagaatctctggtgttactggc

SEQ ID NO: 173229 - DNA, 265 bp, Glycine max
cgttgtcttctcacttcgtcaaaaccaaccaaacccctccccaattctcaagccaaccatgtcttccttcaagagcaagtaccaagatgaactcattgccaatgctgcttacattggcaccccagggaagggtatccttgctgctgatgagtcaactggtacaattggcaagcgattggccagcattaatgtcgagaatgttgaagcaaataggcgtgctcttcgtgaatctattcaccacactggtgcttttgagtggcctcag

SEQ ID NO: 173230 - DNA, 229 bp, Glycine max
ttcatttctacacatccctagctctgtcgttccgtcgttgacgatggcgtttcgggtgcgaaccctgacctccgctctctctttcttctctctctcttgtccatcgcttccgccaatgtcttcttcgaagagcgtttcgatgacgggtgggaaaatcgatgggttaaatcagattggaaaaaagatgagaacgtggctggggagtggaaccacacctctggtcaatgga

SEQ ID NO: 173231 - DNA, 266 bp, Glycine max
cctaaacctaaacctaaacctaaacataaactgaatttcccaaatccccttcccaattttcaccaaaacctaatactcccaaaccaatcttcgatcatggccgccgaatcacaacctcaactaatcgaagagagaagagaggagcaagaacttaagtacctggaatttgtgcaattcgcgaccatccaggccctgatgcgctgcgccatcctctactcctacgccaaggagcgcgcgggtcctctgaagcccggcgtcaacaccgt

SEQ ID NO: 173232 - DNA, 178 bp, Glycine max
caagatgtatcaacaatgttgcggtgtgggcaaaagaccattatctttctggtcaacaatggcggatacaccattgaggttgaaattcatgatgggccatacaatgtgattaagaactggaactacactgggttgattgatgcaatccacaatggtgaagggaaatgctggactgcca

SEQ ID NO: 173233 - DNA, 268 bp, Glycine max
ggctcagacagaactagaactatggtatcatctttgccatcagtaaacgacaatgatttacgacgttaactctcctctttaccgatccttcctcagccagaagggaggctcctctgataagaggaaatcggacgaacagaagccaaaagagcagaaacccaaagccagcgagaacatacctataatgactgagtgataacagctgagctgcattcagttgtagaatgaaaataggtggtaggtattgtatttggtgctaaactaagat

SEQ ID NO: 173234 - DNA, 261 bp, Glycine max
ctcttttcttattgcttgttgcgttctccctcgttttcgcggccgtgtcggcctcttcggacggcggcaacgaggaaccgctgatcatgcaggtggtcgatggcggtgacgtccggctgggagcagagcaccactttttggagttcaagcgcaggttcgggaaggcgtacgattccgaggacgagcacgattacaggtacaaggtgttcaaggctaacatgcgccgcgcccgacgccaccagagtctggacccttcggcgg

SEQ ID NO: 173235 - DNA, 261 bp, Glycine max
caattttctagggttttattcattttccgatggcttctgcagatgttgagtaccgttgctttgtcggtgggctcgcttgggccactgacgaccatgccctcgagagagccttctctcagtacggcgaaatcgttgaaacgaagattatcaacgatcgtgagactggcagatccaggggttttggatttgtgaccttcgcctcggagcagtccatgaaagatgcgatcggagcgatgaatggacagaacttggacggccgta

SEQ ID NO: 173236 - DNA, 265 bp, Glycine max
atttgcatttgcatttcatttggcgttttgtttctttctggaagcttcacttcggcatccatggcgtcgttcgaagaagctcctcccggaaactccaagaacggcgagaagatcttcaagaccaagtgcgctcagtgccacaccgtggacaaaggtgccggtcacaaacaaggacccaatctgaatggtttgtttggaaggcaatctggcacaactcctggatattcctattctactgctaacaaaaacatggctgtgatttggg

SEQ ID NO: 173237 - DNA, 265 bp, Glycine max
cttagctttgattctctgttctctgttttgttctgtttcgcgtacaggaacttaaacaatgaagactgcaaagggcaagggagcagcgaggccctcaaaagaatcactgaagcctgttgatgaccgaaaggttggaaagcggaaggcttctggtaagcctgagaaaagcagagcaccaaagaaggagaagaaggccaagaaagaccccaacaagcctaaaagaccaccgagtgctttcttcgtgttccttgaggagttcaggaag

SEQ ID NO: 173238 - DNA, 263 bp, Glycine max
tgtttctccctcccctttctctcttcgttcaatcgtgatcgtaagactttcaagctatttggttctgaagcttttgttcaatggcaaaggacaagcctgtttctgtcaaagatgccgtcttcaaattgcaaatgtcactccttgaaggcattcaaaatgaagaccagctgtttgctgccgggtctttgatgtcaaggagtgactacgaagacattgtaaccgaacgatccatcacaaacatgtgtggttatccactctgcagc

SEQ ID NO: 173239 - DNA, 261 bp, Glycine max
gcaagtaaaattaaggagaaagctagggtagttgcaatggacttgagaggtcatgggaaatcattgacagaagatgatcttgacttatctgttgagactatgtgcaatgatgtattggctgttataaaggaattatatagcgactctcctccagccatcattcttgttggtcacagcatgggaggatcaattgctgtgcatgttgctgcaaggagatcattgtctgccttggcggggttggttgttgtggatgttgtagag

SEQ ID NO: 173240 - DNA, 264 bp, Glycine max
aaaaaaaccctctctttctctctcttccaaaacctaattttcattttttctcttcaaacaaattttcaaaatgcgtgagatccttcacatccagggtggccaatgcggcaaccagatcggcgccaagttctgggaggtggtttgcgcggacacgggatcgaccccactggaaggtacggtggggactcagagcttcagctcgagaggatcaatgtctactacaacgaagccagctgcggccggttcgtgccgcgcgcggttctc

SEQ ID NO: 173241 - DNA, 262 bp, Glycine max
cacaacacagcctcaaaataaaccatgcagatacaaaccctcccacttgcatccccggctccaagaatcacccggcaccactttccgcggccaccgaaatgcgcagttaccgccacaccgccgccattgaaggagaggagaaaccactcaatgccgccggaaaagatagagattttcaagtccctggagggatgggcctcacagcgggtcttaccgctgctgaagcccgtggagcaatgctggcagccccagaagttcctcc

SEQ ID NO: 173242 - DNA, 254 bp, Glycine max
gcattggcctggaaaaagattgagggaaaaggctattatttctgcattggagcatatacattacgaagatgagaatactcgatatatttgcataggtcctgtaaataaggtgttaaatatgctttgctgttgggtggaagatccaaattctgaggccttcaagttgcatcttcccaggatttatgattatctatggattgcagaagatggcatgaaaatgcagggctacaatggaagtcaactatgggacactg

SEQ ID NO: 173243 - DNA, 255 bp, Glycine max
gttattttgagtgaaggttagaagtgctacaaacaatggcagctggtcaggaagatgtgaagcttttgggagttgtgggaagcccatttgtgtgtagggtccagattgccctcaagttgaagggaattgaatacaaatttgtggaagaaaatttggccaacaagagtgatttgcttcttaaatccaacccagttcacaagaaagttccagtttttattcacaatgagaagcccatagcagagtctcttgtgattg

SEQ ID NO: 173244 - DNA, 256 bp, Glycine max
aaaaaccctaggtagagagctcttcctccctttctcacagcaatggccgccgcagcacgccctctcgtcaccgtgcaggccctcgatggtgacatggcaaccgatgcctccgccaccgttcccatccctgacgtcatgaaggcctctatccgccccgacatcgtcaatttcgtacactcgaacatctccaagaacagccgccagccatacgatgtgcatcgtcgcgctggtcaccagacctccgccgaatcctggg

SEQ ID NO: 173245 - DNA, 254 bp, Glycine max
  unsure (1)..(254): unsure at all n locations
gacagttcatcagctatgtaaacaagctgtagcccaggnccaagctggagcagatgttgtcagtcctagtgatatgatggatggtcgggnaggannactgcgtgcagctctggatgctgaaggctttcagcatgtttctataatgncctatacagcaaagtatgcaagttctttttatggtccatttagagaggcactagactcaaacccccggtttggagacaagaaaacttatcagatgaacccagctaatt

SEQ ID NO: 173246 - DNA, 254 bp, Glycine max
gagagcttccatgatgtccaggtgaaggaccgcagtttaatctggaactccgacttgattgagactattgaattggaaaatcttttgataaatgcatgcatcacaatgtactctgctgaagctaggaaagagagtagaggagctcatgcccgtgaagacttcaaggttagagatgatgggaactggatgaaacacactgtgggattctgggagaacgagaaggtccggttggactacaggccggtgcatttgaa

SEQ ID NO: 173247 - DNA, 261 bp, Glycine max
agaagatggcctcacaggtttgcaaatctgcttccagagccgcgaggtcccttctatcctctcgttttcactctcaaggacgtgcgcttggggctgctgcggctgtttcattgagcagcaaagtgcctctttttttacggaaagaacggttctggaaatggatccgcttcttcatcatcatcatcatcatggatttcaggagctcttgctcttcctgccgcagcttacatgttccaagatcaggaggtgcaggcagctgag

SEQ ID NO: 173248 - DNA, 254 bp, Glycine max
gttgtattgtaattaagcaagaatattaggcaatggagtcttctagaacttcaactactcttgctctttttttaaccatcaatttgcttttctttgtcatggcaagtggctgctacacttgcacacagcctaagccaaaccctatcccattcccttaccctaaccctagtcctgccgcgaagagctgccccagggacgcacttaagctcggagtgtgcgcaaacgtgcttaatggaccaattggtgctattgta

SEQ ID NO: 173249 - DNA, 254 bp, Glycine max
ctcaacacaaaccaaaactcaagctaaaattctcactctctctctcatctcgagatcatagtatcatattcaatatcatttcataccaaacacatggctttggaagctctcaactcaccaacaacaaccgctccatcttttccctttgacgacccaactattccatgggcgaaacgaaaacgttcaaagcgttctcgcgaccatccttctgaagaagagtacctcgccctctgcctcatcatgctcgctcgcgg

SEQ ID NO: 173250 - DNA, 249 bp, Glycine max
aagaatgtggtgactcgagaggtatctgaattgaaggtttctgggttgtttttcgcaattgggcacgagcccgcaaccaagttcttggacgggcagcttgaattggattctgatggatatattgtgacgaagccggggacgacgaagaccagtgttgagggagtgtttgctgctggggatgttcaggacaagaagtataggcaagctattactgctgctggcactggatgcatggcagctttggatgca

SEQ ID NO: 173251 - DNA, 251 bp, Glycine max
gagtttctgagataaccacttttctctttgattcatcaatggcaaccgcgaggaccgtgaaggatgtttcgcctcacgatttcgtgaaggcttacgcctcccatctcaagcgttccggcaagatggagcttcctgagtggactgatattgtaaaaacagcaaaatttaaggaattggctccatatgatcctgactggtattatgttagggctgcctcaatggcaagaaagatttatttgagaggcggtctt

SEQ ID NO: 173252 - DNA, 180 bp, Glycine max
ataatgtgaaatatatatgaaactacattcaacattaattatgcaggacatatttgcagctggaaccgatacttcagcaaaagtaatagagtgggcaatgtcagaaatgatgagaaatccaggaggaagggagaaggcacaagctgagatcagacaaacgttctgaggaaaagaagcaat

SEQ ID NO: 173253 - DNA, 255 bp, Glycine max
cgacttacatccaacgcacaaagcgagtcactcactcatggcatcctccgctctcatctccgacacccagcaatggaaggacctcaaggcacatgtggaggacatcaataaaacacatcttcgcgatctattgagcgatgataagcggtgccagtccatgctcgttgaattcgatgacattctgttggactattcaaggcaacaagccactcctgaaactatccagaagctatttgaattagcggaggctgcatc

SEQ ID NO: 173254 - DNA, 252 bp, Glycine max
gtcgacgtcaaggttaacggcgccgtccacaagggaatgcctcacaagttctaccatggccgcaccggtcgcgtctggaatgtcaccaaacgtgctgttggggtcgaagtcaacaagcaggtcggcaacagaatcataaggaagaggattcacgtgcgtgtggagcatgttatgccatcaaggtgcactgaggagttccgccttaggaagatcaagaatgatcagctcaaggctgaggccaaggccaagggt

SEQ ID NO: 173255 - DNA, 250 bp, Glycine max
cgccaatctgaagcagcaagtgggtcttggtgccaaacccacttgttcatttgatgggaataatcagaggaagtttgtggcaatggcttctaccgttcctgtggagcaagtcaacaatggccccctgcaggtgacaggtgactccttcatcagagagcatctgaggaagttggctccttatcagcccattttgccctttgaggttttatcagctcgccttggacgtaagcctgaggatatcgtgaagtta

SEQ ID NO: 173256 - DNA, 250 bp, Glycine max
ctagtgcaccgtaagggttgtgaagcaggcagagaagagccatggtgcacgtttctttctaccgaaactatgggaaaacgttcaagaagcctcgtcgtccctacgagaaggagcgtttggacgccgagttgaagctggtcggtgagtacgggcttcgctgcaagagggagttatggagggtccagtacgccctgagccgcatccgtaacaacgccagaaacctattgacccttgatgagaagaaccctcg

SEQ ID NO: 173257 - DNA, 251 bp, Glycine max
ccatcggcagttagagacagagagagagagaaacaaaaccctaattggtgagtggcgaaaatggcgcaccggcggcggcagcagcagcaacaggagcagcagtaatcgagcaagtgcagtgcttcgggcggaagaagacagcggtggcagtgacctactgcaagcgtggtcgaggcctcatcaagatcaatggctgcccgatcgagctggtggagccggagatcctccgtttcaaggccttcgagccaatc

SEQ ID NO: 173258 - DNA, 251 bp, Glycine max
cggctcgagcggctcgagcggctcgaggagggaagaactgaatgagcagaagcgaaggtttcctttgagttacaagactttacgagaaagagatttctcctcagtatgctatacaggttcttgacgagttaaccaatggggaagctattgtgagtaccggagttggacagcaccagatgtgggctgctcagttttacaagtacaagaggcctaggcagtggttaacatccggtggtcttggtgctatgggg

SEQ ID NO: 173259 - DNA, 249 bp, Glycine max
ccagtttggtataatatgttggaaggagggctcatatcccacaaaattttctctctttggctaaatcaagatccatcagaagagatggggggtgagattgtctttggtggtattgactacaggcattttagaggagaacacacatacgttccactttctcaaaaaggttattggcagattgatttgggagatattctacttgcaaataattcaacaggcttatgtgagggtggctgtgctgcagttgtt

SEQ ID NO: 173260 - DNA, 210 bp, Glycine max
atcactagaagtgttggatgcatttctatttctaactaattattgtgcttattattattgttgagaaagaaaagaatggcaaagttaataaaattctttgagttgaacacaggggccaagattccttctgttgggttaggcacttggcaagctgagcctggtgttgtagccaaagctgtcaccacagcaattctggttggatacaggcat

SEQ ID NO: 173261 - DNA, 255 bp, Glycine max
gcgaaacgctcttcgttatcttttctcagactccgcggcgtagatccgaggagttcgggaaatcctaactcatcatctcaactcaagtcatggctggacttgcacctgagggatcacagttcgatgctcgtcaatatgattctaaaatgagtgacttactttcatctgatggacaggacttcttcacatcctatgacgaggtttatgatagttttgacgctatgggtttgcaggaaaatcttctcaggggaattt

SEQ ID NO: 173262 - DNA, 255 bp, Glycine max
gtgattgcctccctctgctgccgtccctaatctgaaggctcccgccatctgcgatcggatttcatggctccaaagaaggacaaggctcccccaccttcatccaagcctgccaagtctggcggtggcaagcagaagaagaagaagtggagcaagggtaagcaaaaggaaaaggtgaataacatggtgctcttcgatcagggtacctatgacaagctcctctctgaggcacccaaatacaagctcattactccttcc

SEQ ID NO: 173263 - DNA, 251 bp, Glycine max
gcggtaggctcatccgagaccggaagcagcaatggggatcgatctcaaggccggaggtaaaagcaaaaaaaccaaaagaacagcacccaagtccaatgatatctatcttaagctcttggtcaagctttatcgcttccttgttcggagaactggcagcaaattcaatgccgttatactcaagagattgttcatgagcaaggttaacaagcccccattgtctttgtcaaggttgattaagtataccaagggga

SEQ ID NO: 173264 - DNA, 245 bp, Glycine max
aaggtgtaaaaatatggtttcttgccattatctacttcatagcaggggtccctggagcatatgttctgtggtatcgcccattatatcgtgcttttaggaatgaaagtgctttgaaatttggatggtttttcatgttttatctgcttcacataggattctgcatcttagctgcagttgctcctcctatagttttcaaaggcaaatccctgacgggcattctggctgccatagatgtgctgggcgac

SEQ ID NO: 173265 - DNA, 250 bp, Glycine max
gtctgaaactattatccacagtagctaagcctgcaagcttcgccgtttgaaacagtgcctcaaccatggcagaacaaacagagaaggcttttctgaagcaaccaaaagtgtttctatgctctaaaaggtgggaagggaaagaggcctgggaaaggtgggaatcgcttttggaagtcaattgggcttggattcaagactcccagagatgccattgaaggaacctatattgacaagaagtgccccttcactg

SEQ ID NO: 173266 - DNA, 249 bp, Glycine max
agcagccatggggatcgatctcaaggccggaggtaagagcaaaaagaccaaaagaacagcacccaagtccaatgatatctatctcaagctcttggtcaagctttatcgcttccttgttcggagaactggcagcaacttcaatgctgttatacttaagagattgttcatgagcaaggttaacaaacccccattgtctttgtcaaggttgattaagtatacgaaggggaaggaagataagattgcagtggt

SEQ ID NO: 173267 - DNA, 248 bp, Glycine max
cacaaatcttagccgccattgatttttcctcttccatttctcttactttctcagcctttttcgattacccatttggttatttcgccctaatggctcttgctccatccaaagtttccaccttttctggtttttctcccaaacccagtgttgggggtgctcagaaaaacccaacttgctctgtttctctgagctttttgaatgagaaacttggaagcagaaaccttagggtttgtgcctcaacggtgcct

SEQ ID NO: 173268 - DNA, 250 bp, Glycine max
gtgatgtggtaattccagttatcctaccagaatgtggggagtgcatagattgcaaatcaaccaagagcaaccggtgcactaattttcctttcaaggtgtctccttggatgcctcgagatggcaccacaagattcactggccaaaatggagagatcatataccatttcttgtttatttcaagtttcagtgagtacactgtggtggacattgctaatctgataaagattgatccagaaattcctcctgacag

SEQ ID NO: 173269 - DNA, 253 bp, Glycine max
caaatttctcagatctatccgacgtcgtcgcagatccaccaaccgttatggctgccttcagcggtgatgaaacggctccgtttttcggcttccttggagccgcagctgccctcgtcttctcctgtatgggagctgcctatggcacagcaaagagtggtgtgggcgtggcttccatgggtgtgatgagacctgagctggtgatgaagtctattgtccctgttgtcatggctggagttttgggtatttatggcct

SEQ ID NO: 173270 - DNA, 249 bp, Glycine max
gaggcattcgaaatcggtgaagatggttgctatgaggtttcatcagtaccaggtggtgggaagggctcttcctaccgaatccgatgagcatcctaagatctaccgcatgaaactctgggcaactaacgaggtccgtgccaaatccaagttctggtattttttgagaaaattgaagaaggttaagaaaagcaatgggcaagtgctagccataaatgagatttttgagaggaatcctaccaagattaagaa

SEQ ID NO: 173271 - DNA, 248 bp, Glycine max
gcagaactctgcttcttcggattccgatcgcacgcgccgtcaccatggtgaacgttccgaaaacaaagaagacatactgcaagagtaaggagtgcaggaagcacacgctgcacaaggttacccaatacaagaagggtaaggatagcattgctgcccaaggaaaacgccgttatgatcgcaaacaatccggttatggtggacaaactaagcccgtcttccacaagaaggctaaaaccaccaagaagatt

SEQ ID NO: 173272 - DNA, 243 bp, Glycine max
tttgatgccaatggtggacccatctcgaaagagttgattcccaaactcagtgtggtgaagaataatttatcctctaaattgggggtagcgctaccagatattgatgcccggcaattcattgctaccatcatatttcttaagggggttggagggattttgtttgtgtttggaagcacatttggatctttcctactgcttttgcatctggcgattactactccacttctgtacgatttctataac

SEQ ID NO: 173273 - DNA, 246 bp, Glycine max
tgaattctcagtcgcttctcgaaccctacttcttccgcggtgattgcatttgaattcctgtaatggcgattgataatatttttaaacatgaagccagtgaagaaaaaggagagcgggccagaatggcttcttttgttggagccatggctattgctgacttggtgaagacaaccttggggccaaagggaatggataaaattttgcagtcaacaggtagaggacgtgaagttactgtcactaatgatg

SEQ ID NO: 173274 - DNA, 244 bp, Glycine max
aaaaggagagtgcaataactcgttgtacattcctagtgtgtgggagagacatggctaagatgtgtgttttggtgttggttcttgctctggctgtggccacaagtgccagaaacgttcccaaccccaaggatgctggtcttaaggaccagaagaacttcatcagctatggtggagttggtggttattccgggattgggaacaatggactgccttttggaggagctggtgccggaataggtggtgg

SEQ ID NO: 173275 - DNA, 236 bp, Glycine max
gccgaaggttcatccaatctccgaaggccttcaccggattgcaaccatgtcgaggagaaaggttagagagccaaaggaggaaaacgtgactctgggcccagctgttagagatggtgaacatgtttttggagtcgctcgcatctttgcctccttcaatgacaccttcattcatgtcactgatctgtctgggagggaaacacttgtccgcatcactggcgggatgaaggttaaagctg

SEQ ID NO: 173276 - DNA, 244 bp, Glycine max
tgatactcttcccattatttttgaacgaggtctgttcggtatatatcatgattggtgtgaatcatttagcacctatcctaggacctatgatctcctccatgctgatcatctgttttcaaagcttaagaaaaggtgcaatttggcagctgtagtggccgaggctgatcggattcttaggcctgaaggaaaacttattgttcgtgacactgtggagatcgttgaagagcttgagagcatggctagg

SEQ ID NO: 173277 - DNA, 247 bp, Glycine max
gtctgcttcgagattccaaatgcaggtcttcaagatgccaccagcgcttaaccgatcccagcttttgcacccgcagaactggaacataagtggcacactcaaccctgactataaatgtggccctcctgtaagagtgagtcctactgaaaatcctgacccatccggcttaccatcaaacaaaactgtgatggccagttggcagattgtgtgcaacataacaacagccaagagaacatcaagtaaatgt

SEQ ID NO: 173278 - DNA, 243 bp, Glycine max
cccaatcgtagccgtcgcactttgcgttttctgcgtcatctccgattccccgacaatggccacccaaatgagcaagaagagaaagttcgtagctgatggagtgttcttcgctgaactgaacgaggttctgacaagggagttagccgaggacggatactccggcgtggaagttagggttacgccgatgcgcaccgaaatcatcatcagagccaccagaacccaagccgttctcggtgagaaggg

SEQ ID NO: 173279 - DNA, 174 bp, Glycine max
gtggcagcgacacgtatcaacttcaataatcgcatcgcagaagcagtttccggtgcatctcatcgtctccgaaaatgaacgacgcagatgtctcgaagcaaatccagcagatggtgcggttcatccgccaggaagctgaggaaaaggccaacgagatctctgtctccgccgaag

SEQ ID NO: 173280 - DNA, 104 bp, Glycine max
gatgggtaaggaaaaggttcacatcagtattgtcgtcactggccatgtcgactctgggaaatccactaccactggtcacctgatttacaagcttggaggcattg

SEQ ID NO: 173281 - DNA, 268 bp, Glycine max
  unsure (1)..(268): unsure at all n locations
ggaancttttgtgtnatgttctacttctgttaacatactcgtgaatcgtttncaagttcttnaccgttttctgttgcagatggcttctncgtttctatccgcagattcgcacnctgtcctcancctcttgttctctnnccaccacgcacaagggaaagcccatgntggaggcaacactttgagatttnacaaaaggacacaattccttctnnnagttccaaggtctagnggncggnatctctntggntgttgcagtgtangtnncctc

SEQ ID NO: 173282 - DNA, 264 bp, Glycine max
tcggctcgagcatccctagctctgtcgttccgtcgttgacgatggcgtttcgggtgcgaagcctgacctccgctctctctttcttctctctctcttgtccatcgcttccgccaatgtcttcttcgaagagcgtttcgatgacgggtgggaaaatcgatgggttaaatcagattggaaacaagatgagaacgtggctggggagtggaaccacacctctggtcaatggaatggagacgctaatgacaaaggtattcaaaccagtga

SEQ ID NO: 173283 - DNA, 252 bp, Glycine max
catgcagaagagatcggcgcgtttcatttgatcagatcataacaatggtgtccgaaagactctcctgggcatgggtaaccctctcctcgacatctccgacgtcgtcgatgaagacttcttaaaaaaatatgatatcacctcgaacaatgcgattcttgcggaggacaagcacaagcctatgtatcaagaattggctgagaaatataatgtggagtacattgctggaggtgccactcagaattcaatcaaggt

SEQ ID NO: 173284 - DNA, 251 bp, Glycine max
gaacaactgaagaaccaacaagaggggtattgagattgagattcaagtaatggggaagagcaaggttcttgtggtggggggaactgggtacatagggaggaggatagtgagggcaagcctggcactgggccatgagacctatgtggttcagaggccagagttgagcctccagatagagaagctgcagaggctcctctccttcaagaagcaaggtgctcatctcattgaggcctctttcaatgatcacaaga

SEQ ID NO: 173285 - DNA, 250 bp, Glycine max
ctctccgcagcagccacacttcttcgccgtttcagctgaagagccatccgcaggtaagcaatggttaagcataataatgttatccccaatgggcacttccggaaacactggcaaaactatgtgaagacttggtttaatcaaccagcccgaaagaccagaagacggttggctcggcagaagaaggctgtcaagattttccccaggcctactgctggatctctcaggcctattgttcatggccagactctga

SEQ ID NO: 173286 - DNA, 251 bp, Glycine max
caatatagcccaagcactatacaaacaaaccctaacacacacccatttgattcagtttccatggctagactcaaggttgcatttttggctgcagtgctctgcatggttgtggtgagtgcacccatggcacatgcagctatcacgtgcgggcaggtgacgaatagcctgatcaattgcatcggttacctccagaacggaggaacgccgccgtcgggatgctgcaacggagtgaagagcctcaatgccgccgc

SEQ ID NO: 173287 - DNA, 247 bp, Glycine max
tgcctccctttttatactcaaaaccctaagacacagaggagaacacaaacagcagcgttttggtttgtgagagagacagaggcacagagagaaaatggtttcggggtcaggaatctgcgcgaagagggtagttgtggacgcgcggcaccacatgctggggaggctggcatcgatcgtggcgaaggaacttctgaatgggcagaaggtggtggtggtgcggtgcgaggcgatttgcatctccggtggg

SEQ ID NO: 173288 - DNA, 250 bp, Glycine max; identical to SEQ ID NO: 173256

SEQ ID NO: 173289 - DNA, 249 bp, Glycine max
gagagtgttagcaccaaaaatgtcgaagttaatcttcgtgttccttgcactaattcctcttctctgcacctccttctcgccagagaaaccctcagatcggcgcgtcctcgttttgctcgatgacttcgccatcaaatcctctcactctctcttcttcaactccctcatctctcgcggcttcgatctccaattccacctcgccgacgaccccaaaattgcgctccagagatacggccagtacctctacga

SEQ ID NO: 173290 - DNA, 248 bp, Glycine max
gcaatctgttctaattagaaatagaaggttcatcatctcaaaaaggcttttgtgattctcgatttgatttggatcgcacagaacgaaggcatgggtcaagcttttcggaagctcttcgacaccttcttcggcaacaccgagatgcgggttgtgatgcttggtctagatgctgctggcaaaacaactatactgtacaagctccacattggagaagttttatctactgttcctacaataggttttaatgt

SEQ ID NO: 173291 - DNA, 250 bp, Glycine max
aggaagatgttcttgcgcacaagcaggccattccgttcagacgtttctgtcgtgatgttggaaggacagctcaagcaaagagtagacactctaatggccaaggaaggtggcatgtcaagtcagcaaaattcatccttgatttgctcaaaaatgctgagagcaatgctgaagtgcaaggtctggatgttgatgcgctttacatttctcatatccaagtcaatcaagcacagaagcaacgacgccgatcata

SEQ ID NO: 173292 - DNA, 251 bp, Glycine max
atacctctgagtggacctgtcaatgtcaagttggatttagttggcaaaggtttgacttttgacagtggtggctacaacatcaagactggacctggctgttcaattgaactcatgaaatttgatatgggtggttcagcagcagttttaggaacagcgaaagtcttggtcaaatcaaacctctaggggtggaggttcattttattgttgcagcttgtgagaatatgataagtggaacaggtatgaggcctgga

SEQ ID NO: 173293 - DNA, 261 bp, Glycine max
aaaaggccatatacttttcttttatctcaaataatggacgggatcatccaccagattgaggagacactccatgtgggagggcacaagaaagaggcagcacaacggagcacaccatggtgagcacaaaggtgagcacaaaggagaacaccatggtgagcacaaaggtgaacacaaaggagaacaacaccatggggagcaacaggagggacttgtggataagatccaggacaagatccatggtgatggccatgacaagggtga

SEQ ID NO: 173294 - DNA, 256 bp, Glycine max
cagaagacgcgcagttcaggcgagtgaaagccaccagccatgggtcgtatgcacagccgcggtaagggtatatcctcttctagctttgccctacaacaggacacctcctagctggctcaagatctcttcgcaagatgtcgaagaaaatatctgcaagtttgcgaagaaaggtttgaccccgtctcagattggtgtcattctcagagattctcacggtattgctcaggtcaatagcgtcactggcagcaaaatcctt

SEQ ID NO: 173295 - DNA, 249 bp, Glycine max
  unsure (1)..(249): unsure at all n locations
aaacttctcttgaatccaatatttataacttcaaacaacatcagtncaacagcaaagcctaagctagaagattttctgcagcgattagatggtattgagcagaggcagaaacaattgctgaacttctttgagaaggctctcagaatcctacttttgttgaacatctttcacgcaaaatcgagtccatggatttatctgcatataagaaaaggcgatgcctcaggttgatcatgtgcaaccagttgccga

SEQ ID NO: 173296 - DNA, 249 bp, Glycine max
cgaagaaagattcgaaacgaagaaagaaagcgttgtgaagaatggcggaagagggacaagtgatcggtgtccacagcgtagaggagtggaaggaacatctcaagaagggagaagagtccaagacattgattgtggtggattttactgcttcttggtgcggtccatgccgtttcattgccccaattcttgcagagtttgctaaaaagttgccgaatgtcaccttcctcaaggtggatgtggatgaattgg

SEQ ID NO: 173297 - DNA, 248 bp, Glycine max
aaagctacctagagcttgcacctattggtatcttctacaatatactctcatagtgatcttcttcttcttcattttcattatcaagatgtctttgctttcggatctcatcaacctcaatctctcagaatccacagaaaagatcgttgctgagtacatatgggttggtggatctggtatggacctcagaagcaaagccaggactcttcctgggccagtgagtgaccctgcaaagcttccaaagtggaact

SEQ ID NO: 173298 - DNA, 247 bp, Glycine max
attgaatttcatcagttatgtctataagatatttggtttcacatatgagctgaagctttcaacgacgccagaaaaatacctaggagatattgcaacttgggacaaagctgaaagtgctcttaaagaagctttagatgattttggcaagccttggcagttgaatgaaggggatggtgcattctatggaccaaagatagacatcagtgtatctgatgcattgggtaggaaattccagtgtgcaactttg

SEQ ID NO: 173299 - DNA, 245 bp, Glycine max
agatgaatgtggagaagctggtaatatcgggtttatacactccctaatgagacagacgctgtttatggggcgttagacaaatggacagattgggaaacagagttccctgtgattgcagtgtctaaggctttaaaaatcttaaggaaaaggggtcactgggttcgtgtaattcaagtagctaagtggatgttaagcaaaggtcaaggagcaacgatgggaacatatgacacccttcttctggcatt

SEQ ID NO: 173300 - DNA, 214 bp, Glycine max
cgtcccactttcttctccttttagggtttcctttttgtttctcctttccagatctgcatcttccattttttaggattaagcggtgagattcgtgaatctgagaaatgtcggattcttctcgggaggagaatgtttacatggcgaaattggcggacaggccgagcgttacgaggagatggttgagttcatggagaaggtagcaaagactgtggag

SEQ ID NO: 173301 - DNA, 247 bp, Glycine max
ggagtttcaagggttaccggaaggttgcattactagtatactctctcgcactacgccggcggacgtgtgtaggttttccgtcgtatcaaagattttccgttcggccgctgaatcggacgctgtgtggaaacgttttctcccttccgattaccattccatcatttcccagtctccttcgcctctcaactatccttccaagaaggagctctatctcgctctctcggatcgccctatcatcatcgatcag

SEQ ID NO: 173302 - DNA, 246 bp, Glycine max
ttccaaaccctaacactcctcttcctcttcgatcatcacctctccacaatgccgacgaagttcgacccctcgcagatagtcgacgtcttcgtccgcgttaccggcggcgaagtcggcgcggcgagttccctggccccgaagatcggtcccctcggtctctcccacaagaagatcggagaagacatcgccaaagaaaccgccaaggactggaagggcctccgcgtacacgtcaagctcaccgttcag

SEQ ID NO: 173303 - DNA, 213 bp, Glycine max
tgccgtcacagacagagacaagaaacaatgaagtgtaaccctagggtttcctcaagccgtcgcaagagccgcagagtcacttcaccgctccgtcgagcgtgcgccgcgtcctgatgagcgcgcctctctccaccgatctccggtcaaagtacaacgtgcggtccattccggttcgcaaggacgacgaggttcaggtcgtgaggggaacctaca

SEQ ID NO: 173304 - DNA, 250 bp, Glycine max
gaggaaaagagataaccctgaagcaatggaagaggatgatgttgaagatgaaatagcagaaatcaaggcagctcattttgaggaatcaatgaaatatgctcgaaggagtgttagcgatgccgacattcgcaagtaccaggcatttgcccaaacattaacagcagtcaagagggtttggaagtgagttcaggtttgcagattccacctccagtggtggtgctgccaccgcatctgatccatttgcttctgc

SEQ ID NO: 173305 - DNA, 239 bp, Glycine max
gtttgttgtgagctataagctagtttatcgtgaggagcatatgcagttgtgtgttttctttgttgctgcagtagttttggtagcatggccatgccatggcgcaggctaccaaaggttcactctccgaatgaaaactggctatggtgagcgttcttcggaggtaaaatgcgcaagttttaggcttgctgtggaagctcacaacatccgagcctttaaaacccttcctgaagagtgcgttg

SEQ ID NO: 173306 - DNA, 245 bp, Glycine max
agctcctattgtccacacattaacacacagcaggtggctggaaaaatgtgtagcttgatgtgaaagtcgatgaccaggccttggttggtgacaagacaattgcattttggttggtggacacggatatgtatgacttcatggctttagacagagcatccacacctattatagatcgtggtatagcgttgcacaaaatgattaggcttattaccatgggtcttggtggtgacaggtatttaaatttt

SEQ ID NO: 173307 - DNA, 244 bp, Glycine max
cttgcgtttcctggtgggatcaaactctccaaacttatgacgcacatttccctcagtgatcctacaacgaatagtggttttcccattgtaaatcttgacagtggtatcaacaaattctggcaagatagtggatctccgtgaccaaatggtcttgttcgacaaaagatttgggttcttcttcatcttgtacaagaatgcatcaatgaaagcaggtttgcgtgacaccagaggaggaggcaggggg

SEQ ID NO: 173308 - DNA, 255 bp, Glycine max
ctcgagccgggtttctgtagactccaaccagaaagagagggaaatggctcccaaacatcctagtacgggtttgcttgttggattgaacaagggtcacgttgtcaccaagaaggagttgcctccacgcccttcagatcgtaaggggaaaacaagcaagcgagtgcactttgtgaggaacctcattcgagaggttgccggctttgcaccttatgaaaagcgaataactgagttgctcaaggttggaaaagataagag

SEQ ID NO: 173309 - DNA, 240 bp, Glycine max
gttggatgcatttctatttctaactaattattgtgcttattattattgttgagaaagaaaagaatggcaaagttaataaaattctctgagttgaacacaggggccaagattccttctgttgggttaggcacttggcaatctgagcctggtgttgtagccaaagctgtcaccacagccattctggttggatacaggcataattgattgtgctcaagcgtataacaatcaagcagagattgg

SEQ ID NO: 173310 - DNA, 240 bp, Glycine max
gaaaaatggggtgtttccatctcacagtgactagtctgtgctttgtagtggttgtggttggagtgcttccactctccttagatgcacaactagatccctcgttttacagagacacgtgtcccaaggttcactccattgttcgcgaagtggtgaggaacgtttccaagaaagatccccgcatgcttgccagtctcattagacttcactttcatgactgttttgttcaaggatgtgacgcat

SEQ ID NO: 173311 - DNA, 239 bp, Glycine max
atcatagttcggttcagcaacgacgtgatcggaatcctgaacttactgagcttcctactctccatcccgatcctggtggacggagtgtagctgagcaagcagggcgccaccaagtaagagctgtggctagagaagccggtgatcgcactcagcgtcttcctcatactcgtctcactcgccggcctcgtcggcgcgtgctgtcgcgtgtcgtggctcctctggctctacctcctcatcat

SEQ ID NO: 173312 - DNA, 157 bp, Glycine max
cagagatgcaagccaaacaggctagcgccactagcgaggtatacactgtggcttggggagtttgtaaccatgcttttcacttccattgcataagtcgatggctcgagactcgtcaagtttgtcctctagataacagtgagtgggagtttcagaaata

SEQ ID NO: 173313 - DNA, 245 bp, Glycine max
tgcaaattgctcagggctttaatggagctgatcttcgaaatgtgtgcacggaagctggactggcaacaattcgtgcaagaacgtgattatgtgatccatgaagattttatgaaggctgttagaaaactgaatgatgcaaagaaactcgaatccagtgctcactacagtgctgattttggcaaagactaaaagctattataaaattctgagccatggatatctagggaaaacttcatgcaattagg

SEQ ID NO: 173314 - DNA, 249 bp, Glycine max
ggaggcactgtggcagaagtcctaggagtgtaaaacagagacgcaaaatgaagacgatcttgtcgtctgagaccatgaatattcccgacggcgtgagcatcaaggttcacgctaaggttatcgaggttgagggccctcgtggaaaactcgtgcgagacttccaccatctgaacttggacttccaacttattaccgacgatggcggtaaaaggaagctcaagattgattcttggtttggttctcgtaaaa

SEQ ID NO: 173315 - DNA, 243 bp, Glycine max
gactattcgggagagggacagcaaggatcaagtgcgtgttgatgtggataaagctgcctctgttgttagggaggtgactgaaggccagaggacatgggaagatgtgtggtcaacttttcctcatcattcctctacatctgcagatgaatgattgagttttattagtcaccatctaggttgacccatcatagttttctgttgcaaaattgtgttttttgagtagcgaatcaaactacagggata

SEQ ID NO: 173316 - DNA, 247 bp, Glycine max
tcgagcttcagcaatggtgtacgtcaaggctcagaaatcaaaagcctacttcaagagatatcaagtcaagttcaagagaagaagagagggaaaaaccgattaccgtgccaggattcggttgattaatcaggacaagaacaaatataacactccgaaataccgatttgtggttcgctttagcaacaaggacattgttgcacaaataatatctgctagcattgccggcgatttagttcttgctacagca

SEQ ID NO: 173317 - DNA, 247 bp, Glycine max
cggctcgagatcggccagcaccaacagcatcggcggcgacagtcactctccgacaacaacacttccgcggcgaaaaatgtctctggtggcgaacgaggatttccagcacattctgcgtgtgctgaacaccaacgtggatgggaagcagaagataatgttcgctatgacctccatcaagggtattggaaggagattcgccaacatcgcttgcaagaaggccgatgttgacatgaacaaaagggctggt

SEQ ID NO: 173318 - DNA, 209 bp, Glycine max
gttcagccttctgatactgatttgggggctaaagctcctaaggatgttaagattcaaggcatctggtatgctcagcttgactcatagaccttttcttaatgttgtaactctactttcttataactcaatccacggtcttgtgaccccagttggcgaacactcagagcgttatcatgtgtgtatattataatgacttcgattataaggct

SEQ ID NO: 173319 - DNA, 236 bp, Glycine max
cgattttcatgttactgttagtttgtggggacttggttcgtggtgcaaaggataagaggctcagggttaagggacctgtcaggatgcccactaaggttcttcacatcactaccaggaagtccccctgtggtgaaggtaccaacacatgggacagatttgaacttcgtgtgcacaagagggtgattgacctctacacttccccagatgtggttaagcagattacctctatcacgatt

SEQ ID NO: 173320 - DNA, 248 bp, Glycine max
ctagatctgagcagtttggaaaccctaactgctctcaccaacgacatcaccactctctccgatcaactacctctttcgtcgccctaagtcatggcaggaaacgcacccgagggatcacagtttgatgctcgtcaatatgataccaagatgaatgagctgcttacgtccgatggacaggatttcttcacatcctacgatgaggtttatgacagttttgatgctatgggcttgcaagagaatctcctgag

SEQ ID NO: 173321 - DNA, 254 bp, Glycine max
gaagaacaacgacgatggcgatggctgcagctctgcgtcgcgaaggaaggcgtttgacccaaccaatcaacgccctccactcttctctcaattcctccctcatctctcaagaccaagcccctcatggcgcgcgctccatttccactcaagttgtgaggaaccgaatgaagagtgtgaggaatatccagaagatcaccaaggccatgaagatggttgccgcgtccaagctgcgggccgttcagaccagaactgaa

SEQ ID NO: 173322 - DNA, 247 bp, Glycine max
catctgtatgcctatgcttgtttatcattttcttactttcctctcacgctctgccacaaaactccgtctccgcaataacggaataaaaaaacaagtttaattactattatggcgccgagggatcataagacaagcaacgctaaggctaacggtaacggtaacagcggggtgaaggaggtgcattttcgtggagtgagaaagaggccgtgggggagatacgccgcggagatcagagatcccggcaaga

SEQ ID NO: 173323 - DNA, 245 bp, Glycine max
cctgtgctgaccccaacctcctcaagaaaactgttcgtggcctgtggcaacttgacgggtacattgtatcagactgtgattctgttggggtgttttatgataaccaacattacacaccaacgccagaagaagctgctgccgatgccattaaagcaggtttggatttagactgtgggcctttcctagctgtgcacacgcagaatgcggtcaaaaaaggcttgctaagcgaactgatgtcaatggtg

SEQ ID NO: 173324 - DNA, 241 bp, Glycine max
cgccgaccaccgttcagtgagccaactctctttgatagctctagtgatcagcagcaatggcggggaaagtggcaaaggcagcttatgatgcaaagatgctgaagcttctgaaagagtacagtcaggtgctggtggtttcatcagacaatgtgggttccaaccagcttcagggcatacggaggggacttaatgctgattcggtggtggtgatgggaaagaactccatgatgaaacgctctat

SEQ ID NO: 173325 - DNA, 239 bp, Glycine max
cggagattcgagatccgtggaagaagcagcgcgtttggctggggaccttcgattccgccgaggatgccgcgcgggcctacgacaaggctgcccgatccttccgcgggcccaaggccaaaaccaatttcccccccttccccggcccggcagaggcggaccaccactcgcagattccgctctaccaggcccatgggctttccaccaagttcgagcccgtcgtccaggtgaaccggcccacg

SEQ ID NO: 173326 - DNA, 245 bp, Glycine max
gaagggtgaaagtgatttacctggcctgacagatgttgaaaagccaaggatgaggggtccaaagagagcttccaagattcgcaagctgttcaatctgtctaaggaggatgatgtgaggaagtatgtcaacacatataggagaacatttacaactaaaaatgggaaaaaggtgagcaaagctcctaagatacaacggctggtcactccccggaccctccaaagaaagagggcaaggtttgcagata

SEQ ID NO: 173327 - DNA, 242 bp, Glycine max
cacacaccttgttttcctttctatagagacacacagagagagcaataaacacccttcaatggctaccactaccactaaagtttacattgtttactattctatgtacggacatgttgagaagctagctgaagagattaaaaaaggagctgcttctgttgaaggagtagaagcaaagctatggcaggtacctgaaacactgcctcaagaggtccttgggaaaatgggagcacctccaaagagtg

SEQ ID NO: 173328 - DNA, 245 bp, Glycine max
gttcactcttcttctcttgcggctagggttttagcgcacttcttctagatttaaggaagatgggtaaggaaaaggttcacatcagtattgtggttattggccatgttgactctgggaagtccactaccactggccacctgatctacaagcttggaggcattgacaagcgtgttattgagagatttgagaaggaagctgctgagatgaacaagaggtctttcaagtatgcctgggtgcttgataag

SEQ ID NO: 173329 - DNA, 249 bp, Glycine max
acggctcgagctcagatccaagcttgggagacagagaaagagaaagagaatggacgccattgattctgtgttcgatccgctgagagaattcgcaaaggacagcgtgaggctcgtgaagcgctgccacaaacccgatcgcaaagaattctccaaggttgccgtccgtactgcaattggtttcgtcgtgatgggattcgtcggtttcttcgtgaagatcattttcattccaattaacaacatcatcgtcgg

SEQ ID NO: 173330 - DNA, 220 bp, Glycine max
gttcttcttctttgtcttccatttcggattctctgtgtagaagccatgtctaagggtcctggtctctactctgacattggcaagaaagccagagatctcctgttcaaggactaccacagtgaccagaagtttaccatcactacctactcacccactggagttgctataacatcctcggggaccaagaaaggtgaccgttttgtggcggatttaacaccca

SEQ ID NO: 173331 - DNA, 240 bp, Glycine max
gtaagactctacgtcaggggttcaattcttggatacaagaggtccaagtcaaatcaatacccaagcacctccctaatccagattgagaatgtaaactctaaggaagaagttgcgtggtactgtgggaagcgcatggcttacatctacaaagcgaaggtaaagaagaacggaagccactatcgctgcatttggggtaaggtcaccaggcctcatggtaacagtggtatagttcgagctaag

SEQ ID NO: 173332 - DNA, 241 bp, Glycine max
cgctttcatcttctcatctcttctcttttccctgctaatcatggcaaccttgtcaactgtgaaggtttccccccattgcatgtttcaaacagcaagcaaaaatccatccactgttgccaccacaatgaagtgcccttcttcttttgggtctgtgaagagcatttccagatcttttggcttgaagtcatcctcttcatttagagtcactgccatggcttcttacaaggttaagctgattggc

SEQ ID NO: 173333 - DNA, 208 bp, Glycine max
cgtagcgtcgcactctgtgttttctgcgccgtctccgatctccgacaatggcgacccaaatgagcaagaagagaaagttcgtagctgatggagtgttcttcgctgaactgaacgaggttctgacaagagagttggccgaggacggttactccggcgtggaagttagggttacgccgatgcgcaccgaaatcataattagagccaccag

SEQ ID NO: 173334 - DNA, 142 bp, Glycine max
ggatcgtgagaggggcagtagccgagattccgtgagttgcaaaaatgaagacgattctttccaccgagaccatgaacatcccggacggcgtgagcatcaaagttcatgccaaggtcatcgaagtcgagggcccccgcggaaa

SEQ ID NO: 173335 - DNA, 242 bp, Glycine max
agaaaaatggggtgtttccatctcacagtgactagtctgtgctttgtagtggttgtggttggagtgcttccactctccttagatgcacaactagatccctcgttttacagagacacgtgtcccaaggttcactccattgttcgcgaagtggtgaggaacgtttccaagaaagatccccgcatgcttgccagtctcattagacttcactttcatgactgttttgttcaaggatgtgacgcatc

SEQ ID NO: 173336 - DNA, 245 bp, Glycine max
tgaaaatattccaaatctcttcaagaaaataaagggtgggatttacactcttcccagtcatctatcacccggtgctagagatttgataccagggatgcttgtggttgaccctatgaggagaatgaccatacctgagatccgtcaacacccatggttccaagctcgacttccacgttatttagctgtgccaccaccagatacaatgcaacaggccaaaaagattgatgaggagatccttcaggaag

SEQ ID NO: 173337 - DNA, 247 bp, Glycine max
gaacgctgctgccgaaacccttcccgatccctaaggtaagtgagtaatcggtggttgagaatggtggagaaggcgaagggtaggaaggaggaggtggttaccagagagtacaccattaacctccacaagcgcctccatggctgcacatttaagaagaaagctcctaaagctattaaggagataaggaaatttgcccaaaaggccatggggaccaatgatgtgagggtggatgtgaagttgaacaagt

SEQ ID NO: 173338 - DNA, 249 bp, Glycine max
ggaagtttgattattagtgattcattgaaccacaactccattgttaatggtgcacgaggatcaggagcaacaattcgcgtttttcaacataacgagccatctcatctagaagaagtgttaagagaacaaattgctgagggacaaccgaggacacataggccttggaagaagataatggttgttgtggaggggatatacagcatggaaggagagctttgcaaacttccagaggtcatagctgtatgtaaa

SEQ ID NO: 173339 - DNA, 242 bp, Glycine max
gcctctattttttcttgtgaatttgaaggacgatgagttccacagaggtcgcagccacaacgaagaagggtggaagagggaaacccaagaccacaaagtccgtttcccgttcctccaaagccggccttcagttccccgtcggccgcgtcgctcgctacctcaaggccggtcgctatgcccagcgcgttggttccggttcccctgtttacctatctgcggttctcgaataccttgccgctgag

SEQ ID NO: 173340 - DNA, 241 bp, Glycine max
ggtgagtgagttgtggtgcttttgaaagatgaggccgattctgatgaaaggtcatgagaggccattgacgttcctgaaatacaacagggacggcgatctcctcttctcctgcgccaaggaccacaaccctaccgtctggtttgccgacaacggcgaacgcttgggcacttatcgcggccacaacggcgccgtttggacctgcgacgtctcaagagattcggctcgactcatcacgggaagt

SEQ ID NO: 173341 - DNA, 239 bp, Glycine max
  unsure (1)..(239): unsure at all n locations
ttttgctcggaatttcctgtgtagaaggaactcatgaatcttattgatgtttaacgacaatgaaaatctccacagaaaaggtaaaatgtaaataatgaagtagcattatactcatggaataccacagaatacaaaccgtgttacatctatgatcctcagcngaatacctcataaaattnctcagtgacaagtaaacctgagtctatagactccaagggatccttctaagacggtgtctc

SEQ ID NO: 173342 - DNA, 220 bp, Glycine max
gttgcttttacaattgcttatgttgtcgaatgggacacccagttgttagtggcactggtttctcctttttgatgtttgatacattttgttggattcaagtagtttatgttcgtcttatgttattagctcaaaacaatgttgttactgcttttgcgaatcaacatgatctcctatttgcatctctaaaaaaaagatgaaataaaaaaaaagacttacaagg

SEQ ID NO: 173343 - DNA, 246 bp, Glycine max
ctctatttgacccaccaaggcatgacattgccgagaccataagacgtgctattatgactgttgtcttcttctaggcgctgctcttacatcgaatttcttcacggacatatttggcgtgagatctatcaagaacaaccaccgtgagctcatagcagttgtttatcttcaagtattgtaagtcaggctttcattgctacacagtcaaggagctggacttacattgaaatggatagccatgatcatagc

SEQ ID NO: 173344 - DNA, 236 bp, Glycine max
gcttaatctctctcattccccatttcctcacctccttcaaccgctgctaaattctagggttccgaaatggacgctggcggaaagatcaagaagggcgccggaggtagaaagggcggcggcccaaagaagacgccggtttcaaggtccgtcaaagccggtctccaattccccgtcggaagaattggccgttatttgaagaaaggaaggtacgctcagcgtgtcggtaccggtgctcc

SEQ ID NO: 173345 - DNA, 226 bp, Glycine max
gccatattggcagatgaaatgggtcttggcaaaacagttcaggccatcacatatttaactttgctgaaacacttgcacaatgattctggtccacatcttatagtatgtcctgcttctgttctggaaaactgggaaagggaattaaaaaggtggtgtccatccttttctgttcttcaataccatggggccggacgtgcagcttactgcaaggagttaaactccctgt

SEQ ID NO: 173346 - DNA, 231 bp, Glycine max
cttgcagtcgcagaggaaaaccctagctagtagtctcagttcgttcgagagagaaaaaatggcagagggtctcgttctccgcggaaccatgcgcgcccacaccgacgtcgtgacggcgattgccactcccatcgacaactccgacatgatcgtgacggcgtcgcgcgacaaatccatcattctctggcacctcaccaaggaggacaagactacggtgtcccccgccgccgc

SEQ ID NO: 173347 - DNA, 240 bp, Glycine max
gtaagtttattattcttctctcggcgtcgccatggacgaagaagaggtgcgcaagatcttcagcaagttcgacaagaacggcgacggcaagatctcgtgcgcggagctgaaggagatgatggcggcgctgggatccaaaacgacgtcggacgaggtgaagcgcatgatggcggagctggaccggaacgcgacggctacattgacttgaaggagttcggcgagttccactgcggcggcggt

SEQ ID NO: 173348 - DNA, 221 bp, Glycine max
cacagactcatttgattggacatgcagtgatgagacgccagcaaggcacagcttgatatataggggcttgattcctatattgggggagggatccgccaaggctactgatgcagaatctacagaggtcattctcgaagctgctcttaagtccgcaacacaaaggggcctttgtaagcctggtgatgcagttgttgccctgcatcgtattggcactgcctctg

SEQ ID NO: 173349 - DNA, 239 bp, Glycine max
cacaaacccgtccctcacactctccaaaccctagcggcactacacactagttctatcgctatctccccaagatgtcgagcgccgatcccgagcacagagaagaggaggaggcacccgccgttggcgacgacgaggacaccggagctcacgtcgctccaatcgtcaagctcgaggaggttgctgtcaccaccggcgaggaggacgaagatgcaatcctggatctcaaatcgaagctttac

SEQ ID NO: 173350 - DNA, 239 bp, Glycine max
cttgggagaagaggtcgagtttcacagcagcaatggtgtacgtcaaggctcagaaatcaaaagcctacttcaagagatatcaagtcaagttcaagagaagaagagagggaaaaaccgattaccgtgccaggattcggttgattaatcaggacaagaacaaatataacactccgaaataccgatttgttgttcgctttagcaacaaggacattgttgcacaaataatatctgctagcatt

SEQ ID NO: 173351 - DNA, 244 bp, Glycine max
gttgtcgctgctcatcctccataacctccgagctctacaccgaagaacgaagccatggggaagacacatggaatgggagctgctcgcaagctcaagtctcaccgcaggaggcaaaggtgggctgataagtcatacaagaaatcccatcttgggaatgaatggaagaaaccttttgccggttcatcccatgccaagggaattgtccttgaaaagataggtattgaagctaagcagcccaactctg

SEQ ID NO: 173352 - DNA, 234 bp, Glycine max
cttgaagatggaagaacccttgctgactataacatccagaaggaatctaccctgcacttggtgttgcggcttcgtggtggcatgcaaatctttgttaagactttgactggaaaaaccataactttggaggttgaaagctctgacaccatcgataatgtgaaggcaaagatacaggacaaggaaggtattccaccagaccagcagaggcttatttttgcagggaagcagctggaa

SEQ ID NO: 173353 - DNA, 233 bp, Glycine max
ctctcggtcaaatcaaacctcttggggtggaggttcattttatagttgcagcttgtgagaatatgataagtggaacaggtatgaggcctggagatattgtcacagcttcaaatggaaagactatagaggttaacaacactgatgctgaaggtagacttaccctggcagatgctctggtatatgcttgtaaccaaggtgttgaaaagattattgacttggcaaccttgactggg

SEQ ID NO: 173354 - DNA, 230 bp, Glycine max
gttaaacaaagagccaccaaatctgacttttaggaagaaagacaaaggtggactcaatctcacctcaactgtcaccacaacacatctagatcttgagactgtgaaggctatatgtagtgagtacagaattcacaatgcagatattactctcaggtatgatgccactgctgatgaccttatagatgtcattgagggaagtagggtgtatataccttgtatctatgtggtga

SEQ ID NO: 173355 - DNA, 235 bp, Glycine max
ctcagccgcctcggctagggttcggaaacgaagaagggttctgttatcttttcgcgatgagggccaagtggaagaagaagcgtatgaggaggctgaagaggaagcgccgaaagatgagacagagatccaagtagtgcgttaaacctagtttgtttccgttgcttttacaattgcttatgtggtcaaataggacacccagttgttagtggcactggtctccctttttaatgttttg

SEQ ID NO: 173356 - DNA, 236 bp, Glycine max
ttttggacttatgctctgcacgctctgcttccagcgagtgttctttcttcgtttcaacaccttaatttgcacacgctgcttcttcagcttgagaaatggcacaagaaacctttctattcacatctgaatctgtaaacgagggtcaccccgacaagctgtgcgaccagatctctgatgcagtgctcgatgcgtgccttgaacaggaccctgacagcaaggttgcctgtgagacatgc

SEQ ID NO: 173357 - DNA, 245 bp, Glycine max
ctcgcggaggtggaggacctccacctgatgatggatccggacgatgtcttgagactgaagaatcagctctcggtgaaatcctccggcggcgaaacggcttcgttctgcttcaggtcgaaggagttggttgaactgacgaagatgtgcagagatctgaggcacaaggtgccggagatattggaggtggaggtggatccgaagggaggaccgaggattcaagaggcggcgatgaagctctacgtttc

SEQ ID NO: 173358 - DNA, 261 bp, Glycine max
gaatatgtctccttgtattacccaacagatgcagcagttcaacaagatactgaactacaagcatggtggaaggaagctgtggagaagggtcatggtgacttaaaagaaaagccttggtggcctaaaatgcagacaactgaagatctcattcaatcatgctctattatcgtttggacagcttcggctctccatgctgctgttaattttggacaatatccttatgggggcttaatcctgaaccgtccaactctagccagaagg

SEQ ID NO: 173359 - DNA, 259 bp, Glycine max
  unsure (1)..(259): unsure at all n locations
tgctcatcaccatcgcaaggggagaaagggagaggcgcgaaaatgagcggacgnaggggaagaagaagggagcgagcttcgtgatcgattgcgcgaaccggtggaggataagattatggacattgcttctctggagaagttccttcaggagaggattaaggtcggcggcaaggccggtgcactcggcgattccattaccgtcaccagggacaagagcaagatcaccgtcacctccgacagcaacttctctaaacggtat

SEQ ID NO: 173360 - DNA, 263 bp, Glycine max
atgggagttagtactccatttcttatttattattgaattaaccgatcaacttgctttgttatcgaacatttctttttgatttcaaaaattttccggaaaaaatttgaatctatttttatatgcgaatcaatcctactacttctggtcctgaggtttctgcgcttgaaaaaaaaaatctgggacgtatcgcccaaataattggtccggtactagatgtagcttttcccccaggtaagatgcctaatatttacaacgctctgata

SEQ ID NO: 173361 - DNA, 261 bp, Glycine max
gaaggcggtggagataagatcaagctacctccttcttgctttgcagaactgtctgagcagggtacttttgataagagacagggacccttatactttcagttgtcgttagttcatgaagaaagcacttcaagcatccaaactactgataaagtgaaacaggggaggaccacccattctggagttttagaattcactgctgatgaaggttcagtgggtcttcctcctcatgtatggaataatttgttttctgaaggcactcca

SEQ ID NO: 173362 - DNA, 260 bp, Glycine max
gctgctgctgctgcaaaacctagggttgagccttttgctcaggttttcagcgcttctttcttacaatggttctacagaacgatattgatttgctgaatcctccagctgagttggagaagagaaagcacaagctcaagcgtcttgtgcagtcaccaaactctttcttcatggatgttaagtgccagggctgcttcaacataacaactgtgtttagccactctcagactgttgtggtttgcggaaactgccagactgtgttg

SEQ ID NO: 173363 - DNA, 263 bp, Glycine max
agggtatccctccagatcagcagaggttgatatttgctggtaaacaacttgaggatggaagaacccttgctgattacaatattcagaaggagtctaccttacacttggttcttcgtttaagaggtggcatgcagattttcgtcaagactttgacgggaaagaccatcaccttggaggtggagagttcagataccatagacaatgtgaaagccaagattcaagataaggagggtatccccccagaccagcagaggcttatcttt

SEQ ID NO: 173364 - DNA, 263 bp, Glycine max
gacggccgcaccctcgccgactacaacatccagaaggagtccacgcttcacctcgtcctccgcctccgtggcggcgccaagaagcgcaagaagaagacctacaccaagcccaagaagatcaagcacaagcacaagaaggtcaagctcggcattcttcagttctacaaggtcgacggattctggaaaagtccagaggctccgcaaggagtgccccaacgccgagtgcggcgccggcaccttcatggccaaccacttcgaccgcc

SEQ ID NO: 173365 - DNA, 257 bp, Glycine max
ttcttctctcggcgtcgccatggacgaagaagaggtgcgcaagatcttcagcaagttcgacaagaacggcgacggcaagatctcgtgcgcggactgaaggagatgatggcggcgctgggatccaaaacgacgtcggacgaggtgaagcgcatgatggcggagctggaccggaacggcgacggctacattgacttgaaggagttcggcgagttccactgcggcggcggtggcgacgggagggagctccgggaggcgtt

SEQ ID NO: 173366 - DNA, 256 bp, Glycine max
atgagcttgccaagaggcagatgactggtttcggtggtgttgtcagttttgagattgatggagatctacataccacaataaaatttattgattcattgaaaatcccatatattgcggcctcgtttggtggctgtgagagcattgtggatcaacctgctattttgtcttactgggatcttcctcagtcagaaagggccaagtacaagatttatgacaacctggttcgcttcagctttggagttgaagattttgagga

SEQ ID NO: 173367 - DNA, 258 bp, Glycine max
cggctcgagatcaaagccatggccacctccaacttctctattgttctctccgtctccctagccttctttttggtgctacttaccaaggcacactcgaccgataccgtttctttcaccttcaacaagttcaacccagtccaaccaaacattatgctccaaaaagatgctagtatttcatcctctggggtgttacaactcaccaaagttggcagcaacggcgtgcccacctcgggatctctcggtcgtgccctttacgct

SEQ ID NO: 173368 - DNA, 255 bp, Glycine max
aagtcaaaggaggccaaaattgggtacatgagaaggatcagctctggtggtttcctggtggtggtacccatttcaaacatggggcttctgagtacatagagaggttaggacatatgattaccaatgaggctgctggtgatctgcgatctgctggggtagttcaagttctggatgttggctgtggtgtggccagtttttcagcatatcttcttcccttgggtatacgaacaatgtcctttgcccccaaggatgttc

SEQ ID NO: 173369 - DNA, 258 bp, Glycine max
acaaattccaatttccaattcaaaaccctaactccgttcgaagcaccaaatcgtgatggcaccaaaggcagagaagaagccagcagagaagaagcccgcggaggagaagaaatcgacggtgggagacaaggctccggcggagaagaagccaaaggccggaaagaagcttccgaaggagggaggcgccggcggagaagggaagaagaagaagagaaacaagaagagcgtggagacatacaagatctacatcttcaaggt

SEQ ID NO: 173370 - DNA, 144 bp, Glycine max
cttcaccgtagtttttggtagtcttgtttgagggtgattatgataaacatttatggttttttactttaaatacatttgagttcatttaagtattttgcaatgatttttagagttcaatcgaattgatgtgttgttggtttctat

SEQ ID NO: 173371 - DNA, 262 bp, Glycine max
cttctttccaaatcccaactactactcacactcactgcagatctcaatccatggctaccatcgttagcatcaaggcccgccagatctttgacagtcgtggcaatccaaccgtcgaggtggatttgacatgctccgatggtacttttgctagagctgctgttccaagtggtgcatccactgggatttatgaggcccttgaattgagagatggaggatctgactaccttggaaagggtgtatcaaaggctgttgacaatgtgaa

SEQ ID NO: 173372 - DNA, 254 bp, Glycine max
ctttatgaaattgcaagtgaaaactatgccggaaagtacactgttccggttctgtgggataagaaactcaagacaattgttaacaacgagagctcagagataatccgcatgtttaatactgaattcaataatattgcagaaaaccccaccttggacttgtatcccactgatttaaaagcccaaattgatgataccaacgagtggatatacgatagtataaataatggtgtttataaatgtgggtttgcaaagaa

SEQ ID NO: 173373 - DNA, 257 bp, Glycine max
gattattcatagtgaggcaatagtagcagcaattcacactggtctttgcttctcgttactcatttctcacctaactttctattcttctcagtctcagatcagaaccttggccatggcagcgttccagaagatcaacgtcgccaaccccatcgtcgagatggacggagatgaaatgactagggttatctggaagtcaatcaaggacaagctcattttgcccttcttggagttggacatcaagtattatgacttaggcc

SEQ ID NO: 173374 - DNA, 254 bp, Glycine max
ctctccgcagcagccacacttcttcgccgtttcagctgaagagccatccgcaggtaagcaatggttaagcataataatgttatccccaatgggcacttccggaaacactggcaaaactatgtgaagacttggtttaatcaaccagcccgaaagaccagaagacggttggctcggcagaagaaggctgtcaagattttccccaggcctactgctggatctctcaggcctattgttcatggccagactctgaaata

SEQ ID NO: 173375 - DNA, 256 bp, Glycine max
ggttgtttcctcaggccaagagcttggaaaattagcctcacaaaagcaaagatcaaacaaaccaaggacgagaacacgatgttgcttgaacttgcacttggtttattggttttggctctgtttctgcacttgcgtcccacacccactgcaaaatcaaaagcacttcgccatctcccaaacccaccaagcccaaagcctcgtcttcccttcataggacaccttcatctcttaaaagacaaacttctccactacgcac

SEQ ID NO: 173376 - DNA, 253 bp, Glycine max
acattacaagacaaattcacagtctaaacaagaaattcagaaaattaagctttgggtgaatggagaacctaatttctttggtgaacaaaatccagagggcttgcaccgctttgggtgaccacggcgaacaagtgccttacccactctctgggactctctccccgctatcgccgtcgtcggtggccagagctctggaaagtcctcagtattggaaagtattgttggcaaggatttcttacctcgtggatcaggg

SEQ ID NO: 173377 - DNA, 256 bp, Glycine max
ctgcggaacaagatcgcgggtttctccacgcatctcatgaagcgcatccagaagggtcccgttcgcggcatctccctcaagctccaggaggaggagcgcgagcgccgcatggacttcgtccccgacgtctccgccatcaacaccgaccacatcgaagtcgacaaagaaacccttgacatgcttcattccctcggaatcaacgacatccccggcatcacacaggttgactctgttcctgttcaacaggccttcccct

SEQ ID NO: 173378 - DNA, 253 bp, Glycine max
cagcagcaaaggaaggttgtggtaagtaaatagtagtaacctaacccttgcgtttgcgagtgaggctgaggttgggtttggaaggcaaaggctggtgttgtcccaatccaagagagaagtaaagtaaagcaaaggaatggcgaacatagacatcgaagggatcttgaagcagcagcctgatgatgggcgcgttccgaagacgaaaatagtgtgtactttgggacccgcttctcgatccgtggaaatgactgag

SEQ ID NO: 173379 - DNA, 249 bp, Glycine max
ggcgtttgcgaaattgcgatttcatgtcatagagaggaaaagaggagaggcggggcggacagagacgaatggcagatcagagcgagcattcgaaaacggcgttgcctccggaggaccaggaccgtcccgttcgggtatacgcggatggcatctacgatctcttccactttggccacgcccgctcccttgagcaagccaagaaatcgtttccgaatacatacttgcttgttgggtgttgcaacgatcaag

SEQ ID NO: 173380 - DNA, 253 bp, Glycine max
gttggctattcgcgcattgcttgaagttgtggagagcggaggcaagaacatagaagttgctgtgatgactaaggagcatggtctgcatcaactggaggaagctgaaattgatgccatcgttgctgagattgaagcagagaaagcagctgctgaggctgctaagaaagcccctcctaaggagacataattttctgttttgtgttacgcggggcattgttcttgctacgtgttggctgtactcactgaagctaaa

SEQ ID NO: 173381 - DNA, 252 bp, Glycine max
cgctcgactctcactcacaaacacacactgaactacaacacatcacaagacacatggctgacccaaccttcatcatgatcaagcctgatggcgctcaaagacgccttattggcgagatcattagcagatttcagaagaaaggtttctacttgacaggtctgacacttgttagtgtggaccgtccttttgctgagaagcactatgctgatttgtctgccaagcctttctttagtggtttggtggattacatta

SEQ ID NO: 173382 - DNA, 255 bp, Glycine max
gaaagacggcaggttgatgaaaaagtcaaaagaatcattgaactgaagaataaggtttgttctggtaatgatagcaattttgttgtcatcaaccaaaaaggaattgatcccccatctctggacctgcttgcaagggaaggaataattgcccttcggagagcaaagaggagaaacatggaaagattggttttggcctgtggaggggaggcggtaaactctgtagatgatttgactcctgaatgtctgggttgggca

SEQ ID NO: 173383 - DNA, 254 bp, Glycine max
accggatcccccttcgaagtgaattatattgcagcgaatcacacacactctgaacaacgcccaccatgcaggccagtgataggtttaacatcaattcccagcttgagcatctccaagccaaatatgttggaactggccatgccgatttgaacagatttgagtgggcagtgaacattcaacgagatagctatgcatcatatattggacactaccctttactgggattctttgctattgctgaaaatgaatctatt

SEQ ID NO: 173384 - DNA, 253 bp, Glycine max
ctcaaaattattgataggaagaagaatatctttaagttggcacaaggggagtacattgctcctgagaagattgaaaacgtatatgccaaatgcaaatttgtggcgcaatgctttgtatatggtgatagcctaaatgcttctttggtagctgttgtctctgtggatcatgataacttgaaagcatgggctgcttcagaaggaataatgtataatgatttagcacaactttgcaatgatccaaaagcaagggcag

SEQ ID NO: 173385 - DNA, 255 bp, Glycine max
cttagccgcagatctctcagggcttgcatcttctcagttgtgaagatgtacacatcaaggaagaaaatccacaaggataaggatgctgaaccaactgagtttgaagagtcagttggtcaggcattgtttgatctggaaaataccaaccaggagcttaaaagtgatctgaaggatttatacataaactcagctgtgcaagttgatgtttctgggaaccgcaaggctgttgttattcatgtcccttacagattaagg

SEQ ID NO: 173386 - DNA, 253 bp, Glycine max
cgacaccatctctacgacaacctcctttctctctatctctagctccgatgagtgctctctctaactccagtagtagccacggcaattccttcctcaagatgcccgccatcaagtttaccaagctcttcatcaatggagattttgttgattccatatcaggaaggacatttgagactatagaccccagaaaagaagaggtaattgcaagagttagtgagggagataaagaagaccattgatattgctgttaaag

SEQ ID NO: 173387 - DNA, 250 bp, Glycine max
  unsure (1)..(250): unsure at all n locations
ggtttttctttttctcttctcactgcatcgcttcaggttcttctgaaaagatgtctcgcgtgtatgttggtaacttggattcacgagtcaccgagagagatctcgaagacgaattccgcgttttcggagttattcggagtgtttgggttgcacgtagaccacctggtnatgcttttattgactttgatgaccgcagagacgcacaggatgctatccgtgaattggatggcaagaatggttggagggttga

SEQ ID NO: 173388 - DNA, 252 bp, Glycine max
gttggtatgaagaagaagggtgttgatgaatttcctttctgtgtccatctggttagttgggagaaggaaaacgtttctagtgaggccctggaagctgctcgtattgcttgcaacaagtacatggccaaatttgctggaaaggatgctttccacttgagagtcagggtgcacccattccatgttcttaggatcaacaagatgctttcgtgtgccggagctgataggctccaaactggaatgagaggtgctttt

SEQ ID NO: 173389 - DNA, 249 bp, Glycine max
gctcgtgcctctagggttatcatatctccatttccatttcctctctctcagtttccaagaatcttaagctatgggaaagtcttacccaaccgtgagcgctgattaccagaaggccgttgagaaggcgaagaagaagctcagaggcttcatcgctgagaagagatgcgctcctctaatgctccgtttggcatggcactctgctggaacttacgacgtgagctcgaagaccggtggtcccttcggaaccat

SEQ ID NO: 173390 - DNA, 250 bp, Glycine max
gttggatgcatttctatttctaactaattattgtgcttattattattgttgagaaagaaaagaatggcaaagttaataaaattctttgagttgaacacaggggccaagattccttctgttgggttaggcacttggcaagctgagcctggtgttgtagccaaagctgtcaccacagccattctggttggatacaggcatattgattgtgctcaagcgtataacaatcaagcagagattggttctgctctta

SEQ ID NO: 173391 - DNA, 255 bp, Glycine max
tagcctctttttgtctcccctgcaatcaacggcaccccccacaaaaatgacaggacagacagtgagacccaaaatgttaccctttagccgatgcgcaactcgcaataacaatctcatcatcttgtgcaacaagctgccaactacaagcaactaaaaaagggtgctaatgaagcgactaagacactgaacagaggcatttctgagttcgttgtgatggccgcagacactgagcctcttgagattcttctccatctt

SEQ ID NO: 173392 - DNA, 253 bp, Glycine max
tattcatctgcttactaaaatttcttccattcttagctttgttcaatcaaagttttttaagatggcccagagaaatgttactgctaattcttcttttgaaaggactagcttgccttccctagatcaaaagttggccatggccaagcgctgctctcatgagggtgtgatggcaggagcaaaagcagctgttgttgctactattgctactgccataccaactctggctagtgtaaggatgcttccttgggcaaga

SEQ ID NO: 173393 - DNA, 254 bp, Glycine max
gaaatctgaagctaacttaagggaaatgagatggccaatggcaacactagtcatcgcttcaagctcttgcttttccttctaactctgcactcttcattcgctgagattttcttcgaagagagattcgaagatggatggaagagccgttgggtgctatccgattggaaaaggagtgaaggaaaagcgggtaccttcaagcacacagcaggaaaatggtctggggatcctgatgacaaaggtcttcagacatataa

SEQ ID NO: 173394 - DNA, 249 bp, Glycine max
gtgaaagtgagaaaaaataaaaatcaaagagcataatgtcagggatcattcacaagattggggagacccttcatgtgggagggcacaagaaggaggaggagcataagggtgagcaccatgctggagaatacaaaggggagcaccatggtgaacacagtagtgagtacaaaggagagcatcatggtgaacacaaagctggagagtaccatggtgagcacaagccagagcacaaagaggggttcctagaca

SEQ ID NO: 173395 - DNA, 249 bp, Glycine max
ctccacatctccaacactcacatactctgaaaaaaaaaattaaaaaaaatataaaaaataaaaaaaagtttgtttttcttcaacaaaccatggagggacttccccaaggttaccgtcccaacgttggtgtctgtctcatcaactccgatgatcagatttttgtggcttctaggttgaatgtcccaggagcatggcaaatgcctcaggggggaattgaagatggtgaagagcccaaatctgctgccgtta

SEQ ID NO: 173396 - DNA, 250 bp, Glycine max
ccaccgtcaaacttgtcattctatatgctttgcagggtccattgaatatgtctccgtcgttggatcttcctcccaagggtggcttcagttttgatctatgccgaagaaacgcaatgcttcaaaacaagggcctcaaagccccaacctttctcaaaactggcaccactattgtcggtttagttttccaggatggtgtcattcttggtgctgatactagggcaactgaaggacctatagtggctgataaaaa

SEQ ID NO: 173397 - DNA, 250 bp, Glycine max
gtgggagggagagaggagcggaggagagaaaatgacgacgaggttcaagaagaacaggaagaagagaggccacgtcagcgccggtcacggtcgtatcgggaagcaccgcaagcatcccggtggtcggggtaacgccggtggcatgcaccaccaccgcatcctcttcgacaagtaccatcccggtttcttcggaaaggtgggtatgcgctacttccacaaactccgcaacaaattctactgccccatcgtc

SEQ ID NO: 173398 - DNA, 250 bp, Glycine max
aacaaatataacactccgaaataccgatttgtggttcgctttagcaacaaggacattgttgcacaaataatatctgctagcattgccggcgatttagttcttgctacagcatattcacatgagctgccacgatatggtcttgaagtaggacttacaaattatgcagcagcttattgcactggtctcctgttggcccgaagagtcctcaaaacacttgaaatggatgaggagtatgaaggaaatgttgagg

SEQ ID NO: 173399 - DNA, 253 bp, Glycine max
ttgttctatctgtgacgagcatcatggcctcaagagcagtgttattgttggctatgtgtgtgcttccggcgatggttgtggccattcgcccagcaaagaaccctttttgcgtgaagggtcgtgtctactgtgacccttgccgtgctggttttgagacctcagctaccacctacattgctggtgctgagattatgttgcaatgcaagagcagggttagcaacgaggttgtgtacacgaagaaggggtacaccga

SEQ ID NO: 173400 - DNA, 258 bp, Glycine max
acagcactctcgaagagctccgcgagtgcggggaatgtggaggtggttgaggttatttatgataagactactgggaggagcagggggtttgcgtttgtgaccatgtcttccgttgaggaagctgaagcggctgctaagcagttcaatggctatgaacttgatggaagatcattgagagtgaattctggaccacctcctgctcggaatgagagtgctcctcggtttagaggtggttcttctttcggttccagaggtggt

SEQ ID NO: 173401 - DNA, 260 bp, Glycine max
agaaaaccgaccctctcctttccctcttcaccaaccaatggctcccccaaaggccgagaagaagcccgcggagaaaaagcccgcagagaaggctccggcggagaagaagcccaaggccgagaagaagatatcgaaggaaggaggaagcgagaagaagaagaagagaacaaagaagagcgtggagacctacaagatttacatcttcaaggtgctgaagcaggttcaccccgacatcggaatctcaagcaaggccatggggg

SEQ ID NO: 173402 - DNA, 257 bp, Glycine max
ggcttatggtggatacctaggcacccagagacgaggaagggcgtagtaagcgacgaaatgcttcggggagttgaaaataagcgtagatccggggattcccgatataggtcaacctttcgaactgctgctgaatccacgggcaggcaagagacaacctggtgaactgaaacatcttagtagccagaggaaaagaaagaaaaagcgattcccgtagtagcggcgagcgaaatgggagcagcctaaaccgtgaaaacggg

SEQ ID NO: 173403 - DNA, 253 bp, Glycine max
gtttgtgagaacaagaaaaagaggcgcaagatgagtggtagggtttctgggaaggtgaagtggttcaatgatcagaaggggtttggattcataagcactgacgatggcagcgacgatctcttcgttcaccaatctcagatcaaatctgacggtttccgaagcctcgccgaaggagagtccgttgagttcgccattgaatctgaatctgacggacgcgcgaaggctgttgatgtcactggccccgacggcgcca

SEQ ID NO: 173404 - DNA, 256 bp, Glycine max
atcggaacctcttctgcggcgtacaatgggacactccaacgtttggaattctcacccaaaaaactacggtcctggttctcgcacttgccgagtgtgtgggaatccacatggattgatcaggaagtatggccttatgtgctgcaggcagtgcttccgtagcaatgccaaggaaattggcttcatcaagtatcgctaaaagagctgttgtcacctacggaccaatattatgttctggcactaggatgttttgaagatg

SEQ ID NO: 173405 - DNA, 259 bp, Glycine max
  unsure (1)..(259): unsure at all n locations
accaagttgaagcagactgaagtggattgtgaatacttgaagaactgctgtgagaatctaactgaagagaataggaggcttcaaaaggaagtgcaagagcttagggcattgaagttatcnccanagctttacatgaacatgaaccctcccacnactctcanaatgtgcccttcgtgcgagcgtgttgncgtctcatccacatccttttcctcatcggccaccatgccctctgccccgcctccagctaatctcaacccgg

SEQ ID NO: 173406 - DNA, 261 bp, Glycine max
caaagagggttctcctacagattcttcagcaactgcgattttggatcggaacctcttctgcggcgtacaatgggacactccaacgtttggaattctcacccaaaaaactacggtcctggttctacgcacttgcccgagtgtgtgggaatccacatggattgatcaggaagtatggccttatgtgctgcaggcagtgcttccgtagcaatgccaaggaaattggcttcatcaagtatcgctaaaagagctgttgtcacctac

SEQ ID NO: 173407 - DNA, 261 bp, Glycine max
ctttgacagaagaaggggtaattgctgtaaaaaatgcagcatgtgagaggttattggatcagagggtggagataaagatgaagtcaaagaaaattaacgactgcttgaataggtttcatgttgcagtaccaaagcctcgtgaccagaaggaaaggcctccatgtattcctcaagcagttttagaagctaaagctaagcaagctgctgagaaggaaaagagaaaaactgaaaaggatctggaggatgagaatggtggggcgg

SEQ ID NO: 173408 - DNA, 254 bp, Glycine max
gttgccaaccttaagcaacaatatggattgaacaaaacagcaactgaggtgatcattatcatagaggcatacaggactctaagagatcgtggtcactatcctgctgctcaggttgtgagagatttccaaggcaaatttgcatttattctgtatgacagtggttctaagaccgcatttgttgctgcggatgctgatgggagtgttccctttgtctggggaactgatgctgatggaaatctcattttttcagatga

SEQ ID NO: 173409 - DNA, 255 bp, Glycine max
  unsure (1)..(255): unsure at all n locations
gccctataaaactaaacgctccccttctcgaagaggccgctcgctctctagggtttttctttttctcttctcactgcatcgcttcaggttcttctgaaaagatgtctcgcgtgtatgtnggtaacttggattcacgagtcaccgagagagatctcgaagacgaattccgcgttttcggagttattcggagtgtttgggttgcacgtagaccacctggtnatgcttttattgactttgatgaccgcagagacgcac

SEQ ID NO: 173410 - DNA, 256 bp, Glycine max
ggcaagatgagtttgttaaaaagcaggattggaagaatcctttgagtgtgggaaaatgagtatgtacggtagggatccgtggggaggcacgctggagattcacgcaaccggctccgccacggacgacagtcgcaccgggaatctccaggagctggaccgaggcgctttagacgagacccaacagagctggctcttgggcgccggagaacagaaaaagaacaagaaaacctacgtagaccttggctgcatcatcgtc

SEQ ID NO: 173411 - DNA, 258 bp, Glycine max
gagatctgcctccttttttttatcaaatctatctcttcttcaagaatagttgaaaatggggctgtctttcaccaagttgttcagccgactgtttgccaagaaagagatgcgtatactgatggatggtctcgatgctgcgggtaagaccaccattctgtacaagctcaagcttggagagattgtcaccaccattcccaccattgggtttaatgtggaaactgtggaatataggaacatcagcttcactgtctgggatgt

SEQ ID NO: 173412 - DNA, 258 bp, Glycine max
ggagattcgccaacatcgcttgcaagaaggccgatgttgacatgaacaaaagggctggtgagttgagtgctgcagagttggatagtgtgatgactgtggtggcgaaccctaggcaattcaagatcccggattggtttttgaacaggaagaaggattacaaggatggaaagtactctcaggttgtgtctaatgctcttgatatgaagctcagggatgacttagagagactaaagaagatcagaaaccaccgtggtttga

SEQ ID NO: 173413 - DNA, 257 bp, Glycine max
ctattttggaagctgaaggggaagcagctaaatcaaagcatcaacagggcccttctggccaatgggtcgatgtgatgaaaaggagaagagccattcatgagaatattataaatttggttcgtgaacagcagcagtctaagagtaataaggaaaaggaggaaattcaatcagaaatcagtccttccatggagaaaggaagaaaagcacgtggttctaagaggaagccccaaagtttcaaggatgaggatcactatata

SEQ ID NO: 173414 - DNA, 253 bp, Glycine max
cgctgctgccgaaacccttcccgatccctaaggtaagtgagtaatcggtggttgagaatggtggacaaggcgaagggtaggaaggaggaggtggttaccagagagtacaccattaacctccacaagcgcctccatggctgcacatttaagaagaaagctcctaaagctattaaggagataaggaaatttgcccaaaaggccatggggaccaatgatgtgagggtggatgtgaagttgaacaagtttgtctgga

SEQ ID NO: 173415 - DNA, 252 bp, Glycine max
aaacgggatccaagttcggtattcgaagccactccagcaccagaatggaagggagtaactccactgtgccgagtattgttgtctatgtcactgttcccaacaaagaagcaggtaagaagttggctgaaagcatcgtcaaagagaagcttgctgcttgtgtcaacagggtaccgggtattgaatcggtgtaccagtgggagggaaagatccaaactgattctgaggaacttcttattatcaagactaggcaat

SEQ ID NO: 173416 - DNA, 253 bp, Glycine max
cacctagattcagccacagttggaaaaaaaaaaaaatttgttcgagatggcacgtacgaagcaaactgctcgtaagtccacaggaggaaaggcacctaggaggaagctcgcaaccaaggctgaacgtaagtctgcaccaactactggtggtgtgaagaagccacatcgttatcgtcctggtaccgttgctcttcggaaataccagaagagtaccgagcttttgatcaggaagctccccttccagaggctggtt

SEQ ID NO: 173417 - DNA, 253 bp, Glycine max
gtgatgaacctattcatttagccagtagcctttctgcaaaccaccagcgcttccttgctactggtatccgggtggatttgggttctaattgcaccgaaggcaatgaaaaaggtcacgtggaaccatctaaaccagaagcaacaagaagttcctgcgaaaattccttctcagcaagtgcctagcttcacatcctcttgggcagttgatgacttgttggaattaacagactttgaatcaccagacaaagtaaggc

SEQ ID NO: 173418 - DNA, 253 bp, Glycine max
gagtgtgaactgcaaagggcttctccagcctagtttgttctcagatcttcttcttccatggaccagtacgagaaggtggagaagataggcgagggaacatacggcgtcgtttacaaggctcgcgaccgcgccaccaatgagacaatcgctctgaagaagattcgcctcgagcaggaggacgaaggcgttcccagcaccgccattcgcgagatttctcttctcaaagagatgcagcataggaacattgttaggt

SEQ ID NO: 173419 - DNA, 253 bp, Glycine max
taggtctcgcccaatacctactctccgctcccaagagcacgcaccaccactattgcacttcttcctcgttctccctctttttcttcttcttcgctaaacccttttttctatctcactaacacaacaatgggagacgagaagaagggcaagcctgctgcttccggcgtgtggtccaccatcaagcctttcgtcaatggtggagcctccggcatgctcgccacctgcgtcattcaacccatcgatatgatcaagg

SEQ ID NO: 173420 - DNA, 257 bp, Glycine max
gaaagtatggcttcgacggcagcgtacctggctcggcgcgcggcgcagaaggagagggttcggatcctctaccgccgtgccctcaaagacactctcaactgggccgtacatcgccacctcttctacgacgacgcttcaaacctccgcgaaaggttcgaggagaacagacacgtggaagaccctgataccattgacaggctcatagcggatgctgaagcttcctacaacaagtggcgccatcctgatccttatattgt

SEQ ID NO: 173421 - DNA, 251 bp, Glycine max
actcgagccgaatcggctcgagtaagatccgccttctctgaattgtaaaaatgtcgctcggaacaactgcttgttcatacgcagctctcatccttcatgaagatggaatcagtgtaactgccgacaagatcagcaccttgttggaaactgcaaaggttcaagtagatacctattggccaaccttatttgctaaacttgctgagaagaaaaatcttggcgatttgatagccaatgcagcaggcggtggtgca

SEQ ID NO: 173422 - DNA, 251 bp, Glycine max
tcgctaaccaagaaggaactagggttttacagaatacaagctctctctctctctcgtcggttttcgtcaatcaaatccaatccaatatcaaatatgagtcgtcatcccgaggttaagtgggctcagaggcttgacaaggtctatatcacggtgcaattggctgattcaaaaaatgcaaaagtggatcttacgccagatggtatttttaccttctccggtagtgctggtgctgaagaccatcagtatgagct

SEQ ID NO: 173423 - DNA, 251 bp, Glycine max
  unsure (1)..(251): unsure at all n locations
ttcagttgttgacctcactgtcaggctagagaagccagcaacctatgagcaaatcaaatctgctatcaaggaggaatcagagggcaaattgaagggtattttnggttacaccgaagatgatgttgtgtctactgattttgttggtgataacaggtctagcatatttgacgccaaggccggaatttctttgaatgacaactttgtaaaacttgtttcctggtatgacaacgaatggggttacagttcccgtg

SEQ ID NO: 173424 - DNA, 250 bp, Glycine max
gcggaactgaagaaggagaacgccactggggtgtacgagatcgatgtgaagatgtaccttagggtcaggttcaagttgggtgtcttcaagaccaagacgcttaagcccaaagtatcatgcgacttacgtgttcctttgaaaggaagcgccggtgctggtgtctttcagaccaccaagtgcgactgggatcgctgatggattcggattcacccgacccgacccgacccggttctgctttcacgtcatttct

SEQ ID NO: 173425 - DNA, 250 bp, Glycine max
gaatttggagacaccactctgaccaaggtttttgttgggggcttagcttgggagactccgaacgatgcccttaaagaccactttgagaagtatggtcagatccttgaagctgtcatcatttccgataagcacactggcaaatccaaaggctatggctttgtgactttcaaggaggctgaggctgccaagaaggcttgtgagaattcaacaactctcattatcaatggccgtcgagcgaattgcaatcttg

SEQ ID NO: 173426 - DNA, 251 bp, Glycine max
cagagaggaagcttagagagagagagagagagagagagagagaggagagagtattggcgcttcatcaagatgggtattcctagggattccatgcacaagacgcgtgccactggtggcaagaaaaaggcttggagaaagaagagaaagtatgagcttgggcgtcaggcagcaaacaccaagttatcaagcaacaagacaatcaggaggattcgtgttagaggtggcaatgttaaatggagggcattgaggct

SEQ ID NO: 173427 - DNA, 250 bp, Glycine max
gaagagagcgtcctagtcgcaaccctaataagaagaaccacagcttcaagcgagtgacatccaccagccatgggtcgtatgcacagccgcggtaagggtatatcctcttctgctttgccctacaaaaggacaccccctagctggctcaagatctcttcgcaagatgtggaagaaaatatctgcaagtttgcgaagaagggtttgaccccgtctcagattggtgtcattcttcgagattctcacggtattg

SEQ ID NO: 173428 - DNA, 253 bp, Glycine max
agaatacataaacatcaagatttcagttccaaacaaaacttatcaaaatctcatatactgattcagttctatacataaccatcgagatttactatcaaaccaaaaattctcaaaatctcttcacctctgtgatgaccatggaatacagaaccttagaactcaacatcatatccgcaaaggacatcaagaacgttaacctcttctccaagatggacgtatacgccgtcgttacgctctccggcgaccctctcca

SEQ ID NO: 173429 - DNA, 255 bp, Glycine max
tcctaacctaaaccctactcattctccatacctcaacgaagaggttaaagagacggcaacactttgctgtccgccttgaccgagcagagcttcgtacttggcctcggattttgccctagagtactctcagtcacaacagacaccgtcgtcgtcgtcgtcgtcatcaatggcaccgaagcagaccaaggctgagaagaagatcgcttacgatgcgaagctgtgcgacctaatggaggagtacggccagatcctcgt

SEQ ID NO: 173430 - DNA, 255 bp, Glycine max
taaatccctagtaagccgccatggtgaagtactcaagggagcctgacaatccaaccaagtcttgcaacgctagaggcgccgaccttagggttcattttaagaacactagggaaactgcctttgcaatcaggaagttgcccttggttaaagctaaaaggtacttggaagatgttcttgcgcacaagcaggccattccgttcagacgtttctgtcgtggtgttggaaggacagctcaagcaaagagtagacactcta

SEQ ID NO: 173431 - DNA, 251 bp, Glycine max
cagaaggaggagaagcagaaagaggagacgaagcaatggcgccgaagaagccccgaaccacgtcgaggaaccctgatttggtcaggggaattggcaaatattcgaggtcgcagatgtaccacaagaggggcatctgggccatcaaggccaaaaacggcggtgttttgcccctccacgatcccaagcccaaacccgaggccccggcccagaagccgcccaagttctacccggccgatgacgtgaagaagccc

SEQ ID NO: 173432 - DNA, 249 bp, Glycine max
atgctcttgaagctgtcaagaagctgagggcagaaccaaaggccaatgaccaatatttgcctccttttgttattgttgacgagagtgggaaacctgttggtccgatagttgatggtgatgctgttgttacattcaacttccgagctgatcgtatgacaatgattgctaaagctcttgagtatgaaaattttgacaaatttgatagagttcgttacccaaaaatccgctatgctggaatgcttgaatatg

SEQ ID NO: 173433 - DNA, 249 bp, Glycine max
caaaaaaaaaaaccctctctttctctctcttccaaaacctaattttcattttgtctcttcaaacaaattttcaaaatgcgtgagatccttcacatccagggtggccaatgcggcaaccagatcggcgcacaagttctgggaggtggtttgcgcggagcacgggatcgaccccactggaaggtacggtggggactcagagcttcagctcgagaggatcaatgtctactacaacgaagccagctgcggccg

SEQ ID NO: 173434 - DNA, 248 bp, Glycine max
tatcgagccgaatcggctcgagcttgatcaccttttttgagaaaagacatatatcaatggcacctccgagtgtgttagaagtcagccctcctgctttaacttccatctctgaaccacttccattttttgatggaaccacaaggttatacatttgctatctgtgcccttttgcacaacgcgcatggataactaggaactgtaagggactgcaagacaagatcgaattggttcctattgatcttaaaaac

SEQ ID NO: 173435 - DNA, 247 bp, Glycine max
ctcgttcttcttcgtcgttatcttcttcttttgttgtttgtgtgtttgttttttctctcacctgaaaatgtcttgctgcggtggtaactgtggttgcggaagcgcctgcaagtgcggcaacggctgcggaggctgcaagatgtacccagacttgagctacaccgagtcaaccaccaccgagaccttggtcatgggagtggcaccagttaaggctcaattcgagagtgctgaaatgggtgttcccgct

SEQ ID NO: 173436 - DNA, 249 bp, Glycine max
ctgcgcttcacgatgggtgcttacaagtatgtttcggagctatggcgcaagaagcagtctgatgttatgagattcttgcagcgggtgaggtgctgggagtaccggccagcaaccttctattgtccgtttgacaaggtctactcgcccagaccaaggctcgccgcttgggtttcaaggctaagcagggttatgtgatttaccgtgttcgtgtacgaaggggtggccggaagagaccagttccaaaaggta

SEQ ID NO: 173437 - DNA, 256 bp, Glycine max
gactagttttaagcgaatcgtttggcctttttattcctcctactctcaaataccctaattaggtttgtgattgaatttgcctcactttgctgccgtacctaatcggagagctcccgctgactgcgatcggatttcatggctcctaagaaagataaggctcccccaccttcatccaagcccgccaagtctggtggtgggaagcagaagaagaagaagtggagcaagggaaagcaaaaggagaaggtgaataaccagg

SEQ ID NO: 173438 - DNA, 246 bp, Glycine max
gagcatttgaagctagggctgctaagaaggtgattggttgtgctcaaaatcttagcaagtttaccaatcccgaagaaggtttccaagaattctctgtcgatctagttgaggcagctgttgctcattgccagttaattgtggtttccaagggagcccggtcccgcaacaacttcgtaatgcactctaaaataacttataactgcactgttgatcctggagaaagttatgaattgctttcaatttaaa

SEQ ID NO: 173439 - DNA, 248 bp, Glycine max
caaacccgtccctcacactctccaaaccctagcggcactacacactagttctatcgctatctccccaagatgtcgagcgccgatcccgagcacagagaagaggaggaggcacccgccgttggcgacgacgaggacaccggagctcacgtcgctccaatcgtcaagctcgaggaggttgctgtcaccaccggcgaggaggacgaagatgcaatcctggatctcaaatcgaagctttaccggttcgacaa

SEQ ID NO: 173440 - DNA, 247 bp, Glycine max
tgctccatagctgcagcattagggtttttcatctgcttcaatggggaagggaacagggagttttggtaagagaaggaacaagactcacactctctgtgtgaggtgtggccgccgcagcttccatctccagaagagtcgttgcgccgcttgtgctttccccgccgcacgcactaggaaatataactggagcgtcaaggcaatccgcagaaagaccaccggaactggcaggatgaggtacttgcgtaac

SEQ ID NO: 173441 - DNA, 246 bp, Glycine max
actcgagccgaatcggctcgagcggctcgaggcaggaaaaatggtttagctgaaactgcagaagaggctcgccgcgagcgtgctacaatgtggcagaggaaaggtttggcttgaccccaatgaagtcaacgaaatctccatggccaattctcgccaaaacataaggaagctggttaaggatgggtttatcatcaggaagcccaccaagattcactctcgctcacgtgctcgtcgaatgaaggaagc

SEQ ID NO: 173442 - DNA, 245 bp, Glycine max
ggattacattgactctgcagtgagacatgtgctactaagacagggtgttcttggtatcaaggttaagatcatgcttgattgggatcctaaagggaaacagggtcctaaaactccccttcctgatcttgtcacgatccacacccccaaggaagaggaagaatatgcccggcctgctgctgttttggcaactgatattgaggtccctgttgcttgaaaatgttttatttgttcttgagtagaaattc

SEQ ID NO: 173443 - DNA, 247 bp, Glycine max
agcggccttgtggccgcgcaggaagtgaacagccccttcgagtattgcgacattgtgaccaccaccacgcataagagcttgcggggtgcacgggcggggatgatcttttaccggaagggcccgaagccgccgaagaaggggcagccggagaacgcggtttatgatttcgaggacaagatcaactttgcggtgttcccttcgctgcagggtgggccccacaaccaccagatcggggctcttgccgtgg

SEQ ID NO: 173444 - DNA, 247 bp, Glycine max
cctcttaccgtgcgcatcttctcaatccataacaacttcgccaccgttgcaccgaaaccaatcgccacaaactcgggatctcagattcgacgcgccaaaccatgtcgaaggcgcgtgtctacacagatgtcaatgtccttcgccctaaagagtattgggattacgagtctctcacccttcaatggggtgatcaagatgattatgaggttgtgcgaaaagtgggcagggggaaatatagtgaagtttt

SEQ ID NO: 173445 - DNA, 249 bp, Glycine max
gttagtgcacctccgtagggtttggttattagggttttcgctcacccgtgtgcagtcgagcctcccgaagaaaaagcgaaaatgccgtcgcacaagacattcagaatcaagaagaagttggcgaagaagatgaagcagaacaggcccatcccctactggatccgcatgaggaccgacaacaccatcaggtacaacgcgaagcgccgtcactggcgtcgcaccaagcttggattctgaggtgcttgcttt

SEQ ID NO: 173446 - DNA, 247 bp, Glycine max
ttgtttggttccattttataacttcagggaaggctggacttgacacatttgtgccactatcttggtcctatagattgaaaatcatgaaaggaactgcgaagggattgctctatcttcatgaatttagtcccaaaaaaatatgtccatggagacctcaagccaagtaacatacttcttggacaaaacatggaaccccacatttctgacttcggagttgggcgccttgcaaacatcgctggagggtctc

SEQ ID NO: 173447 - DNA, 247 bp, Glycine max
aaagaaagagaagaaaagagtggaatcgaagacgaagacgaagatggaggacgcatcagcatcaaagttcatcccacaccaaatcggaggggtccaaaacgacgtgcttcgatttggtctccatggagtcaagagcgacatcgttggttcccaccctcttcaatcttcactccagtctacaaggagaatggatgaagcgatgaagaagcaatgcaaagttaacctgtacggaactgcttttcccctg

SEQ ID NO: 173448 - DNA, 249 bp, Glycine max
cccactttaaaaagcccaatagccgaaacctcaacaaaagcagtgtcttccttcaaatccgactgagcgaagaagatattagggtttttgagtgcagtgcggcgatcctagcactctcttctgcagctttcgccgacagcttcattcaccatgggctgagcaaaccgagaaggcttttttgaaacaaccaaaagtgtttctcagctcgaagaaaactgggaagggaaagagacccggaaagggtgggaa

SEQ ID NO: 173449 - DNA, 254 bp, Glycine max
accaaggttgataggagtggtgcttacattgtgagacaggctgctaagagcattgtggcaagtggactagccagaaggtgcattgtgcaagtgtcttatgccattggtgtgcccgagcctttgtctgtctttgttgacacctatggcaccgggaagatccatgataaggagattctcaacattgtgaaggagaactttgatttcaggcccggtatgatctccatcaaccttgatctcaagaggggtgggaataa

SEQ ID NO: 173450 - DNA, 124 bp, Glycine max
cggctcgatcgagaacggttctttgaaacaatcaaaagtgtttctcagctcgaagaatactgggaacggaaagatacccggaaagggtgggaaccgcttttggcaatccattgggcttggattt

SEQ ID NO: 173451 - DNA, 265 bp, Glycine max
cttcagaaaccctaatttctcaaaatcttcagaggacacacagcacaaccaacacctccacagcctctcctacctcccggagccatggccgccgccgactcctccgccgctccatcgcaccagttgtcgcagagggagacggacatccagatgatgctcgccgccgacgttcacctcggcaccaaaaactgcgactttcagatggaacgctacgtcttcaagcgcagaaccgatggtatttacataattaaccttggcaagacat

SEQ ID NO: 173452 - DNA, 265 bp, Glycine max
attcttacaagttacatccattgagaaacatgaaggtctcccccttagcattttcaatcctttttttgtccttcaccatagaactcttcattggcattgcttcagcagcacaagaaccagtgcttgacacctcaggccagaagctgagaacaggtgtcaagtactacattctaccagtcttcagaggcagaggtggaggcctaacagtttcaagcagtggcaacaacacatgccccctctttgtggtgcaagagaagcttgaagt

SEQ ID NO: 173453 - DNA, 260 bp, Glycine max
ctcactgctgtaagaattcccactttccaccaacgccatctcagaaaacatttcactgcaccttcttcttccttacgcctcctcaatctcgcaaagatggaaggaagtgagatcagtgagcaagtgggagaggatttgggagcaaagaagaaagtttttgtagctggagccactggtagcaccggcaaaagaatcgttgagcagttactcgcaaagggctttgctgttaaggctggggttagagacgtcgacaaggccaa

SEQ ID NO: 173454 - DNA, 259 bp, Glycine max
  unsure (1)..(259): unsure at all n locations
caaaagcaaccacaacaagcacttctcttatttcctatcacaccctattacagattcacaagcgcagacacttcaaatggctctggaagctcttcaatcacccagaactgccactccatcgtttagtccctttgaagaaaccaacctcagttacttggagacaccgtggaccaaaggaaagcgttctaagcgtanccgcatggagcagcaactgcaacactcttcatgcaccgaggaagagtacctcgctctctgtctc

SEQ ID NO: 173455 - DNA, 258 bp, Glycine max
tgaggccaataaacagtgtatcaccatcatcaccaatgcgtgccagtggggttaatatatggaagtctccaattccttacttgtttggaggcttagctgtgatgctggctatcatatctatggcattggtgatccttgtttgctcatacagaaaacgtgattctcagtcatcatctgaagttaatgaagacgtgaaatcacaagcaatggccaacaatttagagacaaactcagaacctgaggttcttgtcataatgg

SEQ ID NO: 173456 - DNA, 257 bp, Glycine max
gctcaacggatctaaggcttcagtctgtaatcatgtcaggcaagtatatcatttctgctattcttggatcatttggagttgcatgggtttgtgattattatgtttcagacaaaaagctatttggaggttctacccctggaactattacaaacaatgagtgggcagaagagactgacaaaaaattgcaggcatggcctcgtactgccggtccaccagtggtcatgaatcccataagtcgccaaaatttcattgtcaag

SEQ ID NO: 173457 - DNA, 255 bp, Glycine max
aaaacccaaggctgctgagtgttgcagaggcatgtctgagtcggacacgaagaagaagaagcagcagcagcgcacgacgtgaaagcatgaaggagaagaagggttgatgatcaagccccagagcttcactccccccatcgacacctcccaatggcccattctcctcaaaaactacgagcgcctcaacgtccgcaccggccactacacccccattccctccggctactccccccagaagcgccccctctccgagta

SEQ ID NO: 173458 - DNA, 265 bp, Glycine max
aacactgtaaaattatcacaatgatttggatgataacactgtaccagaaatacagaggactaaccttgcaaatgtagttttgactttaaaaagtcttggtattcatgacttattgaactttgattttatggatcatccacctgctgaggccttattgaaagctttggagcttctatttgcattaagtgcgttaaataagcttggtgaattaactaaggtgggcagacagatggcagagttcccacttgatccaatgttgtaaaaa

SEQ ID NO: 173459 - DNA, 262 bp, Glycine max
ggtcggtgtttcttctttttctgtttgtcttgtgtagctcaggagcaaaggttgtcgccattgatgtacatgcagcaaagcgtctcatccagaccggttccatttatcttgatgttaggacggtggaagagttcaagaaagggcatgtggatgcagttaatgtccttaacattccatacatgttgaatacacccaagggcaaggtaaagaatccagactttctgaaggaggtttcatcagcttgcaacaaagaagatcatct

SEQ ID NO: 173460 - DNA, 263 bp, Glycine max
caatcaatggagaacaccgagggatccagatctgcgacgaacggggtgctgcctctggcgcgcaaggtggcattgattaccggaattaccggccaagacggttcgtacctgacggaattccttctagacaagggttacgaggtgcacggtctgatccgtcgctcctcgaacttcaacacgcagcgcatcgaccacatctatgtggatccccacaacgcccacaaggcccgcatgaagctccactacgccgatctctccgacgc

SEQ ID NO: 173461 - DNA, 262 bp, Glycine max
tcagttattcatctgcttactaaaatttcttccattcttagctttgttcaatcaaagttttttaagatggcccagagaaatgttactgctaattcttcttttgaaaggactagcttgccttccctagatcaaaagttggccatggccaagcgctgctctcatgagggtgtgatggcaggagcaaaagcagctgttgttgctactattgctactgccataccaactctggctagtgtaaggatgcttccttgggcaagagcca

SEQ ID NO: 173462 - DNA, 257 bp, Glycine max
gcgcgacaagcatcccaaaaccctagctcgcgttctgctttcgtcttttacatcaggatggagtctcaggtgaagcacgcacttgttgtcagagttatgggtcgtactggatccagaggacaagtaacccaggttagagtgaaatttttggatgatcagaaccgtcacatcatgaggaatgtgaaaggacctgtgcgagaaggagacattctcaccctactcgagtctgaaagggaagcaagaagattgcgctagat

SEQ ID NO: 173463 - DNA, 253 bp, Glycine max
  unsure (1)..(253): unsure at all n locations
gcttgtttgtgcctgcgtagttacaaagtaaaaagagggaggactaggacaaaagttgttggcagtcatcatgtcgagcgcttcgttgaaggagatgaggaacggtggtgaggattatagcaannnnnnnnnnnnnnnnnnnntgagggacttgtatggagaggattgtgccactgaggaccagcttatcactccatggactttctctgtggccagtggatgcagtttactgagagatccacgctacaacaaa

SEQ ID NO: 173464 - DNA, 262 bp, Glycine max
ttctcgagccgaatcggctcgagctctgctcgtgcctctagggttatcatatctccatttccatttcctctctctcagttaccaagaatcttaagctatgggaaagtcttacccaaccgtgagcgctgattaccagaaggccgttgagaaggcgaagaagaagctcagaggcttcatcgctgagaagagatgcgctcctctaatgctccgtttggcatggcactctgctggaacttacgacgtgagctcgaagaccggtggt

SEQ ID NO: 173465 - DNA, 261 bp, Glycine max
cgggactgtaactagccgcagcacgaggagcagcctcaggaggagaaggatgtctcacaggaagttcgagcacccaaggcacggttcactgggatttcttcccaggaagcgtgctgctcgtcacaggggaaaagtgaaggcattccccaaggatgacccatccaaggcacccaagctcactgcattcttgggttacaaggccggtatgactcacattgttagagaggtcgagaagccaggatcaaagcttcacaagaagga

SEQ ID NO: 173466 - DNA, 257 bp, Glycine max
gttgttctgttagaagtgctacaaacaacaatggctgctaatcaggaagatgtgaagcttttgggagctactggaagcccatttgtgtgcagggttcagattgccctcaagttgaagggagttcaatacaaatttttggaagaaaatttgaggaacaagagtgaactgcttctcaaatccaacccagttcacaagaaggttccagtgtttattcacaatgagaagcccatagcagagtctcttgtgattgttgaata

SEQ ID NO: 173467 - DNA, 260 bp, Glycine max
gcattggctttactaagaggcgtagtaaccaggtgaagaggacctgttatgcacaatcgagccaaatcagacagattcgcaggaagatgagagagataatggtcaaccaagcaacagcatgtgatttgaaagaattggtgcgcaagttcatccccgaaatgattggaaaggagattgagaaggcaacatctagcatctatcctctacagaatgtgttcattcgtaaagttaagatccttaaagctccaaagtttgatctt

SEQ ID NO: 173468 - DNA, 257 bp, Glycine max
gttccctcgctccaaagatcggtccattgggtctctccccaaagaagatcggagaagacattgcgaaggaaaccgcgaaggactggaagggcctccgcgtgacggtgaagctgacagtacagaaccggcaggcgaaggtgacggtggtgccctccgccgccgcgcttgtcatcaaggcgctgaaggagcctgagagggacaggaagaagacgaagaacatcaagcacagcgggaacatctccctagacgacgtcgtt

SEQ ID NO: 173469 - DNA, 255 bp, Glycine max
tctcgagccgaatcggctcgaggcatattcacatgagctgccacgctatggtcttgaagtacgacttacaaattatgcagcagcttattgcactggtctcctgttggcccgaagagtcctcaaaacacttgaaatggatgaggagtatgaaggaaatgttgaggctactggagaggattattcagtggaacctgccgagagcaggaggccattccgtgcactccttgatgttggtcttgttaggactacaacagg

SEQ ID NO: 173470 - DNA, 251 bp, Glycine max
atcgatcatctcctctgcgaaatacaatggagctgacagcccagcagctgagccaatacaacggcactgacccatcgaagccgatctacgtggcggtgaaaggccgagtctacgacgttacctccggaaaatccttctacggccccggcggcccctacgccatgttcgccggcaaagacgccagcagggccctcgccaagatgagcaagaacgacgaagacatctccccctccctcgacggcctctccgac

SEQ ID NO: 173471 - DNA, 253 bp, Glycine max
gacgcatgactaaaccaaacctctcactcgccgtcgtagggtttctcctttcgtttagcaacaacaacaatggttgcagccaagaaaaccaagaagacccatgagagcatcaacaacaggctcgctcttgtcatgaagagtggaaaattcaccctcggttacaagacggttctcaaatcacttaggagctccaaagggaaattgattatcattgctaacaactgcccccctttgaggaaatcagagattgaat

SEQ ID NO: 173472 - DNA, 252 bp, Glycine max
cagaggctacgtacgatcaaattaattaagatggcggaagtgaggaacaaacaagtggttctgagggactatgtgagtggttttcctaaggaatccgacatgaacatagttgaaggaaccacaatattgaagcttccacaaggttccaatgatgtgcttctaaaaaatctctacctttcctgtgacccttacatgagaatgctcatgaccaaggtggaaggcctcgacgtgtttggcacctatacacctggc

SEQ ID NO: 173473 - DNA, 251 bp, Glycine max
agcagtgcagggaagttggtgtgtgtcaccggtgctgccggttatattgcttcatggattgtcaagttcctacttgaacgtggttacactgtcagggccactgttcgaaacccaaatgatcacacgaaggtagaacatttgctaaaacttgaaggtgcaaaggagagactgcacctttttaaggcagatcttttgggtgaaaattcttttgactccattgttgagggctgtgatggcgtctttcatactgc

SEQ ID NO: 173474 - DNA, 259 bp, Glycine max
agcagagcgaccttgaagagctatggctgtcggaaagaataagaggatttccaagggaaagaagggtggcaagaagaaagccgctgatccctttgccaagaaagactggtacgatatcaaggccccttccctcttccaggtcaagaatattggcaaaaccctcgtctctcgtacccagggaaccaagattgcatccgaaggactcaaacatcgggtttttgaggtctcattggctgatctccaaggggatgaagaccac

SEQ ID NO: 173475 - DNA, 255 bp, Glycine max
cacgatcagcaagacgctgtgtatatacgttctgttcattcattcagaagcagcgtgggtgtgtgttttgcttcagagaatctttctcctaatggaacagctgaagccaagcgctcctaactcatcccctctcactccactcgccttcttggacagagcagccaccgtctacgcccacgtcccttccctagtctacaaccacaccaccttcacctggtccctcacgcgccgccgatgcctccagctcgcctcctc

SEQ ID NO: 173476 - DNA, 256 bp, Glycine max
aaacggcagcacgcgcaaaaatggtgaagtttctgaaaccaaacaaagccgtcatcgtccttcagggacgctacgccggcaaaaaagccgtgatagtgcgaaccttcgatgaaggcacgcgcgagcgcccctacgggcactgcttggtggcagggataaagaagtaccctgcgaaggtgatcaagaaggattcggccaagaagacggccaagaagtcgcgtgtgaaggcgttcgtgaagctcgtgaactaccagca

SEQ ID NO: 173477 - DNA, 255 bp, Glycine max
ccaatatagcccaagccctatacaaccaaaccctaacacacacccatttgattcagtttccatggctagcctcaaggttgcatttttggctgcagtgctctgcatggttgtggtgagtgcacccatggcacatgcagctatcacgtgcgggcaggtgacgaatagcctgatcaattgcatcggttacctccagaacggaggaacgccgccgtcgggatgctgcaacggagtgaagagcctcaatgccgccgccaa

SEQ ID NO: 173478 - DNA, 251 bp, Glycine max
attgttgtgactcgttcttcttcgtcgttatcttcttcttttgttgtttgtgtgtttgttttttctctcacctgaaaatgtcttgctgcggtggtaactgtggttgcggaagcgcctgcaagtgcggcaacggctgcggaggctgcaagatgtacccagacttgagctacaccgagtcaaccaccaccgagaccttggtcatgggagtggcaccagttaaggctcaattcgagagtgctgaaatgggtgtt

SEQ ID NO: 173479 - DNA, 251 bp, Glycine max
gttttgttggccatggagactccgtaaatgaaatcaggactcaaacattaaagccatcacttgtgatctctgcaagcaaagatgaatctgtccggttatggaatgttcatactggaatatgcattttaatatttgccggagctggaggacatcgtaatgaagttttaagtgttgattttcacccatcagatatatatcgtattgctagttgtggcatggataatactgtaaaaatatggtctatgaaggag

SEQ ID NO: 173480 - DNA, 249 bp, Glycine max
cagtgcttcaaacccctttttctcttctcatttcctttcatcactctcttgcttcttttcttcttctcgcaattttccattttcacacttttagcgtaagaacatcttttaatggcgtcccaaatccgtgagtggtctggaatcaatacattcgcacctgctacccagactaagttgcttgaactcttgggaaatcttaaacaagagaatgtgaactccttgactatacttgtgatgggaaaaggaggt

SEQ ID NO: 173481 - DNA, 258 bp, Glycine max
cgcgacaagcatcccaaaaccctagctcgcgttctgctattcgtcttttacatcagcaggatggagtctcaggtgaagcacgcacttgttgtacaaagttatgggtcgtactggatccagaggacaagtaacccaggttagagtgaaatttttggatgatcagaaccgtcacatcatgaggaatgtgaaaggacctgtgcgagaaggagacattctcaccctactcgagtctgaaagggaagcaagaagattgcgcta

SEQ ID NO: 173482 - DNA, 258 bp, Glycine max
ccaaactccatttctcactcgccgtcgtctcttccgtctagggtttctcctcttcacaaaaatggttgccgcaaaaaaaactaagaagacccatgagagcatcaacaacaggctcgctctcgtcatgaagagtggcaaattcaccctcggttacaagaccgttctcaaatctcttaggagctccaaagggaaattgattatcattgctaacaactgcccccctttgaggaagtcagagattgaatactatgctatgtt

SEQ ID NO: 173483 - DNA, 254 bp, Glycine max
gtccaaccttgactgcttcctccggcgtacgacacctgttgtgccgtctcagtttcttcccaagcacgagattcgaaaccttaaccgattgtggcacccgtgggagagagaagctgttgagtacttcactttgggtgatctatggaatcgtttccacgaatggagtgcttatggagctggagttcccatcacgttgtccaatggggagacacttgttcagtactatgttccttacctctccgcaattcagatat

SEQ ID NO: 173484 - DNA, 250 bp, Glycine max
gctcattttaccggcggtggaagagagatagaccaataatctgaatctgaaacctccgtgttggtgttgcatatccaaaccctaatttggaaattgaattgttgaagggaagaagatcaagatggttctggcggagttaggtgggagcatttcgcgtgctctccagctgatgagcaatgcgacagtaatcgacgagaaggtgctcaacgattgcctcaacgacatcactcgcgctcttcttcaatccgat

SEQ ID NO: 173485 - DNA, 248 bp, Glycine max
aagtgttggatgcatttctatttctaactaattattgtgcttattattattgttgagaaagaaaagaatggcaaagttaataaaattctttgagttgaacacaggggccaagattccttctgttgggttaggcacttggcaagctgagcctggtgttgtagccaaagctgtcaccacagccattctggttggatacaggcatattgattgtgctcaagcgtataacaatcaagcagagattggttctg

SEQ ID NO: 173486 - DNA, 247 bp, Glycine max
caaggatacatttaccagcagaagtttagtctggtgaacataaagttgaaatgggtgaaagataggacattggatgctgttgttactggtcagagggatcttaaggcagctgggattcttgtctccatcatttattcttcttctgaatgctgccttccaatataccatctttctcgccaccgtggacaacttggtcttcccagtgacctcaaactttccacctttataagaagatatcccaacatat

SEQ ID NO: 173487 - DNA, 247 bp, Glycine max
cactaagcagttgctaccatggtcaccttcaggtttcaccagtaccaggttgttgggagggctcttcccactgaaactgatgtgcatcctaagatctacaggatgaagctgtgggccaccaatgaggtccgtgccaaatccaagttctggtatttcttgagatagctaaagaaggtcaagaaaagcaatggccaaatgctagccatcaatgagatttttgagaaaaatcctaccaagatcaagaatt

SEQ ID NO: 173488 - DNA, 245 bp, Glycine max
ctcctcccagggtttctccaccaagagggaaatggctcccaaaccgcctagtacgggtctgtttgttggactgaacaagggacatgtcgtcaccaagaaggaattgcccccacgcccctcggatcgtaaggggaaaacaagcaagagggtgcactttgtgaggaacctcataagagaggttgctggttttgcaccctatgaaaagcgtataactgagttgctgaaggttgggaaggataagaggg

SEQ ID NO: 173489 - DNA, 245 bp, Glycine max
atggaaggagagaaagaaaatcccgatggtaacgccgctttggtgaactccttctgcgaaatcacttcctcttccaaggaagaagctcttttctttttggagagccacaatttcgacctagacgctgccgtttcgactttcctcgacaacgccaacaaccccctcatccctctcaacgacgaccttgccattcccaaccccaacgccgtttcccctccctcagattctcactctccggacttcaa

SEQ ID NO: 173490 - DNA, 254 bp, Glycine max
atccagttcgatgagcacgcgccgaaggtggcgttgccgcagggcatgatggtgccagtgaattcctttaacacgatgtaccattcgcccgcgttttgggccttgatgctcccggtgtcggtcagcacgatggcctccgatgtgttgagaggttactgggggcagagactgctttgggaggttggtgggtatgttgtggtttaccccccaactgtgcataggtatgataggattgaggcatatccgttttcgga

SEQ ID NO: 173491 - DNA, 252 bp, Glycine max
gtcttccacgttattctctctccgagcttcactctcttttcgcctctgctaaagggagaaaaatggggttctcctcctttctgggtcgtgttctctttgcctccctcttcatcctctccgcatggcagatgtttaatgaatttgatgccaatggtggacccatctcgaaagagttgattcccaaactcagtgtggtgaagaataatttatcctctaaattgggggtagcgctaccagatattgatgcccggc

SEQ ID NO: 173492 - DNA, 251 bp, Glycine max
gtcgccgcgtatttgctcgccgtcctcggtggcaacaacagcccctccgccgatgtcatcaaggaaatccttggctccgttggagtagaagcagatgaagataggattgaatcgtttttgtctgaagttaagggtaaggatatagttgagcttattgctgccggtagggaaaagttggccacggttccttctggtggtggtggtgccgttgccgtcgccgcagctcctgggggaggtgctgctgctgctgc

SEQ ID NO: 173493 - DNA, 249 bp, Glycine max
atcattttttggtgctaaagcatgacttgatgagcgtgagtacaattattaaatgtttggtagccaaagttgacttggaagaagttttatcagtgttcacttcaatgtgaaggaagagtacaactatcgatacaacccaagaactatgaagaataatggagattatcttcgctttaccttttagggatagctgaataattctttcttctgctggcatagttgccccttatacaatattgtcaaatacaa

SEQ ID NO: 173494 - DNA, 251 bp, Glycine max
ggacatattgcttgctctatttgctgtgtgagactcagtaacaagtgtcccatgtgttcaatgcccattgggtataaccgttgccgggctattgagaaggtcttggagtgtattaaaatgtcatgcccgaatgcaaattctggctgcaaagagacacttagttacagcaagaaaaacgaacatgagaaggaatgcatctatctgccatgttcatgcccttttactggttgtgattttattgcctcatccaa

SEQ ID NO: 173495 - DNA, 252 bp, Glycine max
aaaccctcttttttctctctcttgcaaaacctaattttcatttcttccctcaaatttcaaaatgcgtgagatccttcacatccagggtggccaatgcggcaaccagatcggcgccaagttctgggaggtggtttgcgcggagcacgggatcgaccctaccggaaggtacggtggggactcggagttgcagctcgagaggatcaatgtctactacaacgaggccagttgcggtcggttcgtgccgcgcgcggt

SEQ ID NO: 173496 - DNA, 247 bp, Glycine max
cgtaattgcacctcaagatgttgcaacatatggaggactttgtgcacttgcaacatttgatcgggcagagttaaagagtaaagttatagacaattccaacttccgcaatttcttagagttagtacctgaagtaagggaactgataaatgatttttactcaagtcactatgcttcatgtctggaatacctcgggaacctcaaagcaaacctattgcttgatatacatttgcatgaccatgttgagaca

SEQ ID NO: 173497 - DNA, 246 bp, Glycine max
atccttctctgttctcctagaacttgattacttgaacattccctatgacagatgaggtggttcttctggatttctggccaagtccatttgggatgagggtcaggattgcacttgctgaaaagggtatcgaatatgagtacaaagaagaggacttgaggaacaagagtcctcttctcttacaaatgaacccggttcacaagaagattccggttctcatccacaatggcaaacccatttccgaatccc

SEQ ID NO: 173498 - DNA, 246 bp, Glycine max
gtgggagggagagaggagcggaggagagaaaatgacgacgaggttcaagaagaacaggaagaagagaggccacgtcagcgccggtcacggtcgtatcgggaagcaccgcaagcatcccggtggtcggggtaacgccggtggcatgcaccaccaccgcatcctcttcgacaagtaccatcccggtttcttcggaaaggtgggtatgcgctacttccacaaactccgcaacaaattctactgccccat

SEQ ID NO: 173499 - DNA, 246 bp, Glycine max
cgcaaccacatcactctttctttcaaatctagggtttcctccttctgcaaccatcaatgtcggcaatcgcggctccccaacacagatcctcgaagacagagtcctacgtggacaataagcgcaaggaggatatccgccatgccaacatcgtggccgcacgctcagtcgccaacgcggttcgcaccagtctgggccctaagggcatggacaagatgatctccacctcctccgacgaggtcatcatca

SEQ ID NO: 173500 - DNA, 203 bp, Glycine max
atcactaccaggaaatcaccctgtggtgaaggtaccaacacatgggacagatttgaacttagggtgcacaagagagtgattgacctctacagttccccagatgtggttaagcagattacctctatcacgatcgaacctggtgtggaggttgaggtgaccattgcagatgcttgatcttgatccaaattttaactgttatgttt

SEQ ID NO: 173501 - DNA, 268 bp, Glycine max
  unsure (1)..(268): unsure at all n locations
gctgcttgtttgtgcctgcgtagttacaaagtaaaaagagggaggactaggacaaaagttgttggcagtcatcatgtncgagcgcttcgttgaaggagatgaggaacggtggtgaggattatagcaannnnnnnnnnnnnnnnnnnntgagggacttgtatggagaggattgtgccactgaggaccagcttatcactccatggactttctctgtggccagtggatgcagtttactgagagatccacgctacaacaaagggctggcctt

SEQ ID NO: 173502 - DNA, 267 bp, Glycine max
ggctgccgcacatttgaagggtggtgccaagaaggttattatttctgcccccagtaaggatgcccccatgtttgttgttggtgttaatgagcacgagtacaagccagagcttgatattatttccaacgctagctgcacaaccaactgccttgctccactcgccaaggttatcaatgacaggtttggcattgttgagggtttgatgaccactgttcattccatcactgctacccagaagactgttgatgggccatcagccaaggactg

SEQ ID NO: 173503 - DNA, 138 bp, Glycine max
cctaaaccctactcattctccatacctcaacgaagaggttaaagagacggcaacactttgctgtccgccttgaccgagcagagcttcgtcttggccctcgattttgccctaaagtactctcagtcacaacagacaccg

SEQ ID NO: 173504 - DNA, 97 bp, Glycine max
atatacgttaactgttcagatgtctccccatttgaatggcatcccttttctattacatcagctccgggagatgattacttaagtgttcacattcgaa

SEQ ID NO: 173505 - DNA, 97 bp, Glycine max
ggaagctggaggccccaaaatccctatgaaatatggaagagtggatgtatctggacctgaacaatgccctgaagaagggagacttcctgatgctggg

SEQ ID NO: 173506 - DNA, 137 bp, Glycine max
gaaaaatggcaaaggatattcgattcttcgacctcaacacgggcgccaagatcccttcagtcggcttgggaacttggcagtccgatcctggccttgttgctgaagccgtcgcggcggccatcaaggttggttaccgc

SEQ ID NO: 173507 - DNA, 139 bp, Glycine max
ccaagacgtatcctcagcaggctggtaccattcgcaagaatggctacatcgtcatcaaatccaggccttgcaaggttgtagaggtctctacgtcaaagacaggcaagcatggacatgcaaagtgtcactttgttgcaat

SEQ ID NO: 173508 - DNA, 96 bp, Glycine max
ggcttcagagcaccctgaagagaataggggtgaatgccatcccggctattgaggaggtcaatatctttaaaggatgacgtagttatcccagtttct

SEQ ID NO: 173509 - DNA, 272 bp, Glycine max
tcaaactttctctcaagatctgaaaccactctgatggagcaaagtaaggagaaaaatgctccttggttatcagtgccacagtttggggactgggatcagaagggacaagtgccagactactctctagatttctctaaaattcgggaaatgaggaagcaaaacaagacaaatatttcaagggcaagtcttggtaatgaagaggagctcatggcttcttctgccactaacaatacaagcactgtccacagtgatgaccaccagcacccccacta

SEQ ID NO: 173510 - DNA, 148 bp, Glycine max
caaacacaaacacatcgcaactcaagaaatgaaactagcttggtcaccagagagagcatccaaagcatacatcgacacagtccaatcttgccaggttttccgcgaatccggagtggcggagtttatttcggccatggcggcggggtga

SEQ ID NO: 173511 - DNA, 266 bp, Glycine max
gaaggaagctgtcctaaaacaaacgtgttatggttgatctacttggtagacatactcctcatgaagaaatcatttgaacgtactacgaagcacgagagagatctacgatccttgaagaaacgtcttgacaagtatgattcggccaaggaagcaattcttgatcccttcttcactgatttgttcgttgagtctgacccaaacttaacaatctaaagctccttttcccacctaacatggcattttgtcaaaactttactcgactttct

SEQ ID NO: 173512 - DNA, 265 bp, Glycine max
aagagaatggctcccaagggtttaacctttctggctgtgttaatatgcgtttcagcactgtcactgagtccttctgttgcgggggaagggcaaaataatggccttgttatgaacttctacaaggaatcatgccctcaggctgaagacatcatcacagaacaagtcaagcttctctacaagcgccacaagaacactgctttctcctggctcaggaacatcttccatgactgtgctgttcagagttgtgatgcttcactgttgctgg

SEQ ID NO: 173513 - DNA, 180 bp, Glycine max
caactttactcctcttcaatcagttgcatattctttgctattccaatggccactgttgaggttgtgtcagccaaggttgccctcccagaggacacaaaagaggcatcattgaaggttgacgaggagaagaacacagaagaagttgttgagactccaacaccagaaactgtggtcactgag

SEQ ID NO: 173514 - DNA, 140 bp, Glycine max
cttgaattttcttcatccttctctgttctcctagaacttgattacttgaacattccctatgacagatgaggtggttcttctggatttctggccaagtccatttgggatgagggtcaggattgcacttgctgaaaagggta

SEQ ID NO: 173515 - DNA, 263 bp, Glycine max
ctcactcgcatttattcaccatgactaagcaacaagctaattggtctccatacgataacaacggaggatcatgtgttgcaattgctggagcagattactgcgtcatcgccgcggatacgaggatgtccaccggttacaatatcctcactcgcgattactccaaaatctcccaactggcggagaagtgtgttatggcttcttctggtttccaagctgatgtcaaagctttgcagaaggttttgtctgctaggcatttgatttat

SEQ ID NO: 173516 - DNA, 263 bp, Glycine max
cggaagttgaagaaggggcagtgaaagaaacagcacctgataatgaagaggatcaagagaaaggagtgcctgcattttggcttactgctatgaaaaacaatgaagtgttggctgaggagatttcagagcgtgacgaaggtgcttctaagtatctcaaagatatcaagtggagcaggatagaaaaccctaaaggattcaagcttgactttttctttgataccaacccttattttaccaattctgtcttgacaaaaacatatcat

SEQ ID NO: 173517 - DNA, 266 bp, Glycine max
ttcttgttgttggaaagaaaccctagcaagcggaacaatggcagacgttgaggtcgatgtggcggctgcagcagcagcagggcagccgaagaagagaacgttcaagaagttcagtttcaggggcgtggatctcgatgcgcttctggacatgtccaccgatgaactcgtgaagatgttcagtgctcgcgcacgtagaaggttccagagaggcctcaccagaaagcccatggccttgatcaagaagcttcgcaaagcgaaaagagaag

SEQ ID NO: 173518 - DNA, 136 bp, Glycine max
ggaaaagcaatcaacagaatttgggtacaattaaatcgtcaaacttgtgtactgagataattgaatattcaagtccaactgaaactgctgtgtgcaatctggcatcaattgcactaccacgatatgtaagagaaaa

SEQ ID NO: 173519 - DNA, 134 bp, Glycine max
aagagtttgatcctggctcagaaggaacgctagctatatgcttaacacatgcaagtcgaacgttgttttcggggagctgggcagaagaaaaagaggcgcttggaaaaagcactggctacttctgccgccattat

SEQ ID NO: 173520 - DNA, 263 bp, Glycine max
tggacagaagagagcgtcctagtcgcaaccctaataagaagaaccacagcttcaagcgagtgacatccaccagccatgggtcgtatgcacagccgcggtaagggtatatcctcttctgctttgccctacaaaaggacaccccctagctggctcaagatctcttcgcaagatgtggaagaaaatatctgcaagtttgcgaagaagggtttgaccccgtctcagattggtgtcattcttcgagattctcacggtattgctcaggt

SEQ ID NO: 173521 - DNA, 260 bp, Glycine max
caggcgctgctgcccttcagtccttcagcaatggtttacgtgaagtcacagaaatcaaaagcctacttcaagaggtatcaagtcaagttcaagagaagaagagagggaaaaaccgattaccgtgccaggattcggttgattaatcaggacaagaacaaatataacaccccgaaatatcgctttgttgttcgtttcagcaacaaagacattgttgcacaaataatatctgctagcattgctggcgatatggttcttgctgc

SEQ ID NO: 173522 - DNA, 131 bp, Glycine max
aaccctactcattctccatacctcaacgaagaggttaaagagacggcaacactttgctgtccgccttgaccgagcagagcttcgtcttggccctcgattttgccctaaagtactctcagtcacaacagaca

SEQ ID NO: 173523 - DNA, 135 bp, Glycine max
cggctcgagatcagttcttctttcctcaaccttctttcttcttatatatcgaacatggctaagtatcattcaagtgggaaaagctcttccatgactgctatagccttcctgtttatccttctaatcacttataca

SEQ ID NO: 173524 - DNA, 138 bp, Glycine max
gaaattgcacacatgtacaagacagataggaacaagtacgagtcaaatgcaagaagctggacccagaaatatgccatgggctaattgacatatatagaatgagggagagcgattgtttaggcctaacaacctttgtat

SEQ ID NO: 173525 - DNA, 131 bp, Glycine max
gttgtgactcgttcttcttcgtcgttatcttcttcttttgttgtttgtgtgtttgttttttctctcacctgaaaatgtcttgctgcggtggtaactgtggttgcggaagcgcctgcaagtgcggcaacggc

SEQ ID NO: 173526 - DNA, 143 bp, Glycine max
ggatccttgacttcttctctcactttccagaaagccttcacatgttcacctttttatttgatgatttgggtgttccacaagattacaggcatatggatggttttggagttaacacatatacgctgatcaacaaggctgggaaa

SEQ ID NO: 173527 - DNA, 133 bp, Glycine max
aaagggattcatcgttcttcttcccaggttatttagaaaagcaaaatggtgaagatttgctgcattggtgctggatatgtggggggtcctactatggcagtcattgcacttaagtgcccatccattgaagtcg

SEQ ID NO: 173528 - DNA, 127 bp, Glycine max
ctgcgtaggcaaagagagagagagaaaagcgtgaatcatgtcggacgaagagcatcacttcgattctcaggcggatgcgggagcgtccaagacgtatcctcagcaggctggtaccattcgcaagaat

SEQ ID NO: 173529 - DNA, 267 bp, Glycine max
ttcttgacgaaagatcatgacatacgccttggtgattttggacttgccaaaatgttgacttcagatgatctaacttcctctgttgtgggaactcctagctacatgtgccctgagctccttgctgatataccttatggctctaaatcagatatttggtccttgggatgttgtatatacgaaatgacctccctcaagcctgcattcaaagcatttgatatacaagccctgattaacaagattaataagtccatagtggccccattgcca

SEQ ID NO: 173530 - DNA, 269 bp, Glycine max
gaagaatcttagattctgtgggaaaagcttctcaatctttgacgaagataaacaacaatgtcttcacttgcggatgctagagcagacaacttttactatcccccagaatgggaaccgaatcagggttcgctgaacaagtttcatggtcaacatgccttgcgagagagggcgagaaaattagatcagggtatccagattataaggattgagatgccttttaatatatggtgtggaggatgcaattcaatgattgcaaagggtgtccggtt

SEQ ID NO: 173531 - DNA, 266 bp, Glycine max
agatcaattaatttccaatggccgatcagctcaccgacgaacagatctctgagttcaaggaagcctttagcctcttcgacaaggacggcgatggttgtattaccaccaaggaacttgggactgtgatgcggtcgcttgggcagaacccaactgaggctgagctgcaggacatgataaatgaggttgatgctgatgggaatggtaccattgatttcccagaattcctcaatctcatggcgcgcaagatgaaagacactgattcagag

SEQ ID NO: 173532 - DNA, 218 bp, Glycine max
agcgtagtagctcggaatcggtcgaacgatgctgttattcgcaccgcaaacaaacagtgagccatggccgtcggaaagaacaagcgcatctccaaagggaaaaagggtggcaagaagaaggcagctgatccctttgccaagaaggattggtatgacattaaggccccttctctttttcaagtgaaaaatgttggcaaaaccctcgtctctcgtacgca

SEQ ID NO: 173533 - DNA, 266 bp, Glycine max
atcgagcgaatcggctcgagggctcgaggtcgtgaaacaaagatgaagttgttggctaaggaactggctcctctacagggtattggtcctcagaaatgcattgcttttagtgttgatgggtctaaatttgctgctggtgggttggatggacatctcagaattatggagtggcctagtatgcgcgtgattttggatgaaccaagagcacacaaatcagttcgggatatggattttagtctagactcagaatttctagcttcaacttc

SEQ ID NO: 173534 - DNA, 143 bp, Glycine max
gcaccgttctattcttcttccacaatgggtatctctcgtgattccatgcacaagaggcgcgccaccggcggcaagaagaaggcttggaggaagaagagaaagtatgagcttgggaggcagccagcaaacacaaagctatcaag

SEQ ID NO: 173535 - DNA, 266 bp, Glycine max
cgcgtgcatagcagagtcagagacagagacgcagccatggggcggagacctgcgaggtgttataggcaaattaagaacaagccataccccaagtcacgtttctgccgtggtgttcatgatcccaagatcaggatttatgatgttggtatgaagaagaagggtgttgatgagtttcctttctgtgtccatcaggttagttgggagaaggaaaatgtttcaagtgaggcccaggaagctgctcgcattgcatgcaacaagtacatggc

SEQ ID NO: 173536 - DNA, 263 bp, Glycine max
atcgagctctgcgagatcttcattcgccgattttaaaagatgagtaagcttcagagtgatgctttgcgtgaagccatttcaggaatcatggccgattccaaggagaagaatcgcaaatttgtggagaccatcgaactccaaatcgggttgaaaaactacgatccacagaaggacaagcgtttcagtggctatgtcaagcagccccacatccctcgccccaagatgaaaatttgcatgcatggtgatgctcagcatgttgaaga

SEQ ID NO: 173537 - DNA, 269 bp, Glycine max
cttctttctggctccagtcaagcaggaagtgggaattcacttaggagaagaagaaatgtccatggagtcctgaatgcactgagctgggggattttgatgcccgttggtgccataatagcaaggtatttgaaggtgttcaaatctgcagaccctgcttggttttaccttcatgttacatgccaaacctctgcctacatagttggtgttgctgggtggggaactggtctcaaactcggaagtgactcggttggtattaagtataacaccca

SEQ ID NO: 173538 - DNA, 268 bp, Glycine max
cactttgttctctctttggcatacatcattggattttacaatggctgggattggatttgaggacttgctacctgtgatggcgaacaagctgggaggggaggggctgatgaaggagctgtgcaacgggttcgagctgctggtggataaggagaaaggagtgatcacattggagagtttgcgacgcaacgccgcgcttctcgggctgcaggacttgaaggaggatgagcttgtgagtatgatgagggaaggggaccttgatggagatggt

SEQ ID NO: 173539 - DNA, 263 bp, Glycine max
attcgttagggcactcaacattttacactcttttcttcttctcgttgttgcttcggtgttgaatcatggatcagaaagtcgatttcagtgctccgcattccatgggaaccactatcatcggcgttacttacaacggcggtgtcgttctcggagccgactctcgaaccagcactggagtgtatgttgccaaccgagcatcggacaaaatcacacagctcactgataatgtttacgtgtgtcgctctggatcggctgcatgatct

SEQ ID NO: 173540 - DNA, 192 bp, Glycine max
gctctacctctgccactttctgagtacaatacaacactgccatggctgcctcagtctccactattggagctgtcaacagagctccactgagcttgaacagctctgaagctggagattcggttcccagttcagccatctttggcacaagcttgaagaaggttactgcctcaagggtccctaacgtcaagattt

SEQ ID NO: 173541 - DNA, 264 bp, Glycine max
aaacaaacatcttttaccttaaacaacaatggccgatgccgaggatattcaacccctcgtttgcgataatggaaccggaatggtcaaggctggttttgctggagatgatgcaccgagggctgtgttccctagcattgtggggcgtccacgtcacactggggtgatggttgggatggggcagaaggatgcgtatgttggggacgaggctcaatccaagaggggtattttgactctcaaatacccaattgagcatggaattgtgag

SEQ ID NO: 173542 - DNA, 144 bp, Glycine max
ggtccttgcagcacttagtgttgaaattcttaaggccgctggtgagcgcacgataggatctcttgatggtgtagcatttcttctccaatctgacttcttaggtgatcctgcagctacttatgctgttgcagatattattgctaa

SEQ ID NO: 173543 - DNA, 264 bp, Glycine max
acaaaggtcaacctgcatgcctggcccagtcacctcagcttcacaagcaaatgtctatctgtggagattttggccgtgtttttgagattggtcctgtgtttagagcagaagactcctacactcacaggcatctgtgtgagtttacgggccttgacgttgaaatggagatcaagaagcattactttgaggttatggatttagtcgatagattgtttgttgcaatgtttgacagtttgaaccagaattgtaagaaggatctggaag

SEQ ID NO: 173544 - DNA, 264 bp, Glycine max
ctaaagagttgtgccaccatgtcggacgatgaaagggaggagaaagagttggatctctcttctgccgaagttgtcaccaaatacaaaaccgctgctgagatcgttaacaaggccttgaagctagttatttcagaatgtaaaccaaaggcgaagattgtggatatttgtgagaaaggggattcatacattagagagcaaactggaaatgtgtacaagaatgtgaagaggaagattgagagaggtgttgctttcccaacatgttta

SEQ ID NO: 173545 - DNA, 266 bp, Glycine max
gggctcgcagcactgtaacctcacacctctccaaaatccgttccccctttctttcaaacccttttttttttcttccaacaaatcagcgatggcgacgacgtcggtggtgccggcgaatcggcggcgtgcggcggcgaaccccgccgaggatatggacttcgagacgacggagggcgtgaaggccatcgcgagcttcgaggagatggggatcaaggacgatctgctccgcggaatctaccagtacggcttcgagaagccctcagcca

SEQ ID NO: 173546 - DNA, 197 bp, Glycine max
tggagcaccgcccccaccttcaacacctcatcaaacctctccctcaagcttctcgactccggtaacctaatcctctctgcccccaacggcctcgttctatggcagagcttcgattcccccaccgacacgtggctccacggcatgaatctaactcgcttcaactctctaacctcctggcgaacccaaaccgacccgac

SEQ ID NO: 173547 - DNA, 263 bp, Glycine max
gttctgttccaacatatacaaaatatgctgtctggtgaaactgctgtaattgctgagacaggggactcctggtttaattgccaaaagctgaaattgccaaaggcatgtgggtatgagttccaaatgcaatatggttcaattggatggtctgttggtgctactctgggttatgctcaagccgttcctgagaagcgagtgattgcctgcattggtgatggaagttttcaggtgactgcccaagatgtatcgacaatgttacggtg

SEQ ID NO: 173548 - DNA, 262 bp, Glycine max
gtgcaatttaaaggagatggttatacaatctgtgcagctagtggacctgggcgttgcaagataaacaatggaggttgttggcatgaagctaggaatggacatgcatattctgcttgttcggatgatggaggggttaaatgccagtgtcctgcaggctttaaaggtgatggtgtcaaaaactgtgaagacattgatgaatgcaaagagaagaaagcttgtcagtgccctgaatgtagctgcaagaatacttggggaagctatg

SEQ ID NO: 173549 - DNA, 265 bp, Glycine max
acaaagaaaaaaaaaaacccttagccaacacaaccatcatggccacctctgctattcagcaatcagcattcactggtcaaactgctctgaagcagctcaatgagttcgtccgcaagaccggtggcgccggcaaaggtcgcactaacatgcgccgcaccgtcaagagtgctcctcagagcatttggtatggccctgaccgtcccaagtacttgggtccattctcggagcagattccatcatacctgaccggagaattccctggtga

SEQ ID NO: 173550 - DNA, 263 bp, Glycine max
cgcagctcgaaaccctgagtcgccagcgcaccccgaaacctagtccagtttgcagtttcttgtgcggtttatcatgggggatagtcagtattcgttttctctcaccacatttagcccttctggaaagcttgttcagattgagcatgccttgacagctgttggctctggacagacgtctttgggaataaaagctgcaaatggagttgtcattgccaccgagaagaaattgccatctatattggttgatgaaacatcagtccaga

SEQ ID NO: 173551 - DNA, 265 bp, Glycine max
aaaacatttcacagataactggtatgagtcttacaatttcatacaaatcaggaccagcagtgacattgcaaaacaaattataataatgtcatggcaattctatacaaatcttgtagatctaaagattatgggaggcatctcatagataactgactgaacctgacattgcttggggcaaacgcacgcgcgttatactagatgttggatgtggtgttgccagcattggaggttttctctttgatagagatgtacttgcaatgtcatt

SEQ ID NO: 173552 - DNA, 190 bp, Glycine max
gcaagatgtcgaagagaggacgcggtggttcggcggggaacaagttccggatgtcgctgggtctgccggtggcggcgacggtgaactgcgccgacaatacgggggcgaagaacctctacatcatatcggtgaaagggatcaaagggcgtttgaaccgtctcccctcggcttgcgttggcgacatggtgat

SEQ ID NO: 173553 - DNA, 262 bp, Glycine max
caaagacagctctttggtctgcctccacggtacagagattcagttagaacaataactccagggttgcccctttttctgtacaactactccactcaccaactccatggtatctttgaggctgcaagttttggaggatctaatattgatccaacggcttgggaggataagaagtgccctggtgaatctcgtttccctgctcaggttcaagtgattactaggaaagtttgtgagccactagaggaagattccttcagaccaattc

SEQ ID NO: 173554 - DNA, 263 bp, Glycine max
cgttgttgttctaaagcactcatccacacattctccgtcgccacgacaacaatggctccaaagaaaggtgcgaaaggtggagttgtagcagcaaagaagaaggttcaggagaaggtaacgaaccctttgttcgagaagcgtccgaagcagttcgggatcggaggcgcgctgccgccgaagcgggacctgacgcgcttcgtgaagtggccgaagaacgtccaaatccaacgcaagaagcgcatcctcaagcagaggctcaaggt

SEQ ID NO: 173555 - DNA, 260 bp, Glycine max
agagtgatacaatacagagtgcgttgttgctccttcgccacaactccctgccaacatgggtatctccagagattctatgcacaagaggcgtgccactggtggcaagaagaaggcatggaggaagaagagaaagtatgagcttggtcgccagccagctaacactaagctgtcaagcaacaagacagtcaggaggatccgggttagaggtggaaatgtgaagtggagggcactgagattggatactggaaattactcctggg

SEQ ID NO: 173556 - DNA, 265 bp, Glycine max
agacgaaaccctaggttttagtgagtggcgaaaatggcggtgattttttcaagtgcaataccaggaggggcagcaccagcagcaatcgagcaagtgcagtgcttcgggcggaagaagacggcggtggcagtgacctactgcaagcgcggccgaggcctcattaagatcaacggctgcccgatcgagctggtggagccggagatcctccgcttcaaggccttcgagccaatcctcctcctcggtcgcaaccgcttcgccggcgtgg

SEQ ID NO: 173557 - DNA, 268 bp, Glycine max
gttttctctctttgctggattagatattttggttcagtttttattattgatgctcctaagatccgattctcttagatcgaatttggcataacccacttcgtatctgattgaagcacccactgggttctgtctgagattcaacataagatggagtcggatcttggcaagctcttcattgggggaatttcctgggacaccgatgacgaacgtctcaaagaatattttgggaaatatggagaggtgatagaggctgtgatcatgagagatc

SEQ ID NO: 173558 - DNA, 260 bp, Glycine max
gcagaaattggtttttacggcgagaaagaatggtacttcttttcacctcgggaccggaaatacccgaacggttcacggccgaaccgcgccgccggaagcggctattggaaagccaccggcgctgataaaccgatcggaaaaccgaaagcgcttgggatcaagaaagctcaggttttttacgccggaaaagcccccaaaggtgtgaaaaccaattggattatgcacgaatatcgcctcgccaatgttgaccgatctgcctc

SEQ ID NO: 173559 - DNA, 264 bp, Glycine max
  unsure (1)..(264): unsure at all n locations
tcaagttcaccaaaagcaaccacaacaagcacttctcttatttcntattcacaccctattacagattcacaagcgcagacacttcaaatggntctggaagctcttcaatcacccagaactgccactccatcgtttagtccctttgaagaaaccaacctcagttacttggagacaccgtggaccaaaggaaagcgttctaagcgtanncgcatggagcagcaactgcaacactcntcatgcaccgaggaagagtacctcgctctc

SEQ ID NO: 173560 - DNA, 281 bp, Glycine max
gcagcggctaccctaacctcgtcttcctctctactaatttcagctatggccgacgaagctgtggttgttccagatcccacccagatcgatgtcaagctctttaaccgctggagcttcgaggatattgaggttactgacatttcactggctgattacattggagttgcggcatccaagcacgccacatatgttcctcacaccgccggaaggtactccgtgaagcggttcaggaaggcgcagtgccccattgttgagaggctcaccaactctctcatgatgca

SEQ ID NO: 173561 - DNA, 277 bp, Glycine max
gcaatatatctattggcaaaaggtggatgggttatgcttttcagtgttgcagttgggactcttggcatagtgctgatgacccttggttgcctccatgagaagcatcttgaggagcttcttgaatattttcgctttggactgtggtgggttgcccttggggttgcttcttcaattggtctaggatctggtttgcacacatttgtcctatatttgggtccccacatagcactgtttacaataggagcagtgcaatgtggccgagttgatttgaaaagtg

SEQ ID NO: 173562 - DNA, 168 bp, Glycine max
acatggtacaccgcggttcccaccatacaccagatcatacttgatcgccactccagcaaccccgaaccggtttacccgcggctccggttcatccgaagctgcagcgcctcgctcgcaccggttatactcggtaaactcgaggaggctttcggtgcaccggttttagag

SEQ ID NO: 173563 - DNA, 278 bp, Glycine max
gcagttacagcactcaaaaacctagagcgaagagcgtgaaggcaccggccgccggccatgacattcaagcgcaggaacggaggtcgcaacaaacacggccgtggccatgtcaaattcatccgatgctccaactgcggcaaatgctgccccaaggacaaggccatcaagaggtttcttgtgaggaacattgttgaacaggctgcagtcagagatgtgcaggaagcctgtgtctatgaacaatacacgcttccgaaactatatgtgaagatgcagtactg

SEQ ID NO: 173564 - DNA, 275 bp, Glycine max
gaaacccccttccttcttctttgtatttgacgggaagaaacgcatcgagcgtggagaaagagaaggatgatgaggttaaggtggagtgtactcgtaatggtcacgttcgctgtttctctgttttggcttggacccctgcaagtcaaagcctctaattctgtttccgccttcgttcaaaacgccatctactccaacagaatcgccgttttctccaaatcctattgcccctactgtttgcgcgccaaacgcttgcttgctgaactcaatgaaaaacc

SEQ ID NO: 173565 - DNA, 275 bp, Glycine max
ggtgaacactggctcgctggcgtgggccctgggttcggcgttcgggtatttctacatggtgtcggcgtggggaggttatgtgtttataataaacttggtgccgctttatgtgctggtgctgcttgtgacggggaggtactcgatgaggctctatgtggcgtataactgcatgtatgtgttggggatgctgctcgccatgcagattaggtttgtggggttccagcatgttcagtccggcgaacacatggccgccatgggcgtgtttttcttgcttc

SEQ ID NO: 173566 - DNA, 279 bp, Glycine max
gaagaataagagaaagacaacactcgtagaagaagaaagcgtttccaagaagcgaaaggaaggaaaggggttttgtgatttttgaagaatcgcgtttgggagtagtcggagatggagctttcgactccgaattcttcctcgaagcacttgtccatcacgccgggttctagggttttgagaagccctctctccgacgaacagatctggaagcgcctccgtgacgctggcttcgacgaggaatcgattaagcacaaagacaaagctgcgcttattgcttac

SEQ ID NO: 173567 - DNA, 276 bp, Glycine max
gttttcttcatatcttccttgtcactgcccgtgtgtcgccgccatggccaccgtcaccacccaagcctccgccgcaattttccggccatgtacctcgaaatcgaggtttttgaccggctcttccggtaaacttaaccgggaagtgactatgcggccaatggggtgccctccttctgcctctttcaaggttgaagccaagaagggagagtggttacctggcttggcctccccaacttacctcaatggcactcttcctggtgacaatggatttgaccc

SEQ ID NO: 173568 - DNA, 277 bp, Glycine max
aaaggagagggtccagtggtgttgttcctccacggcttccctgagctctggtactcatggcgccatcagattctctctctcagctccctcggctaccgcgccgtcgctcccgatctccgtggctacggtgacaccgaagcaccaccttcaatcagcagctacaactgcttccacatagtgggtgatctcgttgcgcttattgactctctgggtgtccaacaagtgttccttgtggctcatgactggggagcatcataggttggtatctatgcatgtt

SEQ ID NO: 173569 - DNA, 277 bp, Glycine max
tgttggtaaagaaagaaagagaagagaagaatcgaagacgaagatggaggacgcatcagcatcaaagttcattccacaccaaatcggaggggtccaaaacgacgcgcttcgattcggtctccatggagtcaagagcgacatcgttggttctcaccctcttcaatcttcactccaatctacaaggagaatggatgaagcgatgaagaggcaatgcaaagttaacctgtacggaactgcttttcccatgaaggaggagcttgacaggcaaatctgtcca

SEQ ID NO: 173570 - DNA, 278 bp, Glycine max
ataagattacacgctttttgtcatccaatttccctctcccgtgtcgtgtcgtgtcttcttctctaaaataaaaaaccctaacttctgaacctttcaccgcatcgccaccgattccctatctccactaatcaaagaaaagaaaatgagtagacgctcgagcagaactgtctacgttgggaatctacccggtgatatccgtgaaagagaagttgaagatttgtttctgaagtacggacacataacacacatcgacctaaaggttcccccaagaccacctg

SEQ ID NO: 173571 - DNA, 199 bp, Glycine max
ccccaatcgtagccgtcgcactctgtgttttcagcgccgtctccgatctccgacaatggcgacccaaatgagcaagaagagaaagttcgtagctgatggagtgttcttcgctgaactgaacgaggttctgacaagagagttggccgaggacggttactccggcgtggaagttagggttacgccgatgcgcaccgaaatc

SEQ ID NO: 173572 - DNA, 154 bp, Glycine max
caacaagaggggtattgagattgagattcaagtaatggggaagagcaaggttcttgtggtggggggaactgggtacatagggaggaggatagtgagggcaagcctggcactgggccatgagacctatgtggttcagaggccagagttgagcctc

SEQ ID NO: 173573 - DNA, 273 bp, Glycine max
ctttagactttagagtcagtgtacgcagaagagtaaaatcgattggcgatgatggagttgaaagagattcagagactcgaaggccacaccgataaggtttggagcttggcctggaacccgaccaccggtcacgccggtatcccactcgtcttcgcttcttgcagcggcgacaaaaccgtccgaatctgggagcagaacctctcctctggcctctgggcctgcacgggggttctggatgaaacgcacactcgaactgttcgatcttgtgcttgg

SEQ ID NO: 173574 - DNA, 272 bp, Glycine max
gtactttgcaaaaaccctaaaccctctctttctctctccgcgactctgtactcatcaatggcgacgcaatcgttagacgaagaaacaactaagaaagtcatacgacaggtcgagttttatttcggcgacagcaaccttctcaccgatggtttcatgaggaagagtatcactgaaagcgaagatggcatgattagtttggcgctgatttgctcgtttaatcgaatgcgaaaacaccttaatttgggtgatgttaagcccgatgaagtggccca

SEQ ID NO: 173575 - DNA, 273 bp, Glycine max
accaaaaccagaagcgaaatcgcaatcgcaatccagcgaatatgaaggtcgtcgctgcatacttgctcgcagtgttgggagggaatccttccccttctgccgatgacatcaaacacatcctcggcgcagttggagctgaggctgagaatgagttgattgagttgctcttgactgaagtcaagggaaaagacttcaatgagctaattgctagtggaagtgaaaagatgtctgcagtgtctggtggcggtgcagcggttgccgttgctgctgcac

SEQ ID NO: 173576 - DNA, 275 bp, Glycine max
aaaacatttagttccccaaataaacaataccaatgttgacaagagtgtagcagccattcatgcaacggtgttcagctgtcttcgaaggcgtgaggttggggaacaactatatgatcctgttagaaatactgtgactgttgtttatgaggaatatagaaatcaatgtgcagccaattctttgagctcgaaaggaatgtttcaactgatccaaagaaaaggttcttcaaggaatctgatggctcgtgttaatgatgatggatctgtggcaaaggctt

SEQ ID NO: 173577 - DNA, 198 bp, Glycine max
cacacacactgtgtttgtgaaactctctctcacacacaagtcacaaaaacaacttgtgttgttccaatggcatcagcaacaccccttttgaaagatgagctcgacatcgtgatccccacgatcaggaatctggatttcttggagatgtggaggccattctttgagccttaccatctcataattgtgcaagatggtgac

SEQ ID NO: 173578 - DNA, 271 bp, Glycine max
ctaaaccctactcattctccatacctcaacgaagaggttaaagagacggcaacactttgctgtccgccttgaccgagcagagcttcgtcttggccctcgattttgccctaaagtactctcagtcacaacagacaccgtcgtcgtcgtcgtcgtcatcaatggcaccgaagcagaccaaggctgagaagaagatcgcttacgatgcgaagctgtgcgacctaatggaggagtacggccagatcctcgttgtgaactccgataacgtgggatc

SEQ ID NO: 173579 - DNA, 196 bp, Glycine max
gcacagaagagggaaaacggcaccgccgccgtagaagaaaacaaccatggtgcacgtctccttttacaggaactatgggaagacattcaagaagccgcgtcgtccgtacgagaaggagcgtctcgacgcggagttgaagctggttggtgagtacgggcttcggtgcaagagagagctgtggagggtgcagtacgcg

SEQ ID NO: 173580 - DNA, 271 bp, Glycine max
ggagaagcgacaagcccccttggaacacctactccttcaacaccgtcctcattgccttatagccagtgctttcttccctggggcatctcattccgccactaaactcaaaatccccaggcttgtctttcatggcaccggtgtcttcgccttatgtgcctctgaatgcgtccgactctaccagcctcacaagaatgtttcttctgacaccgacccctttatcattcctcatcttccgggagacatccagatgacaaggctgttgttgcccgat

SEQ ID NO: 173581 - DNA, 273 bp, Glycine max
tttttatcaatatcataaaagatcttaccagtggggaacagctaaaagatcgggatgctgcacaaacaagtttgacccttctttcgagttttgctcgccaagggagaatttttcttggactttctgttagtgggccggaaattcatgaagagttttttaaaggccttaacatcacagcagatcagaagaaagttttacggaaagcatgctattccttttatgatgctgcagctgaattacttcagtctgagcattcttcacttcgcttaatgg

SEQ ID NO: 173582 - DNA, 276 bp, Glycine max
ctcaaacattgtttgttgtaggaagaggaatcttgagaaatggcaggggacagcaagagcaagattctgttcatcggagggactggttacatcggaaaattcatcgtggaagccagcgccaaagctggccacccaactttccttttggtgagggagtccactctctccaaccccgcaaaatcacccctcatcgacaatttcaaaggcctcggtgtcaatcttgttttaggagatctatacgatcaccaaagtttggtgagtgctataaagcaggtc

SEQ ID NO: 173583 - DNA, 271 bp, Glycine max
gcgaagacgaaaagaaaaagaaggaagaattgaaggagaaatttgagggtctctgccatgtgatcaaggatgtgttgggtgacaaggtggagaaagttgtggtgtctgatcgtgttgtggattctccttgctgtctcgtgactggtgaatatgggtggacagccaacatggaaaggattatgaaagcacaggcattgagggacagcagcatggctggatacatgtcgagcaagaagaccatggagattaaccctgagaaccccatcatgga

SEQ ID NO: 173584 - DNA, 195 bp, Glycine max
catttctaatctcattctccttctgttcaaacactctcatggcatcagataagaagattaggatcggcatcaacggatttggaaggattggccgtttggtggccagggttgcccttcaaaggaatgatgttgaacttgttgctgtcaacgatcctttcatcaccactgattacatgacatacatgttcaagtacg

SEQ ID NO: 173585 - DNA, 270 bp, Glycine max
gaaagtcttccatagccccccaaaaatgaagagcaccatcttctttgctctctttctcttttgtgccttcaccacctcatacctaccttcagccatcgctgatttcgtgctcgataatgaaggtaaccctcttgaaaatggtggcacatattatatcttgtcagacataacagcatttggtggaataagagcagccccaacgggaaatgaaagatgccctctcactgtggtgcaatctcgcaatgagctcgacaaagggattggaacaat

SEQ ID NO: 173586 - DNA, 273 bp, Glycine max
gaaaaaaggggaatttcaatggcgtcaagggtttctctgaaggcgaaggggaagagttcaaagggatcgaaggctgcggaagatcgatccgcgagcgagtgcctgaaggagtggacgacatgggcgatgcgaaaagcgaaggtcatcactcactacggtttcatccctttggtcatcgtcatcggtatgaactctgaccccaagcccccactttcccagcttctcagccccgtctgatccacctcttcaattcttccaccatcaacgcgacgt

SEQ ID NO: 173587 - DNA, 196 bp, Glycine max
tgaaagtacaattcagcaagcctccctttcaacaaccatggggtgttggtacatggttaaaggaaattaaagacactactaaagaaggatatagttttgaagagctatgcatcaagaaagaagccattgagggagaagagaagttttgtgcaaaatccttgggaacagtaattggttttgccatttcaaagctggg

SEQ ID NO: 173588 - DNA, 273 bp, Glycine max
cagagaacctattgcaattgcaacaccgcacccagaagtgcaccctgggctgtcccgtactcgatcgctgcctcgccggcggcgtcccctgcgcctccgtcaccgagttcgtcggcgagagcggttgcggcaagacgcagctctgcctccaactcgccctctccgcccagctccccccctctcacggcggtctctccgcctcctccatcttcatccacaccgagttccccttccccttccgccgcctccgccacctctcacgcgccttccgcg

SEQ ID NO: 173589 - DNA, 264 bp, Glycine max
gaagattatgaagcttctgcttaaagtgaagaatgggacgccaccgcagaggaagactgcattgaggcagcttacggataaggctcgcgagtttggtgctgggccgttgtttaaccggattttgccattgctcatgcagcctaccctggaggatcaagagaggcatcttttggttaaggtaattgacagggttttgtataagttagacgaattggttcggccttttgtgcataagattcttgttgttattgaaccttgttgatt

SEQ ID NO: 173590 - DNA, 251 bp, Glycine max
gtggaaatggcaggtgcaggaggagggtatggggacgcgaaccagaggatagactacgtgttcaaggtggtgctgataggggactcggcggtggggaagtcgcagatactagctcggtttgcgaggaacgagttcagcttggactccaagtccaccatcggtgttgaatttcagacaaggaccttggtcatagatcacaagaccgttaaggctcagatctgggacactgctggccaagacgatacagagca

SEQ ID NO: 173591 - DNA, 269 bp, Glycine max
gtctcagaaacactcactcactcgattcttctcaaaccgtcaccgtcgaggctatgcccaccaacgaagacttccagagtgtttcaaattgctatgtgttcaagagccgattgcaggagtatgcacagaaggcggggctgcccacgcctgtctatgaaactattaaggaagggccttcccatgaaccttctttcaggtcaacagtgatagtgaacgacgttcggtatgattctttgcctggatttttcaaccgcaaggcagcagagcag

SEQ ID NO: 173592 - DNA, 158 bp, Glycine max
ctcctatagccggcgctcaacaacatggcggacaaggcagtcaccatccgaaccagaaagttcatgacaaacaggcttctctccagaaagcaattcatcgttgatgtccttcatccagggagggctaatgtttccaaggctgaactgaaggagaaatt

SEQ ID NO: 173593 - DNA, 267 bp, Glycine max
gcagcacaagtttgtcttctggtacactcgtcgaacacctggagttcgaaatcaaacatcatatgaggacaacataaagaaaattgttgaatttagtacggttgaaggattttgggtctgctactgccatcttgctcgtcctgcttctttacctagtccaacagatttgcaccttttcaaggaaggaatccgtcctctatgggaggactctgctaactgcaatggtggtaaatggattatacgattcaaaaaggttgtctctggccg

SEQ ID NO: 173594 - DNA, 268 bp, Glycine max
cttttcttgttctgtttttattttcactgttctctgataacaacgttgttagttgtcaccatggttgttctgtctcagccagcattaaaccagtttttccttctgaaaacatgcaagcccacgcccttgttcgcggggattcctgtggtcgacctcacggaccccgatgccaagacccacatagtcaatgcctgcagggacttcggcttcttcaagctcgtgaaccacggtgttccgttacagttcatggccaatttggaaaacgaaa

SEQ ID NO: 173595 - DNA, 269 bp, Glycine max
cgctctctcactcacaaacacacactgaactaaaaaacatcaaaagagacatggctgagcaaaccttcatcatgatcaagcctgatggcgtccaaagaggccttattggcgagatcattagcagatttgagaagaaaggtttctacttgaaaggtttgaaacttgttactgtggaccgtccttttgctgagaagcactatgctgatttgtctgccaagcctttctttagtggtttggtggattacattatctctggccctgttgttgcc

SEQ ID NO: 173596 - DNA, 265 bp, Glycine max
gtcgaagcgtggtcgtggtggttcggcggggaacaagttccgcatgtcgctgggtcttccagtggcggcgacggtgaactgcgccgacaacacgggggcgaagaacctctacatcatttcggtgaaagggatcaaaggccgtttgaaccgtcttccctcggcctgcgttggcgacatggtgatggcaacgtgaagaagggaaaacccgatctgaggaagaaggtcttgccagctgtcatcgttcgccagcgcaagccatggcgcc

SEQ ID NO: 173597 - DNA, 146 bp, Glycine max
caaaaggtcgaggatatggttgggttcttacacgacacccgtggccgccgcacgtgcctacgacaccgctgtcttttacctccggggtcccaacgcgcgccttaacttccccgaactcttgttccaggacgacgaccaggagggca

SEQ ID NO: 173598 - DNA, 266 bp, Glycine max
gcggaggataagaaactaacaaggattcccttagtaacggcgagcgaaccgggaaaagcccatcatgaagatcggtcgccctcggcgttcgaattgtagtctggagaaatcgtcaccagtatcccctgcatcggatttaatgttgagactgtggagtacaagaacatcagcttcactgtgtgggatgttggtggtcaggacaagatccgtccactgtggaggcattatttccagaacactcagggtctcatttttgtggttgatag

SEQ ID NO: 173599 - DNA, 265 bp, Glycine max
cgacgtagatgtcttgagatatctctccaaagatgattttagggttctcactgccgttgaattggggatgcggaatcatgaaatcgtacccaccgaactcatcgaccgaattgcgcgtctcaagcatggaggcacgtacaaggttttgaaaaacttgctcaaacacaagttgttgcatcacgactcttctaaatatgatgggttccgccttacctaccttggttatgattttcttgccattaagactatggtgaacaaaggagtg

SEQ ID NO: 173600 - DNA, 268 bp, Glycine max
gagaaggcaagatgtcgaagagaggacgcggtggttcggcggggaacaagttccggatgtcgctgggtctgccggtggcggcgacggtgaactgcgccgacaatacgggggcgaagaacctctacatcatatcggtgaaagggatcaaagggcgtttgaaccgtctcccctcggcttgcgttggcgacatggtgatggccaccgtgaagaaggggaaacccgatctgaggaagaaggttttgccagctgtcattgttcgccagcgcaa

SEQ ID NO: 173601 - DNA, 268 bp, Glycine max
caaaatcacatttcctttcatttcttcgttatttcctaatcccaatggctcaagcactatcaacttcatcactactactatcacaaaaaacagggtcctacgtcaaaccacagaacaatgtaattgtagcctgcatggcctcttttccatcaaggaaggaatttccaaggctaggaagggtgagagctcaggcttctggtgataacaaagacaactctgtggaagtacaacatgttagcaagggtgaccaaggaaccgcggttgagaa

SEQ ID NO: 173602 - DNA, 292 bp, Glycine max
ggatctcacaagaggttgttggtgatgctctgggtgaggaattcaaaggctatgtcttcaaaattactggaggttgcgacaagcaaggatttccaatgaagcaaggagtgttgacccctggtcgtgttcgcctcttgctgcatagaggaactccttgtttccgggttatggaaggcgcaatggagagcgtaggaggaagtctgttcgtgggtgcattgtcagccctgacctctctgttctcaacttggtgattgtgaagaagggtgaaagtgatttacctggcctgacagat

SEQ ID NO: 173603 - DNA, 293 bp, Glycine max
aaaagctcccgattccgctaaacccgttactgaatctggcaagaagggttatgttggcatccatagttcgggatttcgagacttcctgttgaaaccagagcttcttcgagccattgtagattcaggatttgagcatccttcagaagtgcaacacgaatgcatcctcaagcaatcttaggaatggatgtcatttgccaagcgaaatctgggatgggaaagactgctgtttttgttttgtctacacttcagcaagttgatcctgttcctggtcaagttgcagctcttgttctttg

SEQ ID NO: 173604 - DNA, 292 bp, Glycine max
tgatgagaagagattgtttggtgttaccacccttgatgttgttagggctaaaactttctatgctgggaaagccaatgttccagttgctggtgttaatgtacctgttgtgggcggccatgcaggcattactattctgccactattttctcaagccacaccaaagccaatcttgatgatgatgtcattaaggctcttacaaagaggacacaagatggaggaacagaagttgtagaagctaaggctggaaagggttctgcaactttgtcaatggcctatgctggtgccctttttg

SEQ ID NO: 173605 - DNA, 291 bp, Glycine max
gtagccgtaggtagcagttgcacacggcgcaaaggggaacaagaagaagaagatggtgtccttgaagcttcagaagcggctcgccgctagcgtcctaaagtgtggcagaggcaaggtctggctcgatccaaatgaagtcaatgaaatctccatggccaattctcgacaaaacataagaaagttggttaaggatgggtttattatcaggaagccaactaagattcactctcgctctcgtgctcgtcgaatgaaggaggccaagaggaagggacgtcactctggctatggtaa

SEQ ID NO: 173606 - DNA, 294 bp, Glycine max
gcgttatgactgtggttgccaaccctcggcaattcaagatcccggattggtttttgaataggaagaaagactacaaggatgggaagtattctcaggtggtgtcaaatgcactggatatgaagttgagggatgatttggagcgcttgaagaaaatcagaaatcccgtggtttgaggcactactggggtcttcgtgttcgtggtcagcacactaagactactggtcgcaggggtaaaactgttggtgtctctaagaagcgttaagctgtgttatatgtttgctttgagaaatagat

SEQ ID NO: 173607 - DNA, 292 bp, Glycine max
atttgaggaacttgggggagatccttcaaaaatttcacttgtaaagagatcggtaagcagtatctgtgctgatgtgtctgagtaccacccaaatattaggaattggcacattgatagctacggaaaatcggaagagttccatcctccaaaagttcacttgattgtagtcctagccaggccatctcttccattaaatttgcaagctttggaactcctttgggaacatgtgggaattatgagaagggagtttgtcattctcccacttcctatgccaccctagagaagaaatgta

SEQ ID NO: 173608 - DNA, 290 bp, Glycine max
atcgaatcgaaacgcgaataagtttctttctctctcgttggacgaataatggttctgaggaggaagaagatggagcagcgcttcaccttcttctgctgttgatttcatggccacctcccagtcccagcatcgctgcgttttcgttgggaatataccgtagatgccacagaggaacagcttatcgaaatctgccaagaggttggcccagtagtctcattcagactagttattgacagagaaactgggaaaccaaaaggttatggattctgtgagtacaaggatgaagagac

SEQ ID NO: 173609 - DNA, 288 bp, Glycine max
ttccaaccaagcagcgatgttgttgttagccgaaaaatggaatcatcggagatcgaagacaggaagccggagattctgaaaagcggaggaggttgtcttctgccgccggttccgccgccgcaagcgaaggcggcggtgaagaaggattacatgtacttcgacccgtcggattcaatcccgaagctgcacacggactcgagctgttcggagcacgtggtatcgccggaattcgcgagcgaggtgcagagcgagccaaagtggaaggagtgggagaaaagcctcgagttt

SEQ ID NO: 173610 - DNA, 286 bp, Glycine max
attgcataaaggcaacgaacacattgaacggcggcgcgccatcgattccgagttccccaacaaagcgttaacgagcgtgcgtttttccgacctgaatccgccactctctgaaccggttctccaagccctatcacactccggcttcgacttctgcaccccgtccaagccgccaacattcccttgatctgcagtttcaaggacgtcgacgtcgacgccgccaccggttccggcaaaaccctagcttttgtcgttcctctcgtcgagattctacgtcgctcctcttctc

SEQ ID NO: 173611 - DNA, 285 bp, Glycine max
  unsure (1)..(285): unsure at all n locations
tggtcgtgggtttagtcgtgactcctcgaatgatgagaactcattccctaccagcagagctccttataatcagggtccttttgaagaaggagatgctgggaagtcttctgaaagacgcagttatggtggaccacgagttccttaccgtggtggtctcgtggaggtttcagcaatggtgaaactggtgaaggtgaagacggacgacctcgaagagcatttgatcgtcgcagtgggacnngacgaggaaatgaattcaaacgtgaaggttcaggacgaggtaactgg

SEQ ID NO: 173612 - DNA, 275 bp, Glycine max
gtttgttgttgtaactcgttcttcttcttttgttgttctgtgtttgtgtttgttttttctctcacctgaaaatgtcttgctgcggtggtaactgtggttgcggaagctcctgcaagtgcggcaacggctgcggaggctgcaagatgtacccagactgagctacactgagtcaaccaccaccgagaccttggtcatgggagtggcacctgttaaggctcaatttgagggtgctgaaatgggtgtgcccgctgagaacgatggctgcaaatgtggac

SEQ ID NO: 173613 - DNA, 288 bp, Glycine max
agactcgtttgacaacctgtgaccctcatgctaagcacacagttgtcaactccaacagtccccaagaggttgaagagggcaaggaaattatcttcacatatgatgttgaattccaggagagtgacgtgaagtgggcttcaagatgggatgctctatttctaatgaatgatgatcaaatccactggttctctattgttaactcattaatgattgttctcttcctttctggcatggtggcaatgattatgctgaggacactgtaccgtgacattgcaaagtacaatgagc

SEQ ID NO: 173614 - DNA, 290 bp, Glycine max
ctttgtcctccaaactcaagtgtcggaaagtttgcttcttttccactctgaatcaccctatttattttgggtctctcatctttcttcttccttccaagttgtttttggtgttggtgttggtgttgaattgagttgagaagaaaagaagaggtcatagcacacacacaagacatgtctgctgttgagtcagctgaacacaacaacatcagaggagtaccaactcatggtggacgctatgttcagtacaatatctatggcaatctcttcgaagtttccagaaagtatgtccc

SEQ ID NO: 173615 - DNA, 285 bp, Glycine max
gttgaatcgtgaaaatgttcagaaaccagtacgacacggacgtgaccacatggagccctgcggggaggctgttccaggtggagtacgctatggaggcggtgaagcagggctcggcggcgatagggctccgatcgaagacccacgtggtcctcgcatgcgtcaacaaggccaactccgaactctactcgcaccagaagaagatcttcaaggtcgacaatcacatcggcgtcgccatcgctggcctcaccgccgatggccgcgtcctctcccgctacatgagatccg

SEQ ID NO: 173616 - DNA, 286 bp, Glycine max
tgtttcgtgaagctcagtgcatcaagatctctctctctgtaatcgaaaatgagcaagggaccgggtctctttaccgatatcggcaaaaaatccaaagatcttttgactaaggactacaactccgatcagaaactcaccatttcctcatacagcatctccggagtggccctcacttcaacatctgtcaagaaaggaggactctccactggggatgtggcagcactgtacaagtataagaacactattattgatgttaaactggacaccgcatcaactatctccacaa

SEQ ID NO: 173617 - DNA, 283 bp, Glycine max
atcgagccgctcgagccgcaattgacctcaactttctcgacaagaggctctctgtcggtgttctctcccttccctttggtgtcgtgtcttccaaatggcgaaggtttgattcctctgttcaatcgggttttggtggagaaaatcgtgcctccacgaagaccaccgctggcattttgttacccgagaaatccaccaagctgaattccggaaaagttattgctgttggcactggctttcacagtaaggatgggaagctaattcctgtggctgtaaaggaaggtga

SEQ ID NO: 173618 - DNA, 284 bp, Glycine max
aaagcacaaagatacgaaggaagaaaaaagccccagtttgtggaattgagacatggagagcagcagtgggattgagagcacgggggggcgtgcgccactgtcaggggtggtggcagattgtgtgaagcggtggttcaaagacactctgaaggagctaaggcaggtgatgttaacatgcaggtcttggttggtcagatgtactatcatggctatggtgttcccagagatgctcagaagggaagaatttggctgactaaagcgtcgagggttaggtcttcagtttg

SEQ ID NO: 173619 - DNA, 286 bp, Glycine max
aattcccagcagcactggagctgctaaggctgtaggaaaagttcttccagcactgaatggtaaattgactggcatgtccttccgagtccccactgtagatgtttcagttgttgacctcactgtcaggctagagaagccagcaacctatgagcaaatcaaatctgctatcaaggaggaatcagagggcaaattgaagggtattttgggttacaccgaagatgatgttgtgtctactgattttgttggtgataacaggtctagcatatttgacgccaaggccggaatt

SEQ ID NO: 173620 - DNA, 283 bp, Glycine max
caacattctcataatcaaataccatttcattcattcttacatattgcttaattttatctgaattttgaaacaccttctgaatggctttttcaagagttgcattgttaatatgcacggtaattgggtattttgtgattgcctctgcgggcaattttaccaagattttgatatcacttggggagatgggcgtgctaagatactcaacaatggcgagcttctcactctgtctcttgacaaagcctctggctcgggtttccaatccaagaacgaatacctttttggt

SEQ ID NO: 173621 - DNA, 291 bp, Glycine max
gtaatattattcttcgaatccattttattattcataatgggtattttcacatttgaggatgaaaccacctcccctgtggctcctgctaccctttacaaagctctagttacagatgccgacaacgtcatcccaaaggctgtcgaagccttcaggagtgtgaaaaccttgaggggaacggtggccctggaaccatcaagaagatcactttcgttgaggatggagaaagcaagtttgtgttgcacaaaatagaatcagttgatgaggcaaacttgggatacagctatagcgtag

SEQ ID NO: 173622 - DNA, 288 bp, Glycine max
gtgatttggagtttggagcgactgaactaatcattaatttgcactcgctgtttcagcttcatcacccttcttttgcatcatttatatctcttgagaaatggcacaagaaacctttctattcacatctgaatctgtaaacgagggtcaccccgacaactgtgcgaccagatctctgatgcagtacttgatgcgtgccttgaacaggaccctgacagcaaggttgcctgtgagacatgcaccaagaccaacatggtcatggtcttcggagagatcacaaccaaggccaac

SEQ ID NO: 173623 - DNA, 286 bp, Glycine max
tcgcaatagaaagtgaaagaaaatgagtcgaggaagtgcaactgctgcgaagggcaagaagaagggtgcgacattcaccattgactgcgccaagccagtggaggacaagatcatggacatcgcgtctctcgagaagttccttcaagagaggattaggttggtggcaaggccggtgctctcgccgacaccatcaccgtcacacgtgagaagaccaaaatcatagttacttcagacagcaacttctccaaacggtatctcaagtacttaactaagaagtacttgaaga

SEQ ID NO: 173624 - DNA, 283 bp, Glycine max
gttttaatccttatgttgctcagattgaaactcatgactacatggcaaagctttttcatttgctcatccagttcaataatatattaatcgattttgatagagatgtatggggctatatatctttgggttactttaagcagaccaccaaggctggagagattgggtcatcaactatgcctcacaaagtgaatcctattgattttgagaacagcgaaggtaatctaggtgtagctaatggaggtctgtcacatctaagcatgaagttgccgatttcacgttggca

SEQ ID NO: 173625 - DNA, 278 bp, Glycine max
accaggcgaggagaaagatggatgggaaggagcaggatgtgtcgttgggagcgaacaagttccccgagagacagccaattgggacggcggcgcagagccaagacgacggcaaggactaccaggagccggcgccggcgccgctggttgacccgaggagtttacgtcatggtcgttttacagagcagggatagcagagtttgtggccacttttctgtgtctctacatcactgtcttaaccgttatgggagtcgccggggctaagtctaagtgtagtaccg

SEQ ID NO: 173626 - DNA, 274 bp, Glycine max
gtttgttgttgtaactcgttcttcttcttttgttgttctgtgtttgtgtttgttttttctctcacctgaaaatgtcttgctgcggtggtaactgtggttgcggaagctcctgcaagtgcggcaacggctgcggaggctgcaagatgtacccaacttgagctacactgagtcaaccaccaccgagaccttggtcatgggagtggcacctgttaaggctcaatttgagggtgctgaaatgggtgtgcccgctgagaacgatggctgcaaatgtgga

SEQ ID NO: 173627 - DNA, 286 bp, Glycine max
atggagggctgttacgaaagagattgttaagactcctgaacaatgtggaaggctcacatttcctatttcgttgaagcagcctggtcctcgtgattctccaatacagtgctttatcaggaggaacagagaaacttcaacatatctattgtacattgcctggtaccatcggagaatgagactgataagttgttattagctgccaaaaaggtaagaagggcaacaggcacagacttcgtcatatctttggttgcagatgatttttttcgctccagcaacacatatgttg

SEQ ID NO: 173628 - DNA, 287 bp, Glycine max
caaagctcagacccaaacctttcttttgctcttcatccattccacaccaaaaagtaacagtttcagtttcggagggaaacacaacacaaaaagccccctccccccaaagcaaatcacctttttttctttcagttattcaaaaaatgttcgccgaaagaatggactcaagggagaccctagactccaagccatttcccaagccatcagagtcgtccctcacttccccatacatggaataatgtttcaagacataacgacattgttgttggatcacaaggcgtttaaag

SEQ ID NO: 173629 - DNA, 277 bp, Glycine max
cttccatcggcgcggcacccacacacacagttcgtcggaatgggaagggtgattcgcgctcagcgtaagggtgctgggtcggtgttcaagtctcacactcaccaccgcaagggtccggcgaggttccgcagcctcgacttcggcgagcgcaacgctacctcaagggcgtcgtcaccgacatcatccacgaccccggtcgcggcgcccctctcgccaaggtggcattccgccaccccttccgctacaagaagcaaacggagctcttcgtcgccgccga

SEQ ID NO: 173630 - DNA, 283 bp, Glycine max
ctctgcaaacatgttggtttatcaggacctccttacaggtgatgagcttctctcggactccttccgttacaatgaaattgagaatggaatgctgtgggaagttgaggggaagtgggttgttaagggagcagttgatgttgacattggtgcaaaccttctgctgagggtggagaagatgagggagtcgatgacgcagctgttaaggttgttgacattgttgatacattcagacttcaggagcaacccgcttttgataagaaacagtttgttaccttcatgaaga

SEQ ID NO: 173631 - DNA, 282 bp, Glycine max
gccagatttcaagatgaagttcaacattgcgaatcccaccactggttgtcagaagaagctggagatcgatgatgacctgaagctacgagcattttgggacaagaggatctcacaagaggttgttggtgatgctctgggtgaggaattcaaaggctatgtcttcaaaattactggaggttgcgacaagcaaggatttccaatgaagcaaggagtgttgacccctggtcgtgttcgcctcttgctgcatagaggaactccttgtttccgtggttatggaaggcg

SEQ ID NO: 173632 - DNA, 282 bp, Glycine max
catctgtgcgctgtgcagtgtttaaagaagatgtaaatgctgcgatactggatggaaaagaaatagatgtttcttttgacaacttcccttactatttaagtgagaatacaaaaaatgtcctggtggctgcttgctttatgcacctcatgcataagaacatgaaaagtttactgcagatcttacaaccataaaccctcgtattctactctctggacctgcagggtctgaaatatatcaggagatgttggtaaaagcacttgcaaaatactttggagctaagct

SEQ ID NO: 173633 - DNA, 280 bp, Glycine max
ctgagaggaagagggagtgagagtgttcttcgtttgttaccttctctcagaaatggttacgttcaggtttcaccagtaccaggtggtcgggagggctctcccaacggaagcagatcagcatccgaagatctaccgaatgaagctctgggccacaacgaggttcgcgccaagtctaagttctggtattttttgaggaagctgaagaaggtaaagaagagcaatggtcaagttcttgctatcaacgagatttttgagaagaacccaaccaagattaagaact

SEQ ID NO: 173634 - DNA, 280 bp, Glycine max
actcgagccgattcggctcgagaacctatggtggatggtgggactgaaggtttcaagggccatcctagggttatcttgccagggatcacaccgtgctttgaatgtactgtctggctttttccacctcaagttaagtttcctttgtgtaccctgctgaaacccctagaactgctgcccactgtattgaatatgcccacttgattaagtggaatgaggttcatggcggagtggcttttgatccagataaccctgagcatatgaaatgggtttatgacgaggc

SEQ ID NO: 173635 - DNA, 254 bp, Glycine max
tacataattaaccttggaaagacatgggagaagcttcagcttgctgctaggattatagtcgccattgagaacccacaggatatcatcgttcagtccgccaggccttatggccagagggcagttctaaagtttgctcaatacactggagctctgcaattgcaggaaggcacactcccggaacattcactaatcagatgcagcaatcctacaatgagcctcgtcttctgattctaactgatccaagaacagatcat

SEQ ID NO: 173636 - DNA, 284 bp, Glycine max
gccaagtcagttatcaggtgatgaagcaatcaagaaaatccaagggatccttgaatttctcctacaaattcggcgaacatgttcccgccccggccgccaagacacccaaagcggccaaggcgggacaagagcctgtgatggcttatcctcctgtggggcgggatccagttcgatgccctatggtacgccacaccctcccccgccgcagcaatatgcggcgacgggatatgggtatccacctcagcaggtgcatggtggatacacacctcaagcagcatatgggt

SEQ ID NO: 173637 - DNA, 283 bp, Glycine max
atccctctgtggtcgataaagtcattgaggatcctcatatcatcaatggcaaacaagttgagattaagcggacgataccgaggggagctgttggctctaaggattttaggacaaagaaaatttttgtaggtggaattccttcaaatgtgactgaagatgaatttagagacttctttacacgctatggcgaagttaaagatcaccaaataatgcgggaccactctaccaaccgatctcgtggctttgggtttatcacatttgactctgaagaagcagttgatga

SEQ ID NO: 173638 - DNA, 282 bp, Glycine max
agtcgctgctcatcctccataacctccgagctctacaccgaagaacgaagccatggggaagacacatggaatgggagctgctcgcaagctcaagtctcaccgcaggaggcaaaggtgggctgataagtcatacaagaaatcccatcttgggatgaatggaagaaaccttttgccggttcatcccatgccaagggaattgtccttgaaaagataggtattgaagctaagcagcccaactctgctattcgtaagtgtgccagagttcaacttatcaagaatggg

SEQ ID NO: 173639 - DNA, 200 bp, Glycine max
caaagagtgcgtcagttcagaccgtggtgtgttttccctatcagaaaggcgttattgagataggcacaactgaactggttactgaggatcctagtctcatacaacatgtcaaggcttgcttcttagaaatctcaaagcctacatgctctgaaaatcttcctctgtccttgataagccacatgatgacaaatatccaacat

SEQ ID NO: 173640 - DNA, 278 bp, Glycine max
gttgctctcaatttgttccctgttgacggaccctaatcctgacgatcctttggtccctgaaattgcccacatgtacaagacagacaggaacaagtacgagtcaactgccagaagctggacccagaaatatgccatgggttaagtgacctttggtatgtttgagggagagcctttctactctcagtgtttaggtctctcagcccttgtaggaatatttgtcgttttaaatcatgattaaggcccctccagttgaagatgaatgggggaaaacgtttctc

SEQ ID NO: 173641 - DNA, 198 bp, Glycine max
ttaggattaaggaagtagactagaatctcggaaccaagctcaacgcggcatgttccggtattgccaatacagtcttgtccagtaacccgctagaacgattaagccagtgtcctgatgaatcccgtggaacctagtataggatctcgtctaggatcctcggcattctgagtggatgtatgattcgccctaatccattaa

SEQ ID NO: 173642 - DNA, 284 bp, Glycine max
aggctacaaaatgaaaacccacaaggcatctgcaaagcggtttagggtgaccggacgaggcaaaatagtgcgtaggagagctggcaagcagcatttgctcgtcaagaagaataccaagcgcaaatcccgactctccaaaatgcacgcggtcagcaggagcgactatgacaacgtaattggagccttgccatatctgaaagtaaacagaaatgctacatagatgttctgtttgaaaaactgagtcataagcctagctgggtttagtctagtgatttgtgacgtct

SEQ ID NO: 173643 - DNA, 177 bp, Glycine max
ctcgagccgttctttctctcttctctctctgtccgaagatggcttcacgcaggttcgtatcttctctgattcgatcctcccttcgtagatctcaatcgaaaccctcgatttccgcatccgcatcgaggctcacgtcatccaaccgtgcctctccgcacggttacttgctgaaccgcg

SEQ ID NO: 173644 - DNA, 286 bp, Glycine max
ctcaaattgaagtgattagattctctaccaagtcaattgagagggagataaactcagtcaatgacaaccctttgattgatgtctcaaggaacaaggcccttcatggtggtaacttccaaggaacacctattggagtgtccatggataacacccgtttggctcttgcatcaattggcaagctcatgtttgctcaattctctgagcttgtcaatgactattacaacaatgggttgccctcaaatctcactgccagcagaaaccccagcttggattatggattcaaggg

SEQ ID NO: 173645 - DNA, 219 bp, Glycine max
gccagattttccccttttcttctctggtgccacacctttagttggagcgttgccttatgctcagtgctatggcgggcatcaatttggtatgtgggctgggcagctgggtgatggcagggcaatgactctaggggagatactgaattctaactctgaaaggtgggaacttcaacttaaaggagctggcaagactccttacagtcgctttgccgatggcct

SEQ ID NO: 173646 - DNA, 199 bp, Glycine max
tcaggatgctagcgaagtgttggaatccggtgaggagacattttttcctgctctgcatgttggacttgaaaagacttctgccgtgtcattctggatggagaaccaaacaagaaatgataagaacaaagatttcattcctttagctgataatactgtgcctctatatgattgcggatatgctttgggattgacttcagct

SEQ ID NO: 173647 - DNA, 283 bp, Glycine max
gcgggtcggatctcaggcggaaccagtccaccggggacgtgaggggattcggcggcggcgggaacgtggcgaggtcaaaatcgacgcaggatatttacacgcgggctgaatcgtaagcttctgctgccaacaaagaagaattcttcgcgcggaagagagcggagaatgagtcgcggccggaggggcttccgccgtcgcagggtggcaagtatgttggattcggatctggccccgccccgccccagaggggtaatcagcaaaacgattatttctctgtcgtttc

SEQ ID NO: 173648 - DNA, 287 bp, Glycine max
ggagtctaggagctgctgtcatgtacaaccaacagaaggcctgggatgaccattggatcttttgggttggaccatttattggagcagccattgcagccttctaccaccaattcatcttgagagcaggtgctgctaaggctcttggatcattcaggagcaaccccgctatttgagtcaatttaatttcttcttcatgatgagttcaaaatgaagaggaaattataagaataataaaaatattgtcaataatggcaattgcttgtgcttttattgcaccttttctttga

SEQ ID NO: 173649 - DNA, 260 bp, Glycine max
caaaaaccctatcgttcttcgcggtttcgccgattctcgccatgccgaaagccaaatccgacgccaaagccgccgatagccggttgaagcgcaagggcgctggtgctggaaggaagcaatcgaagaaagctgctaaggatcctaacaagccaaagagacctccaagcgctttcttcgttttcatgtccgagttcagagagcagtttaagaaggagcatcctaacaacaaatccgtcgctgttgtcggtaaagctggtggt

SEQ ID NO: 173650 - DNA, 140 bp, Glycine max
cgccatgtgatgaccaacctcggggagaagctcaccgatgaagaggttgatgagatgattcgcgaggccgatgttgatggcgatggccaaataaactacgaggagttcgttaaggtgatgatggccaagtgatcatcaca

SEQ ID NO: 173651 - DNA, 284 bp, Glycine max
cacaattcacaaccgaaacagtttccatctctctcacaaaatgacaacaatatcaaattgctcccttctcttcctcttcctcttcctctccaccctccacatagcttccaccctctcaacccccaccaacttcatcaagtcctcctgcagcaccacccagtacccagccctctgcatccagtccctctccgtctacgcctccaccatccagcaagacccccacgagctcgtccagacagccctctccctctccctcaaccacaccgaggccaccaaaaccttcg

SEQ ID NO: 173652 - DNA, 199 bp, Glycine max
ccggggtagtgaagtaatagcggctggaatgacagttaatgattggaccgcattttgtggttccgacaccaccgcaacggagctatctgtgattgagagtgttttcaagctgagagaagcacagcctagtgcaattgtggatgagatgaggaaatccctcattgatacctatgtctgaactgtggtagtaatagtgttt

SEQ ID NO: 173653 - DNA, 286 bp, Glycine max
gacaattcaacagccaccgtccgcccccactcaccacgaggatctcctcgtcgccttccacggttgtctgcaaagctgtctccgttaagccccaaaccgaaaccgaagtctcaacattgctgacgatgtcacacagctcatagggaaaacgccgatggtttacctcaacaatatcgtgaagggttctgtggccaatattgctgcgaagcttgagattatggagccctgttgtagtgtcaaggacaggattggttttagtatgataaatgaagctgagcagagagga

SEQ ID NO: 173654 - DNA, 274 bp, Glycine max
ccctcatgagcaccatcctcatgcaaaggtcttcttctacttcacttgctgctgggaggttgttctccacaacaacagcaaccattattgattccccttcacttgctcagagaatcagagatttgcctaaggacctccctggaaccaacatcaagaaacatgtttctcagctcattgggaggactccacttgtttatcttaacaaagtcactgaaggatgtggagcttatgttgctgtcaagcaagagatgatgcaactactgccagcatcaag

SEQ ID NO: 173655 - DNA, 159 bp, Glycine max
tgagaaataagggaaaaatggtgtcgcggaaactgcagaagcgcttctccgcaagcgtgctcaagtgcggcagaggaaaggtttggcttgactccaatgaagtcaacgaaatctccatggccaattctcggcaaaacatcaggaagttggttaaggatg

SEQ ID NO: 173656 - DNA, 277 bp, Glycine max
ggaggcacaatgacaggagttcttagtgcagcaaatgaaaaagctgtagagatgtttattgatgaaaagattagctatttggatatattcaaagttgtggagctaacatgtgagaagcatcaaaatgaattggtatcctctccttcccttgaggaaattattcactatgacctgtgggcgcgaaaatatgctgctagtctgcaagactcttccagcttcactcctattcttgcatgaggatgattaaactagggatgtggctgatgcttcccaattg

SEQ ID NO: 173657 - DNA, 243 bp, Glycine max
cttaagcttgctactgagtttccacactgcataccttaggtcttccgaattcgaagttaatttgcaagatggctaaggaaaaggctcagatcaacattgtggtggttggtcatgtggaccctgaggaggcaaccaccattaacgagctgaagaagcctgttgtggagaaagaagctccagggcatgccatatgagggcatgcacgtacggcctcggaggggaaccagaaaattatgttaccaa

SEQ ID NO: 173658 - DNA, 279 bp, Glycine max
gcccaaggaagctcgttctttcgtcgtcgtcacaagtcacaactcgcaaaccacaatgcctaagcagatccacgagattaaggattttcttctgacggcgcggaggaaggatgcgaggtcggtgaaaatcaagaggagcagggatgtcgttaagtttaaggttcgatgctccaagtacttgtacacgctttgtgtctttgaccctgagaaagccgataagttgaagcaatctcttcctcccggtttgagtgttcaagacctgtagagctgttgagtgtg

SEQ ID NO: 173659 - DNA, 281 bp, Glycine max
gttattggaggtggtcaggatgcctcagctgttacaactactgatcatcgtgctggcaaattcgaagccaaattctttgacaagattcttcaagaagaaattgggggtgtgaaaggccactttggaccaattaatgcattggcttttaaccctgatggaaaaagtttttcaagtggaggtgaagatggttatgtacggttgcaccacttcgacccagattatttcaacatcaaaatttagtgcctgatggtttgtggttaaaattaggtggttcctagaag

SEQ ID NO: 173660 - DNA, 285 bp, Glycine max
ctctctctctcactccttcttctctctcctctggcacccctaaagcttcttctgttctgtgcaggcagtttttctttggtttggttgcatcctttgatctgatcagcaaatttgagaattcagtttgggaagggccattcctctttagtgcaaaacagatcgcaggtgcctttgtgctgatggccactaatgaaaatcttccaccaaatgtaattaagcaacttgccaaggagttgaaaaatcttgatgaatctcctcccgagggcattaaagttgtggtaaatg

SEQ ID NO: 173661 - DNA, 271 bp, Glycine max
ctttgttgcttccaactgatgttgtcatagcagacaagtttgctgctgatgctaacagcaagactgtgccggcatcaagcatcccagatgggtggatggggttggatattggtcctgattccatcaagacatttggtgaagcattggatacgactcagaccattatttggaatggaccaatgggtgtttttgagtttgataagtttgccacaggaacagaggctatagccaagaaactggcagagctgagtgggaagggagtgacaaccac

SEQ ID NO: 173662 - DNA, 278 bp, Glycine max
cggctcgaggctagtggtaaaaataagcttaaagttgacaaatgcttctcaactcctggaatggcacctcatcttggaaagatagcacaatatcttagaaagcgaagactgatgccagataagaagctaggtactcttactagtgatattgctgggcagttgaaagagctaagacaaggccgtgtagagtttaaaatggaaagtaaatcaattttgcatgtgggacttggaaaggtaagctacaaagaggaggctttacgggagaatattagtgcgtt

SEQ ID NO: 173663 - DNA, 249 bp, Glycine max
agagacggcaaagacggaggagaggtcgcaaacgcaaaaatggtgaagtttctgaaaccaaacaaggccgtcattgtccttcagggacgctacgccggcaagaaagccgtgatcgttcgaaccttcgacgaaggaactcgcgagcgcccctacggccactgtttggtggcggggataaagaagtaccctgcgaaggtgatcaagaaggactcggcgaagaagacggcgaagaagtcgcgcgtgaaggcg

SEQ ID NO: 173664 - DNA, 278 bp, Glycine max
cagtcttcctttcctctctctcttgtttgcattcatgtgagggtgattttgtagagagttaacagcacaaaccactcactctcttaacttgagattattttttttctttccccaaacccaaagaggcatgagttgcaacgggtgccgcgtccttcgaaagggttgcagcgagtcttgtatcctgcggccgtgtctacagtggatcgatacgcccgaagcacaaggccatgccactgtcttcgttgccaaattctttggccgtgccgacctcatgtcct

SEQ ID NO: 173665 - DNA, 277 bp, Glycine max
atgagattcaggtgataagacgctcagaattcgcagcttaatagtaggcacaaggatttttgtttcagctttgataattttgttgtctgtcaactttttgagaattttccttacggtttagacgttcatttgaacgaatgtttttctccgttattatagctattgtctatgaagattatatattcattactatgaagcgtgtggatttggttaaaaaaaaaaaaaaaaaaaaaaaaaaaaaaaaaaagaaaaaaaaaaaaaaaaaggaaaagaagta

SEQ ID NO: 173666 - DNA, 278 bp, Glycine max
  unsure (1)..(278): unsure at all n locations
cgcaaatacgcattatattactagttttaatttgttttgtcgtttgcttctttctttgattaatgatgactagctttaaggttgcatgtgtggttgcgatgatgtgcatggttgtcgccatgagtgttacacccatggcacaggccgcaatcacgtgcgggcaggtcgccggcgacgtgtctccgtgcctcagttatcttcgaagcggcggaaaaccgtcggacgcctgctgcaacgngatgaagtcgctcagcggcgcggcgaagaccaccgccgac

SEQ ID NO: 173667 - DNA, 282 bp, Glycine max
  unsure (1)..(282): unsure at all n locations
cgagaactttgataagggactcatatacccaccattcaccaacatcagaaagatttcagcacacatagctgccaatgttgctgctaaggcttatgaacttggcttggccactcgccttcctcaacctaaagatttagtgaagtttgcagagagctgtatgtataccccagcctacagaagctaccgatgaaaagtgataataatanataggcgcttttttctttttcattatcatgatatcatttcattgtcattntttaattttttaccttctttagttcc

SEQ ID NO: 173668 - DNA, 286 bp, Glycine max
cggattttcacgagcaacaataagcatagagagaaatttggcattgcagtgcatcatcgcattgattgagctggaagatgggtagcaaaggcaaacgcaaagagcaagaatcaataataacgagggttatggctcacggaggtagatacgtgcaatacaacgtgtacggaaacttgttcgaggtctcctccaagtatgtccctcccattcgccctgtcggtagaggcgcatacggcatcgtttgtgctgctgttaattgcgatacgcacgaggaagttgccataaa

SEQ ID NO: 173669 - DNA, 167 bp, Glycine max
aaactcatcatcaaaactgttatagctcgtggcacttttggcactgtccatcggggtgtctatgatacccaagatgttgctgtgaaattgttggactggggggaagaaggacaaagaacagaagcagaaattgcctccctgagggcagcgtttacacaggaagttgc

SEQ ID NO: 173670 - DNA, 275 bp, Glycine max
caggtgtgggaggtgaaagctgccgacctgaccattagccctgttcaccgtgctgcagtgggcatagtagatccgaacaagggcatatctctacgatttccacgactacttcgagtcaggcctgacaaagctcctgaacaggcctcatcatctgagcaggttgctgaaatgtataaggctcaaaaacacaatcacacgaacaaccaaaatgacgatgaagatgatgattgagtgaaaaaattctgtttctcatgctgagctataaaatctcagta

SEQ ID NO: 173671 - DNA, 277 bp, Glycine max
cttaccagctatacttgttccttttgaaggttagaagtgctacaatacaaacaatggcagctactcaggaagatgtgaagcttttgggtattgtgggaagcccatttgtgtgcagggtccagattgcccttaagttgaagggagttgaatacaaatttttggaagaaaatttgggcaacaagagtgatttgcttctcaaatacaaccctgttcacaagaaggttccagtgtttgttcacaatgagaagcccatagcagagtctcttgtgattgttga

SEQ ID NO: 173672 - DNA, 275 bp, Glycine max
tatgaacaagccgttgattatagtctgcaacaagactgacttgcagccactggaggggatatcagaggaagacatgaagttggtcaatgagatgaaagctgaagccttgaagactctagttggtcaaggaggtgagcctacagacaataacagtgtattgttgaccatgagcactttgacagaagaaggggtaattgctgtaaaaaatgcagcatgtgagaggttattggatcagcgggtggagataaagatgaagtcaaagaaaattaacgact

SEQ ID NO: 173673 - DNA, 133 bp, Glycine max
gcgtgagtgagtgcgtcatttctttctttctctgcttccctaaccaactgaaccagcagcaacatttgcgcaaatcgaaattgattctctgccacttaacctaaaatggaaatctttccgattcccgccgaat

SEQ ID NO: 173674 - DNA, 196 bp, Glycine max
gaagaaaagaaatcctcacaatgcattcattcggctacagagccaatgcgttgctaacctttgccgtcaccattttggctcttatgtgcgccatggcctctgtatccgacaacttcaacacccccactccctctgcacaagtccaggtgttgaacatcaactggtttcagaaacagcccaatggcaatgacgaggt

SEQ ID NO: 173675 - DNA, 283 bp, Glycine max
cttaaccccaaacaaaggctctgcaattgcaaattcagaggatgtacgatcttcgagtacaacggaagcgccgtggtggctatggtcggcaagaactgcttcgccattgccagcgaccgaacggctcggcgttcagctccaaactatagccacggattttcaacgcatttccaagattcacgacaagctcttcatcgctctctctggcttcgccaccgatgctcaaacattgtatcagcgtcttgttttccggcacaaactgtaccagctgcgtgaagagagg

SEQ ID NO: 173676 - DNA, 287 bp, Glycine max
ccttcttcctctgcgcaggaattaggaatattcgacaggcagagtttcttcaatggctcctaaagttgataagaagaatgatccaaaggcccaggccttgaagactgctaaggcagttaagtcaggtgctacctttaagaagaaggtaaagaagatccgaacttctgtcactttccacaggccgaagaccttgaagaaggacaggaaccccaagtaccctcgcattagcgccccgccgaggaacaagcttgatcattatcagatcctgaaataccccctcaccactg

SEQ ID NO: 173677 - DNA, 181 bp, Glycine max
tctcgagccgattcggctcgagctgaaagcactcagtagggtttgcgcgtttcagagtttgtgacgcacgcatccatggccacgtccaccaacgccgccgcagccccgccgcgccagctctcccagaaggaagccgacatccagatgatgttagccgccgacgtccacctcggcaccaaaa

SEQ ID NO: 173678 - DNA, 300 bp, Glycine max
taaagcatctaagtgagatacacagtagttaggtagcaagcataagtgtctaaccttagaaacatatctgctacatatcgtgtgcattttggaattgtgccactaaaattctattcatctatggctgcctcatcttatgctatgcaatcaatccttgcaaaccctatgatccgcatttccagcgggtctagggagaaccattttggtgttcctgcttatcacatgagaaggaatgttggcctgagagttaggtccatggctgaggaagagcaaccaagtcagcctgcgaccccagttaca

SEQ ID NO: 173679 - DNA, 297 bp, Glycine max
atttgcttctcctccacccatccacaaacgaacacacactttgattgagaatggggcgtgttcgcacaaagacagtgaagaagtcctcgcggcaagtgatcgagaggtactactctcgcatgacgctggacttccacacgaacaagaaggttctggaagaggtggccatcattccctccaagaggctccgcaacaagatcgcgggattctccacccacctcatgaagcggatccagaagggtcccgtacgtggaatctccctcaagctgcaggaggaggagcgcgacgccgcatgga

SEQ ID NO: 173680 - DNA, 290 bp, Glycine max
tacataatctaggttttcagagtggtggagtgtgcagaagagcgtcgcagtcgcaaccctaatcagaagaagcgcagcttcaagcgagtgacagccaccagccatgggtcgtatgcacagccgcggtaagggtatatcctcttctgctttgccctacaaaaggacacctcctagctggctcaagatctcttcgcaagatgtcgaagaaaatatctgcaagtttgcgaagaaaggtttgaccccgtctcagattggtgtcattctcagagattctcacggtattgctcagg

SEQ ID NO: 173681 - DNA, 287 bp, Glycine max
gcaaaggattctacccgccgctcgatgggaattgcgcttcaaggcgtctcgtagggctaatccgcctcacgagggtcaccaacggcacgtgcctttggggggccgaggccccctactgctggtcggcaaacggacggcgggcgcacgcgtcgcttctagcccggattctgacttagaggcgttcagtcataatccaacgcacggtagcttcgcgccactggactttcaaccaagcgcgatgaccaattgtgcgaatcaacggttcctctcgtactaggttgaattac

SEQ ID NO: 173682 - DNA, 298 bp, Glycine max
tacgtgcgattcttctgatattccaaggcgacgctacgacaccggacccatctccggcgacatctcaccgatctccggcgaatccccggtccccactttcttccctcgaaatgaatcccgagtatgattatctgttcaagctccttcttattggagactctggtgttggtaaatcatgccttcttctgagatttgctgatgattcgtacatcgagagctacataagcaccattggagttgattttaaaatacgtactgttgagcaggatggaaagaccattaaactacagatctggga

SEQ ID NO: 173683 - DNA, 286 bp, Glycine max
  unsure (1)..(286): unsure at all n locations
aggagaagctggataatttaggactgattgaagagagtgatggtgcgcgtgtgatttatgttgagggtgtagacataccacttattgctgtgaaaagagatggtggctacaactattttacaactgatctagcatcactttggtatcgtctaaatgaagaaaaacttgaatggattgtatatgttacagatattgggcagcaacagcactttgatatgctatttaaggcctataggcgtgcaggttggttacanaggatgagatgcgtatccaaatgtactcatat

SEQ ID NO: 173684 - DNA, 275 bp, Glycine max
tccttattcaacactcatatccttatcctgtttctttcaatggaagtcatttctgcttctagcttgaatcccaacgctccgatgttcgtgccactcgcctatcggacggtggaggatttctccgaccagtggtggaacctcgttcactcctccccctggttccgcgactactggctccgcgagtgcttccaagatccccagttccaaaacgacgacgctttcgacttcgactttgacctagatctccaagatgaagatgaaaaggaacgaaagga

SEQ ID NO: 173685 - DNA, 283 bp, Glycine max
aacctcctttctctgtgactctgaggtccattgaatatgtctccgtcgttggatcttcctcccaagggtggcttcagttttgatctatgccgaagaaacgcaatgcttcaaaacaagggcctcaaagccccaacctttctcaaaactggcaccactattgtcggtttagttttccaggatggtgtcattcttggtgctgatactagggcaactgaaggacctatagtggctgataaaaactgtgagaaaattcattatatggcacccaacatatattgctgtg

SEQ ID NO: 173686 - DNA, 287 bp, Glycine max
gagtctttgtccaaatcgcgaaggaaggctttggagatgttcctcaggggtggtggggaaagagatgaactcatgagccaggagatggagctacagatgttttctgttccagagaaaaaagaaggaagtgataataagaaagaataccctgttgatatatcgctgcctgacatcaacaacggtgtatatggaacagatgagtttaggatgtacaacttcaaggtgaagccttgctcaagggcttactcccatgactggactgagtgtccattcgttcatccagggga

SEQ ID NO: 173687 - DNA, 281 bp, Glycine max
atggaagagagaaaccctagggtttggaagaagctgatcggagaagatggtgcagcgtctcacctaccgcaagcgccacagctatgccaccaaatccaaccagcacagagtcgtcaagactcccggtggcaagcttgtttatcagaccacgaagaagagggccagcggacccaagtgccctgtcactggaaagaggattcaagggattccacatttaaggccaacagattataagagatcagggttacccaaaaaccgagggactgtgaaccgtgcatatg

SEQ ID NO: 173688 - DNA, 219 bp, Glycine max
agcagcgacacgtatcaacttcaataatcgcatcgcagaagcagtttccggtgcatctcatcgtctccgaaaatgaacgacgcagatgtctcgaagcaaatccagcagatggtgcggttcatccgccaggaagctgaggaaaaggccaacgagatctctgtctccgccgaagaggaattcaatatcgagaagctgcagttggtcgaagccgacaagaag

SEQ ID NO: 173689 - DNA, 296 bp, Glycine max
atttctccgtttcttattcgttagatctcatcttacactcgccatcaagttcgtctcgcgccaccgtcgacgcagctccgaccacctcctttggttccctcactttctcgctcttcttcttctcagaaatatgccttctcagaaggttgaaacgggtcatcaagacacggtccatgatgttgcgatggattactatggtaagaggctggccacggcttcatcagatcacacaattaagataattggggtcagcaacacggcctcccagcatctagcaactttgactggtcaccaag

SEQ ID NO: 173690 - DNA, 291 bp, Glycine max
aattgggaaggcgagggattgcgctgcgtctcttcctcttctctttcgattcatccctcattcataatcttccaatccaacaacctcagcctcacactcacacatacacacatctgaacgcgtatcgtccctcccatggcttcaaagcgcatcctcaaggagctcaaggacttgcagaaagacccaccaacttcttgcagcgctggtccagtagctgaggacatgttccattggcaagcaacgattatgggtcctgctgatagtccttatgctggaggtgtattcctagtc

SEQ ID NO: 173691 - DNA, 290 bp, Glycine max
ctttctcttccttccttctccttctctcagagaacaactcctcactctctcaccgcctccttctcctctcacaccgccatgggcgagacttccgctcccgccgctgatgccggcatggacgccgtccagcgccgtctcatgttcgaagacgaatgcattttggtggatgagaatgaccgtgtggttggtcatgattccaaatacaattgtcacttgatggaaaagattgaagctgagaatttgctgcatagagctttcagtgtattcctgttcaactctaagtatgagtt

SEQ ID NO: 173692 - DNA, 285 bp, Glycine max
  unsure (1)..(285): unsure at all n locations
atttggaatgcaatcaggtttggcacagattcattttgattttttatttttctttcaattgattgccagtgttggaaaatgtggtgtttgatgagcatgatcgagaagttgattactctgacaagtcagttacagaaaatactcgtgcagcttatcctatagagtacattccaaatgcaaagttaccttgtgttggccctcacccaaagaatgtcatacttttggcatgtgacgcatttggtgtactcccacccgttagcaagctaaacctggcacagnccntgt

SEQ ID NO: 173693 - DNA, 282 bp, Glycine max
gttgaacaagttgtggacataagtggcaaccccattttcccaggtggcacatattacattatgccatcaacttggggcgctgccggtggtggattgaaactaggccggacaggaaactcaaactgcccagttactgttttgcaagattactcagaaatcttccgtggcacaccagtcaaattcagcatacctgggataagccctggaatcatctttacaggtactccacttgaaatcgagttcgcagagaaaccttattgtgctgaatcctccaaatgggtg

SEQ ID NO: 173694 - DNA, 281 bp, Glycine max
cttatttagggtttttgtgactgtgctccacaaccgagtcgccatggcgtcgcaggagagtatcgaaaagatgcaggcacggcagaattaccggaatttatggcacaccgatctcatgagatccattcaggccgatactccttattgttgcctcgcgttgtggtgtgcaccatgtgtgtcttaccttcttcgcaaacgagctctctatgatgatatgtcaaggtacacatgttgtgctggctacatgccttgcagtggtaggtgtggagaaagtaaatgtc

SEQ ID NO: 173695 - DNA, 280 bp, Glycine max
gctgtcctagctcaatcccatatgcacatgcaagctgattatcagatgcctgcggtaacagctccaaccgaaccacctgtacggcagctgtcttttgctctaaatgaagcttcggagcagcaagtggtatcatgtgtatcatctgtatcagaacctagaaatgctcaactcgaagcaccggaactctcacaggctgataagaaatatcaaccatcatcccaggccattgacaaacctgcagatgatggctacaactggcgtaagtatgggcagaagcagg

SEQ ID NO: 173696 - DNA, 265 bp, Glycine max
agagaatccgaggcgaagagaagagaaaaattaagatggaggggaaggagcaggatgtgtcgctgggagcgaacaagttcccggagagacagccgattgggacggcggcgcagagccaagacgacggcaaggactaccaggagccggcgccggcgccactggttgacccgacggagtttacgtcatggtccttttacagagcagggatagcagagtttgtggccacttttctgtttctatacatcactgtcttaaccgtcatggg

SEQ ID NO: 173697 - DNA, 285 bp, Glycine max
accaaatgctggtgactttgggggatggttttgtccatgccatggatcacattatgatatttctggcagaattaggaagggaccagcaccatacaatctggaggttcctacgtacaccttcttggaagaaaacaagttgatgattggttgaaaataaaagtggttctgcattcaagtgggatgagtttacaatttatttttttaaaatttatttggacaatgttacaatgctccttttggacgtcgtttgccctcaagttcttgtcgggtatgtttagcaagtga

SEQ ID NO: 173698 - DNA, 291 bp, Glycine max
caaaaaaagacaacacagagagaagcgtcttaataaacgctcttctctgaaaaacctgatttcttctcttcttctcttctctttcgtttcgatcttcgatctctgaaaatgagagagtgcatttcaatccacatcggtcaggccggtattcaggtcggaaacgcctgctgggagctctactgcctcgaacacggcattcagcctgatgggcagatgccaagtgataagactgttggtggaggtgatgatgctttcaacaccttcttcagtgaaactggggctggaaagcac

SEQ ID NO: 173699 - DNA, 289 bp, Glycine max
cacatctgaatatctcacgccgaagaccgtgcgttgaaatcttgcaaggacgagatccaagcatcgttgttttccttcccagaatttacgctcttcttactatcatcaagatacaaaatggaatatcgacggaccagtggtaggcaggaaaccggtggccgtgacagaagacaatctaaaagggaacaggcatatcaggactctcttattgaggatttgtcacaggattttcgtttgccaatcaaccacaggccaacagaaaatgttgatctggacaacgtagagcaag

SEQ ID NO: 173700 - DNA, 282 bp, Glycine max
  unsure (1)..(282): unsure at all n locations
cacactacaccgagattccccctaaacccgtttgcnttgttgtttgcgaagaaatggcgactaagaggagcgtgggaacgttgaaggagggtgatttgaaagggaagagggtgttcgtgagggtcgatctgaacgtgcctttggatgacaaccttaacatcaccgatgacactagagtccgtgctgctgttcccaccatcaagtacttaactggtcatggagccaaagtgatcctttctagccacttgggacgtcctaaaggtgtntcacctaaatacagtt

SEQ ID NO: 173701 - DNA, 266 bp, Glycine max
agagacttttgggggagagtgagtgagagtaaaaagatgtttctgcgtgcggtggcgcggccgttgatggcgaaggtgaaggcttcgacggggatcgtggggctggacgtggtgccgaacgcgagggaggtgctgattgggctgtacagcaagacgctgaaagagatccagaaggttcccgaagatgaagggtaccgcaaggccgtggagagcttcaccaagcacaggctcagcgtgtgcaaggaggaggaggactgggagaacat

SEQ ID NO: 173702 - DNA, 275 bp, Glycine max
gagatccatccatcaattccaatggccgatcagctcaccgacgaacagatctccgagttcaaggaagccttcagcctcttcgacaaggacggggatggttgtattaccaccaaggaacttgggaccgtgatgcggtcacttggccagaacccaactgaggcagagctgcaggacatgataaatgaggttgatgctgatgggaatggtaccattgatttcccagaattcctgaatctcatggctcgcaagatgaaagacactgattcagaggagga

SEQ ID NO: 173703 - DNA, 276 bp, Glycine max
aagaaagagagagagagagagagaaactgagagaaattcgcaaaccctaatttcggaaagatcggcgatggctgcctccaaggatcgcgagaacttcgtctacatcgccaagctcgccgaacaggccgagcgatacgaagagatggtggaatcaatgaagaacgttgcgaatctcgacgttgaactgactgtggaggagcggaatttactttctgttgggtacaagaatgtgattggtgctcggagacatcgtggaggatcctgtcttcattgaga

SEQ ID NO: 173704 - DNA, 278 bp, Glycine max
  unsure (1)..(278): unsure at all n locations
ctaattccggagtttgaggctctgttttcggaccagttcagtgtntcgctcaggaatgaagcgattactatttggaggaggttgggggaagctattaggggcatttttatggagctggagaatttgattcgccgggatccagcgaagatggcggttcccggtggcggtctccatccgatcactcgctacgtgatgaactaccttcgtgctgcgtgccggtcacgccaaacttggagcaagtatttgaagactatggcttgaaaganttacaaacttgg

SEQ ID NO: 173705 - DNA, 288 bp, Glycine max
tagggtacagcatctgtggtattagcaggattgcttgcatccctgaaattagttggtggaaccttagttgaccataccttcttattcctgggtgctggagaggctggaactggtatagctgagctgatagctcttgagatttcaaagcagactaaagctccagtggaagagacccgcaagaagatctggctcgtggactcaaagggacttattgttagctctcgtttggaatcacttcagcagttcaaaaagccttgggcccatgagcatgaacctgttaagagtctt

SEQ ID NO: 173706 - DNA, 288 bp, Glycine max
atcgtttttactttgacggtttctagagagagaaagtttgttatagagagagaaagcgcgctgctgcttcttctgctgctgcttcgacagtgagaagagagagagaagcgctcttctccgtaccgtttctagagagagaaactgatggccggagttaatccgaacggcgtcgccgattttccggcgactccaacgcacggcggacagttcattcagtacaacatattcggaaacctcttcgaggttacggcgaagtaccgtcctccgatcatgcctgtcggacgcggc

SEQ ID NO: 173707 - DNA, 284 bp, Glycine max
gtacacataaatctagctccaattcctaatcacctggttaatttcttcacatagagctatcaagatccaacgttaacatgaagaatgttttagtaaggtcagctgcgcgagctctgcttggcggcggtgggcggactactaccgccagctctcaacggcggcgatcgtggaacagagacaccagcacggtggcggcgcgtttggaagcttccacttgcggaggatgtccactcttccagaggtaaaggatcagcactcagaggagaaaaagaacgaggtcaacg

SEQ ID NO: 173708 - DNA, 283 bp, Glycine max
  unsure (1)..(283): unsure at all n locations
agcgtgcgtttcttcctctctttctttctacttttcgcagcaacagataaaaccatcttccacacaacatacgacatcaccncttggagnanaagaagagccaccgctgcgacgccgttcgtttatttttgagtatccgctgtcatgtttgggcgtggtggaccaaggaggagtgataactccaaatattatgatattctcgggatttccaaaaatgccagtgaagatgaaatcaagaaggcctatagaaaggcggctatgaagaaccatccagataagggag

SEQ ID NO: 173709 - DNA, 255 bp, Glycine max
cttcatccttctctgttctcctagaacttgattacttgaacattccctatgacagatgaggtggttcttctggatttctggccaagtccatttgggatgagggtcaggattgcacttgctgaaaagggtatcgaatatgagtacaaagaagaggacttgaggaacaagagtcctcttctcttacaaatgaacccggttcacaagaagattccggttctcatccacaatggcaaccctctttccgaatccctcatt

SEQ ID NO: 173710 - DNA, 274 bp, Glycine max
ggaagaatcactcccttatccatttccacaccacaccatggacacaaccaacgctctctcttcagcctccattctacgctctcccaaccgccagtctctgacccgaagagcgaaccataatggaagagtaaattaccggaaaccgaataaccgtttctccgtgaaagcctccgccaaagagattgcctttgaccagcattcccgctctgctatgcaggccggcattgacaagctcgccgacgctgttgggctcactcttgggcacagagggagg

SEQ ID NO: 173711 - DNA, 275 bp, Glycine max
taatatctctaaactataactccattagcctctctcagtctcaaacatatatactttgactagctaggcatggttgagcttcggttaagcataagggctctgcaattgccaacactattgattctgtgtttcttcctcattttggggaattttcacaaagctgaggccagaattagacatcacaaatgggaggtaaagtatgagtttaggtcccctgattgctttaagaagctggttattacaatcaatggcaaaactccaggacccaccatcca

SEQ ID NO: 173712 - DNA, 147 bp, Glycine max
ataaataatataaagttctattattcatcagattattaatcctaaattactttagagtgatgtttattatgaaagtaaaaccacacgaattgtacgaaatataaaatggacgattaacgttataattttttaaaatacatattgatt

SEQ ID NO: 173713 - DNA, 275 bp, Glycine max
aaacagtcaccctgacctgagtaaaatttccatttccagaacctcaaatcaaactcttctattcctttctctcatcaatcaattcagttctctcccactcagataggaatgggaatatatctcagcagtccaaaaactgaaaagttttctgaagatggtgaaaatgactgtcttagatatggtttatcgtccatgcaagggtggcgtgcaacaatggaagatgctcatgctgcatatactgatctggatgagtccacttcattttttggtgtcta

SEQ ID NO: 173714 - DNA, 275 bp, Glycine max
gacaggttatttggcaagggagggttcttaattcccaattcactgatgaagagttgaggagtcaaggccgttgccctatgacaccggaagaggttggattgttgctagcagctatgggatttgacaatagcactcgtttatatcttgcctctcacaaggtctatggtggagaggcaaggatttcaactttgagggaattatttcctctgatggaagacaagaagagccttgcttcatctgaagagcgttctcagataaagggaaaagcttctcta

SEQ ID NO: 173715 - DNA, 283 bp, Glycine max
cccaattacccttcccaattttcaccaaaacctaatactcccacaccaatcttcgatcatggacgccgattcacaacctcaacaactcgaagagagaacagaggagcaagaactgaagtacctggaattcgtgcaattcgcgaccatacaggctctgatgcgctgcgccatcctctactcatacgccaaggagcgcgcgggtcctctgaagcccggtgtcgacaccgtggaggaggccgtgaagaccgtcgtggctccggtctacgataggttccaccttgtc

SEQ ID NO: 173716 - DNA, 281 bp, Glycine max
atgattttactgtgcctagggacagtcacagcactcttgcaattgggaacaagcttattatgtatggtggagactgtggtgatcagtatcagggtgatgttaatgttcttgacatggatacgatgagttggtcaaggttgagaattcaaggttcttccccaggagtcagggcaggccatgcggctgtgaatattggaaccaagatctacatcattggaggggtaggagataaacgttattataatgacatatgggtctttgatatctgcacttgttcgtgg

SEQ ID NO: 173717 - DNA, 281 bp, Glycine max
cgaagatttaacacctatggctcctaaagctgatagtttaaagaaggctgatccaaaggcacaagccttgaaaactgctaaggctgttaagtcaggtgctactttaaagaaaaagaccaagaagatccgaacatctgttaccttccatcgaccaaagaccttgaaaaaggataggaaccctaaatacccacgcattagtgctccacccaggaacaagcttgatcactatcagatattgaagtatcctctcacaactgagtctgcaatgaagaagattgaag

SEQ ID NO: 173718 - DNA, 277 bp, Glycine max
ctcattctcactctgttttacatacaatgtcgttctgaatcactgcatcttttcttactttcactctctgcagcttcaatttctgcaaaatggatccgtctgcggcattgctgtttaaccacctcaaaggtgcagacccgttcttcctgctagcgggtcctaatgtgattgaatcagaggagcacattctgcggatggctaagaacatcaagactattgcatctgaagttggaataccgttggttttcaagtcaagctttgacaaagctaaccgaac

SEQ ID NO: 173719 - DNA, 262 bp, Glycine max
attcttacaagttacatccattgagaaacatgaaggtctcccccttagcattttcaatcctttttttgtccttcaccatagaactcttcattggcattgcttcagcagcacaagaaccagtgcttgacacctcaggccagaagctgagaacaggtgtcaagtactacattctaccagtcttcagaggcagaggtggaggcctaacagtttcaagcagtggcaacaacacatgccccctctttgtggtgcaagagatgcttga

SEQ ID NO: 173720 - DNA, 272 bp, Glycine max
  unsure (1)..(272): unsure at all n locations
gtatcgagagcttgctaaccgagttgatgaggctcttggattcatggctgctgctgggctcacagtggaccatcccataatgagaacaactgaattctggacatctcatgagtgcttattgttgccttatgaacaatccctcaccaggttggattcaacttctggtctctactatgactgttcagcccatatgctctgggttggggaacgaaccaggcagcttgatggtgcccatgncgntttcnaagnggtgtcaaaacccngggggnaaa

SEQ ID NO: 173721 - DNA, 274 bp, Glycine max
cttcgatttcatcgtgttgatgatagggtcgctctttctgttcaaagctttcgattttactttctgtgtctccttcttctgcttcttttgattcccccaaatcttcagttttaaaaaccctaatctgctgccatgaggaagaagctcgatacccgtttccctgctgctcggataaagacgataatgcaggcagatgaggatgttggaaagatagcactggctgtgcctgttttagtttctaaagctctagaactatttttgcaagatctttgtg

SEQ ID NO: 173722 - DNA, 270 bp, Glycine max
cgagtagcaacaatggcgaagcgaggtcgcggaggatcggcgggaaacaagttccgcatgtcgctgggtctgccggtggcggcgacggtgaactgcgtcgacaacaccggcgcgaagaacctctacatcatatcagtgaaggggatcaagggtatgctgaaccggttgccgtcagcttgcgtcggagacatggtgatggccaccgtcaagaagggaaagcccgatctccgtaagaaggtgctgctcgccgtcatcgtccgccagcgcaaa

SEQ ID NO: 173723 - DNA, 270 bp, Glycine max
gctagatccctagtaagccgccatggtgaagtactcaagggagcctgacaatccaaccaggtcttgcaaggctagaggcgccgatccttagggttcattttaagaacactagggaaactgcctttgcaatcatgaagttgcccttggttaaagctacaaggtacttggaagatgttcttgcgcacaagcaggccattccgttcagacgtgtctgtcgtagtgttggaaggacagctcaagcaaagaatagacactctaatggccaaggaa

SEQ ID NO: 173724 - DNA, 275 bp, Glycine max
cagtgagttgcaaaaatgaaaacaattctttctgcagagaccatgaacatcccggacggcgtgagcgtcaaggttaatgccaaggtcatcgaagttgagggcccccgcggaaaattggtgcgagacttcaagcacttgaatctcgattttcagctcatcactgacgaaaacggtaaaaggaagctgaaggtggaggcctggttcggttctcggaaaacatccgccgccattcgcaccgccctgagccacgtggagaatctgatcaccggcgtcac

SEQ ID NO: 173725 - DNA, 291 bp, Glycine max
gaaactcagaatccatggcgacaccagcgacgacgaagcgaaaaccggtgttcgtgaaggtggatcagttaaaacctggcaccaacggccacacactgacggtgaaggtggtcagttccaagccggtgaagacggtgagcacccgcggcggtcgaccgacggtgctagccgcgcgcccgtcgcgcattgccgagtgcctcgtcggcgacgaaaccggaaccataatcttcaccgctcgcaacgaacaggtggaccatatgaatgctggcgcaactgtaattctgcgtaatg

SEQ ID NO: 173726 - DNA, 293 bp, Glycine max
ttaacaaccattgttcgttgtggcagtagcaaaacaacacctttttgaaacccgaggttcaagagagaaaagaaacattttccaaattaatggggcgttggatgaaaccagaggtttaccctctattggctgcaatgacctttgttaccggcatgtgtgtgttccaactaacaagaaatgtgctcgggaaccctgatgttaggattaacaaaactcggagaagcatggcagtgttggagaacagagaagagggagagaaatatgctgagcatggcctgaggaagttccttcgt

SEQ ID NO: 173727 - DNA, 291 bp, Glycine max
gcgaagagaatggctcccaagggtttaatctttttggctgtgttatgcttctcagcactgtcactaagtcgttgtcttgcggaggataatggacttgttatgaacttctacaaggaatcatgccctcaggctgaagacatcatcaaagaacaagtcaagcttctctacaagcgccacaagaacactgctttctcctggctcagaaacatcttccatgactgtgctgttcagagttgtgatgcttcactgttgctggactccacaagaaggagcttgtctgagaaggaaaca

SEQ ID NO: 173728 - DNA, 293 bp, Glycine max
ctgaaaagcaagtagctaaggaaaacaaaaacatcatcacagaaactcacaaaggaaaaaaccaacaaacaaacaaaatgtcttctccaagcaagcggcgagaaatggacttgatgaaactgatgatgagtgactacaaggtggagatgattaatgatggaatgcaagagttttatgtgcacttccatggacccaatgagagtccttatcatggaggtgtatggaaagtaagagttgagctgccagatgcttatccttataaatctccttccataggctttatcaataagatc

SEQ ID NO: 173729 - DNA, 291 bp, Glycine max
ctagtcctctctgtaatcccaagaaggacacggtcatgaccaccaaacgcaaacatgcaaattttctgcttcctttattcttcttcttcttcttctgttctcacactttgttctctcatgcagccgattccatcacaggagatacagtaatcagagacaacgatggtggtgatactttggtgtccaaagacctcacctttgaaatgggtttcttcagtttcgataactcttcaagatacgttgggatttggtaccacgagattccggttaaaacattcatatgggttgcaa

SEQ ID NO: 173730 - DNA, 289 bp, Glycine max
caattttctagggtttatacaattttcgatggcttcttcagatgttgagtaccgttgctttgtcggtgggctcgcttgggccactgacgaccaagctctcgagagagccttctctcagtacggcgaaatcgttgaaacgaagattatcaacgatcgtgagactggaagatccaggggttttggatttgtgaccttcgcctcggagcagtccatgaaagacgccatcgaagggatgaacggccaaaaccttgacggccgtaacatcactgttaacgaagctcagtcccgt

SEQ ID NO: 173731 - DNA, 293 bp, Glycine max
cagcgagcgagcgagcagtttcaaagagaggatttgggattgggaaggcgatggattgcgctgcgtctcttcctcttctctttcgattcatccctcattcataatcttccaatccaacaacctcagcctcacactcacacatacacacatctgaacgcgtatcgtccctcccatggcttcaaagcgcatcctcaaggagctcaaggacttgcagaaagacccaccaacttcttgcagcgctggtccagtagctgaggacatgttccattggcaagcaacgattatgggtcctg

SEQ ID NO: 173732 - DNA, 292 bp, Glycine max
gaagatttataatcgtatctctcgagtggagcatgtggatcatgcccgtcgctctgcacagcactgtgtggaaagcattactcagtgcacaaactcacacgtatgattatcttccatacttctactcgaggatttttgaatatgaaggaagccctagaaaagtgtggtggcagttctttggagacaatgttggagaaacagttgaaattggaaattttgatcctaaaatatctaccttctggattgaatctggtaagctgaaaggagttcttcttgaaagtgggagccctga

SEQ ID NO: 173733 - DNA, 292 bp, Glycine max
gcctagtacgggtctgtttgttggactgaacaagggtcacgtcgtcaccaagaaggaattggcttcaaggcccctcagatcgtaaggggaaaacaagcaagagggtgcactttgtgaggaacctcataagagaggtagccggttttgcaccctatgaaaagcgtataactgagttgctgaaggttgggaaggataagagggcactgaaggttgcaaagagaaagctcggaacacacaaacgcgcaaagaagaagcgtgaggaaatgtccagtgttctcaggaagatgagggc

SEQ ID NO: 173734 - DNA, 288 bp, Glycine max
tgaatctgatgcaggcggttcgctacgacgcctacgggggaggtcctgccggcctcaagcactttgaagttgccgttcccagtccaaaggcaaatgaggttttaatcaaactggaagcagttagcattaaccctattgattggaagattcagaagggtcttctccgtcctttatttctccccagaacctttccccacataccttgcactgatgtggctggagaaatagttgagatcggaactcaagtcaaagatttcaaagttggcgaccaagtccttgctaaactca

SEQ ID NO: 173735 - DNA, 279 bp, Glycine max
ggctcgagcagtcggttcttccttgctcaaatagcttcttgagatcccccatttcctccgaagcaaagccaaggctaagggtcctggtctctactctgacatcggcaagaaagctagggatctgctgttcaaggactaccacagtgaccagaagttcaccatcaccacctactcaccgactggagtggctattacagcatcaggaaccaggaaaagtgaactgtttctggctgatgtcaacacccagttgaagaacaaaaacatcactactgatatcaa

SEQ ID NO: 173736 - DNA, 289 bp, Glycine max
tctctcttgcattcggacgcatgtctcctctcattattttcaatgatgctgatctgagtcaagctttccgagcttgctctctttggcatcatgtctatcaatggagaaatttgtgtggcaggttctcgtgtgtttgtcctccttgctatctatgatgaatttgagaagaagttggtggagaaggcaaaatcttgggtcgttggggatccttttgatcccaaatcgctgcaagggcctcatgctgacaggaaccaattggagaaaatactttcatatattgagcacggaa

SEQ ID NO: 173737 - DNA, 289 bp, Glycine max
ctcactctgcactctctcctctctcatcctcggctctgtcgcttctatcgggctgtcaattccgctcgagcaatggcatctcatattgttggttatccacgcatggcacccaggagagatcttaagtttgctttggaatctttttgggatggaaagagtagtgctgatgatctgcatgcggttgctgctgaccttaggtcagccatctggaagcagatggctgatgctggaataaagtatattcctagcaacactttctcatactatgatcaagtactggacacaacag

SEQ ID NO: 173738 - DNA, 284 bp, Glycine max
agaagaagaagatggagatgtatcagatctggagcaggagaatagcgttgggagcgttcgcgtttgttctgcttttcctatcggcctcagcagacgacgtcgttgtgctctctgaagataacttcgagaaggaagttggtcaggacagaggagctctcgttgagttctatgctccttggtgtggacactgcaaaaagcttgctccagaatatgaaaagcttggtagcagcttcaagaaagccaaatctgttttaatcggcaaggttgactgtgatgagcacaag

SEQ ID NO: 173739 - DNA, 286 bp, Glycine max
ctcttcttctcttgcggctagggttttagcgcacttcttctagatttaaggaagatgggtaaggaaaaggttcacatcagtattgtggttattggccatgttgactctgggaagtccactaccactggccacctgatctacaagcttggaggcattgacaagcgtgttattgagagatttgagaaggaagctcctgatttgaccaaggggtctttcaagtatgcctgggtgcttgataagcttaaggctgagcgtgaaagaggaatcacaattgatattgccttgt

SEQ ID NO: 173740 - DNA, 287 bp, Glycine max
ctgaagagccatccgcaggtaagcaatggttaagcataataatgttatccccaatgggcacttccggaaacactggcaaaactatgtgaagacttggtttaatcaaccagcccgaaagaccagaagacggttggctcggcagaagaaggctgtcaagattttccccaggcctactgctggatctctcaggcctattgttcatggccagactctgaaatacaacatgaaagtcagagccgggagaggattttcactggaagaattgaaggctgcaggaattcccaaga

SEQ ID NO: 173741 - DNA, 292 bp, Glycine max
gcgtgaacaagcctcaggtaagccaaaaccatggttaagcataacaatgttatcccaaacggacacttccggaaagcactggcagaactatgtgaagacttggttcaatcagccagcacggaagacaaggagacgattggctcgtcagaagaaagctgtgaagatattccccagacctacggctggacctctcaggcccattgtacatggtcaaactttgaaatacaacatgaaagtgagaggtggaaggggattttctcttgaagaactcaaggtagcagggattcccaaa

SEQ ID NO: 173742 - DNA, 289 bp, Glycine max
ttcagagttgcatcgactgaaacccctaggaaaaaccccagtttctctctttacactagttcccgttccagttctaaccaagcactcacagtacttttgcttctctcgaagatgtctctacgagtgctgaaccctaacgccgaagtgctgaacaaatcggcggcacttcacatgaacatcaatgccgccaagggtttgcaagatgtcctcaaaaccaacctcggtcccaaaggaaccatcaaaatgctcgttggtggtgctggtgatatcaagcttaccaaagatggca

SEQ ID NO: 173743 - DNA, 288 bp, Glycine max
caaagacccagttcgcgttctcgtcactggagccgcagggcaaattggatatgctcttgtccccaatgattgctaggggagtgatgctgggtcctgaccagcccgtgatcctccacatgcttgacattcctccagcagcagagtcgttgaatggggttaaaatggaattggtggatgctgcattccctcttcttaaaggtgttgttgctacaaccgatgtggttgaggcatgcactggggtcaatattgcagtgatggttggtggattccctagaaaagaaggtatgg

SEQ ID NO: 173744 - DNA, 288 bp, Glycine max
gcgaatccagccacagcacagcactctttgcaacacaacaaaaaaagacaacacagagagaagcgtcttaataaacgctcttctctgaaaaacctgatttcttctcttcttctcttctctttcgtttcgatcttcgatctctgaaaatgagagagtgcatttcaatccacatcggtcaggccggtattcaggtcggaaacgcctgctgggagctctactgcctcgaacacggcattcagcctgatgggcagatgccaagtgataagactgttggtggaggtgatgatg

SEQ ID NO: 173745 - DNA, 281 bp, Glycine max
aatggagttcccacactcccttcaatggcaatacggcatcccttctcaccttctctttccctacaatttcatccctgaaaaccatgttcactggacagaaacccctgactctcacatattctcagctgacatccctggtgtgaagaaagaggagcttagagtggaggttgaggactcaaagtacctcataatcagaactcaagcagtggataaatccacagaacctgcgaggaagtttgagaggaagtttaggctgccagggatcgttgatcttgatggca

SEQ ID NO: 173746 - DNA, 285 bp, Glycine max
aaataaataacctaacctaacccttgcgacttgcgacttgcgacttgcgagtgagactgaggttgggtttggaaggcaagggcttgtgttgtcacaatccaagagagaagtaatggcgaacatagacatcgaagggatcttgaagcagcagcagccttatgatgggcgcgttccgaagacgaagatagtgtgtactttgggccctgcttctcgatccgtagaaatgaccgagaagcttctgagggcagggatgaacgttgctcgtttcaatttctctcatggcac

SEQ ID NO: 173747 - DNA, 284 bp, Glycine max
ggcttcgaaacgcatcctgaaggagctcaaggatttgcagaaggatcctcctacgtcatgcagcgcaggtcctgtggctgaagacatgtttcactggcaagccacaatcatgggacctgctgatagcccatatgcaggtggtgttttcttagtttcaattcattttcctcctgactatcccttcaagccaccaaaggttgcttttcggactaaggtgttccacccaaacatcaacagcaatggcagtatatgtcttgacattctcaaggaacaatggagcccag

SEQ ID NO: 173748 - DNA, 285 bp, Glycine max
gtttcgtgttgtagctagctcctcgaaaatgctggcacgcctcgccgcgagtcgcttcaacgagatccgtcagattttccgtcagccttctagggctttctcaaccgctctgaactaccaccttgacacaccggacaacaaccctaaacttccatgggaattcaccgaggccaatcaagcaaaggttaaggagattttgtctcactatccatccaactataagcaatctgctacaattcctcttttagatcttgcccagcagcagcatggaggttggctacctgt

SEQ ID NO: 173749 - DNA, 283 bp, Glycine max
tggatcatgtcctgaatttgatttaagtggtagcatttccaagatattggaagggcaagggaatttaagagaccttcttaaagatgttgataccccaacagtattggcatcaaccaagcgactagcatttaaggacagtttacaacagagaattctcaaagctgagaagattgatgtctcatttgaaactttcccatattatctaagtgatacaacaaagaacgttttgattgcttctacatttattcatttgaagtgcaaaggctttggaaaatatgcttca

SEQ ID NO: 173750 - DNA, 285 bp, Glycine max
tggcaagcatcaatgatggcaagtgattattggctggcatatgaaacatcagaagagctgctcagttgttcaatccttccatgtttatttccatctacgcgattattgcggtagtttcagttgttttaattgtgctaagatcctactctgtcacagtcctggggttaaagacagcacagattttcttctctcaaattctccacagcatcttgcatgcccccatgtctttctttgacaccacgccatctgggagaattctaagcagggcatccactgatcaaacca

SEQ ID NO: 173751 - DNA, 286 bp, Glycine max
gtatttccctacctctcccttcaagatgcagatcttcgtcaagaccctcaccggcaagaccaataacccttgaggtggaaagctctgacaccatcgacaacgtcaaggccaagatccaggacaaggaaggaatccccccggaccagcaacgtctcattttcgccggaaagcaacttgaggacggtcgtacccttgctgactacaacattcagaaggagagtactcttcacctcgtcctccgtctccgtggtggcatgcagatcttcgttaagacactcaccggcaa

SEQ ID NO: 173752 - DNA, 280 bp, Glycine max
gtggagcatgccaagacatgtgtcttgggtggcaagctctttgtatactacattgatgaaacccaatagttctggcattatgttcaacaatatatacgagctgagaggcctcatttctgatggccaatttttctctttggaatcacttactccaaatcagaagatgtctgtggattccttggtgaagaaagcatatgaaaattggcaccgagttgtagaatatgatggaaaagttttaaattctcatactaatttgaaaaaggaatcaagagctgtggcc

SEQ ID NO: 173753 - DNA, 270 bp, Glycine max
ctccgccccttttttgttgttccttcttctcgtacgtcgctttgtgatctctctctgcaaccatgtccgtcgagaaagagagagagacccaggtttacttggccaagcttgccgagcaggccgagagatacgaagaaatggttgagtgtatgaagaaagtagcaaaacttgatcttgatctgactgtggaagaaaggaaccttctctcagtgggatacaaaaatgtgattggtgcacgaagggcctcttggcgcataatgtcctcaattg

SEQ ID NO: 173754 - DNA, 283 bp, Glycine max
ttatcgagccgaatcggctcgagctttgctgttcaaggtcttgacaatactgatctagttgcactctcaggtgctcatacattaagcagagctcactgctctttcattcttgggcgattgtacaatttcagtggcacaggcaaacctgatccaactcttgacacaacttacttgcaacaattgcgccaaatatgcccgaatggtggacccaacaaccttgtgaattttgaccctgtcactcctgataaaattgacagggtctacttctccaatcttcaggtca

SEQ ID NO: 173755 - DNA, 281 bp, Glycine max
cttcacttctcttcttcaattcattctagttctggattccgactcgccgcattgactcggtccgggttggggtcgactcagttcggtttttcattctctcgcgaatctaatctataggaaaagctaagggcacatcacaatgaaggcattgattctggttggggggtttggaacaaggctgaggccactgacactcagttttcctaagcctcttgttgattttgctaacaaacctatgattctgcatcagatagaggcccttaaggccattggagttactg

SEQ ID NO: 173756 - DNA, 278 bp, Glycine max
gtcgaccgcaaaagagaagaaaacaaaaatgctgagaatcgctgctagcgcgaagacaattgttcgaacggggtcgttggaggcgccaccattggggattagggttctgcctcggctctaccacgagagggtggtggaccactacgataacccccgcaacgttggatccttcgacaagaacgaccccaccgtcggaacgggtcttgtcggagcacccgcgtgtggtgacgtcatgaaactccagattaaggttgatgacaaaacggggaagatcgtcg

SEQ ID NO: 173757 - DNA, 284 bp, Glycine max
tggagaaggcacgtgactggattctagggcatggtggtgctacttatataacgtcatgggggaagatgtggctttcagtacttggagtgtatgaatggtctggaaataatcccctgccccctgagatatggctccttccatacatgcttccatttcatccaggaaggatgtggtgtcactgccggatggtctatttgccgatgtcctacttatatggcaagaggtttgttggtccaatctcaccaacagtattatctttgagaaaagagctttatacagtacca

SEQ ID NO: 173758 - DNA, 280 bp, Glycine max
gcgaagaaagattcgaaacgaagaaagaaagcgttgtgaagaatggcggaagaaggacaaattgatccgtgtccacagcgtagaggagtggaaggaacatctcaagaagggagaagagtccaagaaattgattgtggtggattttactgcttcttggtgcggtccatgccgtttcattgccccaattcttgcagagtttgctaaaaagttgccgaatgtcaccttcctcaaggtggatgtggatgaattggagactgtttccaaggagtggggaattgag

SEQ ID NO: 173759 - DNA, 284 bp, Glycine max
cgggattgactgcctcaattgctctagaaaaggcaggacagatggaatctggaaaagtggtccctggtaactgcagcggcaggaggaacggggcaatttgctgttcagctagcaaaattagcaggaaatacagtggttgcaacttgtggaggtggggcaaaagccaagcttctgaaagatttgggagttaacagagtcatagactatcatagtgaagatgtaaaaactgttctaagggaagagttccccaaaggtattgacatcatctatgagtctgttggcgg

SEQ ID NO: 173760 - DNA, 283 bp, Glycine max
aaaaaatgtcaatggacatgatggcaaccgaacgtgtttgttatgttcactgcaacttctgcaaacaccactctagcggttagtgttccatgcagcagtttgctcaccatagttacggttagatgtggacattgtgccaatttgctgacagttaacatgggagcatcacttcaaacttttccttctcaagacactactcagcgattttctaccgttggtaagttacagagacagcatctcagtgttcaagaagcatgcagcaaggaactaggatcatcatcaa

SEQ ID NO: 173761 - DNA, 279 bp, Glycine max
gtcctcacacgagacacgcacacgtataaatagggcgaaaactcaaaagagttaaatcactcacacactctttcttaagttctcagaaaccttaaaaacaacaacgtaggagtgttcggaaaagatggctaagcaggaagtggtggaagggttcaagttcgagcagaggcacgggaaagaacgcgtgagagtggcgcgcgtgtggaagacgaggcaggggcagcacttcattgtggagtggcgcgtggggatcactctcttttcggattgcgtcaactc

SEQ ID NO: 173762 - DNA, 254 bp, Glycine max
cacaggatgacttaataactgaagacatcttattgcttgattgccaaagagagatttatgtttgggctggcttacattcggctatcaaatcaaaacaagaagttcttcatcttggcctgaaatttctggaaatggatgtccttgttgaaggcctatcaatgaacatccctatttatattgtaacggaaggtcatgagccaccatttttcactcgtttcttttcatgggatcactcaaatgaaaatattgttggt

SEQ ID NO: 173763 - DNA, 281 bp, Glycine max
tgcagaccgagctagctagctagcaagcaagcacagagatggaggcaaagcgaggccatgccctcatatgcttggcacgtgtttcactcttcctctgcgctctaaccctatccgctgctcacggaagcaccacggttcaagacatcgcgagaaagttgaaactcggggacaacgagcttctgcgcacggagaagaagttcaaggttttcatggagaattacgggaggagctactccacagaggaggagtatttgcgccgtttggggattttcgcccagaac

SEQ ID NO: 173764 - DNA, 276 bp, Glycine max
acaaaacccatcaaagtctttctccctcagtgatcatatattcattcagttctatacaaaatcctcaaaaactcttcctctctgccatgaccatggaatacagaaccttagaactcaacatcatatccgcaaaggacatcaagaatgttaatctcttctccaagatggacgtatacgccgccgtttcgctctccggtgaccctctccaccctcagggcgccaccacccacgtccacaaagacgccggcagcaaccccacgtggaactaccccgtga

SEQ ID NO: 173765 - DNA, 279 bp, Glycine max
ccaattttctagggttttattcattttccgatggcttctgcagatgttgagtaccgttgctttgtccggtgggctcgcttgggccactgacgaccatgccctcgagagagccttctctcagtacggcgaaatcgttgaaacgaagattatcaacgatcgtgagactggcagatccaggggttttggatttgtgaccttcgcctcggagcagtccatgaaagatgcgatcggagcgatgaatggacagaacttggacggccgtaacatcactgtcaatga

SEQ ID NO: 173766 - DNA, 278 bp, Glycine max
taatttttcattgtttcatttaatctacaatggctgcttcaacaatggctctctcttcatccaccattggctggccaagctatcaagcttgccccctccacccctcagcttggtgttggaagggttagcatgaggaaaacagcctccaagactgtttcttctggaagcccatggtacggcccagaccgtgtcaagtacttgggcccattctctggtgagcccccatcctacctcactggtgaattcccaggtgactatggttgggacactgctgggct

SEQ ID NO: 173767 - DNA, 280 bp, Glycine max
ccaaattttcctcccaaaatgtcaggccgtggaaaaggtgggaagggtttgggaaaagcgaggagttaagaggcacagaaaggttcttcgtgacaacattcaaggaatcacgaaacctgcgattcgtaggttagcgagaagaggtggcgtgaagaggatcagtggtttgatttacgaggaaaccagaggagttctgaagatattcttggagaacgtgattcgcgatgctgtaacctacactgagcacgctaggaggaaaactgttactgctatggatgtc

SEQ ID NO: 173768 - DNA, 280 bp, Glycine max
atacttttctttcttttttttcccctctttaaaagtctggcttttggtcctttgattccccactttcatttgtcacatatcatattatgaagctcacaggtttcctgcaagcggtgactcttgctttggtgttagccaccgtctctgcatcagatcctgatcctcttcaagacctctgtgtcgcagaccttgcttcagcggttaaagtgaatggattcacatgcaaagatgctgccaaggtaaatgcgagtgatttcttctcagacatactagccaaacc

SEQ ID NO: 173769 - DNA, 278 bp, Glycine max
gaagcagcagagggaggagcggcattaaaaatgcagatcttcgtgaaaacctaacggggaagaccataaccctcgaggtcgagagcagcgacaccattgacaatgtcaaggctaagattcaagacaaggaaggcatccctccggatcagcagcgtttgattttcgccggaaagcaacttgaagatggaaggaccttggccgattacaacatccagaaggaatcaacccttcaccttgtcctcaggcttcgtggtggcatcatcgagccttccctcatg

SEQ ID NO: 173770 - DNA, 277 bp, Glycine max
ctcgcatcttgttcctccgctcaacaactataataacatctttctctctccgaacagatcaaactatggccacctcaagcgccaaatcagtccatgatttcaccgttaaagatgccaagggaaatgatattaatcttggtgactacaaaggaaaggtccttatcattgtcaatgttgcctcacaatgtggcttgactaattcaaattacactgagctcagtcagttgtatgagaaatacaaacagaaaggtctggaaattctggcatttccatgcaa

SEQ ID NO: 173771 - DNA, 305 bp, Glycine max
actcgtacgtcagctcgagactcctgtcaacgcacactctctgctcctagggtttctccttcgagtgagggaaatggctcccaaaccgcctagtacgggtctgtttgttggactgaacaagggtcacgtcgtcaccaagaaggaattgcccccacgcccctcagatcgtaaggggaaaacaagcaagagggtgcactttgtgaggaacctcataagagaggttgctggttttgcaccctatgaaaagcgtataactgagttgctgaaggttgggaaggataagagggcactgaaggttgcaaaga

SEQ ID NO: 173772 - DNA, 283 bp, Glycine max
taacctttctcattccccatctcctcaccttattcagccactgctaatttctagggttccgaaatggacgctggcggaaagatcaagaagggcgccggaggaagaaagggcggcggccctaagaagaagccggtttcaaggtccgtcaaggccggtctccaattccccgtcggaagaattggccgttatttgaagaaaggaaggtacgcccagcgtgtcggtaccggatgctccgtttacttggccgcagttctcgagtacctagctgctgaggtgcttgagt

SEQ ID NO: 173773 - DNA, 288 bp, Glycine max
atctcatatcctcaatcaccccctcgcactcgctcttcccttcctctggtggcgacaatgtcgactcctgctaggaagaggctgatgagagacttcaagaggctgcaacaagacccgcctgcagggatcagtggtgccccccaggataacaacataatgctgtggaatgctgtcatatttggtcctgatgatactccatgggatggaggcacgttcaagttgacactccaatttactgaggactatccaaataaaccaccgactgtacgatttgtgtctcgcatgttt

SEQ ID NO: 173774 - DNA, 289 bp, Glycine max
  unsure (1)..(289): unsure at all n locations
tattgaacaactcttcacacaacaaaacttttttctggcattgtagcatcatgactggcagagaaatcctccatatgatgaaggtgaaagcagggtttggaacaccagacacagggaatggaaaaggcaaaatatcaaaacacattacacatggctttcacttgatgaagggcaaatcagcgcatcctatggaagattatttagtttcagaatttaagcaagaaaaggacagagaattaggcttgtctgcaatatntgatcggcacttagggcatgatgtagcaagcta

SEQ ID NO: 173775 - DNA, 285 bp, Glycine max
gtcgaagagaggacgcggtggttcggcggggaacaagttccggatgtcgctgggtctgccggtggcggcgacggtgaactgcgccgacaatacgggggcgaagaacctctacatcatatcggtgaaagggatcaaagggcgtttgaaccgtctcccctcggcttgcgttggcgacatggtgatggccaccgtgaagaaggggaaacccgatctgaggaagaaggttttgccagctgtcattgttcgccagcgcaagcgatggcgccgaaagacggcgtctacatg

SEQ ID NO: 173776 - DNA, 287 bp, Glycine max
caagaatttccattgcatgcaaagcaaatacgcattatattactagttttaatttgttttgtcgtttgcttctttctttgattaatgatgactagctttaaggttgcatgtgtggttgcgatgatgtgcatggttgtggccatgagtgttacacccatggcacaggccgcaatcacgtgcgggcaggtcgccggcgacgtgtctccgtgcctcagttatcttcgaagcggcggaaaaccgtcggacgcctgctgcaacggagtgaagtcgctcagcggcgcggcgaa

SEQ ID NO: 173777 - DNA, 276 bp, Glycine max
ccaggagaggtttgatcctatagttgattcaacatctggccgtgatttcattccaaccatgttgtttggaaggaacattcgtggtcaggattttagtggaatatactgtgcagttcttactgtcaatggggatatcgtgtctgctggagtatttcgtgtctttgggtcagaaatagctgagcttccattggttgcgacaactgctgatcatcaaggacagggttattttcagtgcctgttttcttgtattgagacgctacttggatctttaaatgt

SEQ ID NO: 173778 - DNA, 289 bp, Glycine max
tgttgctattatcatccgcagctgcttttattcgcaccgcaaacaatgagccatggccgtcggaaagaacaagcgcatctccaaggggaagaagggtggcaagaagaaggcagctgatccctttgccaagaaggattggtatgacattaaggctccttctgtttttcaagtgaaaaatgttggcaaaaccctcgtctctcgtactcagggtaccaagattgcttctgaaggactcaagcatagagtgtttgaggtctccttggctgatcttcaaggggatgaggatcat

SEQ ID NO: 173779 - DNA, 291 bp, Glycine max
tgagtttgttgatcgagataactagaaacagtgtgatgaaaatgaaggtccttgttttcttcgttgctacaattttggtagcatggcaatgccatgcgtacgatatgttccctctccgaatgaacactggctatggtgcccgtactccggaggtgaaatgcgcaagttggaggcttgctgtggaagcacacaacatctttggctttgagaccattcctgaagagtgcgttgaagcaacaaaggaatacatccatggcgaacaatatagatcagactccaaaacagttaacc

SEQ ID NO: 173780 - DNA, 283 bp, Glycine max
attccctcccccaccctcaccaccaacgccaaacaagccctaaatctctcttctctttcttcttcttcctttaaccatgagatagatcttgcacgttcagggaggccaatgcggtaaccaaatcggttccaagttctgggaggtgatctgcgacgagcacggcatcgatcccaccggaaagtacaacgaggaaggcaacagcagcatccaactcgaaaggatcaatgtgtattacaacgaggcctctggcggaaggtacgttccccgtgccgtgcttatggat

SEQ ID NO: 173781 - DNA, 283 bp, Glycine max
aagaaactgaggacttagctagtagttagagatgcctgagttttgcgtgacaggtggtactgggttcatcgcatcttacctggtcaaggccttactagagaagggtcacacagtgaggaccaccgtgagaaacccaggggatgtggagaaggttggttttctgactgaactaagtggagccaaagagagactgaagattttgaaagcagatctattagtggaaggaagctttgatgaggcagtgagaggagttgatggtgtctttcatatggcgtccctgtgc

SEQ ID NO: 173782 - DNA, 285 bp, Glycine max
agcagtactctttgccaccaggtgacatgggatgggcccttcattggcaacatgtggtcctttctcagtgcttcaagtccaaggaccctgattccttcatctcctcctttgtctccagatttggaagaactggaatgtacaagaccatgatgtttggaaatccaagtataattgtgacaacacctgaaatatgcaaaagggtgcttacagatgacgataaattcacacctggttggcctcaatctactatagagctcatggaaagaggtcattatttcaatgtcc

SEQ ID NO: 173783 - DNA, 286 bp, Glycine max
atcataccttccacttgcacatatatttgatagggtcattgaggagacattcatatggcatggtgcttcaataggtttctggcgtggggatgtcaaattgttaattgaagatgttggcgaactaaaaccaactattttctgtgctgttccccgtgtgcttgatagagtgtactcaggtttgacgcagaagatttcttctgggggcttcttgaagaagacattattcaactttgcttattcatataagcttaataacatgaagaaagggcttagacatggagaagca

SEQ ID NO: 173784 - DNA, 289 bp, Glycine max
tagcaatgtcagggctgaaggaattgctgaagaaagggttaggtttaggcgacatggcgttcaacgccggcggcggagcatcacctggttccccggccacatggccgccgccacacgcgccatccgccaccgcctcaaactcgccgacctcgtcatcgaagtccgcgacgctcgcattcccttctcctccgccaacgccgatctccagccccacctctccgccaaacgacgcgtcgtcgcactcaataaaaaagacctcgccaaccctaacatcatgcataaatggacg

SEQ ID NO: 173785 - DNA, 289 bp, Glycine max
tccatttccatttcctctctctcagtttccaagaatcttaagctatgggaaagtcttacccaaccgtgagcgctgattaccagaaggccgttgagaaggcgaagaagaagctcagaggcttcatcgctgagaagagatgcgctcctctaatgctccgtttggcatggcactctgctggaacttacgacgtgagctcgaagaccggtggtcccttcggaaccataaagcacccctccgaactcgctcacggcgctaacaacggtcttgacatcgctgttaggcttttgga

SEQ ID NO: 173786 - DNA, 293 bp, Glycine max
ggcttattcatctcataaactcttcttccttctgtttgcaattttcttctcacacgctagtgctgtaaactcttccgatgcttccacaacaattcacaccaatctctcttccataaaatctttctgcacaaccacagctacaccagaagtttgtttcaactcattgaagctatccatctcaataaacataagtccaaacataatcaactacctctgtcagtccctccaagtagcaatatctgaaaccacaaagctctcaaatctcttccacaacgttggacactcaaaaaaca

SEQ ID NO: 173787 - DNA, 285 bp, Glycine max
tgaccctcccttcccaagttccaagtcgcaaacaaagtaacactagaactcacaaaggacagaagaaacgcgaatgccaggagaactccaattaccacccgggttcagattccaccccactgacgatgagcttgtgaatcactacttgtgtagaaagtgtgctgcacaaaccattgctgttcccatcatcaaagaaatcgatttgtacaagtttgatccatggcagcttccagagatggctctttacggtgagaaagagtggtactttttctctcctcgagaccg

SEQ ID NO: 173788 - DNA, 282 bp, Glycine max
cgaggaagagtgcgaaagaaagatcgttctcgatgacagaggggaacggtgacaaaactctgcgaaagatcgcagacgcattcaatgaccttgcaaacgttttcaccgattctcagagcgcagaagcagaggtcaaggttgctcccttctctcatgcctgctctctcgtctcccctctcttcggttgcttgggcgtcgccttcaagttcgccgaaatggattacgtcgccaaggttcatgatctggcagaggcgtccaagtctattcagaatctgcagtctc

SEQ ID NO: 173789 - DNA, 276 bp, Glycine max
tccggatttggcggtggtgttggaggtggggcagggaatggtggtggtctaggatgtggaggatgctttggcggtggtggtggaagtggtgttggagttggggtttgacctggtgctggtcatggtgttggtgttggtggtggtggtggtgttggtggaagaggtggaggtaaacattaagcatgcatgcatgaggttatggagctttagctaaaccatatttggatgttcctcaaaaagagtcctttatgtgtgatgactatcatatagtgcata

SEQ ID NO: 173790 - DNA, 283 bp, Glycine max
ctaatccctctttcttcctcttcctcagtagtgcgattttcgattctcttctctgcaactatgcctaaccctaaggtcttcttcgacatgaccatcggcggtcaacctgccggccgcatcgtgatggagctctatgccgacgtgactcccagcaccgccgagaacttccgcgcgctctgcaccggcgagaagggcgccgggcggagcggcaagcccctccactacaaaggctcgtccttccaccgcgtgatcgcgaacttcatgtgccagggcggcgacttca

SEQ ID NO: 173791 - DNA, 290 bp, Glycine max
caaccggtgttacggactcacaagcctttatccgtggagttgggacctggaatactggggaatattttcgatggaattcagaggcctttgaaaactattgctaaacgatctggtgatgtctatattcctcgtggtgtctctgttccagcactcgacaaagatacactttgggaatttcaacctaagaaaattggtgaaggcgaccttttaaccggtggagatttatatgctactgtttttgagaacagtctaatgcaacaccatattgcacttcctcctgataacatggg

SEQ ID NO: 173792 - DNA, 279 bp, Glycine max
tggcagatgaggtggttctgctagatttctggccaagtccatttgggatgagggtcaggattgcacttgctgaaaagggtatcaaatatgagtccaaagaagaggacttgcagaacaagagccctttgctcctcaaaatgaacccggttcacaagaaaatcccggttctcatccacaatggcaaacccatttgtgaatctctcgttgctgttcagtacattgaggaggtctggaatgacagaaatcccttgttgccttctgacccttaccagagagctc

SEQ ID NO: 173793 - DNA, 272 bp, Glycine max
cgtttttctgcaattctcttcgttttcaagcgattttcttcgtttttctacgaattcacgccgtaaaactatcctgattgtgtgattgcagtatccgtcatgaaaggaggaaagtccaagaccgaatctaagagagccgatcccaaacttgctgtgaataagaagggagccgccaccaaggctaggaaacccgccggcaaaggggaaggcagcgacagaccctaacaagctcaagaggcctccaagtgctttctacgttatcatggaggagt

SEQ ID NO: 173794 - DNA, 276 bp, Glycine max
caaacaatggcagctactcaggaagatgtgaagcttttgggtattgtgggaagcccatttgtgtgcagggtccagattgcccttaagttgaagggagttgaatacaaatttttggaagaaaatttgggcaacaagagtgatttgcttctcaaatacaaccctgttcacaagaaggttccagtgtttgttcacaatgagcagcccatagcagagtctcttgtgattgttgaatacattgatgagacatggaagaacaaccccatcttaccttctgat

SEQ ID NO: 173795 - DNA, 279 bp, Glycine max
taacaacagcacaaagcgggttactgtctgttcaagctaccatctctctctctctttcttagtgcctccttgccagaagttaaaatggcccaagaaactttcctattcacatctgaatcagtgaacgaggggcaccctgacaagctctgtgaccagatctccgatgctgtgctcgatgcatgcttggagcaggaccctgacagcaaggttgcctgtgaaacctgcaccaagaccaacatggtgatggttttcggagagatcacaaccaaggccaacgtg

SEQ ID NO: 173796 - DNA, 278 bp, Glycine max
gttgttttaaatacaatggtaacagccttctcagaatattgtgaaaacaaatttgtcattgaaccagttgaagttatttcttctgatggcaagtcaaacatataccctgatttatctgtctacaatatggaagtttctctatcttacattactggattgattggggtatcattggaagcagaagaggtcactaagttcttaaatcggatgcagttgcatgccaaactgtctacatctgataataagcagtgtaactttgtggtatctgtacctccttc

SEQ ID NO: 173797 - DNA, 248 bp, Glycine max
aagattttcttctctcccttctctctctcaccattctcttcttcttcttcttcttagattccttctctctctctctctctcccctccgccatggctgaggataaggagatgtctacctctgtcatcgatgggaatgattccctaactggacacatcatatctacaactattggaggcataaatgcggaaccaaacagactattagttacatggcagaacgggttgtacgaactggatcatttggaatg

SEQ ID NO: 173798 - DNA, 283 bp, Glycine max
tgcagaagcagcaatgaagaagaagatgatggcaagcacggccatctccctcgtcttcgccgcgctcttcctcttctcctccgtccactctttctacctccctggtgtcgctcctcgcgatttccaaattggtgaccccctctttgtcaaagtgaacaagttatcatctaccaagactcaacttccatatgactactacttcttgaagtattgcaaacccaaaacgatattgaacaatgcagaaaatttgggagaggttcttagaggtgatcgtattgagaat

SEQ ID NO: 173799 - DNA, 284 bp, Glycine max
  unsure (1)..(284): unsure at all n locations
ctctaacatcagagaaatttcagctaacatagcagcaagtgtagctagcaatgcatatgagctattcttggttactcgnctccctcgtcctcagaatcttgtcaagtatgctgagagctgcatgtattctcctgtctacagaaactataggtgaattatggggcaagtcacttgactttggctgtaataaacacatgtcttggtggcatgtgtgagttgtctatgtaacttatgcataagtgagtggttttatgctatttattatgaaatcaccagaactgcag

SEQ ID NO: 173800 - DNA, 282 bp, Glycine max
gaattgttgtaactttttgattcctaaattctctaaaattcgaaattctaatttcgttaggggaaagagattgtttgtgtgtgagtgagtatggctggaaaaggcgagggtcctgctatcggaatcgatttgggaacgacgtactcttgcgtcggcgtgtggcaacacgatcgtgttgaaatcatagccaacgatcagggtaacagaactaccccatcctacgtggctttcaccgacacagaacggttgatcggcgatgcggcgaagaaccaggtcgctatg

SEQ ID NO: 173801 - DNA, 276 bp, Glycine max
ccattacgttatttatttgcctctgtctctcattccctcactcactcattcactctacaattgtgatcttcacaaatcaacaacgtctctctctgttactctgaaaattgacttcaagttagtataactggctgtcaagttgtaatggcattggtctctggaagaagttctgcactgaacccaaatgcacctctattcatacctgctgctcttcggcaggtggaggatttttcacctcaatggtgggatcttgtgaaatcttcaacaatggttcgt

SEQ ID NO: 173802 - DNA, 276 bp, Glycine max
gaaaagaactagctagctggagtctgagaactctagcatgtactagtactactcctacattcctccatcttcctttgtactattttttttttaaccataaaagcaagagcacaaagatggtgagagctccttgttgtgaaaagatgggtttgaagaagggtccttgggctcccgaggaagatcaaatcctcacatcttacattgacaaacatggtcatggcaattggcgtgccctcccaaagcaagcaggcttgttaaggtgtgggaaaagctgta

SEQ ID NO: 173803 - DNA, 275 bp, Glycine max
gagaacaagaaaaagaggcgcaagatgagtggtagggtttctgggaaggtgaagtggttcaatgatcagaaggggtttggattcataagccctgacgatggcagcgacgatctcttcgttcaccaatctcagatcaaatctgacggtttccgaagcctcgccgaaggagagtccgttgagttcgccattgaatctgaatctgacggacgcgcgaaggctgttgatgtcactggccccgacggcgccacgtccagggaaccagacgaggcggtgat

SEQ ID NO: 173804 - DNA, 278 bp, Glycine max
  unsure (1)..(278): unsure at all n locations
caanaataagacattgtttggtttggttacttgctcgaatttcctcgaatcgcttaatttgtatttgattagttaaaccgcaacgcggaatctcttttctcgaactggctaactctcaggcaagtggttcggacgctgattccagcaacaagcggctggtgctcgcactgtatgacgccctaaactccggcgactccgacgccgtcgtcaagatcgtcgccgccgacctcgagtggtggttccatggtccngcctcacaccagtttttgatgcgcatg

SEQ ID NO: 173805 - DNA, 279 bp, Glycine max
tgaaaattcaagaaaacctggaagatttgttgatttagtttatcacgaaaatgcccgtgttcttctccatgatgagaacatatatcgtattgaatgttctcctgcacctacccaattgtcatctattcaactgatggactatggatatgataagcctgaattgactgctgtgtcaatggaccctaatttttcagcctatctgcacaatgacttcctatctgttgtccctgacaaaatggagaagtctggaatttacctgaagaggaataagcgcaagta

SEQ ID NO: 173806 - DNA, 283 bp, Glycine max
gttccatataaaagcaagactagaacacttgcaagttcgaaagagccatttttatttatcagtcaccgaaacaactatggatacaatcaagtccttcaagggctacggcaaagttgacgagttggagcagcaagcctatcagaagaagacacgtaagcgcctcataataatcacagtctcttcaatcgttctaattgcggtgatcatcgccgctatcgcaggggttgtcatacacaagcgcaacacctcatcatctccctcatccgactcgcccacgcaaact

SEQ ID NO: 173807 - DNA, 282 bp, Glycine max
aaacaaacatcattaattctttctttgctgtctttaaggtcaacaacagattataacacatacctcacaatggtttttccaaaaccctcttctgagtctgacctctttctttattccaactttgcttctcgctatgccagggactctcttcccaggttcagcatgccagaaaactccatgccaaaggaggctgcgtaccagaacatacacgatgagttgcagcttgatgcaattccaaagctgaacttggcttactttgtgaccacttccatggaagaagag

SEQ ID NO: 173808 - DNA, 278 bp, Glycine max
  unsure (1)..(278): unsure at all n locations
ttttgatgcaacgctgtcactgagaaaggatctctatctacgaaggatcggaataaaacccttctctctgtgattaagagaatggcttcagatcggaaacttcacacttttgaggaggtggcaaagcacaaccagaccaaggattgctggctcatcatttctggcaaggtgtatgatgtcacgccnttcatggaggatcatcccggaggtgatgaggttttgttatctgcaacagggaaagatgcaaccaatgactttgaagatgtggggcacagtga

SEQ ID NO: 173809 - DNA, 285 bp, Glycine max
tgcactcaccactgccacacttcaatcgcactaatggctgtcaccttctcagatctacacaccgaatagggcatcatatccctcgatcaattcctttctgggaaatactatatttctggggatcagttgacaaatgatgatattaaagtgtatgcagctgttgttgataagccaggggacacttttcctaatgctgccaagtggtacgatgctgtctcttctcaacttgctccaagctttcctggccacgctcaaggggtaagattcagtggcgctgctgctcca

SEQ ID NO: 173810 - DNA, 274 bp, Glycine max
cgtgaacggcacttgcacatgggttagtcgatcctaagggacagttttatcaggttctactgtttgagcttgatgctattcgaaaggcatgtgcatccctggaacccaattatcagcctcctgtgacttttgtggtggttcaaaagcgtcaccacacaaggctctttgctagcaaccatcatgataagagttctgttgacaagagtggcaacatattgcctggcactgttgttgactccagaatctgccatcccaccgaatttgacttttatct

SEQ ID NO: 173811 - DNA, 273 bp, Glycine max
ctctgcctgtaagagtgaaaaaaccttctcttttccttctctcaagtctcaagagatttcatcatggctccaaagaaggacaaggctccaccaccttcctccaagcccgccaaatctggcggtggcaagcagaagaagaagaagtggagcaagggaaagcaaaaggagaaggtgaataacatggtgctgtttgatcagggccctatgataagctcctttctgaagctcccaaattcaagctcatcactccttccattctttctgatcgtttga

SEQ ID NO: 173812 - DNA, 275 bp, Glycine max
cagagacagggagacaagacagagtagtacagattactaccaatggctaccaaggtttacattgtttattattctacgtatggacatgttgagaagctagctagagagatagaaaaaggggctgcttctgtggagggagtagaagcaaaactgtggcaggtacctgaaacattgcctgaagaagtccttgctaagttgggagcacctccaaagagtgatgttccaattattactcccaatgagcttcctgaggctgatggctttttgtttggttt

SEQ ID NO: 173813 - DNA, 268 bp, Glycine max
  unsure (1)..(268): unsure at all n locations
caacaaaatgctttcatgtgctggagctgataggcttcagactggaatgagaggtgcatttggaaatccacagggaacatgtgctagagtcgccattggtcaggttcttctttctgtccgctgcaaggacagcaacagtcatcatgcacaggaggctcttcgtcgtgctaagtttaagttccctggtcgtcagaagatcatagttangcggaaatggggtttcaccaagtttaggcgtgctgattatctcaagtacaagtcagagagc

SEQ ID NO: 173814 - DNA, 276 bp, Glycine max
tatcgagccgaatcggctcgagacccttcgaagtcgtcgtttatacctcctcgttcgcatactcaccctttccctgtctcacagaaagatgaaggtggtcgctgcgtatctgctcgccgtcctcggtggcaacaacaccccctccgccgatgacatcaaggaaatcctcggctccgttggaatagaggcagatgaagataggattgaatcgttcttgtctgaagttaagggtaaggatatagttgagctaattgctgccggtaaggaaaagctggc

SEQ ID NO: 173815 - DNA, 276 bp, Glycine max
ctcatcaatctcgtttgttctcactaactattacttcatcatgtcgtcgagcacagttggtcaagtcatcaaatgcaaagctgcggtttcatgggaggcagggaagccacttgtgattgaagaagtagaggtggcaccaccacaagctggtgaagtgcgtttgaagatcctctacacctctctttgccacactgatgtttacttctgggaagccaagggccaaactccattgtttcctcgtatatttggtcatgaagctggagggattgtggagag

SEQ ID NO: 173816 - DNA, 274 bp, Glycine max
tgattgttgtgactcgttcttcttcgtcgttatcttcttcttttgttgtttgtgtgtttgttttttctctcacctgaaaatgtcttgctgcggtggtaactgtggttgcggaagcgcctgcaagtgcggcaacggctgcggaggctgcaagatgtacccagacttgagctacaccgagtcaaccaccaccgagaccttggtcatgggagtggcaccagttaaggctcaattcgagagtgctgaaatgggtgttcccgctgagaacgatggctgc

SEQ ID NO: 173817 - DNA, 279 bp, Glycine max
tgtttgttgttgtaactcgttcttcttcttttgttgttctgtgtttgtgtttgttttttctctcacctgaaaatgtcttgctgcggtggtaactgtggttgcggaagctcctgcaagtgcggcaacggctgcggaggctgcaagatgtacccagacttgagctacactgagtcaaccaccaccgagaccttggtcatgggagtggcacctgttaaggctcaatttgagggtgctgaaatgggtgtgcccgctgagaacgatggctgcaaatgtggacca

SEQ ID NO: 173818 - DNA, 273 bp, Glycine max
caaattcattttaatcctaattttgcacttcttgatcattcgatttttctcctcaagatgcagatattcgtaaaaactttgaccggcaagaccatcacccttgaggtggaatcctccgacaccattgacaacgtaaaagctaagattcaagaaaggaagggatccacctgaccagcagagattatctttgcgggtaaacacttgaggatggtcgcaccttgccgattacacatcccaaaggatcaaccctcatctcgtgcttcgcatcagggg

SEQ ID NO: 173819 - DNA, 280 bp, Glycine max
gattatcctaagtctttgggaatagtgctgcaatggcttcaagtcaggaggaggtgacccttttgggagctactggaagcccatttgtgtgcagggttcatattgccctcaagttgaagggagttcaatacaaatatgtcgaagaaaatttgaggaacaagagtgaactgcttctcaaatccaacccagttcacaagaaggttccagtgtttattcacaatgagaagcccatagcagagtctcttgtgattgttgaatacattgatgagacatggaagaa

SEQ ID NO: 173820 - DNA, 296 bp, Glycine max
tgtttcgaatagattatcctaagtctttgggaatagtgctgcaatggcttcaagtcaggaggaggtgacccttttgggagctactggaagcccatttgtgtgcagggttcatattgccctcaagttgaagggagttcaatacaaatatgtcgaagaaaatttgaggaacaagagtgaactgcttctcaaatccaacccagttcacaagaaggttccagtgtttattcacaatgagaagcccatagcagagtctcttgtgattgttgaatacattgatgagacatggaagaacaacc

SEQ ID NO: 173821 - DNA, 144 bp, Glycine max
attttgtctaggttttgctactgaatccctgatccacccaatagaaaacagcattattcctgagattcctgcaactgttactgctgttaagaaccctacttctaagattgtctatgatgagcacaaccatgaaagatttccccc

SEQ ID NO: 173822 - DNA, 268 bp, Glycine max
atttctaactaattattgtgcttattattattgttgagaaagaaaagaatggcaaagttaataaaattctttgagttgaacacaggggccaagattccttctgttgggttaggcacttggcaagctgagcctggtgttgtagccaaagctgtcaccacagccattctggttggatacaggcatattgattgtgctcaagcgtataacaatcaagcagagattggttctgctcttaagaagctttttgatgatggtgtggtgaaacgtg

SEQ ID NO: 173823 - DNA, 281 bp, Glycine max
tatggctgtcggaaagaataagaggatttccaagggaaagaagggtggcaagaagaaagccgctgatccctttgccaagaaagactggtacgatatcaaggccccttccctcttccaggtcaagaatattggcaaaaccctcgtctctcgtacctccggaaccaagattgcatccgaaggactcaaacatcgggtttttgaggtctcattggctgatctccaaggggatgaagaccactccttcaagaagattcgtttgagaactgaggacgttcaaggga

SEQ ID NO: 173824 - DNA, 285 bp, Glycine max
ttcatttcttacctgtcaatatctcaaacaaggatggtcctattgtgaagtttgaggatgatgtgtacttgccaacggatgagcctcatgggtcaattcaagctagcttgagccgcctttggtcaaagctgtagaaactgcagaagctatggtgctcatcccttctgtggtggattgccagtgcagcctaaaataccgaacctggccttagagatagtgctttccattaatgtgtcttgtaattctggtttttgtcatcgttgtatttgtttcgtggagaactat

SEQ ID NO: 173825 - DNA, 141 bp, Glycine max
tgtgattgttgtgactcgttcttcttcgtcgttatcttcttcttttgttgtttgtgtgtttgtactttctctcacctgaaaatgtcttgctgcggtggtaactgtggttgcggaagcgcctgcaagtgcggcaacggctgc

SEQ ID NO: 173826 - DNA, 284 bp, Glycine max
taggagttccttttccaaagagccaaccgatgaggatatactcaagcctatggaacgctgatgattgggccacaaggggtggactcatcaagactgactggtccaaagctcctttcactgcatcctacagaaacttcaacgccaatgcttgtgtttggaactctggaaaatcctcatgcaaatcaaattcttcaccttcctctgcatctcccactaatgcatggttatcacaagagcttgattccactgctcagcagaggttgcgttgggtgcagaagaactac

SEQ ID NO: 173827 - DNA, 284 bp, Glycine max
ctagagattctcatgtgccggttttggctccacttccaattggctttgctgtgttcatggttcacttggcaaccatcccagtaacaggcactggcattaaccctgctaggagtctaggagctgctgtcatgtacaaccaacagaaggcctgggatgaccattggatcttttgggttggaccatttattggagcagccattgcagccttctaccaccaattcatcttgagagcaggtgctgctaaggctcttggatcattcaggagcaaccccgctatttgagtc

SEQ ID NO: 173828 - DNA, 140 bp, Glycine max
gtgaaaacctaacggggaagacgataaccctagaggtagagtcttcggacacgatcgacaatgtgaaggcgaagatccaggacaaggagggcatcccgccggatcagcagcgcctgatcttcgccggaaagcagctggag

SEQ ID NO: 173829 - DNA, 286 bp, Glycine max
attgttgtaactttttgattcctaaattctctaaaattcgaaattctaatttcgttaggggaaagagattgtttgtgtgtgagtgagtatggctggaaaaggcgagggtcctgctatcggaatcgatttgggaacgccgtactcttgcgtcggcgtgtggcaaccgatcgtgttgaaatcatagccaacgatcagggtaacagaactaccccatcctacgtggctttcaccgacacagaacggttgatcggcgatgcggcgagaaaccaggtcgctatgaacccaa

SEQ ID NO: 173830 - DNA, 162 bp, Glycine max
caagagaagaagagaatcataagaaagcaagaaagaaaatgggagtggagaagcagttgttgaggcctggcaccggtcccaagccaattcccggtcagaacgtcaccgttcactgcactggtttcgggaagaacggtgacctttctcagaaattctggagca

SEQ ID NO: 173831 - DNA, 282 bp, Glycine max
cagcgatgggaatcgatcttaaggctgggggtaagagcaaaaagaccaaaagaacagcaccaaaatccaatgacatctacctcaaattacttgtcaagctttatcggttccttgttcgaaggactggcagcaatttcaatgctgttatactcaagcgcttgttcatgagcaaggttaacaagcctccaatttctttgtccaggttaattaagtatacaaaggggaaggaggataaaatttgctgtatagtggggactgtaactgatgatatcagagtatatg

SEQ ID NO: 173832 - DNA, 273 bp, Glycine max
gaaaaatggaagatgccttctctttgtatgaacatgccattgctattgagaaaggaaaagaacattcacaaacattgccgatgttgtttgctcaatattctcgatttgtatatttggcttctgggaatgcagagaaggcaaggcagattctagttgaggggcttgagaatgttttgttgtcaaagccactacttgaggctttattgcattttgaggctattcaacctttgccaaagcgtgttggtgtcgactttttggagtcatgggttgtca

SEQ ID NO: 173833 - DNA, 160 bp, Glycine max
ctcaccaaagccttcctagaacgaaaaaaaaaagaagagcaattttccctcaccaaagaagaagaagcaaacaatggccgatcaacttaccgatgaacagatctccgagttcaaggaagccttcagcttgttcgacaaggacggcgatggttgcatcaca

SEQ ID NO: 173834 - DNA, 281 bp, Glycine max
agcatactaagaaactaaagcggcatcatacagcagagttgcttccaccacctctttatgtgatttactcacagttgttggctcaaaaggaggcgtttggagaatctattgatgtggagattataggaagtgtcaaagatgctcaagctttttcccaccatctagctcacaaggacactggcatttccaccactgtggagagtcctaaattggaaaacaatgaacctgatgaagatggtcagagacagagtaaaaggccaaggaggtttcaaggcaaggag

SEQ ID NO: 173835 - DNA, 278 bp, Glycine max
tattcggcgaatcggctcactgtattggaacagtagccagcgttacgtcttaaccacaaggttggagccggttcgataaggagaagaatctgaaagctggtgacacggtttgttttcaccggtccactggaccgtacaagcagctttacatcgattggaagacgaggaatgttgttaacaacgaggtcgcgttgttcggaccggtcggaccggttgtcgaaccgatccagatggttcggctctttggggttaacattttgaaactacccggttcagat

SEQ ID NO: 173836 - DNA, 285 bp, Glycine max
gtcgtgtcgcagcaaaaccaagccacccactaacttgtttggtccaagacatggctctgatcctgcatgctaccaaaacaaacaagaatgccttcaagactctgattgcggcagagtacagtggcgtccaagtggaattggcccctaatttcgagatgggtgtctctaacaaaactcctgaatttctcaagatgaatcctattggaaaggttcctgttttggaaacgcccgatggtccagtctttgagagcaatgcaatcgctcgttacgttgctcgactaaagg

SEQ ID NO: 173837 - DNA, 174 bp, Glycine max
tggggtgttgaggttaaggttggtcagaccgtgacagttgacccaatggatcctgtggattcatacatacacatatctcaggttgcgctcggagaggcgaaaaaggagaaacctaatgagtctgtggttttgtatttgaaagttggtgaacagaagattgtcttgggaaccctt

SEQ ID NO: 173838 - DNA, 215 bp, Glycine max
gagctgaaggacaagaagttttttggaggagaggaatttgggttggtagatattgctgctgtcttcatagcattttggatcccatttttcaggaaatagcagggttgcagttattcacccagtgagaaatttctatactctaacaaatggagcaagaattcttaaccaccttttgtgcagaagtcttcctctagagacccctttttgcctattca

SEQ ID NO: 173839 - DNA, 152 bp, Glycine max
accgagcagccacacctcccgcagcagccatggttctcaaaactgaactatgccgattcagtggtgccaagatctacccaggaaagggcatcagatttgttcgtggtgattctcaggttttcctgtttgcaaactcaaaatgtaagaggtat

SEQ ID NO: 173840 - DNA, 283 bp, Glycine max
aaattgattgaaatcaaacctcaccaccgctgctaggtcaagcttctctgtcggtcattgcatctccaatctcgcttcttctctcagattcggataccaattcggtttcttccgaaccaaacttgtttttgagaaattcggcaattgattttccatggccaacaatccgtcacagcttctcccatcagagttgattgaccggtgtataggttcgaaaatttgggtgataatgaagggtgacaaggagcttgttggtactcttagaggctttgatgtttatgtc

SEQ ID NO: 173841 - DNA, 279 bp, Glycine max
gtgcccagcattcttttttatcttctcttaaagtgatgtttggactgtgaaataataacagtgtgttttttctctggttatttcagtagacaatatgggaagcactggtttgctacatttgatatgccttgtcattgctttagtaagtgtgtcgcttgtgcaagcagaagatgcgtataagtatttcacatggacggtgacttatgggactctttatcccttggctagtccccagcaggttattcttatcaatggtcagtttcctgggcctagacttga

SEQ ID NO: 173842 - DNA, 281 bp, Glycine max
  unsure (1)..(281): unsure at all n locations
attttgatgtgaaggtgaaggactctaagacccttctctttggtgagaagcccgtcaccgtttttggaatcaggaaccctgaggaaattccatggggtgaggttggtgctgattatgttgttgagtcaactggtgtattcactgacaaggacaaggctgctgctcacttgaagggtggtgccaagaaggttgtcatctctgccccaagcaaagatgcacccatgtttgttgttggtgttaacgagaaggagtacaagccagagcttgacattgtttccant

SEQ ID NO: 173843 - DNA, 283 bp, Glycine max
  unsure (1)..(283): unsure at all n locations
cattaacaatgcaggcaacagacattattctgctgggcctgggcttgctcttcgtccgctggtggtggcggcgctggtccaccaccggcggcggcccgaagaacctccctccaggccctcccgggtggcccatcgttggtaacctcttccaagtgctactgcagcgccgtcacttcatttacgtgatccgcgatttacgtanaaactacggcccaatcttcagcatgcagatgggccagcgcacgctgatcatcgtgagcagcgcggagctaatccacgaggc

SEQ ID NO: 173844 - DNA, 157 bp, Glycine max
ctctccctcctcttcacacattttctgtgcgctctaacaaacattctcgttcacactttcagattgtgtgaagatgggggcgggtggccgaactgatgttcctcctgccaacaggaagtcagaggttgaccctttgaagcgggtgccatttgaaaaa

SEQ ID NO: 173845 - DNA, 147 bp, Glycine max
gccttacaatggcatccagataagaacgtcgacaagagggaagaagcagaggctaaattccgagaaattgctgctgcttatgaggttctcagcgatgaagacaagcgtgtaagatatgacagaggggaggaccttgaagagatggga

SEQ ID NO: 173846 - DNA, 141 bp, Glycine max
gtttcgaatagattatcctaagtctttgtggaatagtgctgcaatggcttcaagtcaggaggaggtgacccttttgggagctactggaagcccatttgtgtgcagggttcatattgccctcaagttgaagggagttcaata

SEQ ID NO: 173847 - DNA, 277 bp, Glycine max
ctctcttcgacctcgcatcgcaccttcaacttaacctattccacttgtaatcgtaaacgctttgctagaagaagagacaaagtgtgtctgtgtgtgtgagagagagagcaatggctggctcgtgggcacgccgttctctgattgttctagccatcatttccttcggatgtctatttgcgatttccattgctaaggaggaagccaccaagttagggacggtcatcggcattgatcttggaacaacctattcatgtgtcggtgtttacaagaatggcca

SEQ ID NO: 173848 - DNA, 275 bp, Glycine max
ctagggcgctgctcccgattttctctcttcggattgagtgaattgtgaaatgggttggaaagctgctgagaaactcattaggcactggaaagttgtcagaggggataatgttatgataataaggggcaaagataagggcgagactgggactattaagcgtgtcattcgctctcagaatcgtgtcattgttgagggtaaaaatctggtgaaaaagcacatcaagcaagggcaaggtcatgaagggggcatctttacagttgaagctccaatccatg

SEQ ID NO: 173849 - DNA, 275 bp, Glycine max
ctggtgttattgttatatgccctactagagagcttgcaatacagacacatgctgtggccaaggagctgctcaagtatcattcacaaactcttggattggttattggaggttcagctagaaaaattgaagctgaacgcattgctaaagggataaatttattggtaggaactcctggtcgtcttctagatcatcttcaaaacacaaaaggattcatatataaaaacttgaagtgcctcatgattgatgaagctgacaggattttggaagcaaacttt

SEQ ID NO: 173850 - DNA, 280 bp, Glycine max
agaacaaccactcaccccctctccgatctaatggccaccgtaatcgacggcaaagccgttgcgcaaatcatccgatctgaaatcgccgacgaggtgcgcctgctctctcaaaaatacggcaaggttccgggactagcagttgtgatagtagggaacagaaaggattcacaaagctacgtgggaatgaagagaaaggcatgcgccgaattgggaatcaaatccttcgatgtggaccttcccgaacaagtctcccaagctgaactaataaaacaagttcacg

SEQ ID NO: 173851 - DNA, 274 bp, Glycine max
  unsure (1)..(274): unsure at all n locations
gctccgttaggttttccttccgcgtgtttgctcggaactactcctccactcatcgtttaaaatgtctgacgtggaagagtttcgttgcttcattggtggccttgcatggtcaacgtctgatagaaagttaaaggatacatntgaacagtttggcaagcttattgaggcaaaggtggttgttgacaagttctctggggcgtctcgtggttttggatttgtcacatttgatgacaagaaagcaatggacgaggctattgatgctcatgatgggata

SEQ ID NO: 173852 - DNA, 141 bp, Glycine max
gaagaagtgaagtgctgcttcaatggcttcaagtcaggaagaggtgatccttttgggggttattggaagcccatttctgcacaaggtgcagattgctctcaaattgaagggagttaatacaaatatttggacgatgatttg

SEQ ID NO: 173853 - DNA, 273 bp, Glycine max
  unsure (1)..(273): unsure at all n locations
tgatgcacgatttcctacagtgcaaggaattgtgcgtagaggtttgaaaattgaagccctgatacagtttattgttgagcagggggcgtccaaaaatctcaatctcatggaatgggacaagctctggaccattaataagaagattattgaccctgtctgtcctagacacactgctgtcattgcagacagacgtgttttgttgactctcactgatggtccgagaaaccttttgtccgcatcatacctcggcacaagaatatganctgccggagt

SEQ ID NO: 173854 - DNA, 279 bp, Glycine max
gcactgtggcagaagtcctaggagtgtaaaacagagacgcaaaatgaagacgatcttgtcgtctgagaccatgaatattcccgacggcgtgagcatcaaggttcacgctaaggttatcgaggttgagggccctcgtggaaaactcgtgcgagacttccaccatctgaacttggacttccaacttattaccgacgatggcggtaaaaggaagctcaagattgattcttggtttggttctcgtaaaacctccgccgccatccgcaccgccctcagccacgt

SEQ ID NO: 173855 - DNA, 171 bp, Glycine max
gggcactcaacattttacactcttttcttcttctcgttgttgcttcgctgttgaatcatggatcagaaggtcgatttcagcgctccccattccatgggaaccactatcatcggcgttacttacaacggcggtgtcgttctcggagccgactctcgaaccagcaccggagtg

SEQ ID NO: 173856 - DNA, 163 bp, Glycine max
ctctatttctcagtctctgtgtttgcggctgaggattccgaacgagtgaccttcttcgtttctcgcaaagtttaagtaatcatgggtaaggaaaaggttcacatcaacattgtcgtcattggacatgtcgactctgggaagtcaactaccactggtcacttga

SEQ ID NO: 173857 - DNA, 267 bp, Glycine max
gttgaagaccaaactgaacagcttcttaaaaacatgggggaaattcttaaagccggtggtgctagctactcgtccgttgttaagacaacaattatgttggctgacttgaaggactttaagaaggtcaatgagatctatgctaaatacttcccttcacctttccctgctcgttcaacttatcaagtagctgcattgccattggatgccaagattgaaattgagtgcatagcaactatataagcaccaagagtaatagtatatctggct

SEQ ID NO: 173858 - DNA, 273 bp, Glycine max
cgttgttgttcttcgctttcctgaaactagggttttcaatttcgattcattcgttaataattaaagatgtttgggagggcaccgaagaagagcgataatacgaggtactacgaaatcctcggcgtctcgaagaacgcttcgcaggatgatctgaagaaggcttacaagaaagccgccatcaagaatcaccctgacaagggcggtgatcccgagaagtttaaagagctggcacaagcatatgaggttctgagtgaccctgagaagcgtgagata

SEQ ID NO: 173859 - DNA, 278 bp, Glycine max
tttctctctcgctcgcaaacgcaaataataaaaaacaaggttttagccatggcatcgaagcggatcttgaaggaactcaaggatctccaaaaggatcctcctacctcatgcagcgccggtcctgttgctgaagacatgtttcactggcaagcaacaattatgggtcctccagacagtccttatgctggaggtgttttcctagtcactattcatttccctccagattatccctttaagccacccaaggttgcattcaggacgaaggtatttcacccaaa

SEQ ID NO: 173860 - DNA, 274 bp, Glycine max
attgattgtggggtttccattggcacaatttttggggtttatgcgttgaaagatgtccatgaaccaaccatagaagatgtcctgcttcctgggaagaacatggtggcagctggttactgtatgtatggaagctcttgcacgcttgtgttaagcactggagcaggtgttaatggtttcacccttgacccatctcttggtgagttcatcctaactcaccctaacattaagatcccagagaaaggtatcatttattcagtgaatgaaaggaatgcca

SEQ ID NO: 173861 - DNA, 152 bp, Glycine max
gtctttttggctacttttagatactgggatacaaggcagtcaaatccagtgcacacacagcaactcccagagcgctgctatgctatgacagtgagacatcctctgatggttgttggcactgctgatagaaatcttattgtctacaacttgca

SEQ ID NO: 173862 - DNA, 268 bp, Glycine max
ctcgcttctagccctagggcgctgctcccgattttctctcttaggattgagtgaattgtgaaatgggttggaaagctgctgagaaactcattaggcactggaaagttgtcagaggggataatgttatgataataaggggcaaagataagggcgagactgggactattatgcgtgtcattcgctctcagaatcgtgtcattgttgagggtaaaaatctggtgaaaaagcacatcaagcaagggcaaggtcatgaagggggcatctttac

SEQ ID NO: 173863 - DNA, 275 bp, Glycine max
gggtttttgagtgcggtgcggcgatcctagcactctcttctgcagctttcgccgacagcttcattcaccatggctgagcaaaccgagaaggcttttttgaaacaaccaaaagtgtttctcagctcgaagaaaactgggaagggaaagagacccggaaagggtgggaaccgcttttggaaatccattgggcttggatttaagactcccagggaagccatcgaaggaacctacattgacaagaagtgccccttcactggcaatgtttccatccgtgg

SEQ ID NO: 173864 - DNA, 151 bp, Glycine max
gctatacttgttccttttgaaggttagaagtgctacaatacaaacaatggcagctactcaggaagatgtgaagcttttgggtattgtgggaagcccatttgtgtgcagggtccagattgcccttaagttgaagggagttgaatacaaattt

SEQ ID NO: 173865 - DNA, 272 bp, Glycine max
cgcttgaactctgcgagatcttgagtcgccgatttgaaaagatgagtaagcttcagagtgatgctttgcgtgaagccatctcaggaatcatggccgattccaaggagaagaatcgcaaatttgtggagaccatcgaactccaaatcggtttgaagaactacgatccacagaaggacaagcgtttcagtggctccgtcaagttgccccacatccctcgccccaagatgaaaatttgcatgcttggtgatgctcagcatgttgaagaggcagag

SEQ ID NO: 173866 - DNA, 273 bp, Glycine max
attcattcatttagattcatcaaaagcttataacaacaattaaacatgagtgcagccagcagagcttggattgtggcatcaagcattggagcagtggaggcattgaaggatcaattgggggtgtgcaggtggaaccatgcattgaggtcactgcagcagcatgccaagagcaacattagatcctacactcaggccaaaaccttgtcttctgctacttctgctgctgtctccaataaggtcaagaggaccaaggaggagtccatgaggaaagtc

SEQ ID NO: 173867 - DNA, 270 bp, Glycine max
ccgtgtttcattccaactgcaaaacaacaactcaattaagaaattcttctccggagccatggcagatctcaagtctacattcttgaacgtctattccgttctcaaatctgaactcctccacgaccccgccttcgagttctccgatgatgctcgccattgggtcgaccggatgctagactacaatgtgcctggaggaaagttgaaccggggactgtcagtcattgacagctacagattgttgaaagaaggacaggcattaaatgatgacga

SEQ ID NO: 173868 - DNA, 268 bp, Glycine max
cccttctattgttctaacatcacattcacatgatggacttcatgtttttgacgattttagagaggcttatgcttggctgagtcataatacagaaatagatgataaagtggcttcttggtgggactatgggtaccagacaactgccatggctaaccgaactgtcattgttgataataatacctggaataacacacatattgctactgttggtactgccatgtcttccccagagaaggcagcttgggaaattttccactcattggatgtc

SEQ ID NO: 173869 - DNA, 273 bp, Glycine max
gcagagtagagcagcacagaagagggaaaactgcaccgccgccgtagaagaaaacaaccatggtgcacgtctccttttacaggaactatgggaagacattcaagaagccgcgtcgtccgtacgagaaggagcgtctcgacgcggagttgaagctggttggtgagtacgggcttcggtgcaagagagagctgtggagggtgcagtacgcgctcagccgcatccgcaacaacgcgcggaacctcctcaccctcgacgagaagaacccgcgccgga

SEQ ID NO: 173870 - DNA, 266 bp, Glycine max
cacttgtgtatcctaggatgatggctatccatgatcttgactcaaaggaagatgatgactctgttatacctccctttcttcctctttctagtgaacacatcagtgatgatggaatatatcttcttgagaatggtcatgattgtttgatatatgttggagactctgtgaatccagacatcgtgcagaaactgtttggtgttgctacagttgacaaagtccctaccctgtttgtattgcagcagtacgacaatccactatcaaagaag

SEQ ID NO: 173871 - DNA, 230 bp, Glycine max
tgttggtgcaaagcatccttcgtttcaatttctctctctcagcgctttctgcaatcgaacctttcatctccaaagggatccacaggccgaaggataaatggggctgacattcacaaagcttttcagtcggcttttcgcgaagaaggaaatgcgaattctgatgagtggtcctgatgctgctggtaagaccactatcctgtaccagctcaagctcggagagatcgttacca

SEQ ID NO: 173872 - DNA, 272 bp, Glycine max
gaagaaggcaaagaagatccgaacttctgtcactttccacagaccgaggacattgaagaaggataggaaccccaagtaccctcgcattagcgcgcctccaagaaataagcttgatcattatcagatcctgaaataccctctgaccactgaatccgccatgaagaagattgaggacaacaacactttggttttcattgtcgacctgcgtgccgacaagaagaagatcaaggatgccgtgaagaaaatgtatgacatccaggccaagaaagtta

SEQ ID NO: 173873 - DNA, 147 bp, Glycine max
atctttctctctccgaacagatcaaactatggccacctcaagcgccaaatcagtccatgatttcaccgttaaagatgccaagggaaatgatattaatcttggtgactacaaaggaaaggtccttatcattgtcaatgttgcctcaca

SEQ ID NO: 173874 - DNA, 160 bp, Glycine max
ctcggaatcggctcaagccatggggctttcagattggtggaccttgttgggcttggtgtggcgattgctactggcatgcaatttattcagaattttcctgagcgaacatatagatcaatgcttattcgccttctgcaagaagataagagagctggcgaaa

SEQ ID NO: 173875 - DNA, 136 bp, Glycine max
cagagtttaccaagcgcccaatgaagggaatgcttaccggtcctgttaccattctcaactggtcctttgttagaaatgaccaacctagatctgagagcagctaccagattgctttggctatcaaggacgagttgag

SEQ ID NO: 173876 - DNA, 259 bp, Glycine max
gggtttgcagtcactgctttgtttagatcagaaccagatcgtgttctcttcttccattggcaaacatggcaactcaaatgagcaagaagagaaagtttgtggcggatggagtgttcttcgccgaactgaacgaggttctgacacgtgagttggcggaggacggttactccggcgtggaggttagggttacgccgatgcgcaccgagattatcatcagagccaccagaacccaagccgttctcggtgagaagggaaggag

SEQ ID NO: 173877 - DNA, 282 bp, Glycine max
cggaggggcaagctagggagtaagagatggatttggaccagtggatctccaaggtgaaggatggccagcaccttctcgaagaggagcttcaacttctttgcgaatatgttaaagagatccttattgaggagtcaaatgtgcagcctgtcaacagtccagtgacggtttgtggtgatattcatggtcagtttcatgatctaatgaaacttttccagactgggggtcatgtgccggagacaaattacatttttatgggagactttgttgatcggggttacaata

SEQ ID NO: 173878 - DNA, 265 bp, Glycine max
atttgaatgcagggttctgatggtggaattaagctgtattggggtattgcagctgatgaatctgtggtaatctcggatgatctagatgtcatgaaagatgggtgcgccaaatcctttgctccctttccaccaggtaccatttggaccaggaccaccatgcattactcaaactgttcaagtcacagtagtttacaaagaattttcaataagcacttaaacatatagaatcactttatcctctaacaatacactaagaaaaaagaag

SEQ ID NO: 173879 - DNA, 152 bp, Glycine max
attttggcatcgaggttgaatctcatcggagagagaaaaaccataaccatgtctggaagacgaaagggatgcaagggtatcggaaagggaggagcgatacgacaccgtaaggttctgagggataacattcagggcataacgaagcccgcaat

SEQ ID NO: 173880 - DNA, 232 bp, Glycine max
cacacccagattcaaaaactcgctctgctctgctctgcaattccccttccgtttcgtttcgatctcaaaacatgttcttcttcgattggttctatggcattctagcttccctcggtctctggcagaaagaagccaaaattctcttccttggtctcgataatgcagggaagaccacacttcttcacatgctcaaagacgagagattagttcagcaccagccgacccaacaccc

SEQ ID NO: 173881 - DNA, 135 bp, Glycine max
gtgggttcccagattttagatagcttttgaatgtattttgctggacgtgacgatgattgggaagttgggttgttgtttttatttgtggttgatacttttgttaaataacattgttcagcgataatgatagtgatc

SEQ ID NO: 173882 - DNA, 269 bp, Glycine max
cttcttcccaaccactactactcactcactgcagatctcaattgcatcgctgtccatggctaccatcgttagcatcaaggcccgccagatcttcgacagtcgtggcaatccaactgtcgaggtggatttgacttgctccgatggtacttttgccagagctgctgttccaagtggtgcatccactgggatttatgaggcccttgaattgagagatggaggatctgactaccttggaaagggtgtatcaaaggctgttgacaatgtgaaca

SEQ ID NO: 173883 - DNA, 269 bp, Glycine max
ggatcagatctgctctctccgtttggattcaattcgacactttcctcgcctcaaagattaagcgaacaacatggttgtccttgctgcatccattgtgagcaaatctgggaaagtgctagtttctagacagtttgtggatatgactcgcataagaattgaaggtcttctagcagcatttcccaagttggtagggactggaaaacaacacacatatgttcagactgagaatgtgcgctatgtttaccagccaatagaggcactgtacctgc

SEQ ID NO: 173884 - DNA, 142 bp, Glycine max
ctccatttccatttcctctctctcagtttccaagaatcttaagctatgggaaagtcttacccaaccgtgagcgctgattaccagaaggccgttgagaaggcgaagaagaagctcagaggcttcatcgctgagaagagatgcg

SEQ ID NO: 173885 - DNA, 263 bp, Glycine max
acactttccacttgtctccgaattagttatcttgagaaacattattcccattgctatatattatggctagcatgaaggttacatgggtggttgtgatcatgtgcatggccgtggtgggtgcaccgatgatggcgcaagcaatgacatgcaatgatgtgacggtgaacatggcacagtgcctatcctacctgatgcagggaggaacaccttcaacactctgctgtcaccaccgttgacaaacaaactgtgtgcaactgtctcaa

SEQ ID NO: 173886 - DNA, 268 bp, Glycine max
tgctcagccatatccccatcgcaacttttctgaggaagttgctattcttgatggctactttggcaaacttggtgcaggaagcaatgcttatattttgggtggccaagacaaagcacagaactggcatgtctactctgcttctgcagattctgtaactcaatgtgacaatgtttacactcttgagatgtgcatgactggcctggatagagagaaagcacaggttttctacaaagaacaatctgcttcagctgccatgatgactgttaat

SEQ ID NO: 173887 - DNA, 145 bp, Glycine max
tgaaatggctcccaaaccgcctagtacgggtctgtttgttggactgaacaagggacatgtcgtcaccaagaaggaattgcccccacgcccctcggatcgtaagggggtaagttttttcaattgtaatgagtcagtttttttctat

SEQ ID NO: 173888 - DNA, 144 bp, Glycine max
gttgcaggaaaaatggtttcgctgaaactgcagaagcggctcgccgcgagcgtgctcaagtgtggcagaggaaaggtttggcttgaccccaatgaagtcaacgaaatctccatggccaattctcgccaaaacataaggaagctg

SEQ ID NO: 173889 - DNA, 155 bp, Glycine max
cacctctggtcaatggaatggagacgctaatgacaaaggtattcaaaccagtgaggattacagattctatgctatttcagctgagtaccctgaattcagcaacaagggtaagacactagtctttcaattttctgttaagcacgaacagaagcttg

SEQ ID NO: 173890 - DNA, 203 bp, Glycine max
ttcattttccctcactttctcgctcgccaaacgcccctctctctcctccaatggccgaccagctcaccgacgaccagatcgccgagttcaaggaggccttcagcctcttcgacaaggacggcgatggttgtattactactaaggaacttgggactgtgatgcggtcactagggcaaaacccaactgaggcagaactgcaggat

SEQ ID NO: 173891 - DNA, 201 bp, Glycine max
gaaaacgcattctcaccatttccctctcgattgtgagacttgttgttgttaactgaacttttctgagcaagaatgtctgggcgtggaaagggaggcaagggtttgggaaagggaggagcgaaacgacaccgtaaggtgctgcgcgataacattcagggaatcaccaagcccgcgattcggcgtttggctcgtaggggtggc

SEQ ID NO: 173892 - DNA, 200 bp, Glycine max
gtagcaacaatgtcgaagcgaggtcgcggaggatcggcgggaaacaagttccgcatgtcgctgggtctgccggtggcggcgacggtgaactgcgccgacaacaccggcgcgaagaacctctacatcatatcagtgaaggggatcaagggtaggctgaaccggttgccgtcagcttgcgtcggagacatggttatggccac

SEQ ID NO: 173893 - DNA, 199 bp, Glycine max
agattgaatagctcttgaccgaagtcaagggcaaagacttcaatgagctacttgctagtggaagtgaaaagattactgcagtggctggtggtggtgcagcgattgctgttgctgctgcaccagcgggaggtgctggtggcggtgctgcacctgctgccgaagcaaaggaagaaaagaaagtagaagagaaggaggaatc

SEQ ID NO: 173894 - DNA, 198 bp, Glycine max
ggcataccagatatcatacacaactatggccaacccatgccactctcaaacctcattgcttcactaccaatccacccatccaaaacttgctttgtccatcgcttgatgcgaatcatgatccattctggcttcttctctcaacaaaatcatgacatggagaatcagctagatgccaagtatgtgcttaccgatgcatct

SEQ ID NO: 173895 - DNA, 190 bp, Glycine max
agctccttagtgctgctccttgcagctctaattctatcacctcaagttcttgcaaactatgagaatcccccagtgtacaagcctcccactgagaaaccaccagttactaagcccccagttgagaagcctcctgtttacaagcctccagttgaaaagcctccaatttataagcctccagtagagaagccac

SEQ ID NO: 173896 - DNA, 200 bp, Glycine max
accagatcgagttatcaaggagattgaagagattgtaggtctagattgtagcaatgcgattctctgctctgcaaaggtataattgaaattctcaatgcaattgttgcaagaattcccccacctgaagatacatctaaaagaccattgagggctttaatatttgacagctactacgatccatatagaggtgttattgtata

SEQ ID NO: 173897 - DNA, 192 bp, Glycine max
cctacactgaggatactgagtgtgttgggcttgcacggcttggtaatgaagatcagatgatagtagctggaacaatgaagcagttgcagttgattgattttggagcacctttgcattgccttgttatagacaggcccgacccatcccgtggaggaagaaatgctcgatttttacagatgcaggacatagata

SEQ ID NO: 173898 - DNA, 196 bp, Glycine max
ctcaaatccaagctcgggaacagagaaggagaaagagaatggacgccattgattctgtgttcgatccgttgagagaattcgcaaaggacagcgtgaggctcgtgaagcgctgccacaaacccgatcgcaaagaattctccaaggttgccgtgcgtaccgcaattggtttcgttgtgatgggattcgtgggtttctt

SEQ ID NO: 173899 - DNA, 195 bp, Glycine max
cccaaacaaaggctctgcaattgcaaattcagaggatgtcgatcttcgagtacaacggaagcgccgtggtggctatggtcggcaagaactgcttcgccattgccagcgaccgaaggctcggcgttcagctccaaactatagccacggattttcaacgcatttccaagattcacgacaagctcttcatcgctctct

SEQ ID NO: 173900 - DNA, 193 bp, Glycine max
ccggagagagagtgagtgcaaagccatcgtcttcttctcagacaagtagtttggtaaaagatggctgatgctgaggatattcaaccccttgtctgtgacaatggaactggaatggtgaaggcaggatttgctggtgatgatgctcctagggctgtgtttcccagtattgttggccgacctcgtcatactggtg

SEQ ID NO: 173901 - DNA, 194 bp, Glycine max
gtgattgcctccctctgctgccgtccctaatctgaaggctcccgccatctgcgatcggatttcatggctccaaagaaggacaaggctcccccaccttcatccaagcctgccaagtctggcggtggcaagcagaagaagaagaagtggagcaagggtaagcaaaaggaaaaggtgaataacatggtgctcttcga

SEQ ID NO: 173902 - DNA, 196 bp, Glycine max
aagaaaaagaggcgcaagatgagtggtagggtttctgggaaggtgaagtggttcaatgatcagaaggggtttggattcataagccctgacgatggcagcgacgatctcttcgttcaccaatctcagatcaaatctgacggtttccgaagcctcgccgaaggagagtccgttgagttcgccattgaatctgaatctg

SEQ ID NO: 173903 - DNA, 199 bp, Glycine max
gcctgcagttttctagagtacgattctgatgataatccacaagaagagacaatcaaacctatggtggatggtgggactgaaggtttcaagggccatgctagggttatcatgccagggattacaccatgctttgagtgtactatctggctttttccacctcaagtgaagtttcctttgtgtaccctggctgaaaccccta

SEQ ID NO: 173904 - DNA, 193 bp, Glycine max
gtttccacactgcataccttaggtcttccgaattcgaagttaatttgcaagatggctaaggaaaaggctcagatcaacattgtggtggttggtcatgtggaccctgaggaggcaaccaccattaacgagctgaagaagcctgttgtggagaaagaagctccagggcatgccatatgagggcatgcacgtacgg

SEQ ID NO: 173905 - DNA, 190 bp, Glycine max
acaagttcgacaagaacggcgacggaaaaatctcggtaacggagctgaaggacatgctcgcggccctcggatccaaaacgacggacgaggagttgaaacgcatgatggaggagctcgaccagaacggcgacggtttcatcgacctcaaggagttcgcggattttcactgcaatggcggtgccggaaagga

SEQ ID NO: 173906 - DNA, 190 bp, Glycine max
atggattttctgaaggaaaagatcttgtggtttctgttatgtctgcaatgggagaagaacagatctgttcactgaaggacatcggtcccaaaaattaatatgatgctatggctgtagctatagctgatagcacgctttttcttcttatgttgctaacaggtagtatattctccgatacatgtgtgcaaaa

SEQ ID NO: 173907 - DNA, 190 bp, Glycine max
tacatttctaatctcattctccttctgttcaaacactctcatggcatcagataagaagattaggatcggcatcaacggatttggaaggattggccgtttggtggccagggttgcccttcaaaggaatgatgttgaacttgttgctgtcaacgatcctttcatcaccactgattacatgacatacatgttc

SEQ ID NO: 173908 - DNA, 191 bp, Glycine max
gcaagtttggagtattgggcttttgaagttttggttttcttagctggactaatgcccgactcacagataaccacttcgttgattgcaatatgtataaacacagaattcattgcctacatgatcacttatggtctcagtgcagctgcaagcacaagggtatccaatgaattgggagcaggcaacccggaacg

SEQ ID NO: 173909 - DNA, 192 bp, Glycine max
agttgagctagtttcatttgagaaagagaaggagtcctgggatttgaacactgaagagaaacttgaagctgctggtaagaagaaagaagaaggaaatgtgttgtttaaagctggtaagcatgcaagagcttccaaaagatatgaaaaggctgtaaagtacatagaatatgattcctcattcggtgaggagga

SEQ ID NO: 173910 - DNA, 196 bp, Glycine max
cggagagctcccgctgactgcgatcggatttcatggctcctaagaaagacaaggctcccccaccttcatccaagcccgccaagtctggtggtgggaagcagaagaagaagaagtggagcaagggaaagcaaaaggagaaggtgaataaccaggtgctgttcgatcaggctacctatgacaagctcctctccgaggc

SEQ ID NO: 173911 - DNA, 188 bp, Glycine max
ggtttgcagtcactgctttgtttagatcagaaccagatcgtgttctcttcttccattggcaaacatggcaactcaaatgagcaagaagagaaagtttgtggcggatggagtgttcttcgccgaactgaacgaggttctgacacgtgagttggcggaggacggttactccggcgtggaggttagggtta

SEQ ID NO: 173912 - DNA, 191 bp, Glycine max
tagagttgttaccatttgctcccagtacagagcttaaccgagcttcacaaagatgaatcgggaaaagttgatgaagatggccggttcggttagaactgggggaaagggtaccatgagaagaaagaagaaggctgtccacaagacaacaaccacagatgacaaaaggcttcagagcaccctgaagagaatag

SEQ ID NO: 173913 - DNA, 188 bp, Glycine max
gctgttgcaaaacttagggttgagcctttttttgaggttttcagcgcttctttctcacaatggttcttctgaatgatattgatttgctgaatcctccagctgagttggagaagagaaaacacaaactcaagcgtcttgttcagtcaccaaactctttattcatggatgttaagtgccagggatgcttc

SEQ ID NO: 173914 - DNA, 193 bp, Glycine max
gttcatcgtttgccagacacacaggagagaagagatggcgacgagggtggtggcggaacagaagccgaagacgaagattgtgtgcacgctggggcccgcatcgcgctctgtcccaatgatcgagaagcttctgcgggcgggcatgaacgtggctcgcttcaacttctcccatgggtcccacgagtaccaccag

SEQ ID NO: 173915 - DNA, 192 bp, Glycine max
gttcaaaggtaaggtaggttaacactcttcttcatcgtcgtcgcaatgggacgtgtgatccgtgcgcacgtaagggagcaggctcggtcttcaagtcccacacgcaccaccgcaagggccctgcacgcttccggagcctggacttcggggagcgcaacggctacctcaagggcgtggtcaccgacgtcatcc

SEQ ID NO: 173916 - DNA, 189 bp, Glycine max
gtcttcataaacgcctttcttctccgtttccgtttcctcgttcgaattcgctttttgatctgcgaaaatgagagagtgcatctcgatccacattggtcaggctggtatccaggtcggaaatgcttgctgggagctctactgcctcgagcacggcatcgggcccgatgggcaaatgccaagtgacaagac

SEQ ID NO: 173917 - DNA, 190 bp, Glycine max
cggctcgagcaccgacagtgagagactcattggggaagctgccaagaatctggcagctgtcaacccagaaagggtcatctttgatgtcaagagacttattggaagaaagtttgaagataaggaagttcaacgagacatgaagcttgttccttataagattgtcaacaaggatggaaaaccttacatacag

SEQ ID NO: 173918 - DNA, 186 bp, Glycine max
aactttactcctcttcaatcagttgcatattctttgctattccaatggccactgttgaggttgtgtcagccaaggttgccctcccagaggacacaaaagaggcatcattgaaggttgacgaggagaagaacacagaagaagttgttgagactccaacaccagaaactgtggtcattgagcaaacca

SEQ ID NO: 173919 - DNA, 190 bp, Glycine max
ggactctccactggggatgtggcagcactgtacaagtataagaacactattattgatgttaaactggacaccgcatcaactatctccacaaccctcacattcaatgacgttcttccatccaccaagactattgcttcatttaagctgcctgattataattctggcaagttagaggttcaatacttccatg

SEQ ID NO: 173920 - DNA, 188 bp, Glycine max
ggtgtcattcgttaccatatggtacatgtggatgatgtggctagagcacatatcttcctgcttgagcatcctaacccaaaagggagatataattgctcaccattcattgtgcctattgaagagattgctgaaattatttcagccaaatacccagaatatcaaataccagcactagaagaggtgaagga

SEQ ID NO: 173921 - DNA, 186 bp, Glycine max
aaaaatttcaaaggagttgctacatctttagaaggttgtgtaaatggataccttcaatgtgttgcatatgagagggtcccttcaaaaattctggtttatcaagcctcagatgatccactttaccgtggctatagagcagcagttcaatcgtcaagtcaagaagagtctttgttagattttgcatca

SEQ ID NO: 173922 - DNA, 187 bp, Glycine max
catttcaatttgcatttgcatttcatttggcgttttgtttctttctggaagcttcacttcggcatccatggcgtcgttcgaagaagctcctcccggaaactccaagaattgcgagaagatcttcaagaccaagtgcgctcagtgccacaccgtggacaaaggtgccggtcacaaacaaggacccaat

SEQ ID NO: 173923 - DNA, 188 bp, Glycine max
aaaagaaaatcctcaattttctgagcagccaaacactctctctctgtctctcgaaaattctcagtttgcagagaaaatctgaatcatgtcgtggcaagcgtatgtcgacgatcaccttctgtgtgacatcgaaggtaaccacctcactcacgctgctatcatcggccaagacggcagcgtttgggctc

SEQ ID NO: 173924 - DNA, 185 bp, Glycine max
cttcggctcacttttgataatatttgtgggttggctttcgggcgagacccacagacttgtgtgtcaagtctgcccgataaccgatttgccacggctttcgatcgagccactgaagccacgctccaacgattcattttacctgaggtattgtggaaggtgaaaaaatggcttcggcttgggatgga

SEQ ID NO: 173925 - DNA, 191 bp, Glycine max
tggaaggcgagggtttgaggtgcgcaacaaacaaagatgaaagaagcggatgagcaactatgcgaggcggccattaaaggtgacacgaagaaagtgaggtctcttatatactccggcgctgacgtcacccactttgacggcgatggcctcaatcctctgatgcacgccgcaaagcacggccatgcacccgt

SEQ ID NO: 173926 - DNA, 189 bp, Glycine max
gacgcagtgactaaaccaaacctctcactcgccgtcgtagggtttctcctttcgtttagcaacaacaacaatggttgcagccaagaaaaccaagaagacccatgagagcatcaacaacaggctcgctcttgtcatgaagagtggaaaattcaccctcggttacaagacggttctcaaatcacttaggag

SEQ ID NO: 173927 - DNA, 186 bp, Glycine max
taatttgagtgtatattcagagagaaaaacgaagaaaacatcgtgaagcatgtctggaagaggaaagggagggaagggtctaggaaagggaggagcgaaacggcaccgtaaggttctgagggataacattcagggaatcacgaagcccgcgattcggcgtctggcgcgacgtggtggcgtgaagcg

SEQ ID NO: 173928 - DNA, 183 bp, Glycine max
cactttggtctacaagggctgctcaaaggagcctttcacagatcccaatggggtgtactctcaggcactttcagcactctttggctcattggtttcacaatccaccaaagccaagttctacaaaaccacttctggctctggccagaacaccataactggcctcttccaatgcagaggggatct

SEQ ID NO: 173929 - DNA, 183 bp, Glycine max
cttcactctgcccgctgcatcaatggcttcagagaagaaactttcgaacccaatgagggagataaaagtgcagaagctcgtcctcaatatctctgttggcgagagtggagatcgtctcaccagagcctccaaggtgttggaacaacttagtggccaaaccccagtgttttccaaagcaaggta

SEQ ID NO: 173930 - DNA, 218 bp, Glycine max
gagaaatgaggagtataagagggcagtattgaaggctaaagagcacatacgggctggtgatatttttcaaattgtactaagtcaacgttttgaacagagaacttttgcagacccatttgaaatctacagagcattgaggattgttaatcctagtccatatatgacttatttacaggccagaggaagtattttggttgcttcaagtccagaaattctta

SEQ ID NO: 173931 - DNA, 209 bp, Glycine max
gccggagatggttgtggggtggtatcactcgcatcctggatttgggtgttggctttctggagtggacattaatacgcaacagagttttgaggctttaaatcaacgggcagtggctgtggtggtggaccccattcagagtgtgaaaggcaaagtggtaattgatgctttccggctgattaatccacaaactatgatgctaggtcaggaac

SEQ ID NO: 173932 - DNA, 210 bp, Glycine max
agtcgagccgaatcggctcagggtttgtagtgtagcaggaacaaacagcaatggcgccgaacgtaacacgcaaggttagacagaaaccccgaattgataaggggaattggaaagtactcgaggtcgcagatgtaccacaagaggggcatttgggctatcaaggccaaaaatggtggcgttttacctcgccacgaccctaaacccaaacct

SEQ ID NO: 173933 - DNA, 210 bp, Glycine max
agttttgtgatctgcagctacgatgggtaagggaacggggagtttcggtaagaggaggaacaagacccacaccctctgtgtgaggtgtggccgccgcagcttccacctccagaagagtcgttgctctgcgtgcgcttaccccgctgcgcgcaccaggaaatataactggagcgtgaaggccattaggagaaagaccaccggaactggaag

SEQ ID NO: 173934 - DNA, 211 bp, Glycine max
ttgagaatgtaggtgctgaggattactattgtaggtttgagtacaaagctgccactggggctttcacgcctgaccgtgttgctgtgtattgcaagtgcgagatgccttataacccagatgacctcatggtgcagtgtgaggggtgcaaggattggtaccatcctgcttgcgtgggcatgactattgaagaagcaaagaaattggaacattt

SEQ ID NO: 173935 - DNA, 208 bp, Glycine max
tggatcgcttattgtatgggagatctgatgggccatcaattgattggactacaagaatgaaaattgctatatgtgctgcacaaggtctaaccttcttgcacgaagaggggccttttcaggctatgtataatgagttctcaacagccaacatacagattgacaaagatttcagcgcaaagctttcaggatatggttgtgttggacatat

SEQ ID NO: 173936 - DNA, 207 bp, Glycine max
ctcttcttctcttgcggctagggttttagcgcagttcttctagatttaaggaagatgggtaaggaaaaggttcacatcagtattgtggtcattggccatgtcgactctgggaaatccactaccactggtcacctgatttacaagcttggaggcattgacaagcgtgttattgagaggtttgagaaggaagctgctgagatgaacaag

SEQ ID NO: 173937 - DNA, 194 bp, Glycine max
ctcgtcgtaagtatgccacggataatgtaactgcttcaagttttcagaccatatatggtatggcagagtgcacccctgacttgtctgagaaagactgcaatgactgcttggatggggctatctcaaaaatcccaacctgttgtcaggacaagataggtggtagatttcttagaccaggttgtaatattggattt

SEQ ID NO: 173938 - DNA, 206 bp, Glycine max
ctgctgccgaaacccttcccgatccctaaggtaagtgagtaatcggtggttgagaatggtggagaaggcgaagggtaggaaggaggaggtggttaccagagagtacaccattaacctccacaagcgcctccatggctgcacatttaagaagaaagctcctaaagctattaaggagataaggaaatttgcccaaaaggccatgggga

SEQ ID NO: 173939 - DNA, 206 bp, Glycine max
gttcagatcgcgatgagagccaagtggaagaagaagcgtatgaggaggttgaagaggaagcgccgaaagatgagacagagatccaagtagtgcgttaatccaagtagttgatttccgttgcttttataattatgttgtcaaattgggcacccagttgttagaggcactggtcccacctttttgatgttttgatactttttgtttgg

SEQ ID NO: 173940 - DNA, 205 bp, Glycine max
cccgtaaccatgtctcagactgttgtcctcaaagttggtatgtcatgtgaaggatgtgttggagcagtgaagagagttctaggaaaattggatggtgtggaatcatatgacattgatttgaaggaacaaaaggtggtagtgaaaggaaatgtccagccagacacagttctgcagaccgtttccaaaactgggaagaagactacct

SEQ ID NO: 173941 - DNA, 199 bp, Glycine max
gttttgccaactgtacattataacatgggcggtattcccacaaaccattatggagaggtggttaccattaaaggtgacaatccagatgcagtggtttctggattgatggctgctggggaaacggcctgtgcatcagtccatggtgccaataggcttggtgcaaattcacttctcgatattgttgtttttcggaagagct

SEQ ID NO: 173942 - DNA, 205 bp, Glycine max
tgccggagcaagtttcgtcacgccggaacgatgaccggcggcggatccacggggaggttgccgacgtggaaggagagagagaacaacaagaggagagagagaagacgaagagcgattgcagctaagatctacactggccttcgagcccaggggaactacaagcttccaaagcactgcgacaacaacgaggtcctgaaagctctct

SEQ ID NO: 173943 - DNA, 202 bp, Glycine max
cgttcactccgttttcggcgccggaaaacctgctgatgtgttattgtggaggaacaagaaaatatctgctggcgtgcttggcggagcactgctgtttgggtcctttttgagttgcttgagtatcaccttcttactctggtgtgtcacattctgatactgttgctcgcagttctgttcttgtggtctaatgcccatactttta

SEQ ID NO: 173944 - DNA, 204 bp, Glycine max
cgggactgtaactagccgcagcacgaggagcagcctcaggaggagaaggatgtctcacaggaagttcgagcacccaaggcacggttcactgggatttcttcccaggaagcgtgctgctcgtcacaggggaaaagtgaaggcattccccaaggatgacccatccaaggcacccaagctcactgcattcttgggttaaaaggccgg

SEQ ID NO: 173945 - DNA, 203 bp, Glycine max
gcaatggcacgtaccaagcaaaccgctcgcaagtccaccggaggaaaggctccgaggaagcaattggcaaccaaagccgctcgcaagtcagccccggcgaccggcggagtgaagaagccccaccgcttcaggccaggaacggtggctctgagggagattcgaaagtaccagaagagcaccgaacttctgatccgaaaactccc

SEQ ID NO: 173946 - DNA, 201 bp, Glycine max
tgttgaggatagcacaaagaaaagtaaacactggcacagcaagagttgttcaaatgggagatggaaaagggagaatttgtgtcactggaggcacaggattccttggttcattggataatcaagagcctccttgaacatggatatgctgttaataccactataagatctgacccaggacgcaagatagatgttagcttcctc

SEQ ID NO: 173947 - DNA, 203 bp, Glycine max
ctgtatatgtgggtgccttgcagaacatatttagcaagagtgccaagtacagcttatttgatccctgcaaagaaatggcctatattccattggatgaggataccaaggttaaagggaaggcagccattgatgttgtgtgcaacccattggggaagtctggaggtgccctcatccagcaatttatgatattgacttttgggtca

SEQ ID NO: 173948 - DNA, 206 bp, Glycine max
  unsure (1)..(206): unsure at all n locations
cacagctactcagaagactgttgatggtccttcaaacaaggactggagaggtggaagagctgcttgcgttcaatataattcctagcagcactggagctgctaaggctgtaggaaaagttcttccagcgctgaatggtaaattgactggaatgtccttccgagtccccactgttgatgtttcagttgttgacctanctgtcaggcta

SEQ ID NO: 173949 - DNA, 170 bp, Glycine max
aaaatttctaatgcttccattgcttcatctgactcactcatcaatggctctgagactgaaccctatccccacccaaaccttctccctcccccaaatgcccagcctcagatctccccgcttccgcatggcttccaccctccgctccggttccaaagaagttgaaaatatta

SEQ ID NO: 173950 - DNA, 202 bp, Glycine max
gttcaaaggtaaggtaggttaacactcttcttcatcgtcgtcgcaatgggacgtgtgatccgtgcgcacgtaagggagcaggctcggtcttcaagtcccacacgcaccaccgcaagggccctgcacgcttccggagcctggacttcggggagcgcaacggctacctcaagggcgtggtcaccgacgtcatccatgaccctgg

SEQ ID NO: 173951 - DNA, 200 bp, Glycine max
gctcgtgcctctagggttatcatatctccatttccatttcctctctctcagtttccaagaatcttaagctatgggaaagtcttacccaaccgtgagcgctgattaccagaaggccgttgagaaggcgaagaagaagctcagaggcttcatcgctgagaagagatgcgctcctctaatgctccgtttggcatggcactctg

SEQ ID NO: 173952 - DNA, 201 bp, Glycine max
gtagtgcagcaggaagaagcaataatggcgccgaagataacacgtaaggttagcagaaaccccgaattgataaggggaatcggagagtactcgaggtctcaaatgtaccacaagaggggcatttgggctatcaaggccaaaaactgtggcgttttacctcgccacggccctaaacccaaacctgaaactcccgctgaaaaa

SEQ ID NO: 173953 - DNA, 200 bp, Glycine max
ccacctcattcatactcttagcttatgctaaatacttgaccaaagcccatgtggttgtgaactgtggtggaaccatagtaactccaaagagactccgagctatagcccaaaaacaggtggattacttgctgggagacaaccccttgaagatgtcttatatggtggggtatggtccacggtacccgcaaaggatacaccac

SEQ ID NO: 173954 - DNA, 196 bp, Glycine max
  unsure (1)..(196): unsure at all n locations
gtttattattcttctctcggcgtcccatggacgaagaagaggtgcgcaagatcttcagcaagttcgacaagaacggcgacggcaagatctcgtgcgcggactgaaggagatgatggcggcgctgggatccanaacgacgtcggacgaggtgaagcgcatgatggcggagagngaccggaacggcgacggctacatt

SEQ ID NO: 173955 - DNA, 197 bp, Glycine max
gcagcactcacagcgctaaccccttctctctctcactgtccggttctccgatcgccgtctttgccctgcccattcctgatcaatatgtctcgaagatatgatagccgtactacaatcttctcccctgaaggacgtctttaccaagtggaatatgctatggaggccattgggaatgctggtactgcaatagggatctt

SEQ ID NO: 173956 - DNA, 198 bp, Glycine max
ctcaagctttgtaccaaatagcaattttgctgacccttcaatttaaaggtgagtctatctttggtgtgacatcaggagtaaatgacacattgattttcaacacatttgttctttgtcaagtgttcaatgaattcaatgcaaggaagatggagaagaggaatgtcttcaaaggcatacacaggagcaagttgtttttag

SEQ ID NO: 173957 - DNA, 196 bp, Glycine max
ggactttgtcacatacttgcatcaccatggtcatcatcagaaactgccttggtatcgcggcaaggaatggagttatttaagaggtggtctcacaactgtggatcgtgactaatggttggatcaataacattcaccatgacattggcacccatgttattcaccatcttttacctcaaattcctcattatcacctcgt

SEQ ID NO: 173958 - DNA, 196 bp, Glycine max
tgcagacttgtggtcatgtggggttattctctttgtattggttgcaagttacttgcctttcgatgaccctaatcttatgaacctgtatacaaaaatctcagttgctgaatttacttgcccaccatggctttctttcagtgccaggaaattgattacacgaatccttgggatctgatcccaccactcgtatcactat

SEQ ID NO: 173959 - DNA, 293 bp, Glycine max
atggccaccgtcacttctgcagccgttgctattccctcattcactggcctcaaggcaagcgcaggcaaagtgagtgccgcagttaaagtctcagctccccaagccacaaggttgggcatcaaggcttcgctgaaagacgttggagtcgctgttgtggccactgccgcgagtgcagtgctggctagcaacgccatggccattgaattgttgctgggtggtgatgacgggtctctggctttcgttcccaacaatttctccgtggcctctggggagaagatcgtgttcaagaacaa

SEQ ID NO: 173960 - DNA, 252 bp, Glycine max
acaattgatgttggaaacagcagtcagccacgggcaacaggatgtgagtgctgaatgtataggttttcttttcaatacaataaagtacattacttcaaattgatttcactgtgtttagccattgctgtctatgtggaggcatcattgtacattagtatttgctcaagaaacaaattggtccaatgctatacgttgggtgcttgtttggttttgtgataattgacccatatcagttgctctacatgtaggcta

SEQ ID NO: 173961 - DNA, 273 bp, Glycine max
cgagagatccatccatcaattccaatggccgatcagctcaccgacgaacagatctccgagttcaaggaagccttcagcctcttcgacaaggacggggatggttgtattaccaccaaggaacttgggaccgtgatgcggtcacttggccagaacccaactgacgcagagccgcaggacatgataaatgaggttgatgctgatgggaatggtaccattgatttcccagaattcctgaatctcatggctcgcaagatgaaagacactgattcagag

SEQ ID NO: 173962 - DNA, 281 bp, Glycine max
gttttagcgcactgtcttctagatttaaggaagatgggtaaggaaaaggttcacatcagtattgtggtcattggccatgtcgactctgggaaatccactaccactggtcacctgatttacaagcttggaggcattgacaagcgtgttattgagaggtttgagaaggaagctgctgagatgaacaagaggtctttcaagtatgcctgggtgctggacaaacttaaggctgagcgtgaaagaggaatcaccattgatattgctttgtggaagtttgaaacaac

SEQ ID NO: 173963 - DNA, 286 bp, Glycine max
gcgcgggtgaggtagaacccttccactgtggtgactctgcgatgggtgcctacaagtatgtttcagagctatggcgcaagaagcagtctgatgtcatgcgcttcttgcagcgggtgaggtgctgggagtataggcagcaaccttccattgttcgtttgacaaggtctacccgccctgacaaggctcgtcgcttgggcttcaaggctaagcagggctatgtgatttaccgtgttcgtgttaggaggggtggccgaaagagaccagttcccaaaggtattgtttatgg

SEQ ID NO: 173964 - DNA, 287 bp, Glycine max
tccacacccaacattctcacaagtcacagccaaacaccatttcattaattcttgcagaatattgcttagttttgttttatctgaatttggaaacagcttttgaatggctttttcaagagttgcactgctaatatgcacggtcgggtattttgtgattgcctctgccggcaatttccaccaagattttgatatcacatggggagatggtcgggctaagatactcaacaatggagagcttctcactctgtcacttgacaaagcctctggctcgggtttccaatccaaga

SEQ ID NO: 173965 - DNA, 286 bp, Glycine max
ggctcgaggaagaaccaacaagaggggtattgagattgagattcaagtaatggggaagagcaaggttcttgtggtggggggaactgggtacatagggaggaggatagtgagggcaagcctggcactgggccatgagacctatgtggttcagaggccagagttgagcctccagatagagaagctgcagaggctcctctccttcaagaagcaaggtgctcatctcattgaggcctctttcaatgatcacaagagccttgttgatgctgtgaagcaggttgatgttgtc

SEQ ID NO: 173966 - DNA, 177 bp, Glycine max
  unsure (1)..(177): unsure at all n locations
ctttaggccgagtctgtgccccttgctgttgagtaaactgaggatgaagagttggataaaganatggaggaaccggctttttgtttctcatttggagtttgtctacttgagttctataaataatatgtccctgatgattttaattttgtgattaagctttcgataagagacagagag

SEQ ID NO: 173967 - DNA, 280 bp, Glycine max
ggctgcataggcatagactagagagagagttgcaatggccgtttctttggcagtgaaccgtcctctgcttggtcttcacgagaatgtaccattagctgttgctcatccccaattcctcccgttcaaatggccacccaagtccaaactcccctccgtcgtcggaattcgatgctcctcctcccctttcaacgacaaaaccctcatttccatcacacctaacacttcccacctcaatcccaaccctctcgcttgtcgctttcacgcttcccagtttggagaa

SEQ ID NO: 173968 - DNA, 274 bp, Glycine max
gggttttattcattttccgatggcttctgcagatgttgagtaccgttgctttgtcggtgggctcgcttgggccactgacgaccatgccctcgagagagccttctctcagtacggcgaaatcgttgaaacgaagattatcaacgatcgtgagactggcagatccaggggttttggatttgtgacattcgcctcggagcagtccatgaaagatgcgatcggagcgatgaatggacagaacttggacggccgtaacatcactgtcaatgaagctcag

SEQ ID NO: 173969 - DNA, 297 bp, Glycine max
gtaacccagagctacttcgcctcatcgatagtttcaagtctcgttttgacaatggtgagggttagtgtgttgaatgatgctctgaagagcatgtacaacgccgagaagcgcgggaagcgccaggtcatgattaggccatcctccaaggtcatcataaaattcctattggtcatgcagaagcacgggtacattggtgagttcgagtatgttgatgaccacagggctgggaaaatcgtggttgaattgaatgggcggctgaataagtgtggggttattagccctcgctttgatgttggt

SEQ ID NO: 173970 - DNA, 288 bp, Glycine max
cagcgttcatctcaatctagatttgtgtgcggtgcgtctccggtgaagagaagaagatggcgaccgtaccaggacagctcatatgggaggtcgtaaagaagaacaactctttcttggtgaaagagttcggaaggggcactcagagcgtgcagttcagcagagagcccaacaatctctacaacctcaacactttcaagtactccggtttggcgaacaagaaaactgtcactgttcaacctgcgggtaaagaccagtctgtgttgctggcaacaaccaagacaaagaagc

SEQ ID NO: 173971 - DNA, 222 bp, Glycine max
ctgttcaagacatggccccaatgagtttgggtttatctcacagcttatccagatacaaattgaagtttagtgcagagaaggtggataccatgattgtccaggccattggtttactagatgatcttgataaagagttgaatacctatgccatgagggttcgagaatggtatggttggaattttcctgagcttactaaaataatacaggataacatcctatatg

SEQ ID NO: 173972 - DNA, 279 bp, Glycine max
ccctaacgcgtgcatagcagagtcagagacagagacgcagccatggggcggagacctgcgaggtgttataggcaaattaagaacaagccataccccaagtcacgtttctgccgtggtgttcctgatcccaagatcaggatttatgatgttggtatgaagaagaagggtgttgatgagtttcctttctgtgtccatctggttagttgggagaaggaaaatgtttcaagtgaggccctggaagctgctcgcattgcttgcaacaagtacatggacaaattt

SEQ ID NO: 173973 - DNA, 252 bp, Glycine max
tgcgaatgaagccaatccagctcccggagccgccaagccccacggcggcgcgtggcactccggacatcttcgaatccggcgtccacaccctcgtccgccgcgccgtcgtcatcggcaacggcttcccctcctccgagaatcacagcatcggtttgctccgcgcccttggcctctcccacaaccaactcctctaccgggttacgaggccgagatgtggaatcaacgattggctcattggcttcccctctctgt

SEQ ID NO: 173974 - DNA, 243 bp, Glycine max
attgaattctccagagagaagaagaaacttaatcgatcatcacttcacttcactaatacatcatggcagacgagacccagaacaagtatgagagctctgaggttgaggtccaggatcgtggtgtttttgactttctcggtaagaaaaaggatgaagaagacaagcctcatcctcaggaggaggtcatcgccaccgagtttcaaaaagtcactgtctcagaccaaggagagaacaagcacagcc

SEQ ID NO: 173975 - DNA, 228 bp, Glycine max
ctgctgccgaaacccttcccgatccctaaggtaagtgagtaatcggtggttgagaatggtacagaaggcgaagggtaggaaggaggaggtggttaccagagagtacaccattaacctccacaagcgcctccatggctgcacatttaagaagaaagctcctaaagctattagggagatagggaatttgcccaaaaggccatggggaccaatgatgtgagggtggatgtg

SEQ ID NO: 173976 - DNA, 277 bp, Glycine max
gtcccaaagagctaacaagagattcaagaccggcatggctaatgaagaggaacagaaaaaccacctcttcggcatcaaagatctcggtcacaagactctccttcagagtgatgcactctatcagtatatacttgaaaccagtgtctatccaagagagcacgagtgcttgaaagagatacgcaagatgactgcacaacacccactgaacatcatggcaacaccagcagacgaaggacaacttctgagcatgcttgttaagctcacgaattcaaagacg

SEQ ID NO: 173977 - DNA, 225 bp, Glycine max
aattaccattccataacctaaatctcctctttgtttccgagtcagagagcaatggcacgtaccaagcaaaccgctcgcaagtccaccggcggaaaggcgccgaggaagcaattggcgactaaagccgctcgcaagtcagctccggccaccggcggagtgaagaagccccaccgcttcaggcccggaacggtggctctgagggagatcagaaagtaccagaagagc

SEQ ID NO: 173978 - DNA, 282 bp, Glycine max
ccaataatttcacgactccttcggagatctctctctcgcccataatccaaccatggcaaatacgggaaatttagacgcggcgatagagcaattgctgaacgtggagaagcagatgaggctcgccggtgacgtggcaggtaccagaaaggcggctaccgatattttgcagctctgcttcgatgcacgagcctggaaaaccctcaatgaccagattgtcgttttgtcaaaacgacgtggccagctcaaacaggccgtaacagctatggtgcaacaagctatgca

SEQ ID NO: 173979 - DNA, 282 bp, Glycine max
agagagatccatccatcaattccaatggccgatcagctcaccgacgaacagatctccgagttcaaggaagccttcagcctcttcgacaaggacggggatggttgtattaccaccaaggaacttgggaccgtgatgcggtcacttggccagaacccaactgaggcagagctgcaggacatgataaatgaggttgatgctgatgggaatggtaccattgatttcccagaattcctgaatctcatggctcgcaagatgaaagacactgattcagaggaggagctg

SEQ ID NO: 173980 - DNA, 283 bp, Glycine max
tccactttcactggaatcacaatcctgaaacaaaaacatcttagcatttaacatactactagacaacatgaccaccacattggaaagaggtttctcggaagagcaagaagctctggtggtgaagtcatggaatgtcatgaagaagaattctggagagttgggtctcaagtttttcttgaaaatatttgagattgctccatcagctcagaaattgttctcattcttgagagattcaacggttcctttggagcaaaatcccaagctcaagccccatgtcgtgtct

SEQ ID NO: 173981 - DNA, 269 bp, Glycine max
cattttgctattgcactgcaggatgatgacacaaactaccatatggatgtgattgctgggcttgccaacatgagggcccgcaattacagcattcctgaggttgacaagcttaaagccaagtttattgctggacggatcattcctgcaattgcaacctcgactgccatggcgactggtcttgtctgcctggagctgtacaaagttttggatggagggcacaaagttgaagactacagaaacacatttgctaacttggcactgcctctctt

SEQ ID NO: 173982 - DNA, 277 bp, Glycine max
  unsure (1)..(277): unsure at all n locations
gccaaatgtgagtccttcaatgcatcatcaggaaggacaggtggttcaataggtgaagatccagctactggaccagttcatggaggcctactgtgagatgctcattaagtatgagcaagagctcactaaacccttcaaagaagccatgcttttcttctcaaganttgagngtcaactcaaagccctagcagtttcatcagattttggtcaaagtganacatcttcgcagantgaggttgatgttcaggaaaacaacctagattctcangngnaagat

SEQ ID NO: 173983 - DNA, 271 bp, Glycine max
ggtactacaactgttagttggatgtcgcaaatacagaagattgttgttttatccactacagagattgagtatgttgcagtaacagaagccactgaagagttgatatggcgtcagggattgttaacggagttgggattcgtctaatacaaaagtgttttgcatagtaatagtcaaagtgcaatacatttggcaaagaattcaacattttagaacaaagcacattggtctccattatcactttatcagatctttgcttgaggatgagatgcta

SEQ ID NO: 173984 - DNA, 266 bp, Glycine max
caaagatagcagattttggcatggcaagactggttttaatggatcaaactcaagcaaatacaaatagaattgttggaacctatggatatatggcacctgagtatgcaatgcatggacaattttcaatgaaatcagatgtctttagttttggtgtactggttcttgagatcataagcggccataaaaacagtggcattcgtcatggggagaatgtagaggatctactgagcttcgcatggagaaactggagggatgggacagctgtg

SEQ ID NO: 173985 - DNA, 275 bp, Glycine max
tgggcggtgttactccttctctcgttgattcggatctagagtcttttttcactcttcagttctcgttgttgttcttcgctttcctgaaactagggttttcaatttcgattcattcgttaataattaaagatgtttgggagggcaccgaagaagagcgataatacgaggtactacgaaatcctcggcgtctcgaagaacgcttcgcaggatgatctgaagaaggcttacaagaaagccgccatcaagaatcacccttgacaatggcggtgatcccg

SEQ ID NO: 173986 - DNA, 274 bp, Glycine max
caacatattattaagacacaccccaaaccaaaccacttcacacagaacacatatccattggtgaaggagtatcatgggtgaacaattagggctactaaaagtcatggttgtgcaagggaaaaggttggtgatccgggatttcaagaccagtgatccttatgtagtactcaaactagggaatcagactgcaaagaccaaggtaattaatagctgcttgaatcctgtttggaatgaagagctgaatttcactctgacagaaccattgggagttctg

SEQ ID NO: 173987 - DNA, 280 bp, Glycine max
cccaccgcgtttcggagagagagacgtcgcaatggggaggaggcctgcaaggtgttaccggcagataaaaaacaagccataccccaaatcacgtttctgccgtggtgttcctgatcctaagatcagaatttatgatgttggtatgaagaagaaaggtgttgatgagtttcccttctgcgttcatctggttagctgggaaaaagaaaatgtttcaagtgaagcattggaagctgctagaattgcatgcaacaaatatatggcgaaatttgctggaaaggat

SEQ ID NO: 173988 - DNA, 274 bp, Glycine max
tgtcgctgctccgtaccagtttcactgcataaatttgagagaaaactctgcaaacatgttggtttatcaggacctccttacaggtgatgagcttctctcggactccttccgttacaatgaaattgagaatggaatgctgtgggaagttgaggggaagtgggttgttaagggagcagttgatgttgacattggtgcaaacccttctgctgagggtggagaagagaaggaatccatgacgcgctgttaaggttgttgacatgttgatacattcaga

SEQ ID NO: 173989 - DNA, 275 bp, Glycine max
gctagattgatcaagaaacttgcaaagattaaggaagaacaagggcttatagctgaagctgctgatttgatgcaagaaattgtggtggaaacttttggtgccatggccaagactgagaaaattgcattcattctcgaacaagtccgtttgtgtctagatcgccaggattatgttcgtgcacaaatactctcaagaaagattagcccaagagtatttgatgccgatttatctaaggaaaagaaaaagcctaaagaaggtgataatgttgtagaaga

SEQ ID NO: 173990 - DNA, 276 bp, Glycine max
cgaaaattagggtttgtagtgtagcaggaacaagcagcaatggcgccgaaggtaacacgcaaggttagcagaaaccccgaattgataaggggaattggaaagtactcgaggtcgcagatgtaccacaagaggggcatttgggctatcaaggccaaaaatggtggcgttttacctcgccacgaccctaaacccaaacctgaaacacccgctgaaaaaccacccaaattttaccctgctgatgatatcaagaagcccttgtcaacaagcacaaaccca

SEQ ID NO: 173991 - DNA, 248 bp, Glycine max
aaattacactctttctgtgtaggccttgagggtgcacctgacctaaaggcagcaaaggaagtagcagactacataggaactgtacatcatgaatttcactacactgttcaggatggcatagatgccattgaggatgtgatctatcacattgaaacatatgatgtgacaacaattggagcaagcattcccaggtttcttatgtctcgtaagatcaagtcattgggagtaagatgggttatatctggaga

SEQ ID NO: 173992 - DNA, 268 bp, Glycine max
gctgtctgctgttagatctgtacccgcctagccattgatttggaaaagtccaacttcaaggatgagtaagcttcagagtgatgctctaagagaagctatctcaggaatcatggctgattccaaggaaaagaacaggaaatttgtggagaccattgaactccaaattgggttgaaaaattatgatccccagaaggacaagcgtttcagtggctctgttaagttgcctcatattcctcgccccaagatgaagatttgtatgcttggagat

SEQ ID NO: 173993 - DNA, 275 bp, Glycine max
  unsure (1)..(275): unsure at all n locations
aaaccctagggtttggaagaagctgatcggagaagatggtgcagcgtctcacctaccgcaagcgccacagctatgccaccaaatccaaccagcacagagtcgtcaagactcccggtggcaagcttgtttatcagaccacgaagaagagggccagcggacccaagtgccctgtcactggaaagaggattcaagggattccacatttaagggcaacagaatataagagatcaaggttacccannaaaccgaggactgtagaccgtgcatatggtggt

SEQ ID NO: 173994 - DNA, 277 bp, Glycine max
catttctccatttccattttctctctcacttttcaagaatcgtaagctatgggaaagtcttacccaactgtgagtgctgattaccagaaggccgttgagaaggcgaagaagaagctcagaggcttcatcgctgagaagagatgcgctcctctaatgctccgtttggcatggcactctgctggaacctttgacaagggcacgaagaccggtggacccttcggaaccatcaagcaccctgccgaactggctcacagcgctaacaacggtcttgacatcg

SEQ ID NO: 173995 - DNA, 267 bp, Glycine max
atatcttccaaccattatatctggcacgtatataagctggatttatcttagatactggcagaggaaaccagaaactaaacatagaggtgacctgagtgaagattttgctttctccacattttttccagaatttttaagaccggtcattgaccctatcgcttcaatatttcatcgaatgctctgtggaagatatgatgcttctaatgatgatggctacagtctggaaaatgagcctttaccaggttcagactcaattgaggcatccag

SEQ ID NO: 173996 - DNA, 242 bp, Glycine max
ctcaatgggtagaaacgaagccgccatttccttcctcaccaacgtcgcccgcactgccttcggcctgggcgcggcggccaccgccgtctcctcttccctctacaccgtcgacggcggccagcgcgccgtcctcttcgaccgcttccgcggcatcctggactccaccgtcggcgaagggacccacttcctcatcgcctgggtccagaaacccgacatcttcgacatccgcactcgtccccaca

SEQ ID NO: 173997 - DNA, 270 bp, Glycine max
ctgtgtgtgtgaaactctctctcacacacaagtcacaaaaacaacatgtgttgttccaatggcatcagcaacaccccttttgaaagatgagctcgacatcgtgatccccacgatcaggaatctggatttcttggagatgtggaggccattctttgaggcttaccatctcataattgtgcaagatggtgacccttcaaagaccatcaaggtccctgaaggctttgactatgagctctacaaccgcaatgacatcaacaggatccttggccc

SEQ ID NO: 173998 - DNA, 266 bp, Glycine max
aaggaataccacgatcaccaccgcaaagcaatgggcgctatactttctgccttaactggcggtgccgcaacggcggcgacgtcttcgccggagagttctgcttctagggtccagtctttccactcttcggcgcgctggcagctccacttcaacgagctcaaagaaaccaataagctcgttgtgatagatttctcggcgtcgtggtgcggcccttgcaaattcatagagccagcgattcacgccatgtccgaaaagttcaccgacgt

SEQ ID NO: 173999 - DNA, 266 bp, Glycine max
cacaaacagaggctacgtacgatcaaattaattaagatggcggaagtgaggaacaaacaagtggttctgagggactatgtgagtggttttcctaaggaatccgacatgaacatagttgaaggaaccacaatattgaagcttccacaaggttccaatgatgtgcttctaaaaaatctctacctttcctgtgacccttacatgagaatgctcatgaccaaggtggaaggcctcgacgtgtttggcacctatacacctggctctccatt

SEQ ID NO: 174000 - DNA, 271 bp, Glycine max
atatggaagcctcgcgagattccaaaccctgaatactttgaactcgagaaacctggattttgagcccattgctgctcttggcattgagatttggacaatgcaggatggcatcctatttgacaatattctgatagctaacgatgataaagttgcagaatcctatcgggagaacacatggaagcccaagtttaccattgagaaataaaaacagaaggctgaagatgaggctgcaactggttcagatggtattgcaggcttccagaagaaggta

SEQ ID NO: 174001 - DNA, 259 bp, Glycine max
agctgcagcattagggtttttcatctgcttcaatggggaagggaacagggagtttggtaagagaaggaacaagactcacactctctgtgtgaggtgtggccgccagatcttccatctccagaagagtcattgcgccgcttgtgctttccccgccgcacgcactaggagatataactggagcgtcaaggcaatccgcagaaagaccaccggaactggcaggatgaggtacttgcgtaacgggcctcgccgattcaagagt

SEQ ID NO: 174002 - DNA, 278 bp, Glycine max
aagctttgcaagcaaacataaactatgtgtgcagccaaggagttgattgtaggccaattcaaccaggaggagattgctttgcagccaacaacgttaaggctcttgccacttatgccatgaatgcctactaccaggccaatgggcgccatgatttcaactgtgacttctctcagactggtgttattactactactaatccaagccatgataaatgcaaaatctgagcatgtttatttaaaggttataatcagaggcaagaaaggaagatagagaaaagc

SEQ ID NO: 174003 - DNA, 278 bp, Glycine max
ctaactagagccgagcagcgagagacagaagccctagcagaaatgccggctggtcacggtttgagatcccgcaccagatattcctgtctctcgtcccttcaggaagaagggtaccatcgccctcaccacatacctcaccacctaccacgtcggcgattatgtcgacgtcaaggttaacggcgccgtccacaagggaatgcctcacaagttctaccatggccgcaccagtcgcgtctggaatgtcaccaaacgtgctgttggggtcgaagtcaacaagc

SEQ ID NO: 174004 - DNA, 283 bp, Glycine max
cggctcgagtcgaaactgaacgctgcagcagaagatgttcaaaaaattttctggcgaagatgtatctgcacagaaccaagtgaaggcatctgttcaacgaaaaatacgacaaagtattgctgaagagtatccgggccttgaacctgttttggatgatatacttcccaagaagtcccctcttatagttgctaaatgtcagaaccatctcaatctggttcttgtgaacaacgtgcctttgtttttcagtgtccgtgatggaccatacatgcccaccttgcgactt

SEQ ID NO: 174005 - DNA, 284 bp, Glycine max
cgaaaattagggtttgtagtgtagcaggaagaagcagcaatggcgccgaagaaaacacgtaaggttagcaaaaaccctgaattgataaggggaatcggaaagtactcgaggtcgcagatgtaccacaagaggggcatttgggctatcaaggccaaaaactgtggcgttttacctcgccacgaccctaaacccaagcctgaagctcctgctgaaaaaccacccaaattttaccctgctgatgatatcaagaagcccttgtcaacaagcacaaaccgaaaccagct

SEQ ID NO: 174006 - DNA, 98 bp, Glycine max
caggaatcttgggatcaagtgtcgtttgcacgagttggcaaataaaaggagaatttcagtgacaggagcctcaaagctacttgccaatattttatact

SEQ ID NO: 174007 - DNA, 265 bp, Glycine max
aattcaaagaaggcgtcttcataaacgcctttattctccgtttccgtttccttcccggaattcgatttttcatctctctcttggagcacaccgatgttgctgtccttttggataatgaagccatctatgacatctgtaggcgctcccttgacattgaacgtcctacctacaacaacctcaaccgtcttgtttctcaggtgatgtcttctttgactgcttccatgaggtttgatggggcctgaatgtggatgtgactgaatgccag

SEQ ID NO: 174008 - DNA, 266 bp, Glycine max
tcataatgggtgttttcacattcgaggatgaaatcaactcccctgtggcacctgctactctttacaagggcctagttacagatgccgacgacgtcatcccaaaggctcttgattccttcaagagtgttgaaaacgttgagggagatgtttgcccaggaaccatcaagaagatcactttcgttgaggatggagaaaccaagtttgtgctgcacaaaatagaaagcattgatgaggcgaacttgggatacagctacagcgtggttggg

SEQ ID NO: 174009 - DNA, 277 bp, Glycine max
gacttatttgcaatcaattactataaggcttgaggagtggaggcttaagcgaagagacacagaggagtggatgaggcatcgccaactccctgaagatttgagaagtcgtggttagacgatttgttcaatataaatggcttgctactcgtggagttgatgaggaaaccattctacgtgccttacctgctgatcttcgccgtgatatacagcggcatttgtgcttagaccttgttagaagagttcccttcttctcacagatggatgatcagcttctgga

SEQ ID NO: 174010 - DNA, 278 bp, Glycine max
gtgatatcagatgctgctgctaccacttcagagggaaggagtgttttccaagtgtatatagatgctgctgaagttatgcttgaggatgatgttgcgtcaaatagagctactggttcttatggagctagtattattcaacaacaaacagagaaacgaaagctttatgttttgactcattgcaacactggaagtctagccacagctggatatggtactgctctgggtgtcatccgtgcacttcatagtgccggagttctaaaaagggcttattgcacaga

SEQ ID NO: 174011 - DNA, 279 bp, Glycine max
gtcgttccgtcgttcgcgatggcgtttcgggtgcgaagcctgacctccgctctctctttcttctctctctcttgtccatcgcttccgccaatgtcttcttcagagagcgtgtcgatgacgggtgggaaaatcgatgggttaaatcagattggagaaaagatgagaacgtggctggggagtggaaccacacctctggtcaatggaatggagacgctaatgacaaaggtattcaaaccagtgaggattacagattctatgctatttcagctgagtaccctg

SEQ ID NO: 174012 - DNA, 270 bp, Glycine max
gagtgaagaaggcaaatcgcggagactagatctgatctgagagaatggctcctcggtctagcagcaaggacgcccaataccttttccgcgctctgtggtctgcatatgctgcaacccccattaatctcaagatcattgatctctatgtcatctatgccgtatttaccgctttcatccaggttgtttacatggctttggttggatcatttccatttaactccttcctatcaggagtactgtcttgtgtaggaactgctgttcttgctgttt

SEQ ID NO: 174013 - DNA, 266 bp, Glycine max
agaagacttcacaaccctagctagcagtccctcagcattgtgtgcccacaaatacagctccttgttcctggttacgtttgatagaagatgggattttgggggacgcgggtgatggagattgtgaagaagcatgattctgtagggctggtttggaagagaatcaagctcaccaccacccgaaaagccaatgctaagaagcgtcttcttcgggtttggcagaatgaagctgtcctcaaagcctgttctgccactcccaacgaacctca

SEQ ID NO: 174014 - DNA, 271 bp, Glycine max
ctcagagctcgctctcctcgccgtttctctcatcgctagtttcaagtctccttgtgacaatggttgagggttagtgtgttgaatgatagctctgaagatcatgtacaacgccgataaacgggggtatcgccaagtcatgattaggccgtcctcgaaggtcataataaaattcctcttggtgatgcagaagcatgggtacattggtgatttcgagtatgttgatgaccacagggctgggaaaatcgtggttgaattgaatggcaggctgaat

SEQ ID NO: 174015 - DNA, 262 bp, Glycine max
tgacgatccaagtgatagacactcgtcgcgatggaacgtgtagctgaatccgagcgaactctgtacccatacgtgactggatcctctgtagtcgctatcagatacaaagatgggattctaatggccgctgacatgggaggttcgtatggatctaccctgcggtacaagagtgttgagcgtatcaagcctattggaaagcattctcttcttggtgctagcggggagataagtgactttcaggagattctgcgttaccttgatg

SEQ ID NO: 174016 - DNA, 266 bp, Glycine max
ctttctctttttctctctctccattccgtgttttcagctccggtaacctctccttctccgccgccgttgctatctccgccgtgaccttccatccctcaacgccccacagatcttcaatttgattgcttgggtcaacaatttctgtcattctcaatcatggcaactagacttcagtttgaaaataattgtgaagttggagtcttctctgaactcaccaatgcttactgtttggttgcgattggaggttctgaaagcttctacagtgt

SEQ ID NO: 174017 - DNA, 261 bp, Glycine max
atgtttcgctatctctcccattctctcgcatctcaatacccttttgatttgtgaaaggaaagcaaacatgcttgatcaggtccaacaccctacaatcatagacaaggttgctggccagctccatctccgttctggtgtttctggtattaggagttatgaaggagcctactgccaccccacaatgtaccaaagaccctcttttgggaattactcgaatgctgcattgcagtatcctgtagatgccctcatgcaaagctacta

SEQ ID NO: 174018 - DNA, 262 bp, Glycine max
ggaagagaccctagccactctcccggcgtcgcggtgcgtatctgcgtgaataccctaacgggtaaaacggtcgcgttgtaggttgtgtcttcggacaccatcgacaagagtggttgccaagatccaggaccaggtaggcatccctccggtccagcagctgctcatcttcgccgggaagcagctggagtacggccgcaccctcgccggctacaacatccatgaggagtccacgcttcacctcgtcctccgcctccgtggcggg

SEQ ID NO: 174019 - DNA, 265 bp, Glycine max
attacttctcttcgccttttgctttgcaattgtcaccaagcaattctagcttagctctcacaagcaagcattatcaacaatgaagaaaattgtgttaaaggtggacttacatgatgacaggatcaagcgagaagctatgaagacagcatctggcctttcgggggttcaatcagtttctgttgacattaatgacaagaaaatgaccttattgggggatgttgatccagtgagtgcagtgtcaaagctacgaaagtggtgtcacact

SEQ ID NO: 174020 - DNA, 263 bp, Glycine max
gttctcaattctcttcaccctttgcctctgaaagaaatgggtagtcttgaagcggaaagaacaacagtaggattggcagcaagagacccttcagggattctctccccatacacctacaatctaagaaacacaggccctgatgatgtttacattaaagttcactactgtggagtttgccattctgatctccaccagattaaaaatgatcttggcatgtccaactatcccatggtcccaggacatgaagtggttggtgaggtact

SEQ ID NO: 174021 - DNA, 266 bp, Glycine max
caaaactaggtttcaggttcacggtgtcccgcagctcgcgcatggaagtgttaaaggaagcataatagttgctagtatggaacaaatatttcacaaggaggggttacgtggcatgtaccgtgggctcgcgcccactgtgctggctttgcttccaaattgggcggtttattttagtgcatatgagcagcttaagagccttcttcattccgatgatagccatcatcttcccattggagctaatgtgatagctgcttctggtgctggag

SEQ ID NO: 174022 - DNA, 267 bp, Glycine max
aatttctcagttctctcacacactcattcggagctccgaatctcagattctatggttagggttcccaatttctccaccgatcagaaaatgaggtcaactggtggttctaccaagggcggaaggggcaagcccaaagcctccaaatccgtttcaagatcgcagaaagctggtctccaattccccgttggaagaatcgctcgattccttaaggctgggaaatacgccgagcgtgttggtgctggtgctcctgtgtacctctctgcagtg

SEQ ID NO: 174023 - DNA, 271 bp, Glycine max
ctttttctctctgtactcagactcacttccccacttatttatacaatgtcggcttacaaagaccaggatacccgtcttcattgcatcaaaactaaggtacgtgtcgtccccaatttccccagatccggaattgaagctcgaggttttatttttggtcctcccattgcgctggctataggagcaaagtttgtaccattgaggaaaccaaagaagttgcctggaaaagttatttctcaagaatatattctggaatatggaagggactgtcttg

SEQ ID NO: 174024 - DNA, 220 bp, Glycine max
gctatacttgttccttttgaaggttagaagtgctacaatacaaacaatggcagctactcaggaagatgtgaagcttttgggtattgtgggaagcccatttgtgtgcagggtccagattgcccttaagttgaagggagttgaatacaaatttttggaagaaaatttgggcaacaagagtgatttgcttctcaaatacaaccctgttcacaagaaggttcca

SEQ ID NO: 174025 - DNA, 213 bp, Glycine max
tgctgataacccataaccgaccgcaccaccgttttcctttgctttgcgttctacaatgtcgaaaacctcagagattattacatgcaaagctgctatttgctggggaataggaaaacctgtgactgtggaagagatacaagtagaccctcccaaagccaccgaagttcgagttacgatgctttgtgccagtatatgctccacagacatctctag

SEQ ID NO: 174026 - DNA, 211 bp, Glycine max
cgttggtgcaaagcatccttcgtttcaatttctctctctcagcgctttctgcaatcgaaccttccatctccaaagggatccacaggccgaaggagaaatggggctgacattcacaaagcttttcagtcggcttttcgcgaagaagtgtatgcgaattctgatggttggtcttgatgctgctggtaagaccactatcctgtacaagctcaag

SEQ ID NO: 174027 - DNA, 208 bp, Glycine max
gtttgttgtgagctataagctagtttatcgtgaggagaatatgaagttgtttgttttctttgttgctgcagtagttttggtagcatggccatgccatggcgcaggctaccaaaggttccctctccgaatgaaaactggctatggtgagcgttcttcggaggtaaaatgcgcaagttttaggcttgctgtggaagcacacaacatccga

SEQ ID NO: 174028 - DNA, 209 bp, Glycine max
ctcatatccttatcctgcttctttcactggaagtcatttctgcttctagcttgaatcccaacgctccgatgttcgtgccactcgcctatcggacggtggaggatttctccgaccagtggtggaacctcgttcactcctccccctggttccgcgactactggctccgcgagtgcttccaagatccccagttccaaaacgacgacgctttc

SEQ ID NO: 174029 - DNA, 207 bp, Glycine max
tgggaaatggacggtgcagcaggcggcggactttcgatagcggcgcccacgattgcggcttcgttggattgccggtacttgagtgggttgatggaggagagggagagtgccgcagcggtgttgaaggaggcggggttgagtgatgaattggggagggttagtgtgagtggggtggataagaagaggttgattgatgatgtgaggcag

SEQ ID NO: 174030 - DNA, 206 bp, Glycine max
ctttggtctggttccatcagagaatgacagtaataagttgttattagctgccaaaaggataagaagggcaacaggcaccggttttgtcatatccttggctgcttatgatttttctcgagccagcaacaaatatgttggtaaactaaggtctaactttttgggtaccaagttcaccgtatatgacagtcaagctccacatgattctg

SEQ ID NO: 174031 - DNA, 218 bp, Glycine max
atatgatcccttcttcagaatccctgctttccttttttgacttagatacttcttatgcaactatagtgaggctaagagttggtgcataattaatcaaaatgttggccatattccacaaagcttttgctacaccacctgaagagctgaacagtcctgcatcttacaaaggttccaagaagcctaaggttcctgaggaaactctcaaagatttcctttcc

SEQ ID NO: 174032 - DNA, 235 bp, Glycine max
acgtaactcggaattggtcgatgagcgtgttggatgaactggagaagaacttgcagctgtccacttggcatatggagccatcaaggatgacgctttaccgttttggcaacacctccagcagttctctttggtatgaattggcttacacagaagccaaagggaggatcagaaagggtgacagaacatggcagatagcattcggttccggattcaagtgcaacagtgcagtgtggaa

SEQ ID NO: 174033 - DNA, 213 bp, Glycine max
cgagttacagccgcaccttgattcatgagcgagcgaccttgaagagctatggctgtcggaaagaataagaggatttccaagggaaagaagggtggcaagaagaaagccgctgatccctttgccaagaaggactggtacgatatcaaggccccttccgtctttcaggtcaagaatgttggcaaaaccctcgtctctcgtacccagggaaccaag

SEQ ID NO: 174034 - DNA, 210 bp, Glycine max
gcacaaagcaaagctcatccttgtgttaaaaaaatggcagcagcttcttccatggctctctcatccccatccttggctggcaaggccgtgaagctgggcccatcagccccagaagtgggaagggtgagcatgaggaagaccgtcaccaagcaggtctcctcaggaagcccatggtacggcccagaccgagtcaagtacttgggcccattc

SEQ ID NO: 174035 - DNA, 210 bp, Glycine max
tggtgcgtatccaattcacaaggcaacaatcatgccacgtggatctgctttaggaatggtcactcagcttccctcaagtgacgagacatcaataagcaagaaacagttgttagctcgccttgatgtttgtatgggaggaagagttgcagaggagcttatctttggccaggattatgtcacaactggagcaagtagtgatctccacactgc

SEQ ID NO: 174036 - DNA, 209 bp, Glycine max
caagagcaaggctgagtagaaaattgcaatccctgggtttggaaatggcagcggcaggttgtcagaagtcttctggaattgagcacgaagatcgtcgctgttggcagaaactacgctgctcatgccaaagaactaggcaacgccgttcccaaggagccggtgttgtttctgaaaccgacgtcgtcttacttgagtaacggcggaaccat

SEQ ID NO: 174037 - DNA, 208 bp, Glycine max
cttcaccaaccaggtcattgctcagcttgagttgtggatcgtgaagagtaccggcaagtacgagaagaaggtttacgttttgcccaagcaccttgatgagaaggtggctgcacttcacctgggcaaacttggtgctaagctgacccagcttagcaagtcccaggctgattacatcagtgtgcctgttgagggtccatacaagcctgct

SEQ ID NO: 174038 - DNA, 204 bp, Glycine max
ccaaaccctaacactcctcttcctcttcgatcatcacctctccacaatgccgccgattctcgacccgtcccagatagtcgacgtcttcgtccgcgttaccggccgcgaagtcggcgcggcgagttccctggccccgaagatcggtcccctcggtctctcccccaagaagatcggagaagacatcgccaaagaaaccgccaggga

SEQ ID NO: 174039 - DNA, 217 bp, Glycine max
tctcaaccctagtaagccgcaatggtgaagtactcaagggagcctgacaatccaactaagtcttgcaaggctagaggcgccgaccttagggttcattttaagaacacaagggaaactgcctttgcaatcaggaagttgcccttggtcaaggctaaaaggtacttggaagatgttcttgcccacaagcaggcaattccattcagacgtttttgtcgag

SEQ ID NO: 174040 - DNA, 204 bp, Glycine max
tgctatagcagatgaaagtgtgatggtcataggatatggcaccattttgttagcaaggccacctcatgttaaggctgccaccggagaagaagcctcagcagaagatttaggaggtgccactgtgcactgcgagacatccagggtttctgattagattcctcaagacggactccatgcacttgcgcttgggctgactataattaa

SEQ ID NO: 174041 - DNA, 206 bp, Glycine max
cggctcgagctcagcagtcgtcagaaagactccataacccaaaaatgcctttcaagaggtacgttgagattggaagggttgctcagatcaactatggcaaagagtacgggcggctcgtgatcattgtcgatgtcattgaccagaatagggctcttgttgatgctcccgacatggtgaggtcccaagtgaacttcaagaggctctcg

SEQ ID NO: 174042 - DNA, 205 bp, Glycine max
tgctctctctctctctctctctctctccctatatctatctttctctttctcttttctggttgaagttcgagagacaaatacaccatggcagatatcctgagtgaagaacagattgttgattttaaagaggcctttggcttgtttgacaaagatggggatggttgcattactgtggaagaacttgccactgttattcggtcgttgg

SEQ ID NO: 174043 - DNA, 215 bp, Glycine max
cacaaacacctcgtccctcacaatgcagctagcaatggcggccaacgctgtcgtttcaccgtcgccgttccgacctcagccctttctccggtcatccttctccggcgtctccgtcaagctcactccgcaatccataacgctttcacgctccaagcccctcaccgtcttcgccgccaccaagaaggccgtcgccgtcctcaaggggacctccgccg

SEQ ID NO: 174044 - DNA, 212 bp, Glycine max
ccaacatgttacactgacaatagtggctctatcacctatgaagaattaaagactggtttggctcgaatcggatcaaaactgtctgaggctgaagtgaagcaactcatggatgcggctgatgttgacggaaatgggtcgattgactatcttgaattcatttcggctacaatgcataggcacagacttgatcgtgatgaacatctttacaaagc

SEQ ID NO: 174045 - DNA, 207 bp, Glycine max
agatagtgtgggagagagaagagcggaagagaaaatgacgaccaggttcaagaagaacaggaagaagagaggtcacgtcagcgccggacacggccgtatcggaaagcaccgcaagcatcccggaggtcgcggtaacgccggtggaatgcatcaccaccgtatcctcttcgacaagtaccatcctggtttcttcgggaaggtaggcat

SEQ ID NO: 174046 - DNA, 205 bp, Glycine max
ctaatccctctttcttcctcttcctcagtagtgcgattttcgattctcttctctgcaactatgcctaaccctaaggtcttcttcgacatgaccatcggcggtcaacctgccggccgcatcgtgatggagctctatgccgacgtgactcccagcaccgccgagaacttccgcgcgctctgcaccggcgagaagggcgccgggcgga

SEQ ID NO: 174047 - DNA, 204 bp, Glycine max
caacggagccctctcttcaggtcaccatctagactgcaatcatggctgatggaccacagcatccatcagttgttcagaagctagctggacagtcttacctggtgtccaggcttagccccaactttaactctaggaattattctgcaactggttcttacgtcaatggcggaatgcactcgcctgggttggctgttgtgtcacctg

SEQ ID NO: 174048 - DNA, 203 bp, Glycine max
gctctctcactcacaaacacacactgaactagatatcatcaaaagagacatggctgagcaaaccttcatcatgatcaagcctgatggcgtccaaagaggccttattggcgagatcattagcagatttgagaagaaaggtttctacttgaaaggtttgaaacttgttactgtggaccgtccttttgctgagaagcactatgctg

SEQ ID NO: 174049 - DNA, 213 bp, Glycine max
tgttgttgttgttggaagccaaaaccctagcagccggcgagaatggcagacgttgaggttgatgtggcggcggcggcggcggcggcggctgcagggcagccaaagaagagaacgttcaagaagttcagcttcaggggggtggatctggacgcgcttctggacatgtccactgacgaactcgtgaagatgttcagtgctcgcgcacgcagaagg

SEQ ID NO: 174050 - DNA, 211 bp, Glycine max
cactcagccacacattctccgacatctcgagaacactggcttccaagtaaggtgcgaaaggtggagttgtagcaccaaagaagaaggttcacgagaaggtaacgaaccctttgttcgagaagcgtccgaagcaattcaggatcggaggcgcgctgccgccgaagcgggaactgacgcgcttcgtgaactggccgaagaacgtccaaatcca

SEQ ID NO: 174051 - DNA, 192 bp, Glycine max
ggcgcgaatgcctgtaagagtgaaaaaacctgctcttttccttctctcaagtctcaagagatttcatcatggctccaaagaaggacaaggctccaccaccttcctccaagcccgccaaatctggcggtggcaagcagaagaagaagaagtggagcaagggaaagcaaaaggagaaggtgaataacatggtgc

SEQ ID NO: 174052 - DNA, 206 bp, Glycine max
aaataaaagaataataaatagaaaaaggagcatgttgattatatagaaagtaaagggcaacaatcatttttgtttaccatgggtaaggacaccatcgctgacataataacctatataagaaatgctgacatgaataaaaaaggaatggttcaaataccatttactaacataacagaaaacattgtaaaaatacttttacgcgaggg

SEQ ID NO: 174053 - DNA, 203 bp, Glycine max
gttctaactaagcacttcgtcgctgcttttgcttctgtagaagatgtctctgcgagtgctgaaccctaacgccgaagtgctgaacaaatcggcggcacttcacatgaacatcaatgccgccaagggtctgcaagatgtcctcaataccaacctcggtcccaaaggaaccatcaaaatgctcgttggtggtgccggtgatatca

SEQ ID NO: 174054 - DNA, 206 bp, Glycine max
cttcttttcatatccaatattcattccttgtgcttgtgcttgctatggtgatcacattgatgaaccctaccaatgcaaccctctctccccatttctatgataaagtttgccctcaggcattgccagttataaagtcagtggttcaacgagcaattatccgtgagcgacgcatcggagcatctcttctgcgcttgcatttccatgat

SEQ ID NO: 174055 - DNA, 310 bp, Glycine max
aatttgcgggttttggatttggacttggtcgtcaacacagtctaattaatatctttttgctccttcgcttatgaatcttcttcttcttcttcttcttgttcctgcaacgcactgaattcgatcaatcaatccatcttcaattgctttgtttcgatcggaggaaaatggccgatcagttatcgaagggagaggaattcgagaaaaaggctgacaagaagctcagcggttggggcttgtttggctccaagtatgaagatgccgccgatctcttcgataaagccgccaattgcttcaagctcgccaaatcatg

SEQ ID NO: 174056 - DNA, 311 bp, Glycine max
agcgagcgagcagtttcaaagagaggatttgggattgggaaggcgagggattgcgctgcgtctcttcctcttctctttcgattcatccctcattcataatcttccaatccaacaacctcagcctcacactcacacatacacacatctgaacgcgtatcgtccctcccatggcttcaaagcgcatcctcaaggagctcaaggacttgcagaaagacccaccaacttcttgcagcgctggtccagtagctgaggacatgttccattggcaagcaacgattatgggtcctgctgatagtccttatgctggaggt

SEQ ID NO: 174057 - DNA, 311 bp, Glycine max
cgagatgaagaagatgtacggcctgatcgagacctacaagttgaacggccaattcagatggatttcatcgcagatgaaccgtgtgaggaatggagagctctaccgcgtgatctgcgacaccaggggtgctttcgtgcagcctgctgtatacgaggcttttggtttgacagtggttgaggccatgacttgcggcttgccaacattcgccacatgcaatggtggtcctgctgagatcattgtgcacggcaagtctggcttccacattgacccttaccatggtgaccgtgctgctgatctccttgttgacttct

SEQ ID NO: 174058 - DNA, 308 bp, Glycine max
  unsure (1)..(308): unsure at all n locations
ancaagttcaaattacaatgggtagatcaccttgttgtaacaaaaatggcctcaagaaaggaccatggacaccagaagaagatgatcttataatcagaatgcattcacttttgggaaacagatggtcnctcatagcaggnaggttaccagggagaacagacaatgaaataaagaactactggaacacccatctaagcaaaaagctgaaattccaggnacngnagacacagacacacacantgttagnggatcctcaagagagntgcaantgtggtggcaccaccaccaaagagaggagagagacggtg

SEQ ID NO: 174059 - DNA, 164 bp, Glycine max
tggatggcaagcctaagctgttggatgagaagcagacaactatttataagagggctgttgacaagagttatcacttgaagatgaaagcgtctaggttcattttcagtgaaataagccaaaaatttccaatcatgccattctctgctagggctttggaagagaaa

SEQ ID NO: 174060 - DNA, 275 bp, Glycine max
  unsure (1)..(275): unsure at all n locations
gcttctcgttgttggaaagaaaccctagctagtggtacaattgcatacgttgaggtcgatgtggcggctgcagcagcagcctnggcagccgaagaagagaacgttcaagaagttcagtttcaggggcgtggatctcgatgcgcttctggacatgtccaccgatgaactcgtgaagatgttcagtgctcgcgcacgtagaaggttccagagaggcctcaccagaaagcccatggccttgatcaagaagcttcgcaaagcgaaaagagaagctccac

SEQ ID NO: 174061 - DNA, 308 bp, Glycine max
  unsure (1)..(308): unsure at all n locations
tagatctttgctcgagtggtgattttgttgctcatgttcttagttggagccaggtttgctaaagcaaaagaaggaggagaagaagctgctgataggattttgaatctccctggtcagccaaaagtatcatttaagcaattttctggctatgttactgtcaacaaggttgctggtagagctctcttttactggctcgctgaagctgcccanaatcctctcaccaaacctttggtcatttggcttaatggaggtccaggatgttcatcagtggcatatggagcatctgaagagatggcccatttagaata

SEQ ID NO: 174062 - DNA, 307 bp, Glycine max
caaagggaagcataacagaaccccaaagggaagcataacagtacggggaacctgagttcggatttgaggacatggctaagtgcggcgcttgcgcatccagagacgtgcatggagggattcgaagggacaaacagcattgtgaagggtttggtatcggcaggcatcgggcaagttgtgtcgttggtggagcagcttcttgcgcaagttcttcccgcacaggatcaatttgacgccgccagcagcaaggggcaatttccttcttggattaagcccaaggaaaggaagctgctgcaagcaattgcagtca

SEQ ID NO: 174063 - DNA, 305 bp, Glycine max
gatttggtaagcaatgggtgaaattacaaagtcaatgtgctgggatctggtcctaattgcaaaggacaaattgaatggagtggcagcagcaatatatagaaaaccaactgacaatgagtgctataacaacagaataaaacatgagccaccaatgtgcagcgaatctgatgatccaaatacagcctggaatgtatcactacaggcttgtatgcacaaagtgcccgtagatgcatcagagcgtggatcaatctggcctgagcaatggccactgaggttggagaaaccacttactggatagactctca

SEQ ID NO: 174064 - DNA, 311 bp, Glycine max
taactaaacacaaaccccaaaaaccaaaatcacaactcccaaagcaaaaacccaaatcccaaatgatagtagtaacatgagatgacagacgaccgcgtgcatccaatcccaaacctagctatgtctccggccaccgcccactggacctctgacgccatccacggcggacccctccgtcgtgtcgacctcgactccggcaccaacggctgggcctcccctcccggtgacctcttcctcctccgctcccccaattatttcaccaaacgccagaatatcaccgccggcgactacctcctctccccctccggtat

SEQ ID NO: 174065 - DNA, 310 bp, Glycine max
cacaagcactctctctttcccttaccctttttcaggtttcaacgctccaactatccatggcaaaccgctggctcagacccgaggtatatccactgttcgctgcggttggtgctgctgttgggatctgtggattccaactggttcgtaatatctgcatcaaccctgaagtcagggtgaacaaggagggaaggaaggcaggagttttggagaactttgctgagggagagaagtatgccgagcattcctgaaggaatatgtgcgcaacagaactccggagattatgccctccatcaacagcttcttcgctgac

SEQ ID NO: 174066 - DNA, 309 bp, Glycine max
attgtttgttgttgtaactcgttcttcttcttttgttgttctgtgtttgtgtttgttttttctttcacctgaaaatgtcttgctgcggtggtaactgtggttgcggaagctcctgcaagtgcggcaacggctgcggaggctgcaagatgtacccagacttgagctacactgagtcaaccaccaccgagaccttggtcatgggagtggcacctgttaaggctcaatttgagggtgctgaaatgggtgtgcccgctgagaacgatggctgcaaatgtggaccaaactgctcctgcaacccctgcacttgaa

SEQ ID NO: 174067 - DNA, 302 bp, Glycine max
aggactccatttgtcaaggcaatgtggagagaggcaagagagtgtatttatgtggagccagatcaaagtactcagagcaaaggtgtattttggtacaacaataagttgtgatgattaatgtagccgggggcttcttgtccgtcaggtgggatggtttgaactttcctttgtgactgtttagtatcatgcttgcttattgggaataaagcccatcttgggagagtattatcggtttgatgggactccatttgtcaaggcaatgtggagagaggcaagagagtgtatttatgtggagccagatc

SEQ ID NO: 174068 - DNA, 177 bp, Glycine max
aatggcatctatgccatcctgaacagtgtagtgaaattcatgatgtaacaacaattagagcatgcattcccatgtttcttatgtctcgtaagatcaagtcattgggagtcaaatgggttatatctggagaaggatctgatgagatctttggagggtatctatatttccacaaggcac

SEQ ID NO: 174069 - DNA, 209 bp, Glycine max
caaacatgggaaaacagagcacaccccaattctctgccctcaactgcatcgatctctccaaccccgacatcaactaatccgtcaacttactcaaagaggcatgtttggattccggttttttctacgttgtcaatcatggaataagccaggaattcatggacgaggtttttgcgcagagcaagaagttcttctctcttccacacaacata

SEQ ID NO: 174070 - DNA, 302 bp, Glycine max
gagataactagaaacagtgtgatgaaaatgaaggtccttgttttcttcgttgctacaattttggtagcatggcaatgccatgcgtacgatatgttccctctccgaatgaacactggctatggtgcccgtactccggaggtgaaatgcgcaagttggaggcttgctgtggaagcacacaacatctttggctttgagaccattcctgaagagtgcgttgaagcaacaaaggaatacatccatggcgaacaatatagatcagactccaaaacagttaaccaacaagcttacttttatgccagaga

SEQ ID NO: 174071 - DNA, 306 bp, Glycine max
gaatcgagcgaatcggtcgagtttctctcagcgttgaaacttgaaattcttcttctccgaagcctctttgaaccgggtcaagaaataaacctcgctgggaaccgttgattgggtttgtacgaataatttgaaatgaagattcagtgcaacgtgtgcgaggccgcggaggccaaggttctgtgctgcgcggacgaggcagcactgtgctgggaatgcgacgagaaggttcacgcagcaaacaagctcgccagcaagcaccagagggtccctctctctctctccgcctctcacatgcacaagtgtgac

SEQ ID NO: 174072 - DNA, 301 bp, Glycine max
tgtgaatcaagaaccgctctgctatggctgctctgcaatacttggaatcgctgcgtaattcgcaccctgagctctccgattggtacaattcgctggcggatctgtaccagaagaagctctggcaccagctcactctcaagctcgagcagtttgtggctctcgccgtcttccaggctggtgatgctttaatacaattatatcacaatttcatcacagactttgagacgaaaatcaaccttctcaagcttgcacattttgctgttatagtttctcggcagtattctgaaaaagaagctgctgt

SEQ ID NO: 174073 - DNA, 303 bp, Glycine max
tggattttggtgcaacagggaagctcgcaggaacatgcaacttgttcagtggaaaatgggtctatgatgcttcataccctctctatgacccttcaacttgccccttcgtagatccacagttcaattgccaaaagcatggtcgctcagataaactgtaccaaaaatataggtggatgccattttcttgtcccttgccaaggttcaatggattgaactttttggagaaatatagagggaagaagattatgtttgtcggtgactcccttagcttgaaccagttcaattcattggcatgtatgcttc

SEQ ID NO: 174074 - DNA, 297 bp, Glycine max
agttgctgtcatggtcaccttcaggtttcaccagtaccaggatgttgggagggctcttaccactgaaactgatgtgattcctaagatctacaagatgaagctgtaggtcaccaatgaggtccgtgccaaatccaagttctggtatttcttgagatagctaaagaaggtcaagaaaagcaatggccaaatgctagccatcaatgagatttttgagaaaaatcctcccaagatcaagaattatggaatttggctgcgatatcagagccgaactggttatcacaacatgtacaaggaata

SEQ ID NO: 174075 - DNA, 297 bp, Glycine max
  unsure (1)..(297): unsure at all n locations
cgagcttggattgaatctttggagagatgttgtgatccattccagcaaaactaaggctagngttctagatactcttcttgaacttgtgcttagagaaaggaattgtgaagtaataaacagaggattgatgagaaatataataaagatgcttatggatttgggtttgcctgtttaccaacaggactttgagaagcattttcttgatgtttcagcaaatttttactgtcgtgagtcccagaaattcattgaatcatgtgattgtggtgattatttgaagaaagctgagagacggttaaa

SEQ ID NO: 174076 - DNA, 298 bp, Glycine max
aagaatggcttcagatcggaaacttcacactttcgaggaggtggcaaagcacgaccagaccaaggattgctggctcatcatttctggcaaggtgtatgatgtcacccctttcatggaggatcatcccggaggtgatgaggttttgttatctgcaacagggaaagatgcaaccaatgattttgaagatgttggacacagtgattctgctagagatatgatggaaaaatactacattggtgagattgattcatcaactgtaccactaaaacgtacctacattccacctcagcaagctcag

SEQ ID NO: 174077 - DNA, 193 bp, Glycine max
tgaaggttagagcatttcactgagttatataaaaggcgtggcttgtgggctgtgtagaactcaaatcgatcaaataaatggctactgaacatgaagacgatttcaaggatgagaagaatccccgccccctcgacgaggatgacatcgcccttctcaaaacctatggtttggggccttattccacaagcataaa

SEQ ID NO: 174078 - DNA, 291 bp, Glycine max
agaaacacttcttaatttgttacttcgaaactaccttcactacaacctatatgatcaggctgagaagttgaggtccaaggctcctcgatttgaagcacattcaaaccagcagttttgtcgttatctcttctaccttgggaaaattcggacaattcagctggagtatacagatgcaaaagagtctctcctgcaggccgcccggaaagctcctgttgctgcaaggggttttcgaattcaatgtaacaagtgggctgtgatagtgcgtttactgttgggagaaatacctgagcg

SEQ ID NO: 174079 - DNA, 292 bp, Glycine max
ctccctttgcacaaaccctaacacctaaaagccagaagaagcgaaatcgtaatcgcaatctagcggatatgaaggtcgtcgctgcatacttgctcgcagtgttgggagggaatccatctccttctgccgatgatatcaaaaacatcctcggcgcagttggagctgaggctgagcatgagttgattgagttgctcttgaccgaagtcaagggcaaagacttcaatgagctacttgctagtggaagtgaaaagatttctgcagtggctggtggtggtgcagcggttgctgttgc

SEQ ID NO: 174080 - DNA, 295 bp, Glycine max
aatccctctctctatctctcacacacactttctctctctctctctctcacccagatcttgtagcaatggcgagcgctcccactccacgcgaagagttcgtgtacatggcgaagctggcggagcaggccgagcgctacgaggagatggtggcgttcatggagaaggtctccgcctccgccgagagcgaggagctgaccgtggaggagcgtaacctcctctccgtcgcctacaagaacgtgatcggcgctcgccgcgcctcctggcgcatcatctcctcaatcgagcagaaggagga

SEQ ID NO: 174081 - DNA, 293 bp, Glycine max
tacgttttgctctacgcctctccctctctttcaaaaatcgttctcttcgattttagggttttgttttgctgctgcctccgttccccccttctcataaacaacgcgttttctcttctgcttcgtatctattctttgcttttggttttggttgattcaaggccttcacagcattcgttgcggcattttaatcgatttatccaagcaggactgaatgaactaatggagtctaaaggtgggaaaaagaagtctagtagtagtagtagtaaatcattgttctacgaagctcccctcgg

SEQ ID NO: 174082 - DNA, 293 bp, Glycine max
gttggaagcagagagatggaaggttgggacccgaatacgaagtcgacgctgacacagatccctctgctgacgacgaaggcgggtccacgagacggagcggcatggacgcagaggcttaaggaagagtacaaggctctgatagcgtacacgcagatgaacaagtccaacgacaacgattggttccgtatctccgccgccaatccggaaggcactcgctggaccggtaaatgctggtacgttcacaacctcctcaagtacgaattcgacctccaattcgatgtccccgtcactta

SEQ ID NO: 174083 - DNA, 298 bp, Glycine max
gctgttcttgcgcgtgaacaagcctcaggtaagccaaaaccatggttaagcataacaatgttatcccaaacggacacttccgtaagcactggcagaactatgtgaagacttggttcaatcagccagcacggaagacaaggagacgattggctcgtcagaagaaagctgtgaagatattccccagacctacggctggacctctcaggcccattgtacatggtcaaactttgaaatacaacatgaaagtgagaggtggaaggggattttctcttgaagaactcaaggcagcagggattcc

SEQ ID NO: 174084 - DNA, 274 bp, Glycine max
aaaaaacacaatggcagcgagcgctcccactccacgcgaagagttcgtgtacatggcgaactggcggacaggccgagcgctacgaggagatggtggagttcatggagaaggtctccgcctccgccgagagcgaggactgaccgtggaggagcgcaacctcctctccgtcgcctacaagaacgtaatcggcgctcgcagcgcctcctggcgcatcatctcctccattgagcagaaggaggagagccgcggcaacgaggaccacgtcgccgtcatc

SEQ ID NO: 174085 - DNA, 245 bp, Glycine max
gattgctggaggcactggagtcatgccgggaggtaatgttggggctgatcacgctgtgtttgaacaatagtgctcagcaggaaatgttggcaatgataaagtagtagaacaacagaaagcgaacccagtggcactcttcactcgtcggccatgatgcttagacatcaccagtttcctgcatgtgctgaccgattggaaaatgccgggaaaaaagtgattctggcaggcaaatatcggacaaagga

SEQ ID NO: 174086 - DNA, 255 bp, Glycine max
caacattctcataatccaataccatttcattcattcttacatattgcttaattttatctgaattttgaaacaccatctgaatggctttttcaagagttgcattgttaatatgcacggtaattgggtatttttgattgcctctgcgggcaatttttaccacgattttgatatcacttggggagatgggcgtgctaagatactcaacaatggcgagcttctaactctgtctcttgacaaagcctctggctcgggttt

SEQ ID NO: 174087 - DNA, 257 bp, Glycine max
gctagaataataagatgaaaatgaaagtgattgtattgtttgttgctacagttttggtagcatatgaatgccatggctcagactaccaaaagttccctctccaaatgaaaactgggtttggtgggcaagcagcaatgaggtggcatgtgccagttggaggcttcgcgtggaagcaaacaacgtagtcaagtggcaaactgttcctgcagcttgcggagagtacatagctgactacgttctaggagaccaatatagat

SEQ ID NO: 174088 - DNA, 272 bp, Glycine max
gagtttcgttcgtcaccatgacttttaagcgcaggaatggaggtcgcaacaaacacggccgtggccacgtcaagttcattcgatgctccaactacggcaaatgctgtcctaaggacaaggctatcaagaggtttctggtgaggaacattgttgaacaggctgcagtcagagatgttcaggaggcttgtgtctatgaacaatacacgcgtccgaagctttatgtgaagatgcagtattgtgtttcctgtgctatccactctcatgttgtgagg

SEQ ID NO: 174089 - DNA, 267 bp, Glycine max
actcgttcttcttcgtcgttatcttcttcttttgttgtttgtgtgtttgtattttctctcacctgaaaatgtcttgctgcggtggtaactgtggttgcggaagcgcctgcaagtgcggcaacggctgcggaggcgcagcatgtacccagacttgagctacaccgagtcaaccacctccgagaccttggtcatgggagtggcaccagttaaggctcaattcgagagtgctgaaatgggtgttcccgctgagaacgatggctgcaaatg

SEQ ID NO: 174090 - DNA, 266 bp, Glycine max
cccaaaatccctccctttgtatctcctgtccccaagcttagcttcagcgaccaagctttctttacaatcgctttcatcgcctccacgacgtcagtggcattcactagccttgtttttgctgctgttcccacccatttgcaatgagaaatgctgcattatccctttcaaagctggcagatacagctcgtgaggagctccctagtaccatggctgctattaggctttcggggatggagataagtgatctaacactagaactaagtgat

SEQ ID NO: 174091 - DNA, 263 bp, Glycine max
attgtttgttgttgtaactcgttcttcttcttttgttgttctgtgtttgtatttgtactatctctcacctgaaaatgtctttctgcggtggtaactgtggttgcggaagctcctgcaagtgcggcaacggcgcggaggctgcaagatgtacccagacttgagctacattgagtcaaccaccaccgagaccttggtcatgggagtggcacctgttaaggctcaatttgagggtgctgaaatgggtgtgcccgctgagaacgatg

SEQ ID NO: 174092 - DNA, 262 bp, Glycine max
gtttcgcattgcacaagcactctctctttcccttaccctttttcaggtttcaacgctccaactatccatggcaaaccgctggctcagacccgaggtgtatccactgttcgctgcagttggtgctgctgttaggatctgtggattccaactggttcgtaatatctgcatcaaccctgaagtcagggtgaacaaggagggaaggaaggcaggagttttggagaactttgctgagggagagaagtatgccgagcacttcctgagg

SEQ ID NO: 174093 - DNA, 271 bp, Glycine max
tcttctccgtcgacgacgtttatttgctcctcctactacttcaagccacagatctgctgcggagtacacgtatcctgtatttcatcttcatcttctccaagcttcttcgtcggagaatttggaatttgatacactggatcggatatgccggtggctgcttccgctatatacttcttgaacctccgcggagacgttctcatcaatcgcctctaccgggacgatgtcgggggaaatatggtcgatgcttttcggacacatataatgcaaacaa

SEQ ID NO: 174094 - DNA, 267 bp, Glycine max
aaaagaaaccctagcaagtggagcaatggcagacgttgaagtcgatgtggcggcagagcagcagcagggctgccgaagaagagaacgttcaagaagttcagttttcgaggcgtggatctcgatgcacttctcgctagtacaccgatgaactcgtcaagatgttcagtgcccgcgatcgtagaaggttccagagaggcatcactagaaagcccatggccttgatcaagaagctccgtaaagcgcaaagggaagctccaccaggtgaga

SEQ ID NO: 174095 - DNA, 262 bp, Glycine max
ctcgagccctcttctttttactctctctctgtctctctctacgctttctcgttcgaaatccctcaagggatccactaactgaaggtgaaatggggttgacattcaccaagcttttcagccggcttttcgcaagaaggaaatgcgaattctgatggtgggtctcgatgcagctggtaagaccaccatcctgtacaagctcaaacttggagagatcgttaccacaattcccaccattgggttcaatgtggagactgtggaatac

SEQ ID NO: 174096 - DNA, 182 bp, Glycine max
tgcaaaacttagggttgagcctttttttgagggattcagcgcttctttctcacaatggttcttcagaatgatattgatttgctgaatcctccagctgagttggagaagagaaaacacaaactcaagcgtcttgttcagtcaccaaactatttcttcatggatgttaagtgccagggatgctt

SEQ ID NO: 174097 - DNA, 259 bp, Glycine max
caaggaaatttttcgaactgatggcgaacagttcctcaagtatccaccacctaaagtgattcaggtggataagtctgcatggatgactgatgaagaatttgctagagaaacgattgctggtgttaatcaaatgtcattaagattcttgaggagttcccaccacgtagcaagctagattctcaagcctacggtgatcatacctctataataacaaaacaacacttggagcctaacttgggtgggctcaccgttgagcagg

SEQ ID NO: 174098 - DNA, 256 bp, Glycine max
tgaagaactaacaagaggggtattgagattgagattcaagtaatggggaagagcaaggttcttgtggtgtggggaactgggtacatagggaggaggatagtgagggcaagcctggcactgggccatgagacctatgtggttcagaggccagagttgagcctccagatagagaagctgcagaggctcctctccttcaagaagcaaggtgctcatctcattgaggcctctttcaatgatcacaagagtcttgttgatg

SEQ ID NO: 174099 - DNA, 260 bp, Glycine max
gtactcaagaacggtcgcttggctatgttctccatgtttggtttctttgttcaggctattgtcactggcaagggccctattcagaacctttacgaccacgttgctgatcctgttgccaacaatgcttgggctatgccactaactttgtccctggacaatgaggatgcctacatgcaatgcaatcttctgctcccttttgcagttcccttgtgtttaactccattttcactaatgtaactacacctgtgtagcagaaaaat

SEQ ID NO: 174100 - DNA, 257 bp, Glycine max
gctgtttctacgattcatgttaccccagaagatggtttcagttatgcaatcttcgaaactgttggttatgacttcaaagcggtgaatctgaacgaaatagttcagagggtattggcatgtttcctccaactgagttttctgttgcagttcatgtggatggtgcaagcaagtcgtttgagcagacctgctttctggatgttaagggatactgtcgtgaagagaggagccacgaagggcttggaatgggtggttctgtt

SEQ ID NO: 174101 - DNA, 265 bp, Glycine max
cgctgaattaattttcgcctaaaaagacaattcggtgggatctaggttagcagcaaccagcgcaatctgggactttgctgtctttctccccacacccagagtcaaaaactcagctctgctctttcgtttggtctcaaaacatgttcttcttcgattggttctatggcattctagcttccctcggtctctggcagaaagaagccaaaattctcttcctcggtctcgataatgcagggaagaccaccctccttcacatgctcaaaga

SEQ ID NO: 174102 - DNA, 260 bp, Glycine max
gcaaaggttgccggattctcgcggccaatattgcatggtctgtgcacattaggatttgcagttagggcaatcatcaaatgcatatgcagaggagatccagacttggtaaaaagcatagcgggcagattcttctacatgtctaccctggtgaaactctggttactgagatgtggcttgaaggctcaagggttatatttcggactaaggtgaaagagcgaaagcggacagtcctttctggctacgtcgatctgcgtggtttg

SEQ ID NO: 174103 - DNA, 258 bp, Glycine max
attttcagaggaaaatggcgggtacggtttcgacttgtttcttcttcgtgtttcttctttctctccttcttccttttcagatctccgctgaggaatcctcggagaaggagttcgtactcacattggatcactctaactttcacgacactgtcagcaagcacgatttcatcgtcgtcgagttctacgccccatggtgtggtcactgtaagaagcttgctccggagtatgagaaagctgcttctatcttgagtagtcatg

SEQ ID NO: 174104 - DNA, 253 bp, Glycine max
atgtgggccaatatgatccaatggaggtaagaatatggtacagatacaattatggaggattttgaattcaaggagttgaatgaagttatgaagtactacccgcatggttatcatggtgtagatagggaagaagacctgtttatattgagaggctagggaaagttgatcccaataggcttatgcaagtaactaccttggaaaggtatttgagataccatgtgcagggttttgagaaaaaattgctgttaagttt

SEQ ID NO: 174105 - DNA, 255 bp, Glycine max
ctcgagccgctcgagccgaatcggctcgaggctgtgtctggggaaattagcgatgttgttcgatgtacagaatacacacactgaacggtaagtatggtggacaaggctgttacaatccgaacccgaagttcatgaccaacaggcttctttccaggaagcagtttgtcgttgatgttcttcatccagggagggcaaatgtttccaaggctgaacttaaggagaagctagctaggatgtatgatgtgaaagacccta

SEQ ID NO: 174106 - DNA, 239 bp, Glycine max
agtgtgtcttcacttggtgttccagtttttatttgcagccgccatgtgcggaatcctcgcagtgttgggttgcgtcgacaactctcagaccaagcgcgctcgcatcatcgaattgtctcgcagttgcggcatagaggtcctgattggagtggcatacattgctatgaggattgttaccttgctcatcaacgccttgctattgttgaccctacttcgggggatcaacctttgtacaacga

SEQ ID NO: 174107 - DNA, 254 bp, Glycine max
tggcactgtggcagaagtcttaggagtgtaaaacagagacgcaaaatgaagacgattctatcgtccgagaccatgaatattcccgacggcgtgagcatcaaggttcacgctaaggttatcgaggtgagggccctcgtggaaaactcgtgcgagacttccaccatctgatattggacttccaacttattaccgacgatagcggtaaaaggaagctcaagattgattcttggtttggttctcgtaaaacctccgcc

SEQ ID NO: 174108 - DNA, 253 bp, Glycine max
cttggcatcgcttctcctctctcccaagaaagaatcatcaagggcgattgaacacgaagacgatctcaaagacgagaagaaccctcgacctctcgacgaggatgacatcgccctcctcaagacctacggtttgggaccttactccacaagcataaaaaaggcggagaaggaaatcaaagatatggccaagaaagtgaatgacttatgtggtataaaggagtctgatactggtttagctgcaccaagccagtgg

SEQ ID NO: 174109 - DNA, 253 bp, Glycine max
gccaaaatgcctttcaagaggtacgttgagatcgggagggttgcccaaatcaactacggcaaggaatatggcaggctcgtcgtcattgtcgacgtcaatgaccagaacagagctcttgtcgatgcccagatatggtgaggtcccaagtcaatttcaaaaggctttccctaaccgatattaagattgacattaagagggtcactaagaagaaagatcttgtcaaagccatggaggatgctgatgttaagaccaa

SEQ ID NO: 174110 - DNA, 257 bp, Glycine max
gggtatgccagatgtttctatgcccggggttgctggaggtatgttttctgttccatatgatgtgggtgggatgccactgcgtgatgcatcaatctcccagcaaattcctgttggggcattagcaacactctggctaatgcttctccagagcagcagaggacgatgctgggtgagaatctctacccccttgtggaacagttagagcctgacaatgctgccaaagtgacaggcatgcatcttgagatggaccagactga

SEQ ID NO: 174111 - DNA, 257 bp, Glycine max
gcatctggaagatggtcgcactcttgctgattataacatacaaaaggaatcaacacttcacttggtcttgaggctcaggggaggaaccatgattaaagtgaagactctaactggaaaagaaattgaaattgacattgagccaactgatacaatcgaccggatcaaggaacgcgttgaagaaaaagagggaattccacctgtgcagcagagactcatatatgcaggtaaacagcttgctgatgacaaaacagctaaag

SEQ ID NO: 174112 - DNA, 260 bp, Glycine max
  unsure (1)..(260): unsure at all n locations
taaaaagaatggcttccacgtttggccgcatctaccaattaccttcctctcttcacgatactnctcttcccaatcccttgccaccgattctccctctctaaccacagtgcagatatttgggcgcaagttttgcggcggaggaaatggatttcacagcgtcaagggaaggtctctgttcccggttgcnagtgttcttgccactcaacttaactctgcacaacaggctcagaagattgcttttaccgagagccagaggccag

SEQ ID NO: 174113 - DNA, 254 bp, Glycine max
cactttcttttttcccgcagtcatgggcaaggtcaagatcggaatcaacggatttggaagaattggccgtttggtggccagggtggctctgcagagagacgatgttgaactcgttgccgttaacgatcctttcattaccaccgattacatgacatacatgtttaaatacgacagtgttcacgggcactggaagcatcacgatgtcaccgttaaggatgagaagacccttctcttcggtgacaagccagtcactg

SEQ ID NO: 174114 - DNA, 253 bp, Glycine max
gggaaagttggtctctattcaaacattgaggagctttatttgctcaatcctagagctcttcttccttgctttgtggtgatttgcaaaccttgaacctaaagggtcaaaagtcaaagtttcttacatgttgtgtagttttatagatcccccttattttggcctttatggaggttctttgccattcatctttcgaagaaatttgattctttccccaagtcaaaattgtgcgtcttcgtgtttattgtatgaacct

SEQ ID NO: 174115 - DNA, 253 bp, Glycine max
cttctccactaccgttctttcatcggatcgctgccgtttccggcgtcattccgataattcggcggcatgaagctcacagtgaagactttgaaagggagccatttcgaaatcagtgttcaaccctccgacactgttatggctgtcaagaagaatattgaagatgtacaaggaaaagataattacccatgtggacagcaattgctgattcacaatggtaaggttttgaaagatgaaactacattagtagagaaca

SEQ ID NO: 174116 - DNA, 249 bp, Glycine max
ggagttttctcaactttccctcaattcctccacggattcttgatttcttataagttatcagattatggaggtgcagatgaatgtggagaagctggtaatatcgggtttataaactccctaatgagaaagaggctgtttatggggcgttagacaaatggacagcttgggaaacagagttccctgtgattgcagtgtctaaggctttaaaaatcttaaggaaaaggggtcactgggttcgtgtaattcaag

SEQ ID NO: 174117 - DNA, 253 bp, Glycine max
ctcagttctctcacacactcattcggtgctccgaatctcagattctagggttagggttcccaatttctccaccgatcagaaaatgagttcaactggtggttctaccaagggcggaaggggcaagcccaaagcctccaaatccgtttcaagatcgcagaaagctggtctccaattccccgttggaagaatcgctcgattccttaaggctgggaaatacgccgagcgtgttggtgctggtgctcctgtgtacctc

SEQ ID NO: 174118 - DNA, 258 bp, Glycine max
ggaaaagaagagagagagagagagtcgaaaccggcactccctcatcggaagggagacgaacacagccagcatatctcactacactgcatgcatatgggatgttccgccaaaaggactgaggaaacaaggtaaggcagcaaagaaacctagcacatcagaggatttctggatcaccagcacgcatgatatggacaacagtgctgttcagtcacagggaagcatctcatcagccagtataacaaaccaagctgcagatcc

SEQ ID NO: 174119 - DNA, 252 bp, Glycine max
cttatttgcttcttcgagtttcacagccaagtcgtaaaagggtttcaagggatggaaaacatgcagagcttctggcaattgggtgatgaactccgtgggcactcaaaagcatcggaggatcacaagtggttaatggttgcctcgaaactggccgaacagacaagattgaagggggagcgtgtgaacaaccttgatctttcaaagggacccattgaaacaaggtcaagggataaatttgggttccaggaagag

SEQ ID NO: 174120 - DNA, 251 bp, Glycine max
attggaagctgctagaattgcatgcaacaaatatatggcgaaatttgctggaaaggatgctttccacttgagagtcagagtacatccattccatgttcttaggatcaacaaaatgctttcatgtgctggagctgataggcttcagactggaatgagaggtgcatttggaaagccacagggaacatgtgctagagtcgccattggtcaggttcttctttctgtccgctgtaaggacagcaacagtcatcatg

SEQ ID NO: 174121 - DNA, 250 bp, Glycine max
gttgaaaagaaaccctagcaagtggagcaatggcagacgttgaagtcgatgtggcggcacagcagcagcagggctgccgaagaagagaacgttcaagaagttcagttttcgaggcgtggatctcgatgcacttctcgacatgtccaccgatgaactcgtcaagatgttcagtgcccgcgctcgtagaaggttccagagaggcctcactagaaagcccatggccttgatcaagaagctccgtaaagcgaaa

SEQ ID NO: 174122 - DNA, 248 bp, Glycine max
gtcgcagcaaaaccaagccacccactaacttgtttggtccaagacatggctctgatcctgcatgctaccaaaacaaacaagaatgccttcaagactctgattgcggcagagtacagtggcgtccaagtggaattggcccctaattacgagatcggtgtctctaacaaaactcctgaatttctcaagatggatcctattgggaaggttcctgttttggaaacgcccgcatggtccagtctttgagagca

SEQ ID NO: 174123 - DNA, 248 bp, Glycine max
gttcagcttttgactactgttgatgctgatgggggtctccctgcgagcccacgcattcgcttcaacaaggatggaacacttttagctgtctctgcaaatgagaatggaattaaaattttagccaatggggatagtctgtttccaaacagcaaaggatagcaatgaaattcttaattcatgggcagcaaacttggagaaattgcttgatcttgtggagaagagttgtcatcaaatacacaaggaaacca

SEQ ID NO: 174124 - DNA, 248 bp, Glycine max
cggctcgagtggtactgagcgctgcaatgaagccctacagaagcttgggaaaaaatatgatattgttgtcaacattcagggtgatgagccacttattgaacctgagataatagatggtgttgtgaaagctttgcaggcagctcctgatgcagtgttcagcactgcagtcacatctttaaagcctgaagatgcacatgatccaaatagagtgaaatgtgtggtagataatcgtggttatgccatttatt

SEQ ID NO: 174125 - DNA, 246 bp, Glycine max
ctcgtatcaggtttgctaacaattggtcctcgatttgggggtgccatcgatgatgctgctcgctacttcaaggatgctcatgacagggcacttactccttatgagtttgttgaaggtatgaaaaagaagggaattcgtgtggcaggaatagggcacaggatcaagaatagggacaacaaagataagagagttgagctgctacagaagtttgcacgaacacattttccttccgtgaaatacatggaa

SEQ ID NO: 174126 - DNA, 255 bp, Glycine max
ggcgcaagtgaggaacaagcaagtgcttctaaaggactatgttaccggttttcccaaagaatccgacatgaatattgtcgaaagtaccataacattgaagcttccacaaggttccaatgatgtcttgctcaaaaatttgtatttgtcttgtgatccgtatatgaggaatctcatgaacaggcccgaaggccctcccaatagtcgtgcttacactcctggctctccattaataggatatggtgtgtctaaagtcct

SEQ ID NO: 174127 - DNA, 251 bp, Glycine max
atattacttgcttcttttcttgatcatgtcccttgctggtaaaatcagctctgaaattggtgttcaggcaaccgctgcaaagtggttcaacctcttcacaacacaacttcatcacgttcaaaatcttactgatagaattcatggaaccgagctgcatcatggtgaagactggcatcacaatgagtcggtcaagcactggacttataccatagatggcaaggttacaacttgcaaggagagtattgaatccg

SEQ ID NO: 174128 - DNA, 247 bp, Glycine max
caactcagtagtcaacactaggcactctctattcccattcattgcagaagaagatggaggctcacccctacgtcccacgcgatttgcacttacccggctacgctccctgcttcctttccatgtccaacattctttccgtcttcgcctcctcctcattgctcatcgtcactctcgtctggatcttctctggacgctttaagaaaaccaaagttgatagagtgctgatgtgctggtgggccttcacagg

SEQ ID NO: 174129 - DNA, 246 bp, Glycine max
gttgatccattggtcaatctgatgaaagttgagaaagttcccgattctacatatgacatgattggtggtttagaccagcaaattaaagaaataaaagaggtcattgagctaccaatcaaacatcctgagctgtttgaaagtcttggaattgcacaaccaaagggtgtcctgctctatgggccacctggtacaggtaaaacattgttggctagggcagtggctcatcatactgactgtacatcatca

SEQ ID NO: 174130 - DNA, 250 bp, Glycine max
  unsure (1)..(250): unsure at all n locations
agagttgttaccatttgctcccagtacagagcttaaccganccttcacaaagatgantcgggaaaagttgatgaagatggccggttcggttagaactgggggaaagggtaccatgagncagaaagaagaaggctgtccacaagacaacaaccanagatgacgcnaaggcttcagagcaccctgaagagaataggggtgaatgccntcccggctattgaggaggtcaatatctttaaggatgacgtattat

SEQ ID NO: 174131 - DNA, 249 bp, Glycine max
tggagagcaatggaggcactctatgactcagacaaggctagagctataggagtgagcaatttctcttcaaagaagcttcaagatttgttagatatagcaagagtggttcctgctgttaaccaagtggaattgcacccaggatggcagcagccaaagttgcgcgcattttgtgaatctaaagaaattcatctatctggatattctccactaggttcaccagcagctctcaaaagtgatactattaagaat

SEQ ID NO: 174132 - DNA, 249 bp, Glycine max
gcttgggtcattcttacattgggcagttcaatatgaggaccttttccctcttttcttgtcttttgttctttctttctgtcttttccaccactctgttccaccctggtcattccctccaccaccaccctcactctgccacacacaactacagagatgctctcaccaaatccatcatcttctttgagggccagcggtcagggaagctcccttctaaccagaggatgtcttggaggagagactctggtctct

SEQ ID NO: 174133 - DNA, 250 bp, Glycine max
ctttcacctcttcagcagtcgttacagagactccataacccgaaaatgcctttcaagaggtacgttgagattggaagggttgctcagatcaactatggcaaagagtatgggaggctcgtggttattgtcgatgtcattgaccagaatagggctcttgttgatgctcctgacatggtgaggtcccaagtgaacttcaagaggctatcactcactgacatcaagatcgatattaagaggatccccaagaaga

SEQ ID NO: 174134 - DNA, 252 bp, Glycine max
agttgaggatagcacaaagaaaagtaaacactgccacagcaagagtgttcaaatgggagagggaaaaggaagactttgtgtcactggaggcacaggattccttggttcatggataatcaagagcctccttgaacatggatatgctgttaataccactataagatctgacccaggacgcaagagagatgttagcttcctcacaaacctacctggtgcatcagaaaagcttaaaattttcaacgctgatctcag

SEQ ID NO: 174135 - DNA, 251 bp, Glycine max
cagcaatgggtggggagcgcaacaaggttttcactttggccgaggtctctcagcacaacaatgccaaagactgttggcttgtcattcatggcaaggtttataatgtaacaaagtttttggaagatcaccctggtggggatgaggtcctgttgtcttccacagggaaagatgcaaccaatgattttgaggatattggtcacagcaccagtgccgtagccatgatggatgagttctatgttggagacattgat

SEQ ID NO: 174136 - DNA, 250 bp, Glycine max
  unsure (1)..(250): unsure at all n locations
gcgatatcttcgactgtgggaagcttctttttctgatcttttacgtgtcaatataaattcccttcaaagaaataagctttccactctttttcaatcaatcaccaatggctccttctttcacttacgtcaaaatcttctcttctctcgtcgcagagngattctccaacgctctcaccagacgcgggtacgctgttgcatcacaaagtgcaacaaagggaggagtggcctcaatgagcggcaagatggcacc

SEQ ID NO: 174137 - DNA, 249 bp, Glycine max
gtgaccaacgaggctgttcagaaggctgctgctgcattgaagggttcagatcatcgccgtgcaacaaatgtcagtgccagactggattctcaacaaaagaagctcaaccttccaatcctgtcaaccaccactattggatccttccctcagactgtagaactgaggagggtattcgtgaattcaaggctaacaagatctccgaggaagagtatgtaaagtcaattaaggaggaaattcgcaaagttgttg

SEQ ID NO: 174138 - DNA, 249 bp, Glycine max
cggacatccagatgatgctcgccgccgacgttcacctcggcaccaaaaactgcgactttcagatggaacgctacgtcttcaagcgccgcaccgatggtatttacataattaaccttggaaagacatgggagaagcttcagcttgctgctaggattatagtcgccattgagaacccacaggatatcatcgttcagtccgccaggccttatggccagagggcagttctaaagtttgctcaatacactggag

SEQ ID NO: 174139 - DNA, 246 bp, Glycine max
ctcacttttcatccttcgatcatacacttagttgcttccaattaagatggttctgctagagaagctctgggatgatgttgtggctggccctcaacctgagcgtggccttggcaagctcagaaaactcaccaccctcaaaactattgatgaaggagaaagtagcaagctgcagaagacgttgtcgatgccgtcgacaccaacaaccccgatgactccgacgactccaacgacaccgggatcggcccg

SEQ ID NO: 174140 - DNA, 246 bp, Glycine max
cgacatatttatattcggcatagataacaccgtactctctaatatcccatactatgaaaaacatggatctggggtggaggaatttaatgaaaccttatatgatgaatgggttaacaagggcgacgcaccggcattgccagagactcttaaaaattacaacaagctgttgtctcttggcttcaagattgtattcttgtcaggaagatatcttgacaaaattgccgtaacagaagcaaacctaaagaa

SEQ ID NO: 174141 - DNA, 251 bp, Glycine max
gttgtagagttcacagacttacccgtcaagagacctagagaagaagaagaagaagaacaaaccaatggagtctccaacgacgccgtttcaacgctacccaatgaccctcaataacctggtatctctgctgttattcccggttggttctcagaaatcagcccaatgtggcctggggaggcgcactccttgaaggtggaaaagattttgtttcaagggaagtctgactatcagaatgtcatggtcttccagtc

SEQ ID NO: 174142 - DNA, 250 bp, Glycine max
ctcttcttctcttgcggctagggttttagcgcacttcttctagatttaaggaagatgggtaaggaaaaggttcacatcagtattgtggtcattggccatgtcgactctgggaaatccactaccactggtcacctgatttacaagcttggaggcattgacaagcgtgttattgagaggtttgagaaggaagctgctgagatgaacaagaggtctttcaagtatgcctgggtgctggacaaacttaaggctg

SEQ ID NO: 174143 - DNA, 250 bp, Glycine max
tctcgagccgaatcggctcgagccgaagcccttcagcaaccatgtcgaggagaaaggttagggagccaaaggaggaaaatggcactcttggtccagccgttagagacggtgaacatgttttcggcgtggctcgcatctttgcctccttcaacgacaccttcatccatgtcactgatttgtctgggagggaaacccttgttcgcatcactggtgggatgaaagttaaagctgacagagatgaatcatctcc

SEQ ID NO: 174144 - DNA, 246 bp, Glycine max
aagaatcttaagctatgggaaagtcttacccaaccgtgagcgctgattaccagaaggccgttgagaaggcgaagaagaagctcagaggcttcatcgctgagaagagatgcgctcctctaatgctccgtttggcatggcactctgctggaacttacgacgtgagctcgaagaccggtggtcccttcggaaccataaagcacccctccgaactcgctcacggcgctaacaacggtcttgacatcgctg

SEQ ID NO: 174145 - DNA, 244 bp, Glycine max
ctttctatctcattttcgttcggttcaaacactctcatggcatcagacaagaagattaggatcggcatcaacggatttggaaggattggccgtttggtggccagggttgctcttcagaggaatgacgttgaacttgttgctgtcaacgatcctttcatcaccactgattacatgacatacatgttcaagtacgacaccgttcatgggcagtggaagcattttgatgtgaagctgaaggactcta

SEQ ID NO: 174146 - DNA, 244 bp, Glycine max
gcaattttcatttttctctctcccttagtcaaagggattcatcgttcttcttcccaggttatttagaaaagcaaaatggtgaagatttgctgcattggtgctggatatgtggggggtcctactatggcagtcattgcacttaagtgcccatccattgaagtcgctgttgttgatatctctaaatcccgcattgcagcctggaacagcgaccagcttcctatctatgaacctggccttgatggtg

SEQ ID NO: 174147 - DNA, 245 bp, Glycine max
tcaacattttacactcttttcttcttctcgttgttgcttcgctgttgaatcatggatcagaaggtcgatttcagcgctccccattccatgggaaccactatcatcggcgttacttacaacggcggtgtcgttctcggagccgactctcgaaccagcaccggagtgtatgttgccaaccgagcatcggacaaaatcactcagctcactgataatgtatacgtgtgtcgctctggatcggctgctga

SEQ ID NO: 174148 - DNA, 247 bp, Glycine max
cgagcatcatggcctcgagagcagtgctattgttggctatgtgtgtgcttccggccatggttgtggccattcgcccagcaaagaaccctttttgcgtgaagggtcgcgtctactgtgacccttgccgtgctggttttgagacctcagcaaccacctacattgccggtgctgagattatgttgcaatgcaagagcagggttagcaacgaggttgtgtacaccaagaaggggtacactgactcaactgg

SEQ ID NO: 174149 - DNA, 237 bp, Glycine max
ctccgccccttttttgttgttccttcttctcgttcgtcgctttgtgatctctctctgcaaccatgtccgtcgagaaagagagagagacccaggtttacttggccaagcttgccgagcaggccgagagatacgaagaaatggttgagtgtatgaagaaagtagcaaaacttgatcttgatctgactgtggaagaaaggaaccttctctcagtgggatacaaaaatgtgattggtgcac

SEQ ID NO: 174150 - DNA, 247 bp, Glycine max
attcctggccctgtcggaatggtgccgatcaagagaacaaggttgtcgcttttggcaccattcctggccctgtcggaactccttatgaagggggcattttccagattgatatcacattgccagatgggtacccgtttgaaccccccaagatgaagtttaaaaccaaagtttggcatcctaatatcagcagccaaagtggagctatttgcctggatatcttgaaggaccagtggagcccagcactcac

SEQ ID NO: 174151 - DNA, 244 bp, Glycine max
gtttaagtgttcaccaaaaaaaacaatggatgatgatattgtaggactcggttttcgtccaacagaacaagagcttgtcaacttttacctcaaacacaagttgctcggcgatgatccccgtgtccacgtcatccctgtcattgatctttgcgatgtggaaccttggaatgtaccagtgatattagcatcgtcatcagctatacgatttggtgacccagattggtttttcttcagccctgttgat

SEQ ID NO: 174152 - DNA, 178 bp, Glycine max
gtttgagccctgctgagcttcttgactcacctgttctccttaactcttccaacattctgccatctgcaacaactggagcattggttgctcggagcttcaattggaagagcagttccggggggaaccagcgaattgtcaaagaagaagacaaaggcttctcaaatttctcctttcaaac

SEQ ID NO: 174153 - DNA, 241 bp, Glycine max
atttgtaacgaagcaaacgctgccgaattcgttatcgctttgcactagcagctttgaaacccggttcatccgaagcccttcaccgaaccatgtcgaggagaaaggttagagagccaaaggaggaaaatgtgactctgggtccagctgttagagatggtgaacacgtttttggcgttgctcgcatctttgcctccttcaacgacaccttcatccatgtcactgatttgtctggcagggaaac

SEQ ID NO: 174154 - DNA, 241 bp, Glycine max
gtagcatctgagtcttgtgtttagcgtaggggattgaaaatgagtatgtacggtagggatccgtggggaaggccgttggagatccacgccacagactccgccaccgacgacgagcgcagcggaatctccaggagctggaccgaggcgctttagacgagacacaacagagctggctcttgggcgccggagaacagaaaaagaagaagaaaaggtacgtagatcttggctgcatcatcgtcag

SEQ ID NO: 174155 - DNA, 243 bp, Glycine max
taatttctactctctcttttttcctaaccctctttctttcagatcattgacctctacgtaatctatgccgtcttcaccgctctcatccaggttgtttacatggctttggtgggatcatttccatttaactccttcctatcaggagtactttcttgtgtaggaactgctgttcttgctgcgcagcatgggacttataaacctgctacgtacataggcataaatcttgttcttgtctttctgatc

SEQ ID NO: 174156 - DNA, 270 bp, Glycine max
ctctatcaataatctgtagagttagcttgtcatggcatatttattaattgagtccttgtaatgttgccaagctgtttctggatttgcggattatttcaactcagtttgaaatacaatgttagttttctgttggctaattgtgggtgctctgttctgttgaattattttattttccagatttttgagaagaacccaaccaaaattaagaactatggtatatggttgcggtatcagagtaggactggttaccacaacatgtacaaggagtac

SEQ ID NO: 174157 - DNA, 269 bp, Glycine max
gaaaagaaaatcctcaattttctgagcagccaaacactctctctctgtctctcgaaaattctcagtttgcagagaaaatctgaatcatgtcgtggcaagcgtatgtcgacgatcaccttctgtgtgacatcgaaggtaaccacctcactcacgctgctatcatcggccaagacggcagcgtttgggctcagagtaccgacttccctcagttcaaacctgaggagataactgccatcatgaatgactttaatgagcctggatcacttgct

SEQ ID NO: 174158 - DNA, 268 bp, Glycine max
gccgttgctctgcttcaaccttgcggaagaagaagacgccgcagccatggtgaagtactccagagaacccgacaatcccaccaagtcctgcaaggccagaggcgctgaccttagagtgcatttcaagaacactagggagactgcctttgccatcaggaagttgcccctggttaaagctaaaagatacctggaggatgttttggcccacaaacaggccatccctttccgacgcttctgtggtggtgttgggaggacagcccaggctaag

SEQ ID NO: 174159 - DNA, 266 bp, Glycine max
tttctctctctagcttggacgagtgaattagattcatcatcaagatgtcgtctctgatagcagaagatgtgaagagcagatcagaggtgtaccacggggacgaaatgtgccaagtgaagtccaaggagcttctcaaggaaatcgccctccccaacggccttcttcccctcaaggacatggaggagtgcggctacgacagacaaaccggcttcgtctggctcaaacaaaagaagagttacacccacaagttcgacaagatcggaaag

SEQ ID NO: 174160 - DNA, 262 bp, Glycine max
atcgagccgaatcggctcacggctcgagacccgttcccgccagcgtgaaccgcaacgcgtggcaactgctcgcgatattcttaggcacaatcgtcggcataataacacaacccttacctcttggagcggtagcaatattagggttaggtgtttccgaggccggttttgataaaacccttggcgaagaagaaagcgagggcgatgagccaggggatgggatcgccgaagccggagaatgcggcggcgaagggtagcgttttgg

SEQ ID NO: 174161 - DNA, 263 bp, Glycine max
ggacttaaggttgggatttgggaattagggttgttcgcgtggcgaagatgattgaggtggttttgaacgatcgattggggaagaaggtgcgcgtgaagtgcaacgacgatgataccatcggcgacctgaagaagcttgtggcggctcagactggcacaagagccgacaagatccgcatccagaagtggtacaccatctacaaggatcacatcactctcaaggattacgagatccatgaggatgggtgctcgaactctactaca

SEQ ID NO: 174162 - DNA, 272 bp, Glycine max
aaaaccctaataccttcaaagaacgaatagtggatcagtgatggcacctaaggcagagaagaagccagcggagaagaagcccgcggaggagaagaagtcgacggtgggagacaaggctccggcggagaagaagccgaaggccggaaagaagcttccgaaggagggaggagccggcggagaaggggggaagaagaaaaagaggaacaagaagagcgtggagacgtacaagatatacatattcaaggtactgaagcaggtccaccctgacattg

SEQ ID NO: 174163 - DNA, 269 bp, Glycine max
ctgcgttttccgaatcgaaaggtgacgttagtaagtaacaatggtggagaaggccaagggtaggaaggaggaggttgtcactcgagagtacaccatcaacctccacaaacgcttgcatggctgcacatttaagaagaaggctcctaaagcaattaaggagataaggaagtttgctcagaaagcgatggggacgaatgatgtaagagtggatgtgaagctcaacaaggctgtgtggagccaggggatccggagcgtcccaaggaggatta

SEQ ID NO: 174164 - DNA, 266 bp, Glycine max
agacaactcccaacttctctcagtactctcatcaggatccgtgtgagcagtcgagcagagagatgatcatcaacgtgaaggaatcgacggtggtgcggccggcggaggaggtggcgcggcgggtggtgtggaactccaacgtggacctggtggtccccaatttccacacgcccagtgtatacttctataggtccaacggcacctccaactttttcgacggcaaggttctgaaggaggcactgagcaaggtgctggtgccgttctac

SEQ ID NO: 174165 - DNA, 265 bp, Glycine max
atcttcccaagagttgttcagtatcctagatgattctagtaaaaaaacatttttggttggatcagcagtgtcgatgcaaagatatgtttttgatggagaggctggaaagattggtcttgaaccaaaaaacctagttgcttgcacaagtttcttgctagagcagaaactggtgaaggcctggcttgctgacaaggatgctgaagcattgagatgccagaagctgctggtggaggaggaggaagctgctcagaaaagaaaagctgag

SEQ ID NO: 174166 - DNA, 266 bp, Glycine max
acgaatttcattgcagagtgttattttgagtatcagcatcaatggctccaattgcagtgggaaacgtgattccagacggcattttggcttacttggatgaagaaaacaaaccccaaactgtctccattcactctctcgccaccggcaagaaagtcatcatctttggggttcccggtgccttcactcctacttgcagcttgaagcacgttcctggcttcattgagagagcagaagagctgaaagggaagggtgtggacgaaataatc

SEQ ID NO: 174167 - DNA, 266 bp, Glycine max
cttcattgaggattctgtgagtttcatgtcatatggagggcagcttgagttctatgaagttgttaagaagtatttagacaggcttttgagtgaggttttggatgaagctttagtgaagcttatcaatacatcaattaatggggtttcccaggcaatgcagatggcagcgaatatggctgtcttggagcgtgcttgtgatttcttctttcgccatgctgcacagctttcaggtgttcccttgagaatggtggagagaagcagaagga

SEQ ID NO: 174168 - DNA, 263 bp, Glycine max
cgagataactagaaacagtgtgatgaaaatgaaggtccttgttttcttcgttgctacaattttggtagcatggcaatgccatgcgtacgatatgttccctctccgaatgaacactggctatggtgcccgtactccggaggtgaaatgcgcaagttggaggcttgctgtggaagcacacaacatctttggctttgagaccattcctgaagagtgcgttgaagcaacaaaggaatacatccatggcgaacaatatagatcagact

SEQ ID NO: 174169 - DNA, 266 bp, Glycine max
  unsure (1)..(266): unsure at all n locations
anacatttnnctgggtatataagtggagagtgtaactgaaattatgtggangtgcatcaatggaagaattgccagaagatttttatccacttcttctgccagtgcccgtggttggtgggaccatgtaaggccagcaccgaaggaccccattgttcgtgtgaacgaggcatttctagctgacccttttccccataagatcnatctnggatcaggtacttataagggtgatgatggcaaagctttcattcctcanagcgttcgtntcg

SEQ ID NO: 174170 - DNA, 269 bp, Glycine max
gctataagctagtttatcgtgaggagaatatgaagttgtttgttttctttgttgctgcagtagttttggtagcatggccatgccatggcgcaggctaccaaaggttccctctccgaatgaaaactggctatggtgagcgttcttcggaggtaaaatgcgcaagttttaggcttgctgtggaagcacacaacatccgagcctttaaaaccattcctgaagagtgcgttgaaccaacaaaggactacattaatggcgaacaatttagatca

SEQ ID NO: 174171 - DNA, 263 bp, Glycine max
agctactacactttcattctttgctacagagaattaactagctaggatggtcagtgttgaagagatccgtaatgcacaacgtgcagagggccctgccactgtcatggctattggctacgcaactcctccaaactgtgtcgatcagagtacctatcctgactattatttccgcatcaccaacagcgagcacatgaccgagctcaaagaaaaattcaagcgcatgtgtgataagtcaatgattaagaagcgatacatgtacttaa

SEQ ID NO: 174172 - DNA, 265 bp, Glycine max
cagagattctatgcacaagaggcgtgccactggtggcaagaagaaggcatggaggaagaagagaaagtatgagcttggtcgccagcctgctaacactaagctgtcaagcaacaagacagtcaggaggatccgggttagaggtggaaatgtgaagtggagggcactgagattggatactggaaattactcctggggaagtgaagctgtaactcgcaagactcgtatactagatgtggtttacaatgcctcaaacaacgagcttgtg

SEQ ID NO: 174173 - DNA, 262 bp, Glycine max
gcgagcgagcagtttcaaagagaggatttgggattgggaaggcgagggattgcgctgcgtctcttcctcttctctttcgattcatccctcattcataatcttccaatccaacaacctcagcctcacactcacacatacacacatctgaacgcgtatcgtccctcccatggcttcaaagcgcatcctcaaggagctcaaggacttgcagaaagacccaccaacttcttgcagcgctggtccagtagctgaggacatgttccat

SEQ ID NO: 174174 - DNA, 260 bp, Glycine max
ccaccctctaagcctaagtattcctcaatgaccgatagcgtacaagtaccgtgagggaaaggtgaaaagaaccctatttagggagtgcaatagagaacctgagatccgatgcgaacaatcagtcgaaggagcttagagcctttacttgatatttagtaaagcgcactcactctaacggcgtaccttttgcatgatgggtcagcgagaaaatgggaacagcggcttaagccattaggtgtaggcgcctttcagaggtggaa

SEQ ID NO: 174175 - DNA, 263 bp, Glycine max
ctcatgtgtagctataatcatgtgtttcagtcatcctcagtttgcatattgacaataagaaacgatacttgctcgttcaatatgtatttaggagaataaagttattttagaacatgaagtgcctgcggcaatcggattccggattcatataggtggaatttttgcgtggaagtggattatcttgaatcctgtatttcatagatggacttcctgtagcaaagagtatttaattatttattcaaaatatgttatacatgttaagt

SEQ ID NO: 174176 - DNA, 259 bp, Glycine max
ctgaggataaggagatgtcttcctctgtcaccaatggcgatgattccctcactggtcacatcatatctacaactattggaggcaaaaatggggaacccaaacagactattagttacatggcagaacgggttgtaggaactggatcatttggaattgttttccaggcaaaatgcttggaaactggggaagcagtggctattaaaaaggttttacaggacagaagatacaagaatcgcgaactacagttaatgcgtgtttt

SEQ ID NO: 174177 - DNA, 260 bp, Glycine max
ttacaatcttggaactgttctgtatggattagcagaggacactttaagaactgggggatcagtgagtgctcaagaagtttcaccaaatgaattatacagccagtctgcaatatacattgctgctgctcatgcattgaaaccaaattattcagtttatagcagtgccttgcggttggtgcgttctatgctaccattaccacaccttaaagttggatatttaactgcacctcctgtgggggcatcgattgcacctcataatg

SEQ ID NO: 174178 - DNA, 86 bp, Glycine max
tgttgatcggctcaaaagagaatttaaggtggaagctaacgttggtgccccccaagtaaactacagggaaagcatttccaaaatct

SEQ ID NO: 174179 - DNA, 262 bp, Glycine max
atgcttggtgcccttggctgcaccttcccagagatccttgagaagaatggtgtcaaattcggcgaggccgtgtggttcaaggccggtgcacagatcttctcagagggaggccttgactacttgggcaacccaaacctgatccatgctcagagcatccttgctatctgggctgttcaggttgtgctcatggggtttgttgaaggttacagagttggtggaggaccacttggtgaaggacttgacccaatctaccctggtggtg

SEQ ID NO: 174180 - DNA, 262 bp, Glycine max
cacccgttagcaagctaaacctgggcacagaccatgtaccatttcatcagtggatatactgctttggtggctggcacagaagaaggtattaaggagcctcaggcaactttttcagcttgttttggtgcagcattcattatgctacaccctacaaagtatgcagcaatgcttgctgaaaagatgcagaagcatggtgctactggatggcttgttaacactggttggtctgctggaagctatggtaatggaagccgtattaaac

SEQ ID NO: 174181 - DNA, 260 bp, Glycine max
gctccgcaccagtttcaccgcacgaatatcttgttgtttggagcgatccgagaaaaactctgtaaacatgttggtttaccaggacctccttacaggtgatgagcttctctctgactccttccgttacaaggaaattgagaatggaatgctgtgggaagttgaggggaagtgggttgttaaaggagcagttgatgtagacattggtgcaaacccttctgctgagggtggaggagaagatgagggagttgatgatgcagctg

SEQ ID NO: 174182 - DNA, 260 bp, Glycine max
tgcaggttcaactgcaacataggataaaacaagaggctgaacagtttcggcaatggaaggcttctagagagaaagagcttctgcaattaaagaaggaaggaaggagaaatgagtttgaacgccataagctgcaagctttaaatcagcgccagaaaatggtccttcaaagaaagactgaagaagctgcaatggccactaagaggttaaaggagttgttagaagctcgtaaatcttccagccgagacatttcaggttcaatg

SEQ ID NO: 174183 - DNA, 259 bp, Glycine max
gcagcagcagccatggttctcaaaaccgaactatgccgattcagcggtgccaagatctacccagggaaaggcatcagatttgttcgtggtgattctcaggttttcctgtttgctaactcgaaatgtaagaggtatttccacaacaggttgaagccatcaaagctcacctggactgcaatgtacagaaagcaacacaagaaggacattgctcaagaagctgtgaagaaaagaagacgtgctgccaaaaagccttactcca

SEQ ID NO: 174184 - DNA, 257 bp, Glycine max
caacaatggacctccgtgaatcgataagcaaccaaaccgacgtggccctgagcatctcaaagctcctgttgtcgaaagaagctcgggacaagaacctcgtgtattcgccgctgtcgttgcacgttgttctgagcatcatcgccgctggctccaagggccccacactcgatcagcttctctccttcctccgatccaaatccaccgatcatctcaactccttcgcctctcagctcttcgccgtcgtgctctccgacgcc

SEQ ID NO: 174185 - DNA, 261 bp, Glycine max
ctctctctctctctgtctctctctctctagacttagattttgtgaatggctgaagtggaagagggacaggtcatcggcgtccacaccgttgatgagtggaagctgcaactccagaatgcaaaagactccaaaaaactgattgtggtggattttactgcttcctggtgtggtccatgccgttttatggccccagttcttgcagagattgcaaagaaaactcctgaattgatcttcctcaaagtggatgtggatgaagtgagg

SEQ ID NO: 174186 - DNA, 260 bp, Glycine max
gggcaacctcctttctctgtgactctgagtatcgtatcgttttattattatttctaattctctcttatcaggtccattgaatatgtctccgtcgttggatcttcctcccaagggtggcttcagttttgatctatgccgaagaaacgcaatgcttcaaaacaagggcctcaaagccccaacctttctcaaaactggcaccactattgtcggtttagttttccaggatggtgtcattcttggtgctgatactagggcaactg

SEQ ID NO: 174187 - DNA, 261 bp, Glycine max
tcaaatcagagagtacttcaacaccgccctcaccgtcactcgcatccacgattccggcgagattgttccggccagatccggcgccggccgtttgccctgcgtctgggagagcagcgtctccggtcgggtcgggaaatccgtccccggtttggttctcgcaatataaaatataaaataagtaattagggaaggacgaggtcacgtgttgccgttgctataataattaaataagggacttgtgcacgtggcggtgactggatc

SEQ ID NO: 174188 - DNA, 259 bp, Glycine max
ggaatctccttcctctctctctctgtctctctgtctcctccatggccatctccttcagtcccaaacaccctccttacgatgagatgatatacacagcaatcggagctctgaaggagagggatggttcgagcaagcgagccataggaaagtacatagaacaagtctacaaggaccttccacccactcaccctgcattgttgactcaccatctcaaccgattgaaatcctctgccctcctcgtcctcgtcaagaaatccta

SEQ ID NO: 174189 - DNA, 255 bp, Glycine max
cttctttccaaatcccaactactactcacactcactgcagatctcaatccatggctaccatcgttagcatcaaggcccgccagatctttgacagtcgtggcaatccaaccgtcgaggtggatttgacatgctccgatggtacttttgctagagctgctgttccaagtggtgcatccactgggatttatgaggcccttgaattgagagatggaggatctgactaccttggaaagggtgtatcaaaggctgttgaca

SEQ ID NO: 174190 - DNA, 254 bp, Glycine max
gcgccatatcgcgtatctttctctgttctattcctacgatggagttttggggtgccgaggttaaggttggtgagtctgttaaggtagatccagccgaattcgaggcatgcatacacctttctcaggctgctcttggtgaggcaaagaaagacaaatcaaatgaaccagttgttctctacttgaaagttggtcaacagaaatttgtcttgggaaccctttccagggagaaaattcctcaaatacctctggaattg

SEQ ID NO: 174191 - DNA, 253 bp, Glycine max
ggaaattgaagctgatggtgctaattatcagcttgaaatgatgaggtgcctgagggaggttaatgttgacaacaacaccgttgggtggtaccagtctacattgcttggctcctttcagactgtggagcttattgaaacctttatgaactaccaggagaatattagacgctgtgtttgcataatatatgatccatcaaggtctgatcaaggtgttctagctctgaaggccttgaagctttctgactcattcatg

SEQ ID NO: 174192 - DNA, 259 bp, Glycine max
atcatcacatgcacccgcgattcctacgatcccttcccatggtctcttctctgcaccctcgccgtaccttctagaaccttccctcagatctcaattccccttccgctttctcctttcatggaaatggcttccactccccgcaccgtcgaagagatcttcaaggactacaccgcccgcagaaccgccatcgttcgcgctctctctcaagatgtggatgaattctacggactctgcgatccagataaggagaacttgtgcc

SEQ ID NO: 174193 - DNA, 258 bp, Glycine max
aaagaaaggaaataattgatctttgaaaatgcagggaggaaagaaagctggagagtccatcaaggaaacagctgcaaacattggtgcttctgccaaggctggcatggagaaaaccaaggccactgtccaggagaaggcagaaagaatgacggcacgtgatccgatgcaaaaggagttggcaacccagaagaaagaggcaaagatgagccaggcagagctggacaagcaggcggcgcgtcagcataacacggcggcgaa

SEQ ID NO: 174194 - DNA, 257 bp, Glycine max
ggccttagagagagaaagagaatgtcgtcgacggtgctggaggtgacgcgggcggcacacgaggaagtggagcggttggagcggctgatagtgaaggagctccagaatgaccctgcctccaacaaagagcgcttgtatcagagtcaccgtgtgcgaaacatgatcgacaccattacttccaccactgaaaagcttattggggtatatgaagataacgacaatgcaaggaaggacgagattgctgcactcggaggcca

SEQ ID NO: 174195 - DNA, 254 bp, Glycine max
ctccaattcaaccatggttgcgagactcgcggtaacagcgctggtgctgatagctttggcaacaatttctctccaatcttcagcttcagcttcatcagtgggtaaattcgtcgacgaaaccatcacttcccacaagatcgtcattttttccaagacctattgcccgtactgtagaagagcaaaagctgttttcaaagagttgaaccaagttccacatgttgttgagctcgacgagagagaggatggttcaaaga

SEQ ID NO: 174196 - DNA, 250 bp, Glycine max
gtcaaatggcggcgagtagaagcacttttcctctgatgaaatacttgagagtgcgcgtcgacgctcttccccgcaacactccctttgccctcgctcccaactttttgattcgccgcttctgtgaagaggttaggggttgttttctcgacaagtctgaggtcacagatcgcgtcatttcctgcgtcaaaaacttccagaaagttgatccttcaaaggttaaccctaatgctcacttccagaatgaccttgg

SEQ ID NO: 174197 - DNA, 286 bp, Glycine max
tccgcagcaacaaacaaacatcttttaccttaaacaacaatggccgatgccgaggatattcaacccctcgtttgcgataatggaaccggaatggtcaaggctggttttgctggagatgatgcaccgagggctgtgttccctagcattgtggggcgtccacgtcacactggggtgatggttgggatggggcagaaggatgcgtatgttggggacgaggctcaatccaagaggggtattttgactctcaaatacccaattgagcatggaattgtgagcaattgggacg

SEQ ID NO: 174198 - DNA, 208 bp, Glycine max
ttcagtttctcctcgttgttcttcgctttactgttttcaatttcgattctttcgttaattcaataagatgcttgggagggcaccgaagaagagcgacaatacgaggtactacgaaatcctcggcgtctccaagaacgcttcgcaggatgatctgaagaaggcttacaagaaagccgccattaagaatcaccccgacaagggcggtgat

SEQ ID NO: 174199 - DNA, 290 bp, Glycine max
attgcaaggaccactcgccttctttagtcactggacaacttcttgggttggatgttggcagtgttcttgaagttaccaactgcttcccctttccaatgagggaggaggatgaggaaattgaagctgatggtgccaattatcagcttgaaatgatgagatgcctgagggaggttaatgttgacaacaacacagttggatggtaccagtctacattgcttggatccttccagactgtggagcttattgaaacctttatgaattaccaggagaatattagacgctgtgtttgc

SEQ ID NO: 174200 - DNA, 202 bp, Glycine max
tggcaaaccaggcagtgtattcggtgtgggcgattccaccggaagacgtgggcgccagatgcgccaacctcatgaccgccctccgatccgagttcggcgggccccacttccacccccacatcaccgtcgtcggagccatcaaactcaccccggaagacgccgtgaccaagctccgatcggcgtgccaagccctgaggccctt

SEQ ID NO: 174201 - DNA, 204 bp, Glycine max
attctctgaccaccctagctagctaattagatttctgagagaaaggaaagggtgtgagaagagaatggagagtaaagaggaagatgttaacgttggagcaaacaagttctcagaaaggcaaccaattggtacagcagctcagggtggtggtgacaacgactacaaggaggcacacccagctcatttgtttgaacctggtgagct

SEQ ID NO: 174202 - DNA, 292 bp, Glycine max
agctgctgttcttgcgcgtgaacaagcctcaggtaagccaaaaccatggttaagcataacaatgttatcccaaacggacacttccgtaagcactggcagaactatgtgaagacttggttcaatcagccagcacggaagacaaggagacgattggctcgtcagaagaaagctgtgaagatattccccagacctacggctggacctctcaggcccattgtacatggtcaaactttgaaatacaacatgaaagtgagaggtggaaggggattttctcttgaagaactcaaggcag

SEQ ID NO: 174203 - DNA, 292 bp, Glycine max
cgcaaccctaatcagaagaagcgcacttcaacgcgagtgacagccaccagccatgggtcgtatgcacagccgcggtaagggtatatcctcttctgctttgccctacaaaaggacacctcctagctggctcaagatctcttcgcaagatgtcgaagaaaatatctgcaagtttgcgaagaaaggtttgaccccgtctcagattggtgtcattctcagagattctcacggtattgctcaggtcaatagcgtcactggcagcaaaatccttcgcatcctcaaagctcacggactt

SEQ ID NO: 174204 - DNA, 287 bp, Glycine max
atcaatgtgtaaatttgacaaggttcaactcagagaagacagttagttttgtgccacctgatggtgaatttgaactaatgaaatatcgtatcactgagggtgttaatcttcccttcaaagtattgccaaccataaaggaacttggtcgaacacggatggaagtaaatgttaaggtaaagagtgtctttggtgcgaagatgtttgcactaggggttgttgttaaaattcctgtgccaaaacatactgccaaaacgagtttcacagtaacatctggccgagcaaagtat

SEQ ID NO: 174205 - DNA, 288 bp, Glycine max
gaggtcaggaggagcactagctaagttcacaatttcaaaatggctaggggactaaagaagcatttgaaaaggctcaatgctcctaagcattggatgcttgacaaactgggtggtgcatttgcgcctaaaccctcatctggaccacacaaatcgagggagtgcctccccctcattcttattctgcgaaaccggctgaagtatgctctgacataccgtgaagtcattgctattctgatgcagcgccatgttcttgttgatggcaaagtcaggactgacaagacttaccct

SEQ ID NO: 174206 - DNA, 200 bp, Glycine max
gaggagcagaagcctaagcctcaaacatggcgagagggttaaagaaacacctgaagaggctaaatgctccaaaacattggatgcttgacaagcttggtggtgcctttgcacccaagccatcatctggaccccacaagtcccgggagtgtcttcctctgatcctcatcctacgaaacaggctaaagtatgctctaacatat

SEQ ID NO: 174207 - DNA, 282 bp, Glycine max
aatgggtgctctggatcacatatcggaactctttgactgctccagtggcagttccaagcacaagaagcgcaacaattgcagacggtggaggtgaaagtgaagatggactgcgaaggatgcgagaggaaagtgaggaaggcggtggaggggatgaaaggcgtgaaccaggtggatgtggagcgtaaggccaacaaagtcactgtggtcggctacgtcgaggcctctaaggtggtcgcccgcatcgctcaccgcaccggcaagaaagcagagctctggccctac

SEQ ID NO: 174208 - DNA, 284 bp, Glycine max
acttagccgaggtcacgaggagcactagctagtttcacaatttccaaatggctaggggattgaagaagcatctcaagaggctcaatgctcctaagcattggatgcttgacaaactgggtggtgcatttgcgcccaaaccctcatctggaccacacaaatctagggagtgccttcccctcatactcatcctacgaaaccggctaaagtatgctctgacttaccgtgaagtcatcgctattctgatgcagagacatgttcctggttgatgggaaagtcaggactga

SEQ ID NO: 174209 - DNA, 199 bp, Glycine max
tgtcgttaagttctgaacggaaaagcaccgtcgcaccttccctgaggcttctcttgtctgtcgcgagtgaccatggtgagggttagtgtgctgaacgatgctctgaagagcatgtacaatgctgagaaaaggggaaagcgccaagtcatgattcggccatcctccaaagtcatcatcaaattccttttggtgatgcaga

SEQ ID NO: 174210 - DNA, 284 bp, Glycine max
tggggtccataccccgctgatcaagtcctcaaagaacttgaaggcagttttggatttgtgatctatgacaacaaggatggaacagtttttgttgcatctggttctaatggccagattgggctctactggggtgttgcagctgatggttccatagttatttctgaaaatctggagcttataaaagcaagctgtgctaaatcatttgcaccatttccgaatgggtgtatgtttcatagtgagcatggtctcatgagcattgaacatccaacaaagaagatgaaagc

SEQ ID NO: 174211 - DNA, 197 bp, Glycine max
cgtgattgttgtgactcgttcttcttcgtcgttatcttcttcttttgttgtttgtgtgtttgttttttctgctcacctgaaaatgtcttgctgcggtggtaactgtggttgcggaagcgcctgcaagtgcggcaacggctgcggaggctgcaagatgtacccagacttgagctacaccgagtcaaccaccaccgaga

SEQ ID NO: 174212 - DNA, 279 bp, Glycine max
cacaaattacaaaatcccctcatattatctctctctctcttaaaccatcatgtcctccaccgcgcctcccgtcctccccatctccaactcccaaaccaccgcgggaaccaccggtgcaggcagcggcgccatcgaggctccggccaacaacccggccttccgcgctttcatcaacaacctctccaactccctccgccacggcctcgaccagcgccgcccctggtcggagctcgcggactgctcagcgttctcgaaacccgagtaattctccgaagccac

SEQ ID NO: 174213 - DNA, 287 bp, Glycine max
gaaaaagcaaaaacactgaatacaccaaaaatggccaaaagcaaaaactgtcatgctttgcctcttctccttgccctgatcctcttcttcactcttcttggaacctctcacgcaggtggcatagccatctactgggggcaaaatggtaacgagggcaccctctcagaagcatgtgcaacaggcaaatacacccacataaacatagcctttctcaacaaattcggcaatggccaaaccccagaaatgaacctggctggtcactgcaaccccgcaaccaattcctgcac

SEQ ID NO: 174214 - DNA, 268 bp, Glycine max
tgatgtccaagactttggtgatgggaccttcccttctgctccaggaattgaaacaataagtgtttttccaaaaaatagtgcgagattgataacagctggagaagagacagagctgcttgttggtgttaaaaatgatggggattcaagcttgaatgttattgcgatcaaggctagtgttcaccttccttttgatcaccgtatgctggttcaaaatcttactgcacagggttttaacaatggttctgtaccagcctcagcacaagctact

SEQ ID NO: 174215 - DNA, 285 bp, Glycine max
attatgccaagtttggagagagacttaaatgacacgagggggtattatgagagtggaaagactaaggaagcgtcctggagagaatcgcagctcaaagggttgcgtcgttttctcattgaaaaacaagaagatatcatgaatgccctcatgcatgatttagggaaacatcaacttgaagctttcagagacgagataggaacgttgattaagaccttaaatctggcggttgaagtttttgaaacattggatgtcaggcaaaaaggctgcgttgccgcaattagcatt

SEQ ID NO: 174216 - DNA, 285 bp, Glycine max
gcacacacagacacacacatttcgtcggaatgggaagggtgattcgcgcacagcgtaacgatgcggggtcggtgttcaagtcccacacccaccaccgcaagggcccggcgaggttccgcagcctcgacttcggcgagcgcaaccggctacctcaaaggggtcgtcaccgatatcatccacgaccctggtcgcggtgctcctctagccaaggtggcgttccgccaccccttccgctacaagaagcagatggagctcttcgtcgccgccgagggcctctacaccggc

SEQ ID NO: 174217 - DNA, 275 bp, Glycine max
gggcatatatccaaccaaaaagggacattttgcgggtatttgtgagtgtgtgagagagagagcgagcagtttcagacacagagagaggggtttgggattggagggattgacgctgcgtctcttcctcttctctttcgatccatccctcattcctaatcctccaatccaaccacctcagcctcacactcacatatacacatatctgaacgcgtatcgtccctcctatggcttcaaagcgcatcctcaaggagctcaaggacttgcagaaagacccc

SEQ ID NO: 174218 - DNA, 196 bp, Glycine max
  unsure (1)..(196): unsure at all n locations
ggggaattgttcgcaaatggatctcaagattcgaagtctggccatacctagagacttacactgaggatgtcgcnctggaacttgccaaggagttgcaagccaagcnagatctgattgttggaaacnacagtgatggaaacattgttgcntctttgttagcacataaantaggagtaactnagtgtacattgnncat

SEQ ID NO: 174219 - DNA, 193 bp, Glycine max
gtttcgtcggtgtttacttagatgtatgtgctgttgtagagagaagtaatggcgaacatagacatcgaagggatcttgaagcagcagcagccttatgatgggcgcgttccgaagacgaagatagtgtgtactttgggccctgcttctcgatccgtagaaatgaccgagaagcttctgagggcagggatgaacg

SEQ ID NO: 174220 - DNA, 282 bp, Glycine max
attcgctcgcattgcttcgcctcacaacagcagctgcagcagcaatggctcccaaacgaggtggaaaggctccggctcttgccgctaagaagaagcctgagaaggtcacgaatccgttgttcgagaagcgtccgaagcagttcggaatcggaggggcgttgcctccgaagagagacttgactaggctcgtgaagtggccaaagaatgttcaaattcagaggaagaagaggattctgaagcagaggttgaagggtccaccagctttcgaccagtttaccaaaa

SEQ ID NO: 174221 - DNA, 277 bp, Glycine max
aaacgccgcgagtggattgcttaccttcaagccggagctggtatagttgctgacagtgtccctgatgatgagcaccaagagcgtcaaaacaaagctgctggtcttgctcgtgccattgatttggctgagtccgcttttgttgataaatgaatttagatatctcatgaacatattcgcagtcatagtcatagtcatatgcataaagttgaagctactgattgtttgtacaatccagatggagcttcaagttcaaacttcattcatgtaggtacaaatt

SEQ ID NO: 174222 - DNA, 190 bp, Glycine max
agcgtccttcttgtttcacaagtttccttggaagcggaggcattaccctctctccctttcttctactttctcattcctgcctctcttctcaacatggccgccaacagatggttgaaacctgaggtatacccactcttcgcttcagttggtgtggctgttggaatctgcggtatgcaacttgttaggaata

SEQ ID NO: 174223 - DNA, 155 bp, Glycine max
gtttcttacttgaattttcttcatccttctctgttctcctagaacttgattacttgaacattccctatgacagatgaggtggttcttctggatttctggccaagtccatttgggatgagggtcaggattgcacttgctgaaaagggtatcgaata

SEQ ID NO: 174224 - DNA, 194 bp, Glycine max
attccttccttctccttctctctgagaacaacaccccacactcctatctctctctccgcttccttctcttctcacacctccatggcccacacttcccttccctccgccgatgccggcatggacgctgtccagcgccgtctcatgttcgaagacgaatgcattttggtggatgagaatgaccgtgtggttggtca

SEQ ID NO: 174225 - DNA, 272 bp, Glycine max
agcacatctttctcagttctacgatggagttttggggtgccgaggttaaggttggagagtctgttaaggtagacccagccgaatttgaggcatgcatacacctttctcaggctgctcttggtgaggcaaagaaagataagcctgaaccggtggttctctacatgaaagttggtgaacagaaatttgtcttgggaaccctttttagggagaaaatccctcaaatatctctggaattggttttggaaaaggagtttgagctttcccacagtcca

SEQ ID NO: 174226 - DNA, 192 bp, Glycine max
caacaagttaacagcattccgcaaaatggctgcccagaccctactctctgaagtcactctcccctcctcctccggccagcggaagatgccgctgatgggcctcggcaccgcgccggaagcaaccagcgcggttaccacaaaagatgctgttcttgaggccatcaagcagggctacaggcactttgatgctgc

SEQ ID NO: 174227 - DNA, 283 bp, Glycine max
caggacttctttaatggaaaggagctgtgcaagagcatcaatcctgatgaagctgttgcatatggtgctgctgttcaggctgcaattttaagtggtgagggcaatgagaaggttcaggatcttctcctccttgatgtcacccctctatctcttggtttggagactgctggcggtgtgatgactgtcttgatccctaggaacactacaattccaaccaagaaggaacaggttttctcaacatactctgacaaccagcctggtgtgttgatccaggtctttgaag

SEQ ID NO: 174228 - DNA, 280 bp, Glycine max
tccacctggacccactcatcacaattctcatgatctctactgctctggtggggtggtgttagcttctcgtgatggaaagattgtgtgtgaaaatactcttgatgcacgacttgatgtagtgttccgtaaaaagcttccagagatccgaaggcagctctttggataagttgttgcttgaatattttgattgtattgtttcgttacccctgtaatgtttatatcccgaagcataagcttgtctttggagattaatagctatcgtgccattgcttctgtcaac

SEQ ID NO: 174229 - DNA, 279 bp, Glycine max
cgcgtatctttctctgttctattcctacgatggagttttggggtgccgaggttaaggttggtgagtctgttaaggtagatccagccgaattcgaggcatgcatacacctttctcaggctgctcttggtgaggcaaagaaagacaaatcaaatgaaccagttgttctctacttgaaagttggtcaacagaaatttgtcttgggaaccctttccagggagaaaattcctcaaatacctctggaattggttttggaaaaggagtttgagctttcccacaact

SEQ ID NO: 174230 - DNA, 278 bp, Glycine max
gtaactaagatggcgcaagtgaggaacaagcaagtgcttctaaaggactatgttaccggttttcccaaagaatccgacatgaatattgtcgaaagtaccataacattgaagcttccacaaggttccaatgaagtcttgctcaaaaatttgtatttgtcttgtgatccgtatatgaggaatctcatgaacaggcccgaaggccctcccaatagtcgtgcttacactcctggctctccattaataggatatggtgtgtctaaagtcctggaatctgggca

SEQ ID NO: 174231 - DNA, 278 bp, Glycine max
ctaattcagactgcaactttgctctctgtgaggcttcaatttccaattagggtttcgcttagagtaaccaattaccatgggagtcttcacctttgtcgttcgcaaatccggcgccgaatggagcgccaagcaacattccggcgacatcgaggcctccgccgactccacctacgatctccaaaggaagctcgtgcaagccgctctcgccgttgattcctccggtggagtccagtcctccttctctcccgtgtctcctacctccgctgtgttccaggtga

SEQ ID NO: 174232 - DNA, 276 bp, Glycine max
gagagagagaagtaggcgaggatcgttcacataaaatatcgacagagatcgacgagaaaaagctaagcgaacaatgtggagctccaaaacgacgatgatgctggccattgcagccattgctctgatgatgtttctctcatcggcttcagccgacgacgtcgttgcactcacagaggaaaccttcgaaaacgaggttggcaaggatcgcgccgctctcgttgagttttacgctccctggtgtggacactgtaaaaggcttgccccggagtacgaaca

SEQ ID NO: 174233 - DNA, 275 bp, Glycine max
ggtaggttaaacactcttcttcatcgtcgtcgcaatgggacgtgtgatccgtgcgcacgtatagggagcaggctcggtcttcaagtcccacacgcaccaccgcaagggccctgcccgcttccggagcctggatttcggagagcgcaacggctacctgaagggtgtcgtcactgacgtcatccacgatcctggccgtggcgcgcctctcgctaaggtcgccttccgccacccgttccgctacaagaagcagaacgagctcttcatcgccgccgagg

SEQ ID NO: 174234 - DNA, 274 bp, Glycine max
agaagtcttggcttccacaagaacgagtagacgaggtcataaaaagttctgaaaaattgaagaattggttggatgagaaagaagctgagcaaacaaagacttctggattcagtaagccagcatttacatctgaagaagtatatctgaaggtgcttgatctgcaaaccaaggttgccagtattaatagaattcccaagcccaaacctaaggttcagaagcccgtaaaaaatggaaccgaaagcagtgagcagaatacagagaattctgattctaa

SEQ ID NO: 174235 - DNA, 274 bp, Glycine max
ctctgtttctgtctctgtgtttgcggctgaggattccgaacgagcgaccttcttcgtttctcgcaaagtttaagtcatcatgggtaaggaaaagactcacatcaacattgtcgtcattggacatgtcgactctgggaagtcaactaccactggtcatttgatctacaagcttggaggtattgacaagcgtgtgattgagaggttcgagaaggaggctgctgagatgaacaagaggtcattcaagtatgcctgggtgcttgacaagctcaaggct

SEQ ID NO: 174236 - DNA, 276 bp, Glycine max
agattatcctaagtctttgggaatagtgctgcaatggcttcaagtcaggaggaggtgacccttttgggagctactggaagcccatttgtgtgcagggttcatattgccctcaagttgaagggagttcaatacaaatatgtcgaagaaaatttgaggaacaagagtgaactgcttctcaaatccaacccagttcacaagaaggttccagtgtttattcacaatgagaagcccatagcagagtctcttgtgattgttgaatacattgatgagacatgg

SEQ ID NO: 174237 - DNA, 276 bp, Glycine max
gtcgggaaaaggggcaaagggattgataacaggtaaaacctcagcttcagccaaagacaaagacaaagacaagaagaaacccgtttctcgttcttctagagctggtcttcagtttcctgttggacgaattcaccgtcttttgaagtcaagggtgagtgccaatggaagagttggggccacagctgctgtgtattctgctgctatactggagtatctaactgcagaggtgttggagttggctggtaatgcaagcaaggatctgaaggtgaagcgtat

SEQ ID NO: 174238 - DNA, 281 bp, Glycine max
gtaaggttacttattcagtagttcttctctctcgaattttcactcactgactgtgcatcaatggcggcgataagtctccggaaggggaacacgcggcttccgccggaggtgaaccgcgtgctgtacgttcggaaccttcccttcaacatcaccagcgaggagatgtacgacatctttggcaaatacggcgccattcgccagatccgcatcggcaccaacaaggacactcgcggaaccgctttcgtcgtctacgaggacatctacgacgccaaaaccgccgt

SEQ ID NO: 174239 - DNA, 280 bp, Glycine max
gcagtgttagggtttctgtagcctccaaccagaaagagagggaaatggctcccaaacatcctagtacgggtttgtttgttggattgaacaagggtcacgttgtcaccaagaaggagttgcctccacgcccttcagatcgtaaggggaaaacaagcaagcgagtgcactttgtgaggaacctcattcgagaggttgccggctttgcaccttatgaaaagcgaataactgagttgctcaaggttggaaaagataagagggcactgaaagttgccaagagaaa

SEQ ID NO: 174240 - DNA, 270 bp, Glycine max
taattctctctactactgctagctgtgacttgttttgagttcaatcaaatcgcattggtatctgaaatcaggaaagatggttagcgtagctgagatcaggcaggcacaaagggcagaaggcccagcaaccatccttgccattggaactgcaaacccaccaaaccgtgttgatcagagcacctatcctgattactacttcagaatcaccaacagtgaccacatgaccgagctcaaagagaaatttcagcgcatgtgtgacaagtctatgat

SEQ ID NO: 174241 - DNA, 270 bp, Glycine max
ttctattattcaagtaacttaaggtttcaaacctaggaagttggaagtcatggcagcaacattgatgtcatcaacaacaagttctggtactcttagatcaaatcctttacttggacaaggcaagggtgccaatgccaatgctcttagggatgttgtctccatgggaacttggaagtacaccatgggcaatgatttgtggtatggaccaggcagagtgaaatacttgggacccttctcagctcagaccccttcatacttggaaggagaatt

SEQ ID NO: 174242 - DNA, 274 bp, Glycine max
gccaaaatgcctttcaagaggtacgttgagatcgggagggttgcccaaatcaactacggcaaggaatatggcaggctcgtcgtcattgtcgacgtcattgaccagaacagagctcttgtcgatgcccctgatatggtgaggtcccaagtcaatttcaaaaggctttccctaaccgatattaagattgacattaagagggtccctaagaagaaagatcttgtcaaagccatggaggatgctgatgttaagaccaagtgggagaagagttcatggg

SEQ ID NO: 174243 - DNA, 270 bp, Glycine max
caattgtattgcagtagtgaaatggctggttcaattggaagcggagggaacacaagcacgggtgtggagtggcacgtgcgacctccaaaccctaagaaccccatcgtcttcttcgatgtcaccatcggtaacattcccgccggtcgaatcaagatggaactcttcgccgatattgcccccaaaactgccgagaatttcaggcagttctgcactggggagtacaggaaagcaggactgcctgttggttacaagggttgtcaatttcataga

SEQ ID NO: 174244 - DNA, 269 bp, Glycine max
gcgcctgcatcgcagacggtagacctgcagacactctataacgtccagggatggaacccttacgcggtttctttcaatgcggatgaggacacttttaggttggtatttaagaatcccggcatggaggatgaccccacttgtggccccattattgacaacattgctattaagaagcttttcactcctgataaacccaaagacaacgcagtattcaatggggattttgaagagggtccatggatgttcaggaacacttcactgggtgtgtt

SEQ ID NO: 174245 - DNA, 275 bp, Glycine max
gttcttcttctttgtcttccatttccaattctctgtgtagaagccatgtctaagggtcctggtctctactctgacattggcaagaaagccagagatctcctgttcaaggactaccacagtgaccagaagtttaccatcactacctactcacccactggagttgctataacatcctcggggaccaagaaaggtgacctttttgtggcggatgttaacacccagttgaagaacaagaacatcaccactgatatcaaagtggacaccggttccaatct

SEQ ID NO: 174246 - DNA, 278 bp, Glycine max
atgtcacttgaagttggatagcaagtatgatgctgcaaatgcttatgtggatgctgcacattgctacaagaaaacttccacatcaggagctatttcctgcttaaataaagctgtgactatcttcactgagattggtaggcacatcatggctgctaagtattcaaaggaaattggcgagttatatgagcttgatcaagacatagaacatgctagatcttattatgagagggctgctgaactttttgaaattggggatgcagcaacttctgtgatccagt

SEQ ID NO: 174247 - DNA, 273 bp, Glycine max
ctggcttccagtccaaagggtcttacttgtttggtcacttcagcatgtacataaagatggttcctggagattctgctggcacagtcactgctttctatttatcttcccaaaacgcggagcatgatgagatagactttgagttcttggggaacagaacaggacaaccttacattctgcaaacaaatgtgttcaccggaggcaagggtgatagagagcaaagaatctatctctggtttgatcccacgaaagaataccacagatactccattctct

SEQ ID NO: 174248 - DNA, 275 bp, Glycine max
aacgaacacactctcacataactctctctctctctctctctctgagtccttcttcttcttcgtccagccaacatgagctcaatcgttcagggtttctccaagtcactggccatgaccattctctctgagatcggtgacaaaacgttttttgcagctgcgatactggctatgcgacaccctagacgcctagtcttatcaggttgcttatcggctttgattgtgatgaccattctctctgctcttgttggctgggcagctccaaatctgatctctcg

SEQ ID NO: 174249 - DNA, 274 bp, Glycine max
atttatgtgacagagaatcaccatgtctgaaatctggaaccatgaatggtttctgaagaatctcccggcagacctgatggacgagaagataatgggcaatcaatttgaagagccagaccaacccatgcagagcatcgatacgatcatgcagataatttcagaagctaccgtaccagcagttgggacctattcttttgaccagtttatggaggaacaaatttatgacttggaatctgaatctgatgctgaatctgatcttgatatagatagcagt

SEQ ID NO: 174250 - DNA, 272 bp, Glycine max
ccgaagccagatttcaagatgaagttcaacattgcgaatcccaccactggttgtcagaagaagctggagatcgatgatgacctgaagctacgagcattttgggacaagaggatctcacaagaggttgttggtgatgctctgggtgaggaattcaaaggctatgtcttcaaaattactggaggttgcgacaagcaaggatttccaatgaagcaaggagtgttgacccctggtcgtgttcgcctcttgctgcatagaggaactccttgtttccg

SEQ ID NO: 174251 - DNA, 270 bp, Glycine max
cgaggatgaagaagaagaaaaagtgacagtgattcagatgactacgataatatggagtatgaagaggtggaggatgattatgatgacgatggtgaggaggaggatgaagaagaagaacatggagaggaagtaacagatgatgaagatgggacaggagaaaatagtgaatggaagaatgatgagatggaacagcttgagaaagaatatagagatcttcatcaccaggagctagatactttgaagaacttgaagcatcataaggatgaagat

SEQ ID NO: 174252 - DNA, 266 bp, Glycine max
ctagtcggcgccaccgggtcagcgtcctgaagaagaagagcgacgcgctcacggtgcagttccgccagatcctgaagaagatcgtgtccacgaaagaatctatgggcgacatcatgaaaacgtcgtcgttcgcgctcaccgaggcaaaatacgtcgccggcgacaacatcaagcacgtcgtcctcgaaaacgtgaaagaagctcaatccgcgtccggtcgcgccaggagaacgtcgccggagtgaaactcccgaaattcgactaca

SEQ ID NO: 174253 - DNA, 271 bp, Glycine max
tgacttttcgagaaaggaaaaaaaaagagtttccggcattattccatcatgaacgctcttcccattcttctcttcttcctcttcgtttcggcattagtttatgcgaagaaaactggcgatgtgacggagttgcaaattggcgtgaagcataaaccagcatcatgtgaagttctggcacacaaaggtgacagagtcaaagtacactatcggggaaaactcactgatggaactgttttcgattctagctttgaaagaaataatccaattgaat

SEQ ID NO: 174254 - DNA, 268 bp, Glycine max
aaaccagtgaggattacagattctatgctatttcagctgagtaccctgaattcagcaacaagggtaagacactagtctttcaattttctgttaagcacgaacagaagcttgactgtggtggtggctacatgaagttgctcagtggggatgttgatcagaagaaatttggcggggatactccttacagtattatgtttggcccagatatctgcggttacagtaccaagaaagttcacgctattcttacctacaataacacaaaccactt

SEQ ID NO: 174255 - DNA, 272 bp, Glycine max
catccatagacatggccaccgtcacttctgcagccgttgctattccctcattcactggcctcaaggcaagcgcaggcaaagtgagtgccgcagttaaagtctcagctccccaagccacaaggttgggcatcaaggcttcgctgaaagacgttggagtcgctgttgtggccactgccgcgagtgcagtgctggctagcaacgccatggccattgaagtgttgctgggtggtgatgacgggtctctggctttcgttcccaacaatttctccgtg

SEQ ID NO: 174256 - DNA, 272 bp, Glycine max
ctagaagtattattattcttccatttccattaaaaagaaaatatcataaatgggtattttcacattcgaggacgaaatcacctcccctgtggctcctgctactctttacaaagctctagttacagatgccgacaacatcatcccaaaggctcttgattccttcaagagtgttgaaaacgttgagggaaatggtggccctggaacaatcaagaagataactttcgttgaggatggagaaaccaagtttgtactgcacaagatagaagcagttg

SEQ ID NO: 174257 - DNA, 273 bp, Glycine max
aacgaatcgaaaaaagaaagatcatggcgatggcaaacttggctcgacggaagggttacgccgtcgttttgtcgtcgaggtcgtcgctttgtctgacaaggtggagggggttcgcgtccggatctgacgaaaacgacgtcgtggtcatcggcggcggtcccggcggctacgtggcggccattaaagcggcgcagctgggtctgaaaaccacttgcatcgaaaaacgtggcactctcggcggtacctgcctcaacgtcggatgcatcccttcca

SEQ ID NO: 174258 - DNA, 272 bp, Glycine max
gcttaatctctctcattccccatttcctcacctccttcaaccgctgctaaattctagggttccgaaatggacgctggcggaaagatcaagaagggcgccggaggtagaaagggcggcggcccaaagaagaagccggtttcaaggtccgtcaaagccggtctccaattccccgtcggaagaattggccgttatttgaagaaaggaaggtacgctcagcgtgtcggtatctatgctcccgtatacttggctgcagttctcgaatacctagctgc

SEQ ID NO: 174259 - DNA, 265 bp, Glycine max
gagaacctggaactgggaagacattgcttgcgaaggctgtggcaaactcaacatcagcaacattcttgcgtgttgttggtagtgaactgatacaaaagtacttgggagatggcccaaaacttgtaagagaacttttcagagttgctgatgatctttctccttctattgtattcattgatgaaattgatgcagttggtacaaaaaggtatgatgctcactcaggaggagaacgtgaaattcaaaggaccatgctagagttgctgaa

SEQ ID NO: 174260 - DNA, 265 bp, Glycine max
cttatttgtttaatttttatgtttcttaggtgaattactcaagaaggctcgacaatcccacaaagtagaaaaagaggttatgttatggcgggcaaaggtgttagttcggtggctaaggcggtagcagaatatcagtatccttggcgtgagaagttggggaaatataaggatgagcttgccaagggtgtgtggggatactgggagctgggggcatggaagccgctgagtatcagtgctcggcatcgtgctagaattcgcaaggaag

SEQ ID NO: 174261 - DNA, 269 bp, Glycine max
cagcaattcacactggtctttgcttctcgttactcatttctcacctaactttctattcttctcagtctcagatcagaaccttggccatggcagcgttccagaagatcaacgtcgccaaccccatcgtcgagatggacggagatgaaatgactagggttatctggaagtcaatcaaggacaagctcattttgcccttcttggagttggacatcaagtattatgacttaggccttccttaccgtgatgagaccgatgataaagttacaatt

SEQ ID NO: 174262 - DNA, 268 bp, Glycine max
ccgccacttctgaatctattgaatcaacaatcatgtcggacgaagagcaccatttcgagtccaaggccgacgccggagcctccaaaacctaccctcagcaagccggtaccatccgcaagaacggctacatcgtcatcaaaggccgcccctgcaaggttgtggaagtttcgacttccaaaactggaaagcacggtcacgctaagtgtcactttgttggaattgatattttcactgccaagaaacttgaggatattgtgccctcttctca

SEQ ID NO: 174263 - DNA, 272 bp, Glycine max
attttctggctaaccaaccctgacactccttcttctccgcttcctcttcgatcatcgcttcagaatgccgccgaagttcgacccctcccagatcgtcgacgtcttcgtacgcgtcaccggcggtgaggtcggcgcggcgagttccctcgccccgaagatcggtcccctcggtctctcccccaagaagatcggagaagatatcgccaaggaaaccgccaaggactggaagggcctccgcgtcaccgtcaagctcaccgtgcagaaccgtcagg

SEQ ID NO: 174264 - DNA, 270 bp, Glycine max
cggcgatcctagcactctcttctgcagctttcgccgacagcttcattcaccatggctgagcaaaccgagaaggcttttttgaaacaaccaaaagtgtttctcagctcgaagaaaactgggaagggaaagagacccggaaagggtgggaaccgcttttggaaatccattgggcttggatttaagactcccagggaagccatcgaaggaacctacattgacaagaagtgccccttcactggcaatgtttccatccgtggccgtatcttggct

SEQ ID NO: 174265 - DNA, 269 bp, Glycine max
atgatctcaatcacttctactgaattgaactacttagtcttccgttacctccacgaatcaggttttactcattctgcatttgcattcgggtatgaagctgggattgataaaagcaaaaatgatgatagtgtggttccaccgggtgctcttgttactttcatacagaaaggaattcaatatcttgagctggaagcaaacttgagtggtagtgatgctgacatggatgaggatttttcatttctacaacctctggatcttatcacaaaggg

SEQ ID NO: 174266 - DNA, 271 bp, Glycine max
aatcgccgtcgacgaaaacaaacaacccaaacatgtcttctcttcgaaacgccattcccaggcgtgctcacaaagagcgttctcaaccgtcgtcgaggaaaaaattcggccttctcgaaaagcacaaggactatatccagcgtgctaaagcattccacaagaaagaagacactttgcggaaacttagggaaaaagcagcgaatagaaatgaagatgaattttacttcaagatggttagaacaaaaaccgttgatggagttcataaaccaga

SEQ ID NO: 174267 - DNA, 270 bp, Glycine max
actgatttcactcccaaacaaacaaagaagaagttagatttgaaattgaaagagaaacaaacttgggatataagaagaatggctagtggaggaggctatggagacgcgaaccagaaggtagattacgtgttcaaggtggtgctaattggtgattcagcggtggggaagtcgcagatacttgcacgcttcgcgagaaacgagttcagtttggattcaaaggccacaatcggcgtcgagttccaaacgcgcactttggtcattcagcacaag

SEQ ID NO: 174268 - DNA, 264 bp, Glycine max
cgagcagccacacctcccgcagcagccatggttctcaaaactgaactatgccgattcagtggtgccaagatctacccaggaaagggcatcatatttgttcgtggtgattctcaggttttcctgtttgcaaactcaaaatgtaagaggtatttccacaatcgcctgaagccttcaaagctcacctggactgcaatgtacagaaagcaacacataaaggacattgctcaagaagctgtgaggaagaggagacgtgctgccaaaaag

SEQ ID NO: 174269 - DNA, 262 bp, Glycine max
gtacaagggaccaactctccttgaggctcttgaccaaatcaatgagcccaagaggccctcagacaagccactcaggcttccattgcaggatgtctacaaaattggtggtattggtaccgtgccagtgggacgtgttgagactggtgtcgtgaagcccggtatggtggtgacttttggtcccactgggctgacaactgaggttaagtctgttgagatgcaccatgaggctctcacagaggctcttccaggtgacaatgttggc

SEQ ID NO: 174270 - DNA, 267 bp, Glycine max
aaagctacctagagcttgcacctattggtatcttctacaatatcctctcatagtgctcttcttcttcttcattatcattatcaagatgtctttgctttcggatctcatcaacctcaatctctcagaatccacagaaaagatcgttgctgagtacatatgggttggtggatctggtatggacctcagaagcaaagccaggactcttcctgggccagtgagtgaccctgcaaagcttccaaagtggaactacgatggctctagcacaga

SEQ ID NO: 174271 - DNA, 263 bp, Glycine max
agctaaatccctagtaagccgccatggtgaagtactcaagggagcctgacaatccaaccaagtcttgcaaggctagacggcgccgaccttagggttcattttaagaacactagggaaactgcctttgcaatcaggaagttgcccttggttacagctaaaaggtacttggaagatgctcttgcgcacaagcaggccattccgttcagacgtttctgtcgtggtgttggcaggacagctcaagcaaagaatagacactctaatgg

SEQ ID NO: 174272 - DNA, 265 bp, Glycine max
cgatagtgaaattggaaagcagaagaacctgttttcggaactaaccgacgacatcgttctgaacatcttctacaaactcgaagacgatcctcgccactgggctcgcttagcctgtgtctgcaccaaattctcttccctcgttagggatttctgttggaagaccaaatgctccctcaccatcccccaagacctcctctccgacgacgcctccgacgcccctctctgcctccacaaactctccttctgctgccccggcctccgccac

SEQ ID NO: 174273 - DNA, 292 bp, Glycine max
gagcgtacagatctgtttgaccaaaacccctcacaacacataaatcagacagacaaaagaaagaaagaagagaacaacagagcaatggaaggaggaggagctgctccgccggccgacaccgtgatgtccgacgcggcgccaccgccgcagcagcctccggtggcgatggggatcgagaatattccggcgacgctgagccacggtggcaggttcatccaatacaacatattcggcaacatattcgaagtcaccgccaaatacaagccacccatcatgcccatcggaaaaggcg

SEQ ID NO: 174274 - DNA, 289 bp, Glycine max
cgaaggcgagccacgatgtcaggaagaggaaagggaggcaagggtttgggaaagggaggagcgaagaggcaccgtaaggttctgagggacaacatccaggggatcaccaagcctgcgattcggcgcttggcgaggcgtggcggcgtcaagcgtatcagctgtctcatctacgaagagacacgtggcgttctcaagatcttcctcgaaaacgtcattcgcgacgctgttacttacaccgagcacgctcgccgcaaaaccgtcactgccatggacgtactttatgccctca

SEQ ID NO: 174275 - DNA, 288 bp, Glycine max
gagataactagaaacagtgtgatgaaaatgaaggtccttgttttcttcgttgctacaattttggtagcatggcaatgccatgcgtacgatatgttccctctccgaatgaacactggctatggtgcccgtactccggaggtgaaatgcgcaagttggaggcttgctgtggaagcacacaacatctttggctttgagaccattcctgaagagtgcgttgaagcaacaaaggaatacatccatggcgaacaatatagatcagactccaaaacagttaaccaacaagcttac

SEQ ID NO: 174276 - DNA, 284 bp, Glycine max
gtccaagcagcctccaattcgtgccactctcttcaaaatggccgttaccttctcaaatctccacacagaatcaggtctcaagtccctcgacgacttcctctctgggaaggtctacgtttctggggatcagttcacaaaggacgacatcaaagtgtatggtgctgttttggagaagccaggtgactcttttcccaatgctgccaagtggtacgaggttgtctcatctcagcttgctgcaagcttccccggcaatgctcaaggggtgagattcagtggcaaagctt

SEQ ID NO: 174277 - DNA, 278 bp, Glycine max
ctcacgcatttcctcgtttttttcttcccttttctctttctccggcgacgatctcagattccggccactcctctcgccggcgagcccttactcttccctcctccgtcgagccctctccgattcgaatcgttcccagcctcgcaccaccatgaatcccgaatacgattatttgttcaagcttttgctgattggagattctggtgtaggcaagtcatgtcttctcctgaggtttgctgatgattcataccttgacagctatatcagtaccattggagtgg

SEQ ID NO: 174278 - DNA, 281 bp, Glycine max
aggcttttcaactttaagaaggatagagatggctactggaaatggtttgctggcaacttggcctctggtggtgctgctggtgcatcatcccttttgtttgtttactctcttgactatgcccgtacccgtcttgccaatgatgcaaaggctgcaaaaaagggtggagagagacaattcaatggtctcgttgatgtctacaggaagacattggcatctgatggtgttgccgggctctaccgtggtttcaacatctcatgtgttggaatcatcgtgtatcgtgg

SEQ ID NO: 174279 - DNA, 288 bp, Glycine max
tgtgattgttgtgactcgttcttcttcgtcgttatcttcttcttttgttgtttgtgtgtttgttatgtctctcacctgaaaatgtcttgctgcggtggtaactgtggttgcggaagcgcctgcaagtgcggcaacggctgcggaggctgcaagatgtacccagacttgagctacaccgagtcaaccaccaccgagaccttggtcatgggagtggcaccagttaaggctcaattcgagagtgctgaaatgggtgttcccgctgagaacgatggctgcaaatgtggagct

SEQ ID NO: 174280 - DNA, 280 bp, Glycine max
gagagtggtttcagtgagtgatcggtgttcacttgatccttcataagtcgtcatcatcatcatcatcatcaccgttgattgaagaagatgcagatcagaaacatcgccatcggaaggcctgaagaggctactcaccccgacacgttgaaggcggggttggctgagttcatctccaccttgatcttcgtgttcgccggttcaggttccggcatcgcctacaacaagctcaccgacaacggcgccgccactcccgccggcctcatctccgcttccatcgccc

SEQ ID NO: 174281 - DNA, 281 bp, Glycine max
cagctttttccatgacagaacgagatcgtcttgatctacgaggactgcttcctccaaatgttatgtctcctgacctacagattgaacgattcatggttgatctgaagaggcttgaagttcaagctagagatggaccttctgatcctaatgcattggccaagtggcggatacttaaccgcttgcatgacagaaatgagactatgtactataaggttttgattgccaaaatagaggaatatgcaccaatagtgtatactccaacagtgggtcttgtatgtcag

SEQ ID NO: 174282 - DNA, 279 bp, Glycine max
aaaaagcttcaagatctcatgaatatagcaagagtgcctcctgctgttaaccaagtggaattgcacccaggatggcagcagccaaagctgcatgcattctgtgaatctaaaggagttcatctgtctggatattctccactgggctcaccaggagttctcaaaagtgacattcttaagaatcctgttgtgatagagattgcagagaaattggggaagacaccggcacaagttgcccttaggtggggactgcaaacaggtcatagtgtgctgcctaagagc

SEQ ID NO: 174283 - DNA, 278 bp, Glycine max
cagcagcggcaagcaactccatccgcaatgggaatcgatttgaaggcaggaggtaagtccaagaagaccaaacgtacagcccccaaatccaatgatatttacctcaagctcctcgtcaagctgtaccgttttcttgttcggaggactggtagtaacttcaatgccgtcatcctcaaacgccttttcatgagcaaggtcaacaagcccccgctatccctctctagattgattcgttacaccaagggaaaggaggataagatagctgtggtagtcggggc

SEQ ID NO: 174284 - DNA, 272 bp, Glycine max
gagacgcttcgcaaatctcaatcgaatctcagaaaaatgagagaaatcatcagcattcacataggtcaggccgggatccaggtcggaaactcctgctgggaactctactgcctcgaacatggcatccagcccgacggcatgatgccttctgactccaccttcggtgtagcccacgacgccttcaacaccttcttcagcgaaaccggatctggcaagcacgtcccccgtgctgtcttcgtcgacctcgaacccaccgtacatcgacgaggtcc

SEQ ID NO: 174285 - DNA, 281 bp, Glycine max
gcaagtcagaagaattgttgaagaatgcatagcatcaactgttcttccctggtcgagaatgtagcagccagtgacagtttcaacaaccagaaagactagggatccctatattatcatcaaagccagggatcttatcaagcttctatcacgaagtcttcctgctcctcaggcgataaaaatacttgacgatgacatgcaatgtgacatcattaaaatcagtggcatggttcgcaataaggagcgatttgtaaaaagaagacaacatcttgtgggtcccattc

SEQ ID NO: 174286 - DNA, 286 bp, Glycine max
ttgaaacccccagttgaaaaaccaccagtgtacaagcccccagttgagaagcccccagtttacaagcccccagttgagaagccaccagtttacaagcccccagttgagaagccaccagtatacaagcccccagttgagaagcctccagtgtacaagccaccagtagagaagcctccagtttacaagccaccagtagagaaacctccagtttacaagcccccagtggagaaacctcctatttgcaagccacctgttgagaagcctccggtctacaagccaccatatg

SEQ ID NO: 174287 - DNA, 286 bp, Glycine max
ctcgagccgttttgcttttgccacttcgaaaccaaattttcttcgttcgtccttctgtgatctcttcttccaccatgagcaggtcagggcaaccaccggatttgaagaagtacatggataagaagcttcagatcaagctgaacgcaaatcgcatggttgttggtactctccgtggctttgaccagtttatgaatttagttgttgacaacactgtggaagtgaatggcaatgagaaaaatgacatagggatggtggtaattagaggaaatagtgtggtcactgttga

SEQ ID NO: 174288 - DNA, 284 bp, Glycine max
ctagaatggtcagggaactttttgttatggccagggaacatgctccatcaattatcttcatggacgaaattgacagtattggatctgctcggatggaatctggaagtggcaatggtgatagtgaggtacagcgtactatgctggaacttctcaatcagttggatggatttgaagcttcaaacaagatcaaggttttgatggccacaaatcggattgatatcctggatcaagccctccttagacctggacggattgaccggaagattgaatttccaaaccctaat

SEQ ID NO: 174289 - DNA, 282 bp, Glycine max
ggcctgtctaagggctatggttatgttcaattcgacagtgaagagtctgcacagaatgctattgacaagttaaatggcatgttgatcaatgataagcaggtctatgtaggccattttctgcgaaagcaagatagagagaatgctctcagtaagacaaaatttaataatgtctatgtgaaaaacttatcagagtcaaccacggatgaagagttgatgaaattttttggagaatatggtaccattactagtgctgtaataatgagggacgcagacggtaaatca

SEQ ID NO: 174290 - DNA, 282 bp, Glycine max
tttcagtgagtgatcggtgttcacttgatccttcataagtcgtcatcatcatcatcatcatcaccgttgattgaagaagatgccgatcagaaacatcgccatcggaaggcctgaagaggctactcaccccgacacgttgaaggcggggttggctgagttcatctccaccttgatcttcgtgttcgccggttcaggttccggcatcgcctacaacaagctcaccgacaacggcgccgccactcccgccggcctcatctccgcttccatcgcccatgctttcgc

SEQ ID NO: 174291 - DNA, 279 bp, Glycine max
  unsure (1)..(279): unsure at all n locations
attgcaggaacagagaggggcttgcagtgttgtgtccgtggcaagttggatatgcaggacccaaacaaatncacttagagatcctgtttattatcgttgcaatccaatgccccatcatagaattggatccaagtataaagtgtatccaacttatgattttgcttgtccatatgttgattctatagaaggaatcacgcatgcccttcgatctagtgaataccatgatcgcaatgcccagtatactggattcaagaggacatgggtctagaaaagttctat

SEQ ID NO: 174292 - DNA, 279 bp, Glycine max
tttcagtgagtgatcggtgttcacttgatccttcataagtcgtcatcatcatcatcatcatcaccgttgattgaagaagatgccgatcagaaacatcgccatcggaaggcctgaagaggctactcaccccgacacgttgaaggcggggttggctgagttcatctccaccttgatcttcgtgttcgccggttcaggttccggcatcgcctacaacaagctcaccgacaacggcgccgccactcccgccggcctcatctccgcttccatcgcccatgcttt

SEQ ID NO: 174293 - DNA, 277 bp, Glycine max
tgtagactgtcgagcagtgaataccagttgctcctatagccggcgctcaacaacatggcggacaaggcagtcaccatccgaaccagaaagttcatgacaaacaggcttctctccagaaagcaattcatcgttgatgtccttcatccagggagggctaatgtttccaaggctgaactgaaggagaaattgggcagaatgtatgacgtgaaagacactaacactgtatttgtcttcaagtttcgaactcattttggtggtggcaagtccactgggtttg

SEQ ID NO: 174294 - DNA, 281 bp, Glycine max
agaagatggagatgtatcagatctggagcaggagaatagcgttgggagcgttcgcgtttgttctgcttttcctatcggcctcagcagacgacgtcgttgtgctctactgagataacttcgagaaggaagttggtcaggacagaggagctctcgttgagttctatgctccttggtgtggacactgcaaaaagcttgctccagaatatgaaaagcttggtagcagcttcaagaaagccaaatctgttttaatcggcaaggttgactgtgatgagcacagagtt

SEQ ID NO: 174295 - DNA, 281 bp, Glycine max
cgttccacctcttgaaagatgtgcccgggatcatctcgaagaacattgagaagagtcttgttgaagcttttgagcccatcgggatcagcgactggaactctatcttctggatcgcacatcccggtggtcccgcgatcctcgatcaagtcgaggagaagctccggctcaagccggagaaactccagtccacccggcatgtgctgagtgagtacggaaacatgtcaagcgcgtgtgttttgttcattctggatgaaatgaggaagaagtctaaggaggaaggg

SEQ ID NO: 174296 - DNA, 279 bp, Glycine max
tcttcatcatgcacaagagctcttcagattccacgtttggcccgggttgcctggacctctcccaggccttcttcaggcccataaacaacgccgcccctccctccccgaccaagcgccacaacaagatctccgtcatcggcgccggcaacgtgggaatggccatcgcgcagaccatcctcactcaggacctcaccgacgagctcgtcctcgtcgacaccaactccgacaagctccgcggcgagatgctcgacctccagcacgccgccgccttcctccccc

SEQ ID NO: 174297 - DNA, 276 bp, Glycine max
agagaaagtgctttgtatgaatattctgtcgtctgattacttcaaggagctctatcgattgaacacgtatcacgaagttattgatgagatctacaatcaagttgatcacgtggagccatggatgactgggaattgtcgcggtccttcaactgcattttgtcttctgtacaagttttttactatgaagctcaccgtcaagcaaatgcacgggctgttaaagcaccccgattctccttacataagagcggttggatttctctatctgagatattgtgc

SEQ ID NO: 174298 - DNA, 275 bp, Glycine max
cattctcataatcaaataccatttcattcattcttacatattgcttaattttatctgaattttgaaacaccttctgaatggctttttcaagagttgcattgttaatatgcacggtaattgggtattttgtgattgcctctgcgggcaatttttaccaagattttgatatcacttggggagatgggcgtgctaagatactcaacaatggcgagcttctcactctgtctcttgacaaagcctctggctcgggtttccaatccaagaacgaatacctt

SEQ ID NO: 174299 - DNA, 266 bp, Glycine max
ttttctctctcacttttcaagaatcgtaagctatgggaaagtcttacccaactgtgagtgctgattaccagaaggccgttgagaaggcgaagaagaagctcagaggcttcatcgctgagaagagatgcgctcctctaatgctccgtttggcatggcactctgctggaacctttgacaagggcacgaagaccggtggacccttcggaaccatcaagcaccctgccgaactggctcacagcgctaacaacggtcttgacatcgctgtt

SEQ ID NO: 174300 - DNA, 272 bp, Glycine max
cttgcttcttgcttctattacttgcttctttcttcaccatgtcacttgctgggaaaatcaccactgaaattggggttcatgcaaccgctgcaaagtggttcaacctctttgcaacacaacttcatcatgttcaaaaccttactgatagagtacatggaaccaagctgcatcaaggtgaagactggcatcacaacgagacagtcaaacactggacttataccatagatggtaaggctacaacatgtctggagagtattgaatccattgatgaa

SEQ ID NO: 174301 - DNA, 258 bp, Glycine max
cagccacagttggaacaaaaaaaaaagttgtccgagatggcacgtacgaagcaaactgctcgtaagtccccaggaggaaaggcacctaggaagcagttcgaaaccaaggctgcacgtaagtctgcaccacctactggtggtgtgaagaagccacatcgttatcgtcctggtaccgttgctcttcgtgagattgggaaatgccagaagagtaccgagcttttgatcgggaggctccccttccagaggctggttcgtgaa

SEQ ID NO: 174302 - DNA, 283 bp, Glycine max
tatttactttgatacgaagctctctcgatctaattttccgattaacactaacaatgacggatgcagctgaagacgctacacgacgccgtaatgcggtggccgagtaccgcaagaaacttcttcaacacaaggaattggaatccagagtacgatccgtcagagaaaatttgcgtgcctcgaagaaagagttcaacaaaactgaagatgatttgaagtctcttcaaagcgttggacagatcattggcgaagttcttagggctctcgacaatgaacgcttgattgt

SEQ ID NO: 174303 - DNA, 278 bp, Glycine max
cgcagctttaagctcagggaaacgttttatttcacactctgcgattcgcgatggccgacgatgactatgaggatatcgacatggggtacgaggatgagccaccagagcccgagattgaggaaggtgcagaggaagatttggagaacaaaaacgatgagttaactggagagcctattgacactgaggataaggaagaggaacaaccagtggagcggcctcgaaagacatcaaaatatatgactaagtatgagcgtgctaggattttaggtacccgtgct

SEQ ID NO: 174304 - DNA, 264 bp, Glycine max
cggttactacttgtacctctccaagaaatggtacaagaaaacgacttggatgtatcttgcaattcctatgatactatacgcatgcgagcgattacttcgtgctttaaggtctggatacaaaagtgtcaagattttgaaggttgcagtgtaccctggaaatgtcttggccttgcacatgtctaaaccacaaggatttaagtactctagtggacagtatatttttgttaattgcccagatgtctctccttttcaatggcatccttt

SEQ ID NO: 174305 - DNA, 281 bp, Glycine max
gccttcacaaaaaaattatcgagatcccctttttctcctaagaaaagccatggctaagggtcccggtctctactctgacatcggcaagaaagccagggatctgctgttcaaggactaccacagtgaccagaagttcaccatcaccacctactcacccactggagttgctataacagcatcaggaaccaggaaaagtgaactgtttgtggctgatgtcaacacccagttgaagaacaaaaacatcactactgatatcaaagttgatacagattctaatctct

SEQ ID NO: 174306 - DNA, 275 bp, Glycine max
ctcgagccgcaaaaccagaagcgaaatcgcaatcgcaatccagcgaatatgaaggtcgtcgctgcatacttgctcgcagtgttgggagggaatccttccccttctgccgatgacatcaaacacatcctcggcgcagttggagctgaggctgagaatgagttgattgagttgctcttgactgaagtcaagggagaagacttcaatgagctaattgctagtggaagtgaaaagatgtctgcagtgtctggtggcggtgcagcggttgccgttgctgc

SEQ ID NO: 174307 - DNA, 277 bp, Glycine max
gaaaaagttagggtttgtaactttgtcttttgcttgcgaatctgaatcgaataataatcaatcaatcatcatgtcgtcggcgaagaagatcacactgaagagttcggacggcgaggctttcgaggtggacgaggcggtggcgctggagtctcagacgataaagcacatgatcgaggacgactgcgccgacagcggcatccctctgccgaacgtgacgagcaagatcctggcgaaggtgatcgagtactgcaagaagcacgtcgaggccgcgaatccc

SEQ ID NO: 174308 - DNA, 276 bp, Glycine max
  unsure (1)..(276): unsure at all n locations
atttctaatctcattctccttctgttcaaacactctcatggcatcagatangaagattnggatcggcatcaacggatttggaaggattggccgtttggtggccagggttgcccttcaaaggaatgatgttgaacttgttgctgtcaacgatcctttcatcaccactgattacatgacatacatgttcaagtacgacaccgttcatggccagtggaagcattttgatgtgaaggtgaaggactctaagacccttctctttggtgagaagcccgtcac

SEQ ID NO: 174309 - DNA, 274 bp, Glycine max
cgtggtcgtgtcgcagcaaaaccaagccacccactaacttgtttggtccaagacatggctctgatcctgcatgctaccaaaacaaacaagaatgccttcaagactctgattgcggcagagtacagtggcgtccaagtggaattggcccctaatttcgagatgggtgtctctaacaaaactcctgaatttctcaagatgaatcctattggaaaggttcctgttttggaaacgcccgatggtccagtctttgagagcaatgcaatcgctcgttacg

SEQ ID NO: 174310 - DNA, 273 bp, Glycine max
caaactccatttctcactcgccgtcgtctcttccgtctagggtttctcctcttcacaaaaatggttgccgcaaaaaaactaagaagacccatgagagcatcaacaacaggctcgctctcgtcatgaagagtggcaaattcaccctcggttacaagaccgttctcaaatctcttaggagctccaaagggaaattgattatcattgctaacaactgcccccctttgaggaagtcagagattgaatactatgctatgttggcaaaggttggggttc

SEQ ID NO: 174311 - DNA, 272 bp, Glycine max
ctcgagccgcaaaaccagaagcgaaatcgcaatcgcaatccagcgcatatgaaggtcgtcgctgcatacttgctcgcagtgttgggagggaatccttccccttctgccgatgacatcaaacacatcctcggcgcagttggagctgaggctgagaatgagttgattgagttgctcttgactgaagtcaagggaaaagacttcaatgagctaattgctagtggaagtgaaaagatgtctgcagtgtctggtggcggtgcagcggttgccgttgc

SEQ ID NO: 174312 - DNA, 272 bp, Glycine max
gaaagaaagagaagagaagaatcgaagacgaagatggaggacgcatcagcatcaaagttcattccacaccaaatcggaggggtccaaaacgacgcgcttcgattcggtctccatggagtcaagagcgacatcgttggttctcaccctcttcaatcttcactccaatctacaaggagaatggatgaagcgatgaagaggcaatgcaaagttaacctgtacggaactgcttttcccatgaaggaggagcttgacaggcaaatcctgtccaggtt

SEQ ID NO: 174313 - DNA, 267 bp, Glycine max
acattttctcaggtcattgcacggttggacaaaatcgttgcaaattgctcaaaacaaggatggtggaaagatacttttaaactcccttggtaagattcctagacggatatccttataaaattttagtttctttggaggaattcaaaacggtgaagtgttataccttgaaatgataaaatcaaccatcccttgtggtttgggtctgtacctcgggccttttagttcgatttgagcaatgctagttgctaaaagactgatattactgtt

SEQ ID NO: 174314 - DNA, 262 bp, Glycine max
gataaacagcgtttaggtaggatagtgattggattatatggccaagttgtaccgaaaactgtggaaaattttagagctttgtgtacaggggagaaaggaaagagtgaaaatggcataaagcttcattacaaaggaacaccatttcatcggataatatctggttttgtgattcagggtggagacattgttcatcatgatggtaaagggtctgaatctatttttggtggcacctttcctgatgagaatttcaagattaaacatt

SEQ ID NO: 174315 - DNA, 278 bp, Glycine max
atccgatcctctgtcctctcgaagctttcatcgttcaacatattctcaccatctcagtcatgggcctgctatcttgttttaggtctaccgtcctgagaaaatgttccaaaggaagctctggcatgtcaagattcctgtatacgaacaattttcaacgaaacttgatttcgtctggtggcaatgaatcgtattatgggtattttaacaggagatcatacacttcactttatatgggaactggaactgtgggtgggattacaagtgctagaatcagggtg

SEQ ID NO: 174316 - DNA, 282 bp, Glycine max
ctggaggaaaagctcccaggaagcagcttgcaaccaaggctgcacgtaagtctgcaccaacaactggtggtgtgaagaagcctcatcgttatcgccctggaactgttgctcttcgtgagattaggaaataccagaagagcactgagctcctaatcaggaagcttcctttccagaggttggttcgtgaaattgcccaggatttcaagactgatctgcgtttccagagccatgctgtgcttgcattgcaagaggctgctgaggcataccttgttgggctctttg

SEQ ID NO: 174317 - DNA, 278 bp, Glycine max
ctttggcaaagaagggactcaacaattacgtcaaacagctccagcaacaccctttgagaaccaaggtaatcactgcaggggtactatcagcgatcagcgatgttgtgtctcagaaacttaccgggatacagaaaattcaactcaaacgacttcttttcaaagtgatttttggagccgcttatcttggaccctttggacacttttttcatttaatactggataaaattttcaaaggaaagagagattcaaaaactgtggctaagaaggttctgattgaa

SEQ ID NO: 174318 - DNA, 275 bp, Glycine max
cggagtatggcgcaagaagcagtctgatgttatgagattcttgcagcgggtgaggtgctgggagtatcgccagcaaccttctattgtccgtttgacaaggtctactcgcccagataaggctcgtcgcttgggtttcaaggctaagcagggttacgtgatttaccgtgttcgcgtacgaaggggtggccgtaagagaccagttccaaagggtattgtttatggtaagcccaccaaccaaggtgttactcaactgaaatttcaacgcagcaagaggt

SEQ ID NO: 174319 - DNA, 273 bp, Glycine max
ccctttctttcattctgttgggaaatggaagtcacactttcagcgtgcaagtccattagctcgccttctgttcccgtcgcagctttatttgcggggaaagcaggaactaagagttcgcaatgcagttttttagctggagcaaacaaagtgaggtttcctaggcaagtcggtcaagttagccacgttcgcaaacagcgccaaacgcgtcactgtggtgctctccacgcgacttgcagcggtgacaagatcctgatcgcgaatagaggcgagatt

SEQ ID NO: 174320 - DNA, 271 bp, Glycine max
gggaagagatccagcagcaatggtgtacgtcaaggctcagaaatcaaaagcctacttcaagagatatcaagtcaagttcaagagaagaagagagggaaaaaccgattaccgtgccaggattcggttgattaatcaggacaagaacaaatataacactccgaaataccgatttgtggttcgctttagcaacaaggacattgttgcacaaataatatctgctagcattgccggcgatttagttcttgctacagcatattcacatgagctgcca

SEQ ID NO: 174321 - DNA, 269 bp, Glycine max
gtgggagggagagaggagcggaggagagaaaatgacgacgaggttcaagaagaacaggaagaagagaggccacgtcagcgccggtcacggtcgtatcgggaagcaccgcaagcatcccggtggtcggggtaacgccggtggcatgcaccaccaccgcatcctcttcgacaagtaccatcccggtttcttcggaaaggtgggtatgcgctacttccacaaactccgcaacaaattctactgccccatcgtcaacattgataagctatggt

SEQ ID NO: 174322 - DNA, 273 bp, Glycine max
gaagtctcttcctacttgaagaaagtaggatacaaccctgacaagattccttttgttcctatctctggttttgagggagacaacatgattgagaggtccacaaaccttgactggtacaagggtccaactctgcttgatgcacttgaacagattagtgagcccaagaagccctctgacaagcccctcaggcttccccttcaggatgtgtacaagattggaggtattggaactgtgccagtgggacgtgttgagaccggtgtcttgaagcctgga

SEQ ID NO: 174323 - DNA, 275 bp, Glycine max
tgatactgttgctcagagtgacgtggacgaggcactgaggttaatgcagatgtcaaaattctctttgtattctgtacgatcgtcaaaaatctggtctggatgccatatctgatatctattccatactgcgggatgttgcagctagaggtaaccgaatggacgtcagctatgcccatgcactgaactggatatctaggaaggggtacagcgaacccagttgaaagagtgcttggaggagtatgcagcacttaatgtatggcagatacatcctcaca

SEQ ID NO: 174324 - DNA, 257 bp, Glycine max
tgatactgttgctcagagtgacgtggacgaggcactgcggttaatgcagatgtcaaaattctctttgtattctgaagatcgtcaaaaatctggtctggatgccatatctgatatctattccatactgcgggatgaagcagctagaggtaaccgaatggacgtcagctatgcccatgcactgaactggatatctaggaaggggtacagcgaacccagttgaaagagtgcttggaggagtatgcagcacttaatgtatg

SEQ ID NO: 174325 - DNA, 276 bp, Glycine max
tgggaaactgttggtccgatagttgatggtgatgctgttgttacattcaacttccgagctgatcgtatgacaatgattgctaaagctcttgagtatgaaaattttgacaaatttgatagagttcgttacccaaaaatccgctatgctggaatgcttgaatatgatggtgaattgaaacttccaagtcattaccttgtttctccaccagagattgacaggacttctggtgaatatttagtgtataatggtattcggacttttgcttgcagtgagact

SEQ ID NO: 174326 - DNA, 258 bp, Glycine max
attttgtcaatggtgagagtatcttggcagattctggcactgaacaactggaattcattgttctatcccaaaggactggagacctcaagtatcagcagaaggtggaaaatgtaatagcccagctaaataaaacatttcctgatgatggattacttcccatctacattaatcctcatagtggggcagcaggctactctcccatcacattcggtgccatgggtgatagtttttacgagtacttgctcaaagtttggatac

SEQ ID NO: 174327 - DNA, 264 bp, Glycine max
tatcatggccacctctgctattcagcaatcagcattcgcaggtcaaactgctctgaagcagctcaatgagttggtccgcaagaccggtggcgccggcaaaggtcgcaccaacatgcgccgtaccgtcaagagtgctcctcagagcatttggtatggccctgatcgtcccaagtacctgggtccattctcagagcagattccgtcatacctgaccggagaattccccggtgactacggatgggacactgctggactatcagctga

SEQ ID NO: 174328 - DNA, 238 bp, Glycine max
tatggcttcaactctgcttcccctggcaaccttcttcttagttctctccgcttcttatctccagattgctggggcgaaagcacaaccgttgactagtctcaagcttaactctccgatccttcaggagtctattgctaaagagatcaatgaaaatcctgaggcaggatgggaggctgctataaatcctcatttctccaattatacagttgaacaatttaagcgccttcttggagtaaaa

SEQ ID NO: 174329 - DNA, 222 bp, Glycine max
cagactgagaggaagagagagggagattctttgtttgctaccttctctcggaaaaatggttacgttcaggtttcaccagtaccaggtggttgggagggctcttcccacggaagcagatcagcaccccaagatctaccgaatgaagctctgggccaccaacgaggttcgcgccaagtccaagttctggtattttctgaggaaactgaaaaaggtgaagaagag

SEQ ID NO: 174330 - DNA, 261 bp, Glycine max
ccttgttttcttcgtctttactcttctcttcacagaagcgtaaaaacaaaaggcttgactagagaaagagagagagagagcttcgaatcgaaactcagaagtagaaagaaacacaaatcacaatcgctatggctaggtacgaccgagcaatcaccgtgttctcccctgacggccatctcttccaggtcgagtacgccctcgaagccgtccgcaagggcaacgccgccgtcggcgtccgcggcaccgacaatgttgtcctcg

SEQ ID NO: 174331 - DNA, 274 bp, Glycine max
cttctccttgctttgaccttttgccggttgttgtgttgcatcggtgcaaatggcgttcttcagacgcgtttctggactttctcgacttcgctctcgcgtgggccagcaatctaatcttgcgaattcagttagatggctccaaactccgagctccagtaatactgatctttattctgagttgaaggaactagttccagagtatcaggaacgtgttaagaagctgaagaaagatcatggaagtgttgaattgggaaaaattactgttgatatggta

SEQ ID NO: 174332 - DNA, 274 bp, Glycine max
cacacactctcatagctgtagcggcgacactaagatcggagaaagaatggcgaaaacgacgtcgttgctgctctttacactgctcctcttcggaaccctagctctcatccaggcgaagaaatcgaaggaggatttgaaggaggtgacccacaaggtttactttgatgttgagattaatggaaaagaagcaggtcgtattgtaatgggtctttatgggaaggctgttccaaaaactgcagaaaacttccgagcactttgcacaggggaaaaggga

SEQ ID NO: 174333 - DNA, 274 bp, Glycine max
gtgtttcattccaactgcaaaacaacaactcaattaagaaattcttctccggagccatggcagatctcaagtctacattcttgaacgtctattccgttctcaaatctgaactcctccacgaccccgccttcgagttctccgatgatgctcgccattgggtcgaccggatgctagactacaatgtgcctggaggaaagttgaatcggggactgtcagtcattgacagctacagattgttgaaagaaggacaggcattaaatgatgacgaaatttt

SEQ ID NO: 174334 - DNA, 272 bp, Glycine max
gtgactcgttcttcttcgtcgttatcttcttcttttgttgtttgtgtgtttgttttttctctcacctgaaaatgtcttgctgcggtggtaactgtggttgcggaacgcctgcaagtgcggcaacggctgcggaggctgcaagatgtacccagacttgagctacaccgagtcaaccaccaccgagaccttggtcatgggagtggcaccagttaaggctcaattcgagagtgctgaaatgggtgttcccgctgagaacgatggctgcaaatgtg

SEQ ID NO: 174335 - DNA, 298 bp, Glycine max
cgtacgaactcggaatcggctcgagctctgccgtgcctctagggttatcatatctccatttccatttcctctctctcagtttccaagaatcttaagctatgggaaagtcttacccaaccgtgagcgctgattaccagaaggccgttgagaaggcgaagaagaagctcagaggcttcatcgctgagaagagatgcgctcctctaatgctccgtttggcatggcactctgctggaacttacgacgtgagctcgaagaccggtggtcccttcggaaccataaagcacccctccgaactcgc

SEQ ID NO: 174336 - DNA, 267 bp, Glycine max
gcccatgtatcagaggccattcatgaaggggaaactttacattcacttcactgtggagtttccagattctctaaaccctgatcaagttaaggccttggaggctgttctgccaccaaagccttctttcacaattgacagacatggagctggatgaatgtgaggaaactacactccatgatgtcaacatggaggaggagactaggaggaagcagcaacaagctcaggaggcatatgatgaggatgatgacatgcctggtggtgcacaga

SEQ ID NO: 174337 - DNA, 263 bp, Glycine max
gcaactatgaatatgatgcggaggttgaagagcattgcttctgggaggacttccatttcttcagatcctggaggggattctaactcaaaaagggccaagtttgaaccagaaactgaagggaaggccgatgagaaaacaaataccattgaaacaatctgcacagatcaggaacaacctatagacacaccaaaagaaacttccaatgtaggcacatccgatgtatctacagtagctagaactgagaagtcaggtttcgatgagct

SEQ ID NO: 174338 - DNA, 241 bp, Glycine max
gaattttcttcatccttctctgttctcctagaacttgattacttgaacattccctatgacagatgaggtggttcttctggatttctggccaagtccatttgggatgagggtcaggattgcacttgctgaaaagggtatcgaatttgagtacaaagaagaggacttgaggaacaagagtcctcttctcttacaaatgaacccggttcacaagaagattcgggttctcatccacaatggaaaa

SEQ ID NO: 174339 - DNA, 260 bp, Glycine max
cgttattcacactgtgctgtgcttatttggcgtacttaagagattcgcaatagaaagtgaaagaaaatgagtcgaggaagtgcaactgctgcgaagggcaagaagaagggtgcgacattcaccattgactgcgccaagccagtggaggacaagatcatggacatcgcgtctctcgagaagttccttcaagagaggattaaggttggtggcaaggccggtgctctcgccgacaccatcaccgtcacacgtgagaagaccaa

SEQ ID NO: 174340 - DNA, 265 bp, Glycine max
ctagattcagccacagtttcggaggagaagaaaatagtcgttcgagatggcccgtacgaagcaaactgctcgtaagtccacaggaggaaaggctcctaggaagcagcttgcaaccaaggctgcacgtaagtctgcaccaactactggtggtgtgaagaagccacatcgttaccgtcctggtaccgttgctcttcgtgagattaggaaataccagaagagtaccgagcttttgatcaggaagctccccttccagaggctggttcgt

SEQ ID NO: 174341 - DNA, 277 bp, Glycine max
tgtttgataaaatattgtacacataaatctagctccaattcctaatcaactggttaatttcttcacatagagctatctagatccaacgttaacatgaagaatgttttagtaaggtcagctgcgcgagctctgcttggcggcggtgggcggagtactaccgccagctctcaacggcggcgatcgtggaacagagacaccagcacggtggcggcgcgtttggaagcttccacttgcggaggatgtccactcttccagaggtaaaggatcagcactcaga

SEQ ID NO: 174342 - DNA, 267 bp, Glycine max
ctcgtagacatcacaaaccttccctccattcatcccacgcatggctggcatgaactctagcgtattcggctgtagctatgccatatcaggtgcagcgtgttcggagctcaatgggaaggtcacttccgtggcctatgttgcatgctcttgctacaagttgccattgatcaaagctgaggccagagttcctaaagccaaagaatctgaaggaggaaggagaggtgcccttgttctcttggcagctacacttttcacctctgcagattc

SEQ ID NO: 174343 - DNA, 269 bp, Glycine max
gaattttcttcatccttctctgttctcctagaacttgattacttgaacattccctatgacagatgaggtggttcttctggatttctggccaagtccatttgggatgagggtcaggattgcacttgctgaaaagggtatcgaatatgagtacaaagaagaggacttgaggaacaagagtcctcttctcttacaaatgaacccggttcacaagaagattccggttctcatccacaatggcaaacccatttccgaatcgctcattgctgttc

SEQ ID NO: 174344 - DNA, 272 bp, Glycine max
agactataaccctcgaggtcgagagcagcgacaccatcgacaatgtcaaggccaagattcaagacaaggacggcattcctccggatcagcagcgtttgattttcgccggaaagcagcttgaagatggaaggaccctggccgattacaacatccagaaggaatcaacccttcatctcgtcctcaggcttcgtggtggcatcattgagccttccctcatggctttggctcgcaaatacaaccaggacaagatgatttgccgcaagtgctatgcc

SEQ ID NO: 174345 - DNA, 259 bp, Glycine max
ttaacctcatccaaagcctccagtgcatccccatccaccttatgtcccaaaaccaccagttgtgccagttacaccaccatatgttccaaaaccaccaattgtgaaccctccctatgtcccaaaaccgcctgttgtgccagttacaccaccttatatccctaaaccaccagttttgacaccaccatatgttcctaaaccaccagtggtgccagttacaccaccatatgtccctaaaccaccagtggtgccagttacacca

SEQ ID NO: 174346 - DNA, 252 bp, Glycine max
tattttataccattcttcttatttctttttaccaatcactacttattcaatccaaggatggcttccgccggcgatcttttcacgcatggtttgccggaagttggtggtgccgggaagttacacgtgcttgctgttgatgacagccacgtggaccgcaaggtgatcgagcggttgctcaaaatctcgtcttgcaaagtgacggtggtgaaaagtggtagcagggctctacagtatcgggggttggatggaaaa

SEQ ID NO: 174347 - DNA, 258 bp, Glycine max
tcgccgtcatcacctccggcaagggtggcgtgggcaagaccaccaccaccgccaacatcggcctctccctcgcccgtctcggcttctccgaggttgctgaggccgacgtcggcctccgaacctcgacctcctcctcggcctcgagaaccgcgtcaactacaccgtgatcgaggtcctgaatggcgaatgccgcctcgaccaagccctcgtccgcgacaagcgctggtccaacttcgaactcctctgcatctccaaacc

SEQ ID NO: 174348 - DNA, 272 bp, Glycine max
ctgagactaagaaagagtgttccgaggtaactaataacaaccagcaacctgcgactccgaactcttcatccatttcctccgcgtccagtgaggttttctatgatgaacagaataaaactgtagatcaagcacctgaacaccaaaagacaaaggaacagttgaaggctaagaagacaaatcagaagagacagagagaaccgagattcgcgttcatgacgaaaagcgaggtggatcatctggaagatggatacagatggagaaagtacggtcaa

SEQ ID NO: 174349 - DNA, 265 bp, Glycine max
ttggaatccaaaaatgagagaaatcatcagcattcacataggtcaggccgggatccaggttggcaactcctgctgggaactctactgcctggaacatggcatccagcccgatggcatgatgccaagtgactcctccttcggtgtagcccacgacgccttcaacaccttcttcagcgaaaccggatccggcaagcacgtccctcgcgccgtcttcgtcgatctcgagcccaccgtcatcgacgaagtccgttagtggcacttaccg

SEQ ID NO: 174350 - DNA, 270 bp, Glycine max
acgtatcttcatcaataatcgcagaagcagtttccggtgcatctcatcgtcttccaaaatgaacgacgcagatgtctcgaagcaaatccagcagatggtgcgtttcatccgccaggaagctgaggagaaagccaacgagatctctgtatctgccgaagaggaattcaatatcgagaagctgcagttggttgaagccgaaaagaagaagatcaggcaagaatacgaacgcaaagagcgccaagtcgaaattcgcaagaagattgagtactc

SEQ ID NO: 174351 - DNA, 260 bp, Glycine max
cccgattgcagccgaagttttcaaaagagctggtacttacgatcccaagagacttttgggagtcactatgcttgatgttgttagagccaatacgtttgtggcagaagttctgggtgttgatccaagggatgtggatgtcccagttgttgggggacatgctggaatcacaattttacctcttctttctcagattaaacctccttgctctttcaccccaaaagaaattgagtacctgactggtcgcatacaaaacggtggaa

SEQ ID NO: 174352 - DNA, 257 bp, Glycine max
gcataataatgaccagttctcgagagcgtttggtgaaggcggtgaagcagtttgtggaggttcgctacaaggttttcggcgaccgttatggccaaaacatcatcgacatcctcgactttccgattaaggttgtcttgtctcccttcactctcgccttcgatattgcaggctctgctcctcgcggcttcggcgtcccggaactcatctccaagctctctgccacttccgtcttcgctatagctgctcttgggacttat

SEQ ID NO: 174353 - DNA, 220 bp, Glycine max
ggaattttgtgctttacttcggcagcagaaatatctaaataatttgacagagcatgctctccggaaaaatcaacccttgattatatcaaatttgattaatgacaaggacctttcatctgatcacaatattagtggtactcctaagctggagcagatgtgcttgcaagccttgagtatgtatgtaattcctggcatctcatgtatagaaatatatgtggat

SEQ ID NO: 174354 - DNA, 251 bp, Glycine max
cattaatgaacaaaatattgcagaatcaaaagtagctctagtatatggtcaaatgaatgaaccgcccggagctcgtatgagagttggtttaactgccctgactatggcggaatattttcgagatgtcaatgaacaagatgtacttctatttatcgacaatatctttcgcttcgtccaagcaggatctgaagtatctgccttattgggtcgaatgccttctgctgtgggttatcaacccactcttagtactg

SEQ ID NO: 174355 - DNA, 260 bp, Glycine max
gtcttcttctgcgtcgtgattgttgcacattcagcaatggggaatatgtgaaagctggtttagcagaattggagttgtggtgctgccaagcaaaggaggagtatgcaggttcatcttgggatgagcttaagcacataaggcaagctgttggattcttggttattcatcagaagtataggatttcctatgatgaaatcattaatgatttatgcccaatcatgagtgtccagcagctatacagaatatgtacactttactgg

SEQ ID NO: 174356 - DNA, 268 bp, Glycine max
agcttgtatacgtcgccgcttcagcgtacaacatgatcattcccgagaagaaccgtaaagagatctgcaaatacctcttccaagagggagtttgctttgcgaagaaggacttcaatctggcgaacacccggagattgatgtgccgaatctgcaggtgataaagctgatgcagagcttcaaatccagagagtacgtgagggaaacatttgcgtggatgcactattactggttcctcaccaacgatggaattgagttccttaggacttac

SEQ ID NO: 174357 - DNA, 268 bp, Glycine max
gttcaaaggtaaggtaggttaacactcttcttcatcgtcgtcgcaatgggacgtgtgatccgtgcgcacgtaagggagcaggctcggtcttcaagtcccacacgcaccaccgcaagggccctgcacgcttccggagcctggacttcggggagcgcaacggctacctcaagggcgtggtcaccgacgtcatccatgaccctggccgcggcgcgccgctcgccaaggtcgccttccgccaccctttcagatacaagaagcagaacgagct

SEQ ID NO: 174358 - DNA, 261 bp, Glycine max
gcgggtacggtttcgacttgtttcttcttcgtgtttcttctttctctccttcttccttttcagatctccgctgaggaatcctcggagaaggagttcgtactcacattggatcactctaactttcacgacactgtcagcaagcacgatttcatcgtcgtcgagttctacgccccatggtgtggtcactgtaagaagcttgctccggagtatgagaaagctgcttctatcttgagtagtcatgatcctcctattgttttggca

SEQ ID NO: 174359 - DNA, 268 bp, Glycine max
ctaaaagatcaaggaaggaaggaagcaagatgttgggtgttataaggcacaagagtattcgccatgccttctccgcaataagacacttgtcttctgcagctaaagagattactgtcagggaggctctgaactccgcactcgatgaggaaatgtcagctgatcctaaagtgttcttgatgagtgaagaggttggggaatatcagggtgcatacaagatatccaaggggctgctcgaaaagtttggccccgagagggttcttgatactcc

SEQ ID NO: 174360 - DNA, 260 bp, Glycine max
gatgttttaccaggtgggcacaaaggtgaaaaagatggttatgcaattcctgctgggactgatgtcttcatttctgtatataatctccatagatctccatatttttgggaccgccctgatgacttcgaaccagagagatttcttgtgcaaaacaagaatgaagaaattgaaggatgggctggtcttgatccatctcgaagtcccggagccttgtatccgaacgaggttatatcggattttgcattcttaccttttggtgg

SEQ ID NO: 174361 - DNA, 215 bp, Glycine max
attcataatgggtgttttcacattcgaggatgaaatcaactcccctgtggctcctgctactctttacaaggccctagttacagatgccgacaacgtcatcccaaaggctcttgattccttcaagagtgttgaaaacgttgagggaaatggtggcccaggaaccatcaagaggatcactttcgttgaggatggagaacccagtttgtgctgcacaa

SEQ ID NO: 174362 - DNA, 254 bp, Glycine max
  unsure (1)..(254): unsure at all n locations
gaaaagaaccacattcccttttttgatgttgcttaccangggtttgctagtggaagccttgatgaagatgcagcttctgtgagactgtttgtggcacgtggcatcgaggttcttgtagctcaatcttacagtaaaaatctcggtctctatgctgaaaggattggagcatcaatgtgatttcatcgtcaccagaatctgcagcaagggtaaagagccaactgaaaaggttgcccnaccaatgtactctaatccnc

SEQ ID NO: 174363 - DNA, 257 bp, Glycine max
tttttatcattgatccttctcttccctctgccgccgcaccctgcaaattcaatggcttcagagaagaaactatcgaacccaatgagggaaataaaggtgcagaaactcgtcctcaatatctccgttggtgagagtggagatcgtctcaccagagccgccaaggtgttggaacagcttagtggccaaaccccagtgttttccaaagcaaggtacactgttcggtcctttgggattagaagaaatgagaagattgcatg

SEQ ID NO: 174364 - DNA, 268 bp, Glycine max
acctaattctcaattccatcaaaattggttatcgccattttgattgtgctgctgactacaaaaacgaagcagaagttggagatgcgcttaaggaggcttttgatagtggccttgtgaagagagaggatctcttcattaccaccaagctttggaattctgatcaaggccacgttcttgaggcgtgtaaagacagtctcaagaagcttcagttaacgtatctagatttatatcttgttcactttcctgttagcgtaagcatactggggtt

SEQ ID NO: 174365 - DNA, 269 bp, Glycine max
ctgctgttcctgcgcgtgaacaagcctcaggtaagccaaagccatggttaagcataacaatgttatccccaatggacacttccgtaagcactggcagaactatgtgaagacctggttcaatcagccagcacggaagacaagaagacggttggctcgtcagaagaaagctgtgaagattttccccagacctacagctggacctcttagacccattgtacatggtcaaactttgaaatacaacatgaaagtgagagctggaaggggatttt

SEQ ID NO: 174366 - DNA, 266 bp, Glycine max
ctcagccgcctcggctagaggttcggaaacgaagaagggttctgttttcttttcgcgatgagggccaagtggaagaagaagcgtatgaggaggctgaagaggaagcgccgaaagatgagacagagatccaagtagtgcgttaaacctagtttgtttccgttgcttttacaattgcttatgttgtcaaataggacacccagttgttagtggcactggtctctcctttttgatgttttgatacattttgttggattttatttcgtctt

SEQ ID NO: 174367 - DNA, 256 bp, Glycine max
tggagttgtcatgttggaacttcttagtggacggaaaccgtttgatagctcaaggccgaggtctgagcaggcgttggttcgatgggcaacacctcaactccatgatatcgatgctttggctaaaatggttgatcctgcattggaaggactataccctgtgaagtccctttctcgatttgcggatgttattgctctatgcgttcagccggagccggaattccgaccactatgtcagagtggttcagcgcggttcgat

SEQ ID NO: 174368 - DNA, 213 bp, Glycine max
ggcaagatgtcgaagagaggacgcggtggttcggcggggaacaagttccggatgtcgctgggtctaccggtggcggcgacggtgaactgcgccgacaatacgggggcgaagaacctctacatcatatcggtgaaagggatcaaagggcgtttgaaccgtctcccctcggcttgcgttggcgacatggtgatggccaccgtgaagaaggggaaa

SEQ ID NO: 174369 - DNA, 338 bp, Glycine max
  unsure (1)..(338): unsure at all n locations
tgggaagtcggcaaaatggatccgtaacctcgggaaaaggattggctctgagggctgggcacgggggtcccagtcncgaacccgtcggctgtcggtgaaccggctcaattgctgcagaacaattcttcttcattctcaaagttagtcacagaattttttaggagatcatcccaaagtaactttcaaaaaagatagacaatggggacaggcataagatactttcaggaggataatatagcagtgacagaccaccatactgtacatagagaaaagttaggcgttggagcgcactcaagagacactgactgattacattagcaacttaaggattaaggtta

SEQ ID NO: 174370 - DNA, 342 bp, Glycine max
gctcgagacaggtcatgatgaacaagaggccattaaccgccgtctacaacaaggcgatccccgatctttgcaatcgagaactcggccaccttcccccaaggaatttcgctctccgtcttggcgcctccgaggatcttgtccttcgacttgaattactgaggaatctgcaaaaacacagaggttgtgtcaacactgtgagcttcaatgcagatggtgacactctagtctccggttccgacgattggggggttattctctgggactgggaaactggccgcattaaactctccttccattctggtcattctaacaatgttttccaggccaagttcatgcctcact

SEQ ID NO: 174371 - DNA, 334 bp, Glycine max
cgttgctccttcgccacaactccctgccaacatgggtatctccagagattctatgcacaagaggcgtgccactggtggcaagaagaaggcatggaggaagaagagaaagtatgagcttggtcgccagcctgctaacactaagctgtcaagcaacaagacagtcaggaggatccgggttagaggtggaaatgtgaagtggagggcactgagattggatactggaaattactcctggggaagtgaagctgtaactcgcaagactcgtatactagatgtggtttacaatgcctcaaacaacgagcttgtgcgtactcagactcttgtaaaaagtgct

SEQ ID NO: 174372 - DNA, 264 bp, Glycine max
caggtatagttgatttcctgacttgtttggtcagaaagatgctaaagaaaatgaaaaagcaacctctcttgtttgtggaactccttttctggaagactcgaagggaatgtcattacatcaatgctgaatatttgttgagcgagcttggtcatttgaagaaagaaagtgccaattggaataactctcaaggagatgaagaaattggttcatccccaacaaaggtgtggacacgtagaagcatagctgatgcacttggtgaggatg

SEQ ID NO: 174373 - DNA, 336 bp, Glycine max
tagctactagcatcttcttccatcaccacattcatcttaattaatattctctagtggtgcttcccaatcaatatcctttaattttgtctcaattcctttctttctcattcaccaatccatacttcattttgttaatttcttaatccaacaccaccaagatgccaactgacacatcatcagtttccggcggcgaaatcgtgtgtgtgaccggtgccggcggtttcatagcctcttggcttgtcaaacatctcttagagaaaggctacactgtgagaggaaccgtgagaaacccagatgatccgaagaatggtcatttgatagagttggaaggaggca

SEQ ID NO: 174374 - DNA, 332 bp, Glycine max
tggaagagtaccagataggatgatgcttactttctctgtttttccttctccaaaggtttcggacactgttgtggaaccctacaatgctactctctctgttcaccagcttgttgaaaacgcagacgagtgcatggtgcttgacaatgaagctttgtatgacatttgcttccgtaccctcaagctaaccaccccaagctttggtgacttgaaccatctgatctcagctacaatgtctggtgtcacttgttgtttgaggttccctggtcaacttaactctgatctgcgaaacttgcagtgaaccttattcccttccctcgcctccacttcttcat

SEQ ID NO: 174375 - DNA, 341 bp, Glycine max
ggagctttcgtgcagccggctatatacgaggcttttggtttgacagtggttgaggccatgacttgtgggttgccaacattcgccacatgcaatggtggtcctgctgagatcattgtgcatggcaagtctggcttccacattgacccttaccatggtgaccgtgctgctgatctccttgttgacttctttgagaagtgcaagcttgacccaacccactgggaaacaatctcaaaggctggtctccagcgtattgaagagaagtacacatggcaatttactcacagaggcttctcatctcatggtgtctatggcttctggaagcatgtgtctaacttgaccgc

SEQ ID NO: 174376 - DNA, 331 bp, Glycine max
atagcccaagccctatacaaccaaaccctaacacacacccatttgattcagtttccatggctagcctcaaggttgcatttttggctgcagtgctctgcatggttgtggtgagtgcacccatggcacatgcagctatcacgtgcgggcaggtgacgaatagcctgatcaattgcatcggttacctccagaacggaggaacgccgccgtcgggatgctgcaacggagtgaagagcctcaatgccgccgccaagaccaccgccgaccgccagacggcgtgcaactgcctcaagtcggccgccagccaaatctccggcttcaaagccaacaacgc

SEQ ID NO: 174377 - DNA, 329 bp, Glycine max
aggagtcgaaggacttggaagagaaggccgagatgaagaagatgtatggcctcatcgagacctacaagttgaacggccaattcagatggatatcctctcagatgaaccgtgtgaggaacggagagctctaccgtgtcatctgtgacacaaggggtgcctttgtgcagcctgcagtttatgaggcctttgggttgactgtggttgaggccatgacttgtgggttgccaacgtttgccacatgcaatggtggtcctgctgagatcatgtgcatggaaaatctggttaccacattgatccttaccatggtgaccatgctgctgagatccttg

SEQ ID NO: 174378 - DNA, 331 bp, Glycine max
aaagataatggctctcattgggttgctcttgatgggttttctcacaatgttctcctctgctcatgcctatggtggagggtggactaatgctcatgccaccttctatggagggagtgatgcatctgggacaatgggtggggcatgtgggtatgggaatctctacagccaagggtatggaacaaacactgctgctctaagcactgcactgttcaacaatggcttgagctgtggctcttgctatgagattaggtgtgccaatgaccacaggtggtgccttccaggttctattgtggtcactgccaccaatttctgtcctccaaacaatgccttg

SEQ ID NO: 174379 - DNA, 332 bp, Glycine max
caaacactcttcttcatattcttcttcttcttgttcttgttctatctgtgacgagcatcatggcctcgagagcagtgctattgttggctatgtgtgtgcttccggccatggttgtggccattcgcccagcaaagaaccctttttgcgtgaagggtcgcgtctactgtgacccttgccgtgctggttttgagacctcagcaaccacctacattgccggtgctgagattatgttgcaatgcaagagcagggttagcaacgaggttgtgtacaccaagaaggggtacactgactcaactggagcatacacaatgtacgtggacgaggatcacgca

SEQ ID NO: 174380 - DNA, 337 bp, Glycine max
tgtgagaacaagataaagaggcgcaagatgagtggtagggtttctgggaaggtgaagtggttcaatgatcagaaggggtttggattcataagccctgacgatggcagctacgatctcttcgttcaccaatctcagatcaaatctgacggtttccgaagcctcgccgaaggagagtccgttgagttcgccattgaatctgaatctgacggacgcgcgaaggctgttgatgtcactggccccgacggcgccagcgtccagggaaccagacgatgcggtgatggtagccgaagctatggcgggggacgatgatgtcgtggaggtcgctacggtggaagcg

SEQ ID NO: 174381 - DNA, 356 bp, Glycine max
gctcggaattcgtcgcgagattctttgttgcattatcacaaacacctcgtctctcacaatgcagctagcaatggcggccaacgctgtcgtttcaccgtcgccgttccgacctcagccctttctccggtcatccttctccggcgtctccgtcaagctcactccccaatccataacgctttcacgctccaagtccctcaccgtcttcgccgccaccaagaaggccgtcgccgtcctcaaggggacctccgccgtcgaaggcgtcgccactctcatccaagaagacgatggcccgacgacagtttctgttcgcatcactggccttactccggggcttcatggttttcacctacatgagt

SEQ ID NO: 174382 - DNA, 340 bp, Glycine max
ggtttacaccgagcagccacacctcccgcagcagccatggttctcaaaactgaactatgccgattcagtggtgccaagatctacccaggaaagggcatcagatttgttcgttgtgattcttaggttttcctgtttgcaaactcaaaatgtaagaggtatttccacaatcgcctgaagccttcaaagctcacctggactgcaatgtacagaaagcaacacaaaaaggacattgctcaagaagctgtgaggaagaggagacgtgctgccaaaaagccttactctaggtccattgttggtgcgaccttggaagtaatccagaaaaagagagctgagaagccag

SEQ ID NO: 174383 - DNA, 337 bp, Glycine max
gacagggaactggagacagatatggattggcatcacggcacaaagccacttgttcctcggccagagaccttaagcttcttctacaactataactacaacagtccatatccaggagtggaagtgaaacaagcagcattgatggagacaggagaagggtcagttccagcattaatggacagcagaaacaaagagaagaagaagcgattaacaaataaccagatagagttattggagaggagttttcaggaggagataaagttggaccctgaaaggaagatgaagctttccagggagctaggccttcagcctcgccaatcgctgtttggttccaaataga

SEQ ID NO: 174384 - DNA, 321 bp, Glycine max
gaatttctggaactgagattctggcctatgtctctcaagttcataagattgttcttccagaggaccttattgatcatgacactctgactcttgatcagattgagagtaacattgttcgatgtccagacccggagtatgcagagaagatgatatctgcaattgatgctgtgcgagtgagaggtgattctgttggtggtgttgtgacatgcattgtgaggaactgtccacgaggtctcggttcaccagtatttgacaaacttgaagctgagctggctaaagctgcaatgtcatgcctgcaaccaagggctttcagtttggtag

SEQ ID NO: 174385 - DNA, 327 bp, Glycine max
  unsure (1)..(327): unsure at all n locations
tggtggcggaaccagagaaaaccaaccagaccgattactcttgaggaaacaaaaatctaagatgagccgccatccttctgtcaaatgggnctcagagtctgatgtactctacttaacagttgagctgcctgatgctcaggatgttaagctcaaactggagccagaaggaaaattttacttctctgcaactgctggtgcagagaaaattccttatgaggttgacattgatctgtttgacaagattgatgtaaataatagcaaagctagtgttggttcaagaaacatctgctacttggtgaaaaaggctgagaacaagtggtgggacag

SEQ ID NO: 174386 - DNA, 328 bp, Glycine max
cacatcacatccaacgtacgatccacgaaagatgttggctgttttcgacaaatcggtggcaaaaagcccagagggtctgcagagccctcactcagattccgtctcagccctaaaagacggttttatcgcagaacacttctcttccgttcaccctggttccgtcaccgtcaaccttggctcttccggtctcttggcctattcccttcacagacagaacccccttctcccaaggctgtttgcagttgtggacgacattttctgtttgtttcaaggtcaccttgagaatgttgccaaccttaagcaacaatatggattgaacaaaacagca

SEQ ID NO: 174387 - DNA, 327 bp, Glycine max
atgaatggcaaagtcacactctcgtgtccacctgatatcaatttgcccctctcggccgagcgcagtccacctccacagccttggaatcctgatccttctgatactgtgtttgatattggtcttggtactcaaggactcgagactgagagtttcgtccaactccccaaagttggaaggaaatgcgccaaacggcttgatagcatatggggtgcttggtttttcttcagattttacttcaagccggcattggttgagaagtccaaggccaaggttgttagggacagcaatggtgtttcggggttcgataaatccgatatcaagcttgat

SEQ ID NO: 174388 - DNA, 333 bp, Glycine max
  unsure (1)..(333): unsure at all n locations
tgtttgatagaaataatggatcggaacgggccaaagatcanaagtacaattcttcaccatctctatgataagcagagacagagcccttactatgacaatctctgtcgccctgtttcagatttgcttccatttattgccaatgggatcagaggtgtcactaccaacccagcggtactcactactcagttttttcttcacctgaaaacattactcttctccatttggttttatttttatctagtttctgtgtgttggttataataacttttcagtgttctcacatcgcagatttttgaaagagctatttcatcctcaaatgcctacgatgatcag

SEQ ID NO: 174389 - DNA, 332 bp, Glycine max
ctgcaatggcttcaagtcaggaggaggtgaccttttgggagctactggaagcccatttgtgtgcagggttcatattgccctcaagttgaagggagttcaatacaaatatgtcgaagaaaatttgaggaacaagagtgaactgcttctcaaatccaacccagttcacaagaaggttccagtgtttattcacaatgagaagcccatagcagagtctcttgtgattgttgaatacattgatgagacatggaagaacaaccccatcttgccttctgatccttaccaaagagccttggctcgtttctggtccaaattcattgatgataaggtttttg

SEQ ID NO: 174390 - DNA, 325 bp, Glycine max
aaatctccggcggtccttcagtccattttcctttccatttcggatctgataggaatagatttcgtcagtgttgaaatcacgagaaattcatggctgctccaccggcaagagctcgtgcggattacgattatctcataaaacttctcttgattggcgatagtggtgtcggaaagagttgccttcttctacgattctctgatggttctttcacaactagtttcatcacaactataggcattgattttaagataagaaccattgagcaggatggaaaacggatcaagctccaaatttgggatactgcaggtcaggagcggttccgaac

SEQ ID NO: 174391 - DNA, 332 bp, Glycine max
gtgaagatcccagtgtgggaacaaaagattatattcttcctggaaaaatttcaaatgtcaaagtcatactcaatggtggtcaaagagttacttttctgaggcctgatggatatttcgcattccacaatgttcctgccgtgacacatctaattgaagtggctgcaataggctatttcttttctccggtacgagttgatgtaagtgccagacaccatggcaaaattcaggcagcactgacagaaaataggaggggacttagtgagtttgtcttggagccattgaaggatgaacaatattatgaggttagggagccattctctattatgtccatt

SEQ ID NO: 174392 - DNA, 330 bp, Glycine max
atttgaagttcaagacagcttatcactttttcctttaggttggatacatacacacccgtcacagacttgtttcatgtcttctgtagatctacacactcattactcataccagatcatgttaccagaggcaattgctattgtcatggcccctacagatactacaagtccacatggcatattccatctgtctgatccgggtggtgtgtctgtcattcgtaactgtcaacaacgtggatttcatccccatgaggagcctgaggatgggactccaatatatgagcactgttcccatgtctatatgaatgctaacttgaagttcgatgttgttga

SEQ ID NO: 174393 - DNA, 312 bp, Glycine max
gtttacgagagatagaagcaactcaacaaattaagggtgaaagctgagaaggttgctgaagagaagctcggttcacaacttgatgttcttgctcctgttaagtattgagtagtttttgttagtgtttgaaattttttatgccacttataccaaattgaactacctttcaattttgcttgaggttgctttgttattggatcatagatttgatatctgatcatcttggaagctgttttttatttaattgtgtgttttgtaaaaaaaaaaaaaaaaagggcggccgctctgtttttaatttaattgtgcgttttg

SEQ ID NO: 174394 - DNA, 320 bp, Glycine max
gtgagctataagctagtttatcgtgaggagaatatgaagttgtttgtattctttgttgctgcagtagttttggtagcatggccatgccatggcgcaggctaccaaaggttccctctccgaatgaaaactggctatggtgagcgttcttcggaggtaaaatgcgcaagttttaggcttgctgtggaagcacacaacatccgagcctttaaaaccattcctgaagagtgcgttgaaccaacaaaggactacattaatggcgaacaatttagatcagactctaaaacagttaaccaacaagctttcttttatgctagtgaacg

SEQ ID NO: 174395 - DNA, 322 bp, Glycine max
gattcgaaacatgctaccagattgctttggctatcaaggatgaggttgaggatcttgagaaagcaggtattactgtcatccagattgatgaagctgctctaagagaaggtttacctctgaggaagtctgaggaggctttctatctaaactgggctgttcactcatttaggattaccaactgtggtgtggaggacactactcagattcacactcacatgtgctactccaacttcaatgacatcattcactcaatcatagacatggatgctgatgtgatcaccattgagaactctagatcagacgagaagttactttcagtctt

SEQ ID NO: 174396 - DNA, 321 bp, Glycine max
cttttcttcagttcggtggaaggagccgtagcagcagcggaagctctagcttgggcagcgaatcacaatggcgagaggattgaagaagcatttgaagaggcttaatgccccaaagcattggatgcttgacaaactgggtggtgcatttgctcctaagccctcatctggaccacacaaatccagggaatgcctgccactcatactcattttgcgaaaccggctgaagtatgctctgacataccgtgaagtcattgctattctgatgcagcgacatgtccttgttgatggcaaagtcaggacagacaagacatatcctgctgg

SEQ ID NO: 174397 - DNA, 326 bp, Glycine max
atatggattagctggcttaaaagctgctgagcttcatggaaatcttactcaagcccagcgccttgaagctttggaacagttcaggaagcagcaagtggattttttggttgcaacagatgtggctgcccgtggccttgacattattggtgttcaaacagttatcaactttgcatgtccacgtgatcttaccagctatgttcatcgagtgggtcgtactgcaagagccggaagagaaggatatgctgtcacttttgtgactgacaatgaccgatcacttttaaaagccattgcaaagagggcaggttcaaagctgaaaagccgtattg

SEQ ID NO: 174398 - DNA, 327 bp, Glycine max
tgcagagctcaaccctagagaggaggaagagagagcgtgcaagttccggccaccaccgaccatgacattcaagcgcaggaatggaggtcgcaacaaacacggccgcggccacgtcaaattcatccggtgctccaactgtggcaaatgctgtcccaaggacaaggccatcaagaggtttctggtgaggaacattgttgaacaggctgcagtcagagatgtgcaggaagcttgtgtctatgaacaatatactcttccgaaactctatgtgaagatgcagtactgtgtttcttgtgctatccactctcatgttgtgagggttcgatcccg

SEQ ID NO: 174399 - DNA, 329 bp, Glycine max
ctacaaacctgttgttggcaccctgcaagatcttgcacaggcatattgtgattcttttgctcccagagatggagaccaggataacgaggagaaggttccagactttgttgaaggaatgatttatacaccaacagaaggtgtgatgatgacaggaagatatgcttcaaaggaagaggccaagaagaaggggaataagatcaatagtgtaggatggtggtttaaaccatggttctatcagcatgcacagacggcactgaagaaaggagagtttgtagaatacattcctaccagagaatattatcacaggcacacaagatgcttgtactggg

SEQ ID NO: 174400 - DNA, 327 bp, Glycine max
tgttttgcagaaaccatgtattattttcctgctgagaatagagccaaattctggtataaggcagattatggcctgtttcgtttctgtgtagcagatagtgagcacgactggagagaaggatcagaacaatacaaattcattgagcattgtcttgcaactatagatagaaagcatcaaccatggctaatcttttcggctcatcgtccccttgactactcatctaatgattggtatggcaaggaaggctcatttgaagagccaatgggaagggaaagtttgcagaagctttggcaaaagtacaaagtagaaattccattttatggtcac

SEQ ID NO: 174401 - DNA, 328 bp, Glycine max
ccgagcttggggtttagggcgttgagaagcttattccgtcgaaaatgatgcttccgggttccaatagaagaatacactccgttcatcgtcactctgggatggctgtagcaggattagcagctgatggcagacaaattgttgccagggctaagtctgaagctactaactatgacagcgtatatggcgaaccaattcctgttaaggaacttgctgaccgtgtggctagttatgtgcacctctgtacgctatattggtggctcagatctataatggtgctgcagaccttttggatgtggtgtcatactaggaggttatgacagggatggac

SEQ ID NO: 174402 - DNA, 292 bp, Glycine max
gatagacttgcaggaagactctgggtgtcctcttggaaataaaataccagaatttaatgagttagtataccaaaataggtggcgtgaagcattagataggcttcttgagacaaataacttcccagagtttaccggtagggtatgcccagcaccttgtgaaggttcttgtgtccttggtattattgagaatccagtatctattaaaagcatagaatgcgctatcatagacaaagcttttgaggagggatggatggtgccacgacctccagctaggagaactgggtatgcactt

SEQ ID NO: 174403 - DNA, 308 bp, Glycine max
tctcgaagcatctttctttctcttcctgcagaagctatccgtgttacttgttcccaagtctccaacaagcaaagtacatggttgatttggaaatccaggtccccagcgcattcgacccgtttgccgaggcgagagaatcagatgcccccggggcaaaggagtatgtgcatatacgaattcagcagaggaatggaaagaagagtctgacaacagtgcaagggctgaagaaggagttcagctacgagaagatcctcaaggacctcaagaaggacttctgctgcaacgggactgtggtgcaggacaaggag

SEQ ID NO: 174404 - DNA, 317 bp, Glycine max
tgacttttctcccctcataaaaaaaacctaccaatggctcccgcaaaggcagagaagaagcccgcggagaagaagccggcagagaaggccccagcggagaagaagccgaaggggagaagaagatatcgaaggaaggaggaagcgagaagaagaagaagagaacaaagaagagcgttgagacctacaagatctacatcttcaaggtgttgaagcaagtgcaccccgacatcgggatctccagcaaggctatggggatcatgaacagtttcataaacgacatcttcgagaagctcgcccaggagtcatcgcgtctcgct

SEQ ID NO: 174405 - DNA, 322 bp, Glycine max
cttcgatggcggcaacctcaacatcactggcttctcaactctacattggcctgcgccgcccctgcctcaagctcgattctttcaattctcaatctttctctctcttcgaccctaatcttcgcctatccctctctccacccaaaccctcacgcgccgtcatcgccatggccggcaccgggaagttctttgttggtggcaactggaagtgtaacggaacaaaagactcaatcagcaagcttgttgctgacttgaacaatgcaaaattggagcctgatgttgatgttgtcgttgcacctcccttcctctacatcgatcaagtgaa

SEQ ID NO: 174406 - DNA, 326 bp, Glycine max
tctactactgctagctgtgacttgttttgagttcaatcaaatcgcattggtatctgaaatcaggaaagatggttagcgtagctgagatcaggcaggcacaaagggcagaaggcccagcaaccatccttgccattggaactgcaaacccaccaaaccgtgttgatcagagcacctatcctgattactacttcagaatcaccaacagtgaccacatgaccgagctcaaagagaaatttcagcgcatgtgtgacaagtctatgatcaagacgagatatatgtacctaaacgaagagatcttgacagagaatccaaacatgtgtgcttac

SEQ ID NO: 174407 - DNA, 306 bp, Glycine max
  unsure (1)..(306): unsure at all n locations
tgcacttcagagaaaatggcggtacctctgctctcgaagaagatcgtgaagaagagggtgaagaagttcaagaggcctcagagtgacagganaatttccgtcaagacaaactggcgtagaccaaagggtatagattcccgtgttaggagaaagttcaagggatgcactttgatgccaaacatcggttatggttctgacaagaagacccgccactatctccctaatggttttaagaaatttgttgttcacaatgtgaaggacttggaactgctcatgatgcacaacaggacttactgtgctgagatt

SEQ ID NO: 174408 - DNA, 308 bp, Glycine max
tccaattcacagagcaacacaacgaaccaacaatggcgcacctcagccgcagtcgcagccgcagcacgggcaagcagcgctggagcaggtgcagtgcttcggtcgcaagaagaccgccgtggccgtgacctactgcaagcgcgggcgcggtctcatcaagatcaacggctgccccattgagctcgtggagccggagatcctccgcttcaaggccttcgagcctatcctcctgttgggtaagagccgcttcgccggcgtcgacatgcgcatccgcgtcaagggtggcggccacacctcccagatctacg

SEQ ID NO: 174409 - DNA, 305 bp, Glycine max
aattcttctaagctctactaaaaaaatatacatagaaacaatcgaaattatttattattattaaagcaacatggttttgtcatggacaaaagggagagtgttccggcgtgccagaaagggtaaggagttgaaatattctggtggcgacatggagatagagattgcgatccccacccacttccggtgcccggtaaccttggacatgatgaaggaccccgtgaccgtttccacgggcataacctatgaccgcgacagcatcgagaagtggatcgagtccgggaaccgcacgtgcccggtcaccaaaa

SEQ ID NO: 174410 - DNA, 316 bp, Glycine max
caagagcttctccttcaacccgggcccgtttaacatgaaggagcacgtgctcattaccatattcgccaatgccggaagcgcattcggatccgggtcaccctatgcggtgggtatcgttaacattatcaaagccttttacggacgcagcatctcctttgctgcttcttggcttctcatcattacaacgcaggtgctaggatatggatgggccgggttacttagaaaatacgtggtggaaccggcccatatgtggtggcccagtaccctcgtccaagtctcacttttccgagctttgcatgagaaagatgaccaccga

SEQ ID NO: 174411 - DNA, 318 bp, Glycine max
taacaataaagaacatgcaagcttcaactggagcaagaattcaggtgattcctcttcatcttccaccaggtgacactctactgaaagaacattaaaaattgaagggacccctgaacaaattgagtctgcaaaacaaatggttaaccaagtcataagtggcgagggttagtttgtattggaccattagtgacaccaacatggaatccctttgttggtgttctctcagcttgcgatggtatggttctaaacctcttttgatatttattagagggaaataagtctcctattaatgtgtataccttgtcataattggactgg

SEQ ID NO: 174412 - DNA, 303 bp, Glycine max
agagaattaggcttgtttgcaatatttgatggccacttaggccatgatgtagcaagctatttgcagaaccaccttttccaaaacatcttgcaacagcatgacttttggactgagacagaaagcgcagtgaaaaaagcttacgttgaaacagatgagaaaatattggaacaagaacttgtgttggggcgaggagggtcaacagctgtgactgcaatacttattgatggtcagaagcttgtagtagcaaatgttggtgactcaagagctattatctgtgagaatggaaaggcaagacaactatca

SEQ ID NO: 174413 - DNA, 300 bp, Glycine max
gctcacacatgcccctatcttccttagctacctagattattcacttcaattcctcacaagcaacaccgtatcttgctccaatggcagctttgtatctcccaataagcatgttggcactcattgttgttgtttctcttggtttgtggagtggtgttcaaggtgcaccacaagtgccatgctacttcatttttggtgattctttggttgataatgggaacaacaaccagctccagtctttggctagggctgattacttgccttatgggattgacttccctggtggaccttctggaaggtttt

SEQ ID NO: 174414 - DNA, 202 bp, Glycine max
  unsure (1)..(202): unsure at all n locations
agcgcaaggctttgttttcgggacagcgtcagttcataccagtatgaaggtgctgcaagggaaggtggaaaaggaccgagtatatgggatactttcactcataaatagaaataaaaaanaaaagaccacagnaangcagaagnaacggaagacgaaaaacaacggcagaaggaggagagaggaaacatgaagtacatgaatt

SEQ ID NO: 174415 - DNA, 292 bp, Glycine max
gtcagagtgagaaagagaaagagagaattcgtaaaccctaatttcggaaagatcggcgatgactgcctccaaggatcgcgagatcttcgtctacatcgccaaactcgccgagcaggccgagcgttacgaagagatggtggaatcaatgaagaacgttgcgaatctcgacgttgaactgacggtggaggagcggaatttgctttctgttgggtacaagaatgtgattggtgctcgcagacgtcctggaggatcctgtcttccattgagcagaaggaagaaacaaaagggaacg

SEQ ID NO: 174416 - DNA, 293 bp, Glycine max
cccatttcaattctcaaatccaagctcgggaacagagaaggagaaagagaatggacgccattgattctgtgttcgatccgttgagagaattcgcaaaggacagcgtgaggctcgtgaagcgctgccacaaacccgatcgcaaagaattctccaaggttgccgtgcgtaccgcaattggtttcgttgtgatgggattcgtgggtttcttcgtgaagcttattttcattccaattaacaacatcatcgtcggatctggttaggatgaagggtactacaatcgcctcaggaattca

SEQ ID NO: 174417 - DNA, 308 bp, Glycine max
attcagctcgatgccgtcgtcgctgtttgtgtgtgtatcaggtgcagctaccaacgatggtgaagggtcgtcaaggagagcgcgtcagactctacgtgaggggtacaatccttggatacaaaaggtccaagtccaaccagtacccaaacacatccctgatccaaattgagggagtgaacaccaaagaagaagtaggatggtaggctggcaagaaaatggcctatatctacaaggctaaggtgaaaaaggatggaagccattaccgctgcatatggggcaaggttacgaggcctcacggcaacagtggt

SEQ ID NO: 174418 - DNA, 294 bp, Glycine max
ctcttctttcaggtccaattcactcgcttattcttttctttccatacacattaagaaacaaaaaacgaacaagttcaggactggcatggacttctttcaccgcgcgaacgcggttcgcctccgcagccaccacgacaagtacctcctcgcggaggacgacgaggattcggtgacgcaggaccgcaaaggctcctcgaaaagcgcgcggtggacggtagaatacgtggctgaatacgataacataattcgcctgaagagctgttacggcaagtacctcaccgcctccaaccaccg

SEQ ID NO: 174419 - DNA, 290 bp, Glycine max
ggtttgccgattgagagagacagagaaatgggagaacgaaaaggaatcccaatggctttggggctcttggcgatgatcctcttcttcattgcttcctcttcctctcacctcgttcgcgcttccgatgacgccgacgacgcgatcttctacgagtcgttcgacgaggattttgatggacggtggattgtatccgacaaggaggattacaatggtgtctggaagcatgccaagagtgatgggcatgatgattatggacttcttgttagtgaacacgccaggaaatatgctat

SEQ ID NO: 174420 - DNA, 278 bp, Glycine max
gtcgtctcttcctcttcgcaacaatggttgccgccaagaaaaccaagaagacccatgagagcatcaacaacaggcttgctcttgtcatgaagagcggcaaatacacccttggttataagaccgttctcaaatctcttaggagctccaaagggaaattgattatcattgctaacaactgcccccctttgagaaagtcagagattgaatactatgccatgttggcaaaggttggagttcatcattacaatgggaacaatgtggatttgggcactgcctgc

SEQ ID NO: 174421 - DNA, 289 bp, Glycine max
gagaaaatggcggtacctctgctctcgaagaagatcgtgaagaagagggtgaagaagttcaagaggcctcagagtgacaggaaaatttccgtcaagacaaactggcgtagaccaaagggtatagattcccgtgttaggagaaagttcaagggatgcactttgatgccaaacatcggttatggttctgacaagaagacccgccactatctccctaatggttttaagaaatttgttgttcacaatgtgaaggacttggaactgctcatgatgcacaacaggacttactgtg

SEQ ID NO: 174422 - DNA, 280 bp, Glycine max
gtctccggtgagggaaaagtagtagaagagaagatgtcgaccgtaccaggacagctcatctgggagatcgtgaagaagaacaactcctttttggtgaaagagttcggaaggggcactcagagcgtgcagttcagcagagagcccaacaatctctacaacctcaacactttcaagtactccggtttggcgaaccagaaaactgtcactgttcaacctgctggtaaagaccagtccgtgttgctcgctacaaccagacaagaagcaaaccagctgctgcttg

SEQ ID NO: 174423 - DNA, 194 bp, Glycine max
gtcagagtgagatagagaaagagagaattcgtaaaccctaatttcggaaagatcggcgatgactgcctccaaggatcgcgagatgttcgtctacatcgccaaactcgccgagcaggccgagcgttacgaagagatggtggaatcaatgaagaacgttgcgaatctcgacgttgaactgacggtggaggagcgga

SEQ ID NO: 174424 - DNA, 290 bp, Glycine max
tgtcggttcttccttctcaaatattcttgagatccccattttctccgaagcaaagccatggctaagggtcctggtctctactctgacatcggcaagaaagctagggatctgctgttcaaggactaccacagtgaccagaagttcaccatcaccacctactcaccgactggagtggctattacagcatcaggaaccaggaaaagtgaactgtttctggctgatgtcaacacccagttgaagaacaaaaacatcactactgatatcaaagttgatacagattctaatctctt

SEQ ID NO: 174425 - DNA, 287 bp, Glycine max
gctcgactcttgggctaggtttagcgcagttcttctagatttaaggaagatgggtaaggaaaaggttcacatcagtattgtggtcattggccatgtcgactctgggaaatccactaccactggtcacctgatttacaagcttggaggcattgacaagcgtgttattgagaggtttgagaaggaagctgctgagatgaacaagaggtctttcaagtaatgcctgggtgctggacaaacttaaggctgagcgtgaaagaggaatcaccattgatattgctttgtggaag

SEQ ID NO: 174426 - DNA, 276 bp, Glycine max
gatgaacaagaggtctttcaagtatgcctgggtgctggacaaacttaaggctgagcgtgaaagaggaatcaccattgatattgctttgtggaagtttgaaacaacaaagtattattgcacagttattgatgcgcctggacatagggatttcattaagaatatgattactgggacatcccaagctgactgtgctgtacttatcattgattcgaccactggtggttttgaagctggtatttccaaggatggacagactcgtgaacatgctctgctttc

SEQ ID NO: 174427 - DNA, 284 bp, Glycine max
ctttggagtcgtacttatatagataatgtacaggtcattttatcagaggacttggctgtgcatcctggaagatatttcagtggctatggaattatccgtgatattgtacacagtcatgtgctcctaacaattgcattgcttgccatggaaccaccaataagccttgatggagaagatattcgaaatgaaaagcttaaggttttgaggtcaattcgcaaattggagccaaaggatgtcattctcggccaatataaaacaagtggtggagccaaagttgatgcgtg

SEQ ID NO: 174428 - DNA, 275 bp, Glycine max
gtaagaagaaaagatgccggctggtcatggtttgagatcccgcaccagagattccttctctcgtcctttcaggaagaagggaaccatcgccctcaccacatacctgagaacctaccacgtcggcgactatgttgacgtcaaggttaacggtgccgttcacaagggaatgccccacaaattctaccatggccgcaccggacgcgtctggaatgtcaccaaacgtgctgttggcgtcgaagtcaacaagcaggttggcaacagaattataaggaaga

SEQ ID NO: 174429 - DNA, 284 bp, Glycine max
tccagagatgggctacaatcctcttgaaactcctccatgtggtgagatatgtgtgagagggaaaactgttttcactgcttactacaaaaatccagagttaacaaaggaagctattaaagatggatggtttcacacaggggacataggagaaatgcttcctaatggtgttattaagatcattgacaggaagaagaatcttgttaaactttcccaaggagagtatatagcacttgagcatcttgacaatgtttatggaatcactcctatagttgaagatatctggg

SEQ ID NO: 174430 - DNA, 235 bp, Glycine max
acttaccacactcaatcacgaggcaaccataggcgaagaacggaagaagccaccatagtcgtcgtcgtgagcgaagatccataacaatacagttacaaattgcaacaacacactcctcgttcgatcgtagccagaagaatgggaagtttgggagcgattctgaagaatccagatgacttttaccctctgctgaagctgaaaatggcggcgagaaacgccgagaagcagatcccgc

SEQ ID NO: 174431 - DNA, 211 bp, Glycine max
taccaaaaggagagtgcaataactcgttgtacattcctagtgtgtgggagagacatggctaagatgtgtgttttggtgttggttcttgctctggctgtggccacaagtgccagaaacgttcccaaccccaaggatgctggtcttaaggaccagaagaacttcatcagctatggtggagttggtggttattccgggattgggaacaatggac

SEQ ID NO: 174432 - DNA, 261 bp, Glycine max
cgttgttgttgtactaaaacgtccacacattctccgtcgccacaacaacaatggctccgaagaaaggtgtgaaaggttccgttgtagcagcgaagaagaaggttcaggagaaggtgacgaatcctttgttcgagaagcgtccgaagcagttcgggatcggaggcgcgctgccgccgaagcgggacctgacgcggttcgtgaagtggccgaagaacgtccaaatccaacgcaagaagcgcatcttcaagcagaggctcaagg

SEQ ID NO: 174433 - DNA, 145 bp, Glycine max
gcagagtcagagacagagacgcagccatggggcggagacctgcgaggtgttataggcaaattaagaacaagccataccccaagtcacgtttctgccgtggtgttcctgatcccaagatcaggatttatgatgttggtatgaagaa

SEQ ID NO: 174434 - DNA, 293 bp, Glycine max
caattttacaaatacaaatacccttctccctcgctcaaaacacaaacaagctcgcttcttccttctctcatcaacaacatgcagatcttcgtcaagactttgaccggcaagaccatcaccctcgaggtcgagagcagcgacaccatcgacaacgtcaaggccaagatccaggacaaggaaggtatccctcctgaccagcagaggttgatttttgctggtaagcagctggaagatggtcgcactcttgctgattataacatacaaaaggaatcaacacttcacttggtcttgag

SEQ ID NO: 174435 - DNA, 282 bp, Glycine max
cacctttctcctaaaacatctccagtgggttcttcttcttctattacatcaacgtcgtccaagaccatgaccatggccatggccacgatcctgctcctgttcacggtcttcgcggtttcatcggccctagacatgtcgataatctcgtacgacaacgcccacgccgccacgtcgcgcagcgacaggagctgatgtccatgtacgagcagtggctagtaaagcacggcaaggtgtacaacgcgctcggagagaaggagaagaggttccagatcttcaaggaca

SEQ ID NO: 174436 - DNA, 279 bp, Glycine max
atccattccacaccaaaaagtaactctttcagtttcggagggaaacacaacacaaaaagccccctccctccaaagcaaatcacctttttttctttcagttattcaaaaaatgttcgccgaagagaatggactcaagggagaccctagactccaagccatttcccaagccatcagagtcgtccctcacttccccatacatggaataatgtttcaagacataacgacattgttgttggatcacaagcgtttaaagacactgtcgacatttttgtcgatcgt

SEQ ID NO: 174437 - DNA, 277 bp, Glycine max
ggttacttcacctgttcaatgggaaacaacagtgaagactcttctaaccaagggtctgaagaaaagctatgaactgggacccggaaaggttattgctggaatcgtcaaaagaatggacaaaggtgctgatattgaaaatatcggtgcttaatgtggggaccttgctccttcttcgggttggaatgaacaaaactaaattgtgttagctataaatcaggatgcgtggaacttgaagctttgaaagccaagagcagctacagtcatatttgaatgccag

SEQ ID NO: 174438 - DNA, 270 bp, Glycine max
ttcttgcctgattaatttttttttaagtgttgtttagttaattttgtctgatttttgacctggttagacaaagtctgttttatgctcagaatctacattaaatggttgagtgtatgaagaaagtagcaaaacttgatcttgatctaactgtggaagataggaacctcctctcagtgggatacaaaaatgtgattggtgcacaaggggctcttagcgcatcatgtctcgattgagcagagggagagtctaagggaaatgagccaatgttaa

SEQ ID NO: 174439 - DNA, 139 bp, Glycine max
tgacctctggtgaagctgtcaagtacaagagttccttggacgcattcacacagatcctcaagaatgagggcgccaagtccatgttcaagggtgccggtgttaacatcctccgtgccgttgctggtgctggtgtgcttgc

SEQ ID NO: 174440 - DNA, 208 bp, Glycine max
ttatcgtcaaggaaaactaagttcttcagtcttgacttgagtgctttgagttcatggatccaatccaacacaagttcgtcaacgttggtgctctcaagctccacgtcgcagaaaccggaaccggtccaaacgccgtcgtattcctgcacggcttcccggagatatggtactcgtggcggcaccagatgatagctctcgccggtgccgg

SEQ ID NO: 174441 - DNA, 258 bp, Glycine max
ttcccgtgggagcttcctctttcaaggaagccatgaagatgggtgtagaagtatatcacaatttgaagtctgtgattaagtagaaatatggtcaagatgcagtaaatgttggtgacgaaggtggctttgcccctaacatccaggaaaacaaggaaggtttggaattgctgaaaactgccattgccaaagctggttacacaggcaaagtgtcattggacatgatgttgcagttctgaatctaacaggagattaaactac

SEQ ID NO: 174442 - DNA, 269 bp, Glycine max
cggtgattctcgccgagtacactgaattcagtggcaacttcaacacaatctcgaacatatacatccagaagctccctgcctccaacaacaagttcacctacagctgtgactgccacaccttcaactacctcgtcgacaacggattcacttattgtgttgttgcggatgaatcgattgggcgacaggtgcctgtggcttttctggagcgtgtgaaggatgactttgtggcccaatacagcggcggaaaggccacaacgtggctgcgaaca

SEQ ID NO: 174443 - DNA, 272 bp, Glycine max
ttgcaatgaagaaattgctcaagcaattatatatacactaatggaccggagcgagtcagagttgggagagccccttacacgacttttacctctcggtctgggtcttctatatcttggaaagcaggacagtgttgaggcaactgccgaagtttcaaagactttcaatgaacaaattagaaagtactgtgacatgacactcttatcatgtgactatgctggaactggaaatgttctcaaggttcaaatctgttgggtcttgttcacacatcttg

SEQ ID NO: 174444 - DNA, 252 bp, Glycine max
cgggatcagcacaagattgcaaaatgaagttcaacattgcaaatcccaccactgggtgccagaagaagctggaaatcgatgacgacctgaagcttcgagcattttgggacaagaggatctcccaggaggttcttggtgatgctctgggtgaggagtttacaggatatgttttcacaatcaccggtgggtgtgaccaacaaggattccctatgaagcacggagtgctgacacctggtcgtgttcgacttttgc

SEQ ID NO: 174445 - DNA, 273 bp, Glycine max
ctctgttctctgtcactgctgcgtctctcgtaaccatgcctaagcaaatccacgagattaaggtcttccttctcactgctagaaggaaggacgcaaggtcggtgaagatcaagaggagcagagatgtggttaagttcaaggtcagatgctcgaagtacctctacacactttgtgtgtttgacccagagaaagctgatatattgacgcaatctcttcctccaggtttgagtgttccaagactgtaaaggtaccaggcgagagaccaagaagaag

SEQ ID NO: 174446 - DNA, 283 bp, Glycine max
cggctcgagtgagagccaaaagccgaagacagggaagatggcgctatggatggaaaagggttcagagccattaaccgaaaccgagaaggcagaccttgaagccattgctgcactcaaagagtctgcagcctttgaattcaaggaaaagggtaatcaatatgtgaagatgggcaagaagcattactctgatgccattgattactacacgagggcaattgatcagaaagccttgagtgactctgagacctctattctctttgcaaatagagcccatgtgaatttg

SEQ ID NO: 174447 - DNA, 194 bp, Glycine max
ctcattgccgtcacagagagagacaagaaacaatgaagtttaaccctagggtttcctcaagccgtcgcaagagccgcaaggtcacttcaccgctccgtcgagcgtgcgccgcgtcctgatgagcgcgcctctctccaccgatctccggtcaaagtacaacgtgcggtccattccggttcgcaaggacgacgagg

SEQ ID NO: 174448 - DNA, 130 bp, Glycine max
agtatcgttgagaaataaggggaaaaaatggtgtcgctgaaactgcagaagcggctggccgcaagcgtgctcaagtgtggcagaggaaaggtgtggcttgaccccaatgaagtcaacgaaatctccatgg

SEQ ID NO: 174449 - DNA, 273 bp, Glycine max
tgacaacactaatccgaaccctaacaagtcctttgaggtgaatcagcctcccactgattccgtgtccagtctcagcttcagtcccaaagccaacttcctcgtcgccacttcttgggacaatcaggttcgttgttgggaggtagcacagaatggagttaatgttgccactgttcccaaggcttctataacgcacgatcatccggttttgtgctctacatggaaggatgatggcacaactgtcttctctggtggatgtgacaagcaagtgaagat

SEQ ID NO: 174450 - DNA, 275 bp, Glycine max
ataagtacaagtctcctcctcccccagtccactctccacctccaccacactactactacaaatcaccccctccaccctaccactactagaatatagccctttcatatcacacccccacatggatgtatacagaaagtgtgaaaatgaaagccatggagggggaaggtgcagttgcagtttgcaaatccacaaagaagtataaatgtttgattattgttattgtttagaggactctgtctagttaaaatagttattgtgcttttgttttatcagac

SEQ ID NO: 174451 - DNA, 272 bp, Glycine max
aacctgtgctggtaaagcaagatcaggacaaaacagagaatcggaaatcaggaaaacgtaatattgcacgcactcaggttaatccaaactctgatccagttggcactgtcgagccttcaacatcaagtactacttcctaatacggcactcaagactaatgtttctggagttccagcatattgagctagaaggaaccacaaagcctcagttgatcctccatgtttgtagcaattattgtagagagattgtcctatggtcaaacgttgtaaaga

SEQ ID NO: 174452 - DNA, 273 bp, Glycine max
cttagtcccaattttctagggttttattcattttccgatggcttctgcagatgttgagtaccgttgctttgtcggtgggctcgcttgggccactgacgaccatgccctcgagagagccttctctcagtacggcgaaatcgttgaaacgaagattatcaacgatcgtgagactggcagatccaggggttttggatttgtgaccttcgcctcggagcagtccatgaaagatgcgatcggagcgatgaatggacagaacttggacggccgtaacat

SEQ ID NO: 174453 - DNA, 278 bp, Glycine max
agtatcgttgagaaataaggggaaaaaatggtgtcgctgaaactgcagaagcggctggccgcaagcgtgctcaagtgtggcagaggaaaggtgtggcttgaccccaatgaagtcaacgaaatctccatggccaattctcggcaaaacatcaggaagttggttaaggatgggtttatcatcaggaagccaaccaagattcactcacgctcgcgtgctcgtaggatgaaggaggccaagaagaaaggacggcactctggttatggtaggagaagggtaca

SEQ ID NO: 174454 - DNA, 236 bp, Glycine max
tcacgtttggttgaacgtagcacagatgtttcctttcggagcaaagggtcacaagataaaggggactatggtggttatgcagaagaatgtgttggatatcaacagcatcaccagtgttggtgggatcgttgaccaaggcttaggcttcataggcagtgcagtcgatgcacttacttttgcagccaccgaaatctccatccagttgattagtgctaccacagctgatggtgggaaag

SEQ ID NO: 174455 - DNA, 276 bp, Glycine max
  unsure (1)..(276): unsure at all n locations
aattttctagggtttatacaattttcgatggcttcttcagatgttgagtaccgttgctttgtcggtgggctcgcttgggctcatgacgaccaagctctcgagagagccttctctcagtacggcgaaatcgttgaaacgaagattatcaacgatcgtgagactggaagatccaatagnnntggatttgtgaccttcgcctcggagcagtccatgaaagacgccatcgaagggatgaacggccaaaaccttgacggccgtaacatcactgttaacgaa

SEQ ID NO: 174456 - DNA, 272 bp, Glycine max
gtttcgtcaacaattctcgtcaatatccaactatggccctcaaggctgcctcaggttctataccaagtgcagacacaagtagtgccggtaaggaggaagaaaagtctgagacatatagtcataacatgacagaagccatgggtgctgttttgacttataggcatgaattaggaatgaactataatttcatccgtccagacttgattgtgggatcatgcctacagactcctgaagatgtagacaagttgcgtagaattggagtgaaaactata

SEQ ID NO: 174457 - DNA, 269 bp, Glycine max
cttctggtgcggttccagaacctgcagcacctatcgatagcgaacgtcggcgtttcgtcgctggagcagtttccgcggctgtggaatttgcagaagctgaacctctccgacaaccggatcgccggcgggctggagtttctcgtgcaggcggggctggattcgctgcgcgacctcgatttgtcgaacaatcggattcagtacattgaggatctcgcgcccctcgcgcaggtgaagcttgtctcgctggatctgtacgagtgccccgtgac

SEQ ID NO: 174458 - DNA, 271 bp, Glycine max
cttaatcaagaggagtgagttttgtttttccagccatgacgccgctgatcctgcatgctgggaaaaccaacaaaaattcttacaagacactcattgcagccgagtatgctggcgtccaagttgattttgcccctaattttgagatgggtgtctcctataaaactcctgaatttctcaagatacatcctattggcaaggttcctgtgctggaaacccccgatggtccaatattcgagagcaatgccattgctcgctatgttacccggctgaa

SEQ ID NO: 174459 - DNA, 257 bp, Glycine max
cggctcgaggtgaaacaccatgtccaccaccaccaccaccagtggtgccatacccaccaccagcacaaccaacatgccccatcgacaccctaaaactgggggcatgtgtggatgtgcttggtggcctcatacacattggcataggcagcagtgcccagcagacctgctgtccggtgcttgcagggcttgtggaattggatgctgctgtgtgcctctggcacaaccatagggctaagattcttaacatcaatatcatc

SEQ ID NO: 174460 - DNA, 276 bp, Glycine max
tttaattattatcctatcgatggcgttcaggaaaacccttgctcaacggctccttaacatcaccaaagtgtcatcacaagcgctcaccaattgtcggatttcctcttcctccgtcatcggaaggctttcaccgcgggccgacgagcccgttgatcccggagaaaatggcctcttccgtgcgccgcaactcgccggaaacctcctcgacaggctcaggacgatggggtattgccacaaccggatccggttggatgggttgacgccgcctacgccgaa

SEQ ID NO: 174461 - DNA, 194 bp, Glycine max
cagaggtggaatgaagggaggtagcaaggttgtggttcagccccataggcatgatggcattttcattgccaagggtaaagaagatgctcttgttactaagaatcttgttcctggtgaagctgtttacaacgagaaaaggattaccgttcagaacgaagacagttccaaagatgagtacagagtttggaatcctt

SEQ ID NO: 174462 - DNA, 253 bp, Glycine max
cttcgcccccttttgtgtttctttttttggttgtttgttctttcttctcgttcgtcgctttgtgatctctctctgcaaccatgtccgccgagaaagagagagagacccaggtttacttggccaagcttgccgagcaggccgagaatacgaagaaatggttgagtgtatgaagaaagtagcaaaacttgatcttgatctaactgtggaagaaaggaacctcctctcagtgggatacaaaatgtgatggtgcacg

SEQ ID NO: 174463 - DNA, 89 bp, Glycine max
gcaaggcaaggagagactgttgtcccgggtggaactggtggcaagagcctggaggctcagcaacaccttgctgaaggaaggagcaaggg

SEQ ID NO: 174464 - DNA, 266 bp, Glycine max
aactcctcagagccaaagctgttctcttttttcatctgggtctaaagaaccactggtgaccaaaattgtgaaaaggggttccttgattttcaccaattcatggcatttcagcactacatttcccgggatttgaaaaccatcccaaatgctggactgaggcagaaaaccccaatggttgttttgattgtaacatctgcttagactttgcacatgagccagtggtgacactttgtggtcacctctactgctggccatgcatctacaag

SEQ ID NO: 174465 - DNA, 268 bp, Glycine max
taatagtgcaacatggtgtgtgccaaaaggaggagtggcagatgcacagttacaagcaaatttggattatgcttgtgggcaagggattgattgtaccgcaattcaacaaggaggggcttgttttgaacctaacactttggtaaaccatgctgatatgccatgaatctattgtatcaaacagctggacggaatccattgacttgtgatttctcgcaaacagccatgttgtcaacgaataatccaagtaagttcctatttgatctatgca

SEQ ID NO: 174466 - DNA, 275 bp, Glycine max
agaggccaatcctattcatagctcgagatgggtgaagaagtgaaggtagttgttccagaatcagtgttgaagaagcgcaagagggaggaggaatgggcgttggccaagaagcaagaactcgatgctgccaagaagaagagagccgagagccgcaaatcatctacaacagagctaagcagtacgctaaggagtacgatcaccaggagaaggaattgattcggttgaaacgcgaggccaagctgaaaggtggtttctatgtggatccagaggctaag

SEQ ID NO: 174467 - DNA, 261 bp, Glycine max
aagatccttccatctagcagcaccttaggatggcatagccttaaagttaagggcgaggttcaaacgaagaaaggcttatggtggatacctaggcacccagagacgaggaagggcgtagtaagcgacgaaatgcttcggggagttgaaataagcgtagatccggggattcccgatataggtcaacctttcgaactgctgctgaatccacgggcaggcaagagacaacctggtgaactgaaacatcttagtagccagaggaaa

SEQ ID NO: 174468 - DNA, 262 bp, Glycine max
atccttgtgcaccgtaagggttgtgaagcaggcagagaagagccatggtgcacgtttccttctaccgaaactatgggaaaaccttcaagaagcctcgtcgtccgtacgaaaaggagcgtttggacgccgagttgaagctggtcggtgatacggacttcgctgcaagagggagttgtggagggttcagtacgctctcagccgcatccgtaacaacgccagaaatcttttgaccctcgacgagaagaacccgcgccgtatcttc

SEQ ID NO: 174469 - DNA, 264 bp, Glycine max
atttaattgctcgtttgccagccattgctgcttatatttatcgacggaaatataaggatggaaaaatcataccattggacgattctttggattatggcgcaaactatgctcacatgttagggtttgatgatccggaaatgctggagttttgaggctgtatatttccatccacagtgatcatgaaggtggcaatgttagttcacacacagcacacctagttgctagcccgctatcagatccttatcttgcatttgcggctgcttt

SEQ ID NO: 174470 - DNA, 269 bp, Glycine max
acgcaacgcaagaatagagaactgcgtagcgacccatcagagaagatcgcgatcttctgaaacatgtctggggaagaggaagaaaacgccgcagagctcaaaattggagacgagtttttgaaggcaaagtgcttaatgaactgtgaagttgcattgattcttgagcacaagtatgagcagcttcaacagacatccgatgatcccatgaatcaagtttctcaggtatttgaaaagtcactgcagtatgtgaagcgcttcagccgctataa

SEQ ID NO: 174471 - DNA, 268 bp, Glycine max
agctattgcacattcctgaagattctgtcccttgtaaaatccgtgctaagcgaggttgtgctactcatccccgtagcattgccgagcgggagagaagaacaaggatcagtggcaagctcaagaaattacaggaccttgtacccaatatggatagcaaacaagctatgcagacatgctcgatttggccgttcaacacattaaaggtcttcaaactcaggttcagaagcttcacaaagaaatggagaattgcacttgcggatgcaaacaa

SEQ ID NO: 174472 - DNA, 271 bp, Glycine max
gagaagaacagagagagatccatccatcaattccaatggccgatcagctcaccgacgaacagatctccgagttcaaggaagccttcagcctcttcgacaaggacggggatggttgtattaccaccaaggaacttgggaccgtgatgcggtcactggccagaacccaactgaggcagagctgcaggacatgataaatgaggttgatgctgatgggaatggtaccattgatttcccagaattcctgaatctcatggctcgcaagatgaaagac

SEQ ID NO: 174473 - DNA, 273 bp, Glycine max
gctgccgaaacccttccggaaccctaaggtaagtgagtaatcagtggttgagaatggtggagaaggcgaagggtagaaaggaggaggtggttacccgtgagtacaccattaacctccacaagcgcctccatggctgcacatttaagaagaaagctcctaaagctattaaggagataaggaaatttgcccaaaaggccatggggaccaatgatgtgagggtggatgtgaagttgaacaagtttgtctggagccagggaatcaggagtgttccaa

SEQ ID NO: 174474 - DNA, 277 bp, Glycine max
gtggtgccttatcgctgtggttatcatcttcttcttcctctttcttagatctcttctttctctacgccgcacgccgaaaccatggccggaaaaggagagggtcctgctatcggaatcgatctcggaaccacctactcttgcgtcggtgtgtggcaactgaccgcgttgaaatcatcgccaacgaccaggggaacagaaccacgccgtcttacgtcggattcactgacaccgagcgtctcatcggtgatgcggccaagaatcaagtcgccatgaaccc

SEQ ID NO: 174475 - DNA, 258 bp, Glycine max
gaggattggagggtcgccacgtttagcaacaaccaaaccctctctactctttcttcttctcttcgctagggttttagcttcttcctcttcacttcgttcttctggcctctacaatgagcaacgacaaggacaccttcaacgtcgcgatctcacttccgctctcaacgaggacaatagagcagaccttgtcaatgctctcaagagcaagatacagagtttggctggacagcattctgatattctagagtctctgtcgcc

SEQ ID NO: 174476 - DNA, 258 bp, Glycine max
gctacctaaaccctagtctccatacatcaacttgggaggttaaagagacggcaacgttgtgctgtccgccttgaccgagccagagcttcgtcttggccctcgattttgccctgtaaaactaatcccagtaacaacagaaataatcatggcaccgaaacagaccaaggctgagaagaagatcgcttacgatgcgaactgtgcgacctaatggaggagtacggccaaatcctcgttgtaaactccgacaacgtgggatcg

SEQ ID NO: 174477 - DNA, 266 bp, Glycine max
gtttgttgtgagctataagctagtttatcgtgaggagaatatgaagttgtttgttttctttgttgctgcagtagttttggtagcatggccatgccatggcgcaggctaccaaaggttccctctccgaatgaaaactggctatggtgagcgtcttcggaggtaaaatgcgcaagttttaggcttgctgtggaagcacacaacatccgagcctttaaaaccattcctgaagagtgcgttgaaccaacaaaggactacattaatggcga

SEQ ID NO: 174478 - DNA, 272 bp, Glycine max
aagaaaatgaaagtcattgttttcttcgttgctataataattttaggtgcagaatggcaatgcaatgggtcagagcatgagcatgagtatggccacagctaccaaattttccctttgcgaatgaaaaccggccccggtggccactacattccgaggtatcgtgcaaaagttggaggcttggtgtggaagcacacaacgtcattgactggagaaccattcctcaagattgcgagggatatataggaaactacatgcttggccaccaatataga

SEQ ID NO: 174479 - DNA, 261 bp, Glycine max
ggctaagatggacaagaggactgtccatgatgttgtacttgttggtggttccaccagaattcccaaggtgcaacaactcctgcaagatttctttaatgggaaggagctctgcaagagcatcaatcctgatgaggctgtggcatatgggctgcagttcaagctgctatcttgagtggtgagggtaatgagaaggttcaggatcttctccttcttgatgtcacccctctctctcttgggttggaaactgctggtggggtgatg

SEQ ID NO: 174480 - DNA, 257 bp, Glycine max
ggccgtaacccgcctcgcgaagccgcgtcaaccttctcaccccagatgaggaggtgcctgagctcctccgaagtcaaatcccacgcgccgccgcacgacgccgcgtccttccgcccgtttccgcggcgcgaagatctgagcaacggtgcgtgcagtgggcgttcctcggctgccccggcgtcggaaaaggaacgtacgctagtcgcctgtccaacctcctcggcgtccctcacatcgccaccggcgatctcgttcgc

SEQ ID NO: 174481 - DNA, 254 bp, Glycine max
gtgtctgcctcttctgaaacgccactatttctgctttctctctcattaataataatattattgccttactctttttccacaatggagttgggaagcatactccattttcttcaggacaagaacattttgatcactggagccacggctttcttgccaaagttttgttggagaagatattgagggtccaaccaaatgttaagaagctttaccttcttctaagagctgcagatgccaaatctgccactcatcgcttg

SEQ ID NO: 174482 - DNA, 264 bp, Glycine max
gaacattatggagcccagattcgtaatctccgcatcggaggccgaatcccaatcaatctccaaactcctcccttccctcgtttcctcttctcagtccctcgcccgtccttccatctccaactttcccgtcgccgccgtcggactcgcccctccggccgcatcttcgtgggcgtgaacgtggagttccccggcctccccttccaccacaccatccacgttgaacagttcctcctcaccaacatggccaacaacgccgagacccgc

SEQ ID NO: 174483 - DNA, 272 bp, Glycine max
tctcgagccgattcggctcgaggtgctgcagagccgcattttgcttgcaattcagaaactatgtgcgtagaggggacgaaacaatacaatggcttacgctgcaatgaagcctactaaggccggcttggaggagcctcaggagcagatccataaattaggatcaccctttcctctaagaacgtcaagaatctcgagaaagtgtgcgccgaccttgttcgtggtgccaaggacaagcgcctcagggtgaagggacctgttaggatgccaactaa

SEQ ID NO: 174484 - DNA, 270 bp, Glycine max
gtaatgtcagcatcaggagggaagatttctctgttcaatatgatgacttttaagacaatgacgacattcatgcctccgccacctgcagcaaattttcttgcttttcatcctcaagataacaatattattgctataggcatggatgattcttcctacaaatatataatgtccgcgtagatgaggtaaaaagtaaacttaaaggccatactaaaagaataactggtcttgctttttctcatgtgttaaatgtgctagtttcatctggggcag

SEQ ID NO: 174485 - DNA, 255 bp, Glycine max
gtaatttcgaaaggcttctgttccttcctatatataaaaccagcctcttgtatctatttgcggaaaacaccctagtttttctcagttgaacctcgatcgcacaccagagagaaaagaaagaataatgccaccttcttactggtgaaggagagaaaaccatgtgtgagatgggtcgagaaatatttcaaagattgcctttgcaatttgaaagatgaaatctcgttcagcttcggcctcacaagtctagtgttctgg

SEQ ID NO: 174486 - DNA, 257 bp, Glycine max
ggacgatgtcattaagatggctgaacaagtctcaaaacaagctaccacggtgggaatgctgtggactggagagaagccagatgccaaagcagttgaggaaaatatggcatcatatttcaacaccctgcaaggtttccttttacttcccatggcagtacagtaggtgcagggcctaccttgtcttctgctgttcatgcatccgtcaagcaagtcgttgattccagcttcagattgatgaaggaaactgtctctttata

SEQ ID NO: 174487 - DNA, 265 bp, Glycine max
gcacactgtcacaggtgtagcggcgaaactgaggtcgtagaaagaatggcgaaaacgacgtcgttgttgctctttacactgctcctcttcggaaccttagctctcatccaggcgaagaaatcgaaggaggatttgaaggaagtgaccccaaggtttactttgatgttgagattaatggaaaagaagcaggtcgtattgtgatgggtctttttggaaaggctgttccaaaaactgcagaaaactttcgagctctttgcactgggga

SEQ ID NO: 174488 - DNA, 270 bp, Glycine max
gtgtctgcctcttctgaaacgccactatttctgctttctctctcattaataataatattattgccttactctttttccacaatggagttgggaagcatactccattttcttcaggacaagaacattttgatcactggagccactggctttctgccaaagttttgttggagaagatattgagggtccaaccaaatgttaagaagctttaccttcttctaagagctgcagatgccaaatctgccactcatcgcttgaacaatgagatcatag

SEQ ID NO: 174489 - DNA, 253 bp, Glycine max
ttcactagccgcagcagcctcaggaggagaataaggatgtctcacaggaagttcgagcacccaaggcacgggtcactgggatttctccccaggaagcgtgctgctcgtcacaggggaaaagtgaaggcattccccaaggatacccatccaaggcacccaagctcactgcattcttgggttacaaggctggtatgactcacattgttagagaggtcgagaagccaggatcaaagcttcacaagaaggaaacatg

SEQ ID NO: 174490 - DNA, 251 bp, Glycine max
cataagtaaaccagtgcctcagaaagatgctgctcctggtcttgcatatttccacatccctctgccagaatatgctagttttgactcatcaaacatgactggtgtgaaacaggaaccggatggcaatggcattagctctcctctgtgaactccggcttcttcacaaccttgcttgcagcaggagatgtgaaggcagttttcactggccatgatcacatcaatgacttctgcggcaatctaatgaatataca

SEQ ID NO: 174491 - DNA, 263 bp, Glycine max
tggagatgaggtggagtggcgttggaatcgacgagtggtggaggaacgaacagttttgggtcattggtggtgtctcggcgcatctctttgctgtcttccaaggcctgctcaaagtgcttgctggaattgacaccaactttactgtcactccaaggcctcggacgaagatggagactttgccgagctctacatgttcaaatggaccacccttctcatcccccccacaacccttctcataataaacatgattggggtggttgccg

SEQ ID NO: 174492 - DNA, 275 bp, Glycine max
gtttttgttgttgcagccttttcgttggaaccaaacggtggcatttggggttcgcaaaacgccacgttttgtggtgtgtgctggccctaagaagatattatttggcaaagagtgcagagaagccttacaagctgggattgataaacttgccgatgctgtttctctcaccgttggacccaaaggacgaaatgttattctttctgaatctggaaaccttaaagtgattaatgatggcgttacaattgctcgatccattgagctttcggatgcaattg

SEQ ID NO: 174493 - DNA, 270 bp, Glycine max
gtttctgtctctgtgtttgcggctgaggattccgaacgagcgaccttcttcgtttctcgcaaagtttaagtcatcatgggtaaggaaaagactcacatcaacattgtcgtcattggacatgtcgactctgggaagtcaactaccactggtcatttgatctacaagcttggaggtattgacaagcgtgtgattgagaggttcgagaaggaggctgctgagatgaacaagaggtcattcaagtatgcctgggtgcttgacaagctcaaggct

SEQ ID NO: 174494 - DNA, 270 bp, Glycine max
cctctctctatattccattgccacccagttttgaatatatttttattccttctttgtttcttcactttcttccatacacataaccatgtcttctcagactgttgtcctcaaagttggtatgtcatgtcaagggtgtgctggagcagtgaacagggttttgggaaaaatggaaggtgttgagtcatttgacattgatctgaaggagcagaaggtgacagtgaaaggaaatgtggagccagatgaagttctgcaagccgtttccaaatctgg

SEQ ID NO: 174495 - DNA, 270 bp, Glycine max
aaccctttctctttgcgcgtgtcccgttctcttctccaatcctcctccatccccactgtgtgatctgatcctaaaccttatagccatgactaccatggagattaagctatggaatgacaagcgcgaaagagaaatgtatgacaactttggggagctttatgccattatcaaagccactgagaggcttgagaaggcctatgttagagatataatttcaccgcaggaatatgagttggagtgccagaagctcatagctcatttcaaaacctt

SEQ ID NO: 174496 - DNA, 268 bp, Glycine max
tgaaaaggaaaaccctaagagatgaagagaactcctatcttgttccctctcttctttcttctttgtgccttcacctcatatctaccttcagccaccgctgatgatgatcatgtgtacgacactgacggcgataagcttcaatacggtgtcaattatttcgtgttgccagtgataagaggaaatggcggtggaatacaagtagcaaaagcaggaaacgaaacttgccctctgactgtggtgcaatctggcaacgagctctctgaggggt

SEQ ID NO: 174497 - DNA, 127 bp, Glycine max
cctctttctcgtcactagctctgtgcattcttctctcgctctctgccttccatcacactcggcattgcctttcccaagatagtagaagatggcagacactgaggatattcaacctcttgtatgtgac

SEQ ID NO: 174498 - DNA, 264 bp, Glycine max
cgcgggtgaggtagaacccttccacggtggtgactgcgcgatgggtgcctacaagtatgtttcagagctatggcgcaagaagcagtctgatgtcatgcgcttcttgcagcgggtgaggtgctgggagtataggcagcaaccttccattgttcgcttgacaaggtcgacccgccctgacaaggctcgtcgcttgggcttcaaggctaagcagggctatgtgatataccgtgttcgtgttaggaggggtggccgaaagaggccagt

SEQ ID NO: 174499 - DNA, 270 bp, Glycine max
gtattattcttccattccgttctacatataatcattcataatgggtgttttcacattcgaggatgaaatcaactcccctgtggctcctgctactctttacaaggccctagttacagatgccgacaacgtcatcccaaaggctcttgattccttcaagagtgttgaaaacgttgagggaaatggtggcccaggaaccatcaagaagatcactttccttgaggatggagaaaccaagtttgtgctgcacaaaatagaaagcattgatgaggc

SEQ ID NO: 174500 - DNA, 273 bp, Glycine max
cttagagattagatatcgtcccaatgctccattggtgcttaagggcatcacttgtacttttaaagaaggtagtagagtgggagtcgtaggaaggactggaagtggaaaaagtacactcataagtgctttgtttcgcttagttgatccagcaaaaggttatattcttatagatgggattaacatatgctcaattgggttgaaggatttgagaatgaagctaagcatcatccctcaagaaccaactcttttcaagggcagcattaggaccaactt

SEQ ID NO: 174501 - DNA, 271 bp, Glycine max
cgcgtcgctccgcaccagtttcaccgcacgaatatcctgttgtttggagcgatccgagaaaaactctgtaaacatgttggtttaccaggacctccttacaggtgatgagcttctctctgactccttccgttacaaggaaattgagaatggaatgctgtgggaagttgaggggaagtgggttgttaaaggagcagttgatgtagacattggtgcaaacccttctgctgagggtggaggagaagatgagggagttgatgatgcagctgttaag

SEQ ID NO: 174502 - DNA, 269 bp, Glycine max
gaagaagaagaaaagatggtgggaccagtgagacctcagtttgtgctctttggttcttccattgttcagctcagttactctctccaaggttggggcgctattcttgctcatttgtatgctcgcaaggcggatataattctgcgaggatactctggttggaattcaaggcgtgctgtgcaagttctggatgaaattttccctaagaacgccactgagcaaccagatttggtaattgtgtactttggtggtaatgattctcttcttccaca

SEQ ID NO: 174503 - DNA, 266 bp, Glycine max
acgccctcgatctgaattgtgccgagaaaatcatggtggacgcagcagaacgtagatacttggaggatgatgattcatctctcatgaaaactatcaagggcgcaacaactggtttagtggctggaactatctggggtactgtagttgccacctggtatgatgtcccccgtgtcgagagaaatgttgctcttccagggctgattaggactatcaggatgatgggcaactatggtttgacctttgctgccataggaggagtctacata

SEQ ID NO: 174504 - DNA, 263 bp, Glycine max
ttcgaattgggcacaaatctgagcataaaagaagatcattgcagctggtgattttaggttatttcattatggagcatgtgattggtggcaagtttaaattgggaaggaaaattggtagtgggtcttttggggagctctatttagctgtcaatgtacaaactggagaggaggtggctgttaagctggaacctgtgaagaccaggcatccacagcttcactatgagtcaaaactgtatatgcttcttcaaggaggaacggggatt

SEQ ID NO: 174505 - DNA, 84 bp, Glycine max
catttctccatttccattttctctctcactatgcaagaatcgtaagctatgggaaagtcttacccaactgtgagtgctgattac

SEQ ID NO: 174506 - DNA, 269 bp, Glycine max
ggagccgcaacccaaaacaggtctacaacatacccaggatttcctgaggaaaatagggttggggaaggagaactactacttctggaagcagattggaaaggctttgctttgcacctatgcagtgatcggggcagtgtgggtgtacaacgagacctcaccactgggttggtggacactgaagccaaagccaaaggaagagcttgagctggctcatttgtacgagcggcggcagtttccttacccgggcgatgaagaggcaatgcaagagt

SEQ ID NO: 174507 - DNA, 266 bp, Glycine max
ccgacaatcacattcaacgcttctgtcatggaagaagttaatgtcgtggaaactaaggatggaactgtctcagtagctgctgcgtttgctggtcaccaggaagccgtgcaggatagagaccacaaatttttaagcaaagctgttgaagaagcatataaaggggtagattgtaaagatggaggcccttttggtgccgttatagttcataatgatgaaatagttgctagttgtcacaatatggttctgtgtaacacagacccaactgc

SEQ ID NO: 174508 - DNA, 269 bp, Glycine max
gtttattttgaaaacaaaaaaaaaatccccaatgtcgcagcaattagggttcgcgatcgagctatacctagaccctgcgttggagaatcaggttctgaaagcatggaacgttcttgcgagaagacaaatcagcacgcacctgatagaaatggagtctcggccacacataaccctattctcggcgccatttctagaaccttcgaagctcgaatctctcctgaaaggcttcgcatcgaagcacgatcctctccctctcaccttctcttccc

SEQ ID NO: 174509 - DNA, 269 bp, Glycine max
gtttcacagcagcaatggtgtacgtcaaggctcagaaatcaaaagcctacttcaagagatatcaagtcaagttcaagagaagaagagagggaaaaaccgattaccgtgccaggattcggttgattaatcaggacaagaacaaatataacactccgaaataccgatttgttgttcgctttagcaacaaggacattgttgcacaaataatatctgctagcattgctggcgatattgttcttgctgcagcatatgcacatgagctgccacga

SEQ ID NO: 174510 - DNA, 266 bp, Glycine max
tcgacacctacttctccatggccagacgtaatgctaccgtgcctgctatggagatgaccaagtggttcgacaccaactaccacgttattgtccctgaattgggccctgatgtgaacttcacctatgcttctcacaaggctgttgatgaatacaaggaggccaaggcgcttggagtggataccattcccgtactcgttggccctgttacatacttgttgctctccaagcctgccaagggagtcgagatatccttttctctcctctct

SEQ ID NO: 174511 - DNA, 264 bp, Glycine max
gaagcactagcccatccataccttgaaaaactgcatgatgtagctgatgaaccaatctgcatggagccattttcatttgattttgagcaacaacaattggatgaagagcaaataaaagagatgatctacagggaagcattagcactcaatcctgagtatgcttaaagcagaaaaactcaaggacttgaagcaggcttagaaggaaaaataataattcgttttcaatttttgtaatcactttaagttcagttcttacaatcacga

SEQ ID NO: 174512 - DNA, 263 bp, Glycine max
caattaactatgaagcctaccctactattatccctttccttcctgcctctctttgctttcctggctctttcagaagatgttgaacaagttgtggacataagtggcaaccccattttcccaggtggcacatattacattatgccatcaacttggggcgctgccggtggtggattgaaactaggccggacaggaaactcaaactgcccagttactgttttgcaagattactcagaaatcttccgtggcacaccagtcaaattcag

SEQ ID NO: 174513 - DNA, 265 bp, Glycine max
cgcgagatcttgagtcgccgatttgaaaagatgagtaagcttcagagtgatgctttgcgtgaagccatctcaggaatcatggccgattccaaggagaagaatcgcaaatttgtggagaccatcgaactccaaatcggtttgaagaactacgatccacagaaggacaagcgtttcagtggctccgtcaagttgccccacatccctcgccccaagatgaaaatttgcatgcttggtgatgctcagcatgttgaagaggcagagaaga

SEQ ID NO: 174514 - DNA, 267 bp, Glycine max
ttggaatccaaaaatgagagaaatcatcagcattcacataggtcaggccgggatccaggttggcaactcctgctgggaactctactgcctggaacatggcatccagcccgatggcatgatgccaagtgactcctccttcggtgtagcccacgacgccttcaacaccttcttcagcgaaaccggatccggcaagcacgtccctcgcgccgtcttcgtcgatctcgagcccaccgtcatcgacgaagtccgttgtggcacttaccgtca

SEQ ID NO: 174515 - DNA, 269 bp, Glycine max
gccaaacagagcaaaaacccaacacaccacactcttgcaatcaatcaatggcggaaccttcctcctcgaagcccgccgtccctctcctgaaggacgagctggacatcgtgatcccgacgatccgcaacctcgacttcctcgagatgtggcggcccttcttcgagccctatcacctcatcatcgtgcaggacggagaccccaacaggaccatcaaagttcccgatgggttcgattacgaactctacaaccgcaacgacatcaacaggatc

SEQ ID NO: 174516 - DNA, 267 bp, Glycine max
gttctgaaaccactctcgcgtcgttaccatgccgcaaggggattacatagaacgccacagaagagactatggctaccgtctcgatcacttcgagcgtaagcgcaagaaagaggcacgtcaagttcacaagcgctctgcaattgcccagaaggctctgggtattaagggcaaaatgattgccaagaaaaattatgctgaaaaggcgcagatgaagaagactttggctatgcatgaagaatcatcgtctaggcgcaagactgatgataa

SEQ ID NO: 174517 - DNA, 265 bp, Glycine max
gccaaacgacagcgttctgagtcttttcttcttcgttaccctcttcacatgccttctctctgctacttcccacgatgaccatattttcctaccgagtcaactccatgacgatgactcagtgagttgcactgcaaccgacccaagccttaactacaagccggtgatcggaatcctgacccaccccggcgacggtgcctctggccggctcagcaacgccaccggggtttcttacatcgccgcctcctacgttaaattcgtggagtcc

SEQ ID NO: 174518 - DNA, 264 bp, Glycine max
gagaggaggaagagagagcgtgcaagttccggccaccaccgaccatgacattcaagcgcaggaatggaggtcgcaacaaacacggccgcggccacgtcaaattcatccggtgctccaactgtggcaaatgctgtcccaaggacaaggccatcaagaggtttctggtgaggaacattgttgaacaggctgcagtcagagatgtgcaggaagcttgtgtctatgaacaatatactcttccgaaactctatgtgaagatgcagtact

SEQ ID NO: 174519 - DNA, 260 bp, Glycine max
ctcgagcggtttttgtgatctgcagctacgatgggtaagggaacggggagtttcggtacgaggaggaacaagacccacaccctctgtgtgaggtgtggccgccgcagcttccacctccagaagagtcgttgctctgcgtgcgcttaccccgctgcgcgcaccaggaaatataactggagcgtgaaggccattaggagaaagaccaccggaactggaaggatgaggtacttgcgtaacgtgcctcgcagattcaagagcgg

SEQ ID NO: 174520 - DNA, 263 bp, Glycine max
agaagattaaggaagtgtcacatgaatggtccttggtgaacaagcagaagcccatttggatgagaaagcctgaggagatcacaaaggaggagtattctgctttctacaagagtctcaccaatgactgggaagagcatttggctgtcaagcacttctcagttgagggacagttggagtttaaggctatcctctttgttcctaagagggcaccttttgacctctttgacacaaggaagaagcctaacaatattaagctttatgtc

SEQ ID NO: 174521 - DNA, 271 bp, Glycine max
gaagaacgctcgcccgcaccgtccagatcgtaatcaagagaagaggagcgagttttgtttttccttgcagcccaagccatggcgcctctgatcctgcatggtggaaaaaccaacaaaaattcttacaagacactcattgcggcggagtatgccggcgtccaagttgactttgccccaaattttgagatgggtgtctccaataaaactcctgaatttctcaagatcaatcctattggcaaggttcctgtgttggaaacacctgatggtccag

SEQ ID NO: 174522 - DNA, 263 bp, Glycine max
gtttggagagaagagtgaagaaggcaaatcgcgaagactagatctgatctgagagaatggctcctcggtctagcagcaaggacgcccaagaccttttccgcgctctttggtctgcttatgctgcaacccccactaatctcaagatcattgatctctatgtcatctatgccgtattcaccgctttcatccaggttgtttacatggctttggttggatcatttccatttaactccttcctatcaggagtactttcttgtgtagga

SEQ ID NO: 174523 - DNA, 262 bp, Glycine max
cagaagcaagccataatggagcctcttgttgacacagttgaccagaatcagattgctacaaactgccagctactcaagacaatggatatctcaaagatggctcctggagatgcttcatttgcagcaccttttaagcttgtagctgaacgcgacgactatattcacgctcttgttgcatattttgatgtatcatttacaaagtgtcataaattgatgggattctctacagggccaagatcacgagctacacattggaaacaaa

SEQ ID NO: 174524 - DNA, 265 bp, Glycine max
gtgatttgatcagcagatagagattgaacatttgcagcgaaaagggaaagaaagagaaaatcatgtcaacagcagaagctcctccttctttccaagaagcagcgcgatgcgttgtctgcaattgcagtttcaacactttcagaagaaggcaccactgtcgatcctgtgggagaacattgtgtaatgaacattcatcaaatcaaatggctttaccacaatttggcctttactcaactgtccgagtatgtgctgattgtttcaacaa

SEQ ID NO: 174525 - DNA, 261 bp, Glycine max
cagtggtgccttatcgctgtggttatcatcttcttcttcctctttcttagatctcttctttctctacgccgcacgccgaaaccatggccggaaaaggagagggtcctgctatcggaatcgatctcggaaccacctactcttgcgtcggtgtgtggcaacatgaccgcgttgaaatcatcgccaacgaccaggggaacagaaccacgccgtcttacgtcggattcactgacaccgagcgtctcatcggtgatgcggccaaga

SEQ ID NO: 174526 - DNA, 261 bp, Glycine max
cgaactccgaagcccttcagcaaccatgtcgaggagaaaggttagggagccaaaggaggaaaatgtcactcttggtccagccgttagagacggtgaacatgttttcggcgtggctcgcatctttgcctccttcaacgacaccttcatccatgtcactgatttgtctgggagggaaacccttgttcgcatcactggtgggatgaaagttaaagctgacagagatgaatcatctccatatgctgctatgcttgcagcacagga

SEQ ID NO: 174527 - DNA, 268 bp, Glycine max
atttctaattagggtttcgcttagagtaaccaataaccatgggagtcttcacctttgtcgtccgcaaatccggcagcgaatggagcgccaagcaacattccggcgacatcgaggcctccgccgattccaccttcgatctccaacggaagctcgtgcaagccgctctcgccgttgattcctccggtggagttcagtcctctttctctcccgtgtctcctacctccgctgtgttccaggtgatagtgggtggtgcagtattcgttggagg

SEQ ID NO: 174528 - DNA, 265 bp, Glycine max
ggccgcacttactcttgttctcaagggattcgattttctctgcactcacttctagggtttcctccgcgctatcagcaatcatggccgacgaaacaccaaatgagatgaaggaggaggttccagaaattgttccttttgatcctaccaagaagaagaagaagaagaagattacaattgtagatcctgctgatgaccctgtggagaaattggctgagaagacagaaaacctctcagtttctgagggggttgagactgcatttgctgg

SEQ ID NO: 174529 - DNA, 263 bp, Glycine max
gaattccagaccaaccttgtgccataccccaggattcacttcatgtttgatcttatgctcccgtgatttcagctgagaaggctcaccatgagcagttatcagttggtgaaatcacaaacagcgcattcgagccatcatctatgatggccaagtgtgatcctcgccatggaaaatacatggcttgctgtctcatgtaccggggtgatgttgtgcctaaagatgttaatgcagctgtcggaattatcaagaccaagcgcactatt

SEQ ID NO: 174530 - DNA, 262 bp, Glycine max
gatttgtgtgcggtgcgtctccggtgaagagaagaagatggcgaccgtaccaggacagctcatatgggaggtcgtaaagaagaacaactctttcttggtgaaagagttcggaaggggcactcagagcgtgcagttcagcagagagcccaacaatctctacaacctcaacactttcaagtactccggtttggcgaacaagaaaactgtcactgttcaacctgcgggtaaagaccagtctgtgttgctggcaacaaccaagaca

SEQ ID NO: 174531 - DNA, 263 bp, Glycine max
gcggaggaaaagaaactaacaaggattcccttagtaacggcgagcgaaccgggaaaagcccaccatgaaaatcggtcgccctcggcgtccgaattgtagtctggagaaatcgtcaccactatccccaccatcggatttaatgttgagactgtggagtacaagaacatcagcttcactgtgtgggatgttggtggtcaggacaagatccgtccactgtggaggcattatttccagaacactcagggtctcatttttgtggttga

SEQ ID NO: 174532 - DNA, 259 bp, Glycine max
gcagattctctccttccttctctctatccaaattttgattctttcgatcaaacccgcaacacccacctcaccaaaaccctacgcaacccatccatgacgcttggcttaggaggatccagtgtcgtggttcctaggaacttcagattgctggaggagcttgaacgtggagaaaaaggaattggagatggcacagttagctatggaatggatgatggtgatgacatttacatgcgctcttggactggcaccattattggcc

SEQ ID NO: 174533 - DNA, 261 bp, Glycine max
ggcacccacacacacagttcgtcggaatgggaagggtgattcgcgctcagcgtaagggtgctgggtcggtgttcaagtctcacactcaccaccgcaagggtccggcgaggttccgcagcctcgacttcggcgagcgcaacggctacctcaagggcgtcgtcaccgacatcatccacgaccccggtcgcggcgcccctctcgccaaggtggcattccgccaccccttccgctacaagaagcaaacggagctcttcgtcgccg

SEQ ID NO: 174534 - DNA, 259 bp, Glycine max
gggaagaagagatagtttaacagcaaatcgaacccttgccaatcaaaaccttcctgctcctttcttcaacctcactcaacttaaagctgcctttgctgttcaaggtcttgacactactgatctagttgcactctcaggtaagaaaatcttcccaattaaattcatcctatatatgttgcaaaatttaaaaaataacaatgataaataggaaaattcttgaaattcagggtaaggtaagatattggattcaaagggatat

SEQ ID NO: 174535 - DNA, 261 bp, Glycine max
ctcgctctatttctcagtctctgtgtttgcggctgaggattccgaacgagtgaccttcttcgtttctcgcaaagtttaagtaatcatgggtaaggaaaaggttcacatcaacattgtcgtcattggacatgtcgactctgggaagtcaactaccactggtcacttgatctacaagcttggaggtattgacaagcgtgtgattgagaggttcgagaaggaggctgccgagatgaacaagaggtcattcaagtatgcctgggt

SEQ ID NO: 174536 - DNA, 265 bp, Glycine max
ccaggatggcagcagccaaagctgcatgcattctgtgaatctaaaggagttcatctgtctggatattctccactgggctcaccaggagttctcaaaagtgacattcttaagaatcctgttgtgatagagattgcagagaaattggggaagacaccggcacaagttgcccttaggtggggactgcaaacaggtcatagtgtgctgcctaagagcactaatgagtccagaatcaagggaaactttgatgtgtttgactggtctattc

SEQ ID NO: 174537 - DNA, 250 bp, Glycine max
tgggaggttgtgaagaaggggtgcgaggctctgcatagatgcgaggacatggtcaataacctaggtttgttctctcccaacgagaccaaagaagatatcagcaccaccaatctcaagtacattctggtgccattttatcttgcggagttgacagaaaaattagcacaggatgacaggatacatattctaaaggcttcccaggcaaaactaaaggagtttatttcattttgcgaagcaatggagctggtcc

SEQ ID NO: 174538 - DNA, 246 bp, Glycine max
caaccattgcaaaagccatttacaataagattggtcgcaattttgagggaaggagctttcttgaacaaattggggaactttggaggcaagacgcaattcgtttccaagaacaacttctatttgatatctacaaaacgaaaagaaagatacataatgttgaattaggaaaacaagctttgaaggaaagactttgcagtaaaagggtatttcatgtacttgatgatgtgaatgatgtggagcaattga

SEQ ID NO: 174539 - DNA, 249 bp, Glycine max
ctctgcttcttcggattccgatcgcacgcgccgtcaccatggtgaacgttccgaaaacaaagaagacatactgcaagagtaaggagtgcaggaagcacacgctgcacaaggttacccaatacaagaagggtaaggatagcattgctgcccaaggaaaacgccgttatgatcgcaaacaatccggttatggtggacaaactaagcccgtcttccacaagaaggctaaaaccaccaagaagattgttctga

SEQ ID NO: 174540 - DNA, 246 bp, Glycine max
  unsure (1)..(246): unsure at all n locations
ctgcaactacaaactangattagagaataaagaaatgggcgcaacgaagagtggacgagttaaacttggaatacaaggccttgaggtttcaaaattgggattcggatgtctgggtcttactggagcgtataatgagcctctcccggaacaggatggcatatctattatcaagtatgcattcagtaaaagaatcacattttatgataccactgatgtttatggagccggtgctaatgaaattttgct

SEQ ID NO: 174541 - DNA, 245 bp, Glycine max
gtatgcctatgcttgtttatcattttcttactttcctctcacgctctgccacaaaactccgtctccgcaataacggaataaaaaaacaagtttaattactattatggcgccgagggatcataagacaagcaacgctaaggctaacggtaacggtaacagcggggtgaaggaggtgcattttcgtggagtgagaaagaggccgtgggggagatacgccgcggagatcagagatcccggcaagaaga

SEQ ID NO: 174542 - DNA, 244 bp, Glycine max
ctgctcgagcatctcgcactttctctctctaactcaatctctctctctctctctctctgaattttctcctctctccgattccttttattaattggagtttactcgctccttttcctttccctgaaaacatttcctcgtcgtattgatgtcggaaaagggccggccacttccaaaatttggtgaatgggatgtcaatgatccaacctcagctgaggggttcacagtgatttttaataaggccagg

SEQ ID NO: 174543 - DNA, 245 bp, Glycine max
caaccattgcaaaagccatttacaataagattggtcgcaattttgagggaaggagctttcttgaacaaattggggaactttggaggcaagacgcaattcgtttccaagaacaacttctatttgatatctacaaaacgaaaagaaagatacataatgttgaattaggaaaacaagctttgaaggaaagactttgcagtaaaagggtatttcttgtacttgatgatgtgaatgatgtggagcaattg

SEQ ID NO: 174544 - DNA, 247 bp, Glycine max
tgcacatttgcacccttctcagttctctcaatcaaatccatggcaacaaacgcaaactgcgaaatgcccctcacacaccaccctcattggttctctccaaaatccggaatttaccacagcaaacacgcccccgtggaccttcccaacgacccttttctcgaccttgtttccttcattttttcccaccgccacaatggggtttcggccctcgttgattcttcatctgggtgttccatttcctacccaa

SEQ ID NO: 174545 - DNA, 246 bp, Glycine max
  unsure (1)..(246): unsure at all n locations
cagaaatggaaggagagaaagaaaatcccgatggtaacgccgctttggtgaactccttctgcgaaatcacttcctcttccaaggaagaagctcttttctttttggagagccacaatttcgacctagacgctgccgtttcgactttcctcgacaacgccaacaaacccctcatccctctcaacgacgacctagntcttcccaaccccaacgccgtttcccctccctcagattctcactctccggact

SEQ ID NO: 174546 - DNA, 245 bp, Glycine max
accaaacaaaggctctgcaattgcaaattcagaggatgtcgatcttcgagtacaacggaagcgccgtggtggctatggtcggcaagaactgcttcgccattgccagcgaccgaacgctcggcgttcagctccaaactatagccacggattttcaacgcatttccaagattcacgacaagctcttcatcgctctctctggcctcgccaccgatgctcaaacattgtatcaacgtcttgttttccgg

SEQ ID NO: 174547 - DNA, 244 bp, Glycine max
aaaccggttaagtttgtgtagtttggtaagatgggtggtggatttagagtgcttcacttagttagaccatttctctcgtttcttcctgaagttcagactgctgacaggaaagtgccatttagagagaaggtcatatatactgtgatctctctgttcattttccttgtttgcagtcagcttcctctgtatggcatacactcaacaacaggtgctgatccattctattggatgcgtgttatccttg

SEQ ID NO: 174548 - DNA, 242 bp, Glycine max
atttgcgactctccgccatgatgagctgggacaggaaacacttcttaatttgttacttcgaaactaccttcactacaacctatatgatcaggctgagaagttgaggtccaaggctcctcgatttgaagcacattcaaaccagcagttttgtcgttatctcttctaccttgggaaaattcggacaattcagctggagtatacagatgcaaaagagtctctcctgcaggccgcccggaaagctc

SEQ ID NO: 174549 - DNA, 241 bp, Glycine max
gcgacatgcggcgtgaagaagcgcgtggagcgttcctcggaggatcctacggtggtggtgacaacctacgaggggcaacacactcacccgtgtcctgccacgtcacgggctagcttcgggttcatgcactccgaagcaagtgggttcggacccaccagtggactaggttcggcacactttatgctgcaacaacaacaacagtttcgggaccaagcacaagcacaagcagcaatgttgtata

SEQ ID NO: 174550 - DNA, 245 bp, Glycine max
actggcgcacttgatgagctcattcttgccttctctcgagagggacccaccaaggagtatgtacaacataaaatgatggagaaggcttcagaaatttggagcatgatatcacaaggagcttacatttatgtgtgtggtgatgccaagggcatggccagggatgtacaccgcgccctgcacacaattttgcaagagcagggttctctcgatagttccaaggctgagagcatggtaaagaatctaca

SEQ ID NO: 174551 - DNA, 241 bp, Glycine max
cgtgaatcgataagcaaccaaaccgacgtcgctctgagcatcacaaagctcctgttgtcgaaaaacgctcgggacagtaacctcgtgtactcgccgctgtcgttgcacgttgttctgagcatcatcgcttctggctccaagggccccacactcgatcagcttctctccttcctccgatccaagtccaccgaccatctcaacttcttcgcctctcagctcgtcgccgtcgtgctctccgacg

SEQ ID NO: 174552 - DNA, 239 bp, Glycine max
gccgcgatatcatcttcttatagccactcgaaaatgaccaagagaaccaagaaggccggtattgttggaaaatacggcacccgatatggtgctagtttaaggaaacaaatcaagaagatggaagttagtcagcacagtaaattcttctgcgagttctgtggaaagtatgctgttaagaggaaggctgtgggtatttggggctgcaaagattgtggaaaagtgaaggctggaggtgctta

SEQ ID NO: 174553 - DNA, 241 bp, Glycine max
actggcgcacttgatgagctcattcttgccttctctcgagagggacccaccaaggagtatgtacaacataaaatgatggagaaggcttcagaaatttggagcatgatatcacaaggagcttacatttatgtgtgtggtgatgccaagggcatggccagggatgtacaccgcgccctgcacacaattttgcaagagcagggttctctcgatagttccaaggctgagagcatggtaaagaatc

SEQ ID NO: 174554 - DNA, 242 bp, Glycine max
ccgaagtggagggtgtcccttcagaaattctagaccctgtgaacacttggtccaaacaaaaagggctacaaggagacactattgaagttggctggattgttcaagaacaattttgaaaccttcaccaactacaagattggcaagggcaacaacaacctgacagaagagattctcgcagctggtccaatcttttgagacaatgttatgtaacatgttgtgtggttgggaatgttaatgttagg

SEQ ID NO: 174555 - DNA, 241 bp, Glycine max
gctgtttatgctgcattggagaaagcaggaggagggtcattgaacatagttgtgtctgagagtggatggccttcttctggtggaactgcaacttcacttgataatgcaagaacttacaacacaaacttggttcggaatgtgaagcaaggaacccctaaaaggcctggtgcaccccttgaaacttatgtgtttgccatgtttgatgaaaatcagaagcagccagagtttgaaaaattttggg

SEQ ID NO: 174556 - DNA, 241 bp, Glycine max
caattgttcatgtcccagtgattgacgtgtgctcttcaggtcagggctatcttgtgagtgctggccctgcaatgtcacctagcattccaccattgcatccaaaccttgtgaagccattgattcctgaatctgatgctgtggtgaagggtgcaagagagactctacgattgctacttagtggttcaagccagggtaaccaacagatgatgagggacactctgccagcaattttaactaatcc

SEQ ID NO: 174557 - DNA, 239 bp, Glycine max
actggcgcacttgatgagctcattcttgccttctctcgagagggacccaccaaggagtatgtacaacataaaatgatggagaaggcttcagaaatttggagcatgatatcacaaggagcttacatttatgtgtgtggtgatgccaagggcatggccagggatgtacaccgcgccctgcacacaattttgcaagagcagggttctctcgatagttccaaggctgagagcatggtaaagaa

SEQ ID NO: 174558 - DNA, 244 bp, Glycine max
ccccaccaaagaagccctacaaatatccatcacctccaccaccagttcacacctaccctccccatgttcccaccccagtttaccactctcctccaccaccaccatacgagaagccttacaagtacaagtctcctcctcccccagtccactctccacctccaccacactactactacaaatcaccccctccaccttaccactactaggtagcactttctcttcacacccccacatggatgcatac

SEQ ID NO: 174559 - DNA, 241 bp, Glycine max
agagagatggatccagacgcgttggcaaaggcattcgtggagcactactacagcaccttcgacaccaacaggaacggcttagcgaatctctaccaggagggttccatgctcactttcgaagggcagaagatccaaggcgcttccaacatcgttgccaagctcacctccctcccttttcagcagtgccaccactcaatctccaccgtcgactgccagccctccggcgtcaacgccggcatgc

SEQ ID NO: 174560 - DNA, 238 bp, Glycine max
gcaaaaccctagcggcgcctgctttctttgttcgtgttttgcatcaggatggagtctcaggtgaagcacgcacttgttgtcaaagttatgggtcgtactggatccagaggacaagtgacccaggttagagtgaagtttttggatgatcagaaccgtcacatcatgaggaatgtgaaaggacctgtgagagaaggagacattctcaccctactcgagtctgaaagggaagcaagaagat

SEQ ID NO: 174561 - DNA, 238 bp, Glycine max
gggctttttcatgaattacttcagatccgttaaacaacagccttattttttatacttctgtggtttttcaagaaattgttcagatccgttgacaaaaagccttattcgttgattctatatcgtttttcgagagatattgctcagatctgttagcaactgccttgtttgttgattctattgccgtggattagggttttttttcacgagattgcttcagatccgtacttaagattacgta

SEQ ID NO: 174562 - DNA, 240 bp, Glycine max
attcaaaccaaccatccgcactgtgcatccctttcttccttcttcgtcttattattctccaaaacttccttcttactcttcttctttctgtttcgcaccctccaaacgacgttgtttctcgtcgttcagccatgtcgtacgactacctcttcaagtacatcatcatcggtgacacaggtgtagggaaatcgtgcctgctcctgcagttcaccgataagaggttccaaccggttcatgatc

SEQ ID NO: 174563 - DNA, 239 bp, Glycine max
cttccatcggcgcggcacccacacacacagttcgtcggaatgggaagggtgattcgcgctcagcgtaagggtgctgggtcggtgttcaagtctcacactcaccaccgcaagggtccggcgaggttccgcagcctcgacttcggcgagcgcaacggctacctcaagggcgtcgtcaccgacatcatccacgaccccggtcgcggcgcccctctcgccaaggtggcattccgccacccctt

SEQ ID NO: 174564 - DNA, 239 bp, Glycine max
attcaaaccaaccatccgcactgtgcatccctttcttccttcttcgtcttattattctccaaaacttccttcttactcttcttctttctgtttcgcaccctccaaacgacgttgtttctcgtcgttcagccatgtcgtacgactacctcttcaagtacatcatcatcggtgacacaggtgtagggaaatcgtgcctgctcctgcagttcaccgataagaggttccaaccggttcatgat

SEQ ID NO: 174565 - DNA, 241 bp, Glycine max
gtgcagaagagcgtcgcagtcgcaaccctaatcagaagaagcgcagcttcaagcgagtgacagccaccagccatgggtcgtatgcacagccgcggtaagggtatatcctcttctgctttgccctacaaaaggacacctcctagctggctcaagatctcttcgcaagatgtcgaagaaaatatctgcaagtttgcgaagaaaggtttgaccccgtctcagattggtgtcattctcagagatt

SEQ ID NO: 174566 - DNA, 241 bp, Glycine max
caccgaacaaacacaaacatggatgcatccaaactcaatcaattgaagcatttcatcgaacagtgcaagtccaacccttccctcctctccgatccttcactctccttcttccgcgactatctcgaaagtctcggggcgaaactccctgaatctgcttattccgaatcgacgggcgtggagagcgatgaggacatagaagatgttacggaggagcaagagaaggtagaagaagaagaagaag

SEQ ID NO: 174567 - DNA, 241 bp, Glycine max
actcttccgtgcacagcttgaacacaccgcgtttcggagagagacgtcgcaatggggaggaggcctgcaaggtgttatcggcagataaaaaacaagccataccccaaatcacgcttttgccgtggtgttcctgatcctaagatcagaatttatgatgttggtatgaagaagaaaggtgttgatgagtttcccttctgtgttcatctggttagctgggaaaaagaaaatgtttcaagtgaag

SEQ ID NO: 174568 - DNA, 237 bp, Glycine max
gaggactttaaaggcagttcattccggtgcagatcttgaatctgctatttcaatatgtatgggctacaaatctgagggtcagggcttcatggtaggggtgaagataaatccagtgccgggtttgcctactggttttccagaattacttgagtttgtcatggaacacgttgaagagaagaatgttgaaccacttcttgaggggttgcttgaggctcgtcaggaactccaaccatcact

SEQ ID NO: 174569 - DNA, 237 bp, Glycine max
actgaagttccttctgagatactggttgctttggctttggtattcagtagcatatcgatttgggaatcaagtatgatccttcaactggtatttatggaatggatttctttgttgttctggagcgtcctggctatcgtgtcggacgccgccgaaggtgcaagtcccgtgttggaattcagcaccgtgtcacaaaggaggatgctatgaagtggttccaggtgaaatatgagggagtga

SEQ ID NO: 174570 - DNA, 234 bp, Glycine max
attcagggagactgttttggagagatcatgccgcaccgtgatgagcaaatcacccaacaagcacaaccgtctgtacatagaagcaagaccattggaggaaggtcttgctgaggccattgatgatggcaagattggaccaagggatgaccccaaggttcgttccaagatcttgtctgaagagttcggttgggacaaggatcttgccaagaaaatctggtgctttggccctgagac

SEQ ID NO: 174571 - DNA, 238 bp, Glycine max
cttcccttctccaacatgccaaacgacagcgttctgagtcttttcttcttcgttaccctcttcacatgccttctctctgctacttcccacgatgaccatattttcctaccgagtcaactccatgacgatgactcagtgagttgcactgcaaccgacccaagccttaactacaagccggtgatcggaatcctgacccaccccggcgacggtgcctctggccggctcagcaacgccaccg

SEQ ID NO: 174572 - DNA, 239 bp, Glycine max
acttcttatgcaactatagtgaggctaagagttggtgcataattaatcaaaatgttggccatattccacaaagcttttgctcatccacctgaagagctgaacagtcctgcatcttacaaaggttccaagaagcctaaggttcctgaggaaactctcaaagatttcctttcccaccatcctcacaacacttgctccatgagctttggtgaagctgctgtgctagcttatgttcgtcctga

SEQ ID NO: 174573 - DNA, 232 bp, Glycine max
gtgatctcttctcctcacaatgagcagatcagggcaaccaccggatttgaagaagtacatggacaagaagcttcagatcaagctgaatgcaaatcgcatggttgttggtactctccgtggcttcgaccagtttatgaatttagttgttgacaacactgtggaagtgaatggcaatgagaaaaatgacatagggatggtggtaatcagaggaaatagtgtggtcactgttgag

SEQ ID NO: 174574 - DNA, 230 bp, Glycine max
gggagaggcgcgaaaatgagcggagcagaggggaagaagaagggagcgagcttcgtgatcgattgcgcgaagcggtggaggataagattatggacattgcttctctggagaagttccttcaggagaggattaaggtcggcggcaaggccggtgcactcggcgattccattaccgtcaccagggacaagagcaagatcaccgtcacctccgacagcaacttctctaaacgg

SEQ ID NO: 174575 - DNA, 236 bp, Glycine max
cagctagcgcttcttctctcgcattccgtggagatctagtgctgccaaacctcgctgaaaattagggtttcgtttcggaggtagacgaagatgttcggaagggcaccgaagacaagcgacagcaccaggtactacgaaatcctcggcgtatcgaagaacgcttcaccggatgatttaaagaaggcttacaagaaagccgccattaagaaacaccctgacaaaggcggtgatcctga

SEQ ID NO: 174576 - DNA, 266 bp, Glycine max
attcattcaagattcagcaagtgcgttttggaagcagagaccgaaatacttcgagatggcccgtacaaagcaaactgctcgtaagtcaactggaggaaaagctcccaggaagcagcttgcaaccaaggctgcacgtaagtctgcaccaacaactggtggtgtgaagaagcctcatcgttatcgccctggaactgttgctcttcgtgagattaggaaataccagaagagcactgagctcctaatcaggaagcttcctttccagaggt

SEQ ID NO: 174577 - DNA, 265 bp, Glycine max
gtttttgagagagagagagagatggcagcttctggttcgtggaagagtgggagtggttcttcgatgggtctggagaggatgagcgtggagcagctgaaggcggtgagagagcaagccgatctggaagttaatcttctccaagacagcctctccaacattcgcaccgccaccacccgcctcgagatcgcctcctccgccctcaacgatctctccctccgcccccagggcaaccacatcctcgtccccctcaccgctaccctctacg

SEQ ID NO: 174578 - DNA, 274 bp, Glycine max
agcaatcggagctcatagaccacttcgtcaagcgtgcctccgcggcctccgacgccgctgcactatcctccgttctcgtcgaagccacttctcacccttcgctcttcgctttctccgagattctcgctctgcccaatcttcttcagcttgaagcaactgagaattctgcttatcttgatatgcttcggttgtttgcacatggaacatggaatgattacaagagtaatgctgaccgtcttccacaattgatacctgatcagatcctcaagcttaa

SEQ ID NO: 174579 - DNA, 277 bp, Glycine max
ggaccactttccaatcagccactgttgctgtggttggagacggattcatagcaaagggtataacctttgaaaattctgctgggccaagcaaacaccaagccgtggccctaaggagtggttctgatttctcagccttctataaatgcagcttcgttgcctaccaagatactctctatgtccactccctgggcaaattctaccgcgattgtgacgtttatggcacagtcgacttcatcttcggcaatgcagcaacagtgctccagaactgcaacttgta

SEQ ID NO: 174580 - DNA, 282 bp, Glycine max
gtgaaagagagaagaaaagtcaaagacaatgtcagggatcattcacaagattgaggagacccttcatgtgggaggccacaagaaggacgaggagcacaagggtgagcagcaccatggtggagaatacaaaggggagcatcatggtgaacacagtactgaatacaaaggagagcatcatgttggtgagcacaagccggagcaccatggaggagaagagcacaaagaggggttcctagacaagatcaaggacaagatccacggcgaggagggtggcaccgctga

SEQ ID NO: 174581 - DNA, 131 bp, Glycine max
  unsure (1)..(131): unsure at all n locations
ccatttgccattggatggcgctgctagaatttgtactggtgccaccagtttcctctcccttttgtcccagatnagttaccagagtggcaaaaattagattagaataatatatntatattnttttatcagtc

SEQ ID NO: 174582 - DNA, 135 bp, Glycine max
ctctgctgccgctcgcaagaatctgagtaagattgcctgcaataggctccagaaagagctcgtggaattgggaggtcaattcccccaattggttccaagcacagagtcacggacaatctccagaggtgggtggtt

SEQ ID NO: 174583 - DNA, 264 bp, Glycine max
ggaagctcgttctttcgtcgtcgtcacaagtcacaactcgcaaaccacaatgcctaagcagatccacgagattaaggattttcttctgacggcgcggaggaaggatgcgaggtcggtgaaaatcaagaggagcagggatgtcgttaagtttaaggttcgatgctccaagtacttgtacacgctttgtgtctttgaccctgagaaagccgataagttgaagcaatctcttcctcccggtttgagtgtacaagacctgtagagctg

SEQ ID NO: 174584 - DNA, 219 bp, Glycine max
cccaaaatatcatacttctcgtatccccaaccctcaaccccaacaaagcaagagaagtagggtttttgtgcttggcaaaagaaagagaagagaagatggtgtcaggttcggggatctgcgcgaagcgtgagtaggtggacgcccggcaccacatgctgggtcggctcgcctcgattgtggcaaaggagctgctgaacggacaaaaagtggtggtcatgc

SEQ ID NO: 174585 - DNA, 124 bp, Glycine max
ctgcaattgacaattttatggtacagcagcttgatggaactgttaatgaatgggggtggtaccagcagaagcttggagccaatgctattttggcagtgtcacttgctgtctgcaaggctggtgc

SEQ ID NO: 174586 - DNA, 265 bp, Glycine max
gcatgtcaaagaggattcatgggagagccagatgagatgagacctggacgaggagagtttcatgaatatccaagtacatgtgtgtgtgagaaaccattcatggatgatcttagccaagacggattccggccccctaaactcgcagccaacaacgtgacagtgaatggaggaggaaatgaagaaagtgtacgaaagcgaagtgggagaatggccagcacgtgataaagatgagtgagtttggaccagcgtcaggaagaagaccaga

SEQ ID NO: 174587 - DNA, 262 bp, Glycine max; identical to SEQ ID NO: 157089

SEQ ID NO: 174588 - DNA, 262 bp, Glycine max
ggacaattggcaagcgtttggccagcatcagtgtagagaatgttgaatccaacaggcgtgctcttagggagctgcttttcaccgctcccggtgctcttaaatatctcagtggtgtcatcctctttgaggaaactctctaccagagcacagctgcaggcaagccctttgtggaagtcttgaaggaggctggtgttcttcctggcatcaaggttgacaagggcacagttgagcttgctggcactaatggagaaaccaccactca

SEQ ID NO: 174589 - DNA, 262 bp, Glycine max
gcattcacaaataaggttgaagaggtcactgccggaagaagggagcaacaccatctttcattttccggcgatctcttgtttcttccatcatcaccgttttccggcgatccctaatcctcgcaaacagaaatgacgacatcaaggcgccttgcggacaggaaggtggagaagtttgagaagaacatcacaaaaagaggatttgtgccagacactaccactaagaagggaaaagactaccctgttggcccagtgctgctcggtt

SEQ ID NO: 174590 - DNA, 267 bp, Glycine max
aaaaccctagattttactttatttgtttccctcaatcgaatcgattttccccttccgaaaaccctaattccttcctcgctatcgaagatggacatcgagcagaagcaatcggagctcatagaccacttcgtcaagcgtgcctccgcggcctccgacgccgctgcactatcctccgttctcgtcgaagccacttctcacccttcgctcttcgctttctccgagattctcgctctgcccaatcttcttcagcttgaagcaactgagaat

SEQ ID NO: 174591 - DNA, 204 bp, Glycine max
  unsure (1)..(204): unsure at all n locations
ctcgatcaactcaacacaaaccaaaactcaagctaaaattctcactctctctctcatctcgagatcatagtatncatattcaatatcatttcataccaaacacatggctttggaagctctcaactcaccaacaacaaccgctnccatcttttccctttgacgacccaactattcnatgggggaacngaaangntnnaaggggtt

SEQ ID NO: 174592 - DNA, 276 bp, Glycine max
cagatctgtcttccgaagcaggaactaaatatggctgacttgttggaatggtcaaagcacgataagaaacgaatgtttctgtcgtctaacgtgttggtgaccttgatcgcaccatcaaattttacacagaatgtttaggaatgaagcttttgaggcaaagagatatcccagaggagaaatatgctaatgcttttcttggatttggccctgaagaatcccattttgttgttgaattaccatataattatggggttacctcgtatgacattggcgatg

SEQ ID NO: 174593 - DNA, 280 bp, Glycine max
acatcaagcatatagatgggtcccctgtgaaatcagatgcagaaagacaaagagtgatacaatgtcttgcagctgcaattgagagaagagtttctgagggtttgaagctagaactctgcaccaccgacagagttggacttctatctgatgtcacacgtatcttcagagagaatagcctcacagttacaagggcagaagtggccacaaaaggaggcaaagctgtgaacactttctatgttcgtggtgcttcaggtttccctgttgattccaagaccataga

SEQ ID NO: 174594 - DNA, 293 bp, Glycine max
cagaagaggttttgctgataccatggatgggttttctcaggggaagttcgctggtaatacagggatggacgcaatggtaatcacctaggccttctggagctcagccttctgctatgaaagaaataccaagcaagttgcaagaacggccctgttcaactaagaatggaaccggtcataaccatacaggtgcttccatcagtggcagcgcaccggcttctaaggcacaggttgttggttggcctcctataagatcttttaggaaaaactcgatggccacgacaactaacaagaac

SEQ ID NO: 174595 - DNA, 262 bp, Glycine max
gagataactagaaacagtgtgatgaaaatgaaggtccttgttttcttcgttgctacaattttggtagcatggcaatgccatgcgtacgatatgttccctctccgaatgaacactggctatggtgcccgtactccggaggtgaaatgcgcaagttggaggcttgctgtggaagcacacaacatctttggctttgagaccattcctgaagagtgcgttgaagcaacaaaggaatacatccatggcgaacaatatagatcagact

SEQ ID NO: 174596 - DNA, 261 bp, Glycine max
gcacgctctacaaagaggaaaccgacgccgatcagtacaacctcgtcttcgccaactgccactggcagcaactcaaggtgacaatggacgttaaatctgccatgtacaacctagaagggaatagcaacgtccgcgattacctctctgcgggcagaaccatccttcctagggtttatttgctcttctcgttggtgtatttcgctctggctgctctctggatcagcgtcctctacaagaagcgccaaaccgccttccgcatcc

SEQ ID NO: 174597 - DNA, 269 bp, Glycine max
gtcaaagtgaagaaattcaaccaagcgcgggtaaacggcgggagtaactatgactctcttaaggtagccaaatgcctcgtcatctaattagtgacgcgcatgaatggattaacgagattcccactgtccctgtctactatccagcgaaaccacagccaagggaacgggcttggcggaatcagcggggaaagaagaccctgttgagcttgactctagtccgactttgtgaaatgacttgagaggtgtaggataagtgggagctggaaaca

SEQ ID NO: 174598 - DNA, 272 bp, Glycine max
ctaactcctctgggttccgtcttgcttcaagtcaaaccgtgaattcggttccgcgtgcgaatggaacttacaccgtttcggatttcatgacaaagaagcaagatttgcatgttgtcaaaaccaccaccaccgttgatgaagctttggaggctcttgtaaacaacagaatcagtggtcttccggtgatcgatgaggactggaatctggttggagttgtttctgattatgacttattggctattgattcgatatcacgaggtcctcaaagtgat

SEQ ID NO: 174599 - DNA, 149 bp, Glycine max
gtgagatgggatgaaacatcaaacataccacgtcctgagagagtttcacaatggaggatagaggctgctcttgctccctctggtctgaatcctctaccaatgcccaggcctaaaaggcctcgatctaatgtggttccatcatccccaga

SEQ ID NO: 174600 - DNA, 285 bp, Glycine max
caggtattggctctttgctgcagttaaacttaggtgcttgcttgtgaccaatgaatgaatgcgagatcacatattttgaattcataggaagaaactttttaaaccagtggaaagaaagacatcaggttcactacacttttgtgaaaggaaacctaaaacttcagatgccaccatcatattcattggttatccaggaatcagaaaaaggttattggcatgtacccctagtatcaggcactagctgtgagtccacgagatgttggctctgcattactcggccaagtg

SEQ ID NO: 174601 - DNA, 263 bp, Glycine max
ctttgctctctgtgaggcttcaatttctaattagggtttcgcttagagtaaccaataaccatgggagtcttcacctttgtcgtccgcaaatccggcagcgaatggagcgccaagcaacattccggcgacatcgaggcctccgccgattccaccttcgatctccaacggaagctcgtgcaagccgctctcgccgttgattcctccggtggagttcagtcctctttctctcccgtgtctcctacctccgctgtgttccaggtgat

SEQ ID NO: 174602 - DNA, 258 bp, Glycine max
gaaggagcaaaagcaatggcgccgaagaagccgagaaccacgacaaggaaccctgatttggttagggggattggcaagtattcgaggtcgcagatgtaccacaagaggggcatctgggccatcaaggccaaaaacggtggcgttttgccccgccacgatcccaagcccaagcccgaggccccggcccagaagccgcccaagttctaccccgcggacgatgttaagaagcccctcgtcaacaagcacaagcccaaaccc

SEQ ID NO: 174603 - DNA, 257 bp, Glycine max
gactagttctagatcaaagaacaagtcaagcttctctacaagcgccacaagaacactgctttctcctggctcagaaacatcttccatgactgtgctgttcagagttgtgatgcttcactgttgctggactccacaagaaggagcttgtctgagaaggaaacagatagaagctttgggttgagaaatttcaggtacattgagaccatcaaagaagctttggagagggaatgcccaggagttgtttcctgtgctgatat

SEQ ID NO: 174604 - DNA, 259 bp, Glycine max
ctttgctctctgtgaggcttcaatttctaattagggtttcgcttagagtaaccaataaccatgggagtcttcaccattgtcgtccgcaaatccggcagcgaatggagcgccaagcaacattccggcgacatcgaggcctccgccgattccaccttcgatctccaacggaagctcgtgcaagccgctctcgccgttgattcctccggtggagttcagtcctctttctctcccgtgtctcctacctccgctgtgttccagg

SEQ ID NO: 174605 - DNA, 259 bp, Glycine max
gaaggagcaaaagcaatggcgccgaagaagccgagaaccacgacaaggaaccctgatttggttagggggattggcaagtattcgaggtcgcagatgtaccacaagatgggcatctgggccatcaaggccaaaaacggtggcgttttgccccgatcacgatcccaagcccaagcccgaggccccggcccagaagccgcccaagttctaccccgcggacgatgttaagaagcccctcgtcaacaagctcaagcccaaaccc

SEQ ID NO: 174606 - DNA, 261 bp, Glycine max
gactagttctagatcaaagaacaagtcaagcttctctacaagcgccacaagaacactgctttctcctggctcagaaacatcttccatgactgtgctgttcagagttgtgatgcttcactgttgctggactccacaagaaggagcttgtctgagaaggaaacagatagaagctttgggttgagaaatttcaggtacattgagaccatcaaagaagctttggaaagggaatgcccaggagttgtttcctgtgctgatatcctc

SEQ ID NO: 174607 - DNA, 262 bp, Glycine max
ggggtttgccttgtgccgtttgtgttgttttcgggacgaagaagaagatggtgtcaggttctggaatctgcgcaaagcgggtggtggtggacgcgcgccaccacatgctgggtcgtctagcctccatcgtggcgaaggagcttctgaacggccagaaagtggtggtcgttcgctgtgaagagatttgcatctcgggcgggctggtgaggcagaagatgaaatacttgaggttccttcgcaaacgcatgaacaccaaaccctc

SEQ ID NO: 174608 - DNA, 254 bp, Glycine max
gagagagcaaaaccctagagcatccatcacaagcagaggaagaagatggtgaagttcctgaagcctaacaaggcagtgatcgtcctgcagggccgctacgccgggcgcaaggcggtgatcgtgaggtccttcgacgagggaaccagggagcgcccctacggccactgcctcgtcgccggaataaagaagtacccaagcaaggtcatcaagaaggactccgcgaagaagaccgcgaagaaatctagggttaaggc

SEQ ID NO: 174609 - DNA, 253 bp, Glycine max
tctaaacaaaaaatcaagaacaatggcttatgctaggcttgctccttttgctgtcttcttgcttgccacttccataatgttcccaacgaagatagaagcagcagattgtaatggtgcatgttcacctttcgagatgccaccgtgccgctcaagtgattgtcgttgtgtccctattgcactatttgttggtttctgcatacatccaactggactttcatctgttgcgaagatgatcgacgaacatcccaactta

SEQ ID NO: 174610 - DNA, 236 bp, Glycine max
gtgtggatgacctagtttctgttgatactcttattgaggaacatctcacagttgagcccatcaatgaatatgtccagagttgtgacattgtggccttcaataaaatataaactacaatcggtgggatttggagatcatggcaactgggagaattgcaagttttagaaactatgttctagggggaactaccctgaattgagaatttttgtctttagaaacccgcttatattatttgt

SEQ ID NO: 174611 - DNA, 253 bp, Glycine max
gtagggagttggctgggatgtttctgctattggaaatgctatttggggtggagccaaattgtctgatgttcttgaactcattggaattccaaagttgactagtgtcactgaatttggtggaagacatgtggaattcgtaagcattgataagtgcaaggaggaaaatggaggcccatacaaggcttcaataccactcagtcaggccacaaatcctgaagcagatgttctactagcttatgaaatgaatggtgaa

SEQ ID NO: 174612 - DNA, 254 bp, Glycine max
gtggtggcggcagtggtggtggcatgagatcaaggttccctggtgggatgtttggtgatgatatgtttgcatcttttggggaagggggaggagtacatatgagtcaaggtgcatctcggaaagctcctcccattgagagtaaattgccctgcactcttgaggagatatataaagggactacaaagaagatgaagatctctagagaaattgcagatgctagtggaaaaaccatgccagtagaggaaatcttgacc

SEQ ID NO: 174613 - DNA, 248 bp, Glycine max
ttatcatccgcagctgcttttattcgcaccgcaaacagtgagccatggccgtcggaaagaacaagcgcatctccaaggggaagaagggtggcaagaagaaggcagctgatccctttgccaagaaggattggtatgacattaaggctccttctgtttttcaagtgaaaaatgttggcaaaaccctcgtctctcgtactcagggtaccaagattgcttctgaaggactcaagcatagagtgtttgaggtc

SEQ ID NO: 174614 - DNA, 121 bp, Glycine max
  unsure (1)..(121): unsure at all n locations
ttgacaacngaccacagatgacaaaaggcttcagagcaccctgaagagaataggggtgaatgcgcataccctgnctattgaagaggtcaatattctttaaggatggacgtagttatgccag

SEQ ID NO: 174615 - DNA, 262 bp, Glycine max
  unsure (1)..(262): unsure at all n locations
tttgaatacttcttatgcaactatagtgaggctaagagattggtccataattaatcaaaatgttggctatattccacaaagcttttgctcatccacctgaagagctcaacagccctgcatcttacaaaggttccaagaagcctaaggttcccgagganactctcaaagatttcctttcccaccatcctcacaacacttgctctatgagctttggtgatgctgctgttctagcttatgtccgtcctgatcaatctttctctcg

SEQ ID NO: 174616 - DNA, 250 bp, Glycine max
ttactcactctttctaagttttttctatctctttctctctctctctgtctgccatggttctctccaaaaccacctccgaatccgacgtctctgtccactcaaccttcgcttctcgatatgtcagaacttcgcttcccaggtttaagatgccggaggagtcgataccaaaggaggcagcgtatcaaataataaacgatgagttgatgttggatgggaacccaaggttgaacttggcatcatttgtgacaac

SEQ ID NO: 174617 - DNA, 248 bp, Glycine max
gtgaaaatggctcctccaagaggtcgtggtggttttggtggtggcggtgggtgtaggggtggtggtaggggtgacagaggcagaggaaggggcggtggaggaagaggaggagacaggggcactcccttcaaagctagaggaggtggcagaggtggtggtggccgtggcggaggcaggggtggtggccgtggtggtggcagaggtggaatgaagggaggtagcaaggttgtggttcagccccatagaca

SEQ ID NO: 174618 - DNA, 253 bp, Glycine max
ttgggttccagggatgcacatgcctttcgaatagcatcaagctcaaacagtagaacccaattatcagcctcctgtgacttttgttgtggttcaaaagcgtcaccacacaaggctctttgctagcaaccatcatgataagagttctgttgacaagagtggcaacatattgcctggcactgttgttgactccaaaatctgccatcccaccgaatttgacttttatctctgcagccatgctggaatacagggtaca

SEQ ID NO: 174619 - DNA, 251 bp, Glycine max
ctaattttgcacttcttgatcattcgatttttctcctcaagatgtagatattcgtaaaaactttgaccggcaagaccatcacccttgaggtggaatcctccgacaccattgacaacgtaaaagctaagattcaagacaaggaagggatcccacctgaccagcagagacttatctttgcgggtaaacaacttgaggatggtcgcacccttgccgattacaacatccaaaaggaatcaaccctccatctcgtg

SEQ ID NO: 174620 - DNA, 252 bp, Glycine max
ctctccttctcgctctttcagctttgacttttgttggaaactaaggcctaatcaaaatggtgaagttcacagctgaagagctacgtcgtattatggactataagcataatatccgtaatatgtctgtcattgctcatgttgatcacggaaaatcaaccctcactgattctcttgtggctgctgctggtattattgctcaagaagttgccggtgatgtccgtatgactgatacccgtgcagatgaagctgagc

SEQ ID NO: 174621 - DNA, 253 bp, Glycine max
  unsure (1)..(253): unsure at all n locations
cttccaacgagaatcaaggctttcgccttgcgaacatcggcgactactttatgggccccggcctcgagcagtttattcagcagcttgccgacaacgaccccaaccgctacggaacgccgcccgccgccaaggacgccgtcgagaatctccccaccgttaccgtcgacgacgacttgctgaactccgagctgaaccagtgcgctgtctgccangacgagttcgaaaagggttctaaggtgacacagatgccctg

SEQ ID NO: 174622 - DNA, 255 bp, Glycine max
tgttgttgtaactcgttcttcttcttttgttgttctgtgtttgtgattgttttttctctcacctgaaaatgtcttgctgcggtggtaactgtggttgcggaagctcctgcaagtgcggcaacggctgcggaggctgcaagatgtacccagacttgagctacactgagtcaaccaccaccgagaccttggtcatgggagtggcacctgttaaggctcaatttgagggtgctgaaatgggtgtgcccgctgagaacg

SEQ ID NO: 174623 - DNA, 262 bp, Glycine max
gagaaacatgaagaaggtttcacccttggcattttccattctctttttggccttcaccatagaaccctttattggcattgctgcagcagcaccagaagcagtgcttgacacctcaggccagaagctgagaacaggtgtcaagtactacattctgccagtgttcaaaggcaaaggtggaggcctaacagtttcaagcagtggcaacaacacatgccccctctttgtggtgtcagagaagcttgaagtctcaaagggcacccca

SEQ ID NO: 174624 - DNA, 263 bp, Glycine max
tgcagcatggggcggagacctgcgaggtgttataggcaaattaagaacaagccataccccaagtcacgtttctgccgtggtgttcctgatcccaagatcaggatttatgatgttggtatgaagaagaagggtgttgatgagtttcctttctgtgtccatctggttagttgggagaaggaaaatgtttcaagtgaggccctggaagctgctcgcattgcttgcaacaagtacatggccaaatttgctggaaaggatgctttcca

SEQ ID NO: 174625 - DNA, 251 bp, Glycine max
gtttgacaaagatcttttgaaggctgatgacaagatgggaaatgctttcttgaaccttcaaccaatagtctctgcagccagattaagagacatcttaagagtgtcctctggtgagacaacattaaggaaggtcatacctgatggtgaaaactgtcttgtccgtgaaagcagtatcaactgtgtcaatggtgaggtggtgcagaatgtttggttaaggcttcgtggagttgagtctggggaactagaattga

SEQ ID NO: 174626 - DNA, 249 bp, Glycine max
ggcagcggcgcaggcgggggtcgttttggcatctcacgccattctgaatttcgagttattgttcgcggactcccatcttctgcatcttggcaagatttgaaggatcatatgcgaaaagctggtgatgtgtgttttgctgaggtttcccgtgatagtgaagggacttttggcattgttgattacactaattatgacgacatgaagtatgctattcggaaactagatgacactgagtttagaaatccttgg

SEQ ID NO: 174627 - DNA, 246 bp, Glycine max
ggagtaatggacagagacgaagcagaaaccatggagaatgtggaattcgatgcttctgagattgagtacgttagttacggtggcgagcatcacctccctctcgtaatgaacctggtggaccaagaactcagcgaaccttattccatcttcacgtaccgttacttcgtctatctctggcctcagctttcattcctggcgttccacaagggtaaatgcgtgggcaccgtggtatgtaagatgggggaa

SEQ ID NO: 174628 - DNA, 249 bp, Glycine max
actgtggcagaagtcttaggagtgtaaaacagagacgcaaaatgaagacgattctatcgtccgagaccatgaatattcccgacggcgtgagcatcaaggttcacgctaaggttatcgaggttgagggccctcgtggaaaactcgtgcgagacttccaccatctgaacttggacttccaacttattaccgacgatggcggtaaaaggaagctcaagattgattcttggtttggttctcgtaaaacctccg

SEQ ID NO: 174629 - DNA, 251 bp, Glycine max
tcatttcatcgtgcattcaatggccaccacagcagctctatccggaaccatggtgagcacctccttcatgaggaggcaacctatgaccaccacaagcctaaagacattccccaacgttggtgaagctctttttggtctgaaaagtggacgaggtggtcgtgtcacttgcatggcctcgtacaaggtgaagctcataaccccagaaggagaagtgagatttgaatgcccagatgatgttttcattgttgaca

SEQ ID NO: 174630 - DNA, 246 bp, Glycine max
caaaaggccatataattttattttatttgaaataatgtccgggatcatccacaagattgaggagaccctccatgtgggagggcacaagatagaggagcacaaaggagatcaccatggtgagcacaaaggtgaacacaaaggagaacaccatggtgagcacaaaggtgaacacaaaggagaacaacaccatggggagcacaaggagggacttgtggataagatcaaggacaagatccatggtgatgg

SEQ ID NO: 174631 - DNA, 245 bp, Glycine max
ctttttccctctccatacccttttgctttctttatccaataataagaacttcccacgagtggctttaactggtctggtctggtctggtcggacacacaaaaatattagtatggagaaggtgagttttgtgaagaatggagagcttagattgcctccggggtttcgtttccacccgactgatgaggagctggttttgcagtacttgaagcgcaaggtcttctcctgccctctgccagcctctatca

SEQ ID NO: 174632 - DNA, 249 bp, Glycine max
cggctcgagctcctctctccgcatagctgcgttttccgaatcgaaaggtgacgttagtaagtaccaatggtggagaaggccaagggtaggaaggaggaggttgtcactcgagagtacaccatcaacctccacaaacgcttgcatggctgcacatttaagaagaaggctcctaaagcaattaaggagataaggaagtttgctcagaaagcgatggggacgaatgatgtaagagtggatgtgaagctcaac

SEQ ID NO: 174633 - DNA, 248 bp, Glycine max
actcgagtccgattcggctcgagttcaggatcatctttgatgtcaagtgacttattggaagaaagttcgaagataaggaagttcaaagagatatgaagcttgttccttataagattgtactcaaggatggaaaaccttacatacaagtgacaattaaggatggtgagaccaaggtgttcagccctgaggaaatcagtgctatgattctgactaagatgaaggaaactgcggtagcattccttggaaag

SEQ ID NO: 174634 - DNA, 255 bp, Glycine max
aacactctcgctttcgccttcttccttcacactcagcaaatgagtcgctatccagaagttctgtgggcacaacgttctgataaggtttaccttactgttgctctacctgatgccaagaatgtttctgtgaagtgtgagcctcagggtttgtttactttctctgcttctggggttcaagaagaagcctacagctttagcttggagctgtacggatgcattgaacctgagggttgtaaaactaaatctggcttaaga

SEQ ID NO: 174635 - DNA, 244 bp, Glycine max
atctgggaatgtttttgggtggggcttacgaggaggcgctcggtggagtccacaacttgttcggcggccccagcgtggtcagggtgtcgcagagcgatggccctcacagctttgcggtcacgcgtgccgtgccggggccatcctgtggagatgttcttcgagtgatgcagcaccagcccgagctcatgttcgagacactcaagcaccgcgcgcaggagtatgtcagccacgacaacgcagcagc

SEQ ID NO: 174636 - DNA, 246 bp, Glycine max
gttttatgcttcaaggaggtgattttacacaaggaaatggaatgggtggagaatcaatttacggagagaagtttgctgatgagaacttcaagttaaagcatactggaccaggacttctatcaatggcaaatgctggtcctaataccaatggttcacaatttttcattacaactgtgacaactagctggttggacggaaggcatgttgtttttggtaaagttctttctggaatggatgttgtttaca

SEQ ID NO: 174637 - DNA, 245 bp, Glycine max
ctcggatgttgtaaaattagtgtatgatgtgaagctatgggctggaaaatgtggatgtaggagatttcgggacgaaaggcctcaaaacgcttcgtcgtttgtggttactgagtcctgagtgatcttgtcatccgacctttgccatgacaggtgcgcttgcttggcaggtcaaaatatgttaataaaaaaagttttattggtttagggagagatcgcacgggagttgcccggggtctctctctcgt

SEQ ID NO: 174638 - DNA, 252 bp, Glycine max
ggaccccgtgctatatgcatcctatctgctagtggtgtaatttcaaatgttacacttcgtcagcctgattcttctgggggaaccttgacctatgagggccgttttgagatactttcattatctggatcattcatgcctactgacaaccaaggaacaagaagcagatcaggtgggatgagtgtttcattgtcaagtccagatggtcgcattgtaggtggtggagttgctggtctccttgtagctgctggtcct

SEQ ID NO: 174639 - DNA, 256 bp, Glycine max
gccaattatacaaactggtctaagtagtgaatcaaaggggtcagagtgtgtggggtggttggataagcaaagtccaaactcggttttgtatgtgtcgtttggaagtggaggcacactctctcaacaacagcttaatgagttagcttttggattggaattgagtgataaaaaattcttgtgggttttgagagcacctagtgattcagcagatggtgcttacgttgttgcttctaaggatgacctttaaatttttacc

SEQ ID NO: 174640 - DNA, 252 bp, Glycine max
ttagaagaacagaacagaaccaccacataacagtgcttttcaaaggcggtttgagcaatggcgttcttaaataaaattggaaatctgctcaagaattctgctgtcaagcacatcaatcaggatttttcggcgtctaccccttcacttttccaagcaattagatccatgtcatctgcaaatcttttcgtcggaggtatttcttacagcactgatgatatgagtttgcgagagtcttttgctcgctatggagaa

SEQ ID NO: 174641 - DNA, 247 bp, Glycine max
gtcttcttgatccttctttttctccttgaactcaaacatggcagatgaggtggttctgctagatttctggccaagtccatttgggatgagggtcaggattgcacttgctgaaaagggtatcaaatatgagtacaaagaagaggacttgaggaacaagagtcctcttctcctccaaatgaacccggttcacaagaagattccggttctcatccacaatggcaaacccatttgtgaatccctcattgct

SEQ ID NO: 174642 - DNA, 245 bp, Glycine max
cgagattcaacacttcaactcggcccattgggattttcagggtacaatggcttccaacatctcgccctctgcctttgataaagaacagatatttggaatggctgaaaaggagatggaatatagggtcgaattattcaacaagatgacccagacctgtttcaataagtgtgttgacaataggtacaaggagtctgagctaaatatgggtgaaaatagttgcattgaccgctgtgtttcaaaatatt

SEQ ID NO: 174643 - DNA, 244 bp, Glycine max
caccattatgccaaacatggcatatttcgaattccttccccacgatcctaagcctggctccaccagttcaaaactagtggagttggtgtatgttgaagtggggaaggaatacgaactggtgatcacaacctatgcgggactctatcggtaccgtgtgggcgacatcctccgagtcaccggtttccacaactcggcaccacaattcatcttcgtgcgcaggaagaacgtgttgctgagcattgac

SEQ ID NO: 174644 - DNA, 245 bp, Glycine max
gttttcttcagaaatttgccatcgttgagagaagcgtgagagccttagtcgttcaagatgagagctaagtggaagaagaagcgcatgaggaggttgaagaggaagcgccgaaagatgagacaaagatctaagtaggtgcttgagcaggagttgagatgagctttccatctgctaccagcctcatgacattttaggctgttatggctcttatgatcttgaggtctagtcgctaggggagcttcact

SEQ ID NO: 174645 - DNA, 248 bp, Glycine max
gtggctcggacgctgattccagcaacacgcggctggtggttgcactgtatgacgccctatactccggcgactccaacgccgtcgtcaagatcgtcgccgccgacctcgagtggtggttccatggtccgccctctcaccagtttttgatgcgcatgctcaccggcgactccgccgccgacaactccttccgattcgttccgcagtccatcgccgccttcggctccaccgtcatcgtcgagggctgcgac

SEQ ID NO: 174646 - DNA, 247 bp, Glycine max
cgagtagcaacaatgtcgaagcgaggtcgcggaggatcggcgggaaacaagttccgcatgtcgctgggtctgccggtggcggcgacggtgaactgcgccgacaacaccggcgcgaagaacctctacatcatatcagtgaaggggatcaagggtaggctgaaccggttgccgtcagcttgcgtcggagacatggttatggccaccgtcaagaagggaaagcccgatctccgtaagaaggtgctgcccg

SEQ ID NO: 174647 - DNA, 245 bp, Glycine max
gctagatccctagtaagccgccatggtgaagtactcaagggagcctgacaatccaaccaagtcttgcaaggctagaggcgccgatcttagggttcattttaagaacactagggaaactgcctttgcaatcatgaagttgcccttggttaaagctaaaaggtacttggaagatgttcttgcgcacaagcaggccattccgttcagacgtttctgtcgtggtgttggaaggacagctcaagcaaaga

SEQ ID NO: 174648 - DNA, 291 bp, Glycine max
tgctcaagtagctgaaaagcatcatattccaaggatttcgtttcacggtttttcttgcttctgcctccattgtctgctcatggtacacacttcaaatatttgtgaaagcatcacttcagaatccgagtacttcactatccccggcatacctggtcaaattcaagctaccaaagagcagatacctatgatgatctcaaattcagatgaagaaatgaagcacttcggggaccagatgcgtgatgctgaaatgaagtcatacgggctaatcataaacacttttgaagagttgga

SEQ ID NO: 174649 - DNA, 283 bp, Glycine max
tatgcggtcatcgataccaccaagtatgggcaggttcaggcccgggtacgcaaagcacgtgttgggcccaatgctgaagtttctgagggagacgagaacacccttgatggtgaacccgtacccgtacttcggttacaacgggaaaaacgtgaactttcttctgttcaggcccaaccgaggcttgtacgacaggtacacgaagaggagttacacgaaccagttcgacgctctgatggacgcggtgcactcggcgatgaatgctttggggtacggtgacgtggac

SEQ ID NO: 174650 - DNA, 282 bp, Glycine max
ggattttcaagaggggcatctgtgtatagaggtgtgacaagacaccatcaacatggaaggtggcaggcccgaataggaagggttgcaggaaacaaggacttgtatcttggtacatttagcacacaagaagaagctgctgaagcatatgatatagcagcaatcaagttcagaggaacaagtgctgtgaccaactttgacataagtaggtatgatgtgaagagaatctgctcaagctccactcttattgcaggagatcttgcaaaacggtctcctaaagaatca

SEQ ID NO: 174651 - DNA, 278 bp, Glycine max
  unsure (1)..(278): unsure at all n locations
anagggaagggctcagctctcggttaccaatgttgccactgaagttaactctgtagaacaggctcagagtattgcttctaaagaaagccagaggccagtatacccattttctgccatagttggacaagatgagatgaagctttgtcttctccttaatgtgattgatcctaagattggaggtgtaatgatcatgggggataggggcacagggaaatctacaacggtcagtcatggttgatttacttcccgaaatcaaggttgttgctggtgaccctata

SEQ ID NO: 174652 - DNA, 282 bp, Glycine max
ccatgtgaggagaaagatggaggggaaggagcaggatgtgtcgttgggagcgaacaagttccccgagagacagccaattgggacggcggcgcagagccaagacgacggcaaggactaccaggagccggcgccggcgccgctggttgacccgacggagtttacgtcatggtcgttttacagagcagggatagcagagtttgtggccacttttctgtttctctacatcactgtcttaaccgttatgggagtcgccggggctaagtctaagtgtagtaccgttgg

SEQ ID NO: 174653 - DNA, 284 bp, Glycine max
tggtacttgccaggtaattgaaaagcgttacctgcgcctaacttctgcacctgatcctgccactgtaagacctgaagaggttcttgaaaaagcactattgatgattcaaaattcccagaagaattacctctataaatgcgaccagttaaagtctattcgtcaagacctaactgttcaacgaatacgcaatcaattaacagtcaaggtgtatgaaacacatgcccgattggcactggaatttggggacctgtttgagtataatcagtgtcaatctcagttacaaa

SEQ ID NO: 174654 - DNA, 287 bp, Glycine max
agccactaaaattcattaaaaaccactgtttcaatctgcagtcaagattgtgcgttatggaagatcacgaaagccagagaaaagtcagaatcctgtgcctccatggattcaggaccagtggtgaaatcctcaagcaattagtcttaagatggcctgaacctgtcttgcaaaagctggagcttgtgttcctcgatggcccgtttcctgcacagggaagatctgatgttgaaggcatttttgaccctccttattttgaatggttccaagccaatgaggagttcactgag

SEQ ID NO: 174655 - DNA, 290 bp, Glycine max
aacaacataacatcctcaagcctttgaacatcgttttgcagccatggaaacaggcatagcatgctacactcgcgggcctttcttgcctagtgtttcttccaagcactctccaccctccatctctccatcttttggcttgaggagtctgaaatcgagctctttatttggagaatctctaagagtggcatccaaatcaacactaaaggtttcaaagacaaagaatacttcatcgtgaccagatgtgaaattggtgacagtctggaagaattcctcacaaaagcaacaccaga

SEQ ID NO: 174656 - DNA, 288 bp, Glycine max
cttaaaccctaattttgcaatcagagagtgaagagaagagacgaggttgatgggtcggcgaaagaacaacagcaacaacaatcagtgctcctcaagcaaggaagacgctgacatgaatagcaaccaccttcggtttgaagaagctgacgaggctgtcgacgagagttccaacctcgaccaatccatgtgcgacatcgaagaatccgatgataaaaccagcgccgactattacttcgattcctactctcattttggaattcacgaagaaatgttgaaggacagtgtgag

SEQ ID NO: 174657 - DNA, 172 bp, Glycine max
tttcacttggattaggaggcaagtctcctctcattattatcactgatgcggatatagacaaagcttccgaagttgctctccttggcatcatgtctaacaagggagaaatttgtgtggcaggttctcgtgtgtttgtccaggaagagatctatgatgaatttgagaagcagtt

SEQ ID NO: 174658 - DNA, 280 bp, Glycine max
gtgctctgctcgtgcctctagggttatcatatctccatttccatttcctctctctcagtttccaagaatcttaagctatgggaaagtcttacccaaccgtgagcgctgattaccagaaggccgttgagaaggcgaagaagaagctcagaggcttcatcgctgagaagagatgcgctcctctaatgctccgtttggcatggcactctgctggaacttacgacgtgagctcgaagaccggtggtcccttcggaaccataaagcacccctccgaactcgctca

SEQ ID NO: 174659 - DNA, 273 bp, Glycine max
tattgtcccggtaaagttcattaatcctaaccccgattcactctctccgactcttacattcggattcgtaaccgaaaatcggatggagagaagtgttgattacagttcagaggaggaatgcacggaggattatcggcgtggaggataccacgcggttcgagtcggcgacgctttcaacaatggccgttacatcgtgcagtccaaactcggttggggccatttttccaccgtctggctcgcttaggacactctgcattcgcattatgtagccct

SEQ ID NO: 174660 - DNA, 277 bp, Glycine max
tgtgcaccgtaagggttgtgaagcaggcagagaagagccatggtgcacgtttccttctaccgaaactatgggaaaaccttcaagaagcctcgtcgtccgtacgaaaatgagcgtttggacgccgagttgaagctggtcggtgagtacggacttcgctgcaagagggagttgtggagggttcagtacgctctcagccgcatccgtaacaacgccagatatcttttgaccctcgacgagaagaacccgcgccgtatcttcgagggagaagccctctccg

SEQ ID NO: 174661 - DNA, 283 bp, Glycine max
atatgacaacatcgattatccaaatgggcgaagaaaggccttggttccggaatcggtggtgaagaaggagaaaaggaacgaggagtgggctttggcgaagaagcaggaactcgatgccgctaagaaaatgaggttcgaaacgcggaagctgatttttaacagagccaaacaatactcaaaggaatacgacgagcagcaaaaggaactgattaggttgaagcgtgaagccaagcttaagggtaggttttatgttgaacccgaagctaagctcttgttcatcatc

SEQ ID NO: 174662 - DNA, 283 bp, Glycine max
tgtatgacaagcgatccggcaaagagcctgagaaggagcccaagtttttgaagaacggtgatgctggttttgttaagatgattccaaccaaacccatggttgttgaaactttctccgagtatcctccacttggtaggtttgctgttagggacatgcgtcaaactgatgctgtgggagtcatcaagaacgttgagaagaaggatcctaccggagccaaggtcaccaaggctgcccagaagaagaagtgaatcgtgcgggctggttcatcaggggatgttggtta

SEQ ID NO: 174663 - DNA, 275 bp, Glycine max
cattcttcagcgactgcgtttttggatcggaacctcttctgcggcgtacaatgggacactccaacgtttggaactctcacccaaaaaactacggtcctggttctcgcacttgccgtgtgtgtgggaatccacatggactgatcaggaagtatggccttatgtgctgcaggcagtgcttccgtagcaatgccaaggaaattggcttcatcaagtatcgctaaaagagcagttgtcaactacggaccaatattgtgttctggcactaggcatgtttg

SEQ ID NO: 174664 - DNA, 279 bp, Glycine max
gtctcttccttcagcaactacgatcttcgatagtgatttatcagattcttcctttgcggtcgaatcatggagcccatggacatcgttggtaaatcaaaggaagacgcttcgcttcctaaagcaacaatgacaaaaattattaaagagatgttacccccagatgtacgtgttgcaagagatgcccaagatctattgattgagtgttgtgtagagtttataaagcttgtctcgtcagaatccaatgaagtctgtaatagagaggataaacggacaattgca

SEQ ID NO: 174665 - DNA, 255 bp, Glycine max
ttgataatggctcgctcgttttcacgcgggtctctgcttcctctcgccatcgtttccttagtatgtctatttgtgatttccattgcaaaggaggaagccaccaagttggggacggtcattgggattgatcttggaacaacctattcatgtgttggtgtttacaagaacggccatgttgaaatcatagccaatgatcaaggtaaccgtatcaccccatcgtgggttgctttcaccgacagtgagagactaattgga

SEQ ID NO: 174666 - DNA, 278 bp, Glycine max
ctatccctctctctctccgacgtacatttccatctttttagggtttcatttcatggactccgattcctggatttccacgcgcctctcttcctcttcacgccgccaccattatcgatctgatctgtacgcggaggagagtgaagggaacgatgatttcagggcggagtttctatgccctttctgcgccgaggattacgacgtcgtttccctctgttgccacattgacgaccaccaccctatccaagccaaaaacggggtgtgtcccatttgtgggaaga

SEQ ID NO: 174667 - DNA, 277 bp, Glycine max
tgttggagttcccacactcccttcaatggcaatacggcatcccttctcaccttctctttccctacaatttcatccctgaaaaccatgttcactggacagaaacccctgactctcacatattctcagctgacatccctggtgtgaagaaagaggagcttagagtggaggttgaggactcaaagtacctcataatcagaactcaagcagtggataaatccacagaacctgcgaggaagtttgagaggaagtttaggctgccagggagggttgatcttga

SEQ ID NO: 174668 - DNA, 279 bp, Glycine max
cggaaaatgtggcggtgcattgctcgtggactccgtggacctgcttccaccagatctacctccaatcactcacttggatctcacttttatagattcttctctagtggggcgaactcttcgtacaccgtggtggatcaagcttatgatgctgttgtcgttagtgctggtggcgcgggattgagaactgctattggactttcagaacatgggttcaatgactgctgtattaccaagctcttcccaactcgttcacacactgttgcagctcatgggggtata

SEQ ID NO: 174669 - DNA, 284 bp, Glycine max
ttcacagcacactcctcccagggtttctccaccaagagggaaatggctcccaaaccgcctagtacgggtctgtttgttggactgaacaagggacatgtcgtcaccaagaaggaattgcccccacgcccctcggatcgtaaggggaaaacaagcaagagggtgcactttgtgaggaacctcataagagaggttgctggttttgcaccctatgaaaagcgtataactgagttgctgaaggttgggaaggataagagggcacttaaggttgcaaagagaaagcttgg

SEQ ID NO: 174670 - DNA, 283 bp, Glycine max
ctcgaaaccatcatctccccctgcaccaccaccaccgccacctcgattaccgaaccttctagattcttcgacgcaaccacccccgccacgtcatcgcgctcccccaagcgatcccttcccctcgacgacgaatctcagacggaccaaacggcgtcgtcggagcccaaacgcgtcgtgagccgctgctcctgctgtcggcggcgcgtggggctcactggattccggtgccgctgtggcgacctcttctgcgccgagcaccgctactccgaccgccacgactgct

SEQ ID NO: 174671 - DNA, 282 bp, Glycine max
tcaccaccgagatccatttttttgcgaagaaagttgaagaaaaaaatggaaacaatgttgcctccgaaccaagcagaggaagcaatagtcacaacaagccttaacgagacagagagtgaagttggtatgagggaagaagagaaggagttgcaacaacaagatcactccatgttcaacatcaagagcttcctctggcatggaggctctgtttgggacgcatggttcagctgtgcttcaaatcaagtggctcaagtgctgttgacactgccctattctttctct

SEQ ID NO: 174672 - DNA, 253 bp, Glycine max
ttaatcaacaatcatgtcggacgaagagcaccatttcgagtccaaggccgacgccggagcctccaaaacctaccctcagcaagccggtaccatccgcaagaacggctacatcgtcatcaaaggccgcccctgcaaggttgtggaagtttcgacttccaaaactggaaagcacggtcacgctaagtgtcactttgttggaattgatattttcactgccaagaaacttgaggatattgtgccctcttctcaaaat

SEQ ID NO: 174673 - DNA, 278 bp, Glycine max
tgtaaaaggccatataatttttttttatttgaaataatgtccgggatcatccacaagattgaggagaccctccatgtgggagggcacaagaaagaggagcacaaaggagaacaccatggtgagcacaaaggtgaacacaaaggagaacaccatggtgagcacaaaggtgaacacaaaggagaacaacaccatggggagcacatggagggacttgtggataagatcaaggacaagatccatggtgatggccatgacaagggtgagaaaaagaagaagaa

SEQ ID NO: 174674 - DNA, 293 bp, Glycine max
acgtaagtcggaatcggtcgattcgagcgattcggctcagggcattcacagcgtaattcgtagttgcattttaatcgagttatctaaccaggactgaatgacctaatggagtctaaaggtgggaaaaagaagtctagtagtagtagtagtaaatcaattttttacgaagctcccctcggatacagcattgaagacgttagaccaaacggtggaatcaagaaattcagatctgctgcttactctaatagttctcgcaaaccatcctgatacacatccggattgatagttcgttg

SEQ ID NO: 174675 - DNA, 289 bp, Glycine max
  unsure (1)..(289): unsure at all n locations
gcgttgctcttcgtgagattaggaaataccagaagagtaccgagcttttgatcaggaagctccccttccagaggctggttcgtgaaattgctcaggacttcaagactgatctgcgtttccagagccatgctgtgcttgcattgcaagaagctgctgaggcataccttgttggactctttgaggatactaatctgtgtgccattcacgctaagcgtgtaactattatgcccanagatatccagctggctagaaggattcgtggtgagcgtgcttgatgtggtggtggtgg

SEQ ID NO: 174676 - DNA, 278 bp, Glycine max
ctcaaattcattttaatcctaattttgcacttcttgatcattcgatttttctcctcaagatgcagatattcgtaaaaactttgaccggcaagaccatcacccttgaggtggaatcctccgacaccattgacaacgtaaaagctaagattcaagacaaggaagggatcccacctgaccagcagagacttatctttgcgggtaaacaacttgaggatggtcgcacccttgccgattacaacatccaaaaggaatcaaccctccatctcgtgcttcgcctc

SEQ ID NO: 174677 - DNA, 271 bp, Glycine max
tgggagtgggatattacaggtagagaagatgctattgagtatgctaaaaagcatagtatacctgttcctgtgacaaagaaatccatatatagcagggataagaatctttggcaccttagccatgagggagatattttggaagacccgagtaatgaacctaaaaaggacatgtacatgatgtctgtagacccagaggatgctcctgatcaagcagaatatgtggaaattgggttagagtcagggcttcctgtttcagtcaatggtaagagtc

SEQ ID NO: 174678 - DNA, 259 bp, Glycine max
gtcttctgctcttgcaaagaagaaggttgacagctctgattctgatgatagcagctctgatgaagataaggggaagatggatatagatgatgatagttctgatgaaagtgaagagccacaaaagaaaaagactgtgaaaaatccaaaagaaagcagtgatagttccgaagaagacagtgaggatgaaagtgaggaggaaccctccaaaactcctcagaaaagagacagggatgtggagatggttgatgctgcctcgtct

SEQ ID NO: 174679 - DNA, 255 bp, Glycine max
tgcgactaagagttgctgcttcttccgccactcagcacttcgctccctctgtgcttcaccaaccatggccgaaatcgaagctaccgttccagatccctctcaaatcgacgtcaaacttttcaaccgctggagcttcgacgacgttgaggttactgatatgtctctggctgattacattggagtgtccccgtcaaagcatgctacatatgttcctcacactgctggtaggtactcagtgaagaggttcaggaaggc

SEQ ID NO: 174680 - DNA, 270 bp, Glycine max
  unsure (1)..(270): unsure at all n locations
ctcanactctaacctaactcctctcgtcgtcacaaaaagtcttcttctccgatcgttacgatgttggaactccgtctcgtgcaaggttcccctctgaagaaggttctggaatcgatcaaggagctcgtaaacgacgcgaacttcgactgctcctccaccgggttctccctccaggccatggattccagccacgtcgccctcgttgcgctcctcctccggtccgagggctttgagcactaccgctgcgaccgcaatacctccatgggcatg

SEQ ID NO: 174681 - DNA, 282 bp, Glycine max
atcccctgtatatataaccactcttcctctcctccaaattaaaacacttatcatggatgttaagaaaggtgggtctgtagtacaagcacaagtgaagttgcagaagcataacgaaaaggagatgggcatgagaaaaggtccatgggcggttgaggaggacaccattctggtcaattacatcgccacacacggtgaaggccactggaattccgtggcacgatgtgcaggtctaaggaggagtgggaagagttgcagattaaggtggctaaactacttgcgccc

SEQ ID NO: 174682 - DNA, 280 bp, Glycine max
gtaatttgtgctcacatgtttttcagggtctgtgaaaacatcccaattgttctttgcggtaacaaggttgatgtcaagaacaggcaagtgaaagcaaagcaggttactttccacaggaagaagaatttgcagtactatgagatttcagctaagagcaactacaatttcgagaagcctttcctctatttggccaggaaacttgcagggtagagccactagtttctgcatgtgaagttatagaaaattaaacttaaatatttaatttttaactaatgttttg

SEQ ID NO: 174683 - DNA, 274 bp, Glycine max
gccgattatacaaactggtctaagtagtgaatcaaaggggtcagagtgtgtggggtggttggataagcaaagtccaaactcggttttgtatgtgtcgtttggaagtggaggcacactctctcaacaacagcttaatgagttagcttttggattggaattgagtgataaaatattcttgtgggttctgagagcacctagtgattcagcagatggtgcttacgttgttgcttctaaggatgaccctttaaagtttttaccagatggggtcttagag

SEQ ID NO: 174684 - DNA, 259 bp, Glycine max
ttataacacaacacaaaacgatcttttatttctctgtctagagaagaatctagcaagccctgctcgtcacaaaatcaaaggttgcaactgagaactcactccttcgaatcaaaatcaaaaaatgtcggtgactctgcacacaaacctagagcgacatccagtgtgaaatcttctgcgacgaggtccctaaaacctccgagaattttttagcgctatgtagcagtggttactatgatgggactatatttcaccgcaacat

SEQ ID NO: 174685 - DNA, 283 bp, Glycine max
ttctctcgtcgtcgccgcactgcaccgcaccgcaccgcacgtaagcacccacggagatgaagaagggagtccatccacagaagcaatggatatcctacgttacacaaacgggtaggttgatgcatgtgatgatgacaaagatacaccctgttgggaaggtttatcacttccgggctaagcgtcaaatggccgagagtttaggacagattgctaagttcagacgccgctttgggctagaaaatccagagggcaatgaaaaatgacagcatagggaactttggtt

SEQ ID NO: 174686 - DNA, 258 bp, Glycine max
ctagatactgcaccaaacaccaacaacgctttagctctctctcttctctccataaccgccacctgcgatctggcactaacagatcgccggtggtacatctgaatccgatccagccaacagatctctccaattcaaatggagaatctaatctcgttggtcaacaaaatccagagagcttgcaccgccttaagtgaccacggcgaaaacagtgcactccccacactatgggtatctctccccgccatcgacgtcgtcgga

SEQ ID NO: 174687 - DNA, 168 bp, Glycine max
gtggaacgatgtcgaagaagaacaacctcgccaagagaaagaagcagtacgaattcgatctccaaagagagaaacaagagaagataaagaaagagcagaagctccatgcgaagaaaaacaagatgaaagttgatggtagtgacaagagaaaagtgaagaccaagttga

SEQ ID NO: 174688 - DNA, 270 bp, Glycine max
ggtgagatatatagaaaaacaaaggagaaaagatagaaatggagaagtttccagttgttgacatggggaaccttaataatgaagagagatcagcaaccatggagataatcaaagatgcctgtgagaactggggtttctttgagttggtgaaccatgggatatccatagagttgatggacaccgtggagaggatgacaaaagagcactacaaaaagtgtatggagcaaaggttcaaagaaatggtagcaagcaaaggtttggagtctgctc

SEQ ID NO: 174689 - DNA, 261 bp, Glycine max
ccgagtagcaacaatgtcgaagcgaggtcgcggaggatcggcgggaaacaagttccgcatgtcgctgggtctgccggtggcggcgacggtgaactgcgccgacaacaccggcgcgaagaacctctacatcatatcagtgaaggggatcaagggtaggctgaaccggttgccgtcagcttgcgtcggagacatggttatggccaccgtcaagaagggaaagcccgatctacgtaagaaggtgctgcccgccgtcatcgtccg

SEQ ID NO: 174690 - DNA, 281 bp, Glycine max
agataagcaccaccagaagcaagatgcgcgtggcctttaattggtcacatccacctcttaggtggctcaaaaccaccccatgtcacgttgggccacatggcggacaaatatggtcccgtcttcaccttgcgtctgggtgctcacaaaacgttggttgtgagcaattgggaaatggccaaacagtgctttaccgtcaacgacaaagcgtttgctagccgtcctaaatcagtgtcctttgaattgttgggatacaactattccatgattgggttcatccttac

SEQ ID NO: 174691 - DNA, 272 bp, Glycine max
tgggagattaaagttgagggtcgggtgaaagatggcatcccccatctaacaaaggttgggtcttttgatgttgatgtgagtttggaaggtagtatcatactgtgtaggcaggtagatcaaccaggcatgatcggaaaggttgggagcgttttgggtgaggagaacgtgaatgtcagcttcatgagtgtgggaaggatcgctccacgcaagcaagctgttatggcaattggagtggacgaacacctagcaaggatctttgaagaagatggaga

SEQ ID NO: 174692 - DNA, 278 bp, Glycine max
ctcttcttctcttgcggcttgggttttagcgcagatcttctagatttaaggaagatgggtaaggaaaaggttcacatcagtattgtggttattggccatgttgactctgggaattccactaccactggccacctgatctacaagcttggaggcattgacaagcgtgttattgagagatttgagaaggaagctgctgagttgaacaagaggtctttcaagtatgcctgggtgcttgataagctaaggctgagcgtgaaagacgatcacaattgatattg

SEQ ID NO: 174693 - DNA, 265 bp, Glycine max
caaaatatgatttcttttaggatgctgttactccattgtctgaagcagaagcagttgatctggtcaaaactgtctttgcatctgcaactgagagagatatatacaccggagataaggttgaaatcgtcatcctaaatgccagtggtattcatcgtgaatacatggacctaaggtaagactaatgctttacaggaaattgttgttggagatacctgtcttggattgagaatgtttaaaatgcctctaaaattttaaatgacgtagt

SEQ ID NO: 174694 - DNA, 264 bp, Glycine max
ctgaaactgaaagcgaagaaagaaacagagttagagaattgaatgtgaatggggaatcagaagcagaagtggacgcaggacgaagaagacgctctcatagccggcgttgaaaagcacggccccggaaagtggaagaacattctcaaggatccccaattcgccccttttctcacttcccgttccaacatcgacctcaaggataaatggcgcaatttgagcgtcacaacggtgctcaaggctccaaagaaaaatctagggttccca

SEQ ID NO: 174695 - DNA, 264 bp, Glycine max
ttccaatatgggcaacagaattgttatgggaaattcccttctctttatctctttcttcatcttcagctttagtttcttggaggctcaaaaggctccagcagtttatgtgtttggagactcacttgttgatgttggcaacaacaattacttgagtctctccattgaaaaggcaattcttcctcactatggcattgattttccaactaagaaacccactgggagatttagcaatggcaagaatgctgcagatttaattgctgaaaa

SEQ ID NO: 174696 - DNA, 262 bp, Glycine max
aacggaacttgtgattaaacggtgcgttttagtaagaggaaggtcctcttcaatcctgtctttttcatcgtggatctgcgctagggctccgtaatcagacacctttttcctcttacttcatttaacctcacaacaatcaagttttgaatggcaactgtgagaagtctgaagatcaagacaagtacctgcaaacgtatagtgaaggagctgcattcttatgagaaggaagttgagagagaagctgccaaaacagctgatatga

SEQ ID NO: 174697 - DNA, 266 bp, Glycine max
aacgactctatctctcttcgttttgttcttccttgcgctcctcctcgttcgttcgttctccctcgcgtagatcggcaatggcggagaccgagacgtttgctttccaggctgagatcaaccagctcctcagtctcatcatcaacaccttctactccaacaaggaaatcttccttcgtgaactcatcagcaacgcctctgatgctttggacaagattagatttgagagtttgacggacaagagcaagctcgatgctcagccagagttg

SEQ ID NO: 174698 - DNA, 263 bp, Glycine max
gtcgaagagaggacgcggtggttcggcggggaacaagttccggatgtcgctgggtctgccggtggcggcgacggtgaactgcgccgacaatacgggggcgaagaacctctacatcatatcggtgaaagggatcaaagggcgtttgaaccgtctcccctcggcttgcgttggcgacatggtgatggccaccgtgaagaaggggaaacccgatctgaggaagaaggttttgccagctgtcattgttcgccagcgcaaccatggcg

SEQ ID NO: 174699 - DNA, 263 bp, Glycine max
aagacaacaaccacagatgacaaaaggcttcagagcaccctgaagagaataggggtgaatgccatccctgctattgaagaggtcaatatctttaaggatgacgtagttatccagtttctaaatcccaaagttcaagcatccattgctgctaatacttgggttgtcagtggttcaccgcaaacaaagaagttgcaggatatactccctagcattatccaccattaggaccagataacttggaaaacctgaagaagctagccgag

SEQ ID NO: 174700 - DNA, 265 bp, Glycine max
attccccccctctctcaagtctcaaccatgtcttccggaaccctagaaaacgagaaacctcaagtggaagaagaacaagcccaagctgaagacaaccacaccaagcaagaagataattcggagatgaaagacgacgatgacagaggcgaagaggaaagggatcaggtagaacaagagaaggatgtggagaaagaggaagaaaaagaagaagaagaagaagagaaggaggaggaccgtgacgaggtgaagtcaaaaaagtcaacga

SEQ ID NO: 174701 - DNA, 257 bp, Glycine max
ctgaaactgaaagcgaagaaagatacagagttagagaattgaatgtgaatggggaatcagaagcagaagtggacgcaggacgaagaagacgctctcatagccggcgttgaaaagcacggccccggaaagtggaagaacattctcaaggatccccaattcgccccttttctcacttcccgttccaacatcgacctcaaggataaatggcgcaatttgagcgtcacaacggtgctcaaggctccaaagataaatctagg

SEQ ID NO: 174702 - DNA, 263 bp, Glycine max
ctctctctctctcacccagatcttgtagcaatggcgagcgctcccactccacgcgaagagttcgtgtacatggcgaagtgtgcggagcaggccgagcgctacgaggagatggtggagtccatggagaaggtctccgcctccgccgagagcgaggagctgaccgtggaggagcgtaacctcctctccgtcgcctacaagaacgtgatcggcgctcgccgcgcctcctggcgcatcatctcctcaatccaccagaaggaggagag

SEQ ID NO: 174703 - DNA, 264 bp, Glycine max
aaagcaccgtctccgtctccactctcggcttcttcttcgttgcgctttttcccaaaaccaattgcatcactctcgtccgttaccgccgctgccctagaccaccgcaagcgacgtcgcacaccgccttcatccgttagggcaaaaatgagtcgaggaagtggaggtggatacgatcgtcacatcactattttctcccctgaaggacgtctctttcaagtggagtatgctttcaaggctgtgaaggctgcaggaatcacctcgatt

SEQ ID NO: 174704 - DNA, 255 bp, Glycine max
ctcagaaccttctgaggttaaagcaaaaaacaaagagagagagagagagaaaatgatgaagccatcgatgctcagatctctccactccgccgccacccgcggcgcctctcatctcttccgccgtgggtacgcctccgagccggtgccggagcgcaaggtagccgttctcggcgccgccggcgggatcgggcagcctctctcccttctcatgaagctcaatcccctcgtttcgagcctctccctttacgatatcgc

SEQ ID NO: 174705 - DNA, 258 bp, Glycine max
gttaggttctgcacgctctgcttccagcgagtgttctttcttcgtttcaacaccttaatttgcacacgctgcttcttcagcttgagaaatggcacaagaaacctttctattcacatctgaatctgtaaacgagggtcaccccgacaagctgtgcgaccagatctctgatgcagtgctcgatgcgtgccttgaacaggaccctgacagcaaggttgcctgtgagacatgcaccaagaccaacatggtcatggtctttgg

SEQ ID NO: 174706 - DNA, 264 bp, Glycine max
atactcctgatatcagaaaaagaaaaaagaaaaaaatgtctctagtgactgcagagatcaaagccaaagcagaggtgtatcatggagatgaactctgccaagagaagtcaaagttgctgctaaaggaggtagggctacctaatgggcttttgccattgaaggacattgaggaatgtgggtatgagagggatagtgggtttgtgtggctgaagcagaagaagagcacaaaccacaagtttgagaagattgggaagctggtttcct

SEQ ID NO: 174707 - DNA, 260 bp, Glycine max
cgcgcatagtgtggtagcagcagcagagcttgtatacgtcgccgcttcagcgtagcaacatgatcattcccgagaagaaccgtaaagagatctgcaaatacctcttccaagagggagtttgctttgcgaagaaggacttcaatctggcgaacacccggagattgatgtgccgaatctgcaggtgataaagctgatgcagagcttcaaatccagagagtacgtgagggaaacatttgcgtggatgcactattactggttcc

SEQ ID NO: 174708 - DNA, 258 bp, Glycine max
cttggaaggtaaaaaccggcttctggtttatgagttcatgcaaaaaggaagtttggagaatcatttattcagaaaaggtgttcaacctatggcctgggttacaagggtcaacattgcaattggtgttgcaagaggattaacattcttacattccctggatcaaaatgttatctttcgtgatttaaaggcttccaatatcctacttgattcggacttcaatgcaaagctttcggatttcggcttggcaagagatggtcc

SEQ ID NO: 174709 - DNA, 260 bp, Glycine max
ttaaacatgaagctatctgatgatgttgatttagagagaattgcaaaagatactcatgggtatgttggtgctgaccttgctgccctttgcactgaagctgctttgcaatgcattagggagaagatggatgtaattgacttggaggatgagactattgatgcagaagtactgaattccatggcagttacaaatgagcatttccagactgcccttggaacaagcaacccatcagctttacgtgaaactgttgttgaagtgcc

SEQ ID NO: 174710 - DNA, 260 bp, Glycine max
cttgagagcaaggagctccaatatgatcaaaataatggaattcatgtcttggaagctttcccaaacaatgtggatgtgggaacttatgcgtttgtttttgagattgcacttcatgattctgctggtgaaaaagtttatgctactggaggccaaattcatgtaccaatatatgtcactggcattatcaaagtcagcaatgcggaaattgctgttcttgacagtgatcttggaagtgttgaaacccaaaaaacgctagattt

SEQ ID NO: 174711 - DNA, 262 bp, Glycine max
cggctgcataggcatagactagagagagagttgcaatggccgtttctttggcagtgaaccgtcctctgcttggtcttcacgagaatgtaccattagctgttgctcatccccaattcctcccgttcaaatggccacccaagtccaaactcccctccgtcgtcggaattcgatgctcctcctcccctttcaacgacaaaaccctcatttccatcacacctaacacttcccacctcaatcccaaccctctcgcttgtcgctttca

SEQ ID NO: 174712 - DNA, 262 bp, Glycine max
aatcttaaaaatattcagtgaagatcaacctctatggcatctcttggcgtgcgaccagttcttccccctccattaacttccatctccgacccacctcctcttttcgatggcaccaccaggttgtacatcagttattcttgcccctatgcacaacgtgtgtggatcgctaggaactacaaggggctacaagataagatcaatttggtccctattaaccttcaagacaggccagcttggtataaggagaaagtctaccctgaaa

SEQ ID NO: 174713 - DNA, 261 bp, Glycine max
aaacaaatggctatatattcatccatgctgaaggtcttctaaatcagcaaagaattgcgatatgcaatgctttggctgtggcaaaaatattaaatgccactcttattttgcctgttttgaagcaggaccagatttggaaagaccaaacgaaatttgaagacatttttgatgtggatcacttcattgactacctgaagtatgatgttcgtattgtccgtgatatcccagaatggtttaccgataaatcagagctatttacta

SEQ ID NO: 174714 - DNA, 259 bp, Glycine max
cgtcaagaagggtaaggtcgagcgagtcaggttcagcaaagacggttctgccctccaactaaccgcggttgacggccgtcgcgcctccgttattgtccccaatgacccggacctcatcgacatcctcgccatgaacggcgtcgacatttccgtcgcggaaggcgaatcccccaacagcttgttcaacatcgttggcaacttgctcttccccttgctcgcgttcgcgggtttgttcttcctcttccggagagctcaaggg

SEQ ID NO: 174715 - DNA, 258 bp, Glycine max
aagaaagctacctagagcttgcacctattggtatcttctacaatatcctctcatagtgctcttcttcttcttcattttcattatcaagatgtctttgctttcggatctcatcaacctcaatctctcagaatccacagaaaagatcgttgctgagtacatatgggttggtggatctggtatggacctcagaagcaaagccaggactcttcctgggccagtgagtgaccctgcaaagcttccaaagtggaactacgatgg

SEQ ID NO: 174716 - DNA, 258 bp, Glycine max
  unsure (1)..(258): unsure at all n locations
tgtcgagccgaatcggctcagtgataagccagaagtggtggtaaggggtagcaagagtgnaaaacacaaggaagatgatcaagaggaggggaagggtggattcattgagaaggtgaaggatttcattcatgacattggtgagaagattgaggaagctattgggtttgggaagccaactgctgacgttactgcgattcacattccatcgattaatcttcacaaggcagatcttgttgttgatgtgctcatcaagaaccc

SEQ ID NO: 174717 - DNA, 261 bp, Glycine max
atcggttccattccctgcatttttctagctccttctctcatcactcatctatggctacctttccctcccctccttcaccatcttcttcttcttcaattccgtctccaagatctagaatgttttactatgctggaagtgaagaccactatgaggagcctcacttcctccaagcttgttttctttgcagaaaaccactaggccaaaatcgtgacatcttcatgtacagagggaacacaccattttgtagcaaagagtgcagac

SEQ ID NO: 174718 - DNA, 259 bp, Glycine max
gatcgatcgatggctcttgtaggagttgaactgaagcatgcggcggagggcgtaccggaggagaattgctccgccaagcccaccaagcagggcgagggcctccgccactactattctctcaacatccacgagcatcagctccttcttcgccaaaagactcataacctcaaccgtctcgaggctcagagaaacgacctcaattctagggtgaggatgctgcgcgaagaattacagcttctgcaggaacccggctcttatg

SEQ ID NO: 174719 - DNA, 261 bp, Glycine max
agagagagagcttcgaatcgaaactcagaagtagaaagaaacacaaatcacaatcgctatggctaggtacgaccgagcaatcaccgtgttctcccctgacggccatctcttccaggtcgagtacgccctcgaagccgtccgcaagggcaacgccgccgtcggcgtccgcggcaccgacaatgttgtcctcggcgtcgagaagaaatccaccgccaaactccaagactccaggtcggtgaggaagatagtgaatctggacga

SEQ ID NO: 174720 - DNA, 258 bp, Glycine max
cttgctttagccatcactaacactcagtctctgaattggggctgagggtttcgagtaacgtttatttttcacgagtttaagatatcatgggtaaagagaaggttcacattaacattgtggacattggccatgttgactctgggaagtcaaccaccactggccacttgatttacaagcttggaggtattgacaagcgtgttattgagaggtttgagaaagaagctgctgagatgaacaagaggtcattcaaatacgcct

SEQ ID NO: 174721 - DNA, 258 bp, Glycine max
cgaatttgctacaattaacataatagtagaatcccttttccaacctttcttatcctcagatcggatcagatcagaatcacaccgtcatggagttcatgaaggtcttcgatcaaaccgttcgagcgatatagagagaggtgaatctgtaggtgctcaaggttccggagatcgtacagaaggtgcttgatacaactgataatgaaccttggggtcctcatggcactgtgctggcagagatttcacaggctaccaaaaatt

SEQ ID NO: 174722 - DNA, 256 bp, Glycine max
aaaaatcatccctctcggtttgatgttcttctgcatcctgttcaattacacgattctgagagacacaaaggatgttctggttataactgccagagggagcagtgcggagattataccctttctcaaaacgtgggtgaaccttcccatggccgttgggttcatgttgttgtacacaaagttgtccaatgttttgtcaaagcaagctcttttctacaccgtgattcttccattcattgctttctttggggctttcggg

SEQ ID NO: 174723 - DNA, 249 bp, Glycine max
aatcttaaaaatattcagtgaagatcaacctcaatggcatctcttggcgtgcgaccagttcttccccctccattaacttccatctccgacccacctcctcttttcgatggcaccaccaggttgtacatcagttattcttgcccctatgcacaacgtgtgtggatcgctaggaactacaaggggctacaagataagatcaatttggtccctattacccttcaaaacaggccatcttggtataaggagaaa

SEQ ID NO: 174724 - DNA, 258 bp, Glycine max
taaaattcctaatcagaaaaaaaaaaaccctagtaatgccgccgatggggaggaagcgaaaggtagcacccaaatcttctctatccaccgagccacctctcaagcagcaacaaccaaaacccgaaaatccccctcaagaatacgaagaagtcgaagaggaagttgaggaagaagaggtagaggaagaggtcgaagaggaagaagaagaagaagaggaggacgaggaagaagaggaggaggaagaagaagaagaagaag

SEQ ID NO: 174725 - DNA, 255 bp, Glycine max
caacatcgaaatttccccattgtccgcttccgcaacgaaataactctaccgtgccctacgataaggggtttctcagagcaggagcaatgtcttccccttatctacctgctacaactgactcacttgctctcgcaactgaggccaaagacccatctgaggccatctccattctttatcgggtgcttgatgatccttcttcttcaccagatgctctgggcatgaaagagcaagcaatcacaaacctcactaagcttc

SEQ ID NO: 174726 - DNA, 255 bp, Glycine max
caagtgtttcgaatagattatcctaagtctttgggaatagtgctgcaatggcttcaagtcaggaggaggtgacccttttgggagctactggaagcccatttgtgtgcagggttcatattgccctcaagttgaagggagttcaatacaaatatgtcgaagaaaatttgaggaacaagagtgaactgcttctcaaatccaacccagttcacaagaaggttccagtgtttattcacaatgagaagcccatagcagagt

SEQ ID NO: 174727 - DNA, 256 bp, Glycine max
caccaatagaccttttctttgggttgtgcgtcaagacaacaagagggtataccctaatgaattcttggggtgtaaaggtaagattgtgagttgggctcctcaacaaaaggtgctaagccaccctgctatagcatgttttgtcacccattgtggttggaattctaccatagaaggtgtgtccaatgggttgcctctcttgtgttggccatattttggcgaccaaatatgtaacaaaacgtacatttgtgatgagttg

SEQ ID NO: 174728 - DNA, 253 bp, Glycine max
tgttcctcgggttcttgcatgctttagcaataatcttctcagaggagagcccctcaagcttgtggacggtggccagtcccagagaacctttgtttacattaaagatgctattgaagctgtcttgctgatgattgaaaaccctgccagggccaatggccacatatttaatgtgggtaacccaaacaatgaggttactgttaggcagcttgctgaaataatgattaaggtttattcaaaggtaagtggcgaacaa

SEQ ID NO: 174729 - DNA, 253 bp, Glycine max
ctcgagaattctttttgttgaactcacttctctcttgttcgccacgcactcttgtctctgcaagttgtctgggttgctcgtagaccaccaggatatgcatttattgagtttgatgatcggagggatgcacttgatgcaattcaggccttggatggaaaaaatggttggcgtgtagagctttctcataattccaagggtggtggccgaggagggcgtgggcgtggaggtgaaggcacaaaatgctatgaatgtg

SEQ ID NO: 174730 - DNA, 252 bp, Glycine max
atctcatttgaatacattccttgtagtttatactgaaagatgggtttgaagatggcgttactgatcctaggcctttccctcatgctccttttggtctcctctgaggtggcatccacgaatacaaaagaggaggcaaatggagtggatgatgccaaatatcccggtggaagctatggagggggttacccaggtcatggcggtggcggttatcctggccatggcggtggcggttatcctggccatggcggtggt

SEQ ID NO: 174731 - DNA, 255 bp, Glycine max
gttcaggaaggcgcagtgccccattgttgagagactcaccaactctctcatgatgcacggaaggaacaatggaaagaagctcatggctgtcaggattatcaagcatgcaatggaaattattcacttgctcactgacctgaacccaattcaggtcattgttgatgccgtcatcaatagtggtccccgtgaagatgcaactagaattggttctgctggagtggtgaggagacaggccgttgatatctcaccccttag

SEQ ID NO: 174732 - DNA, 243 bp, Glycine max
ttcaaacaaccttcattatttttctgtgaacctgtctttcaagtttataacttgatcagtatgcagtatccaaatcataagggtagttgcaaattgcaatcgctacgcatgatgttcagggtggatccttctctgcaaaggactaccatgatcctcctcgagcaccgttgattgatgctgaggaactcacacagtggtccttctacagggatttgattgctgagctcattgcgacaatgatct

SEQ ID NO: 174733 - DNA, 251 bp, Glycine max
cccacatgcaaagctaccatggatttgtctgctactgcaacatctgcctcacccgtctttgttgctgctccagcagagaaaggccattttcttttagactttctcatgggaggtgtttcagcagctgtctccaaaactgctgctgctcccattgaacgtgttaagcttttgatccagaaccaggatgagatgatcaaaactggtaggctttctgagccctacaaaggtattggtgattgtttcaagagaac

SEQ ID NO: 174734 - DNA, 252 bp, Glycine max
tctcgagcgaatcggctcgagtatggctatgcaagaatgtaaggtggtgtgtcattagactccttcctgaagtacataactgtgcagtctctttcggaggaaggtctaagaaggcttgggccatatgtagcaaccatggctgaagttgaaggccttgaagcccacaagagagcagttaccttgagacttcaggacatagaagccaggcaggtttcaagatgagatgatgcctcaattcattgttctctttat

SEQ ID NO: 174735 - DNA, 254 bp, Glycine max
caacaaaatgctttcatgtgctggagctgataggcttcagactggaatgagaggtgcatttggaaagccacagggaacatgtgctagagtcgccattggtcaggttcttctttctgtccgctgcaaggacagcaacagtcatcatgcacaggaggctcttcgtcgtgctaagtttaagttccctggtcgtcagaagatcatagttagccggaaatggggtttcaccaagtttagccgtgctgattatctcaagt

SEQ ID NO: 174736 - DNA, 244 bp, Glycine max
gcactggtggggaggaagcttccttatttgcgatggatatctttagaatgtatgagaagtatgctctcaagaatggctggacatttgaagtagtagatatagctcaatctgatcttaaaggatacaatgtacatgtttcatatattaatgcgcaataaatatgacctgattttcagtgctttacaagtgttttgaaatattgattgtggcatccaccatgcattgcaaccttctgttagcaaga

SEQ ID NO: 174737 - DNA, 252 bp, Glycine max
tccaaacaaccttctttctttttctgtgagcctttctttcaggtttttaacttgatcagtgtgcagtgtccaaatcataagggtagttgcaaattgcaatggctaagcatgatgttgagggtggttccttctctgcaaaggactaccatgatcctcggccagcaccgttgattgatgctgaggaactcacacagtggtccttctacagggctttgattgctgagttcattgccacaatgctcttcctttaca

SEQ ID NO: 174738 - DNA, 252 bp, Glycine max
  unsure (1)..(252): unsure at all n locations
atcgcgcccaagagagagagagagagagagaggcgcgaaaatgagcggacgnatggggaagaagaagggagcgagctttgtgatcgattgcgcgaaccggtggaggataaaattatggacattgcttctctggagaagttccttcaggagaggattaaggttggcggcaaggccggtgcactcggcgattccattactgtcactagggacaagagcaagatcaccgtcacctccgacagcaacttctctaaa

SEQ ID NO: 174739 - DNA, 249 bp, Glycine max
tgcctcctttgactttgtggctggtgctgccttttctcgtgttgctagcggcggcaacaacgtctccaacacgcgccacgacggtcgcctcgtcgttccacggtcaacgagagtttgactatttcgctttcgcgttgcaatggcccggcacttactgcaaacgcacccgcagttgccgccccaccaacggttgctgcagaggctccaattttccaacagtgttcaccatacatggactctggcctgact

SEQ ID NO: 174740 - DNA, 287 bp, Glycine max
cgaaaaaatgagactgttcgatccatggcctgtattcttcaagcgagaatggaagcgtaactggcccttcttggttggattcgccgtcaccggaactctcatcaccaaactttctcttggtctctctgctaacgtccttctcctcctccttcttcgccaacctccaaaattggatttttgttctgagtctgatttcccttttcgcagaggaggaagccacaaagtcaaaattcgtccaggcacacaagaggtgactttggaatggaagatttgcagtgactttgcac

SEQ ID NO: 174741 - DNA, 284 bp, Glycine max
ccactgtgtgctctctgtgtggtgtggtcgctcactgcaacaacaacaacaacaacaacgaacgccaacgcaaacgcaaacgcgaataagagcgagaacattctcttcagctcaacccttttctttttcgatggctaatcggcacacgattattctaatgcagacctcgcagaacagagcaactaggacgttcatggattatgaatccataactcaggccatggatggcatatgtgcactgtatgaaaggaaactgaaggagttgaatccggctatcagaaatc

SEQ ID NO: 174742 - DNA, 281 bp, Glycine max
tcgagcggtcatcatccgcagctgctgttattcgcaccgcaaacaaacagtgagccatggccgtcggaaagaacaagcgcatctccaaagggaaaaagggtggcaagaagaaggcagctgatccctttgccaagaaggattggtatgacattaaggccccttctctttttcaagtgaaaaatgttggcaaaaccctcgtctctcgtacgcagggtaccaagattgcttctgaaggacttaaacatagagtgtttgaggtctccttggctgatcttcaaggg

SEQ ID NO: 174743 - DNA, 283 bp, Glycine max
caattattatcataatttctgtgttctgtttctgttctcttctaagtaactatttggaaacctctctttctatttctctctctagaaagtcccagccagccaggtaggggtgaagaagaatggatgctataaggaagcaagcaagtaaattgagggagcaagttgccaggcaacagcaggttatacttagacagttgggccaaattagcaatgaaccgctcatgattgatgaatccgaaattgaatgtcaccagcaacttcaaaagttgtacacttcgacaaa

SEQ ID NO: 174744 - DNA, 283 bp, Glycine max
tagcattcccgaccagagtgctatcaccaaggacaatgtcaccatcatcattgacggcgtcctttatgtcaagattgtggatcctaagctggcgtcttatggggtggagaatcccatttatgctgtgattcagctggcacagacaacaatgcgtagtgagcttggtaagattactcttgacaagacctttgaggaaagggacacactcaatgaaaagattgtggaggccattaatatggctgcaaaaagttggggtctggagtgccttcgatatgaaataagg

SEQ ID NO: 174745 - DNA, 275 bp, Glycine max
caccgaacaaacacaaacatggatgcatccaaactcaatcaattgaagcatttcatcgaacagtgcaagtccaacccttccctcctctccgatccttcactctccttcttccgcgactatctcgaaagtctcggggcgaaactccctgaatctgcttattccgaatcgacgggcgtggagagcgatgaggacatagaagatgttacggaggagcaagagaaggtagaagaagaagaagaagatgatgaaataattgaatccgatgttgagctcga

SEQ ID NO: 174746 - DNA, 256 bp, Glycine max
attcacccttttgcaccaattgaacaggctcaaggttatcaggaaatgtttgatcatttgggtaaactgttgtgtacaatcaccgggttttattccttctctttgctacctaatgctggtgctgctggagaatatgctggactgatggttattcgtgcatatcatttggcaagaggagaccaccatcgcaatgtctgcattatacccgtctcagcacatggtacaaatcctgccagtgctgctatgtgtgcaatga

SEQ ID NO: 174747 - DNA, 259 bp, Glycine max
tcgagatacttgaaatggttgaatctttattttaaagtggcgccctgtttagtatcatcatcaccacagataaattttgggcttagtttcattttaggtgcactctgttttcagtattttcttttttcttccttttaagaaaaggaaaagattatttgcttcaggggtgtagatcttctcctgtttttggagactcgagtgtttgagctagttgaagttgtacaattatttttctattaatggattctgtttttaacgc

SEQ ID NO: 174748 - DNA, 223 bp, Glycine max
cagcgatgggaatcgatcttaaggctgggggtaagagcaaaaagaccaaaagaacagcaccaaaatccaatgacatctacctcaaattacttgtcaagctttatcggttccttgttcgaaggactggcagcaatttcaatgctgttatactcaagcgcttgttcatgagcaaggttaacaagcctccaatttctttgtcaaggttaattaagtatacaaaggg

SEQ ID NO: 174749 - DNA, 282 bp, Glycine max
cgctctgtttctgtctctgtgtttgcggctgaggattccgaacgagcgaccttcttcgtttctcgcaaagtttaagtcatcatgggtaaggaaaagactcacatcaacattgtcgtcattggacatgtcgactctgggaagtcaactaccactggtcatttgatctacaagcttggaggtattgacaagcgtgtgattgagaggttcgagaaggaggctgctgagatgaacaagaggtcattcaagtatgcctgggtgcttgacaagctcagggctgagcgc

SEQ ID NO: 174750 - DNA, 284 bp, Glycine max
tacatttctaatctcattctccttctgttcaaacactctcatggcatcagataagaagattaggatcggcatcaacggatttggaaggattggccgtttggtggccagggttgcccttcaaaggaatgatgttgaacttgttgctgtcaacgatcctttcatcaccactgattacatgacatacatgttcaagtacgacaccgttcatggccagtggaagcattttgatgtgaaggtgaaggactctaagacccttctctttggtgagaagcccgtcaccgttt

SEQ ID NO: 174751 - DNA, 284 bp, Glycine max
tggaagatgggaaagtcccacctgggtcactctgcatgatctcgcataaggaaaaggaggtactcaatgctctagacgatgccggctttccagcaaacgatgaggaggttcagcaagaagtggttgcaatgtctaaaacaaatatatttaggcccgggattgatgttacacaggcagttcttttgcctcagttgacttggaggcgacaggagaaaacagaaatggtagggccttggaaagctaaggtgtatgatatgcacaatgtagttgtgagcataaaatct

SEQ ID NO: 174752 - DNA, 262 bp, Glycine max
gctggtggttgctgatgactgctctctgatcgctagcgaacactacagatttcagccaacgaaggaacaggttttctgaacatactctgacaaccagcctggcgtgttgatataggtctttgaaggtggcagaggaaggactaacgataaccattggttgggccgatttgaactttctggccttcgtcctgcccccatgggtgttcctcagattactgtgtgcttggacattggtgccagtggtattgtgaacgtctctgcc

SEQ ID NO: 174753 - DNA, 282 bp, Glycine max
  unsure (1)..(282): unsure at all n locations
gcaaatggcttctcacgacagcatctccgcttctccaacctccgcttctgattccgtcttcaatcacctcgttcgtgctcccgaagatcctatcctcggggtaactgtcgcttataacaaagatccaagtccagttaagctcaacttgggagttggtgcttaccgaactgaggaaggaaaacctcttgttttgaatgtagtgaggcgagttgaacagcaactcataaatgacgtgtcacgcaacaaggaatatattccgatcgttgggttgctgatttnaat

SEQ ID NO: 174754 - DNA, 287 bp, Glycine max
tccaattccattcattcgttcattcccaggttgtgatggcagcagcaccagcagctaccttcgctattggaaccaccggttccctcggccaaagaggaagctcgcttcctcaatcaaagtcctttgggttgaaattcaactctctgaatcatttgaagagcttctgtggcctcaaggccatgtcatccgtgagatgtgagtcggaatcctccttcttcggtaacaaaaccggtgctgctctacgggcgtcttttgcatccaaagctcaaaaggaaaacaaccacaac

SEQ ID NO: 174755 - DNA, 282 bp, Glycine max
gagagagcaaaaccctagagcatccatcacaagcagaggaagaagatggtgaagttcctgaagcctaacaaggcagtgatcgtcctgcagggccgctacgccgggcgcaaggcggtgatcgtgaggtccttcgacgagggaaccagggagcgcccctacggccactgcctcgtcgccggaataaagaagtacccaagcaaggtcatcaagaaggactccgcgaagaagaccgcgaagaaatctagggttaaggccttcgtgaagctcgtgaactaccagcac

SEQ ID NO: 174756 - DNA, 280 bp, Glycine max
cgagtcttccagtgaaagaaaggcagcgatggaagaagacttcgacatccccggcggcgaggaaatggatctcggcgaagacgaggtcggcgaggagagggagatcggctctggcggcctcaagaagaagctcctcaaggaaggtcaaggctgggaaacccccgaagtcggtgacgaagtccaagttcattacacggggactttgctcgacgggactaagttcgattcgagccgcgacagggattctcccttcagcttcacgctcggacaagggcaagta

SEQ ID NO: 174757 - DNA, 281 bp, Glycine max
agccgtcaaagctgccgtttcacgccacggcaagctcgacatcctcttcagtaacgccggaatcggtggcaattcggactcctccatcatcgcccttgatcctgctgacttgaagagggtttttgaagtcaacgtcttcggcgctttctacgccgccaaacacgccgctgaaataatgattcctagaaagatagggagcattgtgttcacgtctagcgctgtttcggtgactcatccgggttcgccgcacccatacacggcgtcgaagtacgcagtggtgg

SEQ ID NO: 174758 - DNA, 284 bp, Glycine max
agtatttaaagaagcagcaaaaaaattcaaggggaagctgatctttgttcatgtggaattggataatgaagatgtaggaaagcctgttgcagattattttggtatcactgggaatggtcccaaagtacttgcatatacaggaaacgatgatggaagaaaatttttgcttgatgaggagctgactgttgacacaattacggcatttgggaatgatttccttgaagaaaagctaaaacctttcctcaagtctgatccagttcctgaaagtaatgacggtgatgtga

SEQ ID NO: 174759 - DNA, 282 bp, Glycine max
ctaactaaagccgagcagcgagagagagaaaccctagcaaaaatgccggctggtcacggtttgagatcccgcaccagagattccttctctcgtcccttcaggaagaagggtaccatcgccctcaccacatacctcagaacctaccacgtcggcgattatgtcgacgtcaaggttaacggcgccgtccacaagggaatgcctcacaagttctaccatggccgcaccggtcgcgtctggaatgtcaccaaacgtgctgttggggtcgaagtcaacaagcaggtc

SEQ ID NO: 174760 - DNA, 281 bp, Glycine max
cgaatatcttgttgtttggagcgatccgagaaaaactctgtaaacatgttggtttaccaggacctccttacaggtgatgagcttctctctgactccttccgttacaaggaaattgagaatggaatgctgtgggaagttgaggggaagtgggttgttaaaggagcagttgatgtagacattggtgcaaacccttctgctgagggtggaggagaagatgagggagttgatgatgcagctgttaaggttgttgacattgttgacacattcagacttcaggagca

SEQ ID NO: 174761 - DNA, 282 bp, Glycine max
ttcagagagagatgattttactgctaaacttcaggaagtggaagattggactttatggtgagggtgaagatgaaactaaaggtgtatatactgccaagcttgaggaactcaaaaagcatggtgatccaattgatgagcgttacaaagaattcatggagaggggtactataatcgaacagtttgtctattgtataaatagttacagacaagttgcaatgtcgaatgatcccagatttgagcacattgacattaacgagaaacagaaggtcataaatgaatgtg

SEQ ID NO: 174762 - DNA, 277 bp, Glycine max
gacaaatcatatggttgtgtcttccaagaagaagatgagaagaaaacaattggtgtggcactctcaaaggacttaatggctgttgcaggagaagccctcaagaccaacatcacaacacttggcccattagtccttcccatgtcagagcagcttcttttttttgcaactttggtggctagaaaagtgtttaagatgaaaataaagccatacatccctgactttaagctagcttttgagcacttttgcatccatgctggaggaagagcagtgttggatg

SEQ ID NO: 174763 - DNA, 283 bp, Glycine max
ctcaaactttgtaacttcaaaacatactcctctgttctctctgtttctcttcaatcttcctgaaaaaacaaaaacacgaaaaatcatccaccctctcacattctctctctctctcctttcaactaatatggcaattgaaaaccaagacaacactgtcagagaaatcaagccaaagaacaggagaatcatgggtgctggaggccctgatgatgacgacaataggtggccaccgtggttgaagccactgctgaaagagagcttctttgttcaatgcaagttgcat

SEQ ID NO: 174764 - DNA, 140 bp, Glycine max
atgagaacaagataaagaggcgcaagatgagtggtagggtttctgggaaggtgaagtggttcaatgatcagaaggggtttggattcataagccctgacgatggcagcgacgatctcttcggtcaccaatctcagatcaaa

SEQ ID NO: 174765 - DNA, 263 bp, Glycine max
atataagtgaggtctaaagtgaagtcatctactaatcaatcctgtggtgaatgacaaccatttttgtatactcctggcagctcagtagtttgtttggtataatttttgttttcatttttatgcattttgtagctttatacatcctttattattatttaatgggattcgttccatctttcgggacttgagtggataaaaaaaaaggaagaaaaaaaggtaaatgaagaagaagaacatgatggaataattgaacccgatgttga

SEQ ID NO: 174766 - DNA, 277 bp, Glycine max
gtcaattccaacaacaccacaatgggaagaagaccggcgaggtgttaccggcagataaagaacaaaccgtacccgaaatcccgtttctgccgcggcgtgccggagccgaagatccgaatctacgacgtgggaatgaagaagaaaggcgtggacgagttcccgttctgcgtgcacctggtctcgtgggagaaggagaacgtctccagcgaggctttggaggcggcgcgcatcgcatgcaacaagtacatggccaagttcgccggaaaagatgccttcc

SEQ ID NO: 174767 - DNA, 276 bp, Glycine max
  unsure (1)..(276): unsure at all n locations
ctttganatcaaggctgtaaaggagattgagcctgcattgangnaacanctcatcatttccactgccttgatgactattgggattgcaattgttagttggattgcactcccaacttccttcactatcttcaatttnggagtgcagaaagatgtcaagaattggcagctattcttgtgtgttgctgttggtctttgggcagggcttattattggatttgtaactgagtactatnctngcaatgcatatagtccggtgcaagacgttgcagacnccnc

SEQ ID NO: 174768 - DNA, 266 bp, Glycine max
ggccgcgcgactctgttgaccagaaaaaccctagccaccgtgctccgcaacgacgcgaacccataatcggagttggcataacagcagcggctactcattcacgcgggttgcacgtgtacacgctacccgatctggattacgactatggcgcactggagccagccatcagcggcgacatcatgcagctgcaccaccagaagcaccaccagacttacatcaccaactacaacaaggccctcgagcagctccaagacgccatcgccaag

SEQ ID NO: 174769 - DNA, 230 bp, Glycine max
aaattttctagggtttatacaatttcagatggcttcttcagatgttgagtaccgtcgctttgtcggtgggctcgcttgggccactgacgaccaagctctcgagagagccttctctcagtacggcgaaatcgctgaaacgaagattaccaacgatcgtgagagcggaagatcaaggggctctggattcgtgaccttcgccacggagcagtccatgggagacgccatctaag

SEQ ID NO: 174770 - DNA, 278 bp, Glycine max
caacacttgccccgttgcatacaaaacccgatgttcgttctcatatcatgcttggaattccaaagcatgaggaagctccatcaaccccacaacgtcctctttcagcaatgggtgaggcttgttcaagaatggacctaactgcaatacatcagatcttggttgcgacacactacagagacgatgaaggaactaatgagttgtcttttcaagagtggactcaacagatgagagatatgctggaagcaaggaagcgcggagaccatgcattccgtgacaag

SEQ ID NO: 174771 - DNA, 279 bp, Glycine max
ccggtttaccggctcagcgtattcgaaccgaaaacgggttcatggagcgagttacccttgggacccgaaatcgccttcgggttacccatgttctgtcggatagcgggtgtcgggttcgaccttgtcgtaatgggcgggtgggacccagactcgtggaaagcgtcgaattcggtttttatctacaacttcctgtcggccaagtggcggcgtggggccgacatgccgggtgggccccgcacgtttttcgcatgcgcgtcggatcagaacaatcaaacggtg

SEQ ID NO: 174772 - DNA, 278 bp, Glycine max
  unsure (1)..(278): unsure at all n locations
ctccctctttctcgtcactagctctgtgcattcttctctcgctctctgccttccatcacactcggcatttcctttcccaagatagtagaagatggcagacactgaggatattcaacctcttgtttgtgacaatggaacaggaatggttaaagctggatttactggagatgatgccccatgttctgtgntttccagcattgtaggttgttctcgtcacactggtgtgatggttggcatgggccaaaaagatgcatatgttggtgatgaggcacaatcta

SEQ ID NO: 174773 - DNA, 280 bp, Glycine max
tgaaaatgtggaagagaacgggttttgaagaagaagcagttcaattgatcaactcagatttcagggacctaagtctagctgctaatagactcgcccatcatgccatcaaacttggtggcattggctttggagcctcttttttcggattgtttgctgccattgctgctatttatctgttgattttggatcgtacaaactggaaaacaaatattctcacagcactactcattccatacattttcttcagcttgccttcattaattttcgacgtcttcagggg

SEQ ID NO: 174774 - DNA, 251 bp, Glycine max
aacactcataacacaaagcacaaagcaaagctcatccttgagttaaaaaatggcagcagcttcttccatggctctctcatccccatccttggctggcaaggccgtgaagctgggcccatcagccccagaagtgggaagggtgagactgaggaagaccgtcaccaagcaggtctcctcaggaagcccatggtacggcccagaccgagtcaagtacttgggcccattctctggcgagccccggtcctacctaa

SEQ ID NO: 174775 - DNA, 275 bp, Glycine max
ggcctcaaggcaagcgcaggcaaagtgagtgccgcagttaaagtctcagctccccaagccacaaggttgggcatcaaggcttcgctgaaagacgttggagtcgctgttgtggccactgccgcgagtgcagtgctggctagcaacgccatggccattgaagtgttgctgggtggtgatgacgggtctctggctttcgttcccaacaatttctccgtggcctctggggagaagatcgtgttcaagaacaacgcaggtttcccccacatcgttgtgtt

SEQ ID NO: 174776 - DNA, 277 bp, Glycine max
gtcaatggcggtacccttgctctccaacaagatcgtgaagaagcgcgtcaagaagtttatacgcccccagagtgatcgcaagatctccgtcaagccaagctggcgcagacccaacggaattgattctcgtgtcatgagacagttcataggatgcactttgatgcacaacatatcggttatggctcagacacagaaaacccgccattatctaccaaatggtctcaagaaatttgacgtgcacaatgtgaaagacctggaacttctcatgatgcataac

SEQ ID NO: 174777 - DNA, 280 bp, Glycine max
catgtcgcctagtttcatcttcgacccgcctagcgacgaagaaatcgaacactctgaacacgaagaagaagaagaatccgaagaagaaccagagtcaggatcaggaacaggatcagaatcagagtcagaaggagaaggagaagaagaagaagggcacgaagaagcgcgggttccgaagaagaagaagaagaaaacgcagtctccatgggactttgctaaatacacggaatcagtggcggaggaacacgctcgcaggagcacaacctcggtcgacgagaaa

SEQ ID NO: 174778 - DNA, 278 bp, Glycine max
atagaaaagaccatcaaagtttcacttcagccttatccggtttagggtttcggtttttgacccaacctttgacgtatcgaaaccttaagtttcggatcaggtctgagcaatctggttggtagaacctttggtcttagagagtcaagttttatgtctgaattagacgatcaaattcctactgccttcgatccttttgctgatgcaaatgctgatgactcgggtgctgggtcaaaggagtatgtgcatattcgcgtacagcagcgaaatggaaggaaaag

SEQ ID NO: 174779 - DNA, 276 bp, Glycine max
gttagatctgtacctgcctagccattgatttggaaaagtccaagcttcaaagatgagtaagcttcagagtgatgctcttagagaagctatctcaggaatcatgactgattccaaggaaaagaacaggaaatttgtggagaccattgaactccaaattgggctgaaaaactatgatccccagaaggacaagcgttttagtggctctgttaagttgcctcacattcctcgccccaagatgaagatttgtatgcttggagatgcccaacacgttgaaga

SEQ ID NO: 174780 - DNA, 276 bp, Glycine max
ggaaccagtgctgcttcattacctttccgaaattaagatccttcagggcttggaattgagaatgactactagtacgagattgaaaacttgtttgtatagctttacttctcctggtggtccaatgtatcccactagagccgttcgacatgcagccagggaatcattagatttactttttccggtgggacgttacccgcggcatcttattagtttgttcttcaggttgctttatccgtggtattggccttcctcttgttggaacttcgtggtttcttg

SEQ ID NO: 174781 - DNA, 252 bp, Glycine max
aacactcataacacaaagcacaaagcaaagctcatacttgagttaaaaaatggcagcagcttcttccatggctctctcatccccatccgaggctggcaaggccgtgaagctgggcccatcagccccagaagtgggaagggtgagcatgaggaagaccgtcaccaagcaggtctcctcaggaagcccagggtacggcccagaccgagtcaagtacttgggcccattctctggcgagccccgtcctacttaacg

SEQ ID NO: 174782 - DNA, 268 bp, Glycine max
ggtagcagcagctgagcttgtttccgtcgccgcttcacccaccgtagcaaccatgatcattcccgagaagaaccgtaaagagatctgcaaatacctcttccaagagggagtttgctttgcgaagaaggacttcaatctggcaaagcacccagagattgatgtgccgaatctgcaggtgataaagctgatgcagagcttcaaatccagagagtatgtgagggagacatttgcgtggatgcactattactggttcctcaccaacgatgga

SEQ ID NO: 174783 - DNA, 274 bp, Glycine max
atctcatttgaatacattccttgtagtttatactgaaagatgggtttgaagatggcgttactgatcctaggcctttccctcatgctccttttggtctcctctgaggtggcatccacgaatacaaaagaggaggcaaatggagtggatgatgccaaatatcccggtggaagctatggagggggttacccaggtcatggcggtggcggttatcctggccatggcggtggcggttatcctggccatggcggtggtggtggctatcctggtcatggtg

SEQ ID NO: 174784 - DNA, 277 bp, Glycine max
aaaaatatgatttcttttaggatgctgttactccattgtctgaagcagaagcagttgatctggtcaaaactgtttttgcatctgcaactgagagagatatatacaccggagataaggttgaaatcgtcatcctaaatgccagtggtattcatcgtgaatacatggacctaaggaaagactaatgctttacaggaaattgttgttggagatacctgtcttggattgagaatgtttgaaatgcttctaaaatttaaaatgacgtagtgggtttttccca

SEQ ID NO: 174785 - DNA, 275 bp, Glycine max
aacactcataacacaaagcacaaagcaaagctcatccttgagttaaaaaatggcagcagcttcttccatggctctctcatccccatccttggctggcaaggccgtgaagctgggcccatcagccccagaagtgggaagggtgagcatgaggaagaccgtcaccaagcaggtctcctcaggaagcccatggtacggcccagaccgagtcaagtacttgggcccattctctggcgagcccccgtcctacctaaccggtgagttcccaggcgactacg

SEQ ID NO: 174786 - DNA, 273 bp, Glycine max
taaaacctctatttccacttgtttgagtcattcttttgtgtttcatttcagagaccaatttattttttgtgggcattttttttcaggaaggtaatgaaggattttgctgtggaactggaggaactggcagagctagttcttgacttgctgtgtgagaatcttgggctagagaaagggtatctgaagaaggtgttctatggatcaaagggcccaaattttggtaccaaagttagcaactaccctccttgtccgaagccagagctgataaagggg

SEQ ID NO: 174787 - DNA, 274 bp, Glycine max
cattcttcactcaggaaacaagcataatggccttctgtaataaggttggaaatgtcttgaggcagggtgctgctcgcagcacacaagcacctgtttcatccatgcttaattacattcgctgcatgtcttcaagcaagctttttattggaggcctttcatatggagttgacgatcagtctcttaaggatgcattttctggctttggagatgtggttgatgcaaaagttataactgacagagactctggaagatcaaggggatttggatttgtcaa

SEQ ID NO: 174788 - DNA, 275 bp, Glycine max
cggctcgaggtttatttgaaattaacaagtagcaaagatgtttggaatcatcggaggaaacaagggtcacaagataaaggggaacttggtgattatgcgaaagaatgtgttggatatcaacagcattaccagtgttaagggtgtcatcggaaccggcattaacatcattggaggagtcgtcgacaccgttactgctttggcgtcccacatctccatccagctcattagtgccaccaaggctgatggacatgggaaaggacaagttggaaaggcta

SEQ ID NO: 174789 - DNA, 270 bp, Glycine max
ggagtcctcatgttgttccaaaaccaagtgactggggccctttagttgatgttgttggttattgtttcttgaaccttggatcaaagtatcaaccacaagaagattttgttcgatggattcaaaaaggaccaaaacctttatattttgggtttgggagcatgcctcttgatgatcctaaaagaactactgatgttatagtggaggcctatatgatacgggacaacggggaattattgacaggggctggggaaatctagggaacttggcaga

SEQ ID NO: 174790 - DNA, 278 bp, Glycine max
gacagatccattccatagccatgtcaggtgttggccctctatctcaggattgggaacccgtcgtcctccgcaagaaggctcccaccgccgccgccaagaaggacgagaaagccgtcaacgccgcccggcgctccggcgcggaaattgaaaccctaaaaaagtataatgctgggacaaataaagcagcatctagcagcacttcattgaacactaagaggctggatgatgatactgagaatctagctcatgagaaggtaccaactgaacttaagaaggct

SEQ ID NO: 174791 - DNA, 279 bp, Glycine max
gggtacactcagtactacgagaaactcacccgtgttaaagtctggcaccttggcatgctctcacttatggtggattatttcgacaaaagaggcaagccacaagaggatcaggtcgacgacgagtgcctcaaatggcttaacaccaaggagtccaactcagtggtgtacatatgctttgggagcttggcccgtctcaacaaggagcaaaattttgagatagcacgtggaatcgaggcctctgggcacaaattcctttgggtgttgcccaagaacacgaaa

SEQ ID NO: 174792 - DNA, 288 bp, Glycine max
gggcattgaattgtggcaggtgaaatctggtactttgtttgacaatgtcataattactgatgatcctgagtatgccaagcaactggctgaagaaacatggggcaagcacaaggatgttgagaagacagcatttgaagaggctgagaagaagagggaagaggaggaatcaaaggatgacccagttgactctgatgctgatgaggaagaggaagatgctgatgaagctggcaatgactccgatgctgaatcaaagacggaagctggggaagacaccaaggaagagggtgt

SEQ ID NO: 174793 - DNA, 288 bp, Glycine max
aggatttcggccgtttgctccccaaggaaagaagcagagtgtttcttttgaaatcagctagaaaagatgtcaggtgaagaggtagctgttgcagctgaggcacctgctgcttcaattccaggtgagccaatggacatcatgactgctctacagcttgtgctgagaaaatctctggcctatggtggtcttgcacgaggtcttcatgaaggtgctaaggtgatcgagaagcatgctgcacagctctgcgttctagcagaagattgtgaccaacctgattatgtgaaactg

SEQ ID NO: 174794 - DNA, 293 bp, Glycine max
aattattctcctccaaaattgaagtcattttctgacagccagatatgctgttcatccaaaggagatcttgttttggtgaatggtggccaagaaatttttgtcgtctccctgttggtccaaagaaatattttcaggcttttggactctattagctgcatctacaggaaagaaatgaagctgtcacaagaagagcttgtccctagcccagtcatccataaggaaaagaaaaagggtatattcagctctgttatcaaagattttactggcagtaaagaaaagcatgctcccatttt

SEQ ID NO: 174795 - DNA, 294 bp, Glycine max
cgccgtcgttgacgtctacaagctcgagccctgggaccttccctctctgtcgaagctgaagacgaaggacttggagacgtacttcttcagcgcgctggatcgcaagtacggaaacggctccaggaccaaccgcgccaccgagaggggctactggaagaccaccggaaaagaccgtcccgtcacccacggcgaccgcaccgtcggaatgaagaagacgcttgtttaccacagtggccgtgccccacagggccgtcgcaccaactgggtaatgcacgagtataagatgctcgacga

SEQ ID NO: 174796 - DNA, 277 bp, Glycine max
ccaccacaaagagaaaaaagagagaagaaaagcgaatcccctgtgatctctcacacaattccaattcctctggatctagtctcgatcgatagatctcgaacatgagcactggggagcttctcaacatcgaacctctcgaactcaagttcccctttgagctgaagaagcagatctcatgttctcttcaattgtccaataagaccgatagctatgtagccttcaaggtgaaaacaaccaatccgaagaagtattgtgttcgtccgaacactggggttgt

SEQ ID NO: 174797 - DNA, 281 bp, Glycine max
tcgaggtttcacagcagcaatggtgtacgtcaaggctcagaaatcaaaagcctacttcaagagatatcaagtcaagttcaagagaagaagagagggaaaaaccgattaccgtgccaggattcggttgattaatcaggacaagaacaaatataacactccgaaataccgatttgttgttcgctttagcaacaaggacattgttgcacaaataatatctgctagcattgctggcgatattgttcttgctgcagcatatgcacatgagctgccacgatatggtc

SEQ ID NO: 174798 - DNA, 286 bp, Glycine max
  unsure (1)..(286): unsure at all n locations
agcagacagaagcgaacnnagacggggttgcctcaacaattcgctgttgttgttctcttctcttctctttgacatgaatantctttcttccacgctccatggcgggangcttccccgctcagcttcgaaaaccaaaaccgcatctctctccaaatgccatcgcatttgggtcaccaaagcttctgttgccgttgagcaacaaactaaggtcgctctcatcagaattggtaccagaggaagtccactagctctagcacaagcatatgagaccagagacaaactcatg

SEQ ID NO: 174799 - DNA, 285 bp, Glycine max
gttgttgttcccttcttttttctttctccgccccttttttgttgttccttcttctcgttcgtcgctttgtgatctctctctgcaaccatgtccgtcgagaaagagagagagacccaggtttacttggccaagcttgccgagcaggccgagagatacgaagaaatggttgagtgtatgaagaaagtagcaaaacttgatcttgatctgactgtggaagaaaggaaccttctctcagtgggatacaaaaatgtgattggtgcacgaagggcctcttggcgcataatg

SEQ ID NO: 174800 - DNA, 281 bp, Glycine max
gattcacagaacaagggaaagattgctgaattgctcaggtaccactccaccaagagtggtgatgaaatgacaagcctcaaggattatgtgaccaggatgaaggaaggtcagagtgacatctactacatcacaggtgaaagcaagaaggctgttgagaactctccattcttagagaagttgaagaagaagggatacgaggttctttatatggttgatgccattgatgaatatgctgttggtcagctcaaggaatttgagggcaagaagcttgtctctgccac

SEQ ID NO: 174801 - DNA, 287 bp, Glycine max
attggtgagaaacttgacccggctgacaagaagaagattgaggatgcaattgagcaggcaatccagtggttagacagcaaccagcttgcagaagcagatgagtttgaggacaaaatgaaggaattggaaagcatctgcaatccaatcattgccaagatgtaccaaggtggtgctggtccagacgtgggtggtgctggtgcagcagaggatgagtatgctgctcctccttctggtggaagtggtgctggccccaagattgaggaagtggactaaatgtagttgctttc

SEQ ID NO: 174802 - DNA, 294 bp, Glycine max
tgggagggagagaggagcggaggagagaaaatgacgacgaggttcaagaagaacaggaagaagagaggccacgtcagcgccggtcacggtcgtatcgggaagcaccgcaagcatcccggtggtcggggtaacgccggtggcatgcaccaccaccgcatcctcttcgacaagtaccatcccggtttcttcggaaaggtgggtatgcgctacttccacaaactccgcaacaaattctactgccccatcgtcaacattgataagctatggtccctcctaccccaggaggccaaggac

SEQ ID NO: 174803 - DNA, 280 bp, Glycine max
tttgcacaaaccctaacacctaaaagccagaagaagcgaaatcgtaatcgcaatctagcggatatgaaggtcgtcgctgcatacttgctcgcagtgttgggagggaatccatctccttctgccgatgatatcaaaaacatcctcggcgcagttggagctgaggctgagcatgagttgattgagttgctcttgaccgaagtcaagggcaaagacttcaatgagctacttgctagtggaagtgaaaagatttctgcagtggctggtggtggtgcagcggttg

SEQ ID NO: 174804 - DNA, 277 bp, Glycine max
gagcctttggggtcttccgtgtacctccgccaaagggacatcctccaaaagttctaccaagaaagccgaggaaatgggtcttataatgttcccacttcctccttgagtaattcgttgacgaacccttgcaagaaaaagctgtacaggggagtgaggcagaggcactggggcaaatgggtggcggaaattagactcccacagaacaggatgagagtgtggttgggaacctacgacaccgccgaagctgctgcctacgcctacgaccgcgccgcgtaca

SEQ ID NO: 174805 - DNA, 274 bp, Glycine max
tgcttgaaggcacgcaacccgtgagattgttattggcagaaaccacaactgaagctggagaagatcccaggttctgaggaattgtggacgtgaagcgattattgttcaaaaagatagcgtcgaggcttttgttgaaaagctcagaaggtagttccccttcaaagttattgaacctaaggtcaaggaatttaaggtctggaattggaagcacaggctcagggaatcgcccaacaaagcgattgttgctgatgtctgcctcataaagaagcttaag

SEQ ID NO: 174806 - DNA, 278 bp, Glycine max
cagaaagatattgtttggtgtacggtggtgagtgtcgacgctgccactctcgcctgtgtctgtgataaatggaatctgatgcaccgacatggggagacaaactcatgttgaggggattgtcattccatggttttcatggagcaaagcctgaagaaaggacactgggccagaagttcttcatagatatagatgcttggatggatctcaaagcagctggcaaatctgatcacttatcagattctgttagttacacagaaatatatgatatagctaaggat

SEQ ID NO: 174807 - DNA, 282 bp, Glycine max
cccagattcaaccagtttcaaaattgggattcggatgtatgggccttactggagcgtacaatgaccctctccaagaacaggatggcatatctgttatcaagtatgcgttcagtaagggaatcacattttttgatactgcggatgtttatggagccaatgctaatgaacttttggttggaaaggctttgaagcagctgcccagagaaaagattcagatagccacaaaatttggtattgcttcacgaggttttcctgatatgaagatcaagggttcgcctgaat

SEQ ID NO: 174808 - DNA, 285 bp, Glycine max
cgctctgtttctgtctctgtgtttgcggctgaggattccgaacgagcgaacttcttcgtttctcgcaaagtttaagtcatcatgggtaaggataagactcacatcaacattgtcgtcattggacatgtcgactctgggaagtcaactaccactggtcatttgctctacaagcttggaggtattgacaagcgtgtgattgagaggttcgagaaggaggctgctgagatgagcaagaggtcattcaagtatgcctgggtgcttgacaagctcaaggctgagcgcgaa

SEQ ID NO: 174809 - DNA, 272 bp, Glycine max
gtgatctcttctcctcacaatgagcagatcagggcaaccaccggatttgaagaagtacatggacaagaagcttcagatcaagctgaatgcaaatcgcatggttgttggtactctccgtggcttcgaccagtttatgaatttagttgttgacaacactgtggaagtgaatggcaatgagaaaaatgacatagggatggtggtaatcagaggaaatagtgtggtcactgttgaggcgcttgaacctgtgaacaggacttgatttctgtggcttg

SEQ ID NO: 174810 - DNA, 276 bp, Glycine max
tttttgttctattagtttcttgtgtgatttcattcgtgcttattagaattgaagctacaactttgaccagctggcatcatgttgtcacattttgttcccttcatgtggcgctcaaaatgagattctttgagcacaaaccttttgagcagaaagctgtaattggatttgggattttaaatgggatctcaattggacttttaaatttgagcctgggtttcaattctgttggcatctatcaaatgactaagctggcaatcattccttgtactgtattgt

SEQ ID NO: 174811 - DNA, 279 bp, Glycine max
  unsure (1)..(279): unsure at all n locations
attattctttcgcaccttgcagaatcaattttatctctcagtcgtattgagtagatcgtaacaagcaaacagctcgnanatacaccggtgggaaggctcctaggaagcaactcgccaccaaggctgcaagaaaatctgcacctaccaccggtggagtcaagaagcctcatcgctatcgtcctggaactgttgctcttcgtgagatccgaaaataccaaaagagcacagagcttctgatccgcaagctcccctttcagcgtcttgttcgtgaaatcgcgc

SEQ ID NO: 174812 - DNA, 279 bp, Glycine max
agagaggtctcgtctttgggaatgggaagagaagtgttgttgccattgatgggggcttatatgaaaattatcctcaatacagggcttatttgcaagattcagtcacagagctgctaggaacagaaaagtcaaacaatgtggtgatagagcatactaaagatggatctggaataggagctgctctattggctgcttcaaactccatgtacaaccaagacttatagtccattatcatgcaaataaaaattgaaggaataatccatttttccttttgtatat

SEQ ID NO: 174813 - DNA, 282 bp, Glycine max
tctctctcacatttcattacttctagcaagctattacatcttttccttcctctgtctacatttcatttcattcaaaacaatcatggcatctcttcattccacatgttcaacaaaaaccgtcctttatgcattggtattgttggcctcttccatggcaacttctaccaggattttgacataacatggggagatggtcgtgccaagatactcaacaacggcgatcttcttactctttcccttgacaaagcctccggatcagggtttcagtccaagaacgagtat

SEQ ID NO: 174814 - DNA, 286 bp, Glycine max
tgcatccatcgttaagctagaggcgatcggatccagctacagcatagagatcaaggaaggaaggaaggaagatgttgggtgttataaggcacaagagtattcgccctgccttctccgcaatcagacacttgtcttctgcagctaaagagattactgtcagggaggctctgaactccgcactcgatgaggaaatgtcagctgatcctaaagtgttcttgatgggtgaagaggttggggaatatcagggtgcatacaagatatccaaggggctgctcgacaagtatgg

SEQ ID NO: 174815 - DNA, 288 bp, Glycine max
  unsure (1)..(288): unsure at all n locations
ganaaagatgggtactcaaacaacactttggtgtagagcaagaactactataagtgtaggaggtgattggaagttgttcgaatccagaatccgaaaaaagggcaccaccgtgtcaacaagtagaagcagaagctgtttttgttcttcgccgctgacactaatcgtttcttcaatgccttacgagaaggaattcgccgctgcaaaaaaagcagccactctcgctgctcgtctctgcaagaaagtacagaaggctcttctgcaatccgatgtgcactcaaagtcagacaa

SEQ ID NO: 174816 - DNA, 287 bp, Glycine max
ggacaatccgtagtaggaaatactcaagatgctctagatgaagaagaggaagttaaacaggaaagagttattattacccttaggccattgaatatgcaggatttcaaagaggccaaaaatcaggttgctgcaagctttgcagctgaaggggctggaatgggtgagttgaaacagtggaacgatttgtacggagaaggcggttcaaggaagcagcagcagttgtcatacttcctgtgaattttactgaggatttcaatgaaactgtgtgggaacattttcgtggctac

SEQ ID NO: 174817 - DNA, 270 bp, Glycine max
  unsure (1)..(270): unsure at all n locations
agagaggnctcgtctttgggaatgggaagagaagtgttgttgccattgatgggggcttatatgaaaattatcctcaatacagggcttatttgcaagattcagtcacagagctgctaggaacagaaaagtcaaacaatgtggtgatagagcatactaaagatggatctggaataggagctgctctattggctgcttcaaactccatgtacaaccaagacttatagtccattatcatgcaaataaaaattgaaggaataatccatttttcct

SEQ ID NO: 174818 - DNA, 269 bp, Glycine max
gagaggtgtaggataagtgggagctagattcagaaggacgcctgattatccatgaggaagtggaatggaggaaggaaaaacatgcagatgaagattttgattctaggagtgagcgtgatagtcacatatctgcaaagtctggaactaaagcccagaagaagagaaaaacatcagattcaggttgggcttacacagggaaggaatatgctagcaaaaaggcaggtggagatgtgaagaggaaggacaaacttgaaccgtatgcatattgg

SEQ ID NO: 174819 - DNA, 272 bp, Glycine max
aaaatattttcttctatctcatcctttcttttagttttatttttattgttttatcttgggtaaaaaaaatcatgggtgttttcacttctgaaagcgaacacgtttcccccgtctctgctgcaaaattatacaaagctattgtcctagatgccagcaatgtcttcccaaaagcattgccaaatttcattaagagcgtagaaaccattgaaggagatggagggccaggaaccattaagaagcttactcttgctgaaggtttaggttatgtgaag

SEQ ID NO: 174820 - DNA, 272 bp, Glycine max
tagtgactgacttttcgagaaaggaaaaaaaaagagtttccggcattattccatcatgaacgctcttcccattcttctcttcttcctcttcgtttcggcattagtttatgcgaagaaaactggcgatgtgacggagttgcaaattggcgtgaagcataaaccagcatcatgtgaagttctggcacacaaaggtgacagagtcaaagtacactatcggggaaaactcactgatggaactgttttcgattctagctttgaaagaaataatccaa

SEQ ID NO: 174821 - DNA, 277 bp, Glycine max; identical to SEQ ID NO: 108978

SEQ ID NO: 174822 - DNA, 276 bp, Glycine max
gcgttcttcggaggtaaaatgcgcaagttttaggcttgctgtggaagcacacaacatccgagcctttaaaaccattcctgaagagtgcgttgaaccaacaaaggactacattaatggcgaacaatttagatcagactctaaaacagttaaccaacaagctttcttttatgctagtgaacgcgaagtccatcacaacgacatatttatattcggcatagataacaccgtactctctaatatcccatactatgaaaaacatggatatggggtggagga

SEQ ID NO: 174823 - DNA, 284 bp, Glycine max
gtgcagaagagcgtcgcagtcgcaaccctaatcagaagaagcgcacttcaagcgagtgacagccaccagccatgggtcgtatgcacagccgcggtaagggtatatcctcttctgctttgccctacaaaaggacacctcctagctggctcaagatctcttcgcaagatgtcgaagaaaatatctgcaagtttgcgaagaaaggtttgaccccgtctcagattggtgtcattctcagagattctcacggtattgctcaggtcaatagcgtcactggcagcaaaatc

SEQ ID NO: 174824 - DNA, 287 bp, Glycine max
ggctgagtacgacctaactccgcggatggcgccgaatctcgacaggcaccttgtgttccctctcctggagttcctgcaggagcggcagctctacgacgacgaccacatcctgaaggcgaagatcgaccttctcaacaacaccaacatggttgactacgctatggacatccacaagagcctctaccacaccgaggacgtcccgaacgatatggtcgaccgccgcgccgaggtcgttgcccgccttaagtcgctcgaggaggccgccgcccccctcgtcggcttcctcc

SEQ ID NO: 174825 - DNA, 271 bp, Glycine max
aatctgtatcccaagatgtcttgcctgtcttgactgatgcattcgatggaaatattttgagccttgagtttgataattttgctgaagtgcacaaactctatgaaggtggagttacactacctacaaactttcttagcaagatcgcccatataccagtgatcaaggaaatttttcgaactgatggcgtacagttcctcaagtatccaccacctaaagtgatgcaggtggataagtctgcatggatgactgatgaagaatttgcaagagaaac

SEQ ID NO: 174826 - DNA, 267 bp, Glycine max
gtttttgtagaaaaaaaacaactaatccataatgatcaatatcaaaagcatagctatagcaactggtggaagaaatgttcctaggttccaggagttatctccagaaaagttgggaaaggctggtatggttcgagaaaagtcctttggtacaacaaaagaccgaatgctgtacattgaacattgtgcaaattcaagggctgtaaccatattcattcgttttatgtaacaaaatgatcatagaggagacaaagcgcagccttcacgatg

SEQ ID NO: 174827 - DNA, 275 bp, Glycine max
aatacttcttatgcaactatagtgaggctaagagattggtccataattaatcaaaatgttggctatattccacaaagcttttgctcatccacctgaagagctcaacagccctgcatcttacaaaggttccaagaagcctaaggttcccgaggaaactctcaaagatttcctttcccaccatcctcacaacacttgctctatgagctttggtgatgctgctgttctagcttatgtccgtcctgatcaatctttatctcgtcatcaaaggctgtttt

SEQ ID NO: 174828 - DNA, 278 bp, Glycine max
ctggaaacatttcagcagaatgttcagattcaactgttcagctcaatatcaagacactagattcccgcatctacagttttcaagtggacaaaaatatgcccgtctcgttgttcaaagagaaaattgcaaatgaaattggtgttccagtaaatcagcaacggctgatatttagaggaaaagtcttaaaggatgagcacgctctttctgagtattatgttgagaatgggcatacattgcatttagttgaaagacaaccaaatcagtcgcaggcttctggt

SEQ ID NO: 174829 - DNA, 282 bp, Glycine max
ttcccttgttctcacaaagtcacaatggaccccctctctctcttctgcaccggagccctcctcgccggcggcctctactggttcgtgtgcgttctgggccccgccgagcagaagggcaaacgcgccaccgatctttccggcggctccatctccgccgagaaagtccaagacaactacaaacagtactggtccttcttccgccgcccaaaggagatcgagaccgccgacaaagtccccgacttcgtcgacaccttctacaatctagtcacagacatctacgag

SEQ ID NO: 174830 - DNA, 282 bp, Glycine max
ccaaaattagggtttttgtcgtagcaggaagaagcagcaatggcgccgaagataacacgcaaggtcagcagaaaccccgaattgataaggggaatcggaaagtactcgaggtcgcagatgtaccacaagaggggcatttgggctatcaaggccaaaaactgtggcgttttacctcgccacgaccccaaacccaaacctgaaactcccattgaaaaaccacccaaattttaccccgctgatgatgtcaagaaaccccttgtcaacaagcacaaacccaaacca

SEQ ID NO: 174831 - DNA, 281 bp, Glycine max
aaaaaagctgttgccaaggctagtgcatcagcaaaacaagtcaagattgttgaaccgaaaaaagacaatgaagaggactctgatgatgattctgacgaagatgatgattttggaagttctgatgaagagatggaggatgctgatagtgacagtgatgatgagagtgatgacaaagaagatgatgatgaagaaacccatcctaagaataagaaggcagatctaggaaagaagagacccaatgaatctgcatcaaaaactccagtttcctccaagaaagctaa

SEQ ID NO: 174832 - DNA, 269 bp, Glycine max
cctacactgaggatactgagtgtgttgggcttgcacggcttggtaatgaagatcagatgatagtagctggaacaatgaagcagttgcagttgattgattttggagcacctttgcattgccttgttataacaggcccgacccatcccgtggaggaagaaatgctggatttttacagatgcaggacatagatacaacattaagacagcaagaccggtgtaatttagcaaaatagacttcatttttttttgttgtaggagcccttgtatttt

SEQ ID NO: 174833 - DNA, 269 bp, Glycine max
cacaaacgcacactgaattcaaaaacatcgaaagagagaggcatggccgagcaaaccttcatcatgatcaagccagatggcgttcaaagaggccttattggcgagattattagcagatttgagaggaagggtttttacttgaaagggttgaaactcgttactgtggaccgtccttttgctgagaagcactatgctgatttgtctgcaaagcctttctttagtggtttggtggattacattgtctctggccctgttgttgccatgatctg

SEQ ID NO: 174834 - DNA, 262 bp, Glycine max
gtagcacaatgtcgaagcgaggtcgcggaggatcggcgggaaacaagttccgcatgtcgctgggtctgccggtggcggcgacggtgaactgcgccgacaacaccggcgcgaagaacctctacatcatatcagtgaaggggatcaagggtaggctgaaccggttgccgtcagcttgcgtcggagacatggttatggccaccgtcaagaagggaaagcccgatctccgtaagaaggtgctgcccgccgtcatcgtccgccagcg

SEQ ID NO: 174835 - DNA, 255 bp, Glycine max
gtgatctcttctcctcacaatgagcagatcagggcaaccaccggatttgaagaagtacatggacaagaagcttcagatcaagctgaatgcaaatcgcatggttgttggtactctccgtggcttcgaccagtttatgaatttagttgttgacaacactgtggaagtgaatggcaatgagaaaaatgacatagggatggtggtaatcagaggaaatagtgtggtcatgttgaggcgcttacacctgtaaagaggttt

SEQ ID NO: 174836 - DNA, 261 bp, Glycine max
ctaagagttgctgcttcttcagccactccgcacctcgcagcctctgtgccctcaacaaccatggctgaaatcgaaactaccgttccagatcccacccaaatcgacgtcaaactcttcaatcgctggagcttcgaggatgttgaggttaatgatatgtctctggctgattacattggagtgtccccatcaaagcatgctacatatgttcctcacactgctggtaggtactcagtgaagaggttcaggaaagcgcagtgcccc

SEQ ID NO: 174837 - DNA, 260 bp, Glycine max
ctttctcttcctttcacctcctcagcagtcgtcagaaagactccataacccaaaaatgcctttcaagaggtacgttgagattggaagggttgctcagatcaactatggcaaagagtacgggcggctcgtgatcattgtcgatgtcattgaccagaatagggctcttgttgatgctcccgacatggtgaggtcccaagtgaacttcaagaggctctcgctcactgacatcaagattgatattaagaggattcccaagaaga

SEQ ID NO: 174838 - DNA, 261 bp, Glycine max
ttttctctaagtctaaggggtgccctgagatcactttgagcaatggtgaaggctgtggcagttcttggcagcagcgagggtgtcactggaactattttcttcactcaggagggaaatggtccaaccaccgtaactggatctcttgctggtcttaagcctggtctccatggcttccatgtccatgccttgggggacactaccaatggttgcctgtcaactggagcgcatttcaatcctaataacaacgagcacggtgcccct

SEQ ID NO: 174839 - DNA, 269 bp, Glycine max
attatcctaagtctttgggaatagtgctgcaatggcttcaagtcaggaggaggtgacccttttgggagctactggaagcccatttgtgtgcagggttcatattgccctcaagttgaagggagttcaatacaaatatgtcgaagaaaatttgaggaacaagagtgaactgcttctcaaatccaacccagttcacaagaaggttccagtgtttattcacaatgagaagcccatagcagagtctcttgtgattgttgaatacattgatgaga

SEQ ID NO: 174840 - DNA, 267 bp, Glycine max
cctacactgaggatactgagtgtgttgggcttgcacggcttggtaatgaagatcagatgatagtagctggaacaatgaagcagttgcagttgattgattttggagcacctttgcattgccttgttataacaggcccgacccatcccgtggaggaagaaatgctggatttttacagatgcaggacatagatacaacattaagacagcaagaccggtgtaatttagcaaaatagacttcatttttttttgttgtaggagcccttgtatt

SEQ ID NO: 174841 - DNA, 267 bp, Glycine max
cattccctgtggtgaaaggctaaggaggaagatggtgctttcggaggaggaaatgggtcgtctgtaccgaataaggaagacggtgatgcaaatgcttcgggacaggggttttctggtgggtgacttcgagatcaacatgtcgaagcatgagttcaagtccaagtacggcgagcacatgaagcgcgaggacctggtcatcaacaagtccaagaaggacaactccggcgaccagatctacgtcttcttccccgacgagcccaaggtcgg

SEQ ID NO: 174842 - DNA, 262 bp, Glycine max
tctagctgttgcaaatttctactatttttcaatggcctctgcagatgttgagttccgttgctttgttggtgggcttgcttgggtcaccggcaacgatgccctcgagaaagccttttcaatctacggcgacatcgttgaatcgaaggttatcaacgaccgtgagactggaaggtccagaggattcggatttgtgaccttcgcctcagagcagtcaatgaaagatgcgatcgcaggaatgaacggccaggaccttgacggccgt

SEQ ID NO: 174843 - DNA, 264 bp, Glycine max
cacaagtgcacaaccaatgaaaccacataaacttccttctccggcactctcacgtgcgttcgcagtgccctagggtccgccaccaccgccacgcaatgtggagtggcgtttccttcgaagaccgttaccaccgcgaacttcgaaccgtcgctggcggagctccggcgccatgtccggacgtcggacttcgtggccatcgacctcgagatgaccggcgtgacgagcgctccgtggcgcgagttgtttgagttcgaccgctccgac

SEQ ID NO: 174844 - DNA, 260 bp, Glycine max
gttaagttagggtttttgggggtgaagttgcgcttccggcacttccacttccacttcttcatcaccatgagcaggtcaggccaaccaccggatttgaagaagtacatggacaagaagcttcagattaaactgaatggaaatcgcatgattgttggcactctccgtggctttgaccagtttatgaatttagttgttgacaacactgtggaagtgaatggcaatgagaaaaatgacatagggatggtggtaatcagaggaaa

SEQ ID NO: 174845 - DNA, 259 bp, Glycine max
catttctccatttccattttctctctcacttttcaagaatcgtaagctatcggaaagtcttacccaactgtgagtgctgattaccagaaggccgttgagatagcgaagaagaagctcagaggcttcatcgctgagaagagatgcgctcctctaatgctccgtttggcatggcactctgctggaacctttgacaagggcacgaagaccggtggacccttcggaaccatcaagcaccctgccgaactggctcacagcgcta

SEQ ID NO: 174846 - DNA, 262 bp, Glycine max
tgttgaacaagggtttctctgtctgcttcttcactttctctcgtttcaatcgaaaccaaaacaaaatcatgggcagaaaattcttcgttggtggcaactggaaatgcaatgggaccactgaggaggtaaagaagattgttactactttgaatgaggctaaagtacctggagaagatgtcgtagaagttgttgtgagccctccttttgtgttccttcctgttgtaaaaagtttgctgcgccctgatttccatgtttcggcaca

SEQ ID NO: 174847 - DNA, 275 bp, Glycine max
ctgtttcatacctttccctgtttttgtattttcagttgcaacaaccctagtaactctctaaaagatcaaggaaggaaggaagcaagatgttgggtgttataaggcacaagagtattcgccatgccttctccgcaataagacacttgtcttctgcagctaaagagattactgtcagggaggctctgaactccgcactcgatgaggaaatgtcagctgatcctaaagtgttcttgatgggtgaagaggttggggaatatcagggtgcatacaagata

SEQ ID NO: 174848 - DNA, 270 bp, Glycine max
ctgggttgcagggaaaaagaaaaataaaatgggttccgataataccaacttggagttcttgaaggagatcggtttgggctcctccaacattggttcttacattaatggccaatggaaagccactggttcttctgtcacttctgttaatccttctaacaatcagagcatagctcaagtgactgaagcgactttgcaagattatgaggagggattgcaagcttgcagtgaagcagccaagacatggatgactattccggcaccgaagagagg

SEQ ID NO: 174849 - DNA, 237 bp, Glycine max
ctttccattcgttcaccgcaccaatctctgcagcgccttcgatctagaaaacatgactaagagaacaaagaaggctggcattgttggaaaatacggtacccgttatggtgccagtctgcgaaagcagattaagaagatggaagttagtcagcacagcaaatttttctgtgaattttgtgggaagtatgctgtgaagaggaaagctgtaggaatatggggatgcaaggactgtgggta

SEQ ID NO: 174850 - DNA, 242 bp, Glycine max
tgttctgttagaagtgctacaaacaacaatggctgctaatcaggaagatgtgaagcttttgggagctactggaagcccatttgtgtgcagggttcagattgccctcaagttgaagggagttcaatacaaatttttggaagaaaatttgaggaacaagagtgaactgcttctcaaatccaacccagttcacaagaaggttccagtgtttattcacaatgagaagcccatagcagagtctcttg

SEQ ID NO: 174851 - DNA, 258 bp, Glycine max
gcctattgctgctattggtattgagatttggacaatgcaagatggtatattgtttgacaacatcttgatagctaaagatgataaaattgccgagtcctaccgggagactacatggccgcccctgtctgttaagtttcaatcatttcttcaattatctctccttgttggcctccgacgtgcaggggcagatgattcctccttctctttgttttcctcattctcaccactgccttggctagttgcagtttctgctggttc

SEQ ID NO: 174852 - DNA, 254 bp, Glycine max
aagaagcacaatttctctttctctcttcttttgtgtgtccaaaatggctcctagttctgctcacaacaatgggttctatgtgcttatgctagttgggatagtggttagcactatggttgctacctgtgctggtagcttctaccaagactttgatctaacatggggtggtgaccgtgctaagatattcaatggtggccagcttctatcactttccctagacaaagtctctggctctggcttcaaatcaaagaaag

SEQ ID NO: 174853 - DNA, 256 bp, Glycine max
atggattttctgaaggaaaagatcttgtggtttctgttatgtctgcaatgggagaagaacagatctgttcactgaaggacatcggtcccaaaaattaatatgatgctatggctgtagctatagctgatagcacgctttttcttcttatgttgctaacaggtagtatattctccgatacatgtgtgcaaaataaacttcataagatggaaatttgcctgtgcttgaaactcaaatgcttgggatagaagaaattgag

SEQ ID NO: 174854 - DNA, 258 bp, Glycine max
ccaaaattagggtttttgtcgtagcaggaagaagcagcaatggcgccgaagataacacgcaaggtcagcagaaaccccgaattgataaggggaatcggaaagtactcgaggtcgcagatgtaccacaagaggggcatttgggctatcaaggccaaaaactgtggcgttttacctcgccacgaccccaaacccaaacctgaaactcccactgaaaaaccacccaaattttaccccgctgatgatgtcaagaaacccctt

SEQ ID NO: 174855 - DNA, 268 bp, Glycine max
ctgtcattacttctaccaagctactacatttttaacttcctctttctacatttcattcaaaataatcatggcttctcttcattccattacattttcaacattaactgtcctttatgtatttgtattggcctcttccatcgcagcctctgctttcaacttctaccaggattttgacgtaacttggggagatggtcgtgccaagatactcaacaacggcgatcttctcactctttcccttgacaaagcctctggctcggggtttcagtcc

SEQ ID NO: 174856 - DNA, 267 bp, Glycine max
tttgagtgaaggttagaagtgctacaaacaatggcagctggtcaggaagatgtgaagcttttgggagttgtgggaagcccatttgtgtgtagggtccagattgccctcaagttgaagggaattgaatacaaatttgtggaagaaaatttgttcaacaagagtgatttgcttcttaaatccaacccagttcacaagaaagttccagtttttattcacaatgagaagcccatagcagagtctcttgtgattgttgagtacattgatgag

SEQ ID NO: 174857 - DNA, 264 bp, Glycine max
cgattatcctaagtctttgggaatagtgctgcaatggcttcaagtcaggaggaggtgacccttttgggagctactggaagcccatttgtgtgcagggttcatattgccctcaagttgaagggagttcaatacaaatatgtcggagaaaatttgaggaccagagtggaactgcttctcaaatccaacccggtccacaaaaaggttccatggtttattcacaatgagaagcccatggcagagtctcttgtgattgtcgaatacatt

SEQ ID NO: 174858 - DNA, 263 bp, Glycine max
agtgaagaaaccaggagaatatgagccttctgagcaaccagatcctgattcagattatcagagagcccaagaggcccgacgattcatgatttatgttcataccaagatgatgatagttgatgacgaatacataatcgttggatctgccaatatcaaccaaaggtcaatggatggtgctagggactctgagattgccatgggtgcttatcagccctatcatttggctaccaggcagccagcacgtggtcagattcacggtttcc

SEQ ID NO: 174859 - DNA, 261 bp, Glycine max
gccaaaccctagctacctcttccttaatccctaatctctatttctctctctctctttttctctgcaaaacaaaaatgtctcacttcggacgttcgggtcccccagacatttccgacacttactctcttctcgttctgaacatcaccttccgtaccaccgccgacgacctattccctctcttcgacaagtatgggaaggtcgtcgacatcttcatccccaaggatcgaaggactggtgaatcgaggggttttgcgttcgtgc

SEQ ID NO: 174860 - DNA, 258 bp, Glycine max
aggaaattggtgtttgattcattatcaaggtttctcatcagctaccagcacttcacattctacccagttttgtgctttgcaagggtcaatttgtacctccagactttgttgctgttgttctctaggagaaaggtgccagatagagcctttaacataatggggatcttgtgttttgggtttggttccctctgttgatctcttcactaccaaattggggagaaagggtcatgtttgtgttggccagttttgctgtttgtt

SEQ ID NO: 174861 - DNA, 266 bp, Glycine max
gaacaagatggaaagcactgtcacatttgagactgatctcaacctcaaggcaaccgagcttagattggggcttccaggaacagaagaaattgttgaaaaaccacttcctgcaagtgctagaattaccaacaaaaggcctttgtctgaaacctctgaggagtgtgcttcaaagggttctagtgctccacatgtggaaactgaagcagcccctcctgccaaggctaagatagtggggtggccaccaatcagatcctacagaaagaaca

SEQ ID NO: 174862 - DNA, 263 bp, Glycine max
gcatttcagacagtgccaaagatctaattcgaaaaatgcttgatcggaatccaaaaacaagggttacagctcaccaagtactctgtcacccatggattgttgatgacaacattgcaccagataaacctcttgattctgctgttttatcacgcctgaagcagttctctgcaatgaataaacttaaaaagatggctttgcgtgttattgcagagaggctctctgaggaagaaattggtggtctgaaggaattattcaggatgatt

SEQ ID NO: 174863 - DNA, 262 bp, Glycine max
tcagcgatgctgttggatccgccgcccttcctcccgtcgacaaagtccgcctacctccagtgcggcgacgccacggccttcgatgaggaagagctctacagccgcctcaaatccctagtgcgtcagctctagttcgtcgacatccaggaggagtatgtgaaggtcgaactgaagaatctcaggcgcgagctcctccgcgcgatggaggaggtgaagcggatccagtcggtgccgctcgtcataggccagttcatggagatga

SEQ ID NO: 174864 - DNA, 260 bp, Glycine max
ctggccttttgttctcgtgtcaatttctaaatccaccaccacaccctctcttactattctctattattattatctccacacccttcactctctctcactcttctctcgaatcttccaccgcaatggccaccgctgccgagaaactctccgctctcaaatccgccgtcgccggattgaacgaaatcagtgagaatgagaagaacggattcatcagcctcgtcggccgctatctcagtggcgaaggcagcatgtggaatgga

SEQ ID NO: 174865 - DNA, 256 bp, Glycine max
gtctgcaacaacttcttctagagtgtgttctcagatcctcacatcatgtaccgctttgcaacctccctcgcgtccaaagctagtattgccaggagcagcactcaacagattcgacagtagggtcacttggaacaggatttatgcggccaaggacataaagttgggtgtggaggctcgggctctgatgcttaatggtgtcgaagagctcgctgatgccgttaaagtaacaatgggccctaaggggcgtaatgtggtt

SEQ ID NO: 174866 - DNA, 254 bp, Glycine max
gtagaaacgtgaaccagaaccagaatggatcttcaacaacgaccactgaaacttcactttattccttacctgtcaccggggcatgtgatccctctctgcggcattgcaacactcttcgcctcacgcgggcagcacgtgacggtgatcaccactccctactacgcccaaatcctccgcaagtcaagcccctccctccaactccacgtcgttgactttcccgccaaagatgtgggccttcccgacggcgtcgaaat

SEQ ID NO: 174867 - DNA, 165 bp, Glycine max
gaaagaaaaaatacatttatgtctctccctctctttagtacatttggctttgacattaatggctacaaaattcactattgtcaagttgcaccctgaaaaaaaaaaaaaaaaaaaaaaaaaaaaaaaaaaaaaaaaaaaaaaaaaaaaaaaaaaaaaaaggggggg

SEQ ID NO: 174868 - DNA, 254 bp, Glycine max
gccgttcagtgacaccgagtgtaaagaagaggagagaaaccgagaaagaagaagaaaactagggttttgcaattgctgcaatggcgcatcaaggagaaccggcgaactgcggtggggtgagctcgaggaggacgacggcgaggatctggacttcctcctgccgccgcggcaggtgataggccccgacgagaacgggataaagaaggtgatcgagtacaagttcgacgaggacgggaacaaggtgaagatcacca

SEQ ID NO: 174869 - DNA, 253 bp, Glycine max
accttttgcaactttatctggtgatgagagctaccaaagtcgggatcttgaaaaggcatcccagctacttgcaaagcctctatatgatcagaaggtacaaccaactactttgattccaaagcaagttggaaacatgtacactgcgtctctttatgcagcatttgcctccctcattcacaacaaacatagcacattggcaggtaagagggtgatattattctcatacggaagtggcttaactgccacaatgttt

SEQ ID NO: 174870 - DNA, 247 bp, Glycine max
cctgctcttggtggatatgagtatgtgattcatcatctgttttctttggtagcagtagcatatgcaatgttgactggggaaggacagctttacacattcatggtcctgatctctgagacaactactccagggatcaatttgagatggtatcttgatgtagctggaatgaaaaagtccaaagcttatctcatcaatggggttgtaatatttatttcttggctggttgccagaatacttctgttcatat

SEQ ID NO: 174871 - DNA, 265 bp, Glycine max
ctctctctttccatcattgtccccttaaaaatcatgagtgtagaaatactagacggtgcaaccatcgtaggattcgtggaggacgaggaagccttcaacgtctgcgtgagcgacctcttcacccaactggacaccgacaaggacggtcttctctcttacgcggagatgctgaaggagttgcagaggctgagggtgttcgagacccacttcggcgtcgacgtgaagcgtgaccccgacgaactcgcacgtgtgtacgagtccatgt

SEQ ID NO: 174872 - DNA, 263 bp, Glycine max
actgaagttccttctgagatactggttgctttggctttggtattcaggagcatatcgatttgggaatcaagtatgatccttcaactggtatttatggaatggatttctttgttgttctggagcgtcctggctatcgtgtcggacgccgccgaaggtgcaagtcccgtgttggaattcagcaccgtgtcacaaaggaggatgctatgaagtggttccaggtgaaatatgagggagtgatccttaacaagtcccaggcaattgtt

SEQ ID NO: 174873 - DNA, 254 bp, Glycine max
tcttcttctcttgcggctaggttttagcgcacttcttctagatttaaggaagatgggtaaggaaaaggttcacatcagtattgtggtcattggccatgtcgactctgggaaatccactaccactggtcacctgatttacaagcttggaggcattgacaagcgtgttattgagaggtttgagaaggagctgctgatataaaaaagaggtcttacaagtatccctgggtgctggacaaactaaaggctgagcgtaa

SEQ ID NO: 174874 - DNA, 252 bp, Glycine max
tatgaattagatcatcatggaaaaaaggattggtttactaattctgggctgaagtctggcctttatgcatgggttgcccgggcagatgactacaagatcaatagtatctatggagaacatctgcgaaggatgggcgatgtcaaaaccatatctgagcttatggaagaagaagctcgaaggcaagataagcttgtctcgaatttaactaacattattcaggtaaaaaataagcacttaaaagagatagaagtg

SEQ ID NO: 174875 - DNA, 252 bp, Glycine max
cttcactctgcccgctgcatcaatggcttcagagaagaaactttcgaacccaatgagggagataaaagtgcagaagctcgtcctcaatatctctgttggcgagagtggagatcgtctcaccagagcctccaaggtgttggaacaacttagtggccaaaccccagtgttttccaaagcaaggtacactgttcgttcctttgggattagaagaaatgagaagattgcatgctatgtcactgtcagaggtgacaa

SEQ ID NO: 174876 - DNA, 257 bp, Glycine max
attggatccttccctcagactgtagaactgaggagggtacgccgtgagttcaaggctaacaagatctccgaggaagagtatgttaagtcaattaaggaggaaattcgcaaagttgttgaacttcaagaagagcttgatattgatgttcttgttcatggagaaccagagagaaatgatatggttgagtacttcggtgagcaattgtcaggctttgcttcactgttaatgggtgggtgcaatcctatggttcccgttgt

SEQ ID NO: 174877 - DNA, 259 bp, Glycine max
gctaagatggacaaaagaagtgttgatgatgttgtccttgttggtggttctaccagaattcccaaggttcaacaactgctgcaggacttctttaatggaaaagagctttgcaagagcattaatcccgatgaggctgttgcatatggtggtgctgttcaggctgcaatcttaagtggtgagggcaatgagaaggttcaggatcttctcctcctggatgtcacccctctgtctcttggtttggagactgccggtggtgtga

SEQ ID NO: 174878 - DNA, 254 bp, Glycine max
tcgcgatcgaagatatgaacgaatactgaaaaatggcgtcatggaattcatttccgcttcaagttacctacgaggctctgggttggttcgccttcgtttcctggtccatcagtttctatcctcaagtcatcttgaattttcgcaggaagagtgtggttggactcaacttcgatttcgtggtgctaaatctgaccaagcacagttcctatctcatatacaacgcttctctctacttcagctctgctattcagaag

SEQ ID NO: 174879 - DNA, 253 bp, Glycine max
aacaccatagtgaaatggcttccaaggctgcacttctcttgtgtttcaatgttctcttcttcaccgtggttagctccacatatgtgccatgcaacccacaccccaaaactccaaaacacccacctgtcccaaagccaccttccccaaagcaagcaagttgccccaaagacactattaagtttggtgtgtgtgctgatgtgttaggtttgatcaacgtgcaacttgggaagccaccaaagaccccatgctgcaa

SEQ ID NO: 174880 - DNA, 251 bp, Glycine max
cacaccatagtgaaatggcttccaaggctgcacttctcttgtgtttcaatgttctcttcttcaccgtggttagctccacatatgtgccatgcaacccagcccccaaaactccaaaacacccacctgtcccaaagccaccttccccaaagcaagcaagttgccccaaagacactattaagtttggtgtgtgtgctgatgtgttaggtttgatcaacgtgcaacttgggaagccaccaaagaccccatgctgc

SEQ ID NO: 174881 - DNA, 255 bp, Glycine max
cgagaagttggattcaatttacgggtcttttgataagccctctgagaataagaagggatacctgcttcccaggtccaagatggtgaattcggacctctccaggattattaattctgatgaggtgcaatctgttgtgaggcccattaagaaggatgtgaagagggccactctcaagaagaaccctcttaagaatctcaactcgatgctgaagctgaatccttatgccaagactgctaagaggatggcccttctcgc

SEQ ID NO: 174882 - DNA, 260 bp, Glycine max
tcgtactgcacgaaggaaaaaccctagcttccgttcgatcaacaatgacaggagagacagtgaaccccaaagcttaccctttggccgatgcccaactctcaataaccatactagatcttgttcaacaagctgccaactacaagcagctcaaaaaaggtgctaatgaagccactaaaaccctgaacagaggtatctctgaatttgttgtcatggctgctgatactgaaccccttgaaattcttctccatcttcctctactc

SEQ ID NO: 174883 - DNA, 247 bp, Glycine max
gtgagggtggggagaggaaaagaggcgcacgtttatgctgcgtgtgcgagaaatcaagagcttcggtgaagaggccgaaaaccctagagcagatatgcagggagtgcttctacgatgcttttgagtctgagatccatcaggtaattcttgagaatcagctcttcagccctggtgaacgcgtcgcaatcggcgcttctggcggaaaggattccaccgtccttgcctacgtcctctccaagctcaaccg

SEQ ID NO: 174884 - DNA, 250 bp, Glycine max
cacaccatagtgaaatggcttccaaggctgcacttctcttgtgtttcaatgttctcttcttcaccgtggttagctccacatatgtgccatgcaacccaccccccaaaactccaaaacacccacctgtcccaaagccaccttccccaaagcaagcaagttgccccaaagacactattaagtttggtgtgtgtgctgatgtgttaggtttgatcaacgtgcaacttgggaagccaccaaagaccccatgctg

SEQ ID NO: 174885 - DNA, 248 bp, Glycine max
ttcgaatagattatcctaagtctttgggaatagtgctgcaatggcttcaagtcaggaggaggtgacccttttgggagctactggaagcccatttgtgcgcagggttcatattgccctcaagttgaagggagttcaatacaaatatgtcgaagaaaatttgaggaacaagagtgaactgcttctcaaatccaacccagttcacaagaaggttccagtgtttattcacaatgagaagcccatagcagagt

SEQ ID NO: 174886 - DNA, 250 bp, Glycine max
ggactctctcttccactgctcaaaccaccatagagattgattccttgtacgagggtattgacttctacacaaccattacccctgcccgttttgaagagctaaacatggatttattcaggaagtgcatggagcccgtggagaagtgtttgcgggatgccaagatggataagagtaccgtccatgatgttgttcttgttggtggttctactaggattcccaaggttcaacagttgttgcaggacttcttcaa

SEQ ID NO: 174887 - DNA, 252 bp, Glycine max
gaacaggaagaggggaaagaacgaggcggacgacgagaagcgagagctggtgttcaaggaggacgggcaggagtacgcgcaggtgctccggatgctgggtaacgggcggtgcgaggcgatgtgcatcgacgggacgaagaggctctgccacatccgcgggaagatgcacaagaaggtgtggatcgccgccggagacatcatcctggttggactcagggactaccaggacgacaaggctgacgtcatcctcaa

SEQ ID NO: 174888 - DNA, 255 bp, Glycine max
gcttcgcgtggaccaacaagaagtgtaagttttcattcaatggccagcgctcagctctcagcaatatcttcgtcgatctctacggcgtcgtttgaagggcttcgaccttcggctgttcagtttgcttccgcgggcagaattagaattggcaatctctcccaaaggtctttccggggcttggttgtcaaagccgccaccgttgttgcccccaaatacaccgcgattaagcctctgggagacagagtgctgataaaa

SEQ ID NO: 174889 - DNA, 252 bp, Glycine max
gcttcgcgtggaccaacaagaagtgtaagtcttcattcaatggccagcgctcagctctcagcaatatcttcgtcgatctctacggcgtcgtttgaagggcttcgaccttcggctgttcagtttgcttccgcgggcagaattagaattggcaatctctcccaaaggtctttccggggcttggttgtcaaagccgccaccgttgttgcccccaaatacaccgcgattaagcctctgggagacagagtgctgata

SEQ ID NO: 174890 - DNA, 244 bp, Glycine max
cgccgatgggccttcagcggctccgtcgtcgtcggtttcggagtacacacagaagaagatctacgtgagcaacgtcggtgcggacctggatccgcagaagcttctcgcgtttttttcacggttcggggagattgaggaagggccgttggggcttgacaaggccaccggaaaacctaatgggttctgtttgtttgtttacaggaatccggagagtgcgaggagagcgttggaagagcctcataag

SEQ ID NO: 174891 - DNA, 246 bp, Glycine max
ctgcaacgcactgaattcgatcaatcaatccatcttcaattgctttgtttcgatcggaggaaaatggccgatcagttatcgaagggagaggaattcgagaataaggctgagaagaagctcagcggttggggcttgtttggctccaagtatgaagatgccgccgatctcttcgataaagtcgccaattgcttcaagctcgccaaatcatgggacaaggctggagcgacatacctgaagttggcaagt

SEQ ID NO: 174892 - DNA, 246 bp, Glycine max
gactattctaacataatacgcttccttcgtttgtgtatggttgcgcacgcaacacgttacaataatggcttcgaagaattctcaacaagacacgcgcttagctataatcgcctctgcaatccgagtcatccccgactttcgcaagccagggattttgtgacaggacataaccacgctgcttcttgatacaaaggctttcaaagacaccattgacttgtatgttgagaggtacagagatcaaaacat

SEQ ID NO: 174893 - DNA, 245 bp, Glycine max
cacaaattacaaaatcccctcatattatctctctctctcttaaaccatcatgtcctccaccgcgcctcccgtcctccccatctccaactcccaaaccaccgcgggaaccaccggtgcaggcggcggcgccatcgaggctccggccaacaacccggccttccgcgctttcatcaacaacctctccaactccctccgccacggcctcgaccagcgccgcccctggtcggagctcgcggaccgctcag

SEQ ID NO: 174894 - DNA, 221 bp, Glycine max
caccggtggtgcgcttctctcttcaaagattacttatcaaactacggctacattgaatcctctgggccattgagcaattcgatggaccaagaaacaataatatcagccattaagacctaccagcaatatttcagtttgcaacccaccggcaaactaaacaacgagactcttcagcaaatgtcgttcctacgatgtggcgtccccgacattaacattgacta

SEQ ID NO: 174895 - DNA, 255 bp, Glycine max
cttcttgttcctctcgcccagaatccgagatcaaccctgacccctaaggccaggggtttttctcggcttcttcagattcctgaaatggcgtctgtttcagctttagccaagtacaagctcgtcttcttgggtgaccaatccgtgggcaaaaccagcatcatcactcgcttcatgtacgataaattcgataacacctatcaggctacaattggtattgattttctatcaaaaactatgtatctcgaagatcgaact

SEQ ID NO: 174896 - DNA, 252 bp, Glycine max
gttattttaatttaatttccttacagtaattcttttttatttagttattttgtcttcacttgcaggttcaggtcacagtaatatcatttttgattggaaaacacgatctaggatttgcattgggattgcacgtgggcttgcttatcttcatgaagaagtaagaccacatattgttcacagagatataaatgcaagcaatattctccttgacaaaaaccttacacccaaaatttcagattttggtcttgcaaa

SEQ ID NO: 174897 - DNA, 248 bp, Glycine max
gtttctttctctctcatgttgtagtatctcacttgtgtttttcattcgtttctgaaccacacaaacatcaccaccgaacaatgccgacggggttaccggcggcgaattccttagtggcgccggacgaagaggggtgggtgtcggggcagatcaaggcggaggcgcgccgcgacgccgagtcggagcctgctttggcgagctacctctactcgacgatcctctcgcactcgtcgctcgagcgttctctg

SEQ ID NO: 174898 - DNA, 247 bp, Glycine max
cttcattcgcatctttctctcttctctctccacccaaaccctaactcccgaccctgttcccctctcgtatccgtcatgaaaggaggaaagtccaagaccgaatctaagagagccgatcccaaacttgctgtgaataagaagggagccgccaccaaggctaggaaacccgccggcaaggggaaggcagcgaaagaccctaacaagccaaagaggcctccaagtgctttcttcgttttcatggaggagt

SEQ ID NO: 174899 - DNA, 213 bp, Glycine max
gctgaagattggtcccaacgagccatctgagctggctatccatgagaatgcctatggcttggccagatacgctgtcatatgccaggagaatggcctggttcccattgttgagcctgagatccttgttgatggatctcatgacattcacaagtgtgctgccgtcaccgatcgtgtccttgcagcatgctacaaggctttgaatgatcaccacgt

SEQ ID NO: 174900 - DNA, 245 bp, Glycine max
ggaacctagctagggtttggaagaagctgatccgagaagatggtgcagcgtctcacctaccgcaaacgccacagctatgctgccaaatccaaccagcacagagtcgtcaagactcccggtggcaagcttgtttatcagaccacgaagaagagggccagcggacccaagtgccctgtcactggaaagaggattcaagggattccacatttaaggccagcagagtataatagatcaaggttacacag

SEQ ID NO: 174901 - DNA, 244 bp, Glycine max
cctttctctctgcttagggttttgatcgcatcggatcttcactctcttctccgatctcaaaatgcccgccgtttatggagctcgcttgaccaccttcgaagactccgagaaggagagtgaatacggttacgttcgcaaggtatcaggaccagtcgtcgttgcagatggcatggctggggctgctatgtatgaactcgtgcgtgttggtcatgataatctcattggtgaaattattcgtctcgaa

SEQ ID NO: 174902 - DNA, 246 bp, Glycine max
  unsure (1)..(246): unsure at all n locations
tctcacactgcaattccgtcttctcccagaatcggtcactaaatccgcaatcatgaagctcgataccaccggtctcgaatcgtttcccacactgcttgcgcctcaaaacgacgtcgttggagaactctccgccgctccatccttcgaccttccgaattccaacgatttcgaattgantgtgaaagaagctattcagatcgtgaagcccgcgaagggtactacgactcttgcttttatatttaagga

SEQ ID NO: 174903 - DNA, 241 bp, Glycine max
accgcttactattactacgtcaccaagaagccaaaagggtgcttggatcctgagaacttcaaagaatttaaacttgttaaacgcactcaactcagccataatgttgccacgttccgatttgatcttcctactcctaagtcagtgttgggacttcctattggacaacatatcagctgcagagggaaggatagtcttggtgaagaagttgtgaaaccatatactcctacaacattggatactg

SEQ ID NO: 174904 - DNA, 244 bp, Glycine max
ccggctcttgccgctaagaagaagcctgagaaggtcacgaatccgttgttcgagaagcgtccgaagcagttcggaatcggaggggcgttgcctccgaagagagacttgactaggttcgtgaagtggccaaagaatgttcaaattcagaggaagaagaggattctgaagcagaggttgaaggttcccccagctttgaaccagtttaccaaaactcttgacaaaaacctagcaacaagtctgttca

SEQ ID NO: 174905 - DNA, 244 bp, Glycine max
atgaagagtccagaatagaaatcatacatagggatgttaaggcaagtaatgtattgctcgataaggattttaatgctaaagtctcagattttggtttggtccaacttattgaagatgagataacccacattagcactcgagttgcaggaaccattggttacatggctcctgagtatgcaatgcgtggctatctaactgacaaagcagatgtttatagctttggggtggatgcactggaaactgt

SEQ ID NO: 174906 - DNA, 244 bp, Glycine max
ttggaccgatccgagaagaactctgtaaacatgttggtttaccaggacctccttacaggtgatgagcttctctctgactccttccgttacaaggaaattgagaatggaatgctgtgggaagttgaggagaagtgggttgttaaaggagcagttgatgtagacattggtgcaaacccttctgctgagggtggaagagaagatgagggagttgatgatgcagctgttaaggttgttgacattgttg

SEQ ID NO: 174907 - DNA, 244 bp, Glycine max
gttggagaggggcatcagggttctcagcctcttccacagccgaacaagtcactcaagggattgatggaaccgccctcaacgccatcgtcacaagagccacaagtggccttggtctggagaccagccgggctcttgcattgcgcggtgtccatgttgttatggcagtcaggagtctggacactggtaagaatgtcacagagaccatacttacggaaatcccctcggctagtattgatgtcatgga

SEQ ID NO: 174908 - DNA, 213 bp, Glycine max
atcttgcttgatgataaatggacgccaaagattgcagattttgggatggctcgtcttttcccggaagatcaaagccaggtccatacacgtgtggctggaaccaatgggtatatggctccggaatacgtgatgcatggaaatctttcggtgaaggcagatgtatttagctatggagttttggtattggagttgatcaccggccaacgaaactct

SEQ ID NO: 174909 - DNA, 249 bp, Glycine max
ggagaagcagaaagaggagacgaagcaatggcgccgaagaagccccgaaccacgtcgaggaaccctgatttggtcaggggaattggcaaatattcgaggtcgcagatgtaccacaagaggggcatctgggccatcaaggccaaaaacggcggtgttttgcccctccacgatcccaagcccaaacccgaggccccggcccagaagccgcccaagttctacccggccgatgacgtgaagaagcccctcgtc

SEQ ID NO: 174910 - DNA, 242 bp, Glycine max
atcatattcctctctcattctcactataaacacaaaacccttcccatcctaattaaggtgaaaatgaaggcatcacccattgcttggttcactttggtggttgtgtttcttgtggctgaagttcaagtttcaatggcagtgacatgcagcccagtgcagctgagtgcatgtgtaagtgcaataacctcttcaacccctccatcaaacctatgctgctccaagatcaaagaacagaaaccatg

SEQ ID NO: 174911 - DNA, 245 bp, Glycine max
gaatgttagcatggaggaaaagcaaatcttccaaaatgtacaactgagtgttaacttccttgtctctttgctgaaaaagaattggcagaacgttcgctgcctatatctgaagagtaccatggggaaatcgtaccgtgtcttttgagtagtggttcttaaaattcagtgaatttctgattgcacttaatatattgtcatgataggttggacagaatttttcatcgttctacagttttgttggatga

SEQ ID NO: 174912 - DNA, 243 bp, Glycine max
ataatacaactatttttgtcggcaatttggatcctaacgtcacggatgaccatttgagacaagtttttgggcattatggagagttagttcatgtgaagattccagctggcaagcgatgtggatttgtccaatttgcggaccggagctgtgcggaagaggcactgcgggttttgaatggcacacttctaggcggacaaaatgttaggctttcatgggggcgaagtccttcaaacaaacaggctc

SEQ ID NO: 174913 - DNA, 244 bp, Glycine max
caaaaccctcgtctctcgtacgcagggtaccaagattgcttctgaaggacttaaacatagagtgtttgaggtctccttggctgatcttcaaggggatgaggatcatgcattcaagaagattaggttgagagctgaagatgtgcaagggaagaatgtcctgacaaatttctggggaatggatttcacaactgacaagctgaggtcattggtgcgaaaatggcaaactctaattgaagcccatgtg

SEQ ID NO: 174914 - DNA, 246 bp, Glycine max
ctcgatccgctgaggaggcacaccttcaggagcagtcatggttctcaaaaccgagctgtgcacattcagcggtgccaagatctacccagggaaaggcatcagatttgttcgtggtgattctcaggttttcctgtttgctaactcaaaatgtaagaggtatttccacaacaggttgaagccgtcaaagctcacgtggactgcaatgtaccgaaagcagcataagaaggatattgctcaagaagctgt

SEQ ID NO: 174915 - DNA, 246 bp, Glycine max
caggaattgacggaggcattcgaaatcggtgaagatggttgctatgaggtttcatcagtaccaggtggtgggaagggctcttcctaccgaatccgatgagcatcctaagatctaccgcatgaaactctgggcaactaacgaggtccgtgccaaatccaagttctggtattttttgagaaaattgaagaaggttaagaaaagcaatgggcaagtgctagccataaatgagatttttgagaggaatcc

SEQ ID NO: 174916 - DNA, 272 bp, Glycine max
tctagctcagagctcgctctcctcgccgtttctctcatcgctagtttcaagtctccttgtgacaatggtgagggttagtgcgttgaatgatgctctgaagagcatgtacaacgccgagaaacgggggaagcgccaagtcatgattaggccgtcctcgaaggtcataataaaattcctcttggtgatgcagaagcatgggtacattggtgagttcgagtatgttgatgaccacagggctgggaaaatcgtggttgaattgaatggcaggctga

SEQ ID NO: 174917 - DNA, 257 bp, Glycine max
cggctcgagcttttaggaaaagattaacaataaaagtgtggagtactgttgatagcaaagatgtttgggatcttcgacaaggggcaaaagataaaggggacagtggtgttgatgccaaagaatgtgttggacttcaacgccataacctccatcagtaaaggtggtgttattgacacagccaccggcatcttaggccaaggcgtcagctcagttcgtggagtaattgatactgccacttccttctggggccataatat

SEQ ID NO: 174918 - DNA, 262 bp, Glycine max
tggcacttggcaggctttcatcttccttcaacaagcctttacgtcctctcttcaatgctggctcagtttactacaagtcctctttgcctgctgaagctgcgtacgacaatgagaaaagctgtgatacgggactggaactgataccctccgagaatttcacttctgtctctgtaatgcaagctattggctctatcattactaacactcggaatgaaggatatcccggtgcaagatattatgggggaaatgagtatattgacat

SEQ ID NO: 174919 - DNA, 240 bp, Glycine max
cttcgagtttcacagcgaagtcgtaggagggtttcaaaagatggagaacatgcagagcttctggcaattgggcgatgaactccgtggacactcaaaagcatcggaggatcacaaatggttaatggttgcttcgaaattggcggaacagacaagattgaagggggagcgtgtgaacaaccttgatctttcaaagggccccattgaaacaaggtcaagggataaatttgggttccaggaaga

SEQ ID NO: 174920 - DNA, 268 bp, Glycine max
gatggcttctcctcttcttactccttacaagatgggcaaattcaatctgtcccatagagttgttttggcaccgctgaccagacagaggtcttacgacaacgtcccacaaccccatgccatcctctactactcccagagaacttccaacggaggccttctcattactgaagccactggcgtctctgacacggctcaaggctatccgcaaacccctggcatatggactaaagaccatgttcaagcttggaaacccattgtcgatgccgtc

SEQ ID NO: 174921 - DNA, 275 bp, Glycine max
tcggctcgagcacactattagcaatttagcaccttctactactttgtaatcgttcaagagttgtgaactgtgaagaatgagttcaacaagccgtgcttggacttggagcgtggcagcaagtgttggagtcgtggaggccttgaaggaccatggtatatgcaggtggaacagtgtgatgagatcagcacaacatcatgctaggcataatatgaggtctttgtctcaaaccaagaagttttcttttcaatcatctgcgatggcttctgccaaattga

SEQ ID NO: 174922 - DNA, 279 bp, Glycine max
tgcagaagaagatggaggctcacccctacgtcccacgcgatttgcacttacccggctacgctccctgcttcctttccatgtccaacattctttccgtcttcgcctcctcctcattgctcatcgtcactctcgtctggatcttctctggacgctttaagaaaaccaaagttgatagagtgctgatgtgctggtgggccttcacaggtctcacacacattattcttgagggttattttgttttctctcctgagtttttcaaggataaaactggcttctact

SEQ ID NO: 174923 - DNA, 264 bp, Glycine max
ttgtgaactgtgtggcaaacgtgcttttttcaccttgaggaagacagagcagagagagactgaactaattggtggggctgatttgtatatgccggtttgtcgcctgcactacctgaacagccaagttgctgagaggagtgttctcgaatctcaaaattttaaaaccgattgattcccttcttgaggcagctgaagatgtttaagggttattgggaaattggcttgtatgtagcccaccatgtttaattgttcgactgatacatg

SEQ ID NO: 174924 - DNA, 262 bp, Glycine max
cgaaaagttagggttcacaacttttccttttccttttgcttgcgaatctgaatcaaataatcaatcatccattcattattcatcatgtcgtcggcgaagaaaatcacgctgaagagttcggacggcgaggctttcgaggtggaggaggcggtggcgctggagtcgcagacgataaagcacatgatcgaggacgactgcgccgacagcggcatccctctgccgaacgtgacgagcaagatcctggcgaaggttatcgagtact

SEQ ID NO: 174925 - DNA, 266 bp, Glycine max
ctctcattcttctccctaaaatcaaatcatggccaccgccacatcccgaacccttcgattccaatctccgtcactctctctctcctcgaagctccccctctcctccgcgttcacctgagaatccactagaattcattcaggtccagattgctaatgtggaatcccgatttgctagtgctatatcagattctggggagattaaagttaaggctcgggtaaagcatgatatcccccatctgtcaaaggttgggtcttttgatgttgat

SEQ ID NO: 174926 - DNA, 265 bp, Glycine max
cctacccattggatgcacttatgagtgactgcagagaatactttcagcaaactagtaggcgggtttcctttgaatatgcacttttagctggagtgaatgactcagtaaaccatgcattagagcttgctgaattactccatcgatcgggcagcggatatcacgtcaacttgatacctttcaatccaatagaaggctccgagtatcagcgtccttccaagagagcagtgcttgcattttctggtgctttggagtcctctaaaataac

SEQ ID NO: 174927 - DNA, 269 bp, Glycine max
atcacacttcccactttccaatatggaatgctgcataatcggcaggctcaagtcacaacctttatggttcgccctgctcatcggtgtcggattgttaacgattctcaaattggctttcgttgttttcagatgggtctacgtcaatttcctccgaccaccgaagaatctcaaaaagtacggatcttgggcagtggatactggacccactgacggcattggaaagagcatcgctttcgagctcgctcgcaagggcctaatactcgtccttg

SEQ ID NO: 174928 - DNA, 262 bp, Glycine max
cacaaacaaacactcccattttctctctttctctttctctccgacctagcgagaccgagcgatccgatcctaaccccgcgatgctccgccgcgcaaccacctccctcatctccggcgcctcccgccgccgcctctccaccgacgtgccggcgacgccgcgggcggattccgtcttcgcggaggcgtggaagaaagtgagccccaacatcgaccctccgaatacgccgctggcgtacatgaagccgcgaccacccactccttc

SEQ ID NO: 174929 - DNA, 201 bp, Glycine max
  unsure (1)..(201): unsure at all n locations
gcnctactcctccgcccaaggttgattcctttatgcagtttgctgataaaggtattgatgataccagcatctcttttgggcctgttgaagctactggaagaccaacactcaatcttgagagaagtttggatcatgatggacatcctcttgccattaccacagctgatgctgttgcagcaagtggagtccctccttggaatt

SEQ ID NO: 174930 - DNA, 269 bp, Glycine max
tgcgttggcaaaggcattcgtggagcactactacagcaccttcgacaccaaccggaacggttagcgaatctgtatcaggagggttccatgctgaccttcgaagggcagaagatccagggcgcttccagcatcgtcgctaagctcacttccctccctttccagcagtgccaccactccatctccaccgtcgactgccagccctccggtgtcaacgctggcatgcttgtctttgtcagcggcaacctccagctcgctggcgaacagcacac

SEQ ID NO: 174931 - DNA, 277 bp, Glycine max
  unsure (1)..(277): unsure at all n locations
gcacagctcgttgtgattgctcacgatgtggacccaattgaattggttgtctggcttcctgctttgtgcaggaagatggaaattccgtactgtattgtgaagggaaaggcccgcttgggaacggttgtccacaagaaaactgcatccggtttgtgtatgaccactgttaagaatgaagataaattggagttcagcagagttttggaggctatcaaggctaacttcaacgacaaatatgacgagtacagatagtagtggggtngtgggatcatgggat

SEQ ID NO: 174932 - DNA, 259 bp, Glycine max
  unsure (1)..(259): unsure at all n locations
gccaaatgtgagtccttcaatgcatcatcaggaaggacaggtggttcaataggtgaagatccagctctggaccagttcatggaggcctactgtgagatgctcattaagtatgagcaagagctcactaaacccttcaaagaagccatgcttttcttctcaagaattgagtgtcaactcaaagccctagcagtttcatcagatttgggtcanagtgaaacatctncgnagantgaggttgatgttcatgaaaacaacctag

SEQ ID NO: 174933 - DNA, 257 bp, Glycine max
agaaaagttggctatgagcaatgtacgcttagttatgtctattgcccaaaagtatgataacctgggtgcagaaatgggtgaccttgttcagggtggcttgattggattactgcgtggtattgaaaagttcgattcttcaaaagggtttaagatttcaacttatgtttattggtggatacgtcagggtgtttcaagagctttagttgagaattcaagaacattaagattgcctgctcatttgcatgagagattatctc

SEQ ID NO: 174934 - DNA, 263 bp, Glycine max
cttctctgttctcctagaacttgattacttgaacattccctatgacagatgaggtggttcttctggatttctggccaagtccatttgggatgagggtcaggattgcacttgctgaaaagggtatcgaatatgagtacaaagaagaggacttgaggaacaagagtcctcttctcttacaaatgaacccggttcacaagaagattccggttctcatccacaatggcaaacccatttccgaatccctcattgctgttcagtacatt

SEQ ID NO: 174935 - DNA, 265 bp, Glycine max
tggagctgtctgtgcaaatttgcgttgttcttcgcggcacacctcactcactgaacggtaagtatggcggacaaggctgttacaatccgaacccgaaagttcatgaccaacaggcttctttccaggaagcagtttgtcgttgatgtccttcatccagggagggcaaatgtttccaaggctgaacttaaggagaagctggctaggatgtatgaagtgaaagaccctaatactgtatttgtcttcaaattccgaacacattttggag

SEQ ID NO: 174936 - DNA, 126 bp, Glycine max
cagactagtagtattattcttccattcataatgggtgttttcacattcgaggatgaaatcaactcccctggggctcctgctactctttacaaggccctagtacagatgccgacaacgtcatcccaa

SEQ ID NO: 174937 - DNA, 260 bp, Glycine max
caatcttctccgccacttctgaatctattggatcgacaatcatgtcggacgaagagcaccatttcgagtccaaggccgacgccggagcctccaagacctagcctcagcaagccggtaccatccgcaagaacggctacatcgtcatcaaatgccgcccctgcaaggttgtggaagtttccacttccaaaactggaaagcacggtcacgctaagtgtcactttgttggaattgatattttcactgccaagatacttgaggat

SEQ ID NO: 174938 - DNA, 259 bp, Glycine max
tcacggtcgccacgtttagcaataaccaaaccctctctactctttgttcttctccttctcttcgctagggttttagcttcttcctcttcacttcgttctttttcgcctctacaatgagcaacgacaaggacacattcaacgtcgccgatctcacttctgctctcaacgaggacaatagagcagaccttgtcaatgctcttaagagcaagatacagagtttggctggacaacactcggatattctagagtctctgtcgcc

SEQ ID NO: 174939 - DNA, 257 bp, Glycine max
atactcctgatatcagaaaaagaaaaaagaaaaaaatgtctctagtgactgcagagatcaaagccaaagcagaggtgtatcatggagatgaactctgccaagagaagtcaaagttgctgctaaaggaggtagggctacctaatgggcttttgccattgaaggacattgaggaatgtgggtatgagagggatagtgggtttgtgtggctgaagcagaagaagagcacaaaccacaagtttgagaagattgggaagctg

SEQ ID NO: 174940 - DNA, 259 bp, Glycine max
ccctcttctccgccacttctgaatctattgaatcaacaatcatgtcggacgaagagcaccatttcgagtccaaggccgacgccggagcctccaaaacctaccctcagcaagccggtaccatccgcaagaacggctacatcgtcatcaaaggcagcccctgcaaggttgtggaagtttcgacttccaaaactggaaagcacggtcacgctaagtgtcactttgttggaattgatattttcactgccaagaaacttgaggg

SEQ ID NO: 174941 - DNA, 261 bp, Glycine max
  unsure (1)..(261): unsure at all n locations
agaagatctgggctcgtggactcaaagggacttattgttagctctcgtttggaatcacttcagcagttcaaaaagccttgggcccatgagcatgaacctgttaagagtcttctggatgctgtcaaggcaatcaagccaaccgttttgattggatcatctggagcagggnagacatttactaaggaggtggttgaaaccatggcatccttgaatgagaaaccacttattcttgctctctccaacccaacttcacaatctgag

SEQ ID NO: 174942 - DNA, 261 bp, Glycine max
ctcacactctccaaaccctagcggcactacacactagttctatcgctatctccccaagatgtcgagcgccgatcccgagcacagagaagaggaggaggcacccgccgttggcgacgacgaggacaccggagctcacgtcgctccaatcgtcaagctcgaggaggatgctgtcaccaccggcgaggaggacgaatatgcaatcctggatctcaaatcgaagctttaccggttcgacaaggacgggaaccagtggaaggagcg

SEQ ID NO: 174943 - DNA, 273 bp, Glycine max
acgttctcttgcttggtggaggaatgatctttaccttttacaagggctcagggttattcagttggttcatctcttgtggaggaagacaagcttagccttgcaactacacttctcgaaaaggccaaggctaaaggggtttctttgttgcttccaactgatgtggtcatagcagacaagtttgctgctgatgctaacagcaagactgtgccagcatcaagcatcccagacgggtggatgggattagatattggtcccgattccatcaagacattt

SEQ ID NO: 174944 - DNA, 241 bp, Glycine max
ctactacattcccacctttagtcttgttcttagagatggcttgtgaaaccaagtcatggttggttatgtttcttgttttcttggttgctaattgcatgcaacattgtgtccacggggtgtctcaagtgccttgcctttttatctttggggactctatgtctgatagtggaaacaacaatgaacttccaaccacttcaaaatctagtttcagaccatatgggatcgactttccattaggacc

SEQ ID NO: 174945 - DNA, 242 bp, Glycine max
ctccttcttctccgctttctcttcgatcatcgcttcagaatgccgccgaagttcgacccctcccagatcgtcgacgtcttcgtacgcgtcaccggcggtgaggtcggcgcggcgagttccctcgccccgaagatcggtcccctcggtctctcccccaagaagatcggagaagatatcgccaaggaaaccgccaaggactggaagggcctccgcgtcaccgtcaagctcaccgtgcagaaccg

SEQ ID NO: 174946 - DNA, 253 bp, Glycine max
gtgaagagcgaagagaatggctcccaagggtttaatctttttggctgtgttatgcttctcagcactgtcactgagtcgttgtcttgcggaggataatggacttgttatgaacttctacaaggaatcatgccctcaggctgaagacatcatcaaagaacaagtcaagcttctctacaagcgccacaagaacactgctttctcctggctcagaaacatcttccatgactgtgctgttcagagttgtgatgcttca

SEQ ID NO: 174947 - DNA, 256 bp, Glycine max
ctcaaaagaggattagagggtcgccacgtttagcaataaccaaaccctctctactcttttttcttctccttctcttcgctagggttttagcttcttcctcttcacttcgttctttttcgcctctacaatgagcaacgacaaggacacattcaacgtcgccgatctcacttctgctctcaacgaggacaatagagcagaccttgtcaatgctcttaagagcaagatacagagtttggctggacaacactcggatatt

SEQ ID NO: 174948 - DNA, 251 bp, Glycine max
ctcccatcatagaaaaccgaccctctcctttccctcttcaccaaccaatggctcccccaaaggccgagaagaagcccgcggagaaaaagcccgcagagaaggctccggcggagaagaagcccaaggccgagaagaagatatcgaaggaaggaggaagcgagaagaagaagaagagaacaaagaagagcgtggagacctacaagatttacatcttcaaggtgctgaagcaggttcaccccgacatcggaatc

SEQ ID NO: 174949 - DNA, 261 bp, Glycine max
cttaataccatcatggaggatgctgctgcttctgctgctactgataatgtattggaagccaaagatggtactatttctgttgcttcagcatttcctggtcatcaagaagctgtacaggatagagaccacaagttcttaacaaaagcagtgaagaagcatacaagggggttgaatgtggtgatggaggcccatttggagcagttgttgttctaaatgatgaagtagttgtaagctgtcataacatggttttacgaaacactg

SEQ ID NO: 174950 - DNA, 258 bp, Glycine max
gtatgcaacggccacagccatagtcgcctgaaaccgattgttgttgcagggaaaacacagagatccgggtcgacccgttgcagatccgatccaaataagaaaagatgaatattttcaggttagccggggacatgacccatttggccagcgtcctcgtccttcttctcaagatccacaccatcaaatcctgcgccggtgtctcattgaagactcaagaactctatgcactcgtttttgcttgtcgctacctagatatct

SEQ ID NO: 174951 - DNA, 258 bp, Glycine max
ggtgaatgcatggtggctggccaacaaccctgcacactggaagaagccagaggagttccggccagagaggttcttggaggaggaattgcatgtggaagccaatggcaatgactttaggtaccttccctttggggttggcagaaggagttgccccggaatcattcttgcattgcctattcttgccatcactttgggacgtttggtccaaaactttgagctcttgcctccccctggccagtcccagattgacactagtga

SEQ ID NO: 174952 - DNA, 259 bp, Glycine max
caatctggagggctactacagcccaatagatcaggtggaacagaaaccactggttaaccagtatgttaaccctgccccgttccctggaaacggagttcaagtctcacctgttactccatctgctgatgttactgcttacttcagctctagcattcgagcaactcgtttgattattctgaccttggatggggtgaacaagtccccaagacccccgagatctcatccttgctttctgctgctcctttggagggtgctgctg

SEQ ID NO: 174953 - DNA, 262 bp, Glycine max
acgacctaaccccgcggatggcgccgaatctggacaggcaccttgtgttccccctcctggagttcctgcaggagcgccactgtacgacgacaaccacatcctgaaggcgaagatcgacctcctcaacaacaccaacatggtcgactacccatggacatccataaaagcctatatcacaccgaggaggtaccccacgacatggtcgaccgcaggccgaggtagtcgcccgcctcaagtccctcgaggaggctgccgcccccct

SEQ ID NO: 174954 - DNA, 265 bp, Glycine max
ctcagcgatggtgttggatccgccgcccttcctcccgtcgacaaagtccgcctacctccaaggcggcgacgccacggccttcgatgaggaagatctctacagccgcctcaaatccctagtgcgtcactcgagttcgtcgacatccaggagggtatgtgaaggacgaactgaagaatctcaggcgcgagctcctccgcgcgatggaggaggtgaagcggatccagtcggtgccgctcgtcataggccagttcatggagatgatcga

SEQ ID NO: 174955 - DNA, 149 bp, Glycine max
cgaaaattagggtttgtagtgtagcaggaagaagcagcaatggcgccgaagataacacgtaaggttagcagaaaccctgaattgataaggggaatcggaaagtactcgaggtcgcagatgtaccacaagaggggcatttgggctatcaa

SEQ ID NO: 174956 - DNA, 262 bp, Glycine max
ccgaggagacacaccttcagcagcagcagccatggttctcaaaaccgaactatgccgattcagcggtgccaagatctacccagggaaaggcatcagatttgttcgtggtgattctcaggttttcctgtttgctaactcgaaatgtaagaggtatttccacaacaggttgaagccatcaaagctcacctggactgcaatgtacagaaagcaacacaagaaggacattgctcaagaagctgtgaagaaaagaagacgtgctgcc

SEQ ID NO: 174957 - DNA, 258 bp, Glycine max
cgtgctaaatccctagtaagccgccatggtgaagtactcaagggagcctgacaatccaaccaagtcttgcaaggctagaggcgccgaccttagggttcattttaagaacactagggaaactgcctttgcaatcaggaagttgcccttgttaaagctaaaaggtacttggaagatgttcttgcgcacaagcaggccattccgttcagacgtttctgtcgtggtgttggaaggacagctcaagcaaagaatagacactct

SEQ ID NO: 174958 - DNA, 256 bp, Glycine max
ctgatgagctgaggactgtcttggagaccaacttgcctaaagtgaaggaaggtaagaagtccaagttcagtttaggtgtgtccgatcctaagattggttcccagatatctgaagtgactaagattccttgccaaagtaatgagttgtgagtgaacttcttcgtggtgtgcgattccattttgatacgtttgttggtgatctcaagtctggagatttggaaaaggcacaacttggtctgggacatagttacagcagg

SEQ ID NO: 174959 - DNA, 257 bp, Glycine max
ttttctcacttctcagcactcagcagcgatatcagttgaagaaacagaaacaaacaaaagaggcagaagatgttgtgggtggacaaatatcgtcccaaaaccctcgaccaggttatggtccacaccgacatcgctcgcaatctcagaaattggtaacggaacaggattgcccccatttactcttctatggcccatctggctccggcaagaaaaccctaatcatggctcttctccgccaaatgttcggacctggtgcc

SEQ ID NO: 174960 - DNA, 256 bp, Glycine max
ctcagattcttgagaggggtggttacaccttgttcactccacactacataacatgtttttgtccaccacccttcattcttagcagtcagtgcaagtctcaatgtataaaccgtgggagatattgtgctccggatccggagaaggttttggagaaggatatgaagggaaggatgtggtgtatgaaaatttgaggcagttgtgtgttcatagagttgccaatgagagcaaccgttcatgggtctggtgggattatgtg

SEQ ID NO: 174961 - DNA, 258 bp, Glycine max
agattctagagataattattctcctggatggaagtattctaattgggaaatgaaaggtgttcctctaagaattgaaattgggccaaaggatttagcaaataagcaggttcgtgctgttcgacgtgataatggagcaaagatagacatgctagtgctgatttggttgtggaaataaaaaagttgcttgatactattcaacagaacctgtttgatgttgcaaaacaaaaacgagatgaatgcattcagatcatacacact

SEQ ID NO: 174962 - DNA, 263 bp, Glycine max
ggcaaagtcgaagaaccacaccgctcacaaccagtcctacaaggcccataagaatggcatcaaaaagccaaagaggcatcgccacacttccaccaaagggatggatccaaagtttctgaggaaccagaggtacgcgaggaagcataacagaagagcggtgaaacagccaccgaagaagagtaaagtgccactctcaaatgggcctattaggatttgatttgttatttaagccccatatgttttgtgtcgaatctatctttagt

SEQ ID NO: 174963 - DNA, 264 bp, Glycine max
gattctagagataattattctcctggatggaagtattctaattgggaaatgaaaggtgttcctctaagaattgaaattgggccaaaggatttagcaaataagcaggttcgtgctgttcgacgtgataatggagcaaagatagacattgcagtgctgatttggttgtggaaataaaaaagttgcttgatactattcaacagaacctgtttgatgttgcaaaacaaaaacgagatgaatgcattcagatcatacacacttgggatg

SEQ ID NO: 174964 - DNA, 268 bp, Glycine max
tctcgagccgattcggctcgagggcactgaagcttgggcttcaagttattgcaaaaatcactcggatatgctgatgctgctcaggaaccagagttatttacaacggctccatcccttgccattcccaaagctattgccaaggcggggttggagattcacaaattgatttttatgaaattaatgaagcctttgcggttgtggctctcgcaaatcagaaacttcttggacttaactcggaaaaagtaaacgtacatggtggagctgttgc

SEQ ID NO: 174965 - DNA, 261 bp, Glycine max
ggattcatagaatgggcgggataggaaaatcaacacttgctcgagctgtctataatgaattgataattgctgagaagtttgatggtttatgttttcttgcaaatgtgagggctcactcagacaaacacgggttagaacgcctccaagaaaagctcttttagatatactcggagagaagaacatcagcttaacgagtaaggcgcaaggtattccagtcatagagtctaggctcacgggaaagaagttctcttgattctagat

SEQ ID NO: 174966 - DNA, 261 bp, Glycine max
gtggacagaagagagcgtcctagtcgcaaccctaataagaagaaccacagcttcaagcgagtgacatccaccagccatgggtcgtatgcacagccgcggtaagggtatatcctcttctgctttgccctacaaaaggacaccccctactggctcaagatctcttcgcaagatgtggaagaaaatatctgcaagtttgcgaagaagggtttgaccccgtctcagattggtgtcattcttcgagattctcacggtattgctcag

SEQ ID NO: 174967 - DNA, 255 bp, Glycine max
gattctagagataattattctcctggatggaagtattctaattgggaaatgaaaggtgttcctctaagaattgaaattgggccaaaggatttagcaaataagcaggttcgtgctgttcgacgtgataatggagcaaagatagacattgctagtgctgatttggttgtggaaataaaaaagttgcttgatactattcaacagaacctgtttgatgttgcaaaacaaaaacgagatgaatgcattcagatcatacac

SEQ ID NO: 174968 - DNA, 253 bp, Glycine max
cttgcggctagggttttagcgcacgtcttctagatttaaggaagatgggtaaggaaaaggttcacatcagtattgtggttattggccatgttgactctgggaagtccactaccactggccacctgatctacaagcttggaggattgacaagcgtgttattgagagatttgagaaggaagctgctgagatgaacaagaggtctttcaagtatgcctgggtgcttgataagcttaaggctgagcgtgaaagagga

SEQ ID NO: 174969 - DNA, 257 bp, Glycine max
aagagagatggatccagacgcgttggcaaaggcattcgtggagcactactacagcaccttcgacaccaacaggaacggcttagcgaatctctaccaggagggttccatgctcactttcgaagggcagaagatccaaggcgcttcaacatcgttgccaagctcacctccctcccttttcagcagtgccaccactcaatctccaccgtcgactgccagccctccggcgtcaacgccggcatgctcgtcttcgtcagcgg

SEQ ID NO: 174970 - DNA, 259 bp, Glycine max
atttgagcttaaaccctagccgctcttctcttcattcttcactttggaaacaatcataatggcgttctgtaataaggttggaaatgtcttgaggcagggtgctgctcgcagcacacatgcccctgttgcgtccatgcttaattacaccgctgcatgtcttcaagcaagcttttcattggaggcctttcatatggagttgatgaccagtctcttaaggatgcattttctggctttggagatgtggttgatgcaaaagtta

SEQ ID NO: 174971 - DNA, 262 bp, Glycine max
ttctcttctccgtcgacgacgtttgtttgctcctcctcctcctcgaagccacagatctgctgcggactaccgtatcctgtatttcttcttcttcttctgtaagcttcttcgtcggagaatttggaatttgatacactggatcggatagccggtggctgcttccgctatatacttcttgaacctccgcggagacgttctcatcaatcgcctctaccgggacgatgtcgggggaaatatggtcgatgcttttcggacacatata

SEQ ID NO: 174972 - DNA, 266 bp, Glycine max
ttcaagtttacactgcattgctaaaacctcatgatagaatcatgggacttgatctaccacatggagggcatctttctcatggataccagactgacaccaataaggtatctgcagtctccttattttttgagacaatgccatatagactgacgaaaacacgggacacattgactatgatcagttggagagtacggcgaaactcttcaggccaaaattaatagttgctggagctacagcttatgcacgtctgtatgattatgcacgca

SEQ ID NO: 174973 - DNA, 254 bp, Glycine max
cacttgcagaattcaaagaaggcgtcttcataaacgcctttattctccgtttccgtttccttcccggaattcgatttttcatctctgaaaatgagagagtgcatctcgatccacattggtcaggccggtatccaggtcggaatgcttgctgggagctctactgtcttgagcacggcatcgggcccgatgggcaaatgccaagtgacaaaacagttggcggaggtgatgatgctttcaacactttcttcagtgag

SEQ ID NO: 174974 - DNA, 251 bp, Glycine max
cggctcgagcaaagaaagtacacgctattcttacctacaatgacacaaaccacttgataaagaaggatgttccttgtgagactgaccaacttactcatgtttacacatttatcctccgtccggatgcaacctacagcatcctattgataatgtggagaagcaaactggtagtctctactctgattgggatcttctccctccaaagacaatcaaagatcccgaggctaaaaaaccagaagattgggatgaca

SEQ ID NO: 174975 - DNA, 258 bp, Glycine max
cctgacactccttcttctccgcttcctcttcgatcatcgcttcagaatgccgccgaagttcgacccctcccagatcgtcgacgtcttcgtacgcgtcaccggcggtgaggtcggcgcggcgagttccctcgccccgaagcatcgctcccctcggtctctcccccaagaagatcggagaagatatcgccaaggaaaccgccaaggactggaagggcctccgcgtcaccgtcaagctcaccgtgcagaaccgtcaggcca

SEQ ID NO: 174976 - DNA, 254 bp, Glycine max
ttcaaatcacacactctcttcaatttctagggttttgctattgctttgcctccgttccccctttctcacaaaaacaacgccttttctcttctccttcgtatctattctttgcgtttagtttttggttgattgatggcattcacacgtaattcgttgctgcattttaatcgatttatctaaccaggactgaatgacctaatggagtctaaaggtgggaaaaagaagtctagtagtagtagtagtaaatcaatttt

SEQ ID NO: 174977 - DNA, 254 bp, Glycine max
  unsure (1)..(254): unsure at all n locations
tgaaaagggaccatggaggcaaattcaggtgccagcgaccgaatttcgagaatcgccggccacctccgcccccagagagaggatgatgtttgtttgaagcgtacgnnttgccgtgcaaaaggtggggtctccggattcaatgtggcatattgggtgccgcaggaggcatagggcaacctctggcgatgttgatgaagatgaatccactcgtttcacttctccacctctacgatgttgttaacacccctggcgtc

SEQ ID NO: 174978 - DNA, 259 bp, Glycine max
ccgagaaaaccctagttcgcttgcagtcacacaagaggccaatcctattcatagctcgagatgggtgaagaagtgaaggtagttgttccagaatcagtgttgaagaagcgcaagagggaggaggaatgggcgttggccaagaagaagaactcgatgctgccaagaagaagagagccgagagccgcaaactcatctacaacagagctaagcagtacgctaaggagtacgatcaccaggagaaggaattgattcggttgaa

SEQ ID NO: 174979 - DNA, 261 bp, Glycine max
tgtggaagctcttgttcagagaggagaagctaaactcttaacagaagattgggagggagctgtggaggatctgagatcagctgctcaaaaattgcctcaggatatgaatatccgtgaagcagtaatgagggccgagaaagctttaaaataagcaaacgcaaggactactacaaaattttgggaatttcaaaaacagcttcggctgctgatataaaacgtgcctacaagaaactcgccttacaatggcatccagataagaac

SEQ ID NO: 174980 - DNA, 267 bp, Glycine max
ctctctttctctttctctccgacctagcgagaccgagcgatccgatcctaaccccgcgatgctccgccgcgcaaccacctccctcatctccggcgcctcccgccgccgcctctccaccgacgtgccggcgacgccgcggcggattccgtcttcgcggaggcgtggaagaaagtgagccccaacatcgacccgccgaagacgccgctggcgtacatgaagccccgaccacccactccttcgactctcccctccaaactcaccgtcaat

SEQ ID NO: 174981 - DNA, 265 bp, Glycine max
ggcctgtttatattgaaagacttggaaaggtcgatcctaacaaacttatgcaagttacaactttggatagatatgtgaagtaccatgtgcaggagtttgagaaagcttttgcaatcaagtttcctgcttgctctattgctgccaagaggccattgattccagcaccacaatcttagatgttcacggagtgggccttaagaactttacaaagtctgcccgggaacttattacccgattgcagaagattgatggtgataattaccct

SEQ ID NO: 174982 - DNA, 256 bp, Glycine max
tctgtccccgctgcgtctctcgtaatcatgcctaagcaaatccacgagattaaggatttccttctcactgccagaaggaaggatgcgaggtcagtgaagatcaagaggagcagagatgtggttaagttcaaggtcagatgctcaagtacctctacacactttgtgtgtttgacccagagaaagctgataaattgaagcaatctcttcctccaggtttgagtgttcaagacctgtaaaggtactgggcgagagatca

SEQ ID NO: 174983 - DNA, 253 bp, Glycine max
ctcaaccttctttcttcttatatatcgaacatggctaagtatcattcaagtgggaaaagctcttccatgactgctatagccttcctgtttatccttctaatcacttatacaggcacaacagatgcacaatccggggtatgtatggaagacttggcaacaacttaccaacccctcaagaagttgtggccctctacaatcaagccaacattcgcaggatgcgaatctacggtccaagcccagaagtcctcgaagc

SEQ ID NO: 174984 - DNA, 252 bp, Glycine max
gtgtcgagctgagaataccagttgctccagtagccggcactaaacaacatggcggacaaggcagtcaccatccgaaccaggaagtttatgacaaacaggcttctctccagaaagcagttcgtcgttgatgtccttcatccgggagggctaatgtttccaaggctgaactgaaggagaagctgggaagaatgtatgacgtgaaagacaccaacactgtatttgtcttcaagttccgaactcattttggtggtg

SEQ ID NO: 174985 - DNA, 250 bp, Glycine max
gtcccagttccgccttcagcagatgtcatctgcaaatcagtcttttagggatcagggcatgaagtctatgcaaactgctcaatctaatccagatccatttggtgcactgggcttgttcagtgtagtccatataagtgatctaacctgaaatatcttgctcatgggattgatcttacaacacttgggttgaatttgaattcaacagaaaacctttacaagacttttcggtctccgtggtctgatgaaccgg

SEQ ID NO: 174986 - DNA, 255 bp, Glycine max
cagattcaaggttctgttccttgtaaaattcgagccaaaagaggctttgccactcacccaagaagtattgcagagagggtaagaagaacaagaattagtgaaagaatcaagaaactgcaagacctttttccaaaatcagaaagcaaacaagcacagcagatatgttagatttggcagttgagtatattaaggacctgcagcaaaaagttaagatactctcagattgtaaggcaaagtgcaaatgtacaagtaatg

SEQ ID NO: 174987 - DNA, 254 bp, Glycine max
gaagttaactggatggaagcgagaggaggtgatggataaaatgcttttgggagagctttttggcacccatatggctgcttgtcgcctaaagaatcaagaagcttttgttaatttgggtgttgtacttaataaagccatgactgtttggaaacagagaaggttccttttggtttctttgctcggaatggcaagtatgtggaatgcctgctttctgtgagtaagaaattggacgtagagggcctagttactggggt

SEQ ID NO: 174988 - DNA, 253 bp, Glycine max
atagcccaagccctatacaaccaaaccctaacacacacccatttgattcagtttccatggctagcctcaaggttgcatttttggctgcagtgctctgcatggttgtggtgagtgcacccatggcacatgcagctatcacgtggggcaggtgacgagtagcctggccaattgcatcggttacctccagaagggaggaacgccgtcgtcgggatgctgcaacggagtgaagagcctcaatgccgccgccaagacc

SEQ ID NO: 174989 - DNA, 255 bp, Glycine max
cacgaatatcttgttgtttggagcgatccgagaaaaactctgtaaacatgttggtttaccaggacctccttacaggtgatgagcttctctctgactccttccgttacaaggaaattgagaatggaatgctgtgggaagttgagggaagtgggttgttaaaggagcagttgatgtagacattggtgcaaacccttctgctgagggtggaggagaagatgagggagttgatgatgcagctgttaaggttgttgacat

SEQ ID NO: 174990 - DNA, 261 bp, Glycine max
gtttcgaatagattatcctaagtctttgggaatagtgctgcaatggcttcaagtcaggaggaggtgacccttttgggagctactggaagcccatttgtgtgcagggttcatattgccctcaagttgaagggagttcaatacaaatatgcgaagaaaatttgaggaacaagagtgaactgcttctcaaatccaacccagttcacaagaaggttccagtgtttattcacaatgagaagcccatagcagagtctcttgtgattg

SEQ ID NO: 174991 - DNA, 250 bp, Glycine max
gaaagaggcaagaaactgtagaggatgtcccctgtggtaatacagtggctatggttggtcttgaccagttcatcacaaagaatgcaacattgacaaatgagaaggaagtcgatgcccaccctatccgagctatgaagtttctgtctcacctgttgttcgtgttgctgttcaatgtaaggttgcatcagatcttcccaagcttgttgaaggtcttaagcggttggctaagtcagatcctatggttgtttgt

SEQ ID NO: 174992 - DNA, 251 bp, Glycine max
gaagaaaaggaggctaaataaagagagtgaagaagaagagagggtttgggttttggtgtttgttgttgaatcgtgaaaatgttcagaaaccagtacgacacggacgtgaccacatggagccctgcggggaggctgttcaggtggagtacgctatggaggcggtgaagcagggctcggcggcgatagggctccgatcgaagacccacgtggtcctcgcatgcgtcaacaaggccaactccgaactctcctcg

SEQ ID NO: 174993 - DNA, 247 bp, Glycine max
ctgattttggaacatctagatcagttccactagataagactcacttaaccacagctgttggaggaacttttgggtacatagaccctgagtattttcagtctagtcaattttcagataagagtgatgtgtatagttttggggttgtgcttgtagagctcataactgggagaaagcctatttcattcttatatgaagatgagggtcaaaatctggttgctcaattcatttctttgatgaagaagaacca

SEQ ID NO: 174994 - DNA, 253 bp, Glycine max
atggcatagtcagcaactgggatgatatggagaagatttggcatcacacattttacaatgagcttcgtgttgcccctgaagaacaccctgtacttcttaccgaggcacccctcaatcccaaggccaacagagagaagatgcccaaattatgtttgagactttcaatgtgcctgccatgtatgttgcaattcaggctgtcttgtctctgtatgccagtggaagaactacaggtattgtgcttgattctggtgat

SEQ ID NO: 174995 - DNA, 255 bp, Glycine max
gcggaagatgaaccagagaaataccagtcacacttcagtgaatacatcaagcgtgggatagaagctgatggtattgaggcactgtataaaaatgttcatgctgccatccgggctgatcctactctcaagaaatctgataagcagaccccgaaggagcacaagaggtacaacttaaagaagctgacatatgaggagaggaaggctaagttgatttcacgtgtggcagctctcaactctgctgctgataatgatgaa

SEQ ID NO: 174996 - DNA, 260 bp, Glycine max
cacagaaaaaatgggttcttcttcttctatgtggacggtgtgtgtgattttggcatcactggcctctgcagcactctgtgccaacccacgcaggccagtggatgtacaatttggccgaaactacgtgcccacatgggcctttgacacatcaaatatttcaatggtggttctgacattcagcttcatcttgacaagtacactggtactggcttccagtccaaagggtcttacttgtttggtcacttcagcatgtacataaa

SEQ ID NO: 174997 - DNA, 259 bp, Glycine max
tgcacctcttcttcttcttcttcttcgtttgagtatgacgtgtttgtgagcttccgcggtgaagacacacgcaacagcttcaccggttttctatttgaagctctgaaaaaacaaggcatcgaggccttcaaagatgataaagatatctgaaaggcgaatccatagcaccagagctaatacgagccattgtagggtctcatgtgttccctgttgtcttttccaaggactatgcttcctcaacttggtgcctgcgtgaact

SEQ ID NO: 174998 - DNA, 264 bp, Glycine max
agcatatcaataagcggaggaaaagaaactaacaaggattcccttagtaacggcgagcgaaccgggaaaagcccaccatgaaaatcggtcgccctcggcgtccgaattgtagtctggagaagcgtcctcagtggcggaccgggcccaatcccctggaagggggcgccagagagggtgagagccccgtcgtgcccggaccctgtcgcaccacgaggcgctgtcggcgagtcgggttgtttgggaatgcagcaccaatcgggcggt

SEQ ID NO: 174999 - DNA, 291 bp, Glycine max
gtgagagagaaatggagaatgcggaggagatgatgcagcaaaacgacgaggttttgtcggttgaacttccagctccttccggttggaataaactgtttttccctaagaaactgggaacaccaagaaaaagtgagattgtattcattgctccaatggagaggagatcagtaccaaaaaacaattggagcagtacctaaaggcacatcctggcaatcctgtcatttcagagtttgactggggaactggtgagacccctaggcgatcagcaaggatcagtgagaaggtcaagtc

SEQ ID NO: 175000 - DNA, 290 bp, Glycine max
aataccactttcttagtttcaaactcaacttttgagggtctttactctattaaaaacacacaagagttttagtcttttagctaacagtgttcatatgatgaatgcttcaaagttcattaaatgtgttactgttggagatggagctgttggaaaacctgcatgctcatttgctacaccagcaacaagttccccactgattacataccaacagtatttgacaatttcagtgccaatgtagctgtggatggaagcattgtcaatttggggctatgggacacagcaggccagga

SEQ ID NO: 175001 - DNA, 282 bp, Glycine max
gttacgctcttcaaatctatctcttctcagcgattcttgcttcaagttccagaaatgggtgtggctcgaaacattcccgatgcggaggagggaaccttggagattggaatggaatacagaactgtttctggagttgctgggccattgtcattcttgataaagttaagggacccaagtttcaagagattgttaacattcgcttaggagatggtactactcggcgtggacaagtgctagaagttgctggtgaaaaggctgttgttcaggtctttgagggtacat

SEQ ID NO: 175002 - DNA, 290 bp, Glycine max
tgtcagaaccttgatggacgcaacatcactgtgaacgaagctcagtcccgcggaagccgcggtggaggcggtggcggttacggaagtggcggtggatacaaccgcagtggtggtgctggaggatacggtggccgtcgggaaggtgcatataccgtaacggtggtggttatggcggtgacagagaccatcgttacggaccttacggggacggtggatcacgctactctcgtggtggtggtgatggaagctggagaaattagggcttaatgttgtagattagtgtttattgc

SEQ ID NO: 175003 - DNA, 287 bp, Glycine max
cttatttctatgctaaatccctcaaactcaccaacaaagatgtctcttgtcttggacgttgacgacactactctctctaatctccagtattttgctaaccatggatttggtgtggaaccacacaatacaacggcgtttaagaactgggtcttgatggcgaggcattcgcactgccagagactcttaaaatgtacaacaaactgttggctctcggcatcaagattgtattcttatcagaaagaccactgagtctaagggatgttacagccaagaacttaaaggaggtt

SEQ ID NO: 175004 - DNA, 284 bp, Glycine max
gaaagcgaaacgcatagaatcgaaagaggggaaaagaaaaagaaaagttagggttagggattttgagagatggcatcgactaagaagatcaccctgaagagttcggacggtgaggccttcgaggtggaggaggcggtggcgctggagcgcagacgatcaagcacatgatcgaggacgactgcgccgacagtggaatccctctccccaatgtcaccagcaagattctggcgaaggttatcgagtactgcaagaagcacgttgaggcgaacagtgctgatgagaag

SEQ ID NO: 175005 - DNA, 283 bp, Glycine max
atcctccataacctccgagctctacaccgaagaacgaagccatggggaagacacatggaatgggagctgctcgcaagctcaagtctcaccgcaggaggcaaaggtgggctgataagtcatacaagaaatcccatcttgggaatgatggaagaaaccttttgccggttcatcccatgccaagggaattgtccttgaaaagataggtattgaagctaagcagcccaactctgctattcgtaagtgtgccagagttcaacttatcaagaatgggaagaaaattgca

SEQ ID NO: 175006 - DNA, 281 bp, Glycine max
tatggagcgaggaccaaatttctcgccgtgtctccgagctcgccgccgaaatctccgccgacttcggcggacaatctccggctcccgtggtcgtcggcgtggccaccggtgcattcctcttcttggctgacctcgttcgcaaaaagatctgtccatcgccgttgatttcgtccgagttgaatcctacggtttcggaaccgtttccaatggcgcacccaccatttccttcgatttgaaggtcgacgtcaacgcccgtcacgtcatcgtggttgaagacattg

SEQ ID NO: 175007 - DNA, 283 bp, Glycine max
aaaaactcacttctcatcattcattcatcttcgttctaagagccatgtctagcaccgttggccagaccatcaagtgcaaagctgcgattgcatgggaggctgggaagccgctggtgattgaagaagtggaggttgcgccaccgcaaccggtgaagtccgtttgaagatcctctacacctctctttgccacactgatgtttacttctgggatgcgaagggccagactccattgtttcctcgcatttttggccatgaagcttcggggattgtggagagcgtaggc

SEQ ID NO: 175008 - DNA, 286 bp, Glycine max
cggcttctacgctcgcgtctcagtttcagttttggatctctctcttccctctcaccaatctgcaggatttgacaaatggcagattccaaagctggattgaggaagccagtgtttaccaaggttgatcagcttcgcccggggaccagcggcacactttaactgtgaaggtggtcaatgctaagatggtgatgcagcaaggtcgttctgatggtcctcaatcccgtcagatgcgaattgctgaatgtttggttggcgatgagactggaatgatcatattcactgccag

SEQ ID NO: 175009 - DNA, 288 bp, Glycine max
ccgctcgaggttaaatccttctgctccgcgtcttcttgttcctctcgcccagaatccgagatcaaccccgacgaaggcaaggggtttttctcggcttcttcagatttctgaaatggcgcctgtttcagctttagccaagtacaagctcgcttcctgggtgaccaatccgtgggaaaaaccagcatcatcactcgcttcatgtatgataaattcgataacacctatcaggctacaattggtattgattttctatcaaaaactatgtatcttgaagatcgaactgttcga

SEQ ID NO: 175010 - DNA, 283 bp, Glycine max
ggttaccttctcttataatatcctgtcagatcctgataaacggcgtcaatacgactcagctggctttgaggctgttgaatcagacaaccaagagttggagttagatctttcaagtctgggtgctgtcaatacaatgtttgcagcacttttagtaaacttggtgtgccaattaagacaactgtatctgccacagttttggaagaggcactcaatggtttggtgaccattcgtccactgccattgggacataatatatctaaaagggttgagaagcaatgtgcac

SEQ ID NO: 175011 - DNA, 282 bp, Glycine max
ccttgatgttggtcttattaggactacaaccggtaaccgtgtgtttggtgcccttaagggagctctggatggggggttggatattcctcacagtgataagaggtttgctgggtttgataaggaaaagaaggagcttgatgctgagttcatcgcaaatatgtttttggtggacatgttgctgcctatatgaagatcttggctgaagatgaaccagagaaataccagtcacacttcagtgaatacatcaagcgtgggatagaagctgatggtattgaggcactg

SEQ ID NO: 175012 - DNA, 285 bp, Glycine max
cgccgaagaaggttcatccaatccccgaagcccttcaccgcattgcaaccatgtcgaggagaaaggtcagagagccaaaggaagaaaacgtgactctgggcccagctgttagagatggtgaacatgtctttggcgtcgctcgcatcttgcctccttcaatgataccttcattcatgtcactgatttgtctgggagggaaacgcttgtccgcatcactggtggaatgaaggttaaggctgacagagatgaatcgtctccttatgctgctatgcttgcagctcagga

SEQ ID NO: 175013 - DNA, 282 bp, Glycine max
cagaagagcgtcgcagtcgcaaccctaatcagaagaagcgcagttcaagcgagtgacagccaccagccatgggtcgtatgcacagccgcggtaagggtatatcctcttctgctttgccctacaaaaggacacctcctagctggccaagatctcttcgcaagatgtcgaagaaaatatctgcaagtttgcgaagaaaggtttgaccccgtctcagattggtgtcattctcagagattctcacggtattgctcaggtcaatagcgtcactggcagcaaaatcct

SEQ ID NO: 175014 - DNA, 281 bp, Glycine max
gagaaaggctatgaagatcaaccacaagctgtagtgaacatgtctgctttgtggctcttaccgcgccaaatccttaatggattggctgaggccttaggtgtagtaggacagaatgagtttttcctcaccgagctacctcaatctatgtctagcctagcgtccactcttaatggccttggctcttctgtggcaaatttggttgcaagtttcattctcagtgttgttgacaatgtcactggaggtggaggacatgaaagctggctttcaagcaacataaacaa

SEQ ID NO: 175015 - DNA, 281 bp, Glycine max
gggtttcgtttcgggtttgacgttgttcacaatcactttctgcgcttcactcactcccttcgtgcggttttctttctttgtcgaactcgtgcgaaaatgcgtgagattcttcacatacagggagggcaatgcggaaaccagatggagcgaagttctgggaggtggtgtgcgcggcagcacgggatcgattccacggggaggtaccagggggacaacgagttgcaactcgagcgagtcaacgtctattacaatgaagcgagttgcggaaagttcgtgccgag

SEQ ID NO: 175016 - DNA, 282 bp, Glycine max
cctcaattactcaactaaagcttcattcattcatcgtgtcgtgttgtgttctttgcaaccatgcttcttagaacagcgtcctctttctctctcttcaacgccaacggcgaccatatactactcccttcctctgttcgctactctagggcaaacacttggttccatgcgctaccaagaactccaataaccggcccttaaccggcgtcgtatttgaaccctttgaagaggtcaagaaggagctcgaccttgttcccactgtcccacaagcttcccttgctcgcc

SEQ ID NO: 175017 - DNA, 285 bp, Glycine max
cctgacactccttcttctccgcttcctcttcgatcatcgcttcagaatgccgccgaagttcgacccctcccagatcgtcgacgtcttcgtacgcgtcaccggcggtgaggtcggcgcggcgagttccctcgccccgaagatcggtccctcggtctctcccccaagaagatcggagaagatatcgccaaggaaaccgccaaggactggaagggcctccgcgtcaccgtcaagctcaccgtgcagaaccgtcaggccaaggtcacggtggtcccatccgccgccgcg

SEQ ID NO: 175018 - DNA, 285 bp, Glycine max
tgtggattcaggatttgagcatccttcagaagtgcaacatgaatgcatccctcaagcaatcttaggaatggatgtcatttgccaagcgaaatctgggatgggaaagactgctgtttttgttctgtcaacacttcagcaagttgatctgttcctggtcaagttgcagctcttgttctttgccacacaagagaactggcttatcagatttgccatgaatttgagaggttcagcacatatcttcctgatataaaggctgctgttttctatggtggtgtcaacatcaag

SEQ ID NO: 175019 - DNA, 281 bp, Glycine max
gtggtgccttatcgctgtggttttcatcgtcttccttctcttatatttcttttttttttttggccttcgccgcacgccgaaacaatggccggaaaaggaaagggtcctgctatcggaatcgatctcggaaccacctactcttgttcggtgtttggcaacatgaccgatttgaaatcatcgccaacgaccaagggaacagaacgacgccgtcttacgtcggcttcactgataccgagcgtctcatcggtgatgcggctaagaaccaagtcgccatgaacccc

SEQ ID NO: 175020 - DNA, 282 bp, Glycine max
tgaattttcttcatccttctctgttctcctagaacttgattacttgaacattccctatgacagatgaggtggttcttctggatttctggccaagtccatttgggatgagggtcaggattgcacttgctgaaaagggtatcgaattgagtacaaagaagaggacttgaggaacaagagtcctcttctcttacaaatgaacccggttcacaagaagattccggttctcatccacaatggcaaacccatttccgaatccctcattgctgttcagtacattgagga

SEQ ID NO: 175021 - DNA, 277 bp, Glycine max
cttcttctcttgcggctagggtttagcgcacttcttctagatttaaggaagatgggtaaggaaaaggttcacatcagtattgtggtcattggccatgtcgactctgggaaatccactaccactggtcacctgatttacaacttggaggcattgacaagcgtgttattgagacgtttgagaaggaagctgctgagatgaacaagaggtctttcaagtatgcctgggtgctggacaaacttaaggctgagcgtgaaagaggaatcaccattgatattgc

SEQ ID NO: 175022 - DNA, 278 bp, Glycine max
ctaaattgaattcgaatacacaacatgcagcaggggggaggatctgagacggaagtaacatgggaagaccagcagaacatcaacaaattcggaaggttgaataatcgctttcacgagcttgaggatgagatcaaaatcgcaaggaaacaaatgataatttggaggatgcaagcaacgagttgattctcacagatgaagaggtcattcggtttcaaataggagaggtttttgctcatgtgccaaaggatgaagttgagaacaggatagaacagataaaa

SEQ ID NO: 175023 - DNA, 300 bp, Glycine max
ctgcattcggctcgagctatccttccaacccaacatcacacccctcttccttccttccttccctaatactataatttgttacgtcacggagcccaaatgtctgttacggagctcaaagagcgtcactccgctgccaccgacaccgtcaacaatctcagacacgtttaaagcattagcgcctttcgttgctcgacacagatgtttctgggtatgcaaggtctcagggtagaacacctgtgacctttggacctacggatctggtttgctgtagaaccttgcagggtcacacgggaaaggtgt

SEQ ID NO: 175024 - DNA, 287 bp, Glycine max
aaccaacctcactctctctttctctctgttttctggtaattcatcaattgattcaaaatgcagaggctcaaactgcaactagtgctattcctctcaatctcaacttgtcacactgttttctccttcactgatgggttgttgccaaagggaacttcgagcagggcccaaagccatcacaattgaaggggtccgtagtgacaggccacgatgccataccgaattggacaatttcggggttcgttgaatacataaaatcaggacaaaaacagggtgacatgttactggtt

SEQ ID NO: 175025 - DNA, 282 bp, Glycine max
gtttctgtctctgtgtttgcggctgaggattccgaacgagcgaccttcttcgtttctcgcaaagtttaagtcatcatgggtaaggaaaagactcacatcaacattgtcgtcattggacatgtcgactctgggaagtcaactacactggtcatttgatctacaagcttggaggtattgacaagcgtgtgattgagaggttcgagaaggaggctgctgagatgaacaagaggtcattcaagtatgcctgggtgcttgacaagctcaaggctgagcgcgaaagag

SEQ ID NO: 175026 - DNA, 283 bp, Glycine max
ggatgcttgaggagaaccggaggaaggttgaagaagctcagagaagggaagctttagagcagcaaagaagggaggaagaacgatataaagagctggaagagatgcaaagacagaaggaagaagccatgcgaaaaaagaaacaggggaggagcaagaacgtctaaaccaaataaagttgttgggtaaaaacaaatcccgaccaaaattgtcatttgcttttggatccaaatgaccattggcttgggcaacctgtgtctatttatttagtctaaagtgtgtttgg

SEQ ID NO: 175027 - DNA, 280 bp, Glycine max
ctccgaccccaacaaaaagaaacaagcaagccatggattcccagatccatggcttgtcctcgtaaagtcaacccctttaccagtcaaacttaaccccccttctctccccctctgaaaccgcggaagaagatcaaatcgaagatgcttaaaaaaaatgaagggttcgaacaaccggttcttcacggtggcgctggtggcggcgtggtactcctcaaacattggggtgcttctcctgaacaagtacttgctcagcaactacggcttcaagtacccaatcttc

SEQ ID NO: 175028 - DNA, 277 bp, Glycine max
cttcataatgggtgttttcacattcgaggatgaaatcaactcccctgtggctcctgctactctttacaaggccctagttacagatgccgacaacgtcatcccaaaggctcttgattccttcaagagtgttgaaaacgttgaggaaatggtggcccaggaaccatcaagaagatcactttcgttgaggatggagaaaccaagtttgtgctgcacaaaatagaaagcattgatgaggcgaacttgggatacagctacagcgtggttgggggtgctgcat

SEQ ID NO: 175029 - DNA, 273 bp, Glycine max
ggaactgctgctctgtttaattgtgtcaattgggtggagagcaattcatgggatggacgctatggacttgttgtctgcactgacagtgcagtaagataatttcctaaacattcacgttgaatttggactatattcagcaaactaaacatgctttgcactttcttatatgtaataaggacaatacaacttcctaattcaaagttctagattatgtcgtaatgatggtggattaatttcaagctctgtagaatgtatcctttctcaggtctatgc

SEQ ID NO: 175030 - DNA, 280 bp, Glycine max
  unsure (1)..(280): unsure at all n locations
gtgtctctcaaggactccaccttgttcggtctttcattttcagaacctatcaaagctaacttcagctcttctgcattgaggtgcaagagggaattcgaacaaaagctctgtgctgtgagggccgaaacagtggctacagccntccagcagttaccaagtctacaccagaagggaagaaaacattgaggaagggcagtgttgtgataactggggcttcatctggactaggcctggccactgctaaggctttggctgagacgggaaaatggcatgtaataat

SEQ ID NO: 175031 - DNA, 280 bp, Glycine max
ctctctctctctctctcttgcaatggctgccattgttttcatccacattgcatcattggtctctctttttgttgcaacaagtgcaagactccctggagtttacaccggtggcccctggcagagtgctcatgccaccttctacgtggcagtgatgcttctggaacaatgggtggtgcttgtgggtacggaaacctgtacagccagggctacggagttaacaccgcggcgctgagcactgctctgttcaacaacggtttaagctgcggcgcgtgcttcgaga

SEQ ID NO: 175032 - DNA, 282 bp, Glycine max
aagcactctctctttcccttaccctttttcaggtttcaacgctccaactatccatggcaaaccgctggctcagacccgaggtgtatccactgttcgctgcggttggtgctgctgttgggatctgtggattccaactggttcgtatatctgcatcaaccctgaagtcagggtgaacaaggagggaaggaaggcaggagttttggagaactttgctgagggagagaagtatgccgagcacttcctgaggaagtatgtgcgcaacagaactccggagattatgcc

SEQ ID NO: 175033 - DNA, 284 bp, Glycine max
atcggccagcaccaacagcatcggcggcgacagtcactctccgacaacaacacttccgcggcgaaaaatgtctctggtggcgaacgaggatttccagcacattctgcgtgtgctgaacaccaacgtggatgggaagcagaagatatgttcgctatgacctccatcaagggtattggaaggagattcgccaacatcgcttgcaagaaggccgatgttgacatgaacaaaagggctggtgagttgagtgctgcagagttggctagtgtgatgactgtggtggcgaa

SEQ ID NO: 175034 - DNA, 281 bp, Glycine max
ctcttcttcttttcttgtctccttttccattcttctttttctctctgtactcaaactcacttccccacttatttatacaatgtcggcttacaaagaccaggatacccgtcttcatggcatcaaaactaagattcgtgtcgtcccaatttccccaaatccggtattatgttccaagacattactactctattgcttgatcccaaagcatttaaggacacaatagatttgttcgttgagcggtacaagggcaaaaacatttctgttgttgcaggaattgaagc

SEQ ID NO: 175035 - DNA, 283 bp, Glycine max
tactcgagccgattcggctcgagtgctttgcctccgttccccctttctacacaaaaacaacgccttttctcttctccttcgtatctattctttgcgtttagtttttggttgattgatggcattcacagcgtaattcgttgctgcatttcatcgatttatctaaccaggactgaatgacctaatggagtctaaaggtgggaaaaagaagtctagtagtataagtagtaaatcaattttttacgaagctcccctcggatacagcattgaagacgttagaccaaac

SEQ ID NO: 175036 - DNA, 274 bp, Glycine max
atttgcagagattgggagctgacagctccatggacaggagtgcaaatcaaggtgcccgtaaaattcattacaggtgagttggactcggtatatacctcgctaaacttgaaggagtatatccacggtggagggttcaagcagatgtgccaaacttagaacaagtgattgtgcagaaaggagtggctcacttcaataatcaagaagccgccgaggaaatcaatactcacatttacgattttatcaagaagttttaatctcatccaaaaacgaattc

SEQ ID NO: 175037 - DNA, 275 bp, Glycine max
tccagagccaaggtaggttaaacactcttcttcatcgtcgtcgcaatgggacgtgtgatccgtgcgcacgtaagggagcaggctcggtcttcaagtcccacacgcaccaccgcaagggccctgcccgcttccggagcctgatttcggagagcgcaacggctacctgaagggtgtcgtcactgacgtcatccacgatcctggccgtggcgcgcctctcgctaaggtcgccttccgccacccgttccgctacaagaagcagaacgagctcttcatcg

SEQ ID NO: 175038 - DNA, 276 bp, Glycine max
cagagaggaagcttagagagagagagagagagagagagagagaggagagagtattggcgcttcatcaagatgggtatttctagggattccatgcacaagaggcgtgccactggtggcaagaaaaaggcttggagaaagaaagaaagtatgagcttgggcgtcaggcagcaaacaccaagttatcaagcaacaagacaatcaggaggattcgtgttagaggtggctatgttaaatggagggcattgaggctggatactggcaattactcatggggta

SEQ ID NO: 175039 - DNA, 279 bp, Glycine max
ctctggccaaaggctctggattccaaggtttccaagtcctgtgctgtgctttcaatacctacgtcatggaatttctcaaaaaggtttaagttctttggcgtggattcatatcaagttgcatttggattttgactttgagatctgcttggggtgctacttacgaatgttttcccggaaaaacgtaaatttcttctaatgctttatgaaaagaataacgaacaagttcaatgtataccgcctttataaaataataacaagtttcatattgtggttctggtt

SEQ ID NO: 175040 - DNA, 265 bp, Glycine max
ttctagagagagaaagtgatggccggagttaatccaaacggcgtcgccgattattgcggcggttccgacgcatggcggacagttcattcagtaccacatatttggaaacctcttcgaggttacgacgacgtaccgtcctccgatcatgcctatcggacgcggcgctacggaatcgtttgctcactgttgaataccgagacgaacgagctggtggctgtgaagaagatagcgaacgctttcgacaatcacatggacgctaagcgta

SEQ ID NO: 175041 - DNA, 266 bp, Glycine max
tttctctctcgctcgcaaacgcaaataataaaaaacaaggttttagccatggcatcgaagcggatcttgaaggaactcaaggatctccaaaaggatcctcctacctcatgcagcgccggtcctgttgctgaagacatgtttcactggcaagcaacaattatgggtcctccagacagtccttatgctggaggtgttttcctagtcactattcatttccctccagattatccctttaagccacccaaggttgcattcaggacgaaggt

SEQ ID NO: 175042 - DNA, 263 bp, Glycine max
gtttcgggagaaaaagcaatccactcagaggacccttttaattgttcaccgggttgaagttcaaaattgatcagctagaagaattcaacaatgcctcgctatgatgataaatacggcaatacccgcctctatgtgggacacttgtcttcgaggactcgttcccgtgatctggagcgtgcctttagcagatatggaagagttcgaggtgtggatatgaagaatgatttcgcttttgttgattttagtgatcctcgagatgctga

SEQ ID NO: 175043 - DNA, 263 bp, Glycine max
gtcttctgcttcaaggaaggagagcttgttattctctatcaacaaggaaaatgtcaggtgaagaggttgttgttgcagctgagccagctgctgccatcccaggcgagcctatggatatcatgactgccttgcaacttgtgctcagaaaatctctggcttatggtggtcttgcacgaggccttcacgaaggggcaaaagtgattgagaagcatgctgcacaactctgtgttctagcagaagactgtgaccagcctgactatgtt

SEQ ID NO: 175044 - DNA, 265 bp, Glycine max
tctcgagccgaatcggctcgagcccatatcaaagctcatccttggcactaaggtttttcacaagcgaatgcctcctgaagcaattgaccttgcatcaaggcttctccaatattccccaaaacttcgttacagtgcagtggaagcaatggcacatcctttctttgacgagcttcgcgagcccaatgcccggctacctaatggtcgtccactgcctccacttttcaactttaaacaggaattagatggagcgccccctgaactgctt

SEQ ID NO: 175045 - DNA, 263 bp, Glycine max
ctaagacgacaaggacaacattatttgacgacttaaccccaaacaaaggctctgcaattgcaaattcagaggatgtcgatcttcgagtacaacggaagcgccgtggtggctatggtcggcaagaactgcttcgccattgccagcgaccgaaggctcggcgttcagctccaaactatagccacggattttcaacgcatttccaagattcacgacaagctcttcatcgctctctctggcctcgccaccgatgctcaaacattgta

SEQ ID NO: 175046 - DNA, 262 bp, Glycine max
gcaggcgcagagtagagcagcacagaagagggaaaacggcaccgccgccgtagaagaaaacaaccatggtgcacgtctccttttacaggaactatgggaagacattcaagaagccgcgtcgtccgtacgagaaggagcgtctcgacgcggagttgaagctggttggtgagtacgggcttcggtgcaagagagagctgtggagggtgcagtacgcgctcagccgcatccgcaacaacgcgcggaacctcctcaccctcgacga

SEQ ID NO: 175047 - DNA, 262 bp, Glycine max
gcgcctggatacaagttatgccttggaatggaagagaattccgaatcagctttggtctacgaacaaggaagctataagtaatgcaactaggaatctcatggagagttcgatcctggctcaggatgaacgctggcggcatgccttacacatgcaagtcggacgggaagtggtgtttccagtggcggacgggtgagtaacgcgtaagaacctacccttgggaggggaacaacagctggaaacggctgctaataccccgtaggct

SEQ ID NO: 175048 - DNA, 263 bp, Glycine max
aaacaggagaactgttgatgttattgcatccagactgtatttttactattcgtatagctatgagcttacaggagatcttgctgaaattcggggcaacctccttgcattgcaccgatttgcgactctccgccatgatgagctgggacaggaaacacttcttaatttgttacttcgaaactaccttcactacaacctatatgatcaggctgagaagttgaggtccaaggctcctcgatttgaagcacattcaaaccagcagtttt

SEQ ID NO: 175049 - DNA, 263 bp, Glycine max
gcttcttgttgttggaaagaaaccctagcaagcggaacaatggcagacgttgaggtcgatgtggcggctgcagcagcagcagggcagccgaagaagagaacgttcaagaagttcagtttcaggggcgtggatctcgatgcgcttctggacatgtccaccgatgaactcgtgaagatgttcagtgctcgcgcacgtagaaggttccagagaggcctcaccagaaagcccatggccttgatcaagaagcttcgcaaagcgaaaag

SEQ ID NO: 175050 - DNA, 262 bp, Glycine max
cttttcgagaaaggaaaaaaaaagagtttccggcattattccatcatgatcgctcttcccattcttctcttcttcctcttcgtttcggcattagtttatgcgaagaaaactggcgatgtgacggagttgcaaattggcgtgaagcataaaccagcatcatgtgaagttctggcacacaaaggtgacagagtcaaagtacactatcggggaaaactcactgatggaactgttttcgattctagctttgaaagaaataatccaa

SEQ ID NO: 175051 - DNA, 261 bp, Glycine max
ctcaaacctgaaatagtggaggacttccgtaactatgctgacttttgcttcaagacatttggtgatcgggtgaagcactgggtaaccctaaatgaaccatatggctacagcgtgaatggctacagtggtggaaattttgcaccaggtagatgttctaactacgttggaaaatgccctgctggtgattcttccaccgagccctacattgttaaccaccacttaatacttgctcatggagcagcagtcaattgctacaagaac

SEQ ID NO: 175052 - DNA, 259 bp, Glycine max
ctctgttctctctccccctccccgattcgttttgcccctttcgttgccctaatttcaaccatgcctcgccgtagctccggtggaagatctgcccgtcctgctcctcgtgcagcacctcgtcctgctccagttcaccatgctcctcctccagcccctgctcagagcggtggcggatctatgcttggtggcattggttcaaccatagctcaaggtatggcttttggcactggaagtgcagtggcacacagggctgtggatg

SEQ ID NO: 175053 - DNA, 260 bp, Glycine max
ctaacgcgtgcatagcagagtcagagacagagacgcagccatagggcggagacctgcgaggtgttataggcaaattaagaacaagccataccccaagtcacgtttctgccgtggtgttcctgatcccaagatcaggatttatgatgttggtatgaagaagaaggagtgttgatgagtttcctttctgtgtccatctggttagttgggagaaggaaaatgtttcaagtgaggccctggaagctgctcgcattgcttgcaac

SEQ ID NO: 175054 - DNA, 263 bp, Glycine max
cacaagcactctctctttcccttaccctttttcaggtttcaacgctccaactatccatggcaaaccgctggctcagacccgaggtgtatccactgttcgctgcggttggtgctgctgttgggatctgtggattccaactggttcgtaatatctgcatcaaccctgaagtcagggtgaacaaggagggaaggaaggcaggagttttggagaactttgctgagggagagaagtatgccgagcacttcctgaggaagtatgtgcgc

SEQ ID NO: 175055 - DNA, 260 bp, Glycine max
gatgcatttctatttctaactaattattgtgcttattattattgttgagaaagaaaagaatggcaaagttaataaaattctttgagttgaacacaggggccaagattccttctgttgggttaggcacttggcaagctgagcctggtgttgtagccaaagctgtcaccacagccattctggttggatacaggcatattgattgtgctcaagcgtataacaatcaagcagagattggttctgctcttaagaagctttttgat

SEQ ID NO: 175056 - DNA, 262 bp, Glycine max
gtatgcaacggccacagccatagtcgcctgaaaccgattgttgttgcagggaaaacacagagatccgggtcgacccgttgcagatccgatccaaataagaaaagatgaatattttcaggttagccggggacatgacccatttggccagcgtcctcgtccttcttctcaagatccacaccatcaaatcctgcgccggtgtctcattgaagactcaagaactctatgcactcgtttttgcttgtcgctacctagatatctttac

SEQ ID NO: 175057 - DNA, 260 bp, Glycine max
atctgattcgttcgttcactttcactttaccaactcctaacaatttctctctgtttccttcttcaccgcatcaatggagttggacggcgttctcctcggcatgtgcaaccctctcctcgacatctctgccgtcgtcgacgacgctttcttgcaaaaatacggtatcaagttgaacgatgcgattctcgctgaggataagcacaaacctatgtatgaagaattggctaacaatcctaatgtggagtacattgctggaggtg

SEQ ID NO: 175058 - DNA, 257 bp, Glycine max
cagaagttaggagagagaaagagagagagagcgtacagatctgtttgaccaaaacccctcacaacacataaatcagacagacttaagaaagaaataagagaacaacagagcaatggaaggaggaggagctgctccgccggccgacaccgtgatgtccgacgcggcgccaccgccgcagcagcctccggtggcgatggggatcgagaatattccggcgacgctgagccacggtggcaggttcatccaatacaacatat

SEQ ID NO: 175059 - DNA, 257 bp, Glycine max
ggttttctgattaactctttcttctcataactctgccgccgcaacagccccaaatccaatggcttcagagaagaaactttcgaacccaatgagggagataaaggtgcagaagctcgtcctcaatatctccgttggcgagagtggagatcgtctcaccagagccgctaaggttttggaacagcttagtggccaaacccctgtgttttccaaagcaaggtacacggttcgttcctttgggattagaagaaatgagaaga

SEQ ID NO: 175060 - DNA, 256 bp, Glycine max
ctcgtgtatcgtctcctaaaaaaaatggaattgatgtgtcattgttcgagcttacttcttccgccggagaatcctaacacgacgtgttcgctttctctaaagtacgctctcgttgttctcaaccaaagcctcccgagatttgctcccctgctttgggaccacgctcaagtgcgagtttgtgctgatggaggtgccaatagggtgtatgatgaaatgcctcttttcttccctcatcaacaaccttcccatgttcgca

SEQ ID NO: 175061 - DNA, 258 bp, Glycine max
acaaaatgtacacctcgaggaagaaaattcacaaggataaggatgccgagcccactgaatttgaggagacagttggacagtacttgttcgacttggagaacaccaatcaggatctgaaaagtgacttgaaagatctctacataaaccaagctattcaaatggatgtggctggtaatcgcaaggctgtagtcatctatgtgcctttcagattgaggaaggcattccgcaagattcatcttcgacttgtcagagagttgg

SEQ ID NO: 175062 - DNA, 257 bp, Glycine max
ggctcgtaagatctcggcggatacggagcggaaggagaaggagagtcgagagaaggaggaccagtactggcgagatgcggagggttcaaagtcacgcgccgcgaagaagaaggaggaagaggccgaaaagagggcggaggcagccgcgcggaaagcggaggcgcgacggttggcggagcaggaggagaaggagctggagaagtcgatgaagaaggtggacaagaaggcgacacgggtgtcgatcccggtgccgaagt

SEQ ID NO: 175063 - DNA, 259 bp, Glycine max
gtttttgtgtgtcgcttcttcgtaggtgcagctgcaatggtgaagggacgccaaggagaacgtgtcagactctacgtgaggggtacaatccttggatacaaaaggtccaagtcaaaccagtatccaaatacatccctgatccaaattgagggtgtgaatgccaaagaagaagtagcatggtatgctggcaagaaaatggcctatatctacaaggctaaggtgaagaagaatggaagccattaccgctgcatatggggca

SEQ ID NO: 175064 - DNA, 256 bp, Glycine max
gcaagccccactcaaccaccacacctctcctcgttcacgctacccctttctgctcttcttctacctttcaagttttaaaagtataaagatggcagagacattcctatttacctcagagtcggtgaacgagggacaccctgacaagctctgcgaccaaatctccgatgctgtcctcgacgcttgcctcgagcaggacccagacagcaaagttgcctgcgaaacatgcaccaaaaccaacttggtcatggtcttcgga

SEQ ID NO: 175065 - DNA, 251 bp, Glycine max
cttagtcccaattttctagggttttattcattttccgatggcttctgcagatgttgagtaccgttgctttgtcggtgggctcgcttgggccactgacgaccatgccctcgagagagccttctctcagtacggcgaaatcgttgaaacgaaggtctgtttgttgcaggcatcacatctgatctcacacgattcggattcggaattttctcgatcccgttctgatctgtgatctctgatctgtttgcgttact

SEQ ID NO: 175066 - DNA, 253 bp, Glycine max
gtttgcagttgtctgcatgcattgttattttcaaagtccgctttatcaagctgacaagtcaaataaattattccctctctcctagtagtgggggaatagatttgttcctgtatctgatcgaggtttttataatcgtcataatataataacaatttacgttcaaaaaaaaaaaaaaaaaaaaaaaaaaaaaaaaaaaaaaaaaaaaaaaaaaaaaaaaaggggggcccccccatttggagccccctcgcccggg

SEQ ID NO: 175067 - DNA, 253 bp, Glycine max
ctgctcgtgcctctacggttatcatatctccatttccatttcctctctctcagtttccaagaatcttaagctatgggaaagtcttacccaaccgtgagcgctgattaccagaaggccgttgagaaggcgaagaagaagctcagaggcttcatcgctgagaaagagatgcgctcctctaatgctccgtttggcatggcactctgctggaacttacgacgtgagctcgaagaccggtggtcccttcggaaccata

SEQ ID NO: 175068 - DNA, 190 bp, Glycine max
cctagagcttgcacctattggtatcttctacaatatcctctcatagtgctcttcttcttcttcattttcattatcaagatgtctttgctttcggatctcatcaacctcaatctctcagaatccacagaaaagatcgttgctgagtacatatgggttggtggatctggtatggacctcagaagcaaagcca

SEQ ID NO: 175069 - DNA, 256 bp, Glycine max
  unsure (1)..(256): unsure at all n locations
ggagagctgtancgtgtgatctgcgacaccaanggagctttcgtgcagccggctatatacgaggcttttggntngaacantggttgangccatgacttgtnggttnccaacattcgccacatgcaatggnggncctgctgagatcatngtgcatggcaagtctggcntccacattgacccttaccatggtgaccgtgctgcngatctcctngntgacttctttgagaagtgcaagcttgacccaacccactgggna

SEQ ID NO: 175070 - DNA, 257 bp, Glycine max
attggaagaaccaccactaccttatccatttccactcctcaccaagcctcaccatggcctcaaccaacgccctctcttcagcttccattctacgctctcccaaccgccagtctctgaccagaagagcgaaccacaacggaagagtaaattaccgtcaaccgaatagccgtttctccgtcaaagcctccgccaaagagattgcctttgaccagcattcccgctctgctatgcaggccggcattgacaagctcgccgac

SEQ ID NO: 175071 - DNA, 256 bp, Glycine max
cgccgtcgttacgctctccggcgaccctctccaccctcagggcgccaccacccacgtccacaaagacgccggcagcaaccccacgtggaactaccccgtgaaattctccgtcaacgaatcgctggccaaggagaatcgtttgtctcttgagatcaagctcgtctccgaccgcaccctcggcgacaccgttatcggcaccgtccatgttcctctcagggaactcatggacaatcccggcgacgacggttccttccgc

SEQ ID NO: 175072 - DNA, 255 bp, Glycine max
agcctatcaaggagggtgctcttggaaatattccaactattgctttttgcgacactgattctccaatgcggtatgttgatgttgggattcctgccaataataaggggaagcatagcattggttgtctcttctggctattagctaggatggtactgcagatgcggggtactattcgtccaggtcacaagtgggatgtaatggtggacttattcttctatagagaacctgaagaggccaagcaacaagaggaagatg

SEQ ID NO: 175073 - DNA, 254 bp, Glycine max
cagaagactgctgcatttataaaacgattagcaacgctttcactgtgtgttggatcagcagattccatggctgccttggtcacagtaaagcatcttcttcagaagaatgttaagtgcagaaatttattggaaaatgacattggctgtgggctctgtttcgggcacaattcataaatatctaccatattccacagatcccaatttaagtggtgcccttgcctcagtactttgggaactcaatcttttgtctagtc

SEQ ID NO: 175074 - DNA, 252 bp, Glycine max
acaacctctctttctcgtctccgtccgtgcaacctgggaagcaatggcttggagaggaaatcttttgaaaaacataaaagaacttaggtttttgatgtgccagtcatcacctgcaagctcagccacaagggcttttgtggaaaggaattataaggaactaaagacattgaacccaaaattgcccatattaatccgtgagtgcagtggagttgaaccccaattatgggcaagatatgatttgggtgttgagaa

SEQ ID NO: 175075 - DNA, 255 bp, Glycine max
cgctgactgaaactcgcaaaaattagggttttgcagtgatggcactgtccaaccgcgtccgatcgggaatctctctcttcaccaaatccacgttcctcacttccgagcgatccactctccaacgattcctcgttgccccttccatttccttcgcctccagaaattacgccaacgtgccggggcaaaaggaaaacaaagttaaggtccctctggctttgtttggaggttcaggaaactatgcctctgctttgtata

SEQ ID NO: 175076 - DNA, 255 bp, Glycine max
agaaaatggcggtacctctgctctcgaagaagatcgtgaagaagagggtgaagaagttcaagaggcctcagagtgacaggaaaatttccgtcaagacaaactggcgtagaccaaagggtatagattcccgtgttaggagaaagttcaagggatgcactttgatgccaaacatcggttatggttctgacaagaagacccgccactatctccctaatggttttaagaaatttgttgttcacaatgtgaaggacttgg

SEQ ID NO: 175077 - DNA, 255 bp, Glycine max
ccataacctggcggtgagcttcgtgatccccactgacagcccaccttcaaaagcccaaaaggcagttctggaggcccttccggactcaatttcccacaccttcctccctccggtcaatctctccgacttcccgccggacaccaaaatcgaaaccctgatctcccacaccgtcctccgctcccttccttccctccgccaagcattccactccctctccgccacaaacaccctctccgccgtcgtcgtggacctctt

SEQ ID NO: 175078 - DNA, 255 bp, Glycine max
gtttagtgtcaaaatggcggcgagtagaagcactttacctctgatgaagtacttgagagtgcgcgtggacgctcttccccgcaacactcccttgaccctcgcttccaacttgttgattcgccgcttctccgaagaggttaggggttgttttctcgacaagtccgaggtcacagatcgcgtcatttcctgcgtcaaaaacttccagaaagtcgatccttctaaggttaaccctaatgctcacttccagaatgacct

SEQ ID NO: 175079 - DNA, 254 bp, Glycine max
tctcgagccggctcgagcggctcgagattcgctcgccttgcttcgccacacaacagcaactgcagcaatggctcccaaacgaggtggaaaggctccggctcttgccgctaagaagaagcctgagaaggtttcgaatccgttgttcgagaagcgtccaaagcagttcggaatcggaggggcgttgcctccgaagagagacttgactcggttcgtgaagtggccaaagaatgttcaaattcagaggaagaagagga

SEQ ID NO: 175080 - DNA, 251 bp, Glycine max
  unsure (1)..(251): unsure at all n locations
gttcatccaatccccgaagcccttcaccgcattgcaaccatgtcgaggagaaaggtcagagagccanaggaagaaaacgtgactctgggcccagctgttagagatggtgaacatgtctttggcgtcgctcgcatctttgcctccttcaatgataccttcattcatgtcactgatttgtctgggagggaaacgcttgtccgcatcactggtggaatgaaggttaaggctgacagagatgaatcgtctcctta

SEQ ID NO: 175081 - DNA, 250 bp, Glycine max
gtgcttcaaacccctttttctcttctcatttcctttcatcactctcttgcttcttttcttcttctcgcaattttccattttcacacttttagcgtaagaacatcttttaatggcgtcccaaatccgtgagtggtctggaatcaatacattcgcacctgctacccagactaagttgcttgaactcttgggaaatcttaaacaagagaatgtgaactccttgactatacttgtgatgggaaaaggaggtgtt

SEQ ID NO: 175082 - DNA, 250 bp, Glycine max; identical to SEQ ID NO: 119486

SEQ ID NO: 175083 - DNA, 251 bp, Glycine max
atcgagcttcagcaatggtgtacgtcaaggctcagaaatcaaaagcctacttcaagagatatcaagtcaagttcaagagaagaagagagggaaaaaccgattaccgtgccaggattcggttgattaatcaggacaagaacaaatataacactccgaaataccgatttgtggttcgctttagcaacaaggacattgttgcacaaataatatctgctagcattgccggcgatttagttcttgctacagcatat

SEQ ID NO: 175084 - DNA, 287 bp, Glycine max
ttgctggaggcactggagtcatgccgggaggtaatgttggggctgatcacgctgtgtttgaacaaggtgcttcagcaggaaatgttggcactgataaagtagtagaacaacagaaagcgaacccagtggcactccttctctcgtcggccatgatgcttagacatctccagtttcctgcatttgctgaccgattggaaactgccgttaaaaaagtgattctggaaggcaaatatcggacaaaggaccttggagggacaagcaccacccaagaggttgttgatgcagtg

SEQ ID NO: 175085 - DNA, 279 bp, Glycine max
atatgcaacggccacagccatagtcgcctgaaaccgattgttgttgcagggaaaacacagagatccgggtcgacccgttgcagatccgatccaaataagagaagatgaatattttcaggttagccggggacatgacccatttggccagcgtcctcgtccttcttctcaagatccacaccatcaaatcctgcgccggtgtctcattgaagactcaagaactctatgcactcgtttttgacttgtcgctacctagctatctttactaattatgtatctctc

SEQ ID NO: 175086 - DNA, 280 bp, Glycine max
agaagacgaaggacagagcaatgcctcgatggtagcatctgcatcttcaccctcctcggagtgtttcaccctaaatgaggctagattgaaagaacgcaattacctgggattgtcagattgctcttcggtggacagttctattgtcccgagtttgtctgatgagaaaaaggagaatctgaatttgaaggctactgagttgaggcttggacttcctggatcccagtcacctgaaagggatccggatcttttctcgttgagctcaacgaaactcgatgagaag

SEQ ID NO: 175087 - DNA, 281 bp, Glycine max
tctgtccccgctgcgtctctcgtaatcatgcctaagcaaatccacgagattaaggatttccttctcactgccagaaggaaggatgcgaggtcagtgaagatcaagaggagcagagatgtggttaagttcaaggtcagatgctccaagtacctctacacactttgtgtgtttgacccagagaaagctgataaattgaagcaatctcttcctccaggtttgagtgttcaagacctgtaaaggtactgggcgagagatcaagaagaagcaattcattgattctt

SEQ ID NO: 175088 - DNA, 281 bp, Glycine max
aatacagagtgcgttgttgctccttcgccacaactccctgccaacatgggtatctccagagattctatgcacaagaggcgtgccactggtggcaagaagaaggcatcgaggaagaagagaaagtatgagcttggtcgccagcctgctaacactaagctgtcaagcaacaagacagtcaggaggatccgggttagaggtggaaatgtgaagtggagggcactgagattggatactggaaattactcctggggaagtgaagctgtaactcgcaagactcgtat

SEQ ID NO: 175089 - DNA, 261 bp, Glycine max
ccagatcacgaaactaaagaagatggagaaagcgatcagcagacagaagattttgcttcatcatctcaacccttcatcgtctacccacgtcaacgaatcatcctccctctatgcttcagcatgtgtggcgggggacagcgctgcttatcaaaggacatcgacattcagggatgatgttgtgatcgtggctgcttatcggactgctcattgcaaaggtaaacgtggtggtttcaaagatactcttcctgatgatctactggc

SEQ ID NO: 175090 - DNA, 261 bp, Glycine max; identical to SEQ ID NO: 175089

SEQ ID NO: 175091 - DNA, 282 bp, Glycine max
tggcaagatgtcgaagagaggacgcggtggttcggcggggaacaagttccggatgtcgctgggtctgccggtggcggcgacggtgaactgcgccgacaatacgggggcgaagaacctctacatcatatcggtgaaagggatcaaagggcgtttgaaccgtctcccctcggcttgcgttggcgacatggtgatggccaccgtgaagaaggggaaacccgatctgaggaagaaggttttgccagctgtcattgttcgccagcgcaagccatggcgccgaaagga

SEQ ID NO: 175092 - DNA, 279 bp, Glycine max
ggcttgcagaattgtgctgtgtggatgcctaatgttgataagactgagatgaacctcactcatgaattgaatgggaggaattttaatttgactatacccattagtgatccagatgttgtgagaatcaagggaagtgatgatgtaaatatactcagctctgactcagcacttgctgttgggagtagaggagtttctggagaggcaggaccagttgcggcaattcgaatgccaatgctacgggtttgtaatttcaaaggaggaacacctgagctaagacag

SEQ ID NO: 175093 - DNA, 285 bp, Glycine max
tctgtccccgctgcgtctctcgtaatcatgcctaagcaaatccacgagattaaggatttccttctcactgccagaaggaaggatgcgaggtcagtgaagatcaagaggagcagagatgtggttaagttcaaggtcagatgctccaagtacctctacacactttgtgtgtttgacccagagaaagctgataaattgaagcaatctcttcctccaggtttgagtgttcaagacctgtaaaggtactgggcgagagatcaagaagaagcaattcattgattcttctga

SEQ ID NO: 175094 - DNA, 278 bp, Glycine max
ctgatggcttaagggatcacttggccaattttgctgaacaattaaataaagcaagacagatgatttatcctcctgataggagatcatcaaaacttggagctttacttccctctttgacagaggttgtggccaaagaacacaagaggcttcttgctcgaaaatcaattattgagaaaaggtaagaagaacaagaacgacagcttcttgaaatggaacgggaggaggagtcgaagaggctaagactgctgaaaataactgaagaagcggaacaaagaagg

SEQ ID NO: 175095 - DNA, 277 bp, Glycine max
tgtttggtttggtttggttacttgaaaatctcgaatcgcttaattttgatttagttttccaccgcaacgcggaacctctttctcgaactggctaactctcaggcaagtggctcggacgctgattccagcaacacgcggctggtggttgcactgtatgacgccctaaactccggcgactccaacgccgtcgtcaagatcgtcgccgccgatctcgagtggtggttccatggtccgccctctcaccagtttttgatgcgcatgctcaccggcgactccg

SEQ ID NO: 175096 - DNA, 278 bp, Glycine max
cattttcacttctctctctctctttagggttttggctctctctctctctctcccgccttattcctctctacctctcacatccttcacaatgactaacaacaacgacaacatcgccgtgacagatctcacttccgcactcaatgcagagaatcgtgccgacctagatcactgctctcaagagcaatattcagagtctggctgcggttcattccgatgtactggagactctaaccccgaatgtcaagaaacgtgttgaatctcttagagaccttcagggt

SEQ ID NO: 175097 - DNA, 279 bp, Glycine max
caacatatgcaaattctcgttcgggctcgacccgggttgtctcctaccgaatctcccagtctcggacctcgccgtcgcgtttgacctggcctcaaagctctccgccgaacgcgccatgaacgcgtcgccgtttatttggaaactaaaacgactcctcaacataggatccgagaagaaactgagagaaacaattaacgtcgtaaacgacgtcgcaaaagagatgataaagcagagaagagaaatggggttcaagacgcggaacgaccttctctcgcggtt

SEQ ID NO: 175098 - DNA, 279 bp, Glycine max
gctacctacccatgggaaagattgccctagccaatgtcctcttggtccttctcttgaacttgagcactttgctcaatgttcttgcttgtccctattgcccttacccatctcccaagcctcctccaaaaaagcctcccattgtgaaaccaccagttcacaaacaaccaaaaccatgtccaccacccaagtcatctccaaaaccaccccatgtacacccaccctatgtcccaaaacctcctcactaccctaaaccaccagttcatccacatccaccccatg

SEQ ID NO: 175099 - DNA, 279 bp, Glycine max
gctgatccacacattctaatcactgatccattcatgtggaactgtgacgatggtgagaattaccgtcccacaaggccattcagtttggacaccagcacacgcttcaagctttcccctcataatgagtatctattcttcaattgcagtgaggatcatgtgatcgttaagccaaagccaattttctgtgagcgcttccctgagcgttgtgactcttcgtgtgacagtggtagttatctctgcaggcacatgccagggtgctcctttgctatgagtggtagc

SEQ ID NO: 175100 - DNA, 280 bp, Glycine max
gagagagagagagagagagagagagaggagagagtattggcgcttcatcaagatgggtatttctagggattccatgcacaagaggcgtgccactggtggcaagaaaaaggcttggagaaagaagagaaagtatgagcttgggcgtcaggcagcaaacaccaagttatcaagcaacaagacaatcaggaggattcgtgttagaggtggcaatgttaaatggagggcattgaggctggatactggcaattactcatggggtagtgaagcagttactcgcaag

SEQ ID NO: 175101 - DNA, 274 bp, Glycine max
aaacctagtgcaccgtaagggttgtgaagcaggcagagaagagccatggtgcacgtttctttctaccgaaactatgggaaaacgttcaagaagcctcgtcgtccctacgagaaggagcgtttggacgccgagttgaagctggtcggtgagtacgggcttcgctgcaagagggagttatggagggtccagtacgccctgagccgcatccgtaacaacgccagaaacctattgacccttgatgagaagaaccctcgccgtatcttcgagggtgaag

SEQ ID NO: 175102 - DNA, 275 bp, Glycine max
ctcgagccctcttctttttactctctctctgtctctctctacgctttctcgttcgagatccctcaagggatccactaactgaaggagaaatggggttgacattcaccaagcttttcagccggcttttcgccaagaaggaaatgcgaattctgatggtgggtctcgatgcagctggtaagaccaccatcctgtacaagctcaaacttggagagatcggtaccacaattcccaccattgggttcaatgtggagactgtggaatacaagaacattagt

SEQ ID NO: 175103 - DNA, 272 bp, Glycine max
ggagctttgagggttgattctctggtgtagtagcaatcagcacaatagaaaatgttttttgacggatatggatatcatgggacatcatttgagcagatatatcgatgctacccagcttcctttattgaaaagccccaaatcgaaagtggtgacaaaattatcatgcctccatcagcccttgaccgtctagcatctctgcatattgattacccaatgttgtttgaactccgtaatgatgctgccgagcgggtttctcattgtggggttctgga

SEQ ID NO: 175104 - DNA, 271 bp, Glycine max
accggatcccccttcgaagtgaattatattgcagcgaatcacacacactctgaacaacgcccaccatgcaggccagtgataggtttaacatcaattcccagcttgagcatctccaagccaaatatgttggaactggccatgccgatttgaacagatttgagtgggcagtgaacattcaacgagatagctatgcatcatatattggacactaccctttactgggattctttgctattgctgaaaatgaatctattggaagagaacgctacag

SEQ ID NO: 175105 - DNA, 275 bp, Glycine max
ggctctgtcatcccggagcctggaactgatttcagctgaaatggttaccattttagtgcatatccttgcttagcttcatatcagaattctcaacctcaaggttcacagaatgagaatgatccaaataatacaactatttttgttggtaatttggatcctaatgtcactgatgatcatctgaggcaagttttcagccagtatggagaattagtgcatgtgaagattccagcaggcaagcgatgtgggtttgtccaattcgcagacaggagctgtgc

SEQ ID NO: 175106 - DNA, 276 bp, Glycine max
ggagaaactgaagaagtatgctactgtggttcgtgttttggctcacactcagatcaggaaaatgaaagggttgaagcagaagaaagcccatatcatggaaattcaggttaatggtggtagtattgcacaaaaggtggactttgcatacagtttctttgagaaacaggttcctattgatgcagtgttccagaaggatgagatgattgacatcattggtgtgaccaagggtaaaggttatgagggtgttgtcactcgttggggtgttacccgccttcc

SEQ ID NO: 175107 - DNA, 277 bp, Glycine max
gcgaaacgctcttcgttatcttttctcagactccgcggcgtagatccgaggagttcgggaaatcctaactcatcatctcaactcaagtcatggctggacttgcacctgagggatcacagttcgatgctcgtcaatatgatactaaaatgagtgacttactttcatctgatggacaggacttcttcacatcctatgacgaggtttatgatagttttgacgctatgggtttgcaggaaaatcttctcaggggaatttacgcatatggttttgagaagcc

SEQ ID NO: 175108 - DNA, 276 bp, Glycine max
atgacctaaagaaggcatggaaggttggtgttctcactgcggtcatcaagcatatgtcccctgatattgccaaaattcgcaagcttgtgaggcagtctaagtgtcttcaagacaaaatgactgcaaaggaaagtgcaacctggcttgccatcatcaaccaagaggaagccttggctagagagctttaccctgactattgccctccattttcctctgctggaggtaatggatccttggtgatcaatgattgcagcgagtatgatgttgatggggccg

SEQ ID NO: 175109 - DNA, 279 bp, Glycine max
gccgctgcggcagagatccagcagcaatggtgtacgtcaaggctcagaaatcaaaagcctacttcaagagatatcaagtcaagttcaagagaagaagagagggaaaaaccgattaccgtgccaggattcggttgattaatcaggacaagaacaaatataacactccgaaataccgatttgtggttcgctttaggcacaaggacattgttgcacaaataatatctgctagcattgccggcgatttagttcttgctacagcatattcacatgagctgccac

SEQ ID NO: 175110 - DNA, 279 bp, Glycine max
ctcgttagtcgtttgtaacgcctttgtttgcgttttttgcacagaagaattaacacgtatatagcaagcatggcagtcacactctacgaccttagctctgcctctgggttgaagaagcttgatgagtaccttctcccacgcagctacatcaccgggtaccaagctacaaaggatgatcttactgtttatgcagctttgccaactgctccatcagatgaatatggaaatgtttccaggtggtacaagcacattgatgctttgttgagaatctctggtgtt

SEQ ID NO: 175111 - DNA, 271 bp, Glycine max
agctgagaaagaagaaggaattattcctcttacggattcattgcccattatttctcagtcctacattacgcattcccttaaagtggaaggtcttcgaggcattgtaactgtgcctgccaagctggagtctacatctctcgtctttgcctatggagttgatctattttttactcagattgctccttctaggacttacgattcactaactgaagatttcagctatgctttgcttcttctaacaattgttgcacttgtagctgtgatatttgtc

SEQ ID NO: 175112 - DNA, 274 bp, Glycine max
ctaatccttttcctttgtgtttattttccatcttccattaatatgggtgttgttactcagatttatgatacccctgctgctgtgcctcctactaggcttttcaaagccatgacattagatttccataacctcttcccaaagcttgtggatagcatccacagcattgttttcacccaaggaaatggtggtcctggcaccatcaagaagatcaccaccattgaaggtgacaaaaccaagtatgtgctgcacagagttgatgcaattgatgaggcta

SEQ ID NO: 175113 - DNA, 319 bp, Glycine max
cgtacgtaagctgcaaatatccgctcgattcagctcgttggaggcagagaccgagagagcaactgcacgcactgtaactctctcaccgtttcttccgctttgatggaacagtacgagaaggttgagaagataggcgagggaacatacggcgtcgtttacaagggtcgcgaccgctccaccaacgagaccatcgccttgaagaagattcgcttggagcaggaggatgagggggttcccagcaccgccattcgcgagatttctctcttgaaagaaatgcagcacaggaacattgttaggttgcaggatgtagtacatgatg

SEQ ID NO: 175114 - DNA, 275 bp, Glycine max
ggacagaagagagcgtcctagtcgcaaccctaataagaagaaccacagcttcaagcgagtgacatccaccagccatgggtcgtatgcacagccgcggtaagggtatatcctcttctgctttgccctacaaaaggacaccccctagctggctcaagatctcttcgcaagatgtggaagaaaatatctgcaagtttgcgaagaagggtttgaccccgtctcagattggtgtcattcttcgagattctcacggtattgctcaggtcaacagcgtcact

SEQ ID NO: 175115 - DNA, 273 bp, Glycine max
gggagagctgtaccgtgtgatctgcgacaccaagggagctttcgtgcagccggctatatacgaggcttttggtttgacagtggttgaggccatgacttgtgggttgccaacattcgccacatgcaatggtggtcctgctgagatcattgtgcatggcaagtctggcttccacattgacccttaccatggtgaccgtgctgctgatctccttgttgacttctttgagaagtgcaagcttgacccaacccactgggaaacaatctcaaaggctgg

SEQ ID NO: 175116 - DNA, 269 bp, Glycine max
ctttccacactcaatttttcggcatcaacatgaacaatccaactcttataaccttcttccttgttattttcttcgtcttcttcgcggcgtcggcggacggcggcgacgatgagccgctgatcatgcaggtggtggagggcagcggcgtccggttgggagcagagcaccactttttggacttcaagcgcaggttcgggaaggcgtacgcttcccaggaggagcacaattacaggttcgaggtgttcaaggctaacatgcgccgcgctcgc

SEQ ID NO: 175117 - DNA, 270 bp, Glycine max
  unsure (1)..(270): unsure at all n locations
tacattnctaatctcattctccttctgttcaaacactctcatgggcatcagataagaagattaggatcggcatcaacggatttggaangattggccgtttngtggccagggttgcccttcaaaggaatgatgttgaacttgttgctgtcaacgatcctttcatcaccactgattacatgncatacatgttcaagtacgacaccgttcatggccagtggaagcnttttgatgtgaaggtgaaggactctaanacccttctctttgggnaaa

SEQ ID NO: 175118 - DNA, 269 bp, Glycine max
caagagacaaggctaatcatttggctttagtgaaatatttgaaaaaggatctcatgaatgtagatgttccatcaaatgattcaaaaccggaagatgaaagtgatccttctgttaattctaatgatcagtttgtgtggccttggattggagttgtagttaatattccaactagacggacagtagatggacgctgtgttggtgagagcggttctaggctgagggatgagtacagaagcaggggtttcaatccagtgcgagttaatcctttg

SEQ ID NO: 175119 - DNA, 270 bp, Glycine max
gttgtgttgagcagagagagagagtgagggataagaagagaatagggttagggttagggtttgattgaggatgccgaagaacaagggaaagggaggtaagaacaggaagaggggaaagaacgaggcggacgacgagaagcgggagctggtgttcaaggaggacgggcaggagtacgcgcaggtgctccggatgctggggaacgggcggtgcgaggcgatgtgcatcgacgggacgaagaggctctgccacatccgcgggaagatgcacaa

SEQ ID NO: 175120 - DNA, 268 bp, Glycine max
gcgcgatgctgtgggacagccaatgcccattcaagctttggctacagccctcgcaaatgctccaccagaacagcagaggactatgctcggtgaagctttatacccacttgtggatcagctggaacatgattctgctgcaaaggttacaggcatgcttctggagatggaccagcctgaagttttacatctgattgagtcaccagatgctctgaaggcaaaagttgctgaagccatggatgtgttgagaaatgttgctcaacagcaaacc

SEQ ID NO: 175121 - DNA, 274 bp, Glycine max
ctcgagccgcatcaatactattttcttgtcgttgagaagcttcgcgaacgaaagcaaagaaccctagaccgtcacagaaccattccatagccatgtctggtgttggccctctttctcaggattgggaacctgtcgtcctccgcaagaaggctcccaccgccgccgccaagaaggacgagaaagccgtcaacgccgcccgccgctctggcgccgaaatcgaaaccctaaaaaagtataatgctgggacaaacaaagcagcatctagcggcacttc

SEQ ID NO: 175122 - DNA, 278 bp, Glycine max
gttttcacaaggatccatcgttccatttggaaacatagagatcagcccttctgctggaatcttaaattatggacagggactctttgaggggctaaaagcacatagaactgaagatgggcatgtacttttatttcgaccagatgagaatgctcaacgcatgaaacgaggtgcagatagattgtgtatgccatccccatctcctggccaatttgttaatgctgtaaagcagatagttattgccaacaaacgttgggtgcctccaccagggaaagggtcac

SEQ ID NO: 175123 - DNA, 265 bp, Glycine max
cagttttcgtcccgaaaaatctatagtatcgcgtgacacggtacgctattttatcacttgtctgagagtaattaggagaaaactatttaagcttctgagaaggctgttaatttctgtgcatagcattgaagcacttgaaagatgcagaaattgggagagtttaaattaccacctttcttcaattacccaccttacttcactttgcagccagtcagagacacaagagagaagcagatacagctatggaaagatcttattttagatt

SEQ ID NO: 175124 - DNA, 265 bp, Glycine max
catatctccatttccatttcctctctctcagtttccaagaatcttaagctatgggaaagtcttacccaaccgtgagcgctgattaccagaaagccgttgagaaggcgaagaagaagctcagaggcttcatcgctgagaagagatgcgctcctctaatgctccgtttggcatggcactctgctggaacttacgacgtgagctcgaagaccggtggtcccttcggaaccataaagcacccctccgaactcgctcacggcgctaacaa

SEQ ID NO: 175125 - DNA, 268 bp, Glycine max
cgtgcctctagggttatcatttctccatttccattttctctctcacttttcaagaatcgtaagctatgggaaagtcttacccaactgtgagtgctgattaccagaaggccgttgagaaggcgaagaagaagctcagaggcttcatcgctgagaagagatgcgctcctctaatgctccgtttggcatggcactctgctggaacctttgacaagggcacgaagaccggtggacccttcggaaccatcaagcaccctgccgaactggctca

SEQ ID NO: 175126 - DNA, 266 bp, Glycine max
ctccgacaagaaccgcgaccgcaagcgagggattccatggactgaggaagagcacaagctattcttggtggggttgcagaaagtggggaaaggtgattggagagggatctcaaggaactatgtcaaaacgaggacgccaacacaggttgctagccatgctcagaagtactttctccgccgcaccaacctcaatcgccgtcgccggagatccagcctctttgacatcaccaccgactcggtctctacaacccctatggaggaaggag

SEQ ID NO: 175127 - DNA, 250 bp, Glycine max
cacaatcacagacacagtttcgctctactacttgaaccctatttgcagcaatggctgaaaacttcgacgacctaaataataaactccctgagctcaaattagattctaagcaagcgcaagggtttctgtcatttttcaaaaccctacctgatgatccaagggctgtacggttttttgatcgccgggactattatattgcccatggtgagaatgctacattcattgcaaagacctatttccacacaacata

SEQ ID NO: 175128 - DNA, 270 bp, Glycine max
attcacaacacaaacacattcaacaacatggtagcaattctcaagagacagggagaaaacgaatccgaagaaaccatcataggcttggcaaaaagtctcatgcaactctcgcgtgtccaacaacaaagcaataagcctcttctcaaaaccttttctccaacggagttcgagtgcaaaacctgtaaccgcaagttttcatcttttcaagctcttggtggccacagggctagccacaagaagcccaagttcgaagctgaagaactcaaagaa

SEQ ID NO: 175129 - DNA, 265 bp, Glycine max
tccaggtccacttccgcttctttcccaattcaataaaccctcttctctcttttcaaactcccaattcccaaacaataagacccgcaaaccctcattctctccattgccatcacaaaccctacgcttcggttatctaatccaaatccaagacgatgtcgtatcgaccttccgccaacgccaggaccgaggttcgtcggaaccgctacaaggtcgccgtggacgccgatgaaggtcgccgtcgccgagaggataccatggtggagat

SEQ ID NO: 175130 - DNA, 264 bp, Glycine max
ctccagttgaagaacttggaaacacactggtatctagaatgcaacagaatggaaatccttatcctgcccttcatttgagatatgagaaggatatgcctgcatttacaagctgcagtcacaatttgactgcagaagaagatgaagaactgagacagatgcgatatgaagtgggtcactggaaggaaaaggagattaatgggaccgagaggagattgcttggaggttgtccgttaactccaagggagacttccctattacttagag

SEQ ID NO: 175131 - DNA, 245 bp, Glycine max
cagatcgtgtgttccgtacgttcgttcgttcatttccagtgtcaaacatggcgtctcagatgagcaagaagagaaagtttgttgcggacggagtgttcttcgccgaactgaacgaggttctgacacgtgaattggcggaagacggttactccggcgtggaagttaaggttacgccgatgcgcaccgagatcatcatcagagccaccagaacccaagctgttctaagtgagaagggaaggagaatt

SEQ ID NO: 175132 - DNA, 104 bp, Glycine max
atcatatctccatttccatttcctctctctcagtttccaagaatcttaagctatgggaaagtcttacccaaccgtgagcgctgattaccagaaggccgttgaga

SEQ ID NO: 175133 - DNA, 164 bp, Glycine max
  unsure (1)..(164): unsure at all n locations
attctctcttctctctgcatcgcttcaggttcttctgaaaagatgtctcgcgtgtatgttggtaacttggattcacgagtcaccgagagagatctcgaagacgaattccgtgttttcggagttattcggagtgtttggggtgcacgtagaccacctggnnaatg

SEQ ID NO: 175134 - DNA, 255 bp, Glycine max
gtcttggtgacttgttggtcatgggttcgaatccggaaacagcctctttgcatatgcaagggtaaggctgcgtacaacatccctcccccataccttcggatagcgaagaagctctgggcaatggggcccctgtatgattggaaagccatggagaaagatggatactcaaggtggggacgtcggatacgacgtggacaaaatttaattgatgaatttaagattgaccactttagaggatttgctggatattgggct

SEQ ID NO: 175135 - DNA, 265 bp, Glycine max
taatcactctagctgttgcaaatttctactatttttcaatggcttctgcagatgttgagttccgttgctttgttggtgggctttgcttgggctaccggcaacgatgccctcgagaaagccttttcaatctacggcgacatcgttgaatcgaaggttatcaacgaccgtgagactggaaggtccagaggattcggatttgtgaccttcggctcagagcagtcaatgaaagatgcgatcgcaggaatgaacggccaggaccttgacg

SEQ ID NO: 175136 - DNA, 264 bp, Glycine max
attttcaccttttcacaaatggggatggctgcagagtcacagtttcatgtcttggctgttgatgacagtctcatagataggaaactccatgagaaggtcctcagaacctcctcctaatgagttactacagttgattccggtagcaaggctttagagtttctggggttgtgtgagaatgatgagagccacccaagtacaccatatggttgtcccaacaaccatcaggaggtggaggtgaatcttgttataacagattactgtatg

SEQ ID NO: 175137 - DNA, 261 bp, Glycine max
tatgatggccaccgtgaagaaggggaaacccgatctgaggaagaaggttttgccagctgtcattgttcgccagcgcaaccatggcgccgaaaggacggcgtctacatgtatttcgaagataatgctggtgttattgtcaatcccaaaggagaaatgaaaggttctgctatcactggtcccattggaaaagagtgtgctgatctgtggccaaggattgcaagtgcagccaatgctatcgtttgagtgggaattcttgttaaa

SEQ ID NO: 175138 - DNA, 260 bp, Glycine max
gcagatgatggggaagagcaagggattgagaattgcatgccaagccaccagcatttccgctgatagagtccctgacatgggcaaaagacagctcatgaatcttcttcttcttggtgccatttcactccccactgctggaatgcttattccctacacctacttctttgtccctccaggttcaggttcttcagctggcggtactgttgccaaggatgccgttggaaatgatgtaattgccgagaattggctcaaggcacatg

SEQ ID NO: 175139 - DNA, 261 bp, Glycine max
ctttgttcttctaccttattttctttccctagtcaaggagattcatctctgcagcaggttgttttagaaaagaaaaaatgctgaagatttgctgcattggggctggatatgtggggggtccaacaatggcagtcattgcactgaaatgcccctcaattgaagtggctgttgttgacatctctaaatccaggattgcagcatggaacagtgaccagctccctatctatgagccaggccttgatgatgtggtgaagcaatgtc

SEQ ID NO: 175140 - DNA, 103 bp, Glycine max
gaaaagggttattacattgcgccaatccctccttaagcagacttctcgtgttgctctggaggagatcaagctcaagtttatcgacacctcctcaaagtttggg

SEQ ID NO: 175141 - DNA, 252 bp, Glycine max
tgctgagagcaggaggccattccgtgctctccttgatgttggtcttattaggactacaaccggtaaccgtgtatttggtgcccttaagggagctctggatgggggggtggatattcctcacagtgataagaaggttgcttgggttgattaaggaaaagaggaacctgatgctgaagttcaaccgaaataagtttttggtggacatgttgctgcctatatgaagatcttggctgaagatgaaccagagaaata

SEQ ID NO: 175142 - DNA, 265 bp, Glycine max
  unsure (1)..(265): unsure at all n locations
cnnntggttacatacctgggntgtatatntcttcnaagatgtaganggaccggagctgcagactgaggtggattaacgacctcaaaccagagataaaatgnggnaactttagtttagcagaagatatatcataccattanaatactccatgctcttggaaacaaatgatcaatcacaacatctcacagcttgtccaatacaacaaataatgagatcaagaattgttggaacaccaacatcaagaaaaagctatgagaaagagaat

SEQ ID NO: 175143 - DNA, 106 bp, Glycine max
ctcaacttttctcttattaaccatagttcacatattatatcatcacatatcatagtgatatattatatcatatcacaatgtgtggcatacttgctgtggctgggtg

SEQ ID NO: 175144 - DNA, 99 bp, Glycine max
gtgaccaacgaggctgttcagaaggctgctgctgcattgaagggttcagatcatcgccgtgcaacaaatgtcagtgccagactggattctcaacaaaag

SEQ ID NO: 175145 - DNA, 271 bp, Glycine max
cggctccagctcgagacagctcaaagagctcaatatctctcagtctgggatggtttacttgatcctttgatgtttggggattatccaagctcaatgaggactagagtaggaagcaggctaccgaaattttcgcaatcagaagctgctcttgttaagggttcattagattttgttggaatcaatcattacaccacattttatgcaaaagacaattctactaatttaattggaaccctgctccatgattccattgcagactctggtgccgtta

SEQ ID NO: 175146 - DNA, 96 bp, Glycine max
tacaagggtccaactctgcttgatgcacttgaccagattagtgagcccaagaggccctctgacaagcccctcaggcttccccctcaggatgtgtac

SEQ ID NO: 175147 - DNA, 247 bp, Glycine max
ctctgttctcttcaccattctctttcttctttgtttcaagtttcaacaacccagattcactctctctctcgtaattttctctcctattgaggcttagaaaaagagagcaaaaaacttaaaaattgcttgcggccggaggtataaccaccggagggggcaaggagtaccctggaagcctcactctatttgtgacggtaacatgtatagttgcagccatgggtggtttaatcttcggttacgatatcgg

SEQ ID NO: 175148 - DNA, 251 bp, Glycine max
atcggtatgatcatcatcaaaagggatttgaagaagtttttgggcatggtttttccactaaattgagtagtgctggtcttgtttataagcattttggaaaggagattatagccaaagaacttgaggtagatgaggaacaccgagatgtgcatcacatatatttggctgtttacaagagcttcatggaggcaattgatgctatagacaatgggatcaatcagtatgatacagaccagcctccaagatacgtg

SEQ ID NO: 175149 - DNA, 101 bp, Glycine max
cttgaatcttcgttatccttctttttttctccttgaactcgaatattcactatggcagatgaggtggttctgctaggattctggccaagtccatttgggga

SEQ ID NO: 175150 - DNA, 216 bp, Glycine max
agcgcactaccctgaggcttctcttctcttctcttctctgtcgtgagtcaccatggtgagggttagtgtgctgaacgatgctctgaagagcatgtacaatgctgagaaaaggggaaagcgccaagtcatgattaggccatcctccaaagtcattatcaaattccttttcggtgatgcaaaagcacggatacattcgagagtttgagtatgttgatg

SEQ ID NO: 175151 - DNA, 283 bp, Glycine max
aaccaacaatagttaagatcaccaataccaccaagtcatgaagcaaagacagatctttgctcgagtggtgattttgttgctcatgttcttagttggagccaggtttgctatagcaaaagaaggaggagaagaagctgctgataggattttgaaactccctggtcagccaaaagtatcatttaagcaattttctggctatgttactgtcaacaaggttgctggtagagctctcttttactggctcgctgaagctgcccaaaatcctctcaccaaacctttggtc

SEQ ID NO: 175152 - DNA, 270 bp, Glycine max
atctccatttccatttcctctctctcagtttccaagaatcttaagctatgggaaagtcttacccaaccgtgagcgctgattaccagaaggccgttgagaaggcgaagaagaagctcagaggcttcatcgctgagaagagatgcgctcctctaatgctccgtttggcatggcactctgctggaacttacgacgtgagctcgaagaccggtggtcccttcggaaccataaagcacccctccgaactcgctcacggcgctaacaacggtcttg

SEQ ID NO: 175153 - DNA, 279 bp, Glycine max
ttcggctcgagtgaggttttgccacttcgaaaccaaattttcttccttcgttcgcatctgtgatctcttctcctcacaatgagcagatcagggcaaccaccggatttgaagaagtacatggacaagaagcttcagatcaagctgaatgcaaatcgcatggttgttggtactctccgtggcttcgaccagtttatgaatttagttgttgacaacactgtggaagtgaatggcaatgagaaaaatgacatagggatggtggtaatcagaggaaatagtgtg

SEQ ID NO: 175154 - DNA, 262 bp, Glycine max
cccacatgcacaagaagacagaggaggccacagctactactcctcctccaccaccacctgttgcatcattggagcatggtgaaggtgctcatcatgaaggagaggccaaggagaagaaaggtatattagaaaagataaaagagaagcttcctggttatcactccaagacagaggaggaaaaggaaaaggaaaaggagagtggtgctcattgatatttaagattgagacaaggcttttttgttggttggagatgcatgattgt

SEQ ID NO: 175155 - DNA, 265 bp, Glycine max
cttcttcaagttgcacaagcaaagttctcccacaaacctcttctatctcttcctcccaaacatgtttctctttctctctctctctcttaattcctgaaaagcaagtagctaaggaaaacaaaaacatcatcacagaaactcacaaaggaaaaacaaacaaacaaacaaaatgtcttctccaagcaagcggcgagaaatggacttgatgaaactgatgatgagtgactacaaggtggagatgattaatgatggaatgcaagagttt

SEQ ID NO: 175156 - DNA, 268 bp, Glycine max
tctcgagccgaatcggctcgagcggctcgagacccgttcccgccgaccgtgaaccgcaacgactggcaactgctcgcgatacgcttaggcacaatcgtcggcataataacacaacccttacctcttggagcggtagcaatattagggttaggtgtttccgaggccggttttgataaaaccctactcgaagaagaaagcgagggcgatgagccaggggatgggatcgccgaagccggagaatgcggcggcgaagggtagcgttttggtc

SEQ ID NO: 175157 - DNA, 265 bp, Glycine max
  unsure (1)..(265): unsure at all n locations
gacagttcatcagctatgtaaacaagctgtagcccaggcccaagctggagcagatgttgtcagtcctagtgatatgatggatggtcgggtaggngcactgcgtgcagctctggatgctgaaggctttcagcatgtttctataatgtcctatacagcaaagtatgcaagttcttttatggtccatttagagaggcactagactcaaacccccggtttggagacaagaaaacttatcagatgaacccagctaattangagnggcccc

SEQ ID NO: 175158 - DNA, 266 bp, Glycine max
tttctgaggaaaccaccactggagttaagaggctctatcagatgcaggcgaatgggactcttctcttccctgctattaatgtcaatgactctgtcaccaagagcaagtttgacaacttgtatgggtgccgtcactctctccctgatggtctcatgagggctaccgatgttatgattgctggaaaggtggctgttgtggctggatatggtgatgttggcaagggttgtgctgctgcaatgaagcaggctggtgctcgtgtcatcgtg

SEQ ID NO: 175159 - DNA, 250 bp, Glycine max
cgtgctcgatctcgactcgacaaatgtacactgaattcaaaaacatcgaaagagagacgcatggccgagcaaaccttcatcatgatcaagccagatggcgttcaaagaggccttattggcgagattattagcagatttgagaggaagggtttttacttgaaagggttgaaactcgttactgtggaccgtccttttgctgagaagcactatgctgatttgtctggcaagcctttctttagtggtttggtgg

SEQ ID NO: 175160 - DNA, 269 bp, Glycine max
cctacaccaagcccaagaagatcaagcacaagcacaagaaggtcaagctcggcattcttcagttctacaaggtcgacgattctggaaaagtccagaggctccgcaaggtgtgccccaacgccgagtgcggcgccggcaccttcatggccaaccacttcgaccgccactactgcggcaagtgcggcttgacctacgtctaccagaaggccgatgcttaatttgcggttttaattttattttagtatttaaaagttttggtttatgttttc

SEQ ID NO: 175161 - DNA, 264 bp, Glycine max
cacacacactctcatagctgtagcggcgacactaagatcggagaaagaatggcgaaaacgacgtcgttgctgctctttacactgctcctcttcggaaccctagctctcatccaggcgaagaaatcgaaggaggatttgaaggaggtgacccacaaggtttactttgatgttgagattaatggaaaagaagcaggtcgtattgtaatgggtctttatgggaaggctgttccaaaaactgcagaaaacttccgagcactttgcaca

SEQ ID NO: 175162 - DNA, 261 bp, Glycine max
ggtgaagtgttcggattgcggcgacgtgagctgttcgctgcccgcgacgttgtgagaagtccactgaaccttatcatttagaggaaggaagttcgagagggctagaggaaggaggaacagcagaggatttagagtttaagaagataacttggttctaattttttttacaagtgttcacttctgaaattcaactttttgctataggcgttggtgacaggttttatgatatatttctgttacaagacatcgtgagtcgtttta

SEQ ID NO: 175163 - DNA, 249 bp, Glycine max
gttgtgactcgttcttcttcgtcgttatcttcttcttttgttgtttgtgtgtttgttttttctctcacctgaaaatgtcttgctgcggtggtaactgtggttgcggaagcgcctgcaagtgcggcaacggctgcggaggctgcaagatgtacccagacttgagctacaccgagtcaaccaccaccgagaccttggtcatgggagtggcaccagttaaggctcaattcgagagtgctgaaatgggtgttc

SEQ ID NO: 175164 - DNA, 262 bp, Glycine max
cggagtgtctgtgcaaatttgcgttgttcttcgcggcacacctcactcactgaacggtaagtatggcggacaaggctgttacaatccgaacccgaaagttcatgaccaacaggcttctttccaggaagcagtttgtcgttgatgtccttcatccatggagggcaaatgtttccaaggctgaacttaaggagaagctggctaggatgtatgaagtgaaagaccctaatactgtatttgtcttcaaattccgaacacattttgg

SEQ ID NO: 175165 - DNA, 271 bp, Glycine max
caaactccatttctcactcgccgtcgtctcttccgtctagggtttctcctcttcacaaaaatggttgccgcaaaaaaaactaagaagacccatgagagcatcaacaacaggctcgctctcgtcatgaagagtggcaaattcaccctcggttacaagaccgttctcaaatctcttaggagctccaaagggaaattgattatcattgctaacaactgcccccctttgaggaagtcagagattgaatactatgctatgttggcaaaggttgggg

SEQ ID NO: 175166 - DNA, 256 bp, Glycine max
agctactacactttcattctttgcttcagaaaattaactagctaggatggtcagtgttgaagagatccgtaatgcacaacgtgcagagggccctgccactgtcatggctattggcaccgcaactcctccaaactgtgtcgatcagagtacctatcctgactattatttccgcatcaccaacagcgaggacatgaccgagctcaaagaaaaattcaagcgcatgtgtgataagtcaatgattaagaagcgatacatg

SEQ ID NO: 175167 - DNA, 259 bp, Glycine max
gagctccgacaccattgacaatgtgaaggcgaagatccaggacaaggaaggaatcccaccggaccagcagaggcttatttttgctggcaaacagctagaggatggaaggaccctcgctgactacaacatccagaaggagtcaactctgcacttggtgttgcgtcttcgtggggggttttaagctggagctgatttctgtgtgatgttcgatgttggattttcccaaacattttaagaagaaatgtgatgtgtaatgggt

SEQ ID NO: 175168 - DNA, 256 bp, Glycine max
ttggttgattggtcccattgattccgaagagaaaagaaaagatgtttgagccacaacagctatacactcgcgcgaagaccgaggaattcgacctcgaatcaggagaaaccctctacccagggctgagcgtcggcgagaaccagctccgatggggtttcatccgcaaggtctacggcatcctctccgcgcagatcgtcctcaccaccctcgtctccgtcaccaccgttttctatactccaatcaatgacctcctcaa

SEQ ID NO: 175169 - DNA, 260 bp, Glycine max
ctcatgtgtaactataatcatgtgtttcagtcatcctcagtttgtttattgaaaataagaaacgaaacttgctctttcaatatgtatttaggagaataaagttattttagaacatgaagtgcctgcggcaatcggattccggattcatataggtggaatttttggtggaagtggattatcttgaatcctgtatttcatagatggacttcttgtagcaaagagtatttaattatttattcaaaatatgttatacatgttaa

SEQ ID NO: 175170 - DNA, 262 bp, Glycine max
tacacacactctcatagctgtagcggcgacactaagatcggagaaagaatggcgaaaacgacgtcgttgctgctctttacactgctcctcttcggaaccctagctctcatccaggcgaagaaatcgaaggaggatttgaaggatgtgacccacaaggtttactttgatgttgagattaatggaaaagaagcaggtcgtattgtaatgggtctttatgggaaggctgttccaaaaactgcagagaacttccgagcactttgca

SEQ ID NO: 175171 - DNA, 156 bp, Glycine max
gggagtagcggcattaaaaatgcagatcttcgtgaaaactctgacagggaagactataaccctcgaggtcgagagcagcgacaccatcgacaatgtcaaggccaagattcaagacaaggaaggcattactccggatcagcagcgtttgatcttcgc

SEQ ID NO: 175172 - DNA, 255 bp, Glycine max
ctcccctttgccgctgttgttgttgctgcaccaccgaacaacttaccctgtaaatcgcgtttcgtttgtgcaaggttttaaaagatggctgatgctgaggacattcaacctcttgttgttgataatggaactggaatggtcaaggctggttttgcaggtgatgatgctcctagggccgtgttccccagcattattgggagaccacgccatactggtgtaatggttgggatgggtcagaaggatgcttacgtgggt

SEQ ID NO: 175173 - DNA, 257 bp, Glycine max
aggacaaggagcttggcaagattatccaactccaaggcgaccagcgcaagaacgtatcccatttcctcgttcaggccggtcttgtccggaaggaccaggtcaagattcatggtttttgatttaacaattggtcttgtttatgttgtggtagtagtagtagtaatttgaagttgttgtgagttttgaaaagtttggattgtttcttttgtttgatgagtggtgttggaataagtttggtttggttttccaattttcaa

SEQ ID NO: 175174 - DNA, 256 bp, Glycine max
tggagtagcggcattaaaaatgcagatcttcgtgaaaactctgacagggaagactataaccctcgaggtcgagagcagcgacaccatcgacaatgtcaaggccaagattcaagacaaggaaggcattcctccggatcagcagcgtttgattttcgccggaaagcagcttgaagatggaaggaccctggccgattacaacatccagaaggaatcaacccttcatctcgtcctcaggcttcgtggtggcatcattgag

SEQ ID NO: 175175 - DNA, 110 bp, Glycine max
cggtatgactcacattgttagagaggtcgagaagccaggatcaaagcttcacaagaaggaaacttgtgagcctgctacaattattgcgacccctccaatggctattgttg

SEQ ID NO: 175176 - DNA, 249 bp, Glycine max
gaacaagaaagaaaagaaaagaagaggaaaaggagagtggagaggaagaaaaggattgaagttgttgctgtgagaaagagaaagagtgaaatcggagtttggcgaaggaattgcaatcaatggatgtgataaagacgcagcaaatctcatctcgaccaatcgagaaggtggtggttcaccctctcgtgttctcagcatcgtcgacaactacaacagagtcgccaaagacactcgcaagcgagtcgtcgg

SEQ ID NO: 175177 - DNA, 253 bp, Glycine max
gtgctacgaaggcaggcccgttgggctcgagtacgaatacggtgggcccatgttctgttacgacgggtagtatgcaatgcccgtatatgatagttacggcggaggcagaccctgttatgtgaaccgtggtgatcaatatttcagcgaagaggatccacaaggctgcatacttatgtgacaattacgtccacggcgttgcattattgggttctgtaaatgatggtggccattcacaatttgtttcaattatcat

SEQ ID NO: 175178 - DNA, 292 bp, Glycine max
tcggctcgagaaagggctgagctgcacaacaacctaagaatgggaggaagttcgagcttcagggatgagtataccttggaacaaaggctcggagaatcgcgggatattgtggccaaatatcccgatcgagtccccgtgattgtggaaagatatgcgaaatgcgatctgcctgagttggagaagaaaaaataccttgttcctcgagacttgtctgttgggcatttcattcatattttgagttccagacttagtctgccccctgggaaagctctctttgtatttgtgaagaata

SEQ ID NO: 175179 - DNA, 279 bp, Glycine max
ctcatcttaagcattgtggcagacctgagtgagcattttttgagtggaaaatatgagctacagtggctcctcaatgagttctggtagtggatcttctagaaggacatttgagtttggaaggacccatgtggtcagacctaaagggaaacaccaggcaactatagtttggctacatggccttggtgataatggctcaagctggtcccaactcttggaaactcttcctcttccaaatattaaatggatttgcccaactgctcctacacggcctgtagcctt

SEQ ID NO: 175180 - DNA, 278 bp, Glycine max
ccttattcaacactcatatccttatcctgtttctttcaatggaagtcatttctgcttctagcttgaatcccaacgctccgatgttcgtgccactcgcctatcggacggtggaggatttctccgaccagtggtggaacctcgttcactcctccccctggttccgcgactactggctccgcgagtgcttccaagatccccagttccaaaacgacgacgctttcgacttcgactttgacctagatctccaagatgaagatgaaaaggaacgaaaggaaggg

SEQ ID NO: 175181 - DNA, 280 bp, Glycine max
ctccatcctctgaatcaagttttgactttatttgaagagtttctcaactgcactttccttccaaaatgagccggccaatggaggaagatgctgcgggtaaaaatgaggaagaggagttcaacaccggaccactatctgtactcatgatgagtgttaaaaataatactcaggtactgataaattgtcggaacaacaaaaagcttctgggtcgtgtaagggcttttgacaggcactgcaacatggttcttgaaaatgtcagggagatgtggactgaggtgcc

SEQ ID NO: 175182 - DNA, 283 bp, Glycine max
gtcgtcgctactaagagttgctgcttcttcagccactccgcacctcgcagcctctgtgccctcaacaaccatggctgaaatcgaaactaccgttccagatcccacccaaatcgacgtcaaactcttcaatcgctggagcttcgaggatgttgaggttaatgatatgtctctggctgattacattggagtgtccccatcaaagcatgctacatatgttcctcacactgctggtaggtactcagtgaagaggttcaggaaagcgcagtgccccattgttgagagg

SEQ ID NO: 175183 - DNA, 283 bp, Glycine max
caagtttgatccagagaaaatagcagttaagatcacaaatttcaccaatatccctgctgatgagaaccaaattgccgcatatttagtaaaaaatggtccacttgctatgggcgtgaatgcaattttcatgcaaacatacattggtggtgtctcatgccctctcatatgtagcaagaaaaggctgaaccatggtgtgttacttgtgggatatggtgcaaaaggcttctcaattcttaggcttggcaacaaaccatactggatcatcaagaattcgtggggggag

SEQ ID NO: 175184 - DNA, 274 bp, Glycine max
cgaacaaacacaaacatggatgcatccaaactcaatcaattgaagcatttcatcgaacagtgcaagtccaacccttccctcctctccgatccttcactctccttcttccgcgactatctcgaaagtctcggggcgaaactccctgaatctgcttattccgaatcgacgggcgtggagagcgatgaggacatagaagatgttacggaggagcaagagaaggtagaagaagaagaagaagatgatgaaataattgaatccgatgttgagctcgagg

SEQ ID NO: 175185 - DNA, 272 bp, Glycine max
atcttgctagggttttaggaaaagacactgtctcgcgagtgaacacaggttacagcaatggctttctttggtagaattgggaatttattaagacagacagcaagcaggcaggttagttcagaattgcgatcatccccttcgttttttcaggctatacgcagtatgtcatctgctccaagcacaaagctgtttatcggaggtgtttcatattctactgacgagcaaagtttgagggaagctttttcaaaatatggtgaagttgttgatgctag

SEQ ID NO: 175186 - DNA, 277 bp, Glycine max
tctttctctccttcttccttttcagatctccgctgaggaatcctcggagaaggagttcgtactcacattggatcactctaactttcacgacactgtcagcaagcacgatttcatcgtcgtcgagttctacgccccatggtgtggtcactgtaagaagcttgctccggagtatgagaaagctgcttctatcttgagtagtcatgatcctcctattgttttggctaaagtagatgccaatgaggagaagaacaaagaccttgcatcacaatatgatgtt

SEQ ID NO: 175187 - DNA, 280 bp, Glycine max
tggaggagaaggagggagagaaggggattgggagtgcagcagttgcaacaacaggaactacgccttcagatcattctgcaaccgatgcaagcaaccccgcctcctcgtcgacaccaaaaccccctctgattccaagtggctccctcgtattggcgattggatctgcaccggttgcactaacaacaattatgcatcaagagagaagtgcaagaagtgcggacaaccaaaggaggtagcagccatgccagcaattgcgatgaccggagcatctttcccccct

SEQ ID NO: 175188 - DNA, 276 bp, Glycine max
caacgttgtagagggagacttttgggggagagtgagtgagagtaaaaagatgtttctgcgtgcggtggcgcggccgttgatggcgaaggtgaaggcttcgacggggatcgtggggctggacgtggtgccgaacgcgagggaggtgctgattgggctgtacagcaagacgctgaaagagatccagaaggttcccgaagatgaagggtaccgcaaggccgtggagagcttcaccaagcacaggctcggcgtgtgcaaggaggaggaggactgggagaa

SEQ ID NO: 175189 - DNA, 265 bp, Glycine max
ctccctcgctcaataatacaaaacaaaaaagaagaagaagaaggttttcgcgatggcatcgaaacggatcttgaaggaactcaaggatctccagaaggatcctcctacctcttgcagcgccggtcctgttgctgaagacatgtttcactggcaagcaacaattatgggtcctccagacagtccttatgctggaggtgttttcctagtcactattcatttccctccagattatcccttcaagccacccaaggttgcattcagaaca

SEQ ID NO: 175190 - DNA, 280 bp, Glycine max
gtgctttggcttcccttccccctcttcttagcaaatgtttcaatattccaaggccatgttgcttaatttagttcttgtttcctttgtcctcttgagttctatcagagatgggagtgcagggatcaccagctctttcgttcggccacagtggccaggagttgacattcccgtggatcatgaagtatttgcagttccaaagggttataatgcacctcaacaagtgcacatcacgcaaggtgactatgatggaaaagcagtaatagtctcatgggtgacccca

SEQ ID NO: 175191 - DNA, 96 bp, Glycine max
tgtggaagcagttgcagaccgagctagctagctagcaagcaagcacagagatggcggcaaagcgaagccatgccctcatgtgcttggcacgtgttt

SEQ ID NO: 175192 - DNA, 279 bp, Glycine max
ttagaattaaaaagcgtgaaggacagtgataggtttggtttggaaggaagaagaaaatgaaggccatagtgataacgaggccaggaggtcccgaagtgctccaacttgaggaagtggaagatcccctagtcggagacgacgagcttctcatcggagtccacgccacttcccttaacagagccgatacctttcagaggaaaggctcctaccctccccctaagggcgccagccttacctcggtctcgaatgttccggaactgtcctttccctgggtaaaaa

SEQ ID NO: 175193 - DNA, 279 bp, Glycine max
gcacctattggtatcttctacaatatcctctcatagtgctcttcttcttcttcattttcattatcaagatgtctttgctttcggatctcatcaacctcaatctctcagaatccacagaaaagatcgttgctgagtacatatgggttggtggatctggtatggacctcagaagcaaagccaggactcttcctgggccagtgagtgaccctgcaaagcttccaaagtggaactacgatggctctagcacagaccaagctccaggggatgacagtgaagtca

SEQ ID NO: 175194 - DNA, 284 bp, Glycine max
tcaagggcaagtaccatgatgagcttatcgccaatgctgcgtacattggcactcctggaaagggtattcttgctgctgatgagtcaacagggacaattggcaagcgtttggccagcatcagtgtagagaacattgaatccaacaggcgagctcttagggagctgcttttcactgctcctggtgttcttcaatatctcagtggtgtcatcctctttgaggaaaccctctaccagagcacagctgcaggcaagccctttgtgaatgtctgaaggaagctggtgtgc

SEQ ID NO: 175195 - DNA, 275 bp, Glycine max
gggtttttgagtgcggcggtccaaacactcttctctgcagcttttgcctacaactcccttcaccatggctgaacaaaccgagaaagcttttctgaagcaaccaaaagtgtttctcagcacaaagaagactgggaagggaaagagacctggaaaaggtgggaaccgcttttggaagtccattgggcttggatttaagactcccagggaagccatcgaaggaacctatattgacaagaagtgccccttcactggcatgtttccatccgtggccgtat

SEQ ID NO: 175196 - DNA, 275 bp, Glycine max
gtttgttgtgagctataagctagtttatcgtgaggagaatatgaagttgtttgttttctttgttgctgcagtagttttggtagcatggccatgccatggcgcaggctaccaaaggttccctctccgaatgaaaactggctatggtgagcgttcttcggaggtaaaatgcgcaagttttaggcttgctgtggaagcacacaacatccgagcctttaaaaccattcctgaagagtgcgttgatccaacaaaggactacattaatggcgaacaattta

SEQ ID NO: 175197 - DNA, 277 bp, Glycine max
gagaaaatggcggtacctctgctctcgaagaagatcgtgaagaagagggtgaagaagttcaagaggcctcagagtgacaggaaaatttccgtcaagacaaactggcgtagaccaaagggtatagattcccgtgttaggagaaagttcaagggatgcactttgatgccaaacatcggttatggttctgacaagaagacccgccactatctccctaatggttttaagaaatttgttgttcacaatgtgaaggccgtggaactgctcatgatgcacaaca

SEQ ID NO: 175198 - DNA, 275 bp, Glycine max
gcgaaacgcacatttcactattcattctcgtttccctttcgactgtgattgtttgttaactgaacttttcgagcaaaatgtctggacgtggaaaggggggcaagggtttgggaaagggaggagcgaaacgacaccgtaaggtgttgcgcgataacattcagggaatcaccaagcctgcgattcggcgtttggctcgcaggggtggtgtgaagcgtatcagttatctcatctacgaggagacacgtggcgtgctcaagatctttctggagaacgtg

SEQ ID NO: 175199 - DNA, 275 bp, Glycine max
cataaagtcaccatttttccttcccttttgaggtgaagtgagagctgggaaacaaaacatgtctagggcattggttcatttgttgggtgttttgtggctatgttgttggctggcatcaactggagagtcccaaatagagtacctgagatacaaagatccgaagcaaccggttccaactcgggttagggacttgatgagtcgaatgactttggaggagaagattggtcaaatggttcaaattgataggagtgttgccaatgctaatgttatgaaaa

SEQ ID NO: 175200 - DNA, 279 bp, Glycine max
gcttccttaagctccttagtgctgctccttgcagctctaattctatcccctcaagttcttgcaaactatgagaatcccccagtgtacaagcctcccactgagaaaccaccagtatctataagcccccagttgagaagcctcctgtttacaaacctccagttgagaaccccccaatttataagcctccagtagagaagccaccagtgtacaagcccccagttgagaaacccccagtttataagccaccagttgagaaaccaccagtgtacaagccaccag

SEQ ID NO: 175201 - DNA, 277 bp, Glycine max
cacagaattagggttttccaattcacagagcaacacaacgaaccaacaatggcgcagctcagccgcagtcgcagccgcagcacgggcaagcagcgctggagcaggtgcagtgcttcggtcgcaagaagaccgccgtggccgtgacctactgcaagcgcgggcgcggtctcatcaagatcaacggctgccccattgagctcgtggagccggagatcctccgcttcaaggccttcgagcctatcctcctgttgggtaagagccgcttcgccggcgtcga

SEQ ID NO: 175202 - DNA, 278 bp, Glycine max
cttttcttttcaatgttgggaacctcacgaggaatgaggcaaaaaggatcaggacaagaagccatcaattacggtcatccaaggcccaaagcctggcaaacccacggatctgtctaggttgcggcaaatactgttaaagctgaagcatacaccaccacctcacatgattcctccaccaccggctcctgctaaagacgccaaagataataaggatggaaaagagaaagcagcatcaaaagcaactggatctgcagcagaaggtgcacctgattcacagc

SEQ ID NO: 175203 - DNA, 274 bp, Glycine max
gactgagagagaaaggggggaaatggggtatgtgatgagagtgagattggcgtcgttcttcaccggggctgcagtggcgtcgtttctggggctctacaccctccacaaggattacaaggtcgcgcaccaatcctttactcaacagatgaatgacctccacaaatcgctggaaggtcgaatttcttccttggaaaaaatgaaacaaacggaaacgtctgaacaggttgaagcaactgaataagagttcagaccgaagcatccattgtggggaaaa

SEQ ID NO: 175204 - DNA, 271 bp, Glycine max
agcgaggtgttaaaagagtccgtgtccatattcttacagatggccgtgatgttttggatggttcaagtgtggggtttgtggaaaccctagaaaatgatcttgcaaacttgcgtgagaaaggtgttgatgctaggatagcatcaggtggaggtcgtatgaatgtcacaatggatcgttatgagaatgactggaatgttgtgaaacgagggtgggatgctcaagttcttggtgaagccccttataagtttacaaatgctcttgaagctgtcaa

SEQ ID NO: 175205 - DNA, 272 bp, Glycine max
gtaggagccatcgtgtctcatcattcggtcttgattttcgaggcggttggcaccagcagcacaaacggcggaggagctcccccggcattgtcagcgcattacctggcggaggagctgtcggaggactacggatatctctcggagctggcgttccgaggggactatgaaacgtgcctggtgtacacggaggagatgaaagagcggtgcgtggagcagttcaagcaggggacggtgtgtatggaacagctggcagcggtggaagggttgtgtga

SEQ ID NO: 175206 - DNA, 274 bp, Glycine max
tgcgggagcactacctgcgcgacgatatatactgcggcgcaccgttttgcaccgtttgcgcattcttccagtgctcgcctcagtgcttcgccttccaccattctcttcgtcgacaccaatgtcgttctcaaccagattgatttgctggagaatccggcgattgacgatgttgtggtgttgtccattgtgttggaagaggttaagaacaagaacatgtctgtttacaaccgtataagagctatctgtagccattccatgaggaagttctttgttt

SEQ ID NO: 175207 - DNA, 271 bp, Glycine max
ccgtgctcttctggtacttctgatccggaagctcccgttccagcggctggtgcgcgagatcgcacaggatttcaaaaccgatttgcggtttcagagtagcgctgtttccgcgcttcaggaagcggcggaggcttatttggttgggttgtttgaggatactaatctttgtgccattcacgcaaagcgcgtcaccatcatgcctaaggatattcaacttcacaggaggatcaggggcgagagggcttgaggttttaaaatgtttcgtcaccgc

SEQ ID NO: 175208 - DNA, 274 bp, Glycine max
ctttttgaaaacactttagtttcgcaaagttgattctttctctctttatctttctttccccaatttgtgagtgttactgttgaatcgattggattggcattaggttgatctgaaatacgcaattgacatggcgagcgcgatggtagaggacgcgaacttcgaagatgaccaactagccaatatgaccaccgacgacatcgtcagagcttcacgtcttctcgacaacgagattcgcatcctcaaggaagagttgcagaggaccaatttggaattg

SEQ ID NO: 175209 - DNA, 272 bp, Glycine max
ggaagttaaagatgcaggttttcaaatctgcggcgatgaattagggtctattgttgaagtccatgatgtaaagaagttcagacatcatggtggggttgatggcattgcagagaagctttctacatcaaccactgagggtcttaacagtgatactgagttactgaataggagacagcagatatatggaatcaacaaatttactgaaagtgcagctacaagtttctgggtttttgtttgggaagctttcaagacatgactctgatgatacttgg

SEQ ID NO: 175210 - DNA, 275 bp, Glycine max
gcttgccaaatgcgttaaattatcccatgttggaggagtatgacttcagaaatgatactgtgaacccagatcttgacatggaactaaagcctcaagcacaaccacggccatatcaagagaagagccttagtaaaatgtttggaaatggtagagcaagatctggtataatagttttaccctgtggtgctggaaagtccttagttggtgtttctgcagcttgccggataaaaaaaagctgcctctgtttggcaacaaatgctgtttctgtagatcag

SEQ ID NO: 175211 - DNA, 279 bp, Glycine max
aaagagaggaaaaatgccgctcaagttggcgggaggagccactgtcggttcccttctcctatgtgttgctatttctctctttcacatcgctggggccgaagatccctacaggttcttcaactggaatgttacttatggtgacatttaccctcttggtgttcgccaaacgggaatattgatcaacgggcaattcccaggtccagatattcattctgttaccaacgacaacctcatcatcaatgtcttcaacagcttggatgagccctttcttctctcttg

SEQ ID NO: 175212 - DNA, 275 bp, Glycine max
attttggtgaagatttgagaaaaaagaaaaagatttgaaagctaaaggggacgatggtgaagagaaaaaggagaaggataagaaggagaagaagaaaaaagaaaacaaagacaagggtgacaaaactgatgtagagaaggtcaaggggaaagaaaatgatggggaggatgatgaagagaagaaggaaaagaagaaaaaggagaagaaagacaaggatggcaaaactgatgcagagaagatcaagaagaaagaagatgatgggaaggatgatgaag

SEQ ID NO: 175213 - DNA, 272 bp, Glycine max
ggctccggtctacgataggttcaccttgtccccggcgaggtcctcaaatacgcggatcggaaggttgccgagttagacagccacgttccctccaacgtgaagaaggtctcctcccaggcctgctccgtcgtctctgaagtccgccgcgatggcgtctccgcctacgccaagaccgtttactccaagtacgagcctacggcggagcagtgcgcagtgtctgcatggcggaagctcaaccagcttccgctcttccctcaggtggccaatgttgt

SEQ ID NO: 175214 - DNA, 269 bp, Glycine max
tctcttccctctttcatccccccgataagaacaagcacccaccgtttaacgctaatttttgagtgtttttgttttttgcagcaacaaacaaacatcttttaccttaaacaacaatggccgatgccgaggatattcaacccctcgtttgcgataatggaaccggaatggtcaaggctggttttgctggagatgatgcaccgagggctgtgttccctagcattgtggggcgtccacgtcacactggggtgatggttgggatggggcagaag

SEQ ID NO: 175215 - DNA, 271 bp, Glycine max
gtggaggggttctgttccagtaggtgcggaacacacggatcctccgtgggggcgcgcgtgaacggaaagagatacaagttggcgtacatttgggtgggtaattcagagacacagtgcccgggtcaatgcgcgtggccgatccaccaacccatttacggtccccagaatccacctttggttgcacccaacaacgatgtgggacttgacggcatgctgatcaatgtggctagtctccttgctggcactgtcactaacccttttggaaatggtt

SEQ ID NO: 175216 - DNA, 274 bp, Glycine max
ttcttctcattagctagaactcgcagcaccaccaccagcaccaccaccagcaccgttctattcttcttccacaatgggtatctctcgtgattccatgcacaagaggcgcgccaccggcggcaagaagaaggcttggaggaagaagagaaagtatgagcttgggaggcagccagcaaacacaaagctatcaagcaacaagacggtgaggaggattagggttcgcggtggaaacgtgaagtggactgctttgaggcttgataccgggaactactct

SEQ ID NO: 175217 - DNA, 268 bp, Glycine max
aatgggttcacaaaattgtatggataggaagcactatgttctggtgcatggggcatgccatggagcttggtgttggtataagctcaagccacgcttggaatctgcaggccataaggtcacagtacttgaccttgcagcttctggaaccaacatgaagaaaattgaagatgttgatactttctcagagtattctgcgcctttgttgcagctaatggccacaattccctcaaatgagaagttagttctagttggtcacagccttggaggg

SEQ ID NO: 175218 - DNA, 266 bp, Glycine max
tgcaacctcaagggctgtaactatattcattcgtggaggtaacaaaatgatcattgaggtgacaaagcgtgcgcttcatgatgccttgtgcgtggctaggaatcttgtccggaacaactctattgtctatggtggtggttcagctgagatttcttgctctatagctgtggagtcagctgctgatagataccctggagtagaacagtatgcaattagagcatttggggatgctttggaggccttcccaatggcccttgctgaaaata

SEQ ID NO: 175219 - DNA, 269 bp, Glycine max
gcgctctctctctctgtctcctacgattcgttttgccccttttgttgccctaatttcaaccatgcctcgccgtagctccggtggaagatctgcccgtcctgctcctcgggcagctcctcgtcctgctccagttcaccatgctcctcctccagcccctgctcagagtggtggtggatctatgcttggtggcattggttcaaccatagctcaaggtatggcttttggcaccggaagtgcagtggcacacagggctgtggatgcagtcatgg

SEQ ID NO: 175220 - DNA, 272 bp, Glycine max
caagaagaagacctacaccaagcccaagaagatcaagcacaagcacaagaaggtcaagctcggcattcttcagttctacaaggtcgacgattctggaaaagtccagaggctccgcaaggagtgccccaacgccgagtgcggcgccggcaccttcatggccaaccacttcgaccgccactactgcggcaagtgcggcttgacctacgtctaccagaaggccgatgcttaatttgcggttttaattctattttagtatttaaaagttttggttt

SEQ ID NO: 175221 - DNA, 271 bp, Glycine max
attgcaattgcctcttctcttctcccagaatcggtgtaggttacaggtttaagggttttgttttcatttaggtcactaatccgatatcatgaagctcgatacgactagtctcgaatcgtttcccacactgattgcacctcaaaacgacgtcgccggagaactctccgccgctccgttctttgaccttccgaattccaatgacttcgatgggttcttgaaagacgctattcagatggtgaagcccgcgaagggtactacaactcttgctttt

SEQ ID NO: 175222 - DNA, 268 bp, Glycine max
ggcaagatgtcgaagagaggacgcggtggttcggcggggaacaagttccggatgtcgctgggtctgccggtggcggcgacggtgaactgcgccgacaatacgggggcgaagaacctctacatcatatcggtgaaagggatcaaagggcgtttgaaccgtctcccctcggcttgcgttggcgacatggtgatggccaccgtgaagaaggggaaacccgatctgaggaagaaggttttgccagctgtcattgttcgccagcgcaagccat

SEQ ID NO: 175223 - DNA, 274 bp, Glycine max
ccttctcgctctttcagctttgacttttgttggaaactaaggcctaatcaaaatggtgaagttcacagctgaagagctacgtcgtattatggactataagcataatatccgtaatatgtctgtcattgctcatgttgatcacggaaaatcaaccctcactgattctcttgtggctgctgctggtattattgctcaagaagttgccggtgatgtccgtatgactgatacccgtgcagatgaagctgagcgtggtattaccatcaagtctacaggt

SEQ ID NO: 175224 - DNA, 259 bp, Glycine max
gtgcactgcttttcatgacaatgaagagacatttttgaaaaaatacttatatgaaattgccagaagacatccttacttttatgccccggaactacttttctttgctaaaaggtataaagctgcttttacagaatgttgccaagctgctgataaagctgcctgcctgttgccaaagctcgatgaacttcgggatgaagggaaggcttcgtctgccaaacagagactcaagtgtgccagtctccaaaaatttggagaaaga

SEQ ID NO: 175225 - DNA, 260 bp, Glycine max
caaaaactcattcgcgatctcgttctgtacgtgcagccgcagcaagtgatcgaagcgaaaagagagaaattcatcgtcgcagtaatcatgggtaaggttcatggatcacttgcacgtgctggtaaggttagagggcaaaccccgaaggtggccaagcaggataagaagaagaagccacgtggccgcgcccacaagaggatgcagtacaatcgccgattcgtcaccgccgtggtgggattcggcaagaagaggggacccaa

SEQ ID NO: 175226 - DNA, 258 bp, Glycine max
gttgacaggaggcactgtggcagaagtcctaggagtgtaaaacagagacgcaaaatgaagacgatcttgtcgtctgagaccatgaatattcccgacggcgtgagcatcaaggttcacgctaaggttatcgaggttgagggccctcgtggaaaactcgtgcgagacttccaccatctgaacttggacttccaacttattaccgacgatggcggtaaaaggaagctcaagattgattcttggtttggttctcgtaaaacc

SEQ ID NO: 175227 - DNA, 254 bp, Glycine max
aagagattcaagaccggcatggctaatgaagaggaacagaaaaaccacctcttcggcatcaaagatctcggtcacaagactctccttcagagtgatgcactctatcagtatatacttgaaaccagtgtctatccaagagagcacgagtgcttgaaagagatacgcaagatgactgcaaaacacccactgaacatcatggcaacaccagcagacgaaggacaacttctgagcatgcttgttaagctcacgaattc

SEQ ID NO: 175228 - DNA, 252 bp, Glycine max
gggtatgtaagagaaagaaaaaagaggcgcaagatgagtggtagggtttctgggaaggtgaagtggttcaacgatcagaaggggtttggattcataacccctgacgatggcagcgaggaactcttcgttcaccaatctcagatcaaatctgacggtttccgaagcctagctgaaggagagtccgttgagttcgctattgaatctgaatctgacggacgcgccaaggctgttgatgtcactggccccgacggc

SEQ ID NO: 175229 - DNA, 254 bp, Glycine max
tcacccgcaggtttagagaaaatttaacaattagggttgcttctcctttgccgacccatggctcccaaagctgatagttcaaagaaggctgatccaaaggcacaggccttgaaaactgccaaggcagttaagtccggtgctaactttaagaagaagaccaagaagatccgaacatctgttaccttccatcgaccaaggactttgaaaaaggataggaaccccaaatatccacgcattagtgctccacccaggaa

SEQ ID NO: 175230 - DNA, 254 bp, Glycine max
ggagtgacatctataatgtgaatgaggaaaaaatatgtaaagcaatgaaagatcaagcgacaaaagtaaatatggcgtgcttgaaaaaatctgcaacctttccaattcctaataccatgttgccttcaagctcgtctgataaggaggttgatacttcagtcacagaaccactctatgagcattctgctcatcaaacttactcacgctctgtatctctgcctgctcctctgaagcttatacctgccataaaaggt

SEQ ID NO: 175231 - DNA, 262 bp, Glycine max
gttttctccttcttctcctccctctgcctgcagcggtgcaacctatcagcctccaaatccaatggcttcagagaagaaactgtcgaacccaatgagggagatgaaggtgcagaagctcgttctcaatatctctgttggagagagtggagatcgtctcaccagagccgccaaggtgttggaacagcttagtggccaaaccccagtgttttccaaagcaaggtacactgttcgttcctttgggattagaagaaatgagaagatt

SEQ ID NO: 175232 - DNA, 252 bp, Glycine max
cttcgttctaagagccatgtctagcaccgttggccagaccatcaagtgcaaagctgcgattgcatgggaggctgggaagccgctggtgattgaagaagtggaggttgcgccaccgcaagccggtgaagtccgtttgaagatcctctacacctctctttgccacactgatgtttacttctgggatgcgaagggccagactccattgtttcctcgcatttttggccatgaagcttcggggattgtggagagcgt

SEQ ID NO: 175233 - DNA, 255 bp, Glycine max
gtcatttcggagctgctgctattcatggggataaatcccaggctgagagggatcatgtgttgagtcagtttcgaactgggaggtctcctgtgctagtggccacagatgttgctgctcggggactggatatcaaggacattagggtggttgtcaattatgacttccctacaggagtggaagattatgttcataggattggaaggactggaagagctggagccactgggctagcttacactttctttggtgaccagg

SEQ ID NO: 175234 - DNA, 255 bp, Glycine max
ttctatttttcaagtaacttaaggtttcaaacctaggaagttggaagtcatggcagcaacattgatggcagcaacaacaagttctggtactcttaaagcaactcctttccttggccaaggcaagggtgccaatgccaatgctcttagggatgttgtctccatgggaactgggaagtacaccatgggcaatgatttgtggtatggaccagacagagtgaaatacttgggacccttctcagctcagaccccttcata

SEQ ID NO: 175235 - DNA, 255 bp, Glycine max
cttagtcccaattttctagggttttattcattttccgatggcttactgcagatgttgagtaccgttgctttgtcggtgggctcgcttgggccactgacgaccatgccctcgagagagccttctctcagtacggcgaaatcgttgaaacgaaggtctgtttgttgcaggcatcacatctgatctcacacgattcggattcggaattttctcgatcccgttctgatctgtgatctctgatctgtttgcgttacttga

SEQ ID NO: 175236 - DNA, 257 bp, Glycine max
gaaaaaatggcggtgcctcttctctcgaagaagatcgtgaagaagaggctgaagaagttcaagaggcctcaaagtgacaggaagatttctgtgaagacaaactggcgcagaccaaagggtatacgattcccgtgttaggagaaagttcaagggatgcactttgatgccgaacattggttatgcttcagacaagaagacccgccactatctcccgaatggtttcaagaaatttgttgttcacaatgtgaaggatttgg

SEQ ID NO: 175237 - DNA, 249 bp, Glycine max
ggcatcgttttcattttagttatagtttttgaaaaaaggttcttccccgccaccaaaccctagcttagcaaaatgccgagggaaatcatcactcttcaggttgggcaatgtgggaatcagatcggcatggagttctggaagcagctctgcctcgaacacggcatcagcaaagatggcatcctcgaagacttcgccactcaggggggtgaccggaaagacgtgttcttctatcaagccgatgaccagcat

SEQ ID NO: 175238 - DNA, 253 bp, Glycine max
agccattcgtattgtcgcagagaaagaaaaccctagctcaccgtttcaagatgcaaatcttcgttaagaccctcactggtaagaccatcactctcgaagtcgagagttcagataccatagacaatgtaaaggccaaaattcaagacaaggaagggatcccaccagatcagcaacggctcatttttgctggcaagcagcttgaggatggacgtacccttgctgattataacatccaaaaggagtccactctcca

SEQ ID NO: 175239 - DNA, 250 bp, Glycine max
gcgcctgcatcgcagacggtagacctgcagacactctataacgtccagggatggaacccttacgcggtttctttcaatgcggatgaggacacttttaggttggtatttaagaatcccggcatggaggatgaccccacttgtggccccattattgacaacattgctattaagaagcttttcactcctgataaacccaaagacaacgcagtgatcaatggggattttgaagagggtccatggatgttcagga

SEQ ID NO: 175240 - DNA, 254 bp, Glycine max
ctttctatcaaatgatggcggagatggtgggaatctctatggaacagtgaaacaaagtccagctgagcaacagaaagagtcttctaaaggtttcacctttgctgaagttggttgcagaagaacaaggaacagcaaagttacttgttgtcacttttcttcagatggaaagtggctagccagtgctggagatgacatgaaggttgacatctggaacatggacactttagaaacagagagcactcctgcagaacaca

SEQ ID NO: 175241 - DNA, 255 bp, Glycine max
gtgttgatgaatttcctttctgtgtccatctggttagttgggagaaggaaaacgtttctagtgaggccctggaagctgctcgtattgcttgcaacaagtacatggccaaatttgctggaaaggatgctttccacttgagagtcagggtgcacccattccatgttcttaggatcaacaagatgctttcgtgtgccggagctgataggctccaaactggaatgagaggtgcttttggaaagccacagggtacttgtg

SEQ ID NO: 175242 - DNA, 211 bp, Glycine max
ccacaatgggaagaagaccggcgaggtgttaccggcagataaagaacaaaccgtacccgaaatcccgtttctgccgcggcgtgccggagccgaagatccgaatctacgacgtgggaatgaagaagaaaggcgtggacgagttcccgttctgcgtgcacctggtctcgtgggagaaggagaacgtctccagcgaggctttggaggcggcgcg

SEQ ID NO: 175243 - DNA, 234 bp, Glycine max
cacgctgttcctacaatcattccaaatgtgcccttccggtcgcaccctcctcccttcctccgtctccgatttccgaccggcattcgacgtcctcgatgccgaccgcgacggcaaaatcagccgcgacgacctccgcgccttctacgccggagtcggcggcggaggagatgacgtgatcggggcaatgatgacagtggctgacaccaataaggacgggttcgtggagtacgagga

SEQ ID NO: 175244 - DNA, 251 bp, Glycine max
gggcatccaggcaacccttttgatctctcagcaatgtctggtctgctcaatgatccaagtatcaaggaattggctgaacagatagcaaaagatccatcgttcaatcagatggctgagcagcttcagaaaacttttcaaggagctccacaagatgctatccctagcttcgataatcaacaatatttttcaaccatgcaacaggttatgcagaatcctaattttatgaccatggctgagcgcctgggtaatgc

SEQ ID NO: 175245 - DNA, 218 bp, Glycine max
gattctcacaaacaactcttgagaaagaaagaatggctgccaacacattgatgagttctgccatctcagccttcccatctctcctttcctcctcaaaatccagatttgccgcagcagttcctctttccagctttgttgtcaccaatgcctcttcttctcgcttttccatgagtgctgattggatgcctggccagcctagacccccctaccttgatggt

SEQ ID NO: 175246 - DNA, 255 bp, Glycine max
ggcaatggcaacccaagcctctctcttaaccccacccctctccggtctcaaagccagcgaccgcgcctccgtgccatggaagcaaaactccagcctctccttctccagcccgaagcccctcaagttctccagaacaatcagagcagcagccgccgacgagaccacagaggcaccagcaaaagtagaggctgcaccggtcgggttcaccccaccagaacttgacccaaacaccccttccccgatcttcgggggcag

SEQ ID NO: 175247 - DNA, 247 bp, Glycine max
tgagaggaagagggagtgagagtgttcttcgtttgttaccttctctcagaaatggttacgttcaggtttcaccagtaccaggtggtcgggagggctctcccaacggaagcagatcagcatccgaagatctaccgaatgaagctctgggccaccaacgaggttcgcgccaagtctaagttctggtattttttgaggaagctgaagaaggtaaagaagagcaatggtcaagttcttgctatcaacgaga

SEQ ID NO: 175248 - DNA, 248 bp, Glycine max
ttcttctaattgtgtgcgagtagctgttcttctgcttctgctttacaagttttgttgccatggaagcagagttggataccgagcagcagcagcaaatgacggaaggaagctattcccaaactatgcaaattgatccaaaaagggctcgatttccatgctccgttgtgtggtcaccacttcctgtaatctcgtggttcattccttgcattggtcacattggcatctgcagagaggatggggtgatattg

SEQ ID NO: 175249 - DNA, 249 bp, Glycine max
cacaactctctgccaacatgggtatctccagagattctatgcacaagaggcgtgccactggtggcaagaagaaggcctggaggaaaaagagaaagtatgagcttggtcgccagcctgctaacactaagctgtcaagcaacaagacagtcaggaggatccgtgttagaggtggaaatgtgaaatggagggcattgagattggatactggaaattactcctggggaagtgaagctgtaactcgcaagactc

SEQ ID NO: 175250 - DNA, 248 bp, Glycine max
aaattacaacagtttcaaggtgctgttgatgcagcaaggaaagccaacagctcaaagacatggaaggaaggttgctttgcttgtgttgatgcagaggagtttcgtttggcccaaatttgtggactaaacattattattcaggtggatgacttggaagaagtcagtgaatattaccaaaacagaggttgcttcaatgagctcatatctctcatggagagtggtttagggttagaacgggcacatatggg

SEQ ID NO: 175251 - DNA, 252 bp, Glycine max
cttctctagggtttttagctcccccaatttcttcgctcaacatggttcttcaaaatgatattgatttgctaaatcctccggttgagcttgagaagaggaaacacaagctcaagcgtcttgttcagtcaccaaactctttcttcatggatgttaagtgccagggttgcttcaacataaccactgtctttagccactctcagactgttgttgtatgcggaaactgccagactgtcttgtgtcaaccaaccggtg

SEQ ID NO: 175252 - DNA, 254 bp, Glycine max
gtggaatcccaagtttttggtgattgctgctcaaaagaaccatcatactaaattctttcaacctggagctcctgacaatgttcctcctggaacggtaattgataacaaaatttgtcatcctcggaattatgatttctacatgtgtgcacatgctggaatgattggtactagcaggcctacacactaccatgttctcttagacgagattggcttttcacctgatgatctacaggagcttgtgcattcattatcat

SEQ ID NO: 175253 - DNA, 257 bp, Glycine max
ggaaaaatggtttcgctgaaactgcagaagcggctcgccgcgagcgtgctcaagtgtggcagaggaaaggtttggcttgaccccaatgaagtcaacgaaatctccatggccaattctcgccaaaacataaggaagctggttaaggatgggtttatcatcaggaagcccaccaagattcactctcgctcacgtgctcgtcgaatgaaggaagccaagaggaaaggacgtcactctggatacggtaagcgtaagggtac

SEQ ID NO: 175254 - DNA, 251 bp, Glycine max
gttacttcatcatcatcatcaacatgagtcgcttcaacaatcagcaagaatcccctgtatcatatcctccagcactgtatgttagtgccccaccacctatgggttatccttccaaaggtgatcctacagctgtagggtacccccaacaaagagttccagaagaaaccacaagcaggggtgatggattttggaagggatgttgtgctgctttatgctgctgctgggtcctggattgttgcttctgattgaat

SEQ ID NO: 175255 - DNA, 246 bp, Glycine max
caatttctatctctcttatactctcactactctctttgctctttcttttctccactatggctgcacaagaaaacaacttccaagactacttgcctgtgatggccaacaagcttggtggggatggcctaattgatgaactgtgcaatgggttcgatcttttgaaggattctgataaaggggtcatcacttttgagagcctcaagaggaattcttacttgcttggtcttcagggtctcagtgatgagg

SEQ ID NO: 175256 - DNA, 238 bp, Glycine max
actgttttgagtttccaaccttaaaagactctcttttctctctctgaactctgaagcaaaacaacattaccagagtggttctagtaattcagtgctgctagaagatggaaactagtgaatggcatatcgagcgaagatctagcttcggctctgaatcccccttagcaagagaggcaggaaatgtgcctgaaactgggtcactctctattgtggtgcttggtgcttctggtgatcttgc

SEQ ID NO: 175257 - DNA, 249 bp, Glycine max
aaggatgcaggaactggaagcagtgacaagtgagatcgttaggttgattgacacagcaacagtgcctattttggccgttgatgttgatgggctggtcaatgggtggaacataaaaattgctgagttgacgggtcttccaattggtgaagctactggaaagcatttactcacacttgttgaggattcttcaactgatagagtcaagaagatgcttaacttagcactgctaggtgaagaagagaagaatgt

SEQ ID NO: 175258 - DNA, 247 bp, Glycine max
tacaacgcctcgaatccacacagttctactctacgctctaaaccctctctctctctctctctcgatctatcatggctttgcccaatcagcaaaccgtggattaccctagtttcaaactcgtcatcgtcggtgacggcggtacaggaaagacaacgttcgtgaaaaggcatcttaccggtgaattcgagaaaaaatacgaaccgaccattggagtggaggttcacccattggatttcttcacaaactg

SEQ ID NO: 175259 - DNA, 249 bp, Glycine max
ggcattgataatcatagctatggcaacggcgagtgcaagttgtgcggtatcatttagaaacagcttcggtgtgagtaaaccctcggatcttgggttcttgagctctcgtctgaacggcctcagaatctgcttccccaaattgccacccacacccctcactgcttctcccttccccacacccctccctatcgttgccaagagagtgtgtcccttcactggaaagaaatcaaacagggccaacaaagtatc

SEQ ID NO: 175260 - DNA, 243 bp, Glycine max
gtgcgatctgcaacaagcaagatctgcgagaagaacaacaaacaaaacaatggcgagtcagttcgggttatcgtcttcgtcttcctctgcgtccagcatgagagttacctacacgcccgcgaacgacctcgccctcaccaacctcgccttctgttccccctccgatctccgcaatttcgccgtccctggccacaataacctctacctcgccgccgtcgccgattccttcgtcttatctctctc

SEQ ID NO: 175261 - DNA, 242 bp, Glycine max
gttggataggtgagagtgttgattccatcaaatctcttcagatccgccaggtcctcacccaggctgttagcctcggcattattgttacctctgcactgataatatggaaggcattgatgtgcattactggcagtgaatctcctgttgttgttgttctttctggaagcatggaacccggattcaagcggggagacatcttattcttgcacatgagtaaagacccaattcgggcaggggagatt

SEQ ID NO: 175262 - DNA, 249 bp, Glycine max
acggaggcgtcggcggaacctgtgtaatacgaggatgtgtgccaaagaagttgctggtttatgcttctaaattttctcatgaatttgaagaaagtaatggttttggatggagatatgacagtgagcccaagcatgattggagtagtttgatagctaataaaaatgctgagttgcagcgtcttactggcatctacaagaatattttgaacaatgctggggtcaagctgattgaaggccatgggaagatta

SEQ ID NO: 175263 - DNA, 248 bp, Glycine max
gttggataggtgagagtgttgattccatcaaatctcttcagatccgccaggtcctcacccaggctgttagcctcggcattattgttacctctgcactgataatatggaaggcattgatgtgcattactggcagtgaatctcctgttgttgttgttctttctggaagcatggaacccggattcaagcggggagacatcttattcttgcacatgagtaaagacccaattcgggcaggggagattgttgtg

SEQ ID NO: 175264 - DNA, 246 bp, Glycine max
tgcaaactcaagggctgtaactatattcattcgtggaggtaacaaaatgatcattgaggagacaaagcgcagcttcatgatgccttgtgcgtggctaggaatcttatccggaacaactctattgtctatggtggtggttcagctgagatttcttgctctatagctgtggaggcagctgctgatagataccctggagtagaacagtatgcaattagagcatttggggatgctttggaggccatccca

SEQ ID NO: 175265 - DNA, 247 bp, Glycine max
cagttttcgccctcttttctcatctccaacatcttcgtcgtcacggaggctagtcttcctgttatcacaaacaatgtctgacggtcaagaatcagacaagaatattgagatatggaagatcaagaaattgataaaggcattggaagctgctcgaggtaatggtaccagcatgatttctctgataatgcctccacgtgatcaaatatctcgggtcactaagatgttgggagatgaatttggaactgct

SEQ ID NO: 175266 - DNA, 247 bp, Glycine max
gttcggttcaaacactctcatggcatcagacaagaagattaggatcggcatcaacggatttggaaggattggccgtttggtggccagggttgctcttcagaggaatgacgttgaacttgttgctgtcaacgatcctttcatcaccactgattacatgacatacatgttcaagtacgacaccgttcatgggcagtggaagcattttgatgtgaagctgaaggacttctaagaccctttctcttcggtg

SEQ ID NO: 175267 - DNA, 240 bp, Glycine max
ggtgtgcttatccaggtctttgagggtgaaagagcaaggaccagagataacaatttgttgggcaaatttgagctatctggcattcctcctgcacccaggggtgttcctcagattacagtgtgctttgacattgatgccaatggtatcttgaatgtctctgccgaagataaaaccactggccagaaaaataagatcactatcaccaatgacaagggtagattgtcaaaggaagatattgag

SEQ ID NO: 175268 - DNA, 244 bp, Glycine max
ctgacacggggaggtagtgacaataaataacaataccgggctcattgagtctggtaattggaatgagtacaatctaaatcccttaacgaggatccattggagggcaagtctggtgccagcagccgcggtaattccagctccaatagcgtatatttaagttgttgcagttaaaaagctcgtagttggaccttgggttgggtcgatcggtccgcctccggtgtgcaccggtcggctcgtcccttct

SEQ ID NO: 175269 - DNA, 278 bp, Glycine max
aaagccagttgaaattaaggatggtttctagtgtggatctctttccattgaaacggttcaagtggcttattgagttttccatggatcatgattggtgtgcagcagtgagaaaactgttgaacctactgtttgatggaactgtaaatacaggagatcatccttccttgtatcttgcgctttcagagatgggtctccttcacaaagctgtaaggagaaatagcaagcatttagtggagttgcttttgagatatgttcctgagaatatttctgataaacta

SEQ ID NO: 175270 - DNA, 279 bp, Glycine max
ctcatccacagtatcatgggcaagagggtgggttatggaagaagaaactcaatgattgatcagtgagtttcttcttccataacccaccctcatccacagtatcatgggtgggttatggaagaagaaactcactgatcaatcattgaagctttttgactttttacctcaattattcaagaacaattgatgcttgaaagagatccacatggaaatgttcaggttgccaagatagaaacagagaaaatccttattcaaatggttgaaactgagttggagaag

SEQ ID NO: 175271 - DNA, 278 bp, Glycine max
gtgtctctgaaacttcagaagcggcttgccgctagcgttctcaagtgtggtagaggcaaagtttggcttgaccctaatgaggtcaatgaaatctccatggctaattctcgacaaaacataaggaaattggttaaggatggtttcattatcaggaagccaactaagattcattcccgttcccgtgctcgcagaatgaaggaggccaagaggaagggacgtcactctggttatggtaagcgtaagggtacaagagatgctaggctccccaccaaaatcct

SEQ ID NO: 175272 - DNA, 272 bp, Glycine max
gcaactctttttgtttcttcagtttggtataaccttagccgaggtcacgaggagcactagctagtttcacaatttccaaatggctaggggattgaagaagcatctcaagaggctcaatgctcctaagcattggatgcttgacaaactgggtggtgcatttgcgcccaaaccctcatctggaccacacaaatctagggagtgccttcccctcatactcatcctacgaaaccggctaaagtatgctctgacttaccgtgaagtcatcgctattc

SEQ ID NO: 175273 - DNA, 270 bp, Glycine max
gtggtggagaaggtggcgaatgacaattcaagaacaacatgtgaataatggagaccaacaacaacctcaacctcatcgtccctaatcctcaagattcactgtggatgatgaatttgaggactggggaaacaatggattctggatcttatccggagcgtccaggggagccagattgctcatattacatcagaacaggcctttgtagatttggtgcaacatgtcgatttaatcatcctcctaacaggaggctggtacaaattgcattgtatt

SEQ ID NO: 175274 - DNA, 272 bp, Glycine max
ctaaaagctgtgcaagtaatgcacacagtagcattgcggacagaagccactataccaggtggtaaaatgccacctaacattggtcaagtgttgaagaaccacatgagtgagatgtttgcataccatgcaaccatgatgtctaacacccttggaacctcaactgttgtcttcactagaacgggtttcatggctgtccttctgagtcactatcgtccttctgggaccatatttgcttttacagatgagaagagggtacaacagaggctggcttt

SEQ ID NO: 175275 - DNA, 263 bp, Glycine max
gtttgtaagagaaagaaagaagaggcgcaagatgagtggtagggtttctgggaaggtgaagtggtttcacgatcagaaggggtttggattcataacccctgacgatggcagcgaggaactcttcgttcaccaatctcagatcaaatctgacggtttccgaagcctagctgaaggagagtccgttgagttcgctattgaatgcggatctgacggacgcgccaaggctgttgatgtcactggccccgacggtcgcacgtccaggg

SEQ ID NO: 175276 - DNA, 265 bp, Glycine max
gtttcactgcataaatttgagagaaaactctgcaaacatgttggtttatcaggacctccttacaggtgatgagcttctctcggactccttccgttacaatgaaattgagaatggaatgctgtgggaagttgaggggaagtgggttgttaagggagcagttgatgttgacattggtgcaaacccttctgctgagggtggagaagatgagggagtcgatgacgcagctgttaaggttgttgacattgttgatacattcagacttcag

SEQ ID NO: 175277 - DNA, 266 bp, Glycine max
gttagaagtgggggaatggaagagaaatactcaagcctggaaattgtggaggagagcccaaactcgggtgtgttctttcttatcttaaatcgtccgtcacgacggaacgctctctcgcgcgaattcttcagcgagttcccgaaagctctgcacgcactggatcacaacccggaggtgaaggtgatcgtgttgtccggcgccggggaccacttctgctccggcatcgacctctccctcctgggatcaaccgccgcgagttcgggttc

SEQ ID NO: 175278 - DNA, 268 bp, Glycine max
atagagccaggatctctatcataaaggatgaactttttaggttgctggggcatgaagatttacaacattctgtcattcttgtctttgctaataaacaagatatcaaggatgctatgactcctgctgagatcactgatgcactctcacttcacagcatcaaggatcatgattggcatatacaagcttgctgtgctctctcaggagaagggctgtatgatggtcttggatggattgcccagcgagtaactggcaaagccccaacatgatg

SEQ ID NO: 175279 - DNA, 269 bp, Glycine max
gggtttacaccgagcagccacacctcccgcagcagccatggttctcaaaactgaactatgccgattcagtggtgccaagatctacccaggaaagggcatcagatttgttcgttgtgattcttaggttttcctgtttgcaaactcaaaatgtaagaggtatttccacaatcgcctgaagccttcaaagctcacctggactgcaatgtacagaaagcaatacaaaaaggacattgctcaagaagctgtgaggaagaggagacgtgctgcca

SEQ ID NO: 175280 - DNA, 266 bp, Glycine max
ctcttcttctcttgcggctagggttttagcgcagcttcatctagatttaaggaagatgggtaacgaaaaggttcacatcagtattgtggtcattggccatgtcgactctgggaaatccactaccactggtcacctgatttacaagcttggaggcattgacaagcgtgttattgagaggcttgagaaggaagctgctgagatgaacaagaggtctttcaagtatgcctgggtgctggacaaacttaaggctgagcgtgaaagaggaa

SEQ ID NO: 175281 - DNA, 269 bp, Glycine max
gattatcctaagtctttgggaatagtgctgcaatggcttcaagtcaggaggaggtgacccttttgggagctactggaagcccatttgtgtgcagggttcatattgccctcaagttgaagggagttcaatacaaatatgtcgaagaaaatttgaggaacaagagtgaactgcttctcaaatccaacccagttcacaagaaggttccagtgtttattcacaatgagaagcccatagcagagtctcttgtgattgttgaatacattgatgag

SEQ ID NO: 175282 - DNA, 265 bp, Glycine max
aaaaaacacacacgacacactcccatacacacacgttgtctcgcacacattccttcattccgcagcagcaaacatctttaccttaaacgacaacaatggccgatgccgaggatattcaaccgctcgtttgcgataatggaaccggaatggtcaaggctggttttgccggagatgatgcgccgagggcggtgttccccagcattgtggggcgtccacgtcacacgggagtgatggttgggatggggcagaaggatgcgtatgttgg

SEQ ID NO: 175283 - DNA, 266 bp, Glycine max
agaaatgttaaaggcaaagtttgaggctactgccatagaaaaagagctgagggaggctcatggtgcttggcttcccccttggcttgctgttcactatattcatagtaagtcttttgttgatagtcattggaacaaacatgggaaacctgctttggaaatggttactcaaaaggccctagagaaaaaggcacaagctggaaagtgggctgaacctcatgtggaaaccattaaaactaaatgggtcccggccgtaaaagaacagtggt

SEQ ID NO: 175284 - DNA, 246 bp, Glycine max
  unsure (1)..(246): unsure at all n locations
gctgctgttgcaaaacttagggtannagcctttttttgangttttcagcgcttctttctaacaatggttcttcagaatgatattgatttgctgaatcctccagctgagttggagaagagaaaacacaaactcaagcgtcttgttcagtcaccaaactctttcttcatggatgttaagtgccagggatgcttcaacataacaactgtgtttagccactctcaaactgttgtggtgtgcggaaactgc

SEQ ID NO: 175285 - DNA, 268 bp, Glycine max
attcaatatacaacactgaaactttcaaagctcttttgagaacttgttattgcaatggctgacatagatcgctcctttgataataatgtttctgctgtttctactgagaaatcaagccaagtttcagatgttgaattttctgaagctgaggaaatccttattgccatggtgtataatctggttggggagaggtggtctttgattgctggaagaattcctggaagaactgcagaagagatagagaaatattggacttcaagattttcga

SEQ ID NO: 175286 - DNA, 270 bp, Glycine max
ggagactctctgctctgcattggtgttcccatctttcagaatcacaacttcagctttctccaaatgtggcatcagggcttccattgccgttgagcaacaaacttcgcagactaaggttgctctcctcaaaattggtaccagaggaagtccactagctctggctcaggcatatgagaccagagacaagctcatggcatcacatccagagctagcggaagaaggggctattcagattgtgataataaaaacaactggtgacaaaatactatc

SEQ ID NO: 175287 - DNA, 268 bp, Glycine max
gaagacaacaacactttggttttcattgttgacttgcgggccgacaagaagaagatcaaggatgcagtcaagaagatgtatgatattcaggccaagaaagtaaacaccttgatcaggcctgatggaaccaagaaggcctatgtcaggttgacacctgattatgacgccctggatgtggccaacaagattggaattatctaaactaatatatggcctcaccaaagtagatttctgtttagatggtagtttgttatggggtgttgagggg

SEQ ID NO: 175288 - DNA, 267 bp, Glycine max
atcattcttattctgcgaaaccggctgaagtatgctctgacataccgtgaagtcattgctattctgatgcagcgccatgttcttgttgatggcaaagtcaggactgacaagacttaccctgctggtttcatggatgttgtttcaatcccaaaaacaaatgagaacttccgcctgctctatgacactaaaggccgattccgtcttcattccatcagggatgatgaggcaaagttcaagctctgcaaggttaggtcagtacagtttggc

SEQ ID NO: 175289 - DNA, 254 bp, Glycine max
ggggtttgccttgtgccgtttgtgttgttttcgggacgaagaagaagatggtgtcaggttctggaatctgcgcaaagcgggtggtggtggacgcgcgccaccacatgctgggtcgtctagcctccatcgtggcgaaggagcttctgaacggccagaaagtggtggtcgttcgctgtgaagagatttgcatctcgggcgggctggtgaggcagaagatgaaatacttgaggttccttcgcaaacgcatgaacacc

SEQ ID NO: 175290 - DNA, 260 bp, Glycine max
ctcaccaccactggagtgcttcgctatagcaactccgcagcccagtatcaggcccaccccctggtggacctacaatccaaattgattggtctttgaaccaggcccgctcaattcggacaaaccctacagcaagtggaccgaggccaaacccgcaaggatcgtaccattacggtatgataaacacgacgaagacgatcatactggtgagttccgctggtcaagtaaatgggaaacaaagatacgcaattaacagcgtgtct

SEQ ID NO: 175291 - DNA, 265 bp, Glycine max
cagatgtgaaggatgtgaaatatgtaataaattatgacttcccggggtcacttgaggattatgttcatcgcattgggcggacagggagagctggtgcaaaaggaactgcatacacatacttcacagctgctaatgccagatttgcaaaggaacttatagccatactcgaggaagctggacagaaagtgagtcctgaattagcagcaatggggcgtggtgcacctcctccaccttcaggtccccgaggtttccaagaccgtgggag

SEQ ID NO: 175292 - DNA, 268 bp, Glycine max
aacgtaacctgatccgtggctctggttctggctctggctctgccctttttggttttctctcgttaccgaaaccagaagaaccatttgtggtggacatggatctggaccagtggatctccaaggtcaaagatcggcagcatcttcttgaagacgagcttcagcttctctgcgaatttgtaaaagagatccttattgaggagcccaatgtgcagcctgtcaatagtccagtgactgtttctggtgatattcatggtcaattccatgatct

SEQ ID NO: 175293 - DNA, 268 bp, Glycine max
aacctcttctgctctcactatatcctcttcttccacccttcttgatggcaaggctccaagacagtcaccagctgcttcccctcaatgtgtgagcctcccccctccccctttgcactctcagaaccgttcatggaagaccactgcttattgtcgcaaggttgctcgaaaagttatggcaatggccacaggagaggcaccagctgaagctaccccaactgaggtgccagagattgtcaagactcttcaagaaacttgggacaaagttgat

SEQ ID NO: 175294 - DNA, 265 bp, Glycine max
aataaaggcaagctctatttggagtcaagtgaaacatctatcttcctgtccaagttctttgaataaaagtctgaatgtgtcatctctgcactacaatatttgtgattctgaccaagttggttctatttgtttgatggccatcttgcacgtcctgatcttattgtgttcaagtgacagacaaatcagaacagggaagagagatttgaaatgtaaatgccaagtgaaagtgaaaagtacagtccagttttagtgatctctttaattt

SEQ ID NO: 175295 - DNA, 266 bp, Glycine max
aattaatattccaacaacccaagttacctgttgaccctcctcagccaaacaattcttgtttctagctttcacaagcaagctctaacaacaatgaagaaagtagtgttaaaggtggacttacatggtgatagaaccaagcaaaaagctatgaagacagcatctggcctttcaggggttgaatcagtttctgtggacatgaaagatatgaaaatgatcgtagtgggggacattgatccagtgagtgcagtgtccaagctacgaaagtg

SEQ ID NO: 175296 - DNA, 265 bp, Glycine max
gttgcaacgaggattcccaagttcagaagccggaattggcctgtgattgttgccttgactgcaagcacagatgatttgtgggaaagatgcatgcaaattggcatgaatggagtcataagaaagccagttttgttgcatggaatcgctagtgaactcagaagaataatattgcagggaaatagtgtcatgtgaggattcatgctgcaagttaaagcacttgcaacatatcaagaaattaagttataaaaaaaattccagtcacata

SEQ ID NO: 175297 - DNA, 265 bp, Glycine max
attcattcaagattcagcaagtgcgttttggaagcagagaccgaaatacttcgagatggcccgtacaaagcaaactgctcgtaagtcaactggaggaaaagctcccaggaagcagcttgcaaccaaggctgcacgtaagtctgcaccaacaactggtggtgtgaagaagcctcatcgttatcgccctggaactgttgctcttcgtgagattaggaaataccagaagagcactgagctcctaatcaggaagcttcctttccagagg

SEQ ID NO: 175298 - DNA, 260 bp, Glycine max
aaaagatattgatattgaaaagcatactttgacaacaagttctggaaaacttctgaagtatggttcgcttgttattgctacaggatgtacggcatcaaggtttccagagaaaattgggggaaacctacctggtgttcactatattcgggatgttggagatgccgatgcactaattttatcgttggagaaagcaaaaaacgttgtagttgttggaggtggttatataggaatggaggttgctgctgctgctgttggttgga

SEQ ID NO: 175299 - DNA, 262 bp, Glycine max
ctggataggtcaaacatcatcatgtcggacgaagagcaccatttcgagtccaaggcagacgccggtgcctccaaaacctaccctcagcaagccggtaccattcgcaagaacggctacatcgtcatcaaaggacgcccctgcaaggttgtggaagtttcgacttccaaaactggaaagcacggtcacgccaagtgccactttgttggaattgatattttcactgccaagaaacttgaggatattgtgccctcttctcacaact

SEQ ID NO: 175300 - DNA, 260 bp, Glycine max
tcttaatgcaaaagatatttgtgtgactgggagaaaacttacagacaaggtctactactggcatacagggtatattggccacctcaagcaaaggactctaaaggatcaaatggccaaagaccctactgaagtcattcgcaaagctgttctgcgtatgctgcctagaaacaaactacgtgatgacagggatcgaaaattaaggatctttcctggcagtgagcacccttttgttgatcgcccacttgaaccgtatgtgatgc

SEQ ID NO: 175301 - DNA, 259 bp, Glycine max
gttgttgcagggaaaacacagagatccgggtcgacccgttgcagatccgatccaaataagaaaagatgaatattttcaggttagccggggacatgacccatttggccagcgtcctcgtccttcttctcaagatccacaccatcaaatcctgcgccggtgtctcattgaagactcaagaactctatgcactcgtttttgcttgtcgctacctagatatctttactaattatgtatctctctataataccactatgaagtt

SEQ ID NO: 175302 - DNA, 262 bp, Glycine max
gtggaattgataaactgctccctcatgttactacagatgcaaaacataatcaaggtgatggttatgactttattcttatggcagagacagtttactcaatcaacagtctccaaaatctctataatcttatcaagaagtgcttgcaacatcctgatggagtagtgtatatggcagcaaagaagtattattttggagtaggtggtggaactcggcggtttctgtctgtggtagagaaggatggtgtcatgactagtagcctggt

SEQ ID NO: 175303 - DNA, 261 bp, Glycine max
ggcgtaaccctccaacaacaacacttcctcgtcagaaaatgtctctggtggcgaacgaggatttccagcacattctgcgtgtgctgaacaccaacgtggatgggaagcagaagataatgttcgcaatgacctccatcaagggtattggaaggagattcgccaacatcgcttgcaagaaggctgatgttgacatgaacaaaagggctggtgagttgactgctgctgagttggacagtgtgatgactgtggtggcgaacccta

SEQ ID NO: 175304 - DNA, 268 bp, Glycine max
ggtaaagcctgcacttcctgctcttgccagtcttatccagtcaactgatgaagaagtattgactgacgcttgttgggcactttcatatctttctgacggtacaaatgacaaaattcaaggtgtaattgaagctggtgtttgtagccggcttgttgagcttctattgcacccttccccttcagtgcttattcctgctcttcgtaccgttggaaatattgttactggagatgatttgcagacagaggttatcatcaaccatcaagctctt

SEQ ID NO: 175305 - DNA, 263 bp, Glycine max
ggaagagagaaaaaccatggcaacaacactcaacaatggcttcaagatgcctatcattggattgggcgtgtggcgcatggaaggaaacgaaatcagggacctaattctcaattccatcaaaattggttatcgccattttgattgtgctgctgactacaaaaacgaagcagaagttggagatgcgcttaaggaggcttttgatagtggccttgtgaagagagaggatctcttcattaccaccaagctttggaattctgatcaag

SEQ ID NO: 175306 - DNA, 258 bp, Glycine max
ttgagatagctagaagcaataagatgaaaatgaaagtgcttgttttgtttgttgctacagttttggtagcatatgaatgccatggctcagactaccaaaagttccctctccaaatgaaaactgggtttggtgggcaatacagcaatgaggtggcatgtgccagttggaggcttggcgtggaagcaaacaacgtagtcaagtggcaaactgttcctgcagcttgcggagagtacatagctgactacgttctaggagacc

SEQ ID NO: 175307 - DNA, 261 bp, Glycine max
gagaaacatggcttccttaagctccttagtgctgctccttgcagctctaattctatcccctcaagttcttgcaaactatgagaatcccccagtgtacaagcctcccactgagaaaccaccagtttataagcccccagttgagaagcctcctgtttacaagcctccagttgagaaccctccagtttacaagcctccagtagagaagccaccagtgtacaagcccccagttgagaatcctccagtttacaagccaccagttga

SEQ ID NO: 175308 - DNA, 258 bp, Glycine max
attcttcacccgctcagacgcagaggagcagaagcctaagcctcaaacatggcgagagggttaaagaaacacctgaagaggctcaatgctccaaaacattggatgcttgacaagcttggtggtgcctttgcacccaagccatcatctggaccccacaagtcccgggagtgtcttcctctgatcctcatcctacgaaacaggctaaagtatgctctaacatatagagaagttattgccatcttgatgcagcgccatgtt

SEQ ID NO: 175309 - DNA, 256 bp, Glycine max
  unsure (1)..(256): unsure at all n locations
ctagggtttacagagaagcgaagaggcgcacgtnagcagtaactcgtggaattgctagcaatggcgaggatcaaggtttacgagctgaggcagaagacgaaggctgatctgttgaatcagctgaaggacctcaaggccgagcttgccttgcttcgtgttgctaaggtcaccggcggtgcacctaacaagctctctaagatcaaggtggtgaggttgaacattgcccaggttttgacggtgatttctcagaagcaga

SEQ ID NO: 175310 - DNA, 259 bp, Glycine max
gtgacttgccaggtctcactgatgttgagaagccaaggatgaggggtccaaagagagcatccaaaatccgtaagctgttcaacctgtccaaggaggacgatgtgagaaagtatgttaacacataccgtcgaacctttataacaaaagctgggaaaaaagtgagcaaagctccaaagattcaacgattggtcactcctttgacactccaaaggaaacgagcaaggattgccgacaagaagaagagaattgctaaggcaaa

SEQ ID NO: 175311 - DNA, 257 bp, Glycine max
ataaatattccgttttgcgtttctctgcctaaaaggattgaaagatgggtcaagcactaggttgctatcaagttgatcagtcaaatgtggctatcaaggagcattttggaaaatttgatgatgtcctagaacctggatgtcattgcctgccttggtgtcttgggtaccagattgctggtagtttgtcactgcgtgtgcagcaacttgatgttcgatgtgagacgaaaaccaaggacaatgtctttgtcactgtggtt

SEQ ID NO: 175312 - DNA, 182 bp, Glycine max
tagcctctttttgtctcccctgcaatcaacggcaccccccacaaaaatgacaggagagacagtgaacccaaaagcttaccctttggccgatgcgcaactcgcaataacaatcttggatcttgtgcaacaagctgccaactacaagcaactaaaaaagggtgctaatgaagcgactaagacac

SEQ ID NO: 175313 - DNA, 260 bp, Glycine max
actcgagccgaatcggctcgaggctaaatccctagtaagccgccaacgtgaagtactcaagggagcctgacaatccaaccaagtcttgcaaggctagaggcgccgaccttagggttcatttgaagaacactagggaaactgcctttgcaatcaggcagttgcccttggttaaagccaaaaggtacttggaagatgttcttgcgcacaagcaggccattccgttcagacgtctctgtcgtggtgttcgaaggacagctcaa

SEQ ID NO: 175314 - DNA, 258 bp, Glycine max
tagtaatggagaatatgtcaaagctggtttggctgaattggagcattggtgttataaggcaactgatgagtatgcaggttcagcctgggatgagctcaaacatattagacaagctattggatttctggtcatacatcagaaaccaaagaaaacattggatgaaataagccatgacctgtgcccagtaagtaggagaaatctttttcattgaaagatttgctatttagaatagttaccattctgtctctgtgtacaggt

SEQ ID NO: 175315 - DNA, 263 bp, Glycine max
cacctccgcaacatgattattgtgcctgagatgattggtagcattattggagtgtacaatggcaagacctttaatcaggttgaaatcaaacctgagatgattgggcattatctggcagagttttctatttcatacaaacccgttaagcacgggagacctggtattggtgctactcactcatccaggtttattcctcttaagtgaaaactgttactgggaagctacattttagtttgtagtggttctgaagaaaatttcaactc

SEQ ID NO: 175316 - DNA, 262 bp, Glycine max; identical to SEQ ID NO: 121856

SEQ ID NO: 175317 - DNA, 261 bp, Glycine max
catcacttcagaatccgagtacttcactatccccggcatacctggtcaaattcaagctaccaaagagcagatacctatgatgatctcaaattcagatgaagaaatgaagcacttcggggaccagatgcgtgatgctgaaatgaagtcatacgggctaatcataaacacttttgaagagttggagaaggcatacgtgacggattacaagaaggtgagaaatgataaggtgtggtgcattggtcctgtttcattctgtaacaa

SEQ ID NO: 175318 - DNA, 256 bp, Glycine max
atcaatcttctgagagtgtttggttgaaagtagcaaagatgtttcctttcgggcaaaagggtcaaaagataaaggggactatggtggttatgcagaagaatgtgttggatatcaacagcatcaccagtgttggagggatcgttgaccaaggcttaggcttcataggcagtgcagtcgatgcacttacttttgcagccaccaaaatctccatccagttgattagtgctaccaaggctgatggtgggaaacgaaaaat

SEQ ID NO: 175319 - DNA, 260 bp, Glycine max
cgctcgcagtcacccaagaggcgaatccttaccattgctcgagatgggtgaagaagtgaaggccgtggttccagagtctgttttgaagaagcagaagaaagaggaggaatgggcgttggccaagaagcaagacctcgaggctgcgaagaagaagagagccgagagccgcaaactcatctacaacagagctaagcagtacgctaaggagtacgatcaccaggagaaggaattgattcggttgaaacgcgaggccaagctga

SEQ ID NO: 175320 - DNA, 239 bp, Glycine max
ctcagatccatccatcagtggtgggcgatgttgttgttctcagatccagactgagggggtgaaggaaaatgaagtcgtcgaggcgtctgttgaggatcgggcttgtgtcggcgtggtactcgtcgaacattggggtgctgctcctgaacaagtacctccttagcaactatggcttcaagtactctatcttcctcaccatgtgtcacatgaccgcttggtccctcttcagctacgtcgcc

SEQ ID NO: 175321 - DNA, 252 bp, Glycine max
cttcttcttcttcttcttctctctggaattttccctgacttttgtgtgcatcgatggcggcgatcagtctccggaaggggaacacgcggctgccgccggaggtgaaccgcgtgctgtacgttcggaaccttcccttcaacatcacgagcgatgagatgtacgacatcttcggcaagtacggtgccattcggcagatccgcatcggcaccaacaaggacactcgcggaacggccttcatcgtctacgaggaca

SEQ ID NO: 175322 - DNA, 258 bp, Glycine max
aattcactcacctgcctcttcctcacccctgatctccatctaacgagtaaggaaaaatggcgcgtaagaagatcagagagtatgactcagagaggtcgttgaagtcgcactttaagagactctctggcaaggagtttccgatcaagtctgcagagattactgcatcaactgatttcactgagctacaagagaaggaaccctggctttcatcatctaaattggttgtgcaacctgacatgtcatttggaaagcgtggca

SEQ ID NO: 175323 - DNA, 258 bp, Glycine max
gaagtaattgctcatgttgctgagggtcactctgaggatgttgatcgagcagttgcagctgcacgaaaagcatttgatcatggaccatggcctaagatgacggcttatgaacggcaaaggatcttgttgcgcgcactgatctgcttgagaagcataatgatgagcttgcagcacttgagacttgggataatggaaagccttatgaacaagctgctaagattgaagttccaatgcttgttcgcctgattcgatactatg

SEQ ID NO: 175324 - DNA, 307 bp, Glycine max
gcaagaccagggatttggatagtgaggagctattggggcagttgcctgctttgcagcagctgctgtatcgacttgttggttgtcggccagaaggagcagctgttagcaattatgtgatacaatatgctcttgccctggtactgaaggagagctttaagatttattgtgctattaatgatggcattatcaatcttgttgataagttttttgagatgcccagacatgaagctattaaagcccttgatgcctataaacgtgcgggtcagcaggcagcaagtctatctgatttctatgatgtttgcaaagg

SEQ ID NO: 175325 - DNA, 301 bp, Glycine max
caggagttggatactggtcgtgctagctagcgggccaaagtagtgcctaagtcttcctcatatcttccaccctttggcttattagtgggagcaatacatatcattcattcagaggcaacaaaggagttgtaaattaagagcatggctgcacaagctcttgtatcatcatcatctcttaccttctcagccgaggctacaagacaaagtcttggaccaagatcactccaatctccatttggcttctcaagaaaagcctcctttcttgttaaggcagctgctactccccctgtcaagcaaggat

SEQ ID NO: 175326 - DNA, 298 bp, Glycine max
tgagaataccagttgctccagtagccggcactaaacaacatggcggacaaggcagtcaccatccgaaccaggaagtttatgacaaacaggcttctctccagaaagcagttcgtcgttgatgtccttcatccagggagggctaatgtttccaaggctgaactgaaggagaagctgggaagaatgtatgacgtgaaagacaccaacactgtatttgtcttcaagttccgaactcattttggtggtggcaagccactgggtttggtttgatctatgattcagttgagaatgctaagaagta

SEQ ID NO: 175327 - DNA, 296 bp, Glycine max
cacactctctctcaccaaagccttcctagaacgaaaaaaaaaagaagagcaattttccctcaccaaagaagaagaagcaaacaatggccgatcaacttaccgatgaacagatctccgagttcaaggaagccttcagcttgttcgacaaggacggcgatggttgcatcacaaccaaggagcttggaactgttatgcgttcattggggcaaaacccaactgaggcagagctccaggacatgatcaatgaagtggatgctgatgggaatggtaccattgacttccctgagttcctaaat

SEQ ID NO: 175328 - DNA, 281 bp, Glycine max
ctcataatcaaataccatttcattcattcttacatattgcttaattttatctgaattttgaaacaccttctgaatggctttttcaagagttgcattgttaatatgcacggtaattgggtattttgtgattgcctctgcgggcaatttttaccaagattttgatatcacttggggagatgggcgtgctaagatactcaacaatggcgagcttctcactctgtctcttgacaaagcctctggctcgggtttccaatccaagaacgaatacctttttgttatct

SEQ ID NO: 175329 - DNA, 290 bp, Glycine max
tccgcttcgtgacttgcagcaattcccaatggcttccgtttccaagctctcaacgccaaatccacttgcttccttatcagaagcgcttcgcccccgagattctcgcttcctcaccttcaaaccttcttccatcgcttttaatcacaaaactaacctatccgcttccctccgatccattcactcgctccctcttaaaacctccttacggatcaaatgctcccaaacagatgggaatggaagtcctgcaaagaggacagtgcttcatgatctttatgagaaagaagggcaga

SEQ ID NO: 175330 - DNA, 281 bp, Glycine max
cttgttgttggaaagaaaccctagcaagcggaacaatggcagacgttgaggtcgatgtggcggctgcagcagcagcagggcagccgaagaagagaacgttcaagaagttcagtttcaggggcgtggatctcgatgcgcttctggacatgtccaccgatgaactcgtgaagatgttcagtgctcgcgcacgtagaaggttccagagaggcctcaccagaaagcccatggccttgatcaagaagcttcgcaaagcgaaaagagaagctccaccaggtgagaag

SEQ ID NO: 175331 - DNA, 297 bp, Glycine max
tggaattcatgatggggtacaggaacgacactttcgcggaggataatgcggttcgtgaagctgcgtcggggctagagagcgtcgagaaactcatcaagttgctgtcgcatactcaacaacaataccagacaacctcaaagtcttccatggaaaacatcgacaccgactacacagctgtcgctgacgtcgcggtttctaagttcaagaaggtcatttcgcttctgggccgcaccagaaccggtcacgcgcgttttagaagagcccctgtgcctgtgcctgtgcctgtggcttcacctc

SEQ ID NO: 175332 - DNA, 294 bp, Glycine max
atcaaggatagccttgataatgatgaagaaaaagttggagctgatattgtgaaaagagctcttagttaccctttgaaattaattgccaaaaacgctggtgtcaatggtagtgttgtcagtgagaaggtattgtccagcgacaatccaagatatggatataatgctgccaccggaaaatatgaagatttgatgtctgctgggatcattgatccaacaaaggtggtcagatgttgcctggaacatgcagcctctgtagccaaaaccttcttaatgtcagattgtgtggttgtcgag

SEQ ID NO: 175333 - DNA, 295 bp, Glycine max
ctttcttttcttaatttctctctattagtctgcatgctctgcaaactgagcatggctcctctcgcattttccttcttcttcatccttatcacattcttttcttcatcatctgaagcgggatccgttggaataaactatggaagggttgcgaacgacctacctacaccagcgaaagtagtggagcttctgaaggcacaaggtctgaaccgtgtgaagctctacgacaccgacgccaccgtcttaaccgcgtttgcaaactcgggaatcaaggtcgtagttgccatgccaaacgagc

SEQ ID NO: 175334 - DNA, 287 bp, Glycine max
gcccatgtatcagaggccattcatgaaggggaaactttacattcacttcactgtggagtttccagattctctaaaccctgatcaagttaaggccttggaggctgttctgccaccaaagccttcttcacaattgacagacatggagctggatgaatgtgaggaaactacactccatgatgtcaacatggaggaggagactaggaggaagcagcaacaagctcaggaggcatatgatgaggatgatgacatgcctggtggtgcacagagggtacagtgcgcccagcagt

SEQ ID NO: 175335 - DNA, 287 bp, Glycine max
gattgtttgttgttgtaactcgttcttcttcttttgttgttctgtgtttgtgtttgttttttctctcacctgaaaatgtcttgctgcggtggtaactgtggttgcggaagctcctgcaagtgcggcaacggctgcggaggctgcaagatgtacccagacttgagctacactgagtcaaccaccaccgagaccttggtcatgggagtggcacctgttaaggctcaatttgagggtgctgaaatgggtgtgcccgctgagaacgatggctgcaaatgtggaccaaactg

SEQ ID NO: 175336 - DNA, 289 bp, Glycine max
atggcattaaggtgaagatcatgcttgattgggatcctaaggggaaacagggtcctaaaactcccctccctgatcttgtcacaatccattctccaaaggaggaagaagaatacatccagcctgctccagttttggctgctaatgatattgaggtccctgttgcttgaaaagttatacactggagaagtaattcatagtagctgagtgcctagtttttcttgtgtgcaatgtttgttgtcaaagacatgttcaaaattttgtagtttcttgaattttgaagaaattgtta

SEQ ID NO: 175337 - DNA, 289 bp, Glycine max
gctgaatgcactgagctgggggattttgatgcccgttggtgccataatagcaaggtatttgaaggtgttcaaatctgcagaccctgcttggttttaccttcatgttacatgccaaacctctgcctacatagttggtgttgctgggtggggaactggtctcaaactcggaagtgactcggttggtattaagtataacacccatagagcactcgggatcaccctcttctgccttggaacccttcaggtttttgctctgcttttgaggcccaacaaagaccacaaaatcaga

SEQ ID NO: 175338 - DNA, 301 bp, Glycine max
aactgctcatgatgcacaacaggacttactgtgctgagattgcccacaatatatccacaagaaagagaaaagatatagtcgagagagccgcgcacttgatgttgttgtgacaaataaaacggccagattacgtagccaggaggatgaatagtctaaatgactgaaatttacttatttgtagtgaacctggtgacactagttgtgacattgtattttgatcatcttttattctcgtataaattgtaggactgaaatttacttgtttgtagtgaacctggtgacactagttgtgacattgtat

SEQ ID NO: 175339 - DNA, 294 bp, Glycine max
ctggcggttcctgaagaagctctgcatgacggagcttctgagcgagaagaccctggagcatttcgtgaaaatccgcgagaagcgaagtggacgcgttcctcaagagaatgatacgccatttcaggcaatggaaattacgaggtggtgatgaggaaggagctcataacgcacacgaataacatcatcacgaggatgataatggggaagaagagtaatgcggaaaacgatgaggtggccaggttgaggaatgtggtgagggaggtcggggagttgcttggggcgtttaacttgggg

SEQ ID NO: 175340 - DNA, 292 bp, Glycine max
aaaaccctagctagtccactcccccttcctccgttcgatcaacaatgacaggagaagcagtgaaccccaaagcttaccctttggcggatgcccaactctcaataaccatactagaccttgttcaacaagctgccaactacaagcagctcaaaaaaggtgctaatgaagccactaaaaccctgaacaggggtatctctgaatttgttgtgatggctgctgatactgagccccttgagattcttctacatcttcctctacttgctgaggataagaatgtgccctacgtgtttgt

SEQ ID NO: 175341 - DNA, 291 bp, Glycine max
aaagcagagaagtgagatacactaagttatcctcataaatacactctaattaggtggcaagataagtgtctaaccttagtaacattgccacatattgtgttcattttggaattgtgccactaaaattctattcaattcatctatggctgcctcttcttatgctatgcaatcaatcctggcaaaccctttgatccgcatttccagcgggtctagggtgaaccaatttggcgttcctgctttgcacatgagaaggaatgttggcctgagagttaggtccatggctaaggaaga

SEQ ID NO: 175342 - DNA, 288 bp, Glycine max
  unsure (1)..(288): unsure at all n locations
tgagggtactgccatccaattaatgggttctaaaactaatgcatcgggctatagagcacgaaggccactgtcaatatttgctgtgcttggtctgtgctgtttcttttatcttttgggagcatggcaaagaagtggatctgggaaggcagataaacttgcattgaaagttaataacctgatgacaggctgcactgttttacccaatttgagttttgaatcccatcacagtgatgtagaaattgtcagacctgatgtgctaaaagctanagcattcaagccgtgtgacat

SEQ ID NO: 175343 - DNA, 283 bp, Glycine max
atgcactctgccctttgggaggagtttgtaacatggctgctctacctactgcggacttagtgatgcaaatgcaacacatgtagcaagtggtgatgtgagggtgctgcatccagtgttcaaggtttatggccaggccacggcattctccggccccattgtcaccgtgaaggtgtttgaagacaacgtgttggtgagggagcttgttgagacgaaaggcgaaggaagagtattggttgttgatggaggaggaagcttgaggtgtgcattgatgggagggaatttg

SEQ ID NO: 175344 - DNA, 286 bp, Glycine max
gctgctgttgcaaaacttagggttgagcctttttttgaggttttcagcgcttctttctcacaatggttcttcagaatgatattgatttgctgaatcctccagctgagttggagaagagaaaacacaaactcaagcgtcttgttcagtcaccaaactctttcttcatggatgttaagtgccagggatgcttcaacataacaactgtgtttagccactctcaaactgttgtggtgtgcggaaactgccagactgttttgtgccaaccaacagggggacgggcgaggtt

SEQ ID NO: 175345 - DNA, 285 bp, Glycine max
gccaaaccttacgcattccatttctctctattcgctctctttcaatcacaacaacatggccgaacgtggaggcggagaccgtgccggtttcggtcgcggctttggcggtcgtggacgcggcggcgacaggggacgagggcggcgcagggcaggagggcgccgcgacgaggaggagaagtgggtcccagtgacgaagctggggcgcctggtgaaggaggggaaaattcggagcctggagcagatctacctacactcgctcccaatcaaggagcaccaaatcattga

SEQ ID NO: 175346 - DNA, 286 bp, Glycine max
tagggtttgtaactttgtcttttgcttgcgaatctgaatcgaataataatcaatctgtcatcatgtcgtcggcgaagaagatcacactgaagagttcggacggcgaggctttcgaggtggacgaggcggtggcgctggagtctcagatgataaagcacatgatcgaggacgactgcgccgacagcggcatccctctgccgaacgtgacgagcaagatcctggcgaaggtgatcgagtactgcaagaagcacgtcgaggccgcgaatcccgaagacgaaccctccga

SEQ ID NO: 175347 - DNA, 295 bp, Glycine max
tacacttcaccttaccaggtgaggactttgatcagagaataatggagtacttcattaaattgatcaataaaaagcataaaaaggatattagcaaggacagccgagcacttagcaagctgaggagagaggctgaacgtgcaaagagagctctcagcagccagcaccaggtccgcgtggaaattgaatcactttttgatggtgttgatttttctgagccactcacccgagctcggtttgaggagttgaacaatgacttgttccggaagaccatgggaccagtgaagaaggctatgga

SEQ ID NO: 175348 - DNA, 294 bp, Glycine max
gaaagcactcagtagggtttgcggtttcagagtttgtgacgcacgcatccatggccaccaccaccaacgccgccgcagccccgccgcgccagctctcccagaaggaagccgacatccagatgatgttagccgccgacgtccacctcggcaccaaaaactgcgacttccaaatggaacgttacatcttcaagcgccgcaacgacgggatttacattattaaccttgggaagacatgggagaagcttcagttagcagctagggttattgttgcaattgagaaccctcaggatatca

SEQ ID NO: 175349 - DNA, 292 bp, Glycine max
caaacctaacgcagcatcgctattctcttcattccatggctttgcccaaccagcaaaccgtggattatcctagtttcaaactcgttatcgtcggcgatggtggcacaggaaagacaacctttgtgaaaaggcatctcaccggagaattcgagaagaaatatgagccaaccatcggtgtggaggttcacccattggattttttcacaaactgtggaaagattcgattttactgctgggatactgctggacaggagaaatttggtggcctcagagatggatactatatccatgg

SEQ ID NO: 175350 - DNA, 288 bp, Glycine max
attactaccactctccacccccaccttcacctcctccaccttacaagaagccatactactatcactcaccaccccctccttaccactattagctagcatagctctatggatatgaagaatatgtgcaacgaataaaagaaagcgatagaaaaggaagaagaagcgcttcgcgatgcacgaaagagaagaattggaagcaaagtttcggcgttttgtcttatataaaaaaaatgttaaatcattataattttctatgatagggattggtttcttgtcttatatcttttg

SEQ ID NO: 175351 - DNA, 286 bp, Glycine max
agtatttttaccttctctggtagtgctggtgctgaagaccatcagtatgagctaaaactggagctctttgacaaggttaatgtagaggagagcaaaattaatgtaggagtgcgaacatattctgtgtagtgcagaaggcagaggatggatggtggaaaaggttactgcgtggagaaggcaagcctccacattatgtgaaagtagattgggataaatgggtggatgaggatgaagatgatggtaataatggtgaagtggacttgggagggatggatttctcgaaatt

SEQ ID NO: 175352 - DNA, 284 bp, Glycine max
tatagcccaagccctatacaaccaaaccctaacacacacccatttgattcagtttccatggctagcctcaaggttgcatttttggctgcagtgctctgcatggttgtggtgagtgcacccatggcacatgcagctatcacgtgcgggcaggtgacgaatagcctgatcaattgcatcggttacctccagaacggaggaacgccgccgtcgggatgctgcaacggagtgaagagcctcaatgccgccgccaagaccaccgccgaccgccagacggcgtgcaactg

SEQ ID NO: 175353 - DNA, 282 bp, Glycine max
cagtaatatgggctcagatgaggaagtggatgaagataaatgatcagaagcaatgccgatttatgtatagctagcgaaactattctttgtgatctgatgaaaattggactgctttgttatcctctttctggaaaaaatttgttgatgccaaatttctcagatagaagttgagcatagagaagttcattccacgtgtctggcacccctggtaagcaccagtggctgcaatcctgtggggcatcaggtggagtgcccggttcccggtacttggaagggtgaccg

SEQ ID NO: 175354 - DNA, 278 bp, Glycine max
ggtctctggagttacaccacagccacggagctctaggcactgctcattaggtagttttttatttagaggctaacatgagctttgctgcgccatcacttggttctgctggtggtagatctgctagaagagcatttgagtttgggagaacctatgttgtcaggcctaaaggtaaacaccaagcaactatagtctggttgcatggcctcggggataatggctccagttggtcccagctattagagacccttcctcttccaaatattaaatggatatgtccg

SEQ ID NO: 175355 - DNA, 287 bp, Glycine max
gaaaccctagctagccacaatgcagatattcgtgaaaaccctaacggggaagacgataaccctagaggtagagtcatcggacacaatcgacaatgtgaaggcgaagatccaggacaaggagggcatcccgccggaccagcagcgcctgatcttcgccggtaagcagctggaggacggccgcaccctcgccgactacaacatccagaaggagtccacgcttcacctcgtcctccgcctccgcggcggcgccaagaagcgcaagaagaagacctacaccaagcccaaga

SEQ ID NO: 175356 - DNA, 286 bp, Glycine max
tcacattttagaagaataccccctcttttgctgcatcagaggagttgtaaattaagagcatggctgcacaagctcttgtatcatcatcttctcttaccttctcagcggaggctgcaagacaaagtcttggaccaagatcactccaatctccatttggcttctccagaaaagcctcctttcttgttaaggcagctgctaccccccctgtcaagcaaggatcagacagacctttgtggtttgcatcaaagcaaagtctttcttacttggatggcaccttccgggtgac

SEQ ID NO: 175357 - DNA, 296 bp, Glycine max
caagcttgtctgtcatccactagatgttgtcaaaaaaagatttcagattgaagggcttcaaaggcatccaagatatggagctcgagttgagcatcgtgcatacaggaatatgcctgatgccatgcaacggatatttcgattagagggttgggctggtctgtacaaggggataattccatcaactgtcaaagctgcacctgctggtgctgtgacatttgttgcttatgaattgacatcagattggttagagtccactttcaattgattttttcccattttttcttcatgattagtga

SEQ ID NO: 175358 - DNA, 292 bp, Glycine max
attgacaaaaaggtggatgaagcttcccacaagttcgatgagcatgctccttcctttgccaagcaccttgcggatcaagccaagggtgtgattcagaaagtgacttgtgaggcagggaaagttgcaagtgaagctcaatctggggggtcaagagctgctgttcattttgttgctacagagtcaaagcattttgtgttgataaattcggtgaagttgtggaatggactcacccactatccaccattccatgcattggcagagatagcagttcccactgctgctcactggtcag

SEQ ID NO: 175359 - DNA, 289 bp, Glycine max
gttacagcataacttctattctatatttctttctactcgcaagcaaatcagaagaagagaatggcagcagcagaggggctaaacagagagcagtacgtgtacttggcgaactgtcggagcaggcggagcggtacgaggagatggtggagttcatgcagaaggtggtggtggggtcgacgccggcgtcggagctcacggtggaggagcgcaacctcctctcggtggcctacaagaacgtcatcggctcgctgcgtgccgcgtggcgcatcgtctcctccatcgagcagaa

SEQ ID NO: 175360 - DNA, 191 bp, Glycine max
  unsure (1)..(191): unsure at all n locations
cttgttatcactttcttgctttttcttgcttggagacttatccaatcactctgtgctcaacttaagttgccttacaatgtatccagtctttcctttcttctttccttttcccatataatcgtgagacttatgatatatctgtgtctcacttcatcaataataaattataatatagaagagcaatcattang

SEQ ID NO: 175361 - DNA, 290 bp, Glycine max
atgagaggaaacagaagagagaagagcaatcggtgagtgaatggaatggattcaggtcctccggcgaacgatttgtgttcagtgtgccatggcaactttcatattccatgccaagccaattgttctcactggttttgcggaaattgcataatgcttgtgtggcagcacggatcagtgggttgttcatgcaagtgcccactgtgtcgtcgagccatcagtctcttagtccccacagaagagtctctgaggcaacagcaggaccccgaagtttcccagattctgtcaaagat

SEQ ID NO: 175362 - DNA, 287 bp, Glycine max
gccacttctgaatctattgaatcaacaatcatgtcggacgaagagcaccatttcgagtccaaggccgacgccggagcctccaaaacctaccctcagcaagccggtaccatccgcaagaacggctacatcgtcatcaaaggccgcccctgcaaggttgtggaagtttcgacttccaaaactggaaagcacggtcacgctaagtgtcactttgttggaattgatattttcactgccaagaaacttgaggatattgtgccctcttctcacaactgcgatgttcctcatgt

SEQ ID NO: 175363 - DNA, 285 bp, Glycine max
cgggactgtaactagccgcagcacgaggagcagcctcaggaggagaaggatgtctcacaggaagttcgagcacccaaggcacggttcactgggatttcttcccaggaagcgtgctgctcgtcacaggggaaaagtgaaggcattccccaaggatgacccatccaaggcacccaagctcactgcattcttgggttacaaggccggtatgactcacattgttagagaggtcgagaagccaggatcaaagcttcacaagaaggaaacttgtgagcctgttacaattat

SEQ ID NO: 175364 - DNA, 282 bp, Glycine max
tattttcgggccatcagttgaagttgatatacctctttgtttttttcagatgaatacgttatttgccttgggtgcaagagtccggatactatacttacaaaggagaatcgtctcttctttctccggtgtgagaaggtgaattttttatacacttttgcttggttctcttttagtacctatagtttttaagccaagtgtctgcccttacccaccttgcgataagctcctctcaaaggtgatggtttctattaatattttgttttatttatgatcaattagtct

SEQ ID NO: 175365 - DNA, 285 bp, Glycine max
gactagttttaagcgaatcgtttggcctttttattcctcctactctcaaataccctaattaggtttgtgattgtctttgcctcactttgctgccgtacctaatcggagagctcccgctgactgcgatcggatttcatggctcctaagaaagacaaggctcccccaccttcatcgaagcccgccaagtctggtggtgggaagcagcagaagaagaagtggagcaagggatagcataatgagaaggtgaataaccaggtgctgttcgatcaggctacctatgacaag

SEQ ID NO: 175366 - DNA, 293 bp, Glycine max
  unsure (1)..(293): unsure at all n locations
acctacctctttttcttctctctcaacaacttcaccttcttcctcctcgatcatgtctcacttcaagggcaagtaccatgatgagcttatcgccaatgctgcgtacattggcttcctggnaagggtattcttgctgctgatgagtcaacagggacaattggcaagcgtttggccagcatcagtgtagagaacattgaatccaacaggcgagctcttagggagctgcttttcactgctcctggtgttcttcaatatctcagtggtgtcatcctctttgaggaaaccctctacca

SEQ ID NO: 175367 - DNA, 290 bp, Glycine max
ctagggtttacagagaagcgaagaggcgcaccgtagcagtaactcgtggaattgctagcaatggcgaggatcaaggtttacgagctgaggcagaagacgaaggctgatctgttgaatcagctgaaggacctcaaggccgagcttgccttgcttcgtgttgctaaggtcaccggcggtgcacctaacaagctctctaagatcaaggtggtgaggttgaacattgcccaggttttgacggtgatttctcagaagcagaaggccgcgttgagggatgcctacaagaacaagaa

SEQ ID NO: 175368 - DNA, 289 bp, Glycine max
aggatttgggggaacatttggttgattagggtttcttcgggtgctaatgctcttgttttctcacagtcacacagcaatggaagcaatcacagagggagtgaacaacatcaacatctccgattcttacaagaagaatcgcattcaggtctccaacaccaaaaagcccctcttcttctacgtcaatctcgccaagaggtatatgcaacagcataatgaagttgagctctcagcactaggaatggctattgctacggtggttactgttgctgaaatcttgaaaaacaatgag

SEQ ID NO: 175369 - DNA, 286 bp, Glycine max
ctattatcatccgcagctgcttttattcgcaccgcaaacagtgagacatggccgtcggaaagaacaagcgcatctccaaggggaagaagggtggcaagaagaaggcagctgatccctttgccaagaaggattggtatgacattaaggctccttctgtttttcaagtgaaaaatgttggcaaaaccctcgtctctcgtactcagggtaccaagattgcttctgaaggactcaagcatagagtgtttgaggtctccttggctgatcttcaaggggatgaggatcatgc

SEQ ID NO: 175370 - DNA, 289 bp, Glycine max
gtggaaacgtgaaattagggttcatcgaggaggaagaagaagaagaagatgtcgtacctgttgcctcacttgcactctggatgggccgtcgatcaagcaatcctcgccgaagaggagcgtctcgtcgtcatccgtttcggccacgactgggacgaaacctgcatgcagatggacgaggtgttggcgtcagtggcggagacgataaagaactttgcggtgatatacctggtggacataacggaggtgccggatttcaacaccatgtacgagctctacgacccttccacgg

SEQ ID NO: 175371 - DNA, 287 bp, Glycine max
cccatttctctcttctgctcattcctttgactcctcattatcagggaaatggctctcactgggttactcttgttggcctttctcacgatgttctcctctgctcatgcctatggtggagggtggactaatgctcatgccacattctatggagggagtgatgcatctgggacaatgggtggggcatgtgggtatgggaacctctacagccaagggtatggaacaaacactgctgctctgagcactgcactcttcaacaatggcttgagctgtggctcttgctatgagat

SEQ ID NO: 175372 - DNA, 288 bp, Glycine max
ggaggtgtttcagcagctgtctccaaaactgctgctgctcccattgaacgtgttaagcttttgatccagaaccaggatgagatgatcaaaactggtaggctttctgagccctacaaaggtattggtgattgtttcaagagaacaatggcagatgagggtgctatttctctatggagaggaaacactgctaatgttatccgttatttccccacccaggctttgaactttgcatttaaggattacttcaagaggcttttcaactttaagaaggatagagatggctactgg

SEQ ID NO: 175373 - DNA, 136 bp, Glycine max
cgaaaatcgatgggttaaatcagattggcaaacagatgagaacgtggctggggattggaaccacacctctggtcaatggaatggaaacgctattgacaaaggtattcaaaccagtgaggattacagcttctatgct

SEQ ID NO: 175374 - DNA, 169 bp, Glycine max
gttggaaagaaaccctagcaagcggaacaatggcagacgttgaggtcgatgtggcggctgcagcagcagcagggcagccgaagaagagaacgttcaagaagttcagtttcaggggcgtggatctcgatgcgcttctggacatctccaccgatgaactcgtgaagatggt

SEQ ID NO: 175375 - DNA, 285 bp, Glycine max
aaaattatactcaaagtttatatccctggatggaggtttgtacctactactactcatagaaggattaaggaaatagatagagttataaaagctttgcttatggatatgattaacaagagagagaaagcgctaaaggcggatgaagccactaaaaacaacttgttagatatacttctggagtcaaatcacaaggaaattcaagaacacaaaaataataagaatgttggattgaatcttgaggaagttattcaggaatgcaagctattgtactttgcagggcaggag

SEQ ID NO: 175376 - DNA, 299 bp, Glycine max
gccgtgtttcgctatctctcccattctctcgcatctcaatacccttttgatttgtgaaaggaaagcaaacatgcttgatcaggtccaacaccctacaatcatggacaaggttgctggccagctccatctccgttctggtgtttctggtattaggagttatgaaggagcctactgccaccccacaatgtaccaaagaccctcttttgggaattactcgaatgctgcattgcagtatcctgtgatgccctcatgcaaagctactatggatttgtctgctgctgcaacaactgcctcccccg

SEQ ID NO: 175377 - DNA, 262 bp, Glycine max
cctcctgctgctccacctcgccatcgccgctcacggcatcggcatcaactacggcacgctcggcgacaaccttccaccgcccgcggcgtggcgaacttcctgaagacgaagacgaccatcgaccgcgtgaagatctacgacgtgaacccggacatcctgcgggccttcgccggcagcggcatctccgtgacggtgaccgcccccaacggcgacatcgccgccttaaccaaaatcgactcggcgaggcagtgggtggcgacgc

SEQ ID NO: 175378 - DNA, 294 bp, Glycine max
acttcacttcactaatacatcatggcagacgagacccagaacaagtatgagagctctgaggttgaggtccaggatcgtggtgtttttgactttctcggtaagaaaaaggatgaagaagacaagcctcatcctcaggaggaggtcatcgccaccgagtttcaaaaagtcactgtctcagaccaaggagagaacaagcacagcctcttagaaaagcttcaccgatctgacagcagctctagctcttcaagtgaggaggaaggagaagatggagagaaaaggaagaagaagaagaag

SEQ ID NO: 175379 - DNA, 292 bp, Glycine max
cttcaagacctctgtgtcgcagaccattgcttcagcggttaaagtgaatggattcacatgcaaagatgctgccaaggtaaatgcgagtgatttcttctcagacatactagccaaaccaggtgccacaaacaacacctatggctccctagtgactggagccaacgttcagaaaatcccaggactcaacacccttggcgtgtctttatcacgcattgactatgccccaggtggcatcaacccacctcacacgcacccacgtgccaccgaggtagtgtttgtgcttgaaggaaca

SEQ ID NO: 175380 - DNA, 289 bp, Glycine max
  unsure (1)..(289): unsure at all n locations
atagggtttaacttataattgcgtgatcgattccgattcgattgattctcttctctctcacgcgaacagaaacacgaactaagaatccatggcgacaccaacgacgacgaagagaaaaccggtgttcgtgaaggtggatcagctaaaacctggcaccaacggccacacgctgacggtgaaggtggtcagctccaagccggtgaagacggtgaccactcgcggcggtcgatcgtcggtgctcgctgcgcgnccgtcgcgcatcgccgagtgcctcgtcggagacaaaccg

SEQ ID NO: 175381 - DNA, 281 bp, Glycine max
gcagcaattcacactggtctttgcttctcgttactcatttctcacctaactttctattcttctcagtctcagatcagaaccttggccatggcagcgttccagaagatcaacgtcgccaaccccatcgtcgagatggacggagatgaaatgactagggttatctggaagtcaatcaaggacaagctcattttgcccttcttggagttggacatcaagtattatgacttaggccttccttaccgtgatgagaccgatgataaagttacaattgaaagtgcgga

SEQ ID NO: 175382 - DNA, 280 bp, Glycine max
ctagggtttccggattcttgcgttttaatctttgcaattcaaaagcatggggcactccaatgtgtggaactctcatccaaagaactacggacctggttctcgcacctgccgtgtgtgtgggaatcctcatggattgatcaggaagtatgggcttatgtgttgcaggcagtgcttccgtagcaatgccaaggaaattggcttcattaagtatcgctgaaggattagtgtccaactgccccattcggtttggattcttgcattaggctgggttgattttact

SEQ ID NO: 175383 - DNA, 278 bp, Glycine max
ataatgtcgtcacattttgcatgaactttcagggagttggttatccacttgatattgttgtttgtagtgctttgggtgctgatatgtatgactgtgtttatcctactcgcacagcacgctttggcactgctctcgttcctgagggagtattgaaactaaaacataaagcaatggccgatgacacccgtccaattgatcccacttgcccttgtatggtttgcaagaactacagcagggcttacatccattgccttgtgacaaaagatgcaatggggtct

SEQ ID NO: 175384 - DNA, 289 bp, Glycine max
agaaacagtgtgatgaaaatgaaggtccttgttttcttcgttgctacaattttggtagcatggcaatgccatgcgtacgatatgttccctctccgaatgaacactggctatggtgcccgtactccggaggtgaaatgcgcaagttggaggcttgctgtggaagcacacaacatctttggctttgagaccattcctgaagagtgcgttgaagcaacaaaggaatacatccatggcgaacaatatagatcagactccaaaacagttaaccaacaagcttacttttatgcca

SEQ ID NO: 175385 - DNA, 301 bp, Glycine max
attttgtccatccaaaccttaaaaagattcagtgaagaacaacgttaatggcatctcttggtgtgcaagcagttcatcctcctccattaacatccacctccgacccacctcctctttttgatggcaccaccaggttgtacatcagttattcttgcccctatgcacaacgtgtatggatcgctcggaacttcaagggactaaaagacaagatcaatttggtccctataaaccttcaagacaggccagcttggtatatggagaaagtctaccctgaatattaggtgccatccttggagcacaa

SEQ ID NO: 175386 - DNA, 287 bp, Glycine max
tctcacccgcaggttgtagagaaaatttaacaattagggttgcttctcctttgccgacccatggctcccaaagctgatagttcaaagaaggctgatccaaaggcacaggccttgaaaactgccaaggcagttaagtccggtgctaactttaagaagaagaccaagaagatccgaacatctgttaccttccatcgaccaaggactttgaaaaaggataggaaccccaaatatccacgcattagtgctccacccaggaacaagcttgatcactatcagatattgaagtt

SEQ ID NO: 175387 - DNA, 284 bp, Glycine max
attagtttatgcgaagaaaactggcgatgtgacggagttgcaaattggcgtgaagcataaaccagcatcatgtgaagttctggcacacaaaggtgacagagtcaaagtacactatcggggaaaactcactgatggaactgttttcgattctagctttgaaagaaataatccaattgaatttgagcttggtactggtcaagtgatcaaaggttgggaccagggattattgggaatgtgtcttggtgagaagcggaactgaaaataccagcgaaacttggctatgg

SEQ ID NO: 175388 - DNA, 283 bp, Glycine max
gaagaaagaaggggtatgttgagttcgaggagtcgccgccggacgatttcgatccggcgaatccgtacaaggacccggtggcgatgctggagatgagggagcacatcgtgagagagaagtggatccaaatcgagaaggccaagatcattagggagaagctccgctggtgctaccgcatcgaaggcgtcaaccacctccagaagtgccgccacctcgtcaaccagtatctcgagtccacccgcggcatcggttggggcaaggacggtcgccacccatctctcca

SEQ ID NO: 175389 - DNA, 272 bp, Glycine max
gttgcattatcacaaacacctcgtccctcacaatgcagctagcaatggcggccaacgctgtcgtttcaccgtcgccgttccgacctcagccctttctccggtcatccttctccggcgtctccgtcaagctcactccccaatccataacgctttcacgctccaagcccctcaccgtcttcgccgccaccaagaaggccgtcgccgtcctcaaggggacctccgccgtcgaaggcgtcgccactctcatccaagaagacgatggcccgacgaca

SEQ ID NO: 175390 - DNA, 279 bp, Glycine max
atgtgctggtgctgataggctccaaactggaatgagaggtgcttttggaaagccacagggtacttgtgctagagtggctattggacaggtccttctttctgtccgctgcaaggacagcaacagccatcatgctcaggaggctcttcgccgtgccaagttcaagttccctggtcgtcaaaagattatagttagcaggaaatggggcttcaccaagtttagccgttctgattatctcaagttcaagtcagagaacagaattgtgcccgatggtgtgaatgc

SEQ ID NO: 175391 - DNA, 279 bp, Glycine max
atggttttggggttagattaggtcttcctacccaaaacaaaacttcaatttctgtttcagttcgcggagatcaatattttatctaggtccatcgtagatagaagatacgagaaaccaaaggcaatgtttttgtgggattggttttatgggattctagcgtcgctcgggctgtggcagaaggaggccaagatcttattcttgggcctcgataacgctggcaaaactaccttgcttcacatgctcaaagatgagagattagtccagcatcagcctacccag

SEQ ID NO: 175392 - DNA, 296 bp, Glycine max
cacaggtttgcaaagctgcttccagagccgcgaggtcccttctctccgcttccagagcctcccatggacgtgcggttggggctgctacggctgtttcattgagctgcaaagtgcctcttttctacggaaagaacggttctggaagtggttccgcttcatcatcatcatcatcatggatttcaggagcacttgctcttcctgccgcagcttacatgttccaagatcaggagttccgcgcactgagctggagcgcactttcattgccattaagcctgatggagtgcagagagggctga

SEQ ID NO: 175393 - DNA, 293 bp, Glycine max
gagaaaactactcttctgaatgctttgaaatattcgactgcagtgcctgtgatttttctttctgcccttaaatatcacgtcttccctgagaggtggacaaacttttataggcctctctggcttctgtcaagtgttgtgaactcatcatactccttctactgggatgtgaatcgagattgggacctaagtggcttcactcgaatattcaagtttaacaagccacatctgttctcacatatgttacatggaacgagatgggtttacttttgggtgattggaagcaatctggtttt

SEQ ID NO: 175394 - DNA, 289 bp, Glycine max
attaggtttcgggagaaaaagcaatccactcagagagctagaagaattcaacaatgcctcgctatgatgataaatacggcaatacccgcctctatgtgggacacttgtcttcgaggactcgttcccgtgatctggagcgtgcctttagcagatatggaagagttcgaggtgtggatatgaagaatgatttcgcttttgttgattttagtgatcctcgagatgctgatgatgcaagatataacctggatggtcgggatgttgatggaagtcggattattgtggaatttgc

SEQ ID NO: 175395 - DNA, 285 bp, Glycine max
aaattaagtgctcatttcttcttgtagtgattattagaggatttgatcgttaacaatttctcttcttatttgtttaatgtttttggtttcttaggtgaattattcaagaggacccgacaatcccacaaagcagaaagagaggttgttatgttatggcgggcaaaggtgttggttcagtggctaaggcagtagcagaatatcagtatccttggcgtgagaagttggcgaaatataaggatgagtttgctaagggtgtgtggggatactgggagctgggggcatggt

SEQ ID NO: 175396 - DNA, 284 bp, Glycine max
atccggtgagggaaaagtagtagaagagaagatgtcgaccgtaccaggacagctcatctgggagatcgtgaagaagaacaactcctttttggtgaaagagttcggaaggggcactcagagcgtgcagttcagcagagagcccaacaatctctacaacctcaacactttcaagtactccggtttggcgaaccagaaaactgtcactgttcaacctgctggtaaagaccagtccgtgttgctcgcaacaaccaagacaaagaagcaaaacaagcctgctgctttgc

SEQ ID NO: 175397 - DNA, 283 bp, Glycine max
agaaaagttcctctctctctcacacacacacatcccagccatgagcctcttcggtataggcagaaaccagagaacattccgcccgaaaaaaagtactccttctggaagtaagggagctcaacttcgaaaacatattgatgccacgttaggtagtggaaatctgagggaagcagtaaagctacctcctggggaggatttaaatgagtggctagctgtcaacactgttgatttcttcaatcaggtgaatctgctttatggtacccttacagagttctgtactcct

SEQ ID NO: 175398 - DNA, 279 bp, Glycine max
tcgatcaaacacaaaatggaaaagaatgtggggattctcgccattgacatctacttccctcccgcttgcgttcagcaggaagcattggagactcatgatggtgccagtaaagggaagtataccattggacttggccaagactgcatgtcattctgtaccgaagtagaagatgtcatctcaatgagtttgacagtggttacttctcttcttgagaagtatgggattgatcctaaacaaatcggtcgtctggaagttggaagcgagaccgtgatagacaaa

SEQ ID NO: 175399 - DNA, 279 bp, Glycine max
gagaaaaacagatagtgtgggagagagaagagcggaagagaaaatgacgaccaggttcaagaagaacaggaagaagagaggtcacgtcagcgccggacacggccgtatcggaaagcaccgcaagcatcccggaggtcgcggtaacgccggtggcatgcatcaccaccgtatcctcttcgacaagtaccatcctggtttcttcgggaaggtaggcatgcgctacttccacaaacttcgcaacaaattctacaatccgatcatcaacatcgacaagctgtg

SEQ ID NO: 175400 - DNA, 275 bp, Glycine max
attatcctaagtctttgggaatagtgctgcaatggcttcaagtcaggaggaggtgacccttttgggagctactggaagcccatttgtgtgcagggttcatattgccctcaagttgaagggagttcaatacaaatatgtcgaagaaaatttgaggaacaagagtgaactgcttctcaaatccaacccagttcacaagaaggttccagtgtttattcacaatgagaagcccatagcagagtctcttgtgattgttgaatacattgatgagacatgga

SEQ ID NO: 175401 - DNA, 276 bp, Glycine max
tagtcctgttatttctcagcgcgtaaagcatggctttgttggtggagaaaaccacgagtggtcgcgagtacaaggtcaaggacctttcccaggctgacttcggccgcctcgagatcgagctggccgaggtcgagatgcccggcctcatggcctgtcggaccgagttcggcccctcccagcccttcaagggggcccgcatcaccggctccctccacatgaccatccagaccgccgttctcattgagaccctcaccgcccttggcgccgaggtccgct

SEQ ID NO: 175402 - DNA, 263 bp, Glycine max
aattcatcaaaagcttataacaacaattaaacatgagtgcagccagcagagcttggattgtggcatcaagcattggagcagtggaggcattgaaggatcaattgggggtgtgcaggtggaaccatgcattgaggtcactgcagcagcatgccaagagcaacattagatcctacactcaggccaaaaccttgtcttctgctacttctgctgctgtctccaataaggtcaagaggaccaaggaggagtccatgaagaaagtcatg

SEQ ID NO: 175403 - DNA, 273 bp, Glycine max
agcagagaacagaaattgggaaattcctcaatcttttgaactcgtcaagtgcgtgcaacactgtacaataatcttcatcgtccttgaaattcccaatcccctgtagtggtagtaagttgctagcaatcgagaatgggagggcacggaggtctcaacattctcccccaaaagcgatggaacgtttacaatttcgacaacagagagaaggtccgtcgcgacgaagagcaagccgccagggaggagcagctcaagcgtgaagagacccggaagcgc

SEQ ID NO: 175404 - DNA, 284 bp, Glycine max
ggcaagatgtcgtagagatgactgttttcttcgttgctgcactagttccgagatgtcgctgggtatgccggtggcggcgacggtgaactgcgccgacaatacgggggcgaagaacctctacatcatatcggtgaaagggatcaaagggcgtttgaaccgtctcccctcggcttgcgttggcgacatggtgatggccaccgtgaagaaggggaaacccgatctgaggaagaaggttttgccagctgtcattgttcgccagcgcaagccatggcgccgaaaggacg

SEQ ID NO: 175405 - DNA, 286 bp, Glycine max
atacaactgtggtgaatcgggacatctggctagggattgcagtacgaggcggtggtggggacaggtacggaggaggtggtggtggtggcagatatggaggcggcggtggcgggaggtacggtggtggtggaggcggcggcggcggcggaggaagctgctacagctgtggagagtctgggcattttgccagagattccccatcaggtgctcggtgaatttactgtgagggttgtttatgttttgcggattgttttaagtttttactttaatatgtcttagggatttt

SEQ ID NO: 175406 - DNA, 279 bp, Glycine max
aagagctcaggctagattctgggctgattatgttgacattaagatacatgatcttggaaagaagatttggacatcaaagggagaagacaaagaagctgccaagaaggagttcatagaggcccttaaattgttggaggaacagctgggagataagacttattttggaggagacaatattggttttgtggatatagcacttgttccattctacacttggttcaaagtctatgagacttttggcagcctcaacattgagaatgagtgccccaggtttgttgc

SEQ ID NO: 175407 - DNA, 238 bp, Glycine max
acttcttctcttgcggctagggttttagcgcagcttcttctagatttaaggaagatgggtaaggaaaaggttcacatcagtattgtggtcattggccatgtcgactctgggaaatccactaccactggtcacctgatttacaagcttggaggcattgacaagcgtgttattgagaggtttgagaaggaagctgctgagatgaacaagaggtctttcaagtatgcctgggtgctggaca

SEQ ID NO: 175408 - DNA, 275 bp, Glycine max
aatctcttggtgctgatctgaagaagattaaagactgcgttggagatccccatgcagatgtagaaaatcctgttcttaaggctgaacaggatgcacagattggtcaaggctctcgtggtgatgttactatactgcctactcttgttataaacaacagacagtatagaggtaagttgtcaagaccttctgttctcaaggcaatctgttcaggctacctagagaccactgaaccatcaatttgcttaacttcagacctggaaacaaatgagtgtttg

SEQ ID NO: 175409 - DNA, 273 bp, Glycine max
ctcatcaagtccaagaaccaacctaccttttgcaatctcaattcaatggcgtcctctctcattgcgaacgcttcctctccccttccctcctctccaggtccctccttcgccccgccgcttccgcttcccaccgctctttcaacaccaacgccatgcgccagtatgacaaccgcgccgacgaccacagcaccgacatcgatcgtcactccgaacgctctttccctagcactgcgcgccgcgacgatatcttctcagatgtgttggatccatttt

SEQ ID NO: 175410 - DNA, 273 bp, Glycine max
gcaaaaaatggcttctagttcagaatctcaatctcagtctaaaccgctccaagaccgagttgcaatcgtcaccggctcgtcccgcggaatcggccgagaaatcgcgcttcacctcgcctcactcggcgcgcgactcgtcgtcaactacacctccaactcggcccaagccgactcagtcgcggcgcagatcaacgccggttccgccaccacgacaccgcgcgccgtcgtggtccaagccgacgtgtccgatccggctcaggtgaagtcgctctt

SEQ ID NO: 175411 - DNA, 273 bp, Glycine max
aggagattctttgtttgctaccttctctcggaaaaatggttacgttcaggtttcaccagtaccaggtggttgggagggctcttcccacggaagcagatcagcaccccaagatctaccgaatgaagctctgggccaccaacgaggttcgcgccaagtccaagttctggtattttctgaggaaactgaaaaaggtgaagaagagcaatggccaagtgcttgccatcaacgagatttttgagaagaacccaaccaaaattaagaactatggtatat

SEQ ID NO: 175412 - DNA, 276 bp, Glycine max
agaaatggtggcccaggaaccatcaagaagatcactttcgttgaggatggagaaaccaagtttgtgctgcacaaaatagaaagcattgatgaggcgaacttgggatacagctacagcgtggttgggggtgctgcattgccagacacggcggagaagatcacattcgactccaaattggttgctggtcccaatggagggtctgctgggaagctcactgtcaaatacgaaacaaaaggagatgctgagcccaaccaagacgaactcaaaactggaaaa

SEQ ID NO: 175413 - DNA, 281 bp, Glycine max
cgattttcgtaacaggtcagtcctattgagtatgggcatgttttgctgattccgcgcattttcgagtgtttgcctcaaaggattgaccgtgagagcttcctccttgcacttcacatggcagtggaagctgataatccatattttcgattgggttacaacagtttgggtgcttttgcaaccattaaccatcttcacttccaggcttattatttggctctgcccttcccaattgagaaggcccccactaagaaaattgcaagtttaaatggtggggtgaagat

SEQ ID NO: 175414 - DNA, 292 bp, Glycine max
caaaggtaaggtaggttaacactcttcttcatcgtcgtcgcaatgggacgtgtgatccgtgcgcacgtaagggagcaggctcggtcttcaagtcccacacgcaccaccgcaagggccctgcacgcttccggagcctggacttcggggagcgcaacggctacctcaagggcgtggtcaccgacgtcatccatgaccctggccgcggcgcgccgctcgccaaggtcgccttccgccaccctttcagatacaagaagcagaacgagctcttcattgccgccgagggcctctacac

SEQ ID NO: 175415 - DNA, 280 bp, Glycine max
aaaaaacccttctttctttcaggttcattacttgatcagtgtcaaaagggtagttgcaaattgcaatggctaagcatgatgttgagggtggttccttctcagcaaaggactaccatgatcctcctccagcacctttgattgatgctgaggaactcacacagtggtccttctacagggctttgattgctgaattcattgccacattacttttcctttacatcacagtgctcactgtgattggttacaagagccagagtgatgtcaaggccgggggtgatgt

SEQ ID NO: 175416 - DNA, 276 bp, Glycine max
gaaagaaactagaatggccactttagacgaacgcccttctgcgaaaaggtggcttcctcttgaagctaaccctgaagtcatgaaccagttcctttggggtcttggccttccactggacgaggcagagtgctgtgatgtgtttggcttagatgaagagcttctggaaatggttccgaagcccgtcctcgccgtgctttttctttatccaattaccgcaaagtccgaagaagaaaggttgcaacaggaaaacgaaaaaaaggattatagcagcaaagt

SEQ ID NO: 175417 - DNA, 275 bp, Glycine max
caaactcacacactttgtactctccgtccttccttcttcgatccagatctctctccttctccctcaaatggcttcccttctgcaatgttccatgcccctcgtctctctttccaatcgagctctggtacccggtaccaggatctccaacccaagttcagtttccctttcaattaagggaagaagtttcccatccgttacattgcagcccagagggcgtcggtttcagcttagatgtgcggcaaaaccagagacagtgaagaaggtgtgtgacatag

SEQ ID NO: 175418 - DNA, 273 bp, Glycine max
agaatgttgaagacagaacttacatgagtactctgtttggtcaccaaagtgaaattttaagtattgattgcttacgcaaagaaagggtactgactgctggacgtgatcgtagcatgcaattgtttaaggttcatgaagagtcacgtcttgtatttcgtgctcctgcatcctccttagaatgctgttgttttgttagtaatgatgaactcttgtctggttcggatgatggaagcattgagctttggactgtaatgcgaaagaagcctatttaca

SEQ ID NO: 175419 - DNA, 272 bp, Glycine max
cttcattctttctctcttctctctctgtccgaagatggcttcaagcaggttcgtatcttctctgattcgatcctcccttcgtagatctcaatcgaaaccctcgatttccgcatccgcatcgaggctcacgtcatccaaccgtgcctctccgcacggttacttgctgaaccgcgtcgccgaatacgctaccgcggcggcggctgctaccgctcctccctctgctccgcctccgggcaagaaggaggttagcggcggcgggaagatcaccgatg

SEQ ID NO: 175420 - DNA, 271 bp, Glycine max
agtggccaatgaagttaattcatgggctgaaaaggagacaaatggacttgttaaagaccttcttcctcctggatcagttgacagttcaaccagactcatctttgcaaatgcactgtacttcaaaggagcatggaatgaaaagtttgattcttcgataacaaaagactatgattttcaccttcttgatggccgttcaatcagggttcccttcatgacgagcaggaagaatcagtttattagggcttttgatggtttcaaagtccttggtctt

SEQ ID NO: 175421 - DNA, 271 bp, Glycine max
accaagagaacctgaatccatgaaagaactgagagagttgacagcaaaacacccatggaacatcatgacaacctctgcagacgaagggcaattcttgaacatgctccttaagctcatcaatgccaagaacaccatggaaattggtgtctacactggatattcacttcttgccaccgctctcgctcttcctgaagatggaaagatcttggccatggatattaacagggagaattatgaattgggtttgccagtaattaagaaagctggtgtt

SEQ ID NO: 175422 - DNA, 268 bp, Glycine max
gcttcagcagcactcactgcgctaaccccttctctctctctctgctcggttctccgatcgccgtcttcgccttgcccattcctgatcaatatgtctagaagatatgatagccgtacaacaatcttctcccccgaaggacgtctttaccaagtggagtatgcaatggaggccattgggaatgctggaactgcaatagggatcttgtcaaaagatggggtagttctggttggtgaaaagaaggtcacatccaagctgctgcaaacctcaa

SEQ ID NO: 175423 - DNA, 265 bp, Glycine max
cttcaacagttggtgcaggacatcttcaacggaaaggaactttgcaagactactaacccagatgaagctgttgcttacggtgctgcagtgcaggctgcgattctcagtggcgacggtaatgagaaagtgcaggatcttcttttgtaggatgttactcctctatccactggtttggagactgcaggaggagtcatgactgtgttgattcccagaaacacaaccattcgcaccaagaacgagcacgtgttctcaacctactctgaca

SEQ ID NO: 175424 - DNA, 275 bp, Glycine max
gagaaagaagcgcttatcgaactcggacggaagcactgagttgactcggagggagtggaaagtgttgttgcgtaatgtctggtggtatcgctcgtggacgcctcaccgaggagcgcaagtcgtggcggaagaaccatccccatggttttgttgcgaaccggagacgctgcccgatggaaccgtgaatttgatggtgtggcattgcactattcccgggaagactgggactgattgggagggtggctacttcccacttacgctgcactttagtgaag

SEQ ID NO: 175425 - DNA, 283 bp, Glycine max
attggtttgcgttgcgtggttggttttgcggtatcgaagaagaagatggggaaacaggttgtgccggtgaaatcagtgatctacgcgctttcccctttccagcaaaagattatgccgggtctctggaaggacttgcccacgaagattcaccacaaggtctccgagaattggatcagcgccactcttttgctcggtcccctcgtcggcacctacgcgtatgttcaaaactacctggaaaaggagaagctggctcacaggtactgagctcttgcaagagctgatt

SEQ ID NO: 175426 - DNA, 276 bp, Glycine max
aactgaggttgggtttggaaggcaagggcttgtgttgtcacaatccaagagagaagtaatggcgaacatagacatcgaagggatcttgaagcagcagcagccttatgatgggcgcgttccgaagacgaagatagtgtgtactttgggccctgcttctcgatccgtagaaatgaccgagaagcttctgagggcagggatgaacgttgctcgtttcaatttctctcatggcacccacgactatcaccaggaaaccctcaacaatctcaagactgccat

SEQ ID NO: 175427 - DNA, 238 bp, Glycine max
atggaccagaagaatacatcatagcttctttctcatttcacacacacaagaaccttgagacatcatgaagatttcaagttccaagcaattggctgtgggatttgcacttggaaatgaaggataggcaacgttggagagctgaagaggatgctttacttcgtgcatatgtcaaacagtatggtcctagggaatggaatctcgtgtctcagcgcatgaacacacctcttaacagggatgc

SEQ ID NO: 175428 - DNA, 269 bp, Glycine max
aagaaacagtgtgatgaaaatgaaggtccttgttttcttcgttgctacaatttttgtagcatggcaatgccatgcgtacgatatgttccctctccgaatgaacactggctatggtgcccgtactccggaggtgaaatgcgcaagttggaggcttgctgtggaagcacacaacatctttggctttgagaccattcctgaagagtgcgttgaagcaacaaaggaatacatccatggcgaacaatatagatcagactccaaaacagttaacc

SEQ ID NO: 175429 - DNA, 266 bp, Glycine max
caaaagaggagtttgagaatggcaacgatcagcgcggttcaggtggagttcctggagtttccagcggtggttacttcaccagcctccggcaagacctatttcctcggcggcgcaggggagagaggattgacgattgaggggaagttcataaagttcacaggcataggagtatacttggaggataaggcggtgccatcactcgccgctaagtggaagggtaaaacttcagaggagttagttcacaccctccacttctacagggatat

SEQ ID NO: 175430 - DNA, 266 bp, Glycine max
gtttcgtgaagctcagtgcatcaagatctctctctctgtaatcgaaaatgagcaagggaccgggtctctttaccgatatcggcaaaaaatccaaagatcttttgactaaggactacaactccgatcagaaactcaccatttcctcatacagcatctccggagtggccctcacttcaacatctgtcaagaaaggaggactctccactggggatgtggcagcactgtacaagtataagaacactattattgatgttaaactggacacc

SEQ ID NO: 175431 - DNA, 264 bp, Glycine max
agaccttttcagtgtcagtgactgcaagatttactggcaaagcaatggagactaccttgctgttaatgtagagaggtacacgaaaacaaaaaaaagcacatacacaggctttgagcttttccgtataaaagaacgggatataccaattgaagttttggagcttgagaataagaatgataagatcattgcgtttgcttgggagccaaagggtcacagatttgcagttattcatggtgataaccctaagcctgatgttagcattta

SEQ ID NO: 175432 - DNA, 269 bp, Glycine max
cttttcaaggctaattcgtggcctcgtcttctctttttctgtatcgtttttactttcaaccacttccaattttctttttcgtcagatcttaataccatcatggaggatgctgctgcttctgctgctactgctaatgtattggaagccaaagatggtactatttctgttgcttcagcatttcctggtcatcaagaagctgtacaggatagagaccacaagttcttaacaaaagcagttgaagaagcatacaagggggttgaatgtggtga

SEQ ID NO: 175433 - DNA, 272 bp, Glycine max
gcttaaaccctagcccctcttctcttcattcttcactcaggaaacaagcataatggccttctgtaataaggttggaaatgtcttgaggcagggtgctgctcgcagcacacaagcacctgtttcatccatgcttaattacattcgctgcatgtcttcaagcaagcttttattggaggcctttcatatggagttgacgatcagtctcttaaggatgcattttctggctttggagatgtggttgatgcaaaagttataactgacagagactctgg

SEQ ID NO: 175434 - DNA, 270 bp, Glycine max
tatctccatttccatttcctctctctcagtttccaagaatcttaagctatgggaaagtcttacccaaccgtgagcgctgattaccagaaggccgttgagaaggcgaagaagaagctcagaggcttcatcgctgagaagagatgcgctcctctaatgctccgtttggcatggcactctgctggaacttacgacgtgagctcgaagaccggtggtcccttcggaaccataaagcacccctccgaactcgctcacggcgctaacaacggtctt

SEQ ID NO: 175435 - DNA, 266 bp, Glycine max
tacaacttctctctctctctccgtctgtgcattttccattgttgaagaaggagaaaggtcttgaggtgtggggtcggtgatggacggtggagtgaactacaaccctcgcactgtggaagaggttttccgggacttcaagggtcgtagagccggcatgatcaaggctctcaccactgatgttgaagaatttttccagcagtgcgatcctgaaaaggataacctttgtttatacgggttccctaatgagcaatgggaagttaatttac

SEQ ID NO: 175436 - DNA, 261 bp, Glycine max
acgggtttgagaggctccattgatccattgcttgaggaagccgatatagataaagatggaaaaatcagcttaccagaatttcgtagacttctaagaactgcaagcatgggttctcgacccataatgagcccaagtcaccgccatcgaaagatttaagattagatttgtttcggaggctgagataaaattcaggatatgagagtaatggatttcctttaagatgatcttatatgcagattgtgctgaagacctccttgtgat

SEQ ID NO: 175437 - DNA, 261 bp, Glycine max
ttcatccctaacgcgtgcatagcagagtcagagacagagacgcagccatggggcggagacctgcgaggtgttataggcaaattaagaacaagccataccccaagtcacgtttctgccgtggtgttcctgatcccaagatcaggatttatgatgttggtatgaagaagaagggtgttgatgagtttcctttctgtgtccatctggttagttgggagaaggaaaatgtttcaagtgaggccctggaagctgctcgcattgctt

SEQ ID NO: 175438 - DNA, 255 bp, Glycine max
cacaaactagaagtattattattcttccatttccattaaaaagaaaatatcataaatgggtattttcacattcgaggacgaaatcacctcccctgtggctcctgctactctttacaaagctctagttacagatgccgacaacatcatcccaaaggctcttgattccttcaagagtgttgaaaacgttgagggaaatggtggccctggaacaatcaagaagataactttcgttgaggatggagaaaccaagtttgt

SEQ ID NO: 175439 - DNA, 256 bp, Glycine max
cctctctctctttctctttctctctcatccagatcttgcaaaaaaaaaaaaccacaatggcagcgagcgctcccactccacgcgaagagttcgtgtacatggcgaatctgccggaacaggccgagcgctacgaggagatggtggagtccatggaaaaggtctccgcctccgccgaaagcgaggagctgaccgtggaggagcgcaacctcctctccgtcgcctacaagaacgtaatcggcgctcgcggcgcctcctg

SEQ ID NO: 175440 - DNA, 267 bp, Glycine max
tcttaagttgttccttcacctttcttatattcaggaaagtaagatcatctgcatcgccgacgcttccaacaataacaatggccgataatgcaacaacgcaaggaagcaacaccctattttctccttacaagatggccaaattcaacctctctcatagggtggtgttggctcctatgacaagatgcagagcgttgaactggattccacaggcagcgcttgctgaatactacgctcaaagatcaacaccaggtggatttctcatcagcg

SEQ ID NO: 175441 - DNA, 264 bp, Glycine max
cagcggcggtaacagaagaacaagcagagaatgggtcgagtgagaacgaagacggtgaagaaatcctcggcaggtgatagagcgtcactactcgcgcatgaccctggacttccacacgaacaagaagcttctggaggaagtggcgataatcccgtcgaagaggctaaggaacaagatcgcggggttctcgacgcacctgatgaagcgcatccagaagggccctgtgcgcggcatctccctcaagctccaggaggaggagcgcga

SEQ ID NO: 175442 - DNA, 259 bp, Glycine max
attaccacagcttattaccgtggagccatgggcatattgcttgtttatgatgttactgatgaagcatctttcaacaatattaggaattggattcgcaacattgaacaacatgcttctgacaatgtaaacaagatacttgtgggtaacaaggctgatatggatgaaagtaaaagggctgtgcctacctccaaaggtcaagcccttgctgatgagtatggtatcaagttttttgaaaccagtgcgaagacaaacatgaatg

SEQ ID NO: 175443 - DNA, 253 bp, Glycine max
tctgcatcttgaaaggagaggtagggaactgcgcaaagaccctcaccggaaagaccatcacccttgaggtggaaagctctgacaccatcgacaacgtcaaggccaagatccaggacaaggaaggaattcccccggatcagcaacgtctcatcttcgccggaaagcagctacgaggacggccgtaccctcgccgactacaacatccagaaggagtcaacccttcaccttgtccttcgtctccgtggtggcatgc

SEQ ID NO: 175444 - DNA, 264 bp, Glycine max
gggacatgcgtcagaccgtagctgttggagtcatcaagagtgttgagaagaaagaccccaccggagccaaggtcacaaaggctgccgccaagaagaagtgattgcattttggcaattttgctagcacatgtgatcatcaacgtggtttcaaaaaaacttgttcctttacagtagtttatctttgcagagtcttaggtgtttgttttaccagttatatattgaagtgtccgccgatttcatgtagccgtagccttcaaaactggg

SEQ ID NO: 175445 - DNA, 260 bp, Glycine max
cacttttcaagcttctagcatcagggtttgcaaattatgatggcgacaagtgggctaaacacagaaagatcgtgagtccagcattcaatgtagagaaaatgaagctcttggtaccgatattttgccagagttgcgatgatttgatcagcaaatgggagagtttgttatcttcgtctaatgggtcttgtgagttagatgtgtggccttttgtccaaaacgtgtcaagcgacgttcttgctcgtgcaggctttggaagtagc

SEQ ID NO: 175446 - DNA, 253 bp, Glycine max
ggacctaacagtgtgggcgtcaatcacaacattctcataacaaatatccctattggatctcttctctatggctttcttgctgcactagtttatgatgctaatgcaccctcaatgccaggaaacttgataacgtctgactcagtagtgtgcatgggaaggcagtgttacttctggacatttgtctggtggggatgcatatctgtcctgggactagcttcaagcatgctattgttcttaagaaccaaacatgcat

SEQ ID NO: 175447 - DNA, 259 bp, Glycine max
gaagaattaaagttagaataatattccctacaattagcagaaaaaatggttcagcaagatatccgaaggggtccctggacagaacaggaggactacaaattggtgtattttgttggcatgttcggagatcgtagatgggactttatagcaaaggtatcaggtttgaaggtggagggagactgtaaataaaataggtatgaatatttggacatgctaagttatactatgaagcaccctttaaccacctcacttttttgta

SEQ ID NO: 175448 - DNA, 254 bp, Glycine max
ggccttgtaaatgctggacagtatcttgaggagacatatgggggtggactatttccaattttatacatatggggtattggattattagcagcaggccaaagtagcactattacaggtacttatgctggacaattcatcatgggaggttttctaaacttaaggttaaagaagtggatgagagcattgatcacccgaagttgtgcaatatttccaaccatgatagttgctcttatattcgatacctcggaagaatc

SEQ ID NO: 175449 - DNA, 254 bp, Glycine max
gtggacatgacgaacttctacaatcagtataagagtatcgagccctggctgaagaggaagaacccaccggtgccgggaaaagagattctgcagagcaagaaggagagggagaagctcgacgggatgtacgagtgcattctctgcgcctgctgtagcacctcttgccccagctactggtggaaccccgagtcctatctcggtcccgctgcgttgctccacgctaataggtggataagcgacaccgtgatgagtac

SEQ ID NO: 175450 - DNA, 253 bp, Glycine max
ggaacggggagtttcggtaagagaaggaacaagacccacaccctctgtgtgaggtgtggccgccgcagtttccacctccagaagagtcgttgcgccgcgtgcgctttccccgctgcgcgcaccaggaaatataactggagcgtgaaggccattaggagaaagaccaccggaactggaaggatgaggtacttgcgtaacgtgccccgtagatttaagagtggcttcagagacggtaccgaagctgcacccagga

SEQ ID NO: 175451 - DNA, 254 bp, Glycine max
ctctgatttgggtcatctaaattttgtgtcgtcagcttctattttacgggcagaaacatttggtatcccaatccctgactggggtaagaaccctaggaagatggctgaagctgttgatagggtgatagtacctgactttcagcctaagaaagatgtgaaaatagtgacagatgagaaggccaccagtctctctacagcttctatagatgatgcagcggttattaatgatctagtaatcaagttagagaggtgcc

SEQ ID NO: 175452 - DNA, 252 bp, Glycine max
gaagaatatgagcagcagtgcagggaagttggtgtgtgtcaccggtgctgccggttatattgcttcatggattgtcaagttcctacttgaacgtggttacactgtcagggccactgttcgaaacccaaatgatcacacgaaggtagaacatttgctaaaacttgaaggtgcaaaggagagactgcacctttttaaggcagatcttttgggtgaaaattcttttgactccattgttgagggctgtgatggcgt

SEQ ID NO: 175453 - DNA, 255 bp, Glycine max
cgccctcgaaacccttaccggcgccgtcttccagcgtccccccttgatctccgccgtcaagcgtcactccggattcggaccatctacgaaagtaagctccttgagtatgaccctgataggcacttggttgttttctggatttcctgtgaggctggtacctatgttaggactatgtgtgttcacttagggttgcttcttggtgtgggtagccacatgcaggagcttaggagggttaggtccgggatcatgggggag

SEQ ID NO: 175454 - DNA, 264 bp, Glycine max
  unsure (1)..(264): unsure at all n locations
cgcattgaaaagcagcaccatcaccacccccacctcttaccccttctttcataaatatgcgtctctgcaacaacatgttcaccaccacctccttgttcttcacatcatcctcatcatcttcttcaatcagttgactcttcgttcctccctctattctttcggatggagcccatggacatcgttgggaaggccaaggaagacgcttctcttcctaaagcgacaatgacganaattattaaagagatgttgcccccggacgtgcgt

SEQ ID NO: 175455 - DNA, 254 bp, Glycine max
gcctgcagttgttgttctcagtctaagatcaccgtcgaggtcttccccattcaatcaaagcacaaaaatggaggtgactgttttcactcctgcactggaaggaattaagcttgtaaaatcagagcaaggagaaattttgacccagcctttcttggatgcttgcaagcatatacttcctgttatagataagtttggagctgctatggcccttgttaaatctgacattggtggtaacatatcgagattggaatcta

SEQ ID NO: 175456 - DNA, 251 bp, Glycine max
cgtttccacccgactgatgaggagctggttctgcaatacttgaagcgcaaggtcttctcctcccctttgccagcctctatcattcctgagcttcatgtttgcaagtctgatccttgggatttgccaggtgatttggagcaagagagatacttctttagcaccaaagtggccaaatatcccaacggaaatcgctccaacagagccacaaattcgggttattggaaggcaactggcttggacaaacaaatgtt

SEQ ID NO: 175457 - DNA, 250 bp, Glycine max
gcgcggcataacctaaacctatctttcttctctctctgtgtgtgcgcatcaacggcaaccagaagcagccatggccactgcaaggactgtgaaggatgtttcacctcatgagttcgttaaggcgtactcctctcacctcaagcgatccggcaagatggagctgccagagtggactgatattgtgaaaactgcaagatttaaggagttggctccttatgatcctgactggtactatgtcagagctgcttcc

SEQ ID NO: 175458 - DNA, 259 bp, Glycine max
cgaggaagaaaattcacaaggataaggatgccgagcccactgaatttgaggagacagttgcacagtacttgtttgacttggagaacaccaatcaggatctgaaaagtgacttgaaagatctctacataaatcaagcaattcaaatggatgtggctggtaatcgcaaggctgtagtcatctatgtgcccttcagattgaggaaggcattccgcaagattcatcttcgacttgtcagagagttggagaagaagtttagtgg

SEQ ID NO: 175459 - DNA, 262 bp, Glycine max
aaaaaatgctagcctctcagtttttgtagaaacatttagcaatgagtttgtgtctcaagcatgggatttcttctcagatgcaactgttgagatcaacacatatattacgggagcacaaattgatggtatcatcacagacttccctaaaactgctgacagatacagaaggaacaaatgcttaggtttgggtgacaacaaacctacttacatggaacctgttcaaccaggtagtctttttggactcattaccaaagattcttgc

SEQ ID NO: 175460 - DNA, 248 bp, Glycine max
cttggtgattgattgttgcaaccaattgttatctagtttttccatattctaattttcatgaaatattgtacagagctatgttttgaatttaaatcaaaggcaaagcattattctgtttccttagatgttaaatttagaaaacaacatcattgcaaagtatttatctgttttgatgatatttattggaaaaaaaaaaaaaaaaaaaaaaaaaaaaaaaaaaaaaaaaaaaaaaaaaaaagggggggggc

SEQ ID NO: 175461 - DNA, 245 bp, Glycine max
gcgggaggcaaaacgaatctacttgatcacttttttaccgagctaggcaaaatggagaccaagcgtctgtcatcgttattgaatgaggatcctgcaattatggaacgacgtagtgcgctcgcaaagagactagagttataccggagtgcacaagctgaaatagatgcagttgcttggtctaagtagatatatgtatgccagatcacgtttatacgagagccagcagtgtcattattcattgtttc

SEQ ID NO: 175462 - DNA, 247 bp, Glycine max
  unsure (1)..(247): unsure at all n locations
gnattaagcaacattttactgggtatataagtggagagtgtaactgaaattatgtggaggtgcatcaatggaagaattgccagaagatttttatccacttcttctgccagtgcccgtggttggtgggaccatgtaaggccagcaccgaaggaccccattgttcgtgtgaacgaggcatttctagctgacccttttccccataagatcaatcttggaataggtacttataagggtgatgatggcaaag

SEQ ID NO: 175463 - DNA, 256 bp, Glycine max
ctcactcacacacacaaagtgctggagcaaacactaacactaacacaacaccaccaacaagaagaagaagaaacattcccagagacccttttgctctgtgaagccaaagttgctatcttttctcaaatggggacccgaatcccttcgcaccagctcagcagcggcctctacgtgtcgggtcgacccgaacaagtaaaagagcgtccgccgacgatgacgtcacgctctgttccgtacaccggcggcgaccccaaga

SEQ ID NO: 175464 - DNA, 251 bp, Glycine max
gtttgtgagaacaagaaaaagaggcgcaagatgagtggtagggtttctgggaaggtgaagtggttcaatgatcagaaggggtttggattcataagccctgacgatggcagcgacgatctcttcgttcaccaatctcagatcaaatctgacggtttccgaagcctcgccgaaggagagtccgttgagttcgccattgaatctgaatctgacggacgcgcgaaggctgttgatgtcactggccccgacggcgc

SEQ ID NO: 175465 - DNA, 251 bp, Glycine max
gtccaaggacttggaagagaaggccgagatgaagaagatgtatggcctcatcgagacctacaagttgaacggccaattcagatggatctcctctcagatgaaccgtgtgaggaacggagagctctaccgtgtcatctgtgacacaaggggtgcctttgtgcagcctgcagtttatgaggcctttgggttgactgtggttgaggccatgacttgtgggttaccaacatttgccacatgcaatggtggtcctg

SEQ ID NO: 175466 - DNA, 251 bp, Glycine max
attctctttgcgcagttccctacctctcctttcaagatgcagatcttcgtcaagaccctcaccggaaagaccatcacccttgaggtggaaagctctgacaccatcgacaacgtcaaggccaagatccaggacaaggaaggaattcccccggatcagcaacgtctcatcttcgccggaaagcagctcgaggacggccgtaccctcgccgactacaacatccagaaggagtcaacccttcaccttgtccttcg

SEQ ID NO: 175467 - DNA, 245 bp, Glycine max
gtttctcagtttctcagtttcttattcgttagatctcatcttacactcaccgtcaagttcgtctcgcgccaccgtcgacgcagttccggccactgcctttggttccctcactttctgtctcttcttcttcttcttctcagaaatatgccttctcagaaggttgaaacgggtcatcaagacacagtccatgatgttgcgatggattattatggtaagaggctggccacggcttcatcagatcacac

SEQ ID NO: 175468 - DNA, 266 bp, Glycine max
atcacttttctactttgagtcttcttgatccttctttttctccttgaactcaaacatggcagatgaggtggttctgctagatttctggccaagtccatttgggatgagggtcaggattgcacttgctgaaaagggtatcaaatatgagtacaaagaagaggacttgaggaacaagagtcctcttctcctccaaatgaacccggttcacaagaagattccggttctcatccacaatggcaaacccatttgtgaatccctcattgctg

SEQ ID NO: 175469 - DNA, 263 bp, Glycine max
gcaaggcaaggagagactgttgtcccgggtggaactggtggcaagagcctggaggctcagcaacaccttgctgaaggaaggagcaagggagggcaaacaaggaaggaacagctgggtacagaagggtaccaggaaatgggacgcaaaggagggttgagcactgtggacaaatcaggagaagaacgtgctcaagaggaaggcattggcatcgatgagtccaagttcaggactggtaataacaagaaccagaatcagaacgaaga

SEQ ID NO: 175470 - DNA, 261 bp, Glycine max
ggaaatgattctagagaatcttccagctcaaaggcagagcatgcttttctctgctaccatgcccagttgggtgaagaagttggcgagaaaatatttgaacaatccactcacaattgatttggttggtgatgaagaggaaaagcttgctgaagggataaaactttatgctatagcagccactgccacttcaaagcggacaattctttctgatcttgtaactgtttacgcaaagggtgggaagactatagtttttacacagac

SEQ ID NO: 175471 - DNA, 261 bp, Glycine max
ccctctttcttcctcttcctcagtagtgcgattttcgattctcttctctgcaactatgcctaaccctaaggtcttcttcgacatgaccatcggcggtcaacctgccggccgcatcgtgatggagctctatgccgacgtgactcccagcaccgccgagaacttccgcgcgctctgcaccggcgagaagggcgccgggcggagcggcaagcccctccactacaaaggctcgtccttccaccgcgtgatcccgaacttcatgtg

SEQ ID NO: 175472 - DNA, 262 bp, Glycine max
cttctcttaaaagagcctttgctttttctttaggcctttccgaattaagtacttgtttcattttctctcgaagcaagaaaaatgttcatcgagagtctcaaggttgagagtcctaacgtgaagtacacagagactgagattcagtccgtgtacaactatgaaaccactgaacttgttcacgagaacaagaatggcacttatcagtgggttgtcaagcccaaaactgtcaaatatgaatttaaaaccaacacccatgtcccta

SEQ ID NO: 175473 - DNA, 261 bp, Glycine max
tgttgttggaaagaaaccctagcaagcggaacaatggcagacgttgaggtcgatgtggcggctgcagcagcagcagggcagccgaagaagagaacgttcaagaagttcagtttcaggggcgtggatctcgatgcgcttctggacatgtccaccgatgaactcgtgaagatgttcagtgctcgcgcacgtagaaggttccagagaggcctcaccagaaagcccatggccttgatcaagaagcttcgcaaagcgaaaagagaa

SEQ ID NO: 175474 - DNA, 257 bp, Glycine max
gttctaactaagcacttcgtcgctgcttttgcttctgtagaagatgtctctgcgagtgctgaaccctaacgccgaagtgctgaacaaatcggcggcacttcacatgaacatcaatgccgccaagggtctgcaagatgtcctcaaaaccaacctcggtcccaaaggaaccatcaaaatgctcgttggtggtgccggtgatatcaagcttaccaaagatggcaacactctcttgaaagagatgcaaatccaaaacccga

SEQ ID NO: 175475 - DNA, 254 bp, Glycine max
attactttagtgttttctcttgtcacataaaagtcatctaagaagaattacaagatcatcatcacaataacaagatgagttcaggaattagagcatggagtgtggcagcaagtgttggaattgtggaggccttgaaagaccaaggtatatgcaggtggaatcatgccttaagatcagctcaacaccatctcaaaaaccatgttggctcattctctcaggctaacaagctttcttcttctgctatgatctccaca

SEQ ID NO: 175476 - DNA, 261 bp, Glycine max
tctcgagccgaatcggctcgagctcaattttctgagcagccaaacactctctctctgtctcacgaaaattctcagtttgcaacgaaaatctgaatcatgtcgtggcaagcgtatgtcgacgatcaccttctgtgtgacatcgaaggtaaccacctcactcacgctgctatcatcggccaagacggcagcgtttgggctcagagtaccgacttccctcagttcaaacctgaggagataactgccatcatgaatgactttaat

SEQ ID NO: 175477 - DNA, 266 bp, Glycine max
aggtctgaataataaagggtccgtggcaatggagacagacgccaaaagggctagaagcttccctagaacatttgattgaccttcaccaccacaaatctcttgtccttgcccaccacacagacaaagccaagaaggacgcaataaggaaagccgagcacgtctctgctttgttggttgaagcggtgaatcgtggggtccaagattccttcatcaaccagaagcgaattgagctcgaaattcgaactctggctaccaccatcacgagg

SEQ ID NO: 175478 - DNA, 259 bp, Glycine max
aagattgttgatgcaaagattgctacagagtcacttcatcgggggtctggccagatcattccaacagctagacgagtggcctattcagctttcctcatggctactcctcgtcttatggaaccagtatattatgtggagattcaaacaccaatagattgtgtatctgcaatttacactgtattatctcgaaggcgtggacatgttactgctgatgttcctcagcctggcaccccagcttatattgttaaggcatttttgc

SEQ ID NO: 175479 - DNA, 261 bp, Glycine max
gggaactggtaaatcagaaaagatcaccattacaaacgaaaagggacgtcttagccaggaagaaatagatagaatggttcgtgaagcagaagagtttgccgaggaagacaagaaggtgaaggagaggatcgatgctcgcaacagtcttgaaacctacgtatacaacatgaagaatcaggtcagtgacaaggacaagctcgcggacaagttggagtcagatgaaaaggagaagattaaggtagaagcggaactgaagaataa

SEQ ID NO: 175480 - DNA, 257 bp, Glycine max
atctttaccaggttgattaaccgcaacaccacaattcctacaaaaaagagtcaggtgttttcaacagcagctgacaatcagactcaggttggtatcaaggtgctacaaggtgagagggaaatggctgtagacaacaaatcgcttggagaatttgagcttgttggcattcctcctgccccaagaggcatgcctcagattgaagtcacatttgacatagatgccaatgggattgttactgtctctgccaaagacaagtc

SEQ ID NO: 175481 - DNA, 253 bp, Glycine max
ctcagtgttgcaaacttctctccatgattttattgaggttattttccagaacaacgaaaacaccatgcaatcttggcatcttgatggttatgatttttgggtcattggtcatggtttcggccagtggacagatgctagcagaaaaacatataatctagtggatgccctgactagacacactgcacaggtgtatccaaaatcctggactactatattggtgtctttggataaccaaggcatgtggaacttgagg

SEQ ID NO: 175482 - DNA, 256 bp, Glycine max
aacgcagcatcgctatactcttcattccatagctttgcccaatcagcaaaccgtggattaccctagtttcaaactcgttatcgtcggtgatggtggcacaggaaagacaacctttgtgaaaaggcatctcaccggagaattcgagaagaaatatgagccaaccatcggtgtggaggttcacccattggattttttcacaaactgtggaaagattcgattctactgctgggatactgctggacaggagaagtttggt

SEQ ID NO: 175483 - DNA, 256 bp, Glycine max
aaacatccaacacaaaggcatttcagtctgcaataagtcacctgagtcagtatgcttctgaaggtggctctcagctctatgttcctgcaggaaaatggctcactggtagcttcagcctcactagtcacttcaccctctatcttgacaaagatgctgttctccttgcttctcaggatataactgagtggcctgtgcttgaacccctcccatcatacggtagaggaagagacgcaccagcaggaagattcacaagcct

SEQ ID NO: 175484 - DNA, 261 bp, Glycine max
acaacttctgctacttcctactccaaccgcacttctgctccgcaattatcatgggcaaggtcaagatcggaatcaacggatttggaagaattggccgtttggtagccagagtggctctgcagagagacgatgttgaactcgttgccgttaacgaccctttcatcaccaccgattacatgacatacatgtttaaatacgacagtgttcatggacactggaagcatcacgatgtcaccgttaaggacgagaagaccctctctt

SEQ ID NO: 175485 - DNA, 258 bp, Glycine max
gaaaaaagaaaaaggaaaacaatgggttccgataatcaccagaacttggagttcttgaaggagatcggtttgggctcttccaacattggctcttacattaatggccagtggaaagccactggttcttctgtcacttctgttaatccttctaacaatcagagtatagctcaagtgaccgaagcaactttgcaagattttgaggaggggttgcgagcttgcagtgaagcagctaagacatggatgactataccggcaccg

SEQ ID NO: 175486 - DNA, 256 bp, Glycine max
cttagccgaggtcacgaggagcactagctagtttcacaatttccaaatggctaggggattgaagaagcatctcaagaggctcaatgctcctaagcattggatgcttgacaaactgggtggtgcatttgcgcccaaaccctcatctggaccacacaaatctagggagtgccttcccctcatactcatcctacgaaaccggctaaagtatgctctgacttaccgtgaagtcatcgctattctgatgcagagacatgtt

SEQ ID NO: 175487 - DNA, 258 bp, Glycine max
ctctagggttatcatttctccatttccattttctctctcacttttcaagaatcgtaagctatgggaaagtcttacccaactgtgagtgctgattaccagaaggccgttgagaaggcgaagaagaagctcagaggcttcatcgctgagaagagatgcgctcctctaatgctccgtttggcatggcactctgctggaacctttgacaagggcacgaagaccggtggacccttcggaaccatcaagcaccctgccgaactg

SEQ ID NO: 175488 - DNA, 257 bp, Glycine max
gagagaaattgagtttctgagataaccacttttctctttgattcatcaatggcaaccgcgaggaccgtgaaggatgtttcgcctcacgatttcgtgaaggcttacgcctcccatctcaagcgttccggcaagatggagcttcctgagtggactgatattgtaaaaacagcaaaatttaaggaattggctccatatgatcctgactggtattatgttagggctgcctcaatggcaagaaagatttatttgagaggcgg

SEQ ID NO: 175489 - DNA, 255 bp, Glycine max
gtgagggccttccatggcttccgcttgtgcttcctctgcaattacagctgttgccatctctacgccgagttccgggcagaagaatggatcaggaggttgttttcttagtggaaggaaattgagggtgaaaaaggagagagcagcaattggaggacgatcgatgggcactacagtgtgcgcagttgctgagcctgacagacctctatggttcccaggcagcacccctcctccatggcttgatggcactctacctgg

SEQ ID NO: 175490 - DNA, 250 bp, Glycine max
gggtgcactatcattgaaatgctgacaggaaaacctccttggagcgaatttgaagggcctcaagcaatgttcaaggtactgcacaaatccccagatctacctgaaagtttgtcttcagagggacaggatttccttcagcagtgtttcagaaggaatccagcagaacgaccatcagcagcagtgcttcttacacatgcctttgtacaaaatttgcatgatcaagatgttcaagttcattcccaagggcaaa

SEQ ID NO: 175491 - DNA, 255 bp, Glycine max
cgcttaaggaggcttttgatagtggccttgtgaagagagaggatctcttcattaccaccaagctttggaattctgatcaaggccacgttcttgaggcgtgtaaagacagtctcaagaagcttcagttaacgtatctagatttatatcttgttcactttcctgttgccgtaagcatactggggttggtaatacttctagtcctttgggtgatgatggggtcctggacatagataccaccatatccctggaaacgac

SEQ ID NO: 175492 - DNA, 256 bp, Glycine max
ttcacatctctcttttcactcaaaactacaaactttatttcctctccgtattctcacatttccacaacatggacgagggtttcgacatggcggcggcggagccatgggcgaggacttcgacttcgccggcagcggcagcaaccccgtcctgaaggtcggcgaggagaaggagattgggaaagagggtttgaagaagaagctcctgaaagaaggtgaaggatgggacacccctgaagctggtgacgaattcaagttc

SEQ ID NO: 175493 - DNA, 258 bp, Glycine max
cagaggtgaagcttcatggattttggtatagtccctacactttgagggtggtatggaccttaaagttaaaggatataccatatcaaaacatagaagaagaccgctacaataagagtcttcaacttcttgaatacaacccagtatacaagaaaactccagtgcttgtccataatggaaaacccttatgtgagtccatgcttattgttgaatacattgatgagatttggtcacataattcattacttcctgctgatccct

SEQ ID NO: 175494 - DNA, 258 bp, Glycine max
gatcgatgcttaaaggagttaaagagtaaaagcaccgtctccgtctccactctcggcttcttcttcgttgcgctttttcccaaaaccaattgcatcactctcgtccgttaccgccgctgccctagaccaccgcaagcgacgtcgcacaccgccttcatccgttagggcaaaaatgagtcgaggaagtggaggtggatacgatcgtcacatcactattttctcccctgaaggacgtctctttcaagtggagtatgcttt

SEQ ID NO: 175495 - DNA, 257 bp, Glycine max
gaagcaataaccttttttcctctgccgccactggtttcgatcccacacccacaaccctccatccttcgaatgctcttgcgttttccttaaactgcctcattccgaagccatacacacataacggtttttctaggtgctagcaatgtcgactcctgctaggaagaggctcatgagagatttcaagaggctgcaacaagaccctcctgcaggaatcagtggcgcccctcaggataacaacatcatgctgtggaatgctg

SEQ ID NO: 175496 - DNA, 256 bp, Glycine max
gttaccatttgctcccagtacagagcttaaccgagcttcacaaagatgaatcgggaaaagttgatgaagatggccggttcggttagaactgggggaaagggtaccatgagaagaaagaagaaggctgtccacaagacaacaaccacagatgacaaaaggcttcagagcaccctgaagagaataggggtgaatgccatcccggctattgaggaggtcaatatctttaaggatgacgtattatccagtttctaaatcc

SEQ ID NO: 175497 - DNA, 255 bp, Glycine max
attcacgagggcctaatgtttctcatggaaatatcaagtcatcaaacatcctcttaaccaaatcatatgatgccagagtgtctgactttggccttgcacaccttgttggcccctcctctacccctaaccgtgtggccggctaccgtgcgccggaggtgactgatcctcgcaaggtgtctcagatggcagatgtgtacagctttggtgtgttgctcttggaacttctgactgggaaggcacctacccatgctctcc

SEQ ID NO: 175498 - DNA, 253 bp, Glycine max
cgccggcaacatcccgtgtccgttgccagcaagagtctactactgttacccctgtcgcagaagaagaccccgcttcgctgcctcgaacccgaaccccgattcataggcccggacatttggaacaagagctggtatccaaaagctgcagatcatgtgaatacagataaaacatggtatgttgttgatgctacagacaaagttcttggaagactagcatcgacgattgctattcacatccgagggaaaaacttgg

SEQ ID NO: 175499 - DNA, 255 bp, Glycine max
gaaaaaatgggttcttcttcttctatgtggacggtgtgtgtgattttggcatcactggcctctgcagcactctgtgccaacccacgcaggccagtggatgtacaatttggccgaaactacgtgcccacatgggcctttgatcacatcaaatatttcaatggtggttctgacattcagcttcatcttgacaagtacactggtactggcttccagtccaaagggtcttacttgtttggtcacttcagcatgtacata

SEQ ID NO: 175500 - DNA, 252 bp, Glycine max
cacttgtatgaatgatcagaaggataagctgtggcctatgctgcaaaagcttggggtcaccatgaaatctgaggagaaggacctcatgggtaaagcattgatgaagcgtgtcatgcaaacctggcttccagcaagtagtgctctattggaaatgatgatatttcatctaccctctccatcaacagcccagaagtatcgtgtggagaacttgtatgagggtcctcttgatgatcaatatgcttctgctatcag

SEQ ID NO: 175501 - DNA, 252 bp, Glycine max
attccccttatctttctctcttctctctccccgcccaaaccctaactccctaccctattccgctttctctcatccatcatgaaaggaggaaagtccaagaccgaatctaagagagccgatgccaaacttgctgtgaataagaagggcgccgccaccaagactaggaaacccgccggaaaggggaaggcagcgaaagatcctaacaagccaaagaggcctccaagtgctttcttcgttttcatggaggaattc

SEQ ID NO: 175502 - DNA, 253 bp, Glycine max
cgttgttgttgttctaaaacgtccacacattctccgtcgccacaacaacaatggctccgaagaaaggtgtgaaaggttccgttgtagcagcgaagaagaaggttcaggagaaggtgacgaatcctttgttcgagaagcgtccgaagcagttcgggatcggaggcgcgctgccgccgaagcgggacctgacgcggttcgtgaagtggccgaagaacgtccaaatccaacgcaagaagcgcatcctcaagcagag

SEQ ID NO: 175503 - DNA, 255 bp, Glycine max
ccactctcctccaccaccaccatacaagaagccttataagtacaagtctcctcctcccccagtccactctccacctccaccacactactactacaaatcaccccctccaccctaccactactagaatatagccctttcatatcacacccccacatggatgtatacagacagtgtgaaaatgaaagccatggagggggaaggtgcagttgcagtttgcaaatccacaaagaagtataaatgtttgattattgttat

SEQ ID NO: 175504 - DNA, 251 bp, Glycine max
atcatggatcagaaagtcgatttcagtgctccgcattccatgggaaccactatcatcggcgttacttacaacggcggtgtcgttctcggagccgactctcgaaccagcactggagtgtatgttgccaaccgagcatcggacaaaatcacacagctcactgataatgtttacgtgtgtcgctctggatcggctgctgattctcagattgtctctgactatgtgcgctacttccttcaccaacacacgataca

SEQ ID NO: 175505 - DNA, 255 bp, Glycine max
gttgcagaccgagctagctagctagcaagcaagcacagagatggaggcaaagcgaggccatgccctcatgtgcttggcacgtgtttcactcttcctctgcgctctaaccctatccgctgctcacggaagcaccacggttcaagacatcgcgagaaagttgaaactcggggacaacgagcttctgcgcacggagaagaagttcaaggttttcatggagaattacgggaggagctactccacagaggaggagtattt

SEQ ID NO: 175506 - DNA, 259 bp, Glycine max
agagtaagaaggatttggaattgagaatttccatggcggcggcgacgaacttgttagcaacactgggggatctggagagggactccttcgtggctcttctttcgaagctgatcgctgaatcgaagtacgtccagaacaacccgccggagctcattccccaagaggacagagtggtgaagcacgtcttggacgttctgttaccgttcagcaccaccaccggcggtggacccttgctcgtaaaccacgtcacctaccacgc

SEQ ID NO: 175507 - DNA, 254 bp, Glycine max
ctctctttctctccctgaagcaaaacaacattagcatcaaaaccagtaatccggtgctgctagaggatgggaactagtgaatggcatatcgagcgaagatctagcttcggcactgaatcccccttagcaagagaggcaggaaatgtgcctgaaactgggtcactctctattgttgtgcttggcgcttctggggatcttgctaagaagaagacatttcctgcacttttccatctataccggcagggattcttacc

SEQ ID NO: 175508 - DNA, 254 bp, Glycine max
ggagatgtatcagatctggagcaggagaatagcgttgggagcgttcgcgtttgttactgttttcctatcggcctcagcagacgacgtcgttgtgctctctgaagataacttcgagaaggaagttggtcaggacagaggagctctcgttgagttctatgctccttggtgtggacactgcaaaaagcttgctccagaatatgaaaagcttggtagcagcttcaagaaagccaaatctgttttaatcggcaaggttg

SEQ ID NO: 175509 - DNA, 253 bp, Glycine max
ctccttgtattacccaacagatgcagcagttcaacaagatactgaactacaagcatggtggaaggaagctgtggagaagggtcatggtgacttaaaagaaaagccttggtggcctaaaatgcagacaactgaagatctcattcaatcatgctctattatcgtttggacagcttcggctctccatgctgctgttaattttggacaatatccttatgggggcttaatcctgaaccgtccaactctagccagaagg

SEQ ID NO: 175510 - DNA, 254 bp, Glycine max
ctctaaactaaacacttccatacacaaattttctctcccagaaaaaaaaaatattttcatttcattttcgagtaaaagtaaaacacagttcctgatcaatggcatctcgccgccgcatgttattgaaggtcataatcctcggagacagcggtgttggtaaaacatcactgatgaatcagtatgtgaatcgtaaatttagtaatcagtataaggcaaccatcggtgcagattttcttaccaaggaagttcaattt

SEQ ID NO: 175511 - DNA, 254 bp, Glycine max
caacctttctcttcctcctcactcaaacttcccctctctacgccgttcctcccaaatggatgcaccaatggagttttggggtgttgaggttaaggttggtcagaccgtgacagttgacccaatggatcctgtggattcatacatacacatatctcaggttgcgctcggagaggcgaaaaaggagaaacctaatgagtctgtggttttgtatttgaaagttggtgaacagaagattgtcttgggaaccctttcta

SEQ ID NO: 175512 - DNA, 252 bp, Glycine max
cgcaggaattaggaatattcgacaggtagagtttcttcaatggctcctaaagttgataagaagaatgatccaaaggcccaggccttgaagactgctaaggcagttaagtcaggtgctacctttaagaagaaggtaaagaagatccgaacttctgtcactttccacaggccgaagaccttgaagaaggacaggaaccccaagtaccctcgcattagcgccccgccgaggaacaagcttgatcattatcagatc

SEQ ID NO: 175513 - DNA, 250 bp, Glycine max
aactgaagaaccaacaagaggggtattgagattgagattcaagtaatggggaagagcaaggttcttgtggtggggggaactgggtacatagggaggaggatagtgagggcaagcctggcactgggccatgagacctatgtggttcagaggccagagttgagcctccagatagagaagctgcagaggctcctctccttcaagaagcaaggtgctcatctcattgaggcctctttcaatgatcacaagagcc

SEQ ID NO: 175514 - DNA, 252 bp, Glycine max
cctcaagccactctaaagaaaatggcggtgcctctactctcgaagaagatcgtgaagaagagggtgaagaagttcaagaggcctcagagtgacaggaaaatttctgtcaagacaaactggcgcagaccaaagggtatcgattcccgtgttaggagaaagttcaagggatgcactttgatgccaaacattggttatggttcagacaagaagacccgccactatctccctaatggttttaagaaatttgttgtt

SEQ ID NO: 175515 - DNA, 247 bp, Glycine max
gcttccacaaccctatcgcacatctttctcagttctacgatggagttttgggctgccgaggttaaggttggagagtctgttaaggtagacccagccgaatttgaggcatgcatacacctttctcaggctgctcttggtgaggcaaagaaagattagcctgaaccggtggttctctacatgaaagttggtgaacagaaatttgtcttgggaacccttccagggagaaaatccctcaaatatctctgga

SEQ ID NO: 175516 - DNA, 255 bp, Glycine max
ctaataaaatagttaccacaacccactattagttgcttgctgcgagcgaatccctctctctatctctcacacacactttctctctctctctctctcacccagatcttgtagcaatggcgagcgctcccactccacgcgaagagttcgtgtacatggcgaagctggcggagcaggccgagcgctacgaggagatggtggagttcatggagaaggtctccgcctccgccgagagcgaggagctgaccgtggaggagc

SEQ ID NO: 175517 - DNA, 254 bp, Glycine max
tctcgagccgaatcggctcgaggaaccattctcttacctatcggatagttgatagaattttttgccaggttccaaggaaatttaccagtaaaattgaagggaagatgaactatgaagattttgtttattttatacttgccgaggaagataagtcatccgaacctagtctcgaatactggttcaaatgcattgatttggatggaaatggagtgctgacacctaatgaaatgcagttcttttatgaggagcagttg

SEQ ID NO: 175518 - DNA, 253 bp, Glycine max
cgactctcttctcattggttctccgtattctccctcaatcctattaaccttttcttctttcatttcccaccccattctataatcaatcaatggcaatggcttcttcaatccctaatgcgccttctgcgttcaattctcagagctacgttggtctcagagcgccactgaggaccttcaacttttcttctcctcaagctgccaaaattcctcgctcccaacgccttttcgtcgtcagagcctccgattcggagtt

SEQ ID NO: 175519 - DNA, 246 bp, Glycine max
cgtgcctctagggttatcatatctccatttccatttcctctctctcagtttccaagaatcttaagctatgggaaagtcttacccaaccgtgagcgctgattaccagaaggccgttgagaaggcgaagaagaagctcagaggcttcatcgctgagaagagatgcgctcctctaatgctccgtttggcatggcactctgctggaacttacgacgtgagctcgaagaccggtggtcccttcggaaccat

SEQ ID NO: 175520 - DNA, 248 bp, Glycine max
aattaactcacgagggctgcacatcgacaatgggtggggagcggaacaaggtcttctctttggccgaggtctctcagcacaacaatgccaaagactgttggcttgtcattcatggcaaggtttataatgtgacaaagttcttggaggaccaccctggaggggatgaggtcctgttgtcttccacagggaaagatgcaaccaatgattttgaggatattggtcacagcaccagcgccgtagccatgatg

SEQ ID NO: 175521 - DNA, 251 bp, Glycine max
gcagaactctgcttcttcggattccgatcgcacgcgccgtcaccatggtgaacgttccgaaaacaaagaagacatactgcaagagtaaggtgtgcaggaagcacacgctgcacaaggttacccaatacaagaagggtaaggatagcattgctgcccaaggaaaacgccgttatgatcgcaaacaatccggttatggtggacaaactaagcccgtcttccacaagaaggctaaaaccaccaagaagattgtt

SEQ ID NO: 175522 - DNA, 259 bp, Glycine max
attggacttggccaagactgcatgtcattctgtaccgaagtagaagatgtcatctcaatgagtttgacagtggttacttctcttcttgagaagtatgggattgatcctaaacaaatcggtcgtctggaagttggaagcgagaccgtgatagacaaaagcaaatccatcaagacattcctgatgcagatcttcgagaaatattgatatagcggcattgagggtgttgattcaactaatgcatgctatgggaggactgctg

SEQ ID NO: 175523 - DNA, 284 bp, Glycine max
gagggtactgccatccaattaatgggttctaaaactaatgcatcgggctatagagcacgaaggccactgtcaatatttgctgtgcttggtctgtgctgtttcttttatcttttgggagcatggcaaagaagtggatctgggaaggcagataacttgcattgaaagttaataacctgatgacaggctgcactgttttacccaatttgagttttgaatcccatcacagtgatgtagaaattgtcagacctgatgtgctaaaagctaaagcattcaagccgtgtgac

SEQ ID NO: 175524 - DNA, 285 bp, Glycine max
atgggccagttgaagttgcattcactgtttatgaggattttgctcactacaaatcaggagtttacaaacacatcacaggttatgaactaggtggtcatgcagtaaagctaattggatggggaacaactgaagatggggaggattattggcttcttgcaaatcagtggaacagagaatggggagatgatggttacttcaagatccgaagagggacaaacgaatgtgggattgaagaggatgtaactgctggtttgccttccaccaaaaacctcgtcagagaggtga

SEQ ID NO: 175525 - DNA, 286 bp, Glycine max
ctctcaagtccaacctacccctttttcttctcccaccaacttcaccgtcttcttcctcgatcatgtctcacttcaagggcaagtaccatgatgagcttattgtcaatgctgcttacattggcactcctggaaagggtattcttgctgctgatgagtcaacagggacaattggcaagcgtttggccagcatcagtgtagagaatgttgaatccaacaggcgtgctcttagggagctgcttttcaccgctcccggtgctcttaaatatctcagtggtgtcatcctctt

SEQ ID NO: 175526 - DNA, 290 bp, Glycine max
agggacctcttagctatggtgtcacctttccagaacagtgctatgggataatggagatgttggattcttttctcaaggatcactcttgtttttctggtttggaaaggaataagaagagtgatcttaaatgggaggagtttgctccaagggttgaagattacaatcattttctggcaagggcaattgcaggagggactggccagattgttaagggtatcttcttgtgcagcaatgcttacaccaaccaggtccaaaaaggaggggaaacgatcctaaatactgctgcagaa

SEQ ID NO: 175527 - DNA, 291 bp, Glycine max
tggggactgcatctgttgttcttgctggggttgtggcagccttgaagctcattggaggtactctggctgaccacacattcttgtttcttggtgctggagaggcaggaactggaatagcagaactaatagctcttgagatgtcaaagcagacaaagacacctatagaggagactcgcaagaagatatggcttgtagactcaaagggtttgattgttggttcaagaaaggcttcacttcaacacttcaagcagccttgggctcatgagcatgagcctgtaggcagtctcttag

SEQ ID NO: 175528 - DNA, 279 bp, Glycine max
gaagaagaagaaaagatggtgggaccagtgagacctcagtttgtgctctttggttcttccattgttcagctcagttactctctccaaggttggggcgctattcttgctcatttgtatgctcgcaaggcggatataattctgcgaggatactctggttggaattcaaggcgtgctgtgcaagttctggatgaaattttccctaagaacgccactgagcaaccagatttggtaattgtgtactttggtggtaatgattctcttcttccacatccaagtggt

SEQ ID NO: 175529 - DNA, 279 bp, Glycine max
aaaaaatgggttcttcttcttctatgtggacggtgtgtgtgattttggcatcactggcctctgcagcactctgtgccaacccacgcaggccagtggatgtacaatttggccgaaactacgtgcccacatgggcctttgatcacatcaatatttcaatggtggttctgacattcagcttcatcttgacaagtacactggtactggcttccagtccaaagggtcttacttgtttggtcacttcagcatgtacataaagatggttcctggagattctgctgg

SEQ ID NO: 175530 - DNA, 281 bp, Glycine max
gcagtttcttcgattctctctttctctttcttcagaaaaattaaacccattcaaagaaagaaagaaagagcgatcatttccaatcacaatggcagatcaactcaccgatgaacagatctcggagttcaaggaagccttcagtttgttcgataaggatggcgatggttgcatcacaacaaaggagcttggaactgttatgcgttcgttgggtcagaatccaacagaggctgagctccaagacatgatcaatgaagtagatgctgatgggaatggcaccattg

SEQ ID NO: 175531 - DNA, 283 bp, Glycine max
ccaggattcattttatgctttcatcttatgctcctgtaatttcagccgagaaggctcaccatgagcagctatcagttggtgaaatcaccaacagtgcattcgagccatcatctatgatggccaagtgtgatccccgccatggcaaatacatggcgtgctgtctcatgtacagaggtgacgtagtgcctaaagatgttaatgcagctgttggaattatcaagaccaagcgcactattcaatttgttgactggtgccccaccgggttcaagtgacgaatcaatta

SEQ ID NO: 175532 - DNA, 283 bp, Glycine max
atcagaagccggattactgaagagctatggacctctaagtttccttaaggtccataatgcgggacacatggttccaatggaccagcccaaggctgcattagagatgctgaagaagtggattaatggaacccttgctgaacctagggatataaggaaaaattggttgctgagatgtgatctcttttattgcttatttaattagtctagcaaaagggaacataaatgagaaaagaaattgcagaagtgtgacctgtatgtagtttgtgtgatatgataccacccc

SEQ ID NO: 175533 - DNA, 291 bp, Glycine max
aacgctcaaaccatccttttctttcgctcttcttccattccacactaaaaagtaacactttcggagggaaacacaatacaacacaaaaagccccccccacaaagcaaatcaccttttttttcctttcaaaatgttcgccgaagagaatggcccaagggagaccccagactccaagccatttcccaagccatcagagtcgtccctcacttccccaaacatggaataatgttccaagacataacgacattgctgttggatcacaaggcgtttaaagacaccgtcgacattttt

SEQ ID NO: 175534 - DNA, 293 bp, Glycine max
ttccattccgttctacatataatcattcataatgggtgttttcacattcgaggatgaaatcaactcccctgtggctcctgctactctttacaaggccctagttacagatgccgacaacgtcatcccaaaggctcttgattccttcaagagtgttgaaaacgttgagggaaatggtggcccaggaaccatcaagaagatcactttccttgaggatggagaaaccaagtttgtgctgcacaaaatagaaagcattgatgaggcgaacttgggatacagctacagcgtggttgggg

SEQ ID NO: 175535 - DNA, 282 bp, Glycine max
gtagtttcaaaacttcaaaattatgtagtatgtattatgttgcactctggtgttttgtgtctaaacaaacctcgagccggaaacactagctagggtattgggagctctcgttgtttcggagttatggaccttacgcagccatggcactgctacgaatgccgccgccgccccaccacgccagctctcccagaaggaagctgacatccagatgatgttggccgccgacgtccacctcggcaccaagaactgcgacttccaaatggaacgttacatcttcaagcg

SEQ ID NO: 175536 - DNA, 279 bp, Glycine max
cttcagaagctcctcgccgctagcgtcctaaagtgcggcaagggcaaggtctggcttgatccaaatgaagtcaatgaaatctccatggccaattctcgacaaaacataaggaagttggttaaggatgggtttattatcaggaagcgactaagattcactctcgctcccgtgctcgtcgaatgaaggaggccaagagaaaggggcgtcactctggttatggtaagcgtaagggtacaagggaggcaaggcttcccaccaaaatcctttggatgaggagga

SEQ ID NO: 175537 - DNA, 280 bp, Glycine max
ctgaaagctattctccaccgtagccgcaagcttcgccgtttgaaacagtgcctcaaccatggcagaacaaacagagaaggcttttctgaagcaaccaaaagtgtttctatgctctaagaaaggtgggaagggaaagaggcctgggaaaggtgggaatcgcttttggaagtcaattgggcttggattcaagactcccagagatgccattgaaggaacatatattgacaagaagtgccccttcactggcaatgtttccattcggggtcgtatcctagccggt

SEQ ID NO: 175538 - DNA, 277 bp, Glycine max
gcagattccaaagctggattgaggaagccagtgtttaccaaggttgatcaacttcgcccggggaccagcgggcacactttaactgtgaaggtggtcaatgctaagatggtgatgcagaaaggtcgttctgatggtcctcaatccgtcagatgcgaattgctgaatgtttggttggcgatgagactggaatgatcatattcactgccagaaatgatcaagtggatatgatgaaagaggctgctactgtgatcctgcgcaatgccaaaattgacatgtt

SEQ ID NO: 175539 - DNA, 279 bp, Glycine max
gaaactgcaaattatgcttactattgtggatgacctagtttctgttgatactcttattgaggaacatctcacagttgagcccatcaatgaatatgtccagagttgtgacattgtggccttcaataaaatataaactacaatcggtgggatttggagatcatggcaactgggagaattgcaagttttagaaactatgttctagggggaactaccctgaattgagaatttttgtctttagaaacccgcttatattatttgtttctatatatctttgtgttg

SEQ ID NO: 175540 - DNA, 281 bp, Glycine max
gcttaacagaagcagaagagttggagaagtatatcgccattagagaagagatgtataagaaagctaaagagttcgattctaagatcattggttttgaaacagctatcaggtggccctactttcatgtacggcccctcaatgttggagagcttgagaattggcataactatttggactttatagaaagggaaggggacttgagcaagattgtcaagttgtatgagagatgtgtcattgcatgcgccaattatccggagtattggatacgctatgttttgtgt

SEQ ID NO: 175541 - DNA, 241 bp, Glycine max
gcacgcattcgtgagataactcaatattcgtcgctcatggcactctcttctcgtctcttttccaaatccaaattgatctatggcagtcaaatacttctacaaaaggagcatgctattccagttcgtcactttgctaaagagtctgccctcctgcccttaagggagacgagatgctgaagaacatttttgtggaggtgaagaacaaatttgagaccgccataggaatattacagaaggagaa

SEQ ID NO: 175542 - DNA, 282 bp, Glycine max
tggggttcaagacgcggaacgaccttctctcgcggttcatgggatcaatagacgacgacgtttatttaagagacattgtggtgagttttctattagcgggtcgtgacaccatcgctgccgggttaacgggcttttttatgttgttatcgaaaagcccggaggtggaggagttgattaggtcggaggtgggccgggtgatgggcccgggccaggagtttccttcgtttgagcaaatccgcgaaatgcattacctgaacgcggcgattcacgacagcatgaggc

SEQ ID NO: 175543 - DNA, 280 bp, Glycine max
gcaaaagctcttgaggttatacctagacaattatgtgacaatgccggatttgatgcaactgatgtgctgaataagctaaggcagaaacatgcgcttccttctggtgagggggcaccatatggggtggacatagcaactggtggaattgctgactcatttgctaactttgtctgggagcctgcagttgtgaagatcaatgctataaatgctgcaacagaggctgcctgccttatcttaagtgtggatgaaacaattaaaaatcccaagtctgagagtgcac

SEQ ID NO: 175544 - DNA, 279 bp, Glycine max
caatttccaattagggtttcgcttagagtaaccaattaccatgggagtcttcacctttgtcgttcgcaaatccggcgccgaatggagcgccaagcaacattccggcgacatcgaggcctccgccgactccacctacgatctccaaggaagctcgtgcaagccgctctcgccgttgattcctccggtggagtccagtcctccttctctcccgtgtctcctacctccgctgtgttccacgtgatagtgggtggtgctgtattcgttggaggtggcggtggt

SEQ ID NO: 175545 - DNA, 274 bp, Glycine max
agcgaagaaagattcgaaacgaagaaagaaagcgttgtgaagaatggcggaagagggacaagtgatcggtgtccacagcgtagaggagtggaaggaacatctcaagaagggagaagagtccaagaaattgattgtggtggatttactgcttcttggtgcggtccatgccgtttcattgccccaattcttgcagagtttgctaaaaagttgccgaatgtcaccttcctcaaggtggatgtggatgaattggagactgtttccaaggagtggggaa

SEQ ID NO: 175546 - DNA, 275 bp, Glycine max
ctctcgctcgcaaacgcaaataataaaaaacaaggttttagccatggcatcgaagcggatcttgaaggaactcaaggatctccaaaaggatcctcctacctcatgcagcgccggtcctgttgctgaagacatgtttcactggaagcaacaattatgggtcctccagacagtccttatgctggaggtgttttcctagtcactattcatttccctccagattatccctttaagccacccaaggttgcattcaggacgaaggtatttcacccaaatat

SEQ ID NO: 175547 - DNA, 277 bp, Glycine max
cgggactgtaactagccgcagcacgaggagcagcctcaggaggagaaggatgtctcacaggaagttcgagcacccaaggcacggttcactgggatttcttcccaggaagcgtgctgctcgtcacaggggaaaagtgaaggcattccccaaggatgacccatccaaggcacccaagctcactgcattcttgggttacaaggccggtatgactcacattgttagagaggtcgagaagccaggatcaaagcttcacaagaaggaaacttgtgagcctgtt

SEQ ID NO: 175548 - DNA, 279 bp, Glycine max
  unsure (1)..(279): unsure at all n locations
gagagaaagaaattaagaaaaaatggcagcctgcactgtctactcaacacaatctctgagcacaaattgctccatctcaaccccatcaaagacacagctgagtttcttccaccaaaagcaggtagttttctggaggaacagcnnnnnnnnnnnnnnnnnnnnnnnnnnnnnntatgtgataacatgtgcagcaggtgactcacagacagtggtgattggtcttgctgcagactcagggtgtgggaagagcaccttcatgaggaggctgacaagtgtgtt

SEQ ID NO: 175549 - DNA, 276 bp, Glycine max
cacagtacttgtttgacttggagaacaccaatcaggatctgaaaagtgacttgaaagatctctacataaatcaagcaattcaaatggatgtggctggtaatcgcaaggctgtagtcatctatgtgcccttcagattgaggaaggcattccgcaagattcatcttcgacttgtcagagagttggagaagaagtttagtgggaaggatgttgtcttcattgccacaaggaggatcgtgcgaccacctaagaaaggctctgctgttcagcgaccccgaa

SEQ ID NO: 175550 - DNA, 123 bp, Glycine max
gccacacgcttcagaagacatggcctcattgggtgggttacaaaatgtgagcggcatcaattttcttatcaaagagggtccaaaagtcaatgcaaagttcgagctgaagccgccaccatatcc

SEQ ID NO: 175551 - DNA, 287 bp, Glycine max
cctctctctaactttcacacgcagcggcttcttcttccgttttcctgaatcggtgtgaacaatggcgacgtacgctgcgatgaaacccaccaagcccgggttggaggagtcccaggaacagatccataagataaggatcaccctttcttccaagcacgtcaaaaacctcgagaaggtttgtgcggacttggttcgtggtgcaaaggacaagcgcctcagggttaagggacctgttaggatgcccactaaggttcttcacatcactaccaggaagtccccctgtggtg

SEQ ID NO: 175552 - DNA, 287 bp, Glycine max
  unsure (1)..(287): unsure at all n locations
caacgacaccgtatcataccgtaacatgttcacagcaccttttcctacatccactgttactctctccggtgaaagcgtaacctcaccgccgcgccacgtcagattccggtcagtagtatcgttcgccaccgccactttcacggaggagcacaacataaggcagctccgtatctgagacctcatcacgggatggctttgagcgcgacgcagtacgacattctggggatccgcgccacggcgtccggcgangaaatcagggcggcgtaccggcgactggcgagggtgtg

SEQ ID NO: 175553 - DNA, 278 bp, Glycine max
tttccactttctctctgtttaagaactcaccacttcttcaacttggtgccgttgtttcatggaccagaactacgcctcatagctcctttctcatttcacacacacaaagaaccttgagacatcatgaagattccaagttccagcaactggttgtgggatttgcacttggaaatgaaggataggcaacgttggagagctgaagaggatgctttactacgcgcatatgtcaaacagtatggtcctagggaatggaatctggtgtctcagcgcatgaacac

SEQ ID NO: 175554 - DNA, 277 bp, Glycine max
ttctttctctagggttttaaccttagggtttcaaattctgtgtttcactctctcttgcggcatagctttgccatggataggtaccagaaagtggataagcctaagcccgagtctcccatcaatgagaacgagatccgaatcacgacgcagggcgctattcgcaactacatcacctacgccagttcgcttcttcaggaaaaacatgccagcgagattgttttgaaggcaatgggacaagctatcagcaagacagttgccattgcagagattttaaaga

SEQ ID NO: 175555 - DNA, 273 bp, Glycine max
ctgctctgtttcaccgagtttgggcgtttagatcagaaccaaatcgtgttctcttccattggcaaacatggcaactcaaatgagcaagaagagaaagtttgttgcggacggagtgttctttgccgaactgaacgaggttctgacacgtgaattggcggaggacggttactccggcgtcgaagttagggttacgccgatgcgcaccgagatcatcatcagagccaccagaacccaagccgttctaggtgagaagggaaggagaattagggaact

SEQ ID NO: 175556 - DNA, 266 bp, Glycine max
gcagcatggtcctatgaattgctcctcgtcactaaatggttatgcattggctcccaatactgctttgggatctggtagtatcttgcaagagtcctctgctggtcggtcagatgctgatttgaatggtggtttggtggaaatcctttggcctttggtggagatgatccctcacttcagatttttctccccacaagaccagcagattcatccatgcacaatgaattgagagatcaagcaagtgtggctaatggtgtctgcactgagga

SEQ ID NO: 175557 - DNA, 276 bp, Glycine max
ccaaaccctagcggcactacacacgttatctctctctctctctctctctctccctctctccttccccaagatgtcgagcgccgatcccgagcaccgagaagaggaggaggcacccgccgtcggcgacgacgaggacaccggagcacacgtcgctcccatcgtcaagctcgaggaggttgctgtcaccaccggcgaggaggacgaagatgcaatcctagatctcaaatcgaagctttaccggttcgacaaggatgggaaccagtggaaggagcgagg

SEQ ID NO: 175558 - DNA, 247 bp, Glycine max
tttgcttcttcgagtttcacagccaagtcgtaaaagggtttcaagggatggaaaacatgcagagcttctggcaattgggtgatgaactccgtgggcactcaaaagcatcggaggatcacaagtggttaatggttgcctcgaactggccgaacagacaagattgaagggggagcgtgtgaacaaccttgatctttcaaagggacccattgaaacaaggtcaagggataaatttgggttccaggaagag

SEQ ID NO: 175559 - DNA, 278 bp, Glycine max
ggaaaattcaaccttcatggtgttttgggagagatcgttgaactgataaaaccaatagcatctgtgaaaaagttacctatcaccttaattctgtctcctgatctgcctactcatgccattggtgatgaaaagcgacttacacaactcttttgaatgttgtgggtaatgctgtcaaattcactaaggagggctatgtttctataagagtatcggttgcaaaaccagaatctttacaggattggcgacctccagagttttatccagcatctagtgatggc

SEQ ID NO: 175560 - DNA, 269 bp, Glycine max
cttccttaagctccttagtgctgctccttgcagctctaattctatcccctcaagttcttgcaaactatgagaatcccccagtgtacaagcctcccactgagaaaccaccagtttataagcccccagttgagaagcctcctgtttacaagcctccagttgagaaccctccaatttataagcctccagtagagaagccaccagtgtacaagcccccagttgagaaacctccagtttacaagccgccagttgagaacctccagtgtacaagc

SEQ ID NO: 175561 - DNA, 285 bp, Glycine max
gcactgatagcagcgatggggatcgatcttaaggctgggggtaagagcaaaaagaccaatagaacagcaccaaagtccaatgacatctacctcaaattacttgtcaagctttatcgattccttgttcgaaggacagacagcaatttcaatgctgtgatactcaagcgcttgttcatgagcaaggttaacaagcctccaatttctttgtcaaggttaattaagtatacgaaggggaaggaggataaaattgctgtagtagtggggactgtaactgatgatatcaga

SEQ ID NO: 175562 - DNA, 269 bp, Glycine max
aatttatgaaatggcagctgagatggtgtgtgaggacctgccaaaggaagtgtgtgctttctcattagcttcatcagggaagaggtgtttgttggagaccgagaaggtggccgacggttgcgtcgagtaccaatgccggacgtcggaagtggtggtggagagaatggcagagtacatagagacagaccaatgtgtggaggcatgtggggttgataggaactctgttggaatttcatctgatgccttctttgagcctcaattcactggca

SEQ ID NO: 175563 - DNA, 269 bp, Glycine max
gaattccagaccaaccttgtgccataccccaggattcacttcatgctttcatcttatgctcccgtgatttcagctgagaaggctcaccatgagcagttatcagttggtgaaatcacaaacagcgcattcgagccatctctatgatggccaagtgtgatcctcgccatggaaaatacatggcttgctgtctcatgtaccggggtgatgttgtgcctaaagatgttaatgcagctgtgggaattatcaagaccaagcgcactattcaattt

SEQ ID NO: 175564 - DNA, 270 bp, Glycine max
cagttatatggggtcttcttggaccgcgcagaattttcggagacctcggtgaatatgccaaagtgaacttgttcttccttggtggagctattgctccctttctagtttggcttgctcacaaggcatttccagagcaagatggataactctaattcacatgcctgtgttgttgggtgctacatcgatgatgccacctgcaactgctgtgaacttcactagttggatactagtaggctttctctcaggatacatagcatatagatacagaca

SEQ ID NO: 175565 - DNA, 262 bp, Glycine max
  unsure (1)..(262): unsure at all n locations
cgcacacgaggagcagcctcaggaggagaaggatgtctcacaggaagttcgagcacccaaggcacggttcactgggatttcttcccaggaagcgtgctgctcgtcacaggggaaaagtgaaggcattccccaaggatgacccatccaaggcacccaagctcactgcattcttgggttacaaggccggtatgactcacattgttagagaggtcgagaagccaggatcaaagcttcacaagaaggaaacttgtgangctgttac

SEQ ID NO: 175566 - DNA, 271 bp, Glycine max
agacacaatgcaagaatgcgtttctgaattcatcagcttcattaccagcgaggcgagtgagaaatgccagaaggagaagagaaagacaatcaatggagacgatttactatgggccatggcaactttagggtttgaagatacattgagccgctaaggtgtacctggctaggtacagagaggcggagggtgacactaaaggatctgctagaagtggtgatggatctgctagaccagatcaagttggccttgcaggtcaaaatgctcagcttgt

SEQ ID NO: 175567 - DNA, 190 bp, Glycine max
gccatcttcttcttccatgtcgagggcgcgaactattgttctgtggcttcacggcctgggtgactctggtcccgccaacgaacccatcaaaaccttattcacttcttcccaattcagagacaccaaatggtccttcccttctgccccttccgcccctgtcacttgcaactatggttctgtaatgccttca

SEQ ID NO: 175568 - DNA, 277 bp, Glycine max
cttcttctcagtttcacctccgatgcttttgaagatctctcccccactattggtgttgattttaaggtcaaatatgtgacgatggggggtaaaaagctgaagcttgcaatttgggatactgctggccaggagaggttcagacactgacgaattcttattaccgaggggcacaaggaatcatcatgggcgagtttctgttctccattttttgacttgccatcttccccaattgtacatttattggattaggtgaaatgccttgaatgacaacctggac

SEQ ID NO: 175569 - DNA, 280 bp, Glycine max
agatactagaatggccactttagacgaacgcccttctgcgaaaaggtggcttcctcttgaagctaaccctgaagtcatgaaccagttcctttggggtcttggccttccactggacgaggcagagtgctgtgatgtgtttggctagatgaagagcttctggaaatggttccgaagcccgtcctcgccgtgctttttctttatccaattaccgcaaagtccgaagaagaaaggttgcaacaggaaaacgaaaaaaaggattatagcagcaaagtgtatttta

SEQ ID NO: 175570 - DNA, 284 bp, Glycine max
cagagaaaaaatgacccaaatcatgtttgagaccttcaatgtgcctgccatgtatgtggccatccaagctgtcctctccctatatgcaagtggtcgcacaactggtattgttttggactctggcgatggtgttagtcacactgtgccaatctatgagggctatgcactccctcatgccattcttcgtttggatcttgctggccgtgatctgactgactctttgatgaagatcctcactgagagagggtacatgttcaccacctctgccgagcgggaaattgttc

SEQ ID NO: 175571 - DNA, 292 bp, Glycine max
tgcagagatccttaaagatcgtccatcttggttccgtgactgtcggagcctagaagtttttactatgtttcctgctggaaatggaggaaccattgaacttgtttacacacagacatatgctgcaacaacactggcatctgctcgggatttctggactctgagatataccacaagtttggaaaatggcagtcttgtggtttgtgagaggtccctgtctggttctggaactggccctaatccagctgctgctgctcagtttgtaagggctgaaacactccctagtggctacttg

SEQ ID NO: 175572 - DNA, 285 bp, Glycine max
aggagataagttttcacaaggatccatcgttccatttggaaacatagagatcagcccttctgctggaatcttaaattatggacagggactctttgaggggctaaaagcacatagaactgaagatgggcatgtacttttatttcgaccagatgagaatgctcaacgcatgaaacgaggtgcagatagattgtgtatgccatccccatctcctggccaatttgttaatgctgtaaagcagatagttattgccaacaaacgttgggtgcctccaccagggaaagggtc

SEQ ID NO: 175573 - DNA, 290 bp, Glycine max
ggggttattcttctgtgggatttggctgagggtaagcgtctttactctctcgatgctggctcaatcatccatgcactctgcttcagccccaacaggtactggctctgcgccgccaccgagcagagcatcaagatctgggatttggagagcaagagtatcgttgaggatttgaaggttgacctcaagactgaggctgatgccacctccggtggtggtaacgccaacaagaagaaggttatttattgcacaagtttgaactggagtgcggatggaagcactttgtttagtgg

SEQ ID NO: 175574 - DNA, 286 bp, Glycine max
agactgtcgagcagtgaataccagttgctcctatagccggcgctcaacaacatggcggacaaggcagtcaccatccgaaccagaaagttcatgacaaacaggcttctctccagaaagcaattcatcgttgatgtccttcatccagggagggctaatgtttccaaggctgaactgaaggagaaattgggcagaatgtatgacgtgaaagacactaacactgtatttgtcttcaagtttcgaactcattttggtggtggcaagtccactgggtttggtttgatctatg

SEQ ID NO: 175575 - DNA, 282 bp, Glycine max
gtgatcacagcaaattcggtggccgaaaccgtgagccttgcaccggagattatccgtggtggcgaactgttggttcagtgttctcaatccttgatcgctcaaccagaattgaccctgatgatcctgatgctgatccagttgaatcgcttcgcggggagattgagctcagacatgttgattttgcgtacccttctaggcctgatgtgatggtgttcaaggatttgaaccttaggatccgtgcaggccagagtcaagcccttgtgggggcaagtggttcgggga

SEQ ID NO: 175576 - DNA, 284 bp, Glycine max
aaacaatatagttattttgagtgaaggttagaagtgctacaaacaatggcagctggtcaggaagatgtgaagcttttgggagttgtgggaagcccatttgtgtgtagggtccagattgccctcaagttgaagggaattgaatacaaatttgtggaagaaaatttggccaacaagagtgatttgcttcttaaatccaacccagttcacaagaaagttccagtttttattcacaatgagaagcccatagcagagtctcttgtgattgttgagtacattgatgagac

SEQ ID NO: 175577 - DNA, 287 bp, Glycine max
ctcatcagttatcttcttctttctcttgtttattatctcagatagatgatcacaaggccccaatgatgggaagagtcatggaaaaaccaagccaagatcttcttcagcagcaacaacaagccctaaagtgccctcgctgcgagtcttcaaacaccaagttctgctactacaacaactacagcttgtcacagcctaggcacttttgcaaagcctgcaagcgttactggacaagaggtggcactctcagaaacgttcccgttggtggtggctgcagaaaaaacaagcgt

SEQ ID NO: 175578 - DNA, 281 bp, Glycine max
ctccgtaccagtttcactgcataaatttgagagaaaactctgcacacatgttggtttatcaggacctccttacaggtgatgagcttctctcggactccttccgttacaatgaaattgagaatggaatgctgtgggaagttgaggggaagtgggttgttaagggagcagttgatgttgacattggtgcaaacccttctgctgagggtggagaagatgagggagtcgatgacgcagctgttaaggttgttgacattgttgatacattcagacttcaggagcaa

SEQ ID NO: 175579 - DNA, 280 bp, Glycine max
tgcgtttccctttcattttccctcactttctcgctcgccaaacgcccctctctctcctccaatggccgaccagctcaccgacgaccagatcgccgagttcaaggaggccttcagcctcttcgacaaggacggcgatggttgtattactactaaggaacttgggactgtgatgcggtcactagggcaaaacccaactgaggcagaactgcaggatatgattaatgaggttgatgctgatggcaatggaaccatcgacttcccagagttcctcaacctgatg

SEQ ID NO: 175580 - DNA, 279 bp, Glycine max
caagtctcaaaccatggcgtttagaggaggcactatgttgatattaacaatgatggcattacttgagattcagatatgctcatcggagataaaccgtggaaactttccaaatggcttcgtatttggacactgcctcttcagcttttcagtatgaaggggcagtgaaagaagacggaaggggaccctctgtgtgggacactttttcacatacttttggcaaaataattgatttcagcaatgctgatgttgcggtggatcagtaccaccgatacgaagaag

SEQ ID NO: 175581 - DNA, 292 bp, Glycine max
gcaagccccactcaaccaccacacctctcctcgttcacgctacccctttctgctcttcttctacctttcaagttttaaaagtataaagatggcagagacattcctatttacctcagagtcggtgaacgagggacaccctgacaagctctgcgaccaaatctccgatgctgtcctcgacgcttgcctcgagcaggacccagacagcaaagttgcctgcgaaacatgcaccaaaaccaacttggtcattgtcttcggagaaatcacgaccaaggccaacgttgactacgagaag

SEQ ID NO: 175582 - DNA, 288 bp, Glycine max
cttcccaaacacgtcactaatcgtatcaacaattcaccatgcgcttgagctgcaatggatgccgcgttctccgcagagggtgcaccactgagtgccccattcgcatctccctccaatggatcaattcccctaactcccaatccaacgcaaccctcttccttgcaaagttctatcgccgccaaggtctcctcagcctcctcaccaacgctccctcacaactacaacaagccgttttaaaatctttgctttacgaagcatgcggtcgaatagtgaacccggttctcggct

SEQ ID NO: 175583 - DNA, 288 bp, Glycine max
attagcacttcttcttttcacactgccgctgcaacaatggcttcagagaagaaactttcgaacccaatgagggagataaaagtgcagaagctcgttctcaatatctctgttggcgagagtggagatcgtctcaccagagccgccaaggtgttggaacaacttagtggccaaaccccagtgttttccaaagcaaggtacactgttcgttcctttgggattagaagaaatgagaagattgcatgctatgtcactgtcagaggtgacaaggcaatgcaacttttggagagt

SEQ ID NO: 175584 - DNA, 282 bp, Glycine max
ggcattgctaggggccttgtataccttcatgaggattcacgattgaggattattcaccgtgatctcaaagcaagcaacattctcttggatgcagagatgcatcctaagatatcagattttggtatggcaagattatttgaagtggatcaaactcagggaaatacaagtagaattgttggaacctttggatatatggcaccagagtatgcaatgcatggacaattctcagtgaaatctgatgtttttagttttggtgtgctgattctcgagattgtaagtggc

SEQ ID NO: 175585 - DNA, 282 bp, Glycine max
gggctgcacagctgccaatactatggccttcggttaagtgcacactccttctctaccaaaagagaggatgaggaaagggagcaactcgcaaaggacatttcaaaggattggagttctgtctttgaacgtagcattaacactctctttctcactgaaatggttcgaggactaatgctgactctgaaatacttctttgaaacaaaagttacaatcaattatccatttgagaaaggccctttgagccctcgtttccgtggtgaacatgcactccggcgatatcca

SEQ ID NO: 175586 - DNA, 271 bp, Glycine max
ctacctagacattagcaatgaggtcaaattcgcttggaaaattcagagagacatggcagagcgtggacacagtcttgaaagcatcaaggctagcattgaagcaaggaagcctgattttgaagcatatattgatccacaaaagcaatacgcagatgcagtgatagaagtgttgccaacgcaactcattccagatgacaacgagggtaagattttgagagtgagattgatacagaaagagggggttaagtactttagcccggtttacttgttt

SEQ ID NO: 175587 - DNA, 290 bp, Glycine max
gcctccttcaaaatcgtcatcaatttcgcgtctttctttctcaattctcttagattctcaattgggtcttcaaaaatgcggatgagttgcaatggatgtcgagttctgagaaaaggttgcagtgaaaattgcagcatcagaccctgtttacaatggatcaaaagcccagaatcccaagccaatgctactgtgtttctcgctaagttttatggtcgtgctggtctcatgaacctcgttaacgcatgccccgaacatcttcgtccagcgatctttcgctacgtagtgtacga

SEQ ID NO: 175588 - DNA, 283 bp, Glycine max
cagcggtgacagaacgcttccttgagcagagaaacccaagcagatcgattactcttgagaaaacaagatgagccgccacccttctgtcaaatgggctcagacgtctgatgtactctacttaacagttgagctgcctgatgctcaggatgttaagctcaaactggagccagaaggaaaattttacttctctgcaactgctggtgcagagaagattccttatgaagttgacattgatctgtttgacaagattgatgtaaataatagcaaagccagtgttggttca

SEQ ID NO: 175589 - DNA, 281 bp, Glycine max
ggaaaatctctttacacattctacattggccaaaatgattttacttccaacttagcagccattggcattggtggagtgcaacaatacctccctcaagttgtttcacaaattgcttccaccattaaggagatatataatcttggagggcgtacatttttggttcttaatcttgctcctgtgggatgctaccctgcattcttggtggaacttcctcataatagttcagacattgacgaatttggatgcttggtttcatacaacaatgcagtagtggaatacaa

SEQ ID NO: 175590 - DNA, 274 bp, Glycine max
gtgagctataagctagtttatcgtgaggagaatatgaagttgtttgttttctttgttgctgcagtagttttggtagcatggccatgccatggcgcaggctaccaaaggttccctctccgaatgaaaactggctatggtgagcgttcttcggaggtaaaatgcgcaagttttaggcttgctgtggaagcacacaacatccgagcctttaaaaccattcctgaagagtgcgttgaaccaacaaaggactacattaatggcgaacaatttagatcag

SEQ ID NO: 175591 - DNA, 266 bp, Glycine max
gccggcaacatcccgtgtccgttgccagcaagagtctactactgttacccctgtcgcagaagaagacccgcgcttcgcgtgcctcgaacccgaaccccgattcacaggcccggacatttggaacatgagctggtatccaaaagctgcagatcatgtgaatacagataaaacatggtatgttgttgatgctacagacaaagttcttggaagactagcatcgacgattgctattcacatccgagggaaaaacttggcaacctacacac

SEQ ID NO: 175592 - DNA, 274 bp, Glycine max
  unsure (1)..(274): unsure at all n locations
atttgctcccagcactgagcttaaccgagcttcacaaagatgaatcgggaaaaattgatgaagatggccggttcggttagaactgggggaaagggcaccgtgagaagaaagaagaaggctgtccacaagacaacaaccacagatgacaaaaggcttcagagcaccctgaagagaataggggtgaatgccatcccggctattgaggaggtcaatatcttaaggatgacgtattatccagtttctaaatcccaaagttcaagcatccntgctgcta

SEQ ID NO: 175593 - DNA, 276 bp, Glycine max
tttcactcaaatcatggatttcttgcaagcacaagaaaatcagatacttgtgggtgtggccgtggccgttgtagccattgggcttggtgcagtatatctctattcatccaagaagaccaaaggttgcttggacccagagaactttaaggcattcaaacttgttaagcgtgcacagctgagccataatgttgcaaagttcacatttgcactcccaacacctacatctgttttgggtcttccaattgggcaacacataagttgcaggggtaaagatgc

SEQ ID NO: 175594 - DNA, 282 bp, Glycine max
taagggttagatatatagaaaaacaaaggagaaaagatagaaatggagaactttccagttgttgacatgggaaacctgaataatgaagagagatcagcaaccatggagataatcaaagatgcctgtgagaactggggtttctttgagttggtgaaccatgggatatccatagagttgatgatggacaccgtggagaggatgacaaaagagcactacaaaaagtgtatggagcaaaggttccaagaaatggtagcaagcaaaggcttggagtctgctcaatct

SEQ ID NO: 175595 - DNA, 280 bp, Glycine max
gtgccttcgagccatcctccatgatggcaaagtgtgaccctcgccacggcaagtacatggcgtgtactttgatgtaccggggcgatgtcgtgcccaaggatgtgaatgctgctgtggccaccatcaagaccaagagaaccatccagtttgtggattggtgccccactgggttcaagtgtggtataaactatcagcctcctactgttgttcctggaggtgaccttgccaaggtgcagagggctgtgtgcatgatttcgaactccactagtgtggctgaagt

SEQ ID NO: 175596 - DNA, 279 bp, Glycine max
gccatcggaaaccaacaatgcctcctttgactttgtggctggtgctgccttttctcgtgttgctagcggcggcaacaacgtctccaacacgcgccacgacggtcgcctcgtcgttccacggtcaacgagagtttgactatttcgctttcgcgttgcaatggcccggcacttactgcaaacgcacccgcagttgctgccccaccaacggttgctgcagaggctccaattttccaacagtgttcaccatacatggactctggcctgactataatgatggaa

SEQ ID NO: 175597 - DNA, 195 bp, Glycine max
gatttgggagcaaaggctccaaaggatgtcaagatccagggcatctggtatgctcagcttgagtcatagagtgttttgttttctgttttgtttgttggctcagattttgttagtaacttcatgcatggtgttgctgcattatcccttgacccaactttcctagcactactgagagtactgtcatggttgtatatt

SEQ ID NO: 175598 - DNA, 278 bp, Glycine max
gtgctgcaatggcttcaagtcaggaggaggtgacccttttgggagctactggaagcccatttgtgtgcagggttcatattgccctcaagttgaagggagttcaatacaaatatgtcgaagaaaatttgaggaacaagagtgaactgcttctcaaatccaacccagttcacaagaagattccagtgtttattcacaatgagaagtccatagcagagtctcttgtgattgttgaatacattgatgagacatggaagaacaatcccatcttgccttctgat

SEQ ID NO: 175599 - DNA, 274 bp, Glycine max
cattattctgctgggcctgggcttgctcttcgtccgctggtggtggcggcgctggtccaccaccggcggcggcccgaagaacctccctccaggccctcccgggtggcccatcgttggtaacctcttccaagtgatcctgcagcgccgtcacttcatttacgtgatccgcgatttacgtaaaacatacggcccaatcttcagcatgcagatgggccagcgcacgctgatcatcgtgagcagcgcgcagctaatccacgaggcactgatccagcga

SEQ ID NO: 175600 - DNA, 274 bp, Glycine max
tttcggaccctaaccgcgtgtgtatttaaaatcctcaaaagcggggaaaggaagattggattctgggactttgacgttgtttcaattgtggtcgtgtcggtgcccgatctcaaacgacgatgtcatctttatatagaggagaatccaggaggtacaacaataaaccaagaggacgtcataatttgacaacgcagaagaagcaggagattaaggaagcctttgagttatttgatactgatggctcaggaactattgatgccaaagagctgaatgt

SEQ ID NO: 175601 - DNA, 270 bp, Glycine max
ctttcaccgcagtgttagggtttctgtagcctccaaccagcaagagagggaaatggctcccaaacatcctagtacgggtttgtttgttggattgaacaagggtcacgttgtcaccaagaaggagttgcctccacgcccttcagatcgtaaggggaaaacaagcaagcgagtgcactttgtgaggaacctcattcgagaggttgccggctttgcaccttatgaaaagcgaataactgagttgctcaaggttggaaaagataagagggcact

SEQ ID NO: 175602 - DNA, 271 bp, Glycine max
cacagcccggcctgatatagcagatgattgttttttgttggcctcaaggtgtattcgctactgtcctcaactgtttattccctcgtctgtttttccttcattagtggattgctctatgattgggatcacagtacagcatagggaggcttcgaattccatattgcatttcttggctgacatttttgatcttgcgaattcctctgtgggggagcaatttataccaataagagatagtgtaataattcctcgaggtgccagcatcaccagaatt

SEQ ID NO: 175603 - DNA, 283 bp, Glycine max
  unsure (1)..(283): unsure at all n locations
ccttgctgtgagaaagcacacacaaacaaaggtgcatggaccaaagaagaagatcatcgcctcatttcttacattagagctcacggtgaaggctgctggcgctctctccccaaagccgccggccttctccgttgcggcaagagctgtcgtctccgctggatcaactatctccgccctgacctcaagcgcggcaatttcaccctcgaagaagaccaatcatcatcaaactccatagcctcctggcaacaagtggtctctaattgctggaagattgcggntagaa

SEQ ID NO: 175604 - DNA, 282 bp, Glycine max
cctctctgattttgtaattgagttcgatcaaatagctcccagtactttaattgatttctgaatatcatcacttaatttgaaggaaagatggtgagcgtactgagatccgccaggcacaaagggcagaaggcccagcaaccatccttgccattggaactgcaaacccaccaaactgtgttgatcagagcacctatcctgactactacttcagaatcaccaacagtgagcacatgaccgagctcaaagagaaattccagcgcatgtgtgacaagtctatgatca

SEQ ID NO: 175605 - DNA, 275 bp, Glycine max
ggcaaaaccctagctttggagtcttccctcccatctcccacttcttgcaatctctgcagccatggcgagtaccaaagttcagagggttatgacccaacctattaacttgattttcaggtttcttcagagcaaagcgcgcattcagatttggctttttgagcagaaggatttgaggattgaaggccgaatcatcggttttgatgaatacatgaatttggttcttgatgatgctgaagaagtgaacgtcaagaagaaaagcagaaagacattaggga

SEQ ID NO: 175606 - DNA, 269 bp, Glycine max
attgttgatgtcttggcttggggctccattggccatgttgttgcttactatatcttggccaccactagcaatggctatgaccctgcattctttggctgattttcatcacgttccattgtctttctttgcttactttttactatgttataatgtaatcaatgtcatcatgtataggttctctctaagatccaacaagttcagcatatgctaatttggtcactcttttcgcctgctatttggttaatggaaaatggattctctttattatc

SEQ ID NO: 175607 - DNA, 271 bp, Glycine max
atcgtattctctacgctattcctattaaatgaatcatagtcatagatagatccattattcatagtttaaattaggaaccttttgtgttctgttctgttctgttacatctcgtgaatcgtttacaacttcttaaccgttttctgttgcagatggcttcttcgtttctatccgcagcttcgcacgctgtctcaccctcttgttctctgtccaccacgcacaagggaaagcccatgcttggaggcaacactttgagatttcacaaaggacccaa

SEQ ID NO: 175608 - DNA, 270 bp, Glycine max
attcagggagactgttttggagagatcatgccgcaccgtgatgagcaaatcacccaacaagcacaaccgtctgtacatggaagcaagaccattggaggaaggtcttgctgaggccattgatgatggcaagattggaccaagggatgaccccaaggttcgttccaagatcttgtctgaagagttcggttgggacaaggatcttgccaagaaaatctggtgctttggccctgagacccttggacccaacatggtggttgatatgtgcaaggg

SEQ ID NO: 175609 - DNA, 270 bp, Glycine max
attgaggttgagttggtgcaaaatctgataatggcagaaacagaagacaaaacccttcaagcctcgcccatgaacgaaaccaagaagatgaagaagaataagaataagaagaagagcgacaaaaaaagacctcgggagattgctaccgaggagcgtccagaggaagaggagaatgagaataatacagatagcgatggagaatcctcgaagaagaagaagaagaagaaggtggaaggagaaagtgaagtgaaagagaaaaaggtgaagaac

SEQ ID NO: 175610 - DNA, 271 bp, Glycine max
cacaaacgcacactgaattcaaaaacatcgaaagagagaggcatggccgagcaaaccttcatcatgatcaagccagatggcgttcaaagaggccttattggcgagattattagcagatttgagaggaagggtttttacttgaaagggttgaaactcgttactgtggaccgtccttttgctgagaagcactatgctgatttgtctgcaaagcctttctttagtggtttggtggattacattgtctctggccctgttgttgccatgatctggg

SEQ ID NO: 175611 - DNA, 273 bp, Glycine max
aagacagaaaaaaacaccatgatcctaatctactacctctcggagcacccggctatcgtgggcttccggtggagccacgcccaatcatggggagccacctggtccttcctcttcacctcaatcgcctcctacctcttcctctcaatcctcctccacctctctctttctctcctcttccgccgccgtcaaatccctcttggcccattccccgccgtccacagcctctccatgtccctcgtctccgccacgatcttcgccggcatcctcctctct

SEQ ID NO: 175612 - DNA, 283 bp, Glycine max
ggtagatttctgaagaagaagaaaacccttacaaatctaactccgattgaaatttgaaagcgttaaaccctaaacccccaaattgattcattccgctcgttggtgtcatggcttcttcatcgagtagcggattgacgttcaagctgcaccctctggtgatcgtgaacatctccgaccactacaccagggtcaagtctcagatgaacccaacccacgcgccaccgcacaccaccaccaacaacaacaacgccaacggcggcgacggcgtcgtttcgccgccgct

SEQ ID NO: 175613 - DNA, 273 bp, Glycine max
aaaaaagatgcgatgctacacgcaaacaagtagtacaagtccaataagaaaagcaagatagaaagattggctagttcacacacctcaattaatacaacaacaccctgttgctgatagttattatagagagagttcgatcaattcaagcttgcaagcttaaccatggaacggtatgagataattaaagatattgggtcaggaaactttggtgtggcaaagctggtcgaggaaaaatggagtggtgaattatatgctatcaagttcattgagaga

SEQ ID NO: 175614 - DNA, 276 bp, Glycine max
gactgagaaaacagaactatacaaaatggaagatacactttctgcgttgaggtctttgatgctttctcagtctccaccgcttgatgccttagttgttccttctgaagattatcaccagagcgaatatgtgtccgcacgagacaagcgccgcgaattcgtttccggcttcactggaagtgccggcttggcacttataacaaagaatgaagcactgctgtggacggatggacgatattttttgcaggctgagcaagaacttagtgctcagtggaagct

SEQ ID NO: 175615 - DNA, 215 bp, Glycine max
cgcagacgaacgagcagactcaggaggagaaggatgtctcacaggaagttcgagcagccaaggcacagttcgactgggctttcttcccaggaagcgtgctgctcgtcacaggggactaagtgaaggcattccccaaggatgacccatccaaggcgcccaagctcactgcactcttggggtaaaaggccggtcatgactcacattgttagagaggt

SEQ ID NO: 175616 - DNA, 274 bp, Glycine max
cttcctcagtagtgtcatttacgcttctcttctctgcagcaactacgcctaaccctaaggtcttcttcgacatgaccatcggcggtcaatctgctggccgcatcgtgatggagctctacgccgacgtcactccccgcaccgccgagaacttccgcgcgctttgcaccggcgagaagggcgtagggcggagcggcaagcccctccactacaagggctcgtccttccaccgcgtgatcccgagtttcatgtgtcagggtggcgacttcagcgccgg

SEQ ID NO: 175617 - DNA, 269 bp, Glycine max
aaaaaaaccaaaaccctttgcgagtgaagccctagactacactacacacttcgcaatggcggttgttgcgcaaacccctgacatcgccggcgagcgacagtccggccaagacgttcgcacccaaaacgttgtggcatgccaagccgttgccaacatcgtcaaaagctctttaggccccgttggcctcgacaagatgctcgtcgacgacattggcgacgtcactatcaccaacgacggtgccacgattctcaagatgcttgaagtggagc

SEQ ID NO: 175618 - DNA, 271 bp, Glycine max
cagaggtgaagcttcatggattttggtatagtccctacactttgagggtggtatggaccttaaagttaaaggatataccatatcaaaacatagaagaagaccgctacaataagagtcttcaacttcttgaatacaacccagtatacaagaaaactccagtgcttgtccataatggaaaacccttatgtgagtccatgcttattgttgaatacattgatgagatttggtcacataattcattacttcctgctgatccctacgagagagctct

SEQ ID NO: 175619 - DNA, 268 bp, Glycine max; identical to SEQ ID NO: 146085

SEQ ID NO: 175620 - DNA, 268 bp, Glycine max
gagtttgtgaagttgttacagcaagctaagagtgaggcagctgctgcatttggcaatgacggggtttatttggagaagtacattcaaaacccaaggcacattgagttccaggttcttgcagataaatatggtaatgttgttcactttggagaacgtgattgcagcattcagaggcgtaatcagaaactgcttgaagaagcaccatctcctgccctgacccctgagttgcgaaaggcaatgggagatgcagcagttgctgctgctgcat

SEQ ID NO: 175621 - DNA, 266 bp, Glycine max
ctgattcgttcgttcactttcactttaccaactcctaacaatttctctctgtttccttcttcaccgcatcaatggagttggacggcgttctcctcggcatgtgcaaccctctcctcgacatctctgccgtcgtcgacgacgctttcttgcaaaaatacggtatcaagttgaacgatgcgattctcgctgaggataagcacaaacctatgtatgaagaattggctaacaatcctaatgtggagtacattgctggaggtgctactcag

SEQ ID NO: 175622 - DNA, 267 bp, Glycine max
atggaatcaagcggagaacaagttcatctgcccttgccatggatctcagtacaatgaccaaggaagagttgtgagaggacctgctccattgtctctggcattagcacattgtgatatagatgatgggaaggtcgtgtttgttccttgggttgaaacagatttcagaacaggtgatgctccatggtgggcttagactccttaaaacctctgttgtcataatatatatttaaacatgaaattcaaacattctgttttgtattaatgcat

SEQ ID NO: 175623 - DNA, 218 bp, Glycine max
gggtcctgctatcggaatcgatctcggaaccacctactcttgcgtcggtgtgtggcaacatgaccgcgttgaaatcatcgccaacgaccaggggaacagaaccacgccgtcttacgtcggattcactgacaccgagcgtctcatcggtgatgcggccaagaatcaagtcgccatgaaccccatcaacaccgtcttcgatgccaagaggttgattggtc

SEQ ID NO: 175624 - DNA, 271 bp, Glycine max
gaagaaagaaacagagttagagaattgaatgtgaatggggaatcagaagcagaagtggacgcaggacgaagaagacgctctcatagccggcgttgaaaagcacggccccggaaagtggaagaacattctcaaggatccccaattcgccccttttctcacttcccgttccaacatcgacctcaaggataaatggcgcaatttgagcgtaagaaacggtgctcagggctccaaagaaaaatctagggttcccaagcctaaagccttctctgct

SEQ ID NO: 175625 - DNA, 180 bp, Glycine max
accaaattcttattagaacgaaaaaagaaaagaaaagaaaaaagagcgatttttccctcaccaaagaagaaccaaaacaatggcggatcaactcaccgatgaacagatctccgagttcaaggaagccttcagcttgttcgataaggacggcgatggttgcatcacaaccaaggagcttgg

SEQ ID NO: 175626 - DNA, 179 bp, Glycine max
gtgaagagtgagagagagagagagagagaggcacttggaatccagaaatgagagacatcatcagcattcacataggtcaggccgggatccaggttggcaactcctgctgggaactctactgcctggaacatggcatccagcccgatggcatgatgccaagtgactcctcttcggtgtag

SEQ ID NO: 175627 - DNA, 179 bp, Glycine max
ggaagctttgagagagagagagggaggagggagagtgttgacgctccatcaagatgggtatttctagggattccatgcacaagaggcgtgccactggtggcaagaagaaggcatggagaaagaagagaaagtatgagcttgggcgtcaggccgcaaacaccaagttatcaagcaacaaa

SEQ ID NO: 175628 - DNA, 179 bp, Glycine max
tccattctatatatttcataatgggtgttttcacattcgaggatgaaaccacctctcctgtggctcctgctaccctttacaaagctctagttacggatgctgacaacgtcatcccaaaggctgttgacgccttcaggagtgttgaaaacgttgagggaaatggtggccccggaaccatc

SEQ ID NO: 175629 - DNA, 141 bp, Glycine max
ctggctaccacacatgggaaaaattaattctcaaggatccacaagatccttccactccaaatgcagtttcatacaaaacagcagcgagagagaaactgataaggcagggatacaacattgttgggatcattggagaccaat

SEQ ID NO: 175630 - DNA, 266 bp, Glycine max
gtcggagctgtctgtgcaaatttgcgttgttcttcgcggcacacctcactcactgaacggtaagtatggcggacaaggctgttacaatccgaacccgaaagttcatgaccaacaggcttctttccaggaagcagtttgtcgttgatgtccttcatccagggagggcaaatgtttccaaggctgaacttaaggagaagctggctaggatgtatgaagtgaaagaccctaatactgtatttgtcttcaaattccgaacacattttgga

SEQ ID NO: 175631 - DNA, 170 bp, Glycine max
cagaacctggcagctgtgtagatccaaattcgccacatttagcttcagttgtatcagcatcaggcaaaacggcaaacacgccactagtccagtgtaccagccatatgtgtcctattcgagtgcattggcatgtgaagctcaattacaaagagtactggagggtcaagatc

SEQ ID NO: 175632 - DNA, 185 bp, Glycine max
ctcgagccgcgcagtgactaaaccaaacctctcactcgccgtcgtagggtttctcctttcgtttagcaacaacaacaatggttgcagccaagaaaaccaagaagacccatgagagcatcaacaacaggctcgctcttgtcatgaagagtggaaaattcaccctcggttacaagacggttctcaaa

SEQ ID NO: 175633 - DNA, 184 bp, Glycine max
aaaggacattcattcatctatggctacccttattgctcccagcaaccactctccccaagaagatgctgaagctctcagaaaggcttttgaaggatggggaactgatgagaacactgtcatagtaattttgggtcatagaactgtgtatcagaggcagcaaatcagaagagtttatgaggaaatt

SEQ ID NO: 175634 - DNA, 180 bp, Glycine max
cacaagtcaccagtctctctcttaggttgtgacttgtgaggatgtcaactcctgcaaggaagagactcatgagagatttcaaaagattgcaactagaacctcctgctggcatcagtggtgctcctcaagacaataatattatgctttggaatgcagttatcttcggaccggatgacaccc

SEQ ID NO: 175635 - DNA, 276 bp, Glycine max
  unsure (1)..(276): unsure at all n locations
gtcggaaactacagtgatggaaacattgttgcctctttgttggcacataaattaggagtcactcagtgtaccattgctcatgcacttgagaagaccaaataccccgaatccgacatttactggaaaaaattggaagagagataccacttctcttgccaattcacagctgatctatttgccatgaaccacacagatttcattatcaccagtaccttccaggngattgctggaagcaaggacnctttggacattagggtccaaaaggcntttnccttc

SEQ ID NO: 175636 - DNA, 230 bp, Glycine max
acaaggcagaaagcaagctcatcctagagttttaaaaatggcagcagcctcctccatggctctctcttccccatccttggctggcaaggccgtgaagctgggcccatcagcccccgaagtcgggagggtcagcatgaggaagaccgtcaccaagcaggcctcctccggaagcccatggtacggcccagaccgcgtcaagtacttgggcccattctctggcgagcccccgt

SEQ ID NO: 175637 - DNA, 178 bp, Glycine max
gatggatgccactacccccaagtactctaaggctaggtatgatgaaatcgtgaaggaagtctcttcttacttgaagaaggttggttacaacccagacaagattccctttgttcccatctctggttttgagggtgacaacatgattgagaggtccaccaaccttgactggtacaaggga

SEQ ID NO: 175638 - DNA, 182 bp, Glycine max
caacaaatccgtcgctgttgtcggtaaagctggtggtgacaaatggaaatcgctgtctgatgctgaaaaggcccccttcgttgccacggccgaaaagaagaaacaagagtatgagaaaactattttggcttacaataagaaattggaggggaagaattcagaggaagacgagtctgacaagt

SEQ ID NO: 175639 - DNA, 182 bp, Glycine max
gttaatagcattccgcaaaatggctgccaccaccttagtctctgaagtcactctcccctcctcctccggccagcggaagatgccgctgatgggcctcggcaccgcgccggaagcaaccagcgcggttaccacaaaagatgctgttcttgaggccatcaagcagggctacaggcactttgatg

SEQ ID NO: 175640 - DNA, 221 bp, Glycine max
gtcaatatttgctgtgcttggtctttgctgtttcttttatcttttgggagcatggcaaagaagtggatctgggaagggagataaccttgcattgaaagttaataacctgatgactgactgcactgttttacccaatttgagttttgaatctcatcacaatgatgtagaaattgtcgaacctgctgagccaaaagctaaagagttcaagccgtgtgatgtga

SEQ ID NO: 175641 - DNA, 155 bp, Glycine max
gctccgaatccggctcgctggagagcggtgctaagggatgcgaggtcattgtgagtggaaaattgagagcccagagagccaaatctatgaagtttaaggatgggtacatgatttcttccgggcaacctgtcaaagattacactgactctgcagtg

SEQ ID NO: 175642 - DNA, 274 bp, Glycine max
gtgtccaactggattcaagtgtggtatcaactaccagcctccttctgttgttcctggtggtgaccttgccaaggtgcagcgggctgtatgcatgatcagcaacaacactgcagttgctgaggtgttctctcgcattgaccacaaatttgatctgatgtatgccaagagggcctttgttcactggtatgttggtgagggtatggaagaaggagagttctctgaagctcgtgaggatcttgctgctcttgagaaggactatgaggcggttggggct

SEQ ID NO: 175643 - DNA, 251 bp, Glycine max
cgctaaccaagaaggaactagggttttacagaatacaagctctctctctctctcgtcggttttcgtcaatcaaatccaatccaatatcaaatatgagtcgtcatcccgaggttaagtgggctcagaggcttgacaaggtctatatcacggtgcaattggctgattcaaaaaatgcaaaagtggatcttacgccagatggtatttttaccttctccggtagtgctggtgctgaagacatcagtatgagctaa

SEQ ID NO: 175644 - DNA, 131 bp, Glycine max
ggacagactcgtgagcatgctcttcttgctttcacccttggtgtgaagcagatgatctgctgctgtaacaagatggatgccactaccccgaagtactctaaggctaggtatgatgaaattgtgaaggaagt

SEQ ID NO: 175645 - DNA, 261 bp, Glycine max
gaaaagggtatcgaatatgagtacaaagaagaggacttgaggaacaagagtcctcttctcttacaaatgaacccggttcacaagaagattccggttctcatccacaatggcaaacccatttccgaatccctcattgctgttcagaacattgaggaggtttggaatgacagaaatcccttgttgccttcagacccttaccagagagcgcaggctagattctgggctgattatgttgacattaggatacatgatcttggaaag

SEQ ID NO: 175646 - DNA, 260 bp, Glycine max
  unsure (1)..(260): unsure at all n locations
gcgagctcttcatcctcgagctcaccatccgctcctggctccacgccgacgagaanaagcgccgcaccctccagaagaacgacatcgccgccgcnatcactcgcaccgacattttcgacttcctcgtcgacatcgtcccccgngacgagatcaaggacgacgccgnntctcggggcaanggcaantggggtgcttaattactaccggccattggnaacccgccgggnatnattttggccccccngngtnaaccccnaaag

SEQ ID NO: 175647 - DNA, 161 bp, Glycine max
gtttattatcaggaagcccaccaagattcactctcgctcacgtgcccgccgaatgaaggaagccaagaggaaaggacgtcactctggatatggtaagcgtaagggtacaagggaggcaaggcttcccactaaaatcctttggatgaggagaatgcgtgtgc

SEQ ID NO: 175648 - DNA, 175 bp, Glycine max
gctgctgttaactttggacagtatccatatggaggtttaatcctaaacaggccaactattagcaggagattcatgcctgaaaaggggtctcctgaatatgatgcgttggctaagaaccttgacaagatttctataactgtaaggtcaatgagggtctccttcttgccagtaatag

SEQ ID NO: 175649 - DNA, 176 bp, Glycine max
tccttttgaaggttagaagtgctacaatacaaacaatggcagctactcaggaagatgtgaagcttttgggtattgtgggaagcccatttgtgtgcagggtccagattgcccttaagttgaagggagttgaatacaaatttttggaagaaaatttgggcaacaagagtgatttgctt

SEQ ID NO: 175650 - DNA, 197 bp, Glycine max
ctttctctctcccttagtcaaagggactcattgttcttctcccaggttatttagaaaagcaaaatggtgaagatttgctgcattggtgctggatatgtggggggtcctactatggcagtcattgcacttaagtgcccatccattgaagttgctgttgttgatatctctaaatcccgcattgcagcctggaacagtga

SEQ ID NO: 175651 - DNA, 253 bp, Glycine max
gtcatttacgcttctcttctctgcagcaactatgcctaaccctaaggtcttcttcgacatgaccatcggcggtcaatctgctggccgcatcgtgatggagctctacgccgacgtcactccccgcaccgccgagaacttccgcgcgctttgcaccggcgagaagggcgtagggcggagcggcaagcccctccactacaagggctcgtccttccaccgcgtgatcccgagtttcatgtgtcagggtggcgacttc

SEQ ID NO: 175652 - DNA, 248 bp, Glycine max
gtgattttcgtttgcgttgctgttgcgactgagtgagtgaagatggcgtgcttgcacgaccacagttgcgaagaccatgactgttcctctaactggtctctctacaaacacatcgacctctccaaggtaactgctttgaatgaggcaaatccaggaagtgttaagtcagtattcaaagcttgggaagagcgtctggattcttctggggtacacttggaaagcaatgagggtgatccgagttacttgtc

SEQ ID NO: 175653 - DNA, 224 bp, Glycine max
aaaacggatgcgcgaacgggctttctttcgccttgcttgttgctttactaaatagaaagaaagggcttttctcgcttgtttagtaaagtccagtttttggccttatcttgcaggtgacgacgacgtcgagttggcggcggagaaagactcggcattcaggtgagccgcccggtggtgtggtacgtagtgggtttagtacgccccgccaaaacggctccgaaaca

SEQ ID NO: 175654 - DNA, 162 bp, Glycine max
actcggttctgccttcacaaaaaaattatcgagatcccctttttctcctaagaaaagccatggctaagggtcccggtctctactctgacatcggcaagaaagccagggatctgctgttcaaggactaccacagtgaccagaagttcaccatcaccacctact

SEQ ID NO: 175655 - DNA, 166 bp, Glycine max
gtgaatagggatcagggatgtggaggctgaagatagcagatggaggaaatgatccatacatattcagcacaaacaatttcgttgggaggcagacatgggagtttgatcctgaagcaggcagtccagaggaacgggcccaggttgaagcagctcgtcagcatttcta

SEQ ID NO: 175656 - DNA, 211 bp, Glycine max
ggccgtgtcgcagcaaaaccaaaccacatattaacttgtttgctctaagtcatggctctgatcttgcacgcaaccaaagcaaacaagaatgctttcaagactctgattgcggcagagtacagtggcgtccaagtggaattggcccctaatttcgagatgggtgtctctaatagaactcctgaattccttaaaatgaatcccataggaaagg

SEQ ID NO: 175657 - DNA, 176 bp, Glycine max
ccaaacccgaaatgggtcatctccataaggtcggcgccattcccatgcgccatcttcaggagttccgtcttcaagccatcgatggcttcgaccttaatcagcgccttctttttgatgaaactttcaaggagggtgatcttgttgatgtctctggcaccaccattggcaagggtttc

SEQ ID NO: 175658 - DNA, 174 bp, Glycine max
aagtgatcccagctggatcttctagtggtgcaaagaaggcttttactggaatgtgagcttcgatttccagtttttattgaagaaaaatgttaccttgttatttagtagatctgatttcttttctggaaggtgacatattaaaaccttatcaattttggattttctttgaggttt

SEQ ID NO: 175659 - DNA, 172 bp, Glycine max
ctcgagcccaatgtttgagaacatggacgagcaacttttggatgctatgtgtgaccgactcaagccagtgctatacacagaagaaagctgcattgtccgggaaggagatcctgttggtgagatgctatttatcatgcgcggcaagttattgactgtgaccactaatggtgga

SEQ ID NO: 175660 - DNA, 201 bp, Glycine max
gtcgaagcgaggtcgcggaggatcggcagggaacaagttccgcatgtcactgggtctgccggtggcggcgacggtgaactgcgccgacaacaccggcgcgaagaatctctacatcatatcagtgaaggggatcaagggaaggctgaaccggttgccgtcagcttgcgtgggtgacatggttatggccaccgtcaggaggga

SEQ ID NO: 175661 - DNA, 168 bp, Glycine max
caaggacatcatcatggttgaccacatgaagaaaatgaagaacaatgccattgtttgcaacattggtcactttgacaatgagatcgacatgctggggctggagaactaccccggcgtgaagcgcatcaccatcaagccccaaaccgacagatgggtcttccccgagac

SEQ ID NO: 175662 - DNA, 284 bp, Glycine max
cgcttgtgctgccttcgtttgcgtttttatcacagaggaattaacatatatatagcaagcatggcagtcacactctacgaccttagctcttcctctgggttgaagaaacttgatgagtaccttctcccacgcagttacatcaccgggtaccaagctacaaaggatgatcttactgtttatgtcgctttgccaactgctccatcagatgaatatggaaatgtttccaggtggtacaagcacattgatgctttgttgagaatctctggtgttactggcgagggatc

SEQ ID NO: 175663 - DNA, 277 bp, Glycine max
gcgagcgagcgagcagtttcaaagagaggatttgggattgggaaggcgagggattgcgctgcgtctcttcctcttctctttcgattcatccctcattcataatcttccaatccaacaacctcagcctcacactcacacatacacacatctgaacgcgtatcgtccctcccatggcttcaaagcgcatcctcaaggagctcaaggacttgcagaaagacccaccaacttcttgcagcgctggtccagtagctgaggacatgttccattggcaagcaac

SEQ ID NO: 175664 - DNA, 279 bp, Glycine max
ttcctctaaaccctaaacaactctttctcttcttccttcgctcgttgttctccctcgcgtagatcgacaatggcggagacagagacgtttgctttccaggctgagatcaaccagctcctcagtctcatcatcaacaccttctactccaacatggagattttccttcgtgaactcatcagcaacgcctccgatgctttggacaagattcgatttgagagtttgacagataagagcaagctcgatgctcagccagagttgttcattcatattattccagac

SEQ ID NO: 175665 - DNA, 280 bp, Glycine max
gagcttccgagaaagtcttgatctccgctcatggcttctccgcgagctgcagaaaacaccgagaatagcttggagaagatcaagcgccagtacgcttccgcttccggtagaaacctgttgcaaggaccacttctcaagagatctgaaaccctgagaaaatggaacgagcgttgggtcatcttggacccgactacggggagaatggaatacaagataagacgaaatgaaccttctgttaaaggaacaattatatttgacgccaatagcaccatcaccatat

SEQ ID NO: 175666 - DNA, 279 bp, Glycine max
ggggtattcttgctgctgatgagtcaacagggacaattggcaagcgtttggccagcatcagtgtagagaatgttgaatccaacaggcgtgctcttagggagctgcttttcaccgctcccggtgctcttaaatatctcagtggtgtcatcctctttgaggaaactctctaccagagcacagctgcaggcaagccctttgtggaagtcttgaaggaggctggtgttcttcctggcatcaaggttgacaagggcacagttgagcttgctggcactaatggag

SEQ ID NO: 175667 - DNA, 278 bp, Glycine max
cttctctctgagaacaacaccccacactcctctctctctctccgattccttctcttctcacacctccatggcccacacttcccttccctccgccgatgccggcatggacgctgtccagcgccgtctcatgttcgaagacgaatgcattttggtggatgagaatgaccgtgtggttggtcatgattcaaaatacaattgtcacttgatggaaaagattgaagctgagaatttgctgcatagagctttcagtgtattcctgttcaactcaaagtatgagt

SEQ ID NO: 175668 - DNA, 272 bp, Glycine max
gggcattgaattgtggcaggtgaaatctggtactttgtttgacaatgtcttaattactgatgatcctgaatatgccaagcaactggctgaagaaacatggggcaagcacaaggatgttgagaagacagcatttgaagaggctgagaagaagagggaagaggaggaatcaaaggatgacccagttgactctgatgctgatgaggaagaggaagatgctgatgaagctggcaatgactccgatgctgaatcaaagacggaagctggggaagaca

SEQ ID NO: 175669 - DNA, 276 bp, Glycine max
tgaagaaggcaaatcgcgaagactagatctgatctgagagaatggctcctcggtctagcagcaaggacgcccaagaccttttccgcgctctttggtctgcttatgctgcaacccccactaatctcaagatcattgatctctatgtcatctatgccgtattcaccgctttcatccaggttgtttacatggctttggttggatcatttccatttaactccttcctatcaggagtactttcttgtgtaggaactgctgttcttgctgtttgtctcagga

SEQ ID NO: 175670 - DNA, 278 bp, Glycine max
  unsure (1)..(278): unsure at all n locations
ggagagttatnntnncttcatttaaggngccccgaaacccaaaccctaatctgattcgctttcgattatggcgtctganagcgcttctcgatcgagttccgcggccgattcgtacattgggagcttgataagcttgacctctaagagtgagatcagatacgaaggtattctctacaacatcaacaccgaagagtccagtattggcctcagaaacgtgcggtcttttggaacagaaggnaggaaaaaggatggcccacaaatccctcccagtgacaagg

SEQ ID NO: 175671 - DNA, 278 bp, Glycine max
gtgagattacccatagatagagagcgcggcataacctaaacttacccttcttctctctgtgtgtgtgcgcatcaaacgcaaccagaagcagccatggccactgcaagaactgtgaaggacgtttctcctcatgagttcgtcaaagcttactcttctcacctcaagcgatctggcaagatggagctgccagagtggactgatattgtgaaaactgcaagatttaaggagttggctccttatgatcctgactggtactatgtcagagctgcttccatggc

SEQ ID NO: 175672 - DNA, 275 bp, Glycine max
gtgagattgttaggttgattgaaacagcaacagtgcctattttggcagttgatgttgatgggctggtcaatgggtggaacataaaaattgctgagttgacaggtcttccagttggtgaagctatgggaaagcatttactcacacttgttgaggattcttcaactgatagagtcaagaagatgcttaacttagcactgctaggtgaagaagagaagaatgtccaatttgagatcaaaacacatgggtctaagatggattctggtcctattagttta

SEQ ID NO: 175673 - DNA, 276 bp, Glycine max
cgcagcttgaaacagagcagagcgaccttgaagagctatggctgtcggaaagaataagaggatttccaagggaaagaagggtggcaagaagaaagccgctgatccctttgccaagaaagactggtacgatatcaaggccccttccctcttccaggtcaagaatattggcaaaaccctcgtctctcgtacccagggaaccaagattgcatccgaaggactcaaacatcgggtttttgaggtctcattggctgatctccaaggggatgaagaccactc

SEQ ID NO: 175674 - DNA, 276 bp, Glycine max
cgcaaacacgctgttcctacaatcattccaaatgtgcccttccggtcgcaccctcctcccttcctccgtctccgatttccgaccggcattcgacgtcctcgatgccgaccgcgacggcaaaatcagccgcgacgacctccgcgccttctacgccggagtcggcggcggaggagatgacgtgatcggggcaatgatgacagtggctgacaccaataaggacgggttcgtggagtacgaggagttcgagcgcgtggtctcggcggagagaaagcccgt

SEQ ID NO: 175675 - DNA, 277 bp, Glycine max
aaagattgcaattcttgatcatgagaaaaagagaacaattgtattgcgtaaagatggtcttcctgatgctgtggtgtggaatccttgggataagaaagcaaaggctatatctgatttcggtgatgatgagtataagtacatgctttgtgtagaggctgctgctattgaaaagcctatcactttgaaacctggtgaggaatggaagggaagactagaactttcaactgtttcttctagttattgtagtggacagcttgatcccaaaagagttattcaa

SEQ ID NO: 175676 - DNA, 276 bp, Glycine max
ctctctcacatttcattacttctagcaagctattacatcttttccttcctctgtctacatttcatttcattcaaaacaatcatggcatctcttcattccacatgttcaacaaaaaccgtcctttatgcattggtattgttggcctcttccatggcaacttctaccaggattttgacataacatggggagatggtcgtgccaagatactcaacaacggcgatcttcttactctttcccttgacaaagcctccggatcagggtttcagtccaagaacg

SEQ ID NO: 175677 - DNA, 274 bp, Glycine max
aggatttgtacaagtgattgttgttgcctacaagaacagaaaacttccattaccaccaaacaactcccctgaacattaccatcataagaaggagtcagaccttgtcgttccaaccgataaactaagtttcctgaatagagcctgtgttatcaaagatcgggaacaagaaatagcctcggatggttcagcatcaaatccatggaaactctgcacagtagatcaagtagaggaactaaaagccattattaaagtgattcccttgtggtctacaggg

SEQ ID NO: 175678 - DNA, 273 bp, Glycine max
atttctggtatgtatttgggtgaaattgtaaggagagttttgttgaagttggctgaagaagttgacttctttggagatactgttcctccaaaattgagaattcctttcgtacttaggacacctgacatgtctgcaatacatcaagatacatcttcagatctgaaggtggttggaaacaaattgaaggatatattagagatcaataacacatccctgaaaatgaggaagattgttgtggaactctgtgatattgttgctaatcggggagcccgc

SEQ ID NO: 175679 - DNA, 275 bp, Glycine max
caccgccccaatctctgcagcgccttcgatctagaaaacatgactaagagaacaaagaaggctggcattgttggaaaatacggtacccgttatggtgccagtctgcgaaagcagattaagaagatggaagttagtcagcacagcaaatttttctgtgaattttgtgggaagtatgctgtgaagaggaaagctgtaggaatatggggatgcaaggactgtggtaaagtgaaagcaggcggtgcttatactttgaataccgcaagtgctgtgacggt

SEQ ID NO: 175680 - DNA, 276 bp, Glycine max
ccttttctcgcctccatcgcaggtttctacctatattgctgttctttgcttcgattaggatcagtcaccatgtatcttcagttttacataaacgataacggtgacaaagtttacaccactaagaaagattcgccgctagggctacctacacaatctgctcatccagcccggttttcacctgatgataaatattcaaggcagagagttcttctgaagaagcgttttggattgttaccgacccagcagccacctccaaagtattgagtgatatagaag

SEQ ID NO: 175681 - DNA, 276 bp, Glycine max
attttaggttcttcgttacgcgttgtgttgcgttgtgcgtgagaaagtgcgcgtggtgaaaaagcatggcttctcagctcctgagacgaaccttcggaagtcgtttccttgcaaaccctagggccttctcctccgctgcttccactccgatccgcgccactctcttccccggcgacggcatcggccccgagatcgccgattccgtcaaacagatattccaagcagctgatgtcccaatagaatgggaagagcactatgtaggaactgaaattgacc

SEQ ID NO: 175682 - DNA, 269 bp, Glycine max
cacaaatcttagccgccattgatttttcctcttccatttctcttactttctcagcctttttcgattacccatttggttatttcgccctaatggctcttgctccatccaaagtttccaccttttctggtttttctcccaaacccagtgttgggggtgctcagaaaaacccaacttgctctgtatctctgagctttttgaatgagaaacttggaagcagaaaccttagggtttgtgcctcaacggtgcctctcactggggtgatttttgaa

SEQ ID NO: 175683 - DNA, 271 bp, Glycine max
aaaccctctctttctctctcttccaaaacctaattttcattttttctcttcaaacaaattttcaaaatgcgtgagatccttcacatccagggtggccaatgcggcaaccagatcggcgccaagttctgggaggtggtttgcgcggacacgggatcgaccccactggaaggtacggtggggactcagagcttcagctcgagaggatcaatgtctactacaacgaagccagctgcggccggttcgtgccgcgcgcggttctcatggacctcga

SEQ ID NO: 175684 - DNA, 272 bp, Glycine max
aaaagaaccatcagaccaaatgcaaagaagcttagtgcgctgttcatgtcaaggcatgagatggactgggatacatttgcaagtaaggttaaagcatgtcaaagaggattcatgggagagccagatgagatgagacctggacgaggagagtttcatgaatatccaagtacatgtgtgtgtgagaaaccattcatggatgatcttagccaagacggattccggccccctaaactcgcagccaacaacgtgacagtgaatggaggaggaaatga

SEQ ID NO: 175685 - DNA, 265 bp, Glycine max
atcgttgtcaatttcgcctctttctttctcaactcccttagattctctccatcgggtcttcaaaaatgcggatgagctgcaatggatgtcgagttctcagaaaaggttgcagtgaaaattgcagcatcagaccctgtttacaatggatcgaaagcccaggatctcaagccaatgctactgctgttcttgccaagttctacggccgtgctggtctaatgaagctggataacgcaggccccgaatgactcagtccaacgatctttcg

SEQ ID NO: 175686 - DNA, 271 bp, Glycine max
ccagtccaagcagcctccaattcgtgccactctcttcaaaatggccgttaccttctcaaatctccacacagaatcaggtctcaagtccctcgacgacttcctctctgggaaggtctacgtttctggggatcagttcacaaaggacgacatcaaagtgtatggtgctgttttggagaagccaggtgactcttttcccaatgctgccaagtggtacgaggttgtctcatctcagcttgctgcaagcttccccggcaatgctcaaggggtgaga

SEQ ID NO: 175687 - DNA, 269 bp, Glycine max
ggaacatttcctgaatggaggtagagttaccaatgaatgttgaagccatcttcaagccagttgggggaatgtcacagactgtggatttcacgttgtgaggactccactcaacaaagtaggaggagttcttgttctgcacattgatcatctgttcgtcgacttccttggtgctcatcttgcctctaaacatggctgaggcagtgaggtagcggccatgtcgagggtcagcagcacacatcatgttctttgaatcccacatttgctgtgtc

SEQ ID NO: 175688 - DNA, 280 bp, Glycine max
agcttgcacgtaattcctgaactttgctctcagcatcactgtcacctcactaagtcgctcaccaggtgtcgtgtttccaacatgtggcaagcaagaaccccatgtcttgaactgggattcaatcctagggcgcaagctgtcgagcattctcttcaaggaattcaaaagaattccaagctcatcaggaaccacttaggcacatgtagatcgtttggcaagtttttgaacatatttattaagcccaaatttcttaggacccatgctttctttgagaggagat

SEQ ID NO: 175689 - DNA, 273 bp, Glycine max
ttatcatatctccatttccatttcctctctctcagtttccaagaatcttaagctatgggaaagtcttacccaaccgtgagcgctgattaccagaaggccgttgagaaggcgaagaagaagctcagaggcttcatcgctgagaagagatgcgctcctctaatgctccgtttggcatggcactctgctggaacttacgacgtgagctcgaagaccggtggtcccttcggaaccataaagcacccctccgaactcgctcacggcgctaacaacggt

SEQ ID NO: 175690 - DNA, 274 bp, Glycine max
aaatctaattcgacatggcgtcacgggacaacaagaaggcgtccagcagccgagccggccgaattcgcaccctctccgatctgaaccgtccctccgccgattccgacagcgactccgatggccctcaggagtattacaccggcggcgaaaagagtggaatgcttgtccaggatccttcaaagggaaatgatgtggatgacattttcaatcaagctaggcaacttggggctgttgaaaggcctcttgatcagcttcaggagcctccaaggtcaac

SEQ ID NO: 175691 - DNA, 273 bp, Glycine max
gggcgaagttgaaaaaccaaaacccttggcgagtgaagccctagactcactagactacacacttcgcaatggcggttgttgctcaaacccctgacatcgccggcgagcggcagtccggccaagacgttcgcacccaaaacgttgtggcatgccaagccgttgccaacatcgtcaaaagctctttaggccccgttggcctcgacaagatgctcgtcgacgacattggcgacgtcaccatcaccaacgacggcgccacgattctcaagatgctgg

SEQ ID NO: 175692 - DNA, 270 bp, Glycine max
caaactcacacactttgtactctccgtccttccttcttcgatccagatctctctccttctccctcaaatggcttcccttctgcaatgttccatgcccctcgtctctctttccaatcgagctctggtacccggtaccaggatctccaacccaagttcagtttccctttcaattaagggaagaagtttcccatccgttacattgcagcccagagggcgtcggtttcagcttagatgtgcggcaaaaccagagacagtgaagaaggtgtgtga

SEQ ID NO: 175693 - DNA, 266 bp, Glycine max
aaagttgccacagcatttaaattggaggaagatgtagtaattgcaaatctggatgctgataaatatagggatctggctgaaaagtacgacgtgagtggatttcctaccttgaagttcttcccaaagggcaacaaagctggtgaagactacggaggtggaagagacttggatgactttgtggcttttatcaatgagaaatctggagcaagtcgagatggaaaaggacaacttacttcccaagctggtatagtagaaagcttggatgt

SEQ ID NO: 175694 - DNA, 269 bp, Glycine max
cagggactctttgaggggctaaaggcatacaggactgaagatgggcgtatacttttatttcgaccggatgagaatgctcaacgcatgaagagaggtgcagatagattgtgcatgccatctccatctaatgaccactttgttaatgccgtaaagcagatagttcttgcaaacaaacgttgggttcctccttcaggaaaagggtcactatatgttaggccattgctgatgggaacaggagcatcgataggtgtgggaccagctcctgagta

SEQ ID NO: 175695 - DNA, 268 bp, Glycine max
atcttctcagagggaggccttgactacttgggcaacccaaacctgatccatgctcagagcatccttgctatctgggctgttcaggttgtgctcatggggtttgttgaaggttacagagttggtggaggaccacttggtgaaggacttgacccaatctaccctggtggtgcttttgaccctcttggtctggctgatgaccctgatgcattcgctgagttgaaggtcaaggaactcaagaacggtcgcttggctatgttctccatgtttg

SEQ ID NO: 175696 - DNA, 270 bp, Glycine max
atggtaacagaaaatgttggcgatgatgaagaaaactctgagacgaaagaagcaaaggaaactgaaagtgaagacaacaatgggatgaaagaaggaaaggtaaccgaaggtgaagacaagaaacgacaagctggtggaaaattttctgccgctgcttacaaggacaacatggatgttgtctcacgtgaggatttgaagagtgtctttgagaaatttggtacagtgaagtacattgatttcaagattggagcagagtcaggatacattcgc

SEQ ID NO: 175697 - DNA, 269 bp, Glycine max
ctttccaccaacaagaaagaaaacagagagaaactttcatttcatagattttcatcatctcagcaaaggaatcaatcaatcaagccatggcaggcttcagtggcgacgaaaccgctcctttcttcggcttcctcggtgccgctgcggccctcgtcttctcctgtatgggagcggcgtatggaacggcgaagagtggggtgggggtggcgtcgatgggagtgatgaggccggagctggtgatgaagtcgatcgtgccggtggttatggcg

SEQ ID NO: 175698 - DNA, 268 bp, Glycine max
atcagttgcatattctttgctattccaatggccactgttgaggttgtgtcagccaaggttgccctcccagaggacacaaaagaggcatcattgaaggttgacgaggagaagaacacagaagaagttgttgagactccaacaccagaaactgtggtcactgagcaaaccaaggaggaaagtactgaggccccacgacctgcagcttcagaagacaagccctcggttgaagttcagactaaagaggtggcagaggaagttgtgtctgaga

SEQ ID NO: 175699 - DNA, 264 bp, Glycine max
caactccatggtatctttgaggctgcaagttttggaggatctaatattgatccaacggcttgggaggataagaagtgccctggtgaatctcgtttccctgctcaggttcaagtgattactaggaaagtttgtgagccactagaggaagattccttcagaccaattcttcaccactacgacggccctaagttccgtcttgagctgagtgtgcctgaggcactgtctcttctggatatttttgcaaaccagaacagtttcgatgac

SEQ ID NO: 175700 - DNA, 268 bp, Glycine max
gcggaagaagaagacgccgcagccatggtgaagtactccagagaacccgacaatcccaccaagtcctgcaaggccagaggcgctgaccttagagtgcatttcaagaacactagggagactgcctttgccatcaggaagttgcccctggttaaagctaaaagatacctggaggatgttttggcccacaaacaggccatccctttccgacgcttctgtggtggtgttgggaggacagcccaggctaagagcagacactccaatggtcaag

SEQ ID NO: 175701 - DNA, 265 bp, Glycine max
gacatttaaagctgtaaattgttgatctcagaagcagctattggtgctctcaaagttcaccactcgtactatttggctgcacttgacccatttaaatataaataacacaggcgcaaggtgctagacacttctccgcctccaaatcacattttctttaaaaaaaaaaaaaaaaaaaaaaaaaaaaaaaaaaaaaaaaaaaaaaaaaaaaaaaaacaaaaaaaaggggggcccccccaatcagtggacccccccccgggggtttttc

SEQ ID NO: 175702 - DNA, 265 bp, Glycine max
tgaggctagggttaccggattcttgcgttttaatatctgcaattcagaagcatggggcactccaatgtgtggaattctcaccctaagaactacggacctggttctcgcacttgccgtgtgtgtgggaatcctcatggattgatcaggaaatatgggcttatgtgttgcaggcagtgcttccgaagcaatgccaaggaaattggcttcatcaagtatcggtgaaagattagttttccacctgccccacccggtttggattcttgca

SEQ ID NO: 175703 - DNA, 265 bp, Glycine max
  unsure (1)..(265): unsure at all n locations
tgggaccaaagactccatcagaaagcttgtctctgacttgaacagtgcaacattggagtcnnnnnnnnnnnnnnnnnnnncacctccttttgtgtacatcgatcaggtgaaaaactcaattacagataggattgaaatttctgcccagaattcttgggtgggaaaaggtggggctttcacgggagaaatcagtgtggagcaactaaaagaccttggctgcaagtgggttattcttggacattctgagcgaagacatgtaattgga

SEQ ID NO: 175704 - DNA, 269 bp, Glycine max
aaaaaaaaaaagaataataaatagaaaaaggagcatgttgattatatagaaagtaaagggcaacaatcatttttgtttaccatgggtaaggacaccatcgctgacataataacctatataagaaatgctgacatgaataaaaaaggaatggttcaaataccatttactaacataacagaaaacattgtaaaaatacttttacgcgagggttttgttgaaaacgtcagaaaacatagagaaaacgacaaatattttttagttttaactct

SEQ ID NO: 175705 - DNA, 268 bp, Glycine max
gcaaagcaaaccaaaccaaaccgtgagtccgtgacaagatctgtgttgtgatttgtgtgtgacgtacattccaaaactttcaatagttgaataatggctgttgagacttctgataaaccaaatttacctcatgattttgatgatgatgatgatgggccagtaatttacaaaaggtactcatcatctaagaaaaatcaattgcattcagaagtaaggaagtcaagttctcacagtcatgctggacagtcatatagacagatttctgatg

SEQ ID NO: 175706 - DNA, 258 bp, Glycine max
  unsure (1)..(258): unsure at all n locations
atggtgctaaatggtatttttctgccctttatatcaccgagtcatctggtgcccgtcgtagacatagcgaggatcttngccatggaaggtgtggatgtgaccataatcaccacaccagcaaacgccgccgttttccaaagctccatcgaccgtgattgtatccgcggtcgctccattcgaacccatgttgtcaagttccctcaagtccctggcttgccacaaggattggagtccttcaacgcttccactcccgcagac

SEQ ID NO: 175707 - DNA, 264 bp, Glycine max
aaacttcacttttaaatgccatagagagggcaatgaaatatactcagtcaactctttaaacttccatcctgtacaccacacatttgcaacttctggttctgatggtgctttcaatttttgggataaggatagtaaacagcggctcaaggccatgttgagatgcagcctacctattccttgcactaccttcaacaatgatggttcaatatttgcttactcagtctgctatgactggagtaaaggggcagaaaattctaatcctgc

SEQ ID NO: 175708 - DNA, 265 bp, Glycine max
  unsure (1)..(265): unsure at all n locations
tttgaaggggattctgggaatcactcagaaagacgtggttatggtggncctcgtgggccctaccgtggtggtngtggtggtcgcggtcgtcgtggaggttttaccaacggtgaagttggtgaagaaggacgcccaagaagagcatttgaacaccacagtgggaactggacgaggaaatganttcaaacgggatggctctggacgtgggaatggggtacacagaatgatgacattgctgtggttactgaggnantggtgtatgaac

SEQ ID NO: 175709 - DNA, 264 bp, Glycine max
cttcttcagctacacgaccagcacagaagatctgaaaagggttgctgctgcgactggtggaaccgtacaaacatctgtgaataacattattgatgaggtccttggaacttgtgaaatttttgaggaaaggcaggttggaaatgagaggttcaatattttcaatggatgtccatctggccaaacagccaccatagttcttcgtggtggagctgatcagttcatagaggaagcagagcgaagtttgcatgatgcaatcatgattgt

SEQ ID NO: 175710 - DNA, 263 bp, Glycine max
gtccaattagggtgaattatgctaatgaaagacctcgtggatatggtggtggtggcggcggctttggttcatatggtgctgtaggtggcggtggttatgaaggtggtggtggcagcggttatcgtggaaatgtttctgatggttatggtggtggcaactatagtcgaaatgatgggggtggttatggatatggtgcaggcagttatggatcaggcggcaattatggggacagtggccctggcaataactactcgggaggctat

SEQ ID NO: 175711 - DNA, 269 bp, Glycine max
accaaaccaaagcaagaatagtgttctaagagtgagcaacaacttcaaacaccattgtgagaactggcttccaagggtgcacttctcttgtgtctcaacattctcttcttcactgtggtaagctccacatatgtcccatgcaacccaccccctaaaactcctaaacacacacctgtcccaaagccaccttccccaaagcaaccaagttgccccaaagacaccattaagtttggtgtgtgtgctgatgtgttaggtttgattaacgtgca

SEQ ID NO: 175712 - DNA, 261 bp, Glycine max
agaatactcataataatatagtggctagcatagagctagtaataatattaatattgttaagctagctctaagccatggctaatgaacgtgatctgttctcggcggagattgtgaaccgtggaattgaatcgtcaggaccaaacgctgggtcgttgacgttttcggtgagggtgagaaggcgcttaccggattttcttcaatcggtgaaccttaagtacgtgaaattgggttaccattatctgataaaccatggcatatact

SEQ ID NO: 175713 - DNA, 264 bp, Glycine max
tgtcgagccgaatcggctcgaggttgggcatgctcaacagaaggagggtacacttgaaagaagcgtgacaaaggaaaaggattgttgtgaaatcagagattcagatgaagaacttgaagttgtacatggagaaccaaaccatcatagaggagaatgagaagttgaggaaacaagccatgcttctgcacaaagagaatcaggccctctcgtctcagctccaaaagaagctttcaggacaaaacaacaataccaacaataactagc

SEQ ID NO: 175714 - DNA, 309 bp, Glycine max
agtatttgcagaactttgtttcccaacctccattgcctccgcttctacctcgctaccatgatcattcctgagaagaaccgcaaggagatctgcaaatacctcttccaagagggagtttgctttgcgaagaaggacttcaatttggcgaacaccctgagattgacgtgccgaatctgcaggtgattaagctgatgcagagtttcaagtctcgcgagtatgtgagggagacttttgcttggatgcactattactggttcctcacaacgatggaatcgagtttctcagaacttaccttaaccttccttccga

SEQ ID NO: 175715 - DNA, 302 bp, Glycine max
ctgagaggaagagggagtgagagtgttcttcgtttgttaccttctctcagaaatggttacgttcaggtttcaccagtaccaggtggtcgggagggctctcccaacggaagcagatcagcatccgaagatctaccgaatgaagctctgggccaccaacgaggttcgcgccaagtctaagttctggtattttttgaggaagctgaagaaggtaaagaagagcaatggtcaagttcttgctatcaacgagatttttgagagaacccaaccaagattaagaactacgggatatggttgcggtatca

SEQ ID NO: 175716 - DNA, 296 bp, Glycine max
  unsure (1)..(296): unsure at all n locations
ttctcttatctctaagtcaacatggctcaccatgaagattcaagtgtatggaattcgagtatacctcaccctaagctcaatgaaagaattttgtcttctctgtcacggagaactgttgctgctcacccctggcacgatttagagattgggccaggagctccagctgttttcaactgtgtggttgaaattggcaaaggcagtaaggttaagtatgagctggacaagacaagtggacttataaaggttgatcgatctntactcatcagntgtnnacccacacaactatggtttngtcc

SEQ ID NO: 175717 - DNA, 300 bp, Glycine max
tgcacaagtgagggaggttgaaggcggcgtgagaagcatgttggacatcaacctattcagagaggagaagggccacaaccctgaattcatccgcgaatcccagcgccgtcgtttcgccagcgtcgaagtcgtcgacgaggtcatcaatctcgacaaagaatggcgaaagcgtcaattcgagttggagaatctccgcaaagaatttaacaagatcaacaaggaagtctccaaactcaagcgtgctggcgaggatgactaagttcatcagtgaatcagaggaaaccaagaaatcgatagggg

SEQ ID NO: 175718 - DNA, 294 bp, Glycine max
tgctactccaatttatcagaagcttcctgaagatgttgaaatatggaaggccatgaaggcactaacaaaagccatgtgctgggaagttgtgtcgatcagcaaggatccagtaaatggagtaggtgtagctgtatacaggaagccaacttctaatgagtgttacgagcaacgctcaaagaatgagccaccgctgtgtccagactctgatgatcctaatgcagcatggaacattcaattgcaagcttgcttgccaaagcgccagttagttcaaaggaacgaggctcaaaattgcct

SEQ ID NO: 175719 - DNA, 297 bp, Glycine max
catcccctaaggtttctgacacagttgttgagccttacaacgcaacattatcagtgcaccagctcgttgaaaatgcagatgaatgcatggttttggataacgaagctctctatgacatatgcttccgcacccttaagctcaccaccccaagctttggagatctgaaccatctaatttcagccaccatgagtggtgtgacatgttgtcttcgattccctggtcaactcaactcagatcttcgcaaactcgccggaatctcattcccttcctcgtctgcacttcttcatggtgggattt

SEQ ID NO: 175720 - DNA, 293 bp, Glycine max
gaaaacgttcaagaagcctcgtcgtccctacgagaaggagcgtttggacgccgagttgaagctggtcggtgagtacgggcttcgctgcaagagggagttatggagggtccagtacgccctgagccgcatccgtaacaacgccagaaacctattgacccttgatgagaagaaccctcgccgtatcttcgagggtgaagcccttctccgaagaatgttccgttacggactcctcgacgagacacagaacaagctgattatgtgttggctctcaccgtcgagaactttctcgaacg

SEQ ID NO: 175721 - DNA, 302 bp, Glycine max
ggggagtattattatttgatacgaaatacaaagctcttcaaaacccaaacaacaaccgtactgcacaactccaccactgtgcaatggccgacgaggaacctgttgatcagaagagatatcttgaagagtcttgcaaaccaaaatgtgtaaaaccattactagaataccaggcgtgcattaaaaggatacatggtgatgaatctgggcagaaacactgcactggacaatattttgattattggtcttgtattgacaatgtgttgcaccgaagctattcaccaaactgaagtaaatcgggaagg

SEQ ID NO: 175722 - DNA, 297 bp, Glycine max
gcttgttgcattgtcaatggctgagatttgttcatcttatccaacttctggtgggctttattattggagtgccaagcttgctgggcccagatgggcaccctttgcttcctggattactggctggttcaatattgttggccagtgggcagtgacaacaagtgtagattattcacttgcacaactgattcaggttattattctccttagtactggtggcaaaaatggtggtggatatgaggcatctaaatatgagttattgctttccatgggggaattttgttcctacacggtataata

SEQ ID NO: 175723 - DNA, 297 bp, Glycine max
gagagcacaaagaaactgccatggacgctctgaggaaacaagccagcaagctcagagagcaagttgccaaacagcaacaggctgtaataaagcagttcagtagtagtggttatgagagttcagatgttgtggtcatcgatgaggtcgaaatgcagagacatcaccagctggaaaagttgtatagggccacacgttcagggaaggacttccagaaggaaattgttaaagcagcagaaacatttacagctatagttataagcatattgaaacaggaacaaaactttctgaggattgctg

SEQ ID NO: 175724 - DNA, 296 bp, Glycine max
aaaaaaccctctctttctctctcttccaaaacctaattttcattttttctcttcaaacaaattttcaaaatgcgtgagatccttcacatccagggtggccaatgcggcaaccagatcggcgccaagttctgggaggtggtttgcgcggagcacgggatcgaccccactggaaggtacggtggggactcagagcttcagctcgagaggatcaatgtctactacaacgaagccagctgcggccggttcgtgcgcgcgcggttctcatggacctcgaaccgggcaccatggacagcgtc

SEQ ID NO: 175725 - DNA, 295 bp, Glycine max
  unsure (1)..(295): unsure at all n locations
ttcggatctagagtcttcagtttctcctcgttgttcttcgctttcctgttttcaatttcgattctttcgttaatttaataagatgtttgggagggcaccgaagaagagcgataatacgaggtactacgaaatcctcggcgtctccaagaacgcttcgcaggatgatctgaagaaggcttacaagaaagccgccattaagaatcaccccgacaagggcggtgatcccgagaagtntaaagagctggcgcaattatgaggttctgagtgaccctgagaagcgtgagatatatgatca

SEQ ID NO: 175726 - DNA, 292 bp, Glycine max
cactctgctggaacctttgacaagggcacgaagaccggtggacccttcggaaccatcaagcaccctgccgaactggctcacagcgctaacaacggtcttgacatcgctgttaggcttttggagccactcaaggcggagttccctattttgagctacgccgatttctaccagttggctggcgttgttgccgttgaggtcacgggtggacctgaagttccattccaccctggaagagaggacaagcctgaccaccaccagagggtcgcttgctcgatgccactaaggggtctga

SEQ ID NO: 175727 - DNA, 156 bp, Glycine max
ggattgcttcagcccttcatgctgctgttaactttggacagtatccatatggaggtttaatcctaaacaggccaactattagcaggagattcatgcctgaaaaggggtctcctgaatatgatgcgttggctaagaaccctgagaaggagtttttga

SEQ ID NO: 175728 - DNA, 190 bp, Glycine max
gtttgcagtcactgctctgtttcaccgagtttgggcgtttagatcagaaccaaatcgtgttctcttccattggcaaacatggcaactcaaatgagcaagaagagaaagtttgttgcggacggagtgttctttgccgaactgaacgaggttctgacacgtgaattggcggaggacggttactccggcgtcg

SEQ ID NO: 175729 - DNA, 302 bp, Glycine max
ctttggacatttcagcttatcggaagcttgcccggagttgtcatcctgatgtgaacaaagaacctggtgcagaacagaaatttaaagaacttagtaatgcatatgaggtcttgtcagatgatgagaaacgatccatatatgatacatatggagaggctggacttaagggttcaggaatgggcatgggggatttcagcaatccttttgacctatttgagacactgtttgagggcatggggggcatggggggaagcaaggatcttggaatggagcagttgagggtgaagatgagtattacagtc

SEQ ID NO: 175730 - DNA, 299 bp, Glycine max
caacaacttctgctacttcctactccaaccgcacttctgctccgcaattatcatgggcaaggtcaagatcggaatcaacggatttggaagaattggccgtttggtagccagagtggctctgcagagagacgatgttgaactcgttgccgttaacgaccctttcatcaccaccgattacatgacatacatgtttaaatacgacagtgttcatggacactggaagcatcacgatgtcaccgttaaggacgagaaacccttctcttcggtgacaagccagtcactatttttggacacagaaa

SEQ ID NO: 175731 - DNA, 293 bp, Glycine max
ccgaagaagaactctcttgaaggtcatcattctcggtgacagcggggtggggaagacgtctttgatgaaccagtatccttctgtttctgtctacatactccgtgttctttactttgcgatgcaatttgctttctattgtttagtactgcatgtaaactatgtattttcccctaacatatgtaatttaggtatgtgaataagaagtttagtaatcagtacaaggcaaccattggagcggattttttaacaaagaagtgcaatttgaagataggcttttcaccttacagatttgg

SEQ ID NO: 175732 - DNA, 295 bp, Glycine max
ccgaaacagtttccatctctctcacaaaatgacaacaatatcaaattgctccctgctcttcctcttcctcttcctctccaccctccacatagcttccaccctctcaacccccaccaacttcatcaagtcctcctgcagcaccacccagtacccagccctctgcatccagtccctctccgtctacgcctccaccatccagcaagacccccacgagctcgtccagacagccctctccctctccctcaaccaaccgaggccaccagaaccttcgtcgcagaatgcaacaaattcagag

SEQ ID NO: 175733 - DNA, 288 bp, Glycine max
gagaaggacgaggaggttgaggatttgagtttcgatggctccgggttgaactatgattctgatgacttgactgagagcaattataataatgtttctgagggtaatactgggaagaatggtggggttagttccaacgcgaacagcaccgtcatcaccggtttggatcaaaaagggaagaagaagggaatgcctgctaagaatttgatggccgaacgacgccgtaggaagaagctcaatgatagactcacatgttgaggtccgttgttcccaagattagccaaatggaca

SEQ ID NO: 175734 - DNA, 289 bp, Glycine max
gttctttgagaagagcaaggctgatccatctcactgggacaaaatctcccagggtggactcaagcgtattcatgagaagtacacatggcaaatttactcggacaggctcttgacactcactggtgtgtatggcttctggaagcacgtgaccatcttgaacgccgtgagagcaaacgttacctcgagatgttctatgctctcaagtaccgcaaattggctgagtctgtgcccctgctattgaagagaaattcatgtttgaagagaaccttcatggagaaaccggcttttg

SEQ ID NO: 175735 - DNA, 174 bp, Glycine max
tagcacaccagtcaaattcagcatacctgggataagccctggaatcatctttacaggtactccacttgaaatcgagttcgcagagaaaccttattgtgctgaatcctccaaatgggtggcgttcgtggacaatgaaatccaaaaggcatgtgtgggtattggtggtcctgaagg

SEQ ID NO: 175736 - DNA, 293 bp, Glycine max
gtttgagtgcagaaggtaaaaaagaaaatggtggtgaagattcgattggcaaggctcgggtgccggaaccacccattctatcgtgtggttgttacggatagcaaaacaacaagagatggcaagcaacttgaagttttaggtttctacaatcccgtcgcaggcaaggatgatgacaaaagaatgagcctcaaactggagagaatcaagtattggctttccgttggagctaagccttcagagcctgttagcatcttctatttagagcaggtttaggacaatctcatcaattccct

SEQ ID NO: 175737 - DNA, 291 bp, Glycine max
gtggcctttgcgccactttaaggagctacttgaagagcttgtagccattgctagggtaagcaaagggaagcaacggttcaacattgatctcacaccatttcgtgaataaaaaaaatggtgatggttttcagttattctgaatgtaatttctttaccattggtcttttaagattgttcaagggtgaatgcaaaactgtctcctctcacaagttccttataaggagagtttatcttaaaaatattattgatgatcaatgcatgttactctgaagtggtaacactataccaact

SEQ ID NO: 175738 - DNA, 289 bp, Glycine max
atctgcctggaggagagttgtttgccttgctatcaattctggtattagcactccaggtatgtctgctagtcttgcttattttgacacttacagaagggaaaggttgccagctaatttggtgcaagctcaacgagactactttggtgctcatacatatgaaagggttgacatagaggggtcttaccatactgagtggttcaagcttgccaaacagtcaagaaattagattactgtatttgagccatcaggattttcctaataaatgtaatattgtctgctcagactgtat

SEQ ID NO: 175739 - DNA, 286 bp, Glycine max
attttgtccatccaaaccttaaaaagattcagtgaagaacaacgttaatggcatctcttggtgtgcaagcagttcatcctcctccattaacatccacctccgacccacctcctctttttgatggcaccaccaggttgtacatcagttattcttgcccctatgcacaacgtgtatggatcgctcggaacttcaagggactaaaagacaagatcaatttggtccctataaaccttcaagacaggcagcttggtataaggagacagtctaccctgaaaataaggtgcca

SEQ ID NO: 175740 - DNA, 163 bp, Glycine max
tcaacacttggactctctccccattggttctgtcttggacgtgaaaggcccacttggccacattgaatacactggcagaggaaacttcctcgttcatgggaaaccaaggtttgccacgaggctagccatgttggctggtggcacaggaatcacacccatttac

SEQ ID NO: 175741 - DNA, 199 bp, Glycine max
ggaaatggggcttcaccaagtttagccgttctgattatctcaagttcaagtcagagaacagaattgtgcccgatggtgtgaatgcaaagcttcttgggtgccatggaccattggccaatcgtgaacctggaagagcctttttggatactgctactagttcttagtctgtcttttaatttggaaatactagacttttgga

SEQ ID NO: 175742 - DNA, 298 bp, Glycine max
tgcactctctcttttctctcttaacacaaaaaccctatcgttcttcgcggtttcgccgattctcgccatgccgaaagccaaatccgacgccaaagccgccgatagccggttgaagcgcaagggcgctggtgctggaaggaagcaatcgaagaaagctgctaaggatcctaacaagccaaagagacctccaagcgctttcttcgttttcatgtccgagttcagagagcagtttaagaaggagcatcctaacacaaatccgtcgctgttgtcggtaaagctggtggtgacaaatggaaat

SEQ ID NO: 175743 - DNA, 291 bp, Glycine max
ctcactaggaaaatctggcatacacggaactttaaaggacaggtcagcccacacgagtttctacaagcagtgatgaaagccagtaaaaaaaggtttcggataggtgcacaatctgatccagtagagttcatgtcatggctacttaatacgctacatgcagatcttaagacttcaaagaagaatacaagcataatatatgagtgttttcagggtgaacttgaggttgtgaaagagattcctaacaagtgatctctgataagaaagaaaacaatgctgagaaactttcagatg

SEQ ID NO: 175744 - DNA, 288 bp, Glycine max
gacctaggatttcggccgtttgctccccaaggaaagaagcagagtgtttcttttgaaatcagctagaaaagatgtcaggtgaagaggtagctgttgcagctgaggcacctgctgcttcaattccaggtgagccaatggacatcatgactgctctacagcttgtgctgagaaaatctctggcctatggtggtcttgcacgaggtcttcatgaaggtgctaaggtgatcgagaagcatgctgcaagctctgcgttctagcagaagattgtgaccaacctgattatgtgaa

SEQ ID NO: 175745 - DNA, 287 bp, Glycine max
caaaatgcgatcctcaagcattcgcagcttcaccatcttcaccctctttctcattgcgatcctcccccacggacacgcaacaactccaacctccaaacttcgcctcaaacctctctcttctcccttttcaaccgccctcgaaaccctccagaaacaactcgggtacaccttcaagagcatcgatcttcttcgtcgcgccatgacacacgcttccttctccgaagaaaacaacaaagctttcgcattctcggcgccacgtcatcgaaacctccgtctctttccatctg

SEQ ID NO: 175746 - DNA, 277 bp, Glycine max
gctaaaacgcagtctaatccagaaaatacagtgggagttctcacaatggcagggaaaggcgttcgtgttttggtcacccctaccagtgatctgggcaagatcttagcctgcatgcatgggctagatataggtggtgagatgaacctagctgctggcattcaggttgcacaactggctcttaagcatcggcaaaataaaaaacaacagcagaggattattgtctttgctggaaccctgtcagcatgaaaagaagatgttggagatgataggaagacag

SEQ ID NO: 175747 - DNA, 285 bp, Glycine max
aaagcttctctggcgcttgggcttagcataacccttacctttggtatagagaagaagaatagagagtgatggagtgcgtattcggattggtgggtaatggattcgcgatcgtggtggctgattcatcggcggtgcacagcatcctcgtccacaagtccaacgaggacaagatcatgcttctcgattcccacaaactcatcgccgctagcggcgagcccggagacagggttcaattcactggtacattcagaaaaacgtcgccttgtatcagttccgtaacggcat

SEQ ID NO: 175748 - DNA, 277 bp, Glycine max
ctggtggataacgaaatttcttagacaaaaaacaaggatcagaaacgttgaatcaagttgaggaagatggcactagtctctggaggaagatcaacactgaaccctaacgcccctctttacattcctgccgcgtttcgccaagtggaggatttctctccggaatggtggcagctggtgacgacgctgacatggtaccatgactactggctaagccagcagcacgatgagggagccttctaacggaggacgacgggtttgatggcaatgatgtcgttga

SEQ ID NO: 175749 - DNA, 157 bp, Glycine max
aagaaacttaatcgatcatcacttcacttcactaatacatcatggcagacgagacccagaacaagtatgagagctctgaggttgaggtccaggatcgtggtgtttttgactttctcggtaagaaaaaggatgaagaagacaagcctcatcctcagga

SEQ ID NO: 175750 - DNA, 290 bp, Glycine max
cacaggcgcagagcgtgatccattgacgaagatggtgcagcgtctcacctaccgcaagaggcacagctatgccaccaaatccaaccaacacagggtcgtcaaaacccctggtgggaagctcgtttatcagaccaccaagaagagggccagcgggcccaagtgccccgtcactggcaagaggattcaggggattccacacttgaggcctgcagagtacaagagatcaaggttacccagaaaccgtggactgtcaaccgtgcatatggcggagttttgtctggaagtgctgt

SEQ ID NO: 175751 - DNA, 284 bp, Glycine max
agaaggttcatccaatctccgaatcctttaatcgcattgcaaccatgtcgaggagaaaggtcagagagccaaaggaggaaaacgtgactcttggcccagctgttagagatggcgaacatgtctttggcgtcgctcgcatatttgcctcctttaatgataccttcattcatgtcactgatctgtctgggagggaaacgcttgtccgcatcactggtggaatgaaggttaaggctgacagagagaatcatctccttatgctgctatgcttgcagctcaggatgttg

SEQ ID NO: 175752 - DNA, 285 bp, Glycine max
gggttgaagatgtcgtgccaattgctaccggccacgagcgtgaggagattcaggccgatctcgagggaagggatattcttgaaataaaccatcccgtaggtccttttggcacaaaggaagcacctgctgttgttaaatcttactttgacagaaggatagttggatgcccaggagatgaaggtgaaggtgagcatgatgttgtctggttttggctggagaaaggcaagcctatagaatgccagtgtgctcacagtattttaagttggaagtggtcggccctggtgg

SEQ ID NO: 175753 - DNA, 281 bp, Glycine max
caaacagcatccgcggcagcgacgcgtaaccctccaacaacaacacttccgctgcgaaaaatgtctctggtggcgaacgaggatttccagcacattctgcgtgtgctgaacaccaacgtggatgggaagcagaagataatgttcgcaatgacctccatcaagggtattggaaggagattcgccaacatcgcttgcaagaaggctgatgttgacatgaacaaaagggctggtgagttgactctgctgagttcgatagtgtgatgactgtggtggcgaaccta

SEQ ID NO: 175754 - DNA, 280 bp, Glycine max
aaaaaatggcacctgcaacacagagtctctctctcctcctcctgttctcactctgcatcgccgcaaccgttagatcgagcgacacgactacgattgtgtgtacacggcctacgttagaaccggttcggtgttgaaggggggaacggactcgaagatcgggctgaagctgtacgacaagtacggctactacatctacattaaaaacatcgaagcatggggcggcttgatgggcaagggtacagctacttcgagcgcggcaacctcgacatcttcagcggaa

SEQ ID NO: 175755 - DNA, 281 bp, Glycine max
ctcgagccgctttgttcactcttcttctcttgcggctagggttttagcgcacttcttctagatttaaggaagatgggtaaggaaaaggttcacatcagtattgtggtcattggccatgtcgactctgggaaatccactaccactggtcacctgatttacaagcttggaggcattgacaagcgtgttattgagaggtttgagaaggaagctgctgagatgaacaagaggtctttcaatatgcctgggtgctggacaaacttaaggctgagcgtgaaagagga

SEQ ID NO: 175756 - DNA, 279 bp, Glycine max
ctcgaaatcaccttccgctttctctccattgttctctccgatccaagaccttactccaaccacagagaatggactcgcaggatagagtctcttatcacacatcaaattgaaatcattgccatactttgtgaagatgaggaacaaaattccgacacacgtggcactgcaccaaccgctgatctcagcaggaacaatagcagcgagagcagaagctacagcgaggcaagcctgcttccgcggttgccacgtggtacaaatccaggacgtagcgcagaggat

SEQ ID NO: 175757 - DNA, 277 bp, Glycine max
tccaaacaaccttctttctttttctgtgagcctttctttcaggttcttaacttgatcagtgtgcagtgtccaaatcataagggtagttgcaaattgcaatggctaagcatgatgttgagggtggttccttctctgcaaaggactaccatgatcctcctccagcaccgttgattgatgctgaggaacttcacacagtggtccttctacagggctttgattgctgagttcattgccacaatgtcttcctttacatcacagtgctcactgtgattgggta

SEQ ID NO: 175758 - DNA, 122 bp, Glycine max
gtgacgtctccgaatcctctgcgatggattatgtcgccggttatgcactggctctggatatgactgctagggaccttcaagctgctgctaagtctgcaggtcttccatggagtttggcaaaa

SEQ ID NO: 175759 - DNA, 258 bp, Glycine max
ggagcttcttactttcaaccactttcttggaacatccgtatgaaggttgctcttgatgctgctaagggtcttgcatatcttcatagcgatgaagcaaaagtgatatatcgagacttcaaagcttcaaatatcttacttgattcgaatacaatgcaaaactttctgattttggcttggcaaaggatggaccagctggtgataagagccatgtctctacaagggtaatgggcacatatggctatgctgctcctgaatata

SEQ ID NO: 175760 - DNA, 256 bp, Glycine max
caaacttgacgagagtgaagatgagaagaagaagcaagaggagttgaaggagaagtttgacaacctatgcaaggtgatcaaggatgttttgggtgacaaggttgagaaggttgtagtctctgaccgtgttgttgattcaccatgcttctggtgactggagaatacggttggactgcaaacatggaaaggatcatgaaagctcaagccctaagggacaacagcatggcaggatacatgtcaagcaagaagacaatgg

SEQ ID NO: 175761 - DNA, 255 bp, Glycine max
ctaaaatagcatgagtgtggatttgaacaaaactgcctccaacagtcatgataaaatggcaatatcagcagaacagcaggcaaagatcattgaggtgagagggttgatagggccactatctgataaggaatctgtgtactgttctatgcttccatctcaaggtatttaagggcacgaaattggaatgtcaagaaggcagctcaaatgttgaagcaaagcctaaaatggagaaaagaatacaagcctcaagagatc

SEQ ID NO: 175762 - DNA, 251 bp, Glycine max
agcggtgatactgttcaagtcataaggtgttcgtttctgaaatttgtggcacagcaagtgagcgatggggagagcttcaagggataagagggatatctattaccggaaagcaaaagaagaaggttggcgagctcgaagtgcgttaaactccttcagatagacgaggaattcaacctttttgatggagtgaagcgtgttgtagatttatgtgctgccccaggtagctggagtcaggttttgagtcgtaaatt

SEQ ID NO: 175763 - DNA, 246 bp, Glycine max
gtttgttgttgtaactcgttcttcttcttttgttgttctgtgtttgtgtgtgtctgttctctcacctgaaaatgtcttgctgcggtggtaactgtggttgcggaagctcctgcaagtgcggcaacggctgcggaggctgcaatgtacccagacttgagctacactgagtcaaccaccaccgagaccttggtcatgggagtggcacctgttaaggctcaatttgagggtgctgaaatgggtgtgccc

SEQ ID NO: 175764 - DNA, 251 bp, Glycine max
aggaagcccatttgtgtgcagggttcatattgccctcaagttgaagggagttcaatacaaatatgtcgaagaaaatttgaggaacaagagtgaactgcttctcaaatccaacccagttcacaagaaggttccagtgtttattccaatgagaagcccatagcagagtctcttgtgattgttgaatacattgatgagacatggaagaacaaccccatcttgccttctgatccttaccaaagagccttggctcg

SEQ ID NO: 175765 - DNA, 251 bp, Glycine max
gagagggagtcagagaaaccctaggtaagaagaaaagatgccggctggtcatggtttgagatcccgcaccagagattccttctctcgtcctttcaggaagaagggaaccatcgccctcaccacatacctgagaacctaccacgcggcgactatgttgacgtcaaggttaacggtgccgttcacaagggaatgccccacaaattctaccatggccgcaccggacgcgtctggaatgtcaccaaacgtgctgt

SEQ ID NO: 175766 - DNA, 253 bp, Glycine max
acacaacaacactctctcttctcgctcttggcttttcgctcttcactcactctcattcattcatttccaccgttcatggatccagtaagcgtgtggggtaacacgcccttggcgacggtggatcccgagatccatgacctcatgagaaggagaagcgccgtcaatgccgcggaatcgagctcatcgcctccgagaacttcacctccttcgacgtcatcgaggccctcggcagcgctctcacgaacaaatactc

SEQ ID NO: 175767 - DNA, 257 bp, Glycine max
ctctctccgagcttcactctcttttcgcctctgctaaagggtgaaaaatggagttctcctcctttctaggtcgtgttctcgttgcctcgctcttcatcctctccgcatggcagatgtataatgaatttgatgccaatggtggacccactcgaaagagttgattcccaaactcagtgtggtgaagaataatttatcctctatattgggggtagcgtaccagatattgatgcacggcaattcattgctaccatcatatt

SEQ ID NO: 175768 - DNA, 256 bp, Glycine max
gtgcgttgctgcggcaactaaaccattcatcaaattccaattccacagacacactacttctcttccgcttcttctgatggcaaaccaagcttcactctccttttcttcttccgtgtctcctgttcacgcgcctctcaagcgcgtggcacgcacaacggaagctttcattgcgacgaggccctcggctgcttcatgattcgcctcacgaacaaattcaacagcgccgaaatcgttcgctcccgagaccctcaggtgt

SEQ ID NO: 175769 - DNA, 251 bp, Glycine max
cgaccatttcaggaagaaagaagtgcaatggacatcggaacctatggctatcctacaccagcagtgaaaaagattgagtcttactatgatgtgccagagggagtggatattcggggaagatatgatgcagagtttgcaaaaacctcacaaaagatgctttgaaattcgttgctgacttgcaacgtgagttcaggaaccatatcaagtatgcattagagtgcagaagagaagcaaagaagaagtacaatgaa

SEQ ID NO: 175770 - DNA, 251 bp, Glycine max
actctgatgaagataaggggaagatggatattgatgatgatagttctgatgaaagtgaagagccacaaaagaaaaagactgtgaaaaatccaaaagaaagcagtgatagttccgaagaagacagtgaggatgaaagtgaggagaaccctccaaaactcctcagaaaagagacagggatgtggagatggttgatgctgcctcgtctggaaagaaagcgcctaagaccccagttacacccaaagaagatactg

SEQ ID NO: 175771 - DNA, 247 bp, Glycine max
tttggttacttgaaaatctcgaatcgcttaattttgatttagttttccaccgcaacgcggaacctctttctcgaactggctaactctcaggcaagtggctcggacgctgattccagcaacacgcggctggtggttgcactgatgacgccctaaactccggcgactccaacgccgtcgtcaagatcgtcgccgccgacctcgagtggtggttccatggtccgccctctcaccagtttttgatgcgcat

SEQ ID NO: 175772 - DNA, 249 bp, Glycine max
cggaaaaagaggattggagggtcgccacgtttagcaacaaccaaaccctctctactctttcttcttctcttcgctagggttttagcttcttcctcttcacttcgttcttctggcctctacaatgagcaacgacaaggacacctcaacgtcgctgatctcacttccgctctcaacgaggacaatagagcagaccttgtcaatgctctcaagagcaagatacagagtttggctggacagcattctgatatt

SEQ ID NO: 175773 - DNA, 247 bp, Glycine max
cggctcgaggatggctcaaccctccaagtgttccatgtgttcagcacttgttccccattcaggccctcaaaaccaatgtcatgggaagagagtgtcctacagctacaagccaaggaccaagccaggatgcagtacctttctacttggtggctaggaggtccattgtcgcaattgcctcagggagacaaatcacacagagccctacttacatagtgagggccaagtttggtaccccagcacagaccct

SEQ ID NO: 175774 - DNA, 248 bp, Glycine max
agttctagatggcaaaaccaagttcagctgatggtaggactagaagttctgtgcagatctttatagtagttggtctgtgctgtttcttctatattttaggtgcgtggcagagaagtggtttcggaaagggagatagcatagttggagattactaagactaacacagaatgtaatatagttccaaatttaagttttgattcccaccatggtggagaagttaacgaatttgatgaagctgattcaaagcc

SEQ ID NO: 175775 - DNA, 253 bp, Glycine max
atcgtggtggagaaatccacagtccctgtcaaaactgctgaagccatagagaagattctgacccacaatagcaagggaatcaaattccagattctatcaaaccctgaattccttgcagagggaactgcaatcaaagatctcttaacccagaccgtgttcttattggaggcagggaaaccccagagggccaaaaagctattcaaacattgaaggatgtttatgctcaatgggtcaccgaagaaagaatactgat

SEQ ID NO: 175776 - DNA, 255 bp, Glycine max
gttgattcggatctagagtcttcagtttctcctcgttgttcttcgattacctgtggtcaatttcgattctttcgttaatgtaataagatgtttgggagggcaccgaagaagagcgataatacgaggtactacgaaatcctcggctctccaagaacgcttcgcaggatgatctgaagaaggcttacaagatagccgccattaagaatcaccccgacaagggcggtgatcccgagaagtttaaagagctggcgcaac

SEQ ID NO: 175777 - DNA, 255 bp, Glycine max
tgcgaggaaggcggttggggcgggggaatcggttcggagatatcacgtgaacctgtctgttttcacgtccgttccagacgcgtggggaattgaacaggtgtttcccattatcccaattcaccgtttggacgaaaagccttcggtaggggtattctctcggacttgacttgtgacagcgacgggaagattgacaagttcatcaacggagagtccagcctgccgcttcatgagatggaaggaggaagaacttactat

SEQ ID NO: 175778 - DNA, 252 bp, Glycine max
  unsure (1)..(252): unsure at all n locations
atggagcaagggtaaagcaatctttgctagtggaagcccatttgatcctgttgaatatgaaggaaaagtttntgttcctggacaggccaacaatgcttacatatttcctggttttggcttgggtttgatcatttctggtgcatccgcgtgcgtgatgagatgctcttggcagcctctgaagctttggctgcacaagtatcacaggagaactatgataaggggctgatttaccctccattctcaaacatcaga

SEQ ID NO: 175779 - DNA, 251 bp, Glycine max
tgttgctgctcatcctccgtaacctccgagctctgcaccgaagaacgaagccatggggaagacacatggaatgggatctgctcgcaagctcaagtcccaccgcaggaggcaaaggtgggctgacaagtcatacaagaaatcatcttggaaatgaatggaagaaaccttttgctggttcatcccatgccaagggaattgtccttgaaaagataggtattgaggctaagcagcccaactctgccattcgtaag

SEQ ID NO: 175780 - DNA, 249 bp, Glycine max
  unsure (1)..(249): unsure at all n locations
gcttctncactttctctcgtttcaatcgaaaaaaatcatgggcagaanattcttcgtcggtggcaactggaaatgcaatgggaccactgaggaggtgaagaagattgtnactantttaaatgaagctaaagtccctggagagatgttgtagaagttgttgtgagccctccttttgtgttccttccttttgtaaaaagtntgctgcgccctgatttccatgtctcggcccaaaattgnngggttcgcaaa

SEQ ID NO: 175781 - DNA, 246 bp, Glycine max
gtaaggcactgtgttctacatgtgtttgcagttgtctgcatgcattgtaattttcaaagtccgctttatcaagctgagtcagtcaaataaattattccctctcattgctagtgggaatagatttgttcctgtatctaatgagcttttttatataatcgtctaaatataataacaatttacgtccaaaaaaaaaaattaaagggggggccgctgactagtgattccgtcgccccgggatttaattcc

SEQ ID NO: 175782 - DNA, 246 bp, Glycine max
caacctcttagtcccaattttctagggttttattcattttccgatggcttctgcagatgttgagtaccgttgctttgtcggtgggctcgcttggaccactgacgaccatgccctcgagagagccttctctcagtacggtaaatcgttgaaacgcagattatcaacgatcgtgagactggcagatccaggggttttggatttgtgaccttcgcctcggagcagtccatgaaagatgcgatcggagcg

SEQ ID NO: 175783 - DNA, 250 bp, Glycine max
cttcattctagcaattcgaattcccaatccaaaaccctaataccttcaaagaacctagtagtgaatcagtgatggcacctaaggcagagaagaagccagcggagaagaagccggtggaggagaagaagtcgacggtgggaacaaggctccggcggagaagaagccgaaggccggaaagaagcttccgaaggacggaggagccggcggagaaggggggaagaagacaaagaggaacaagaagagcgtggag

SEQ ID NO: 175784 - DNA, 248 bp, Glycine max
agagaaaaacagatagtgtgggagagagaagagcggaagagaaaatgacgaccaggttcaagaagaacaggaagaagagaggtcacgtcagcgccggacacggccgtatcggaaagcaccgcaagcatcccggaggtcgcgtaacgccggtggcatgcatcaccaccgtatcctcttcgacaagtaccatcctggtttcttcgggaaggtaggcatgcgctacttccacaaacttcgcaacaaattct

SEQ ID NO: 175785 - DNA, 246 bp, Glycine max
gaattagggcaattacgtttactagaagtggacaatagagtggtagtgccagctaaaactcatctgcgtgttattataacatcagctgatgtacttcatagttgggcagtaccttccctgggtgtcaaatgtgatgcttgcctggtcgtttgaatcagatctctacttttatacaaagagaaggggtttactatggtcaatgcagtgagatttgtggaactaaccatgcctttatgcctattgtca

SEQ ID NO: 175786 - DNA, 251 bp, Glycine max
cacaaattacactctttgcctcgcatcttcaacttaaccttttctactcataatcttaacaacttagctagaagaagatacaagatagagacaaagtgtgtgtgtgtgagagagagcaatggctggctcgtgggcacgccgtttctgattgttctggctatcatatccttcggatgtctatttgcaatttccattgctaaggaggaagccacaaaattggggacggtcatcgggattgatcttggaacgac

SEQ ID NO: 175787 - DNA, 249 bp, Glycine max
acggcaatggtctccaattctcactaatctccgtcctgtttccggtcttcgccaccgatcaaatactccgtttagctcctccggtgtaagagcacaggttgctactctggaggaagcaggaaccggagcaactcaaaaagggaatcgccggttgtagtggtgaccggagcttccagaggcattggaaaagcgattgcactgtcgttaggtaaagcaggttgcaaggttctggtcaactatgcaaggtca

SEQ ID NO: 175788 - DNA, 253 bp, Glycine max
cataagaccgatagctatgtggccttcaaggtgagaacaaccaatccgaagaagtattgtgttcgtccgaacactggtattgtcacgccacgatctacgtgtgatgttatcgttaccatgcaagcgcaaatagaggctcctgtgatatgcaatgcaaggataagtttcttcttcagagcgtaaaaactgttgatggtaccagtccgaaggatatcactgcagacatgttcaacaaggaggcagggcatgtggt

SEQ ID NO: 175789 - DNA, 251 bp, Glycine max
gttcttctttcctcaaccttctttcttcttatatatcgaacatggctaagtatcattcaagtgggaaaagctcttccatgactgctatagccttcctgtttatccttctaatcacttatacaggcacaacagatgcacaatcggggtatgttatggaagacttggcaacaacttaccaacccctcaagaagttgtggccctctacaatcaagccaacattcgcaggatgcgaatctacggtccaagcccag

SEQ ID NO: 175790 - DNA, 247 bp, Glycine max
ccaattttctagggttttattcattttccgatggcttctgcagatgttgagtaccgttgctttgtcggtgggctcgcttgggccactgacgaccatgccctcgagagagccttctctcagtacggcgaaatcgttgaacgaagattatcaacgatcgtgagactggcagatccaggggttttggatttgtgaccttcgcctcggagcagtccatgaaagatgcgatcggagcgatgaatggacagaa

SEQ ID NO: 175791 - DNA, 246 bp, Glycine max
gcaattttcatttttctctctcccttagtcaaagggattcatcgttcttcttcccaggttatttagaaaagcaaaatggtgaagatttgctgcattggtgctggatatgtggggggtcctactatggcagtcattgcattaagtgcccatccattgaagtcgctgttgttgatatctctaaatcccgcattgcagcctggaacagcgaccagcttcctatctatgaacctggccttgatggtgttg

SEQ ID NO: 175792 - DNA, 246 bp, Glycine max
gttagatctgtacctgcctagccattgatttggaaaagtccaagcttcaaagatgagtaagcttcagagtgatgctcttagagaagctatctcaggaatcatgactgattccaaggaaaagaacaggaaatttgtgggaccattgaactccaaattgggctgaaaaactatgatccccagaaggacaagcgttttagtggctctgttaagttgcctcacattcctcgccccaagatgaagatttgt

SEQ ID NO: 175793 - DNA, 244 bp, Glycine max
gaaaaatggggtgtttccatctcacagtgactagtctgtgctttgtagtggttgtggttggagtgcttccactctccttagatgcacaactagatccctcgttttacagagacacgtgtcccaaggttcactccattttcgcgaagtggtgaggaacgtttccaagaaagatccccgcatgcttgccagtctcattagacttcactttcatgactgttttgttcaaggatgtgacgcatcagtt

SEQ ID NO: 175794 - DNA, 243 bp, Glycine max
cagaatttctatctatctcttgtttcaatttcaacaacggttactccttttacgttttgagtttcaatcaagccatcatcatgtctaccgcatcgcaacccaaggccaagaaaacggcgtcgtccaagaagcccactctcaccctcccttcgccgtgatgatatcagaggcgattgcgagtctgaaagagagaaccggttcgagccaatacgcgataaccaaatacatcgacgggaagcacaa

SEQ ID NO: 175795 - DNA, 241 bp, Glycine max
aatccatatcattctgatcgcttcttactgtcaccgacagcacttgctggattaattaccatgttgcacgcatgcctagacatgaaagctattgtgttgggaaaatatcactatgttctctacttcctcgttttggcaatggccaaggatgttgttgactgtggatgagaacttgaagcctctatcagtgcctgttcgtgttggccaagcgtagatgttgttggacaagcggtcgtccgaa

SEQ ID NO: 175796 - DNA, 246 bp, Glycine max
ctcttctatctctgcttcttcgcaatctcagaacagaacacaacagagcccttcaactctctctgtcgttgatggcgtcacaagcgagcctccttcttcagaagcagctcaaagatctttgcaaaaaccccgtcgatggttttctgccggtttggtcgacgaaaccaacatttttgaatggagtgtaactataattggacctcccgatactctttatgaggggggatttttcaatgccattatgag

SEQ ID NO: 175797 - DNA, 243 bp, Glycine max
gggaaagtcttacccaaccgtgagcgctgattaccagaaggccgttgagaaggcgaagaagaagctcagaggcttcatcgctgagaagagatgcgctcctctaatgctccgtttggcatggcactctgctggaacttcgacgtgagctcgaagaccggtggtcccttcggaaccataaagcacccctccgaactcgctcacggcgctaacaacggtcttgacatcgctgttaggcttttggag

SEQ ID NO: 175798 - DNA, 246 bp, Glycine max
cttaaccccacccctctccggtctcaaagccagcgaccgcgactccgtgccatggaagcaaaactccagcctctccttctccagcccgaagcccctcaagttctccagaacaatcagagcagcagccgccgacgagccacagaggcaccagcaaaagtagaggctgcaccggtcgggttcaccccaccagaacttgacccaaacaccccttccccgatcttcgggggcagcaccggcgggctcctg

SEQ ID NO: 175799 - DNA, 245 bp, Glycine max
tctcacactgcaattccttcttctcccagaatcggtcactaaatccgcaatcatgaagctcgataccaccggtctcgaatcgtttcccacactgcttgcgcctcaaaacgacgtcgttggagaactctccgccgctcatccttcgaccttccgaattccaacgatttcgatgggtttgtgaaagaagctattcagatggtgaagcccgcgaagggtactacgactcttgcttttatatttaagga

SEQ ID NO: 175800 - DNA, 246 bp, Glycine max
cagaatttctatctatctcttgtttcaatttcaacaacggttactcctttttcgctttgagtttcaatcaagccatcatcatgtctaccgcatcgcaacccaaggccaagaaaacggcgtcgtccaagaagcccctccccatcctcccttcgccgtgatgatagcagaggcgattgcgagtctgaaagagagaaccggttcgagccaatacgcgataaccaaatacatcgaagggaagcacaagga

SEQ ID NO: 175801 - DNA, 247 bp, Glycine max
aagaaggtgtggatcgccgccggagacatcatcctggttggactcagggactaccaggacgacaaggctgacgtcatcctcaagtacatgcccgacgaggccaggctcctcaaggcctacggcgagctccccgacacctcgcctcaacgagggcatcggcgccggcttggacgaggaggacgacgccaccgccaacgactacatcgagttcgaggatgaggatattgataaaatctaatcaccctcg

SEQ ID NO: 175802 - DNA, 244 bp, Glycine max
ccagagagtgatacaatacagagtgcgttgttgctccttcgccacaactccctgccaacatgggtatctccagagattctatgcacaagaggcgtgccactggtggcaagaagaaggcatggaggaagaagagaatatgagcttggtcgccagcctgctaacactaagctgtcaagcaacaagacagtcaggaggatccgggttagaggtggaaatgtgaagtggagggcactgagattggata

SEQ ID NO: 175803 - DNA, 239 bp, Glycine max
ctcttagtcccaattttctagggttttattcattttccgatagcttctgcagatgttgagtaccgttgctttgtcggtgggctcgcttgaggcactgacgaccatgccctcgagatagccttctctcagtacgcgaaatcgttgaaacgaagattatcaacgatcgtgagactggcagatccaggggttttagatttatgaccttcgcctcggagcagtccatgacagatgcgatcgga

SEQ ID NO: 175804 - DNA, 241 bp, Glycine max
tattcttccattccgttctacatataatcattcataatgggtgttttcacattcgaggatgaaatcaactcccctgtggctcctgctactctttacaaggccctagttacagatgccgacaacgtcatcccaaggctcttgattccttcaagagtgttgaaaacgttgagggaaatggtggcccaggaaccatcaagaagatcactttccttgaggatggagaaaccaagtttgtgctgca

SEQ ID NO: 175805 - DNA, 245 bp, Glycine max
tgagattagaagtgctcgatccagtatatattccatgagaaacatactcaagaggctttccagtgtaaactacatgactctggagtttataacagcacttctactccgtgttagccagaaatcacttctcaataagtggatgctcggagccttgctatggaaatggcacctgttattatgtggcaaaaggaacggagacctgaattttatcatcaatattggaatcaggtgtcaaaaagtctttc

SEQ ID NO: 175806 - DNA, 248 bp, Glycine max
ctcatttatagtttactattgaaagatgggtttggtaatggcaatactgatcctaggcctgctggccatgttccttttggtctcctcagaggtggcatccgcgaattcaaaagaggtgacaaatggagttgaagatgcaatatcctggtggaggctatggtgggggttacccaggcaatggcggtggtggctatcctggccgtggtggtggctaccctggtcgtggtggtggctatccaggtcgcggt

SEQ ID NO: 175807 - DNA, 285 bp, Glycine max
gccaaacccgcaaggatcgtaccattacggtatgataaacacgacgaagacgatcatactggtgagttccgctggtcaagtaaatgggaaacaaagatacgcaattaacagcgtgtcttatgttgtcccagacacccctcttaagctcgccgattacttcaaaatctccggtgttttccgccccggaagcatatctgacagacccactggcggcggcatttaccttgacacatctgtgttacaagctgactacagaaattttgtcgagattgtcttccaaaacaa

SEQ ID NO: 175808 - DNA, 270 bp, Glycine max
gtccagaatgaatcatagggtttctgggaaggtgaagtggttcaatgatcagaaggggtttggattcataagccctgacgatggcagcgacgatctcttcgttcaccaatctcagatcaaatctgacggtttccgaagcctcgccgaaggagagtccgttgagttcgccattgaatctgaatctgacggacgcgcgaaggctgttgatgtcactggccccgacggcgccacgtccagggaaccagacgaggcggtgatggtggccgaact

SEQ ID NO: 175809 - DNA, 270 bp, Glycine max
ctgaaaaccctaaatctcagtttttcttatacagccactctttcattctcattgccgtcacacagagagagaagagacaatgaagtttaacccaagggtttcctcaagccgtcgaaagagccgcaaggctcacttcaccgctccgtcgagcgtgcgtcgcgtcctgatgagcgcgcctctctcgaccgatctccggtcgaagtacaacgtgcggtccattccggttcgcaaggacgacgaggtgcaggtggtgaggggaactacaagggc

SEQ ID NO: 175810 - DNA, 273 bp, Glycine max
aacatcttcacaaactagtaaatagtaatattattcttcgaatccattttattattcataatgggtgttttcacatttgaggatgaaaccacctcccctgtggctcctgctaccctttacaaagctctagttacagatgccgacaacgtcatcccaaaggctgttgatgccttcaggagtgttgaaaaccttgaggggaacggtggccctggaaccatcaagaagatcactttcgttgaggatggagaaagcaagtttgtgttgcacaaaata

SEQ ID NO: 175811 - DNA, 274 bp, Glycine max
tgcaagccgccgtgtcgttcctgacgaaccttgcccgcgccgctttcgggctgggcgcctccgcgaccctattgagctcctccctctacaccgtcgatggcgggcagcgcgccgtcctcttcgaccgtttccggggcatcctcgacgagaccgtcggcgaggggacccacttcctcatcccgtgggtccagaaaccctacatcttcgacatccgcacccgcccccacaccttctcctccgtctccggaacaaaagacctccagatggttaacta

SEQ ID NO: 175812 - DNA, 276 bp, Glycine max
cacgcggactctcacgaacgtggggcccgcgggaacttacaaagcttcagtaacgtcagatatggcttccgtgaaaatctcggttgaaccgaaagtgctgagtttcaaggaaaatgaaaaaaaatcattcacggtcacattttcatcctcgggttcgccacagcaaagagtgaacgcttttggaagggtagaatggtccgatgggaagcacgtggttggaaccccaatttcgattaattggggttgatgcaaggttgacattgatgatagcgggga

SEQ ID NO: 175813 - DNA, 270 bp, Glycine max
taaatttgctgcaaaattgagcaaccgttctgttattaccactgggttgggaagcacaagtgcaggattgactgttactgcagtgaaggatggaggggaatggatgttagaagctggggctcttgttttagcagatggaggcttgtgttgcattgatgaatttgatagtatgagggaacatgatagagcaactatacatgaagccatggagcagcagacaataagtgttgccaaggctggtcttgtaacaacactaagcactagaacaac

SEQ ID NO: 175814 - DNA, 273 bp, Glycine max
cttcggctccatcttctccgatctcctcaaactctatcagcgcagaaccaagcctctatcaccatggggaagacacatggaatgggagctgcccgcaagctgaagtctcaccgtaggagacaaaggtgggctgacaagtcatacaaaaagtctcatctgggaaatgaatggaagaagccttttgctggttcatcccatgccaagggtattgttcttgaaaagattggtattgaggctaagcagcccaactctgccattcgaaaatgtgccagg

SEQ ID NO: 175815 - DNA, 271 bp, Glycine max
caaactattagcaatttagcaccttctactactttgtaatcgttcaagagttgtgaactgtgaagaatgagttcaacaagccgtgcttggacttggagcgtggcagcaagtgttggagtggtggaggccttgaaggaccagggtatatgcaggtggaacagtgtgatgagatcagcacaacaacatgctaaacataatatgaggtctttgtctcaaaccaagaagttttcttttcaatcatctgcgatggcttctgccaaattgaaagatg

SEQ ID NO: 175816 - DNA, 278 bp, Glycine max
gaagaacctttccgatgaaaccgtgactgcaaactgtccaagagatgctttgctgaggttgatcaggaggatcaatccaaacatcttcatgcacggggtcgtcaatggcacttacaatgcaccatttttcgtgacaaggttcagggaagcactcttccacttctcatcattgtttgacatgtttgaagttaacgtgcctcgtgaagatccatctaggcttatgattgagaaaggggtgttcggaagggatgcaatcaatgtgatagcatgtgaggggg

SEQ ID NO: 175817 - DNA, 276 bp, Glycine max
gtttggtgtttgaatcgtgaaaatgttcagaaaccagtatgacacggacgtgacgacatggagcccggcggggaggctgttccaggtggagtacgcgatggaggcggtgaagcagggctcggctgcgatagggctccgatccaagacccacgtggtcctcgcatgcgtcaacaaggctaactccgaactttcatcgcaccagaagaagatcttcaaggtcgacaaccacatcggcgtcgccatcgccggcctcaccgccgacggccgcgtcctctc

SEQ ID NO: 175818 - DNA, 273 bp, Glycine max
ttgtgaactgtgtggcaaacgtgcttttttcaccttgaggaagacagagcagagagagactgaactaattggtggggctgatttgtatatgccggtttgtcgcctgcactacctgaacagccaagttgctgagaggagtgttctcgaatctcaaaattttaaaaccgattgattcccttcttgaggcagctgaagatgtttaagggttattgggaaattggcttgtatgtagcccaccatgtttaattgttcgactgatacatgtttttatct

SEQ ID NO: 175819 - DNA, 273 bp, Glycine max
gcaaattccagctggaattcctggaagtcttaaaaacaattaccatcgtgctgatgggcaaaactgtggcaactttcttactgatcggccatctaccaaggttcatgctgccccaggtggcggatcttccttgaattacctctttggtggtcctccagggaactaattcatcattgtgattcaaacctaccatgtgatgtatcatgtgtaaaatagatagctgcattgttttagtccagtggactttgtttcttgtgcaattgaacctcttga

SEQ ID NO: 175820 - DNA, 270 bp, Glycine max
agaactaggcccacaagtgtggagtgagaccaagtcaggggaggcaccccaaaagatggcaggtgcgagaccgaacaaggatgacagtaaggactcagatttctggaagatgcttaatgagccagaggaccaggccccaggaggggaggaggtgccggctgaggagcaggacccaagccctgaggcagcagattcagcttctggtgctcccaatgattttcagaacaacgtgcaggtcaaagtcattcgaagccctgcggatttgattcg

SEQ ID NO: 175821 - DNA, 267 bp, Glycine max
acaatttcgagaagcctttcctctatttggccaggaaacttgcaggtgatcctaacttgcactttgtggaatctcctgcattggctccaccagaagttcaaattgatttagctgcacagcaacaacacgaagctgagcttcttgcagctgctagtcagccccttcctgacgatgatgatgaatcttttgagtaaaattgtgctttttctgagtcgtgttactgcgtatgctatgatatgtattttgggggggtgtattgttgacatt

SEQ ID NO: 175822 - DNA, 273 bp, Glycine max
gcagggtttcccgaagatttaacacctatggctcctaaagctgatagtttaaagaaggctgatccaaaggcacaagccttgaaaactgctaaggctgttaagtcaggtgctactttaaagaaaaagaccaagaagatccgaacatctgttaccttccatcgaccaaagaccttgaaaaaggataggaaccctaaatacccacgcattagtgctccacccaggaacaagcttgatcactatcagatattgaagtatcctctcacaactgagtct

SEQ ID NO: 175823 - DNA, 279 bp, Glycine max
agaaagtgaaaaacttatcctatccgttatttgaagttctgttggtgagtgtgagtgagtgtatcaatcggccacacagaaatgggcagtgcttctctgattccagtttcctggttgccttggcggccactttctcctttcaagggaacggtgaaaaccttggtcgcaaaaccatggctgaagaagattcagcaagcaagacccctcatttccgtggttaacaaggctgcctctctatcttcccccgtgacagcacccagcgtcggcgttcggtttcgg

SEQ ID NO: 175824 - DNA, 278 bp, Glycine max
gcttgagactctgcgagatcttgagtcgccgatttgaaaagatgagtaagcttcagagtgatgctttgcgtgaagccatctcaggaatcatggccgattccaaggagaagaatcgcaaatttgtggagaccatcgaactccaaatcggtttgaagaactacgatccacagaaggacaagcgtttcagtggctccgtcaagttgccccacatccctcgccccaagatgaaaatttgcatgcttggtgatgctcagcatgttgaagaggcagagaagata

SEQ ID NO: 175825 - DNA, 274 bp, Glycine max
ctagttctagatcgcgggctgccgctcgcgcggctcgagacaaatcaaagccatggccacctccaacttctctattgttctctccgtctccctagccttcattttggtgctacttaccaaggcacactcgaccgataccgtttctttcaccttcaacaagttcaacccagtccaaccaaacattatgctccaaaaagatgctagtatttcatcctctggggtgttacaactcaccaaagttggcagcaacggcgtgcccacctcgggatctctc

SEQ ID NO: 175826 - DNA, 270 bp, Glycine max
ggtggtgtgatgactgtcctgatccctaggaacactacaattccaacaaagaaggaacaagttttctcaacatactctgacaaccagcctggtgtgcttatccaggtctttgagggtgaaagagcaaggaccagagataacaatttgttgggcaaatttgagctatctggcattcctcctgcacccaggggtgttcctcagattacagtgtgctttgacattgatgccaatggtatcttgaatgtctctgccgaagataaaaccactggc

SEQ ID NO: 175827 - DNA, 267 bp, Glycine max
ctgttctgtgttcagtcttcaaccacctcaacacatagacgacgcgccacttgtttttgctccaaaccgccctctgattcccgaacccaatgacttctccgctggtggcggagggcgccgccgtcacggcgttccgatcggtgatgctccgggtgcagcaggcggcggagagatccgggtccaaacccgaccgggtccgggtcgtggcggtttccaagacgaaacccgtcactctgattcaacaactctacgacgccagtcaccgac

SEQ ID NO: 175828 - DNA, 271 bp, Glycine max
agctcgtcctcgtcgacaccaactccgacaagctccgcggcgagatgctcgacctccagcacgccgccgccttcctcccccgcaccaagatccacgcctccgccgactcctccgtcaccgccggctccgacctctgcatcgtcaccgccggcgcccgccagatctccggcgagtcacgcctcaacctcctccagaggaacctctccctcttccgcgccattattccccctctcgtccgttactcccccgacacaactctcctcatcgtttc

SEQ ID NO: 175829 - DNA, 268 bp, Glycine max
tacagccgcaccttgattcagagcagagcgaccttgaagagctatggctgtcggaaagaataagaggatttccaagggaaagaagggtggcaagaagaaagccgctgatccctttgccaagaaggactggtacgatatcaaggccccttccgtctttcaggtcaagaatgttggcaaaaccctcgtctctcgtacccagggaaccaagattgcttctgaaggactcaaacatagagtgtttgaggtctcattggctgatctccaagga

SEQ ID NO: 175830 - DNA, 266 bp, Glycine max
gcggctgctacttcggctccatcttctccgatctcctcaaactctatcagcgcagaaccaagcctctatcaccatggggaagacacatggaatgggagctgcccgcaagctgaagtctcaccgtaggagacaaaggtgggctgacaagtcatacaaaaagtctcatctgggaaatgaatggaagaagccttttgctggttcatcccatgccaagggtattgttcttgaaaagattggtattgaggctaagcagcccaactctgcca

SEQ ID NO: 175831 - DNA, 266 bp, Glycine max
cactactgatgcctttttgggacccagatttccaccattctctgtaacttcacacactatataacagaaaatgagggggggcttatggcaactcgggcaatcaatcactcgccgtcttgcccagggtgataagaaggctgttgctcgtaggtattttgcctcagatgctgagctgaaaaagacagtcgtttatgacttccatgttgctaatggagggaagatggtgccatttgctggatggagcatgccaattcaatataaggact

SEQ ID NO: 175832 - DNA, 270 bp, Glycine max
tgactgctgaaatacagcaaaagattttgcatttgccaacatcttgggactggagaaatgttcatggtatcaattttgtcagtcctgttcgaaaccaagcatcctgtggcagctgctactcatttgcttctatgggtatgctagaagcgagaatccgtatactaaccaacaattctcagaccccaatcctaagccctcaggaggttgtgtcttgtagccagtatgctcaaggctgtgaaggcggcttcccataccttattgcaggaaagt

SEQ ID NO: 175833 - DNA, 267 bp, Glycine max
gaagcgtcttaataaacgctcttctctgaaaaacctgatttcttctcttcttctcttctctttcgtttcgatcttcgatctctgaaaatgagagagtgcatttcaatccacatcggtcaggccggtattcaggtcggaaacgcctgctgggagctctactgcctcgaacacggcattcagcctgatgggcagatgccaagtgataagactgttggtggaggtgatgatgctttcaacaccttcttcagtgaaactggggctggaaag

SEQ ID NO: 175834 - DNA, 267 bp, Glycine max
caagccaagtgaaagtgagaaaaaataaaaatcaaagagcataatgtcagggatcattcacaagattggggagacccttcatgtgggagggcacaagaaggaggaggagcataagggtgagcaccatgctggagaatacaaaggggagcaccatggtgaacacagtagtgagtacaaaggagagcatcatggtgaacacaaagctggagagtaccatggtgagcacaagccagagcacaaagaggggttcctagacaaagtcaagga

SEQ ID NO: 175835 - DNA, 265 bp, Glycine max
cccagttcaaaggtaaggtaggttaacactcttcttcatcgtcgtcgcaatgggacgtgtgatccgtgcgcacgtaagggagcaggctcggtcttcaagtcccacacgcaccaccgcaagggccctgcacgcttccggagcctggacttcggggagcgcaacggctacctcaagggcgtggtcaccgacgtcatccatgaccctggccgcggcgcgccgctcgccaaggtcgccttccgccaccctttcagatacaagaagcaga

SEQ ID NO: 175836 - DNA, 267 bp, Glycine max
gattatcctaagtctttgggaatagtgctgcaatggcttcaagtcaggaggaggtgacccttttgggagctactggaagcccatttgtgtgcagggttcatattgccctcaagttgaagggagttcaatacaaatatgtcgaagaaaatttgaggaacaagagtgaactgcttctcaaatccaacccagttcacaagaaggttccagtgtttattcacaatgagaagcccatagcagagtctcttgtgattgttgaatacattgatg

SEQ ID NO: 175837 - DNA, 264 bp, Glycine max
cccatggccaccacctccgcattcctcctccttcacctcctcctgctgctccacctcgccatcgccgctcacggcatcggcatcaactacggcacgctcggcgacaaccttccaccgcccgcggcggtggcgaacttcctgaagacgaagacgaccatcgaccgcgtgaagatctacgacgtgaacccggacatcctgcgggccttcgccggcagcggcatctccgtgacggtgaccgcccccaacggcgacatcgccgcctta

SEQ ID NO: 175838 - DNA, 266 bp, Glycine max
tgaaattcaatggcacccaggaaaatgtctgacacagaagattcttaagaaaaaacctaagaagggttcgaagaatgctaaaccaattaccaaaactgaaaattgtgaaagcttcttcaatttcttcaaccccccgcaagttcctgaagatgatgaagacatcgatgaagatgtggctgaggaacttcagaatcagatggaacaagactatgacatagggtccacaataagagacaagattattccccatgctgtatcatggttta

SEQ ID NO: 175839 - DNA, 264 bp, Glycine max
catcaattctctctcatactctcactactctctttgctctttgttttctccactatggctgcacaacgaaacttccaagactacttgcctgtgatggccaacaagcttggtggggatggcctaattgatgaactgtgcaatgggttcaatctgttgaaggattctgataaaggggtcatcacctttgagagcctcaagaggaactctgccttgtttggccttcagggtcttagtgatgaagatcttcggtccatggttttggaa

SEQ ID NO: 175840 - DNA, 269 bp, Glycine max
gaggaaccctagctagggtttggaagaagctgatccgagaagatggtgcagcgtctcacctaccgcaaacgccacagctatgctaccaaatccaaccagcacagagtcgtcaagactcccggtggcaagcttgtttatcagaccacgaagaagagggccagcggacccaagtgccctgtcactggaaagaggattcaagggattccacatttaaggccagcagagtataatagatcaaggttacacagaaaccgaaggactgtgaaccg

SEQ ID NO: 175841 - DNA, 268 bp, Glycine max
gaagagggggtcagagtgagaaagagaaagagagaattcgtaaaccctaatttcggaaagatcggcgatgactgcctccaaggatcgcgagaacttcgtctacatcgccaaactcgccgagcaggccgagcgttacgaagagatggtggaatcaatgaagaacgttgcgaatctcgacgttgaactgacggtggaggagcggaatttgctttctgttgggtacaagaatgtgattggtgctcgcagacgtcctggaggatcctgtctt

SEQ ID NO: 175842 - DNA, 266 bp, Glycine max
tgatgatgaccttgatctctttggcgatgagactgaggaagacaaaaaggcagcagaggaaagggaggctgctaagaagtctaccaagaagaaagagagtggcaaatcttctgttctgcttgacgttaagccttgggatgatgaaacagacatgaagaagctggaagaggctgttcgcagtgttgagatgcctggtctattgtggggagcatccaaactggttcctgttggttatgggatcaagaagttgcagatcatgttaacta

SEQ ID NO: 175843 - DNA, 272 bp, Glycine max
aatagaacttcacaactattgcacaagtgtgtatgaagaaggagatgctcgatctgctttgatcactatgcttcaatcgctccaccatgccaaaagtggcgttgatatagtttcagggacaagggtcaagacacactttgctagaccaaattggcgcagtgttttcaaacacactgcactcaaacaccctgggaaaagagttggtaagtactgatgttgctcttgattcatttttcaaattcattataccatcatatatatatatatatatg

SEQ ID NO: 175844 - DNA, 263 bp, Glycine max
ctctcaccaagggaactaacaagtttcgttgtgggcaaagtaagtggtgatccaatatgtcaaaaaatccaaaagttttctttgatattctaattggaaagatgaaagctgggcgagtggtaatggagttgtttgttgatgcaaccccaaaaacagctgaaaacttcagggccctctgcactggggaaatggggattggaaaatctgggaaacctttacattacaaaggttctgcatttcatcgtattattccagagtttatg

SEQ ID NO: 175845 - DNA, 262 bp, Glycine max
gagaagtgttataagctttgaatggaagccccggtaaacggcggcagtaactctaactgtcctaaggtagcgaaattccttgtcgcataagtagcgacctgcacgaatggtgtaacgactgccccgctgtctccgacatggacccggtgaaattgaattctccgtgaagatgcggagtaccaacggctagacggtaagaccccgtgcaccttaactatagcttcgcagtgacaaccttgatcgaatgtgtaggataggtggg

SEQ ID NO: 175846 - DNA, 260 bp, Glycine max
gcgcttttgatttgcaacggcttcaaggacgcggagtacatttctcttgccctggttgccaacaaacttgccctcaacaccgtgattgttgtggagcaggaggaggaggttgatttgatcgttgaattgagcaagaagctctgtattaagcccgtgattgggcttcgtgcgaacttcggaccaagcattccggccatttcggtgggacttcaggagagaaggggaagtttgggctgaccaccgctcagattcttagggtt

SEQ ID NO: 175847 - DNA, 262 bp, Glycine max
taagtttcaatttcaagcccttttctttttcttttttatttaaaattccaatttcgcgaaccccaaattccctccctccttttccctttctctctgttctgtaacgtagcatttacagcgatcagtttatagtgagtcacttagaggagttttaggtatcatcgatcatctatggcagggtacaagggcgatgacgagtacgattacctcttcaagctggttctgatcggcgattctggtgtggggaagtccaacctgcttt

SEQ ID NO: 175848 - DNA, 262 bp, Glycine max
caaagaatcaaagaaaggggtggtggctgcttcgaaagcttaataatttgtttatttccagaacatcatagttttcgcagcagcaaactaacaaattactcatatcatataataagatggcccgttctctctcgcaagccaaacgtattggtgtccttgttgctcaatctatctccctaattcccgttcatcggcgaggttacgcagtggcatccgatgtatcggtaagagttggattgggtaatattgggcgaaggaatgg

SEQ ID NO: 175849 - DNA, 263 bp, Glycine max
catcgtttcgcattgcacaagcactctctctttcccttaccctttttcaggtttcaacgctccaactatccatggcaaaccgctggctcagacccgaggtgtatccactgttcgctgcggttggtgctgctgttgggatctgtggattccaactggttcgtaatatctgcatcaaccctgaagtcagggtgaacaaggagggaaggaaggcaggagttttggagaactttgctgagggagagaagtatgccgagcacttcctg

SEQ ID NO: 175850 - DNA, 271 bp, Glycine max
cggctcgaggatcattctgcgcaggtaagacagagagaaagaactgacctcagcggcggcggcagcggcaacagaagaacaaccaccaccacacacaatgggtcgcgtgagaacaaaaacggtgaagaaatcctcccgccaggtgattgagcgttactactcgcgcatgaccctcgacttccacacaaacaaaaagcttctcgaagaagtggccatcatcccttccaagaggctgcggaacaagatcgcgggtttctccacgcatctcatg

SEQ ID NO: 175851 - DNA, 267 bp, Glycine max
aataaattcatgaagttgtttgcacaaggttcaaggctgaatttcctatctttgataaggttgaagtcaatgggaagaatgcagcgccactttataagtttttaaaggagcagaaagggggaatatttggtgatggtatcaagtggaacttcacaaagttcttagtaaacaaagaaggaaaggttgtggacagatatgcacctaccacctcacctctgaaaatcgagaaagacatagagaagctcttgcaatcttgaatagtaagat

SEQ ID NO: 175852 - DNA, 261 bp, Glycine max
gtttgatggtgccttgaacgttgatgttaatgaattccagaccaaccttgtgccataccccaggattcacttcatgctttcatcttatgctcccgtgatttcagctgagaaggctcaccatgagcagttatcagttggtgaaatcacaaacagcgcattcgagccatcatctatgatggccaagtgtgatcctcgccatggaaaatacatggcttgctgtctcatgtaccggggtgatgttgtgcctaaagatgttaatgc

SEQ ID NO: 175853 - DNA, 257 bp, Glycine max
ctccttcagaatcccctttcccagttcccaacttcatttcaaatcaatatgaagaaaattgtgataaagtaggaaatacctgacgacaaaaccaagataaatgccatgatggcagtatctggtattttaggggtggagacagtctcagtggacatgaatgacctgaaaatgactataattgggaatgttgatgctgtaatagtagttggcaagcttagaaaatgttgtgatcatgctgatatactatcagttggacc

SEQ ID NO: 175854 - DNA, 258 bp, Glycine max
ccccaatcgtagccgtcgcactttgcgttttctgcgtcatctccgattccccgacaatggccacccaaatgagcaagaagagaaagttcgtagctgatggagtgttcttcgctgaactgaacgaggttctgacaagggagttagccgaggacggatactccggcgtggaagttagggttacgccgatgcgcaccgaaatcatcatcagagccaccagaacccaagccgttctcggtgagaagggaaggagaatcaggg

SEQ ID NO: 175855 - DNA, 261 bp, Glycine max
attataaccaaacactcttcttcatattcttcttcttcttgttcttgttctatctgtgacgagcatcatggcctcgagagcagtgctattgttggctatgtgtgtgcttccggccatggttgtggccattcgcccagcaaagaaccctttttgcgtgaagggtcgcgtctactgtgacccttgccgtgctggttttgagacctcagcaaccacctacattgccggtgctgagattatgttgcaatgcaagagcagggttag

SEQ ID NO: 175856 - DNA, 256 bp, Glycine max
gtgagataagctgccatgtcgatcttgtccgttccgtcaccaacacagcgttgttccatttcgatttctcggctgccattgccattgccattgccgtttcaattgcaagtaagaagaagagcaaaagggggaaaagtggtaatgagcatggaggcaggtattggagtgatgggcaccaagttgggtatgatgagctatttcgaatccgacggagaggttgttcctgtcactgtcgtgggtttcaaagaaggcaaca

SEQ ID NO: 175857 - DNA, 259 bp, Glycine max
ctaacatcttctcacaacagcatcactaatccttttcctttgtgtttattttccatcttccattaatatgggtgttgttactcagatttatgatacccctgctgctgtgcctcctactaggcttttcaaagccatgacattagatttccataacctcttcccaaagcttgtggatagcatccacagcattgttttcacccaaggaaatggtggtcctggcaccatcaagaagatcaccaccattgaaggtgacaaaacc

SEQ ID NO: 175858 - DNA, 262 bp, Glycine max
actcgagccgaatcggctcgagctcacaaacgcacactgaattcaaaaacatcgaaagagagacggcatggccgagcaaacctatcatcatgatcaagccagatggcgttcaaagaggccttattggcgagattattagcagatttgagaggaagggtttttacttgaaagggttgaaactcgttactgtggaccgtccttttgctgagaagcactatgctgatttgtctgcaaagcctttctttagtggtttggtggatta

SEQ ID NO: 175859 - DNA, 304 bp, Glycine max
atcgctcactattgatccgattccaccgtcatcggatctttctgcagccaccgtctatcgcacttcgttgccgtcattggcgccggaattctgaatgttaatgaatttgagcaagtaatgatgaatggaagagctatccaataacatgacatgatatgcaaattcttgtatacttgattgttaagacagcttaaacaatacaaggatgttttcgctgttttatggactatggaagtacttgttcagcaagatggagcttcatgtactcattctggggattgacaaggctggcaaaacgactttg

SEQ ID NO: 175860 - DNA, 299 bp, Glycine max
ccacgtagcaagctagatacacaagcctacggtgatcatacctgtataataacaaaacaacatttggaacctaacttgggtgggctcactgttgagcaggctatccagagcaagaagctgttcatcttagatcaccatgactatctcattccatatttgaggaaaataaatgcaactaccacaaagacttatgctaccagaaccatatttttcttgaaaagtgatggaactttgacgccattggccattgagttaagtaagccgcatcctcaagggtgagaatatggtcctgttagcga

SEQ ID NO: 175861 - DNA, 293 bp, Glycine max
cttttaaattgtaggcactgaataatctagggagtgtctatgtagactgtgataaactggaccttgctgctgactgctacatgaatgcactcaacatcaagcatacacgagcacatcaggggttggcacgtgtatatcatcttaaaaatctccggaaagcagcatatgatgagatgacaaagctaatagaaaaggctcggagtaatgcatcagcttatgagaaacgttcagaatattgcgaccgtgacatggcaaagagtgatcttagtatggcatcacaattggatcctcta

SEQ ID NO: 175862 - DNA, 284 bp, Glycine max
aatactaggtagtattgggatcattacagtatttggatgggcttacatcttggcacttacattcagcattcaggattttggttacctttatgatccaaacaatgagactgctggagcatttgttccagcacaaatactctatgatgcattccatgggagatatcacaattctgctggagcaatcattctactatttgtcatttggggttcattcttttttggtgggctttcaattactacaagtgctgccagagtggtttatgctttgtctagagacaagggag

SEQ ID NO: 175863 - DNA, 292 bp, Glycine max
gtaaagtttgatccttctgatgtagaactcttagaacatttagcagcaaaatgtggcattggaaacactcagcaacacatgtttatcaatgagttcatcccaacactggaaggagaccaaggaatttgctacacacatccggaaaatcttccaggtgctaagaaagatgggagttatgtccatttctttcacagaacaaccaatgcatatgctactggtcaacgaaagcgtcgaaagattcatcatcaacagggtttgactgaagagcatgtgcgctggcataagactggca

SEQ ID NO: 175864 - DNA, 289 bp, Glycine max
ctccttcgccacaactccctgccaacatgggtatctccagagattctatgcacaagaggcgtgccactggtggcaagaagaaggcatggaggaagaagagaaagtatgagcttggtcgccagcctgctaacactaagctgtcaagcaacaagacagtcaggaggatccgggttagaggtggaaatgtgaagtggagggcactgagattggatactggaaattactcctggggaagtgaagctgtaactcgcaagactcgtatactagatgtggtttacaatgcctcaaa

SEQ ID NO: 175865 - DNA, 291 bp, Glycine max
ttctgcgcaccgaactgaaccaaacgacaatggaagcagcggaaaacgacagcgtcgtactcgaaacgacggagccttccagttcccacggttccgacggcgacgatcacctccgacagagctccgacgtgctggccaaaggcttgtcttcgatgctctcttcggtgattagcgatttcgatttcagagctcagcaaactctccaaagccagaaccacctctcttccgtcatcgatcgtctcaccggagaacttgatcagttacttgaagatgcacctttaccattcataa

SEQ ID NO: 175866 - DNA, 292 bp, Glycine max
attgttgaaaagaaaccctagcaagtggagcaatggcagacgttgaagtcgatgtggcggcagcagcagcagcagggctgccgaagaagagaacgttcaagaagttcagttttcgaggcgtggatctcgatgcacttctcgacatgtccaccgatgaactcgtcaagatgttcagtgcccgcgctcgtagaaggttccagagaggcctcactagaaagcccatggccttgatcaagaagctccgtaaagcgaaaagggaagctccaccaggtgagaagccagaaccagtacg

SEQ ID NO: 175867 - DNA, 301 bp, Glycine max
tcggctcgatgattagatggcgagagcggactgctggcctcatccattctggcaatgagattttggagacatacacttattacccagatgccagtcttcaagagagagaacatgttttggaacagcaaactgtgttacgacaacttgagtcaatattgtctattcacaaattagtaaggcttggacattatgttgatgcattaagggaggttgctaaacttccatttattcctttagacccccgaggccctgacattgctgttgatgtgcttgaaaatttatctcctcatgtccaagcttg

SEQ ID NO: 175868 - DNA, 289 bp, Glycine max
gtttgagtgaaaccctagctagccacaatgcagatattcgtgaaaaccctaacggggaagacgataaccctagaggtagagtcttcggacacgatcgacaatgtgaaggcgaagatccaggacaaggagggcatcccgccggatcagcagcgcctgatcttcgccggaaagcagctggaggacgggcgcacccttgccgactacaacatccagaaggagtccaccctccacctcgtcctccgcctccgcggcggcgccaagaagcgcaagaagaagacctacaccaagc

SEQ ID NO: 175869 - DNA, 288 bp, Glycine max
attaagtgcccatttcttcttgtagtggttattagaggatttgctcgctatcatatcacagtatatatcttcttatttgtttaatttttatgtttcttaggtgaattactcaagagggctcgacaatcccacaaagtagaaaaagaggttatgttatggcgggcaaaggtgttagttcggtggctaaggcggtagcagaatatcagtatccttggcgtgagaagttggggaaatataaggatgagcttgccaagggtgtgtggggatactgggagctgggggcatgga

SEQ ID NO: 175870 - DNA, 285 bp, Glycine max
cttagtcaaagggattcatcgttcttcttcccaggttatttagaaaagcaaaatggtgaagatttgctgcattggtgctggatatgtggggggtcctactatggcagtcattgcacttaagtgcccatccattgaagtcgctgttgtttatatctctaaatcccgcattgcagcctggaacagcgaccagcttcctatctatgaacctggccttgatggtgttgtgaagcaatgccgtggcaagaacctcttcttcagcactgatgttgaaaagcatgtctttga

SEQ ID NO: 175871 - DNA, 284 bp, Glycine max
ctgaaagatagtgaacacctagcagccatgattgataatgtatcttctgttgataacttggattttatcatggaaagtgatgctcttggacataaagttatggaccagagacaagggcatgaaagtttacttgctgttgctgggacagttacccttgaggaggtcaattctgttggtgccaaggtgttagaatttatagctgattttgcaaagcctactgcaccacttcctgcagcaattgttgcttgtgttccaaaaaaagttcacaatgagggagctggtga

SEQ ID NO: 175872 - DNA, 286 bp, Glycine max
aaaccatttgagcaatttatataaattataagttaaactaaacttaacacttacgaacagaaacaacaaacacaattcagcttctcctccgaggaaacgctgctgacatggcgttcgggtcttccgaggatgtctcaggtgtcaaattgcttgtacttctggcggttatgtacggactcttctcggcgctgacatactccgtcatccacatgaagttcgtgaagcctctcgggaatgacgcgccgctcgatcgattctctgaagccagaaccgtacaacacgttcg

SEQ ID NO: 175873 - DNA, 286 bp, Glycine max
  unsure (1)..(286): unsure at all n locations
tgctgntggtggctccaatatgcattattttgaccttcttatcagactaaaatctgaacaagagcatctcttccgtaatattcagagaaatgagtaccacaatttgtatgaatttatcagttcaaagggcttgaaaattatgaacttaggagatgcccaacctactgttggtataaagaaggttctnnnnnnnnnnnnnnnnnnnnnnnnnnnnccacatcttgagcgcataaaaaatgaagctggtgaagatgaaagtgatgaggaggattctgattttgttgcg

SEQ ID NO: 175874 - DNA, 268 bp, Glycine max
cttcttctgtttatcgcatcgcgtattggttggtcgataaacaaagagtgtgtgttgtgtggtttggtttggtttttcacttttcttcatctttttgcgagaagacacacacacagagagagatggctacgacgaggattgaggcatagaagaagccgaagacgaagatcgtgtgcactctgggccccgcatcacggtcggtcccaatgatcgagaagcttctgcgagcaggcatgaacgtggcgcgcttcaacttctcccatgggtc

SEQ ID NO: 175875 - DNA, 286 bp, Glycine max
gcgactctctttccttccctctttttccgaatctgaatcgaaatggcttcggagactgagacgtttgcttttcaggccgagatcaaccagctcctcagtctaatcatcaacaccttctacagcaacaaggagatctttcttcgtgagctcatcagcaatgcctctgatgctttggacaagattcgatttgagagtcttacagacaagagcaagcttgatgctcagccagagttgttcattcacattattcctgacaagaccaacaacacattgtctatcattgaca

SEQ ID NO: 175876 - DNA, 283 bp, Glycine max
aaacaaaccaacttatcctccttcttctcactctctggattcgattcaaaagaaaaagcttatcctctgtcactcatcttcttctgccaaaaccaatgccaccacccattctctagtttctaacacactctatttcaacaaccatgtcactatacgacgccgctttcgtcgacacagagctctccaaacgcacttccatcttcggcctccgcctctgggtcgtcatcggcatcctcgtcggatccctcatcgtcatcaccctcttcctcctctccctctgcct

SEQ ID NO: 175877 - DNA, 284 bp, Glycine max
aacacaaggcagaaagcaagctcatcctagagttttaaaaatggcagcagcctcctccatggctctctcttccccatccttggctggcaaggccgtgaagctgggcccatcagcccccgaagtcgggagggtcagcatgaggaagaccgtcaccaagcaggcctcctccggaagcccatggtacggcccagaccgcgtcaagtacttgggcccattctctggcgagcccccgtcctacctcactggcgagttcccaggtgactacggctgggacactgctgggc

SEQ ID NO: 175878 - DNA, 288 bp, Glycine max
gaagcccatttgtgtgcagggtccagattgcccttaagttgaagggagttgaatacaaatttttggaagaaaatttgggcaacaagagtgatttgcttctcaaatacaaccctgttcacaagaaggttccagtgtttgttcacaatgagcagcccatagcagagtctcttgtgattgttgaatacattgatgagacatggaagaacaaccccatcttaccttctgatccttaccaaagagccttggctcgtttctggtccaaattcattgatgataagattgtgggtg

SEQ ID NO: 175879 - DNA, 285 bp, Glycine max
cggttagaagtgggggaatggaagagaaatactcaagcctggaaattgtggaggagagcccaaactcgggtgtgttctttcttatcttaaatcgtccgtcacgacggaacgctctctcgcgcgaattcttcagcgagttcccgaaagctctgcacgcactggatcacaacccggaggtgaaggtgatcgtgttgtccggcgccggggaccacttctgctccggcatcgacctctccctcctgggatcaaccgccgcgagttcgggttcatccggctccggcgaaa

SEQ ID NO: 175880 - DNA, 287 bp, Glycine max
tatcgagccgattcggctcgagtttggggtttctctcgctaaccaattaggaactagggttatacagaatacaagctctctatctctctcgtcggttttcgtcaatcaaatccaatccaatatcaaatatgagtcgtcatcccgaggttaagtgggctcagaggcttgacaaggtctatatcacggtgcaattggctgattcaaaaaatgcaaaagtggatcttacgccagatggtatttttaccttctccggtagtgctggtgctgaagaccatcagtatgagcta

SEQ ID NO: 175881 - DNA, 287 bp, Glycine max
tacttccttcctcgtttcgttaaccttctaattcaatccattcctcacttccttttcaaccgaagcttttctccgataatcgcagagagaaagaataatggattggggaaacgtaaccgcggaggatctgatcgacgcgctccgcgaggtcgattggtcgtcgccgccgcgcccgctgtcggaattcttctcgcgattcactgttcccagatcttcctctaaatggaacagccgcctcaaatgcaacctctactactaccggaccaactacttcattttgattgttt

SEQ ID NO: 175882 - DNA, 280 bp, Glycine max
gcgaagaggcgcaccgtagcagtaactcgtggaattgctagcaatggcgaggatcaaggtttacgagctgaggcagaagacgaaggctgatctgttgaatcagctgaaggacctcaaggccgagcttgccttgcttcgtgttgctaaggtcaccggcggtgcacctaacaagctctctaagatcaaggtggtgaggttgaacattgcccaggttttgacggtgatttctcagaagcagaaggccgcgttgagggatgcctacaagaacaagaagtacttg

SEQ ID NO: 175883 - DNA, 277 bp, Glycine max
ccgggttcacgtttcacaatcactttttgcgcttctctcactcactcactcttcttcttcctcttcgtgtggttttctttctcgaactcgaacgaagatgcgtgagattcttcacatccagggagggcaatgcgggaaccagatcggagccaagttctgggaggtggtgtgcgcggagcacgggatcgattcaacggggaggtaccaaggggacaacgagttgcaactcgagcgagtcaacgtctactacaatgaagcgagttgcggaaggttcgtg

SEQ ID NO: 175884 - DNA, 284 bp, Glycine max
cttcccttctccaacatgccaaacgacagcgttctgagtcttttattcttcgttaccctcttcacatgccttctctctgctacttcccacgatgaccatattttcctaccgagtcaactccatgacgatgactcagtgagttgcactgcaaccgacccaagccttaactacaagccggtgatcggaatcctgacccaccccggcgacggtgcctctggccggctcagcaacgccaccggggtttcttacatcgccgcctcctacgttaaattcgtggagtccgg

SEQ ID NO: 175885 - DNA, 283 bp, Glycine max
gttggatctggatatgatgcacctgaagttgccttgtctggtcagtatactttgaaaagtgatgtctacagctttggagttgtcatgttggaacttctcagcggacggaaaccatttgatagctcaaggccaagatctgagcagtctttggttcgatgggcaacacctcaactccatgatattgatgcattggctaaaatggttgatcctgcaatgaaagggctatatcctgttaagtctctttctcgatttgccgatgttattgctctttgcgttcagccgg

SEQ ID NO: 175886 - DNA, 287 bp, Glycine max
cacaaacacatcgcaactcaagaaatgaaactagcttggtcaccagagagagcatccaaagcatacatcgacacagtccaatcttgccaggttttccgcgaatccggagtggcggagtttatttcggccatggcggcggggtggaactcgcagctcatagtggagacgtggtcgcagggaggacttattgccaccagcgtgggattagccctggcgaggtctcacacgtgcggaagacacgtgtgcgtagttcccgacgagcgggcgaggtcggagtacgcggagag

SEQ ID NO: 175887 - DNA, 282 bp, Glycine max
cacagttctactctacgctctaaaccctctctctctctctctctcgatctatcatggctttgcccaatcagcaaaccgtggattaccctagtttcaaactcgtcatcgtcggtgacggcggtacaggaaagacaacgttcgtgaaaaggcatcttaccggtgaattcgagaaaaaatacgaaccgaccattggagtggaggttcacccattggatttcttcacaaactgcggaaagattcgcttctactgttgggatactgctggacaagagaagtttggtg

SEQ ID NO: 175888 - DNA, 286 bp, Glycine max
ttcgaggctgggttcagagaattcaaggatgattcggaaatcgaggatgttgatgacgaggacgatgaagacgaggaggagttgaagaagaagccctttgggttctctcgctccagcaacaaggctgcttctaagcctctctctcgtggatcagcaactgtggaatcaaaggggcaagctgagaagtgtgccaagagaaagaggaagaaccagtatcgtggaatccgtcagcgtccatggggaaagtgggctgctgagatccgtgacccaagaaagggggttcgtg

SEQ ID NO: 175889 - DNA, 284 bp, Glycine max
aagcaggcgagttgagagagaatgggaaggaagaaggggtatgttgagttcgaggagtcgccgccggacgatttcgatccggcgcatccgtacaaggacccggtggcgatgctggagatgagggagcacatcgtgagggagaagtggatccaaatcgagaaggccaagatcattagggagaagctccgatggtgctaccgcatcgaaggcgtcaaccacctccagaagtgccgccacctcgtcaaccagtatctcgagtccacccgcggcatcggttggggcaa

SEQ ID NO: 175890 - DNA, 282 bp, Glycine max
taaaaccacctccgaatccgacgtctctgtccactcaaccttcgcttctcgatatgtcagaacttcgcttcccaggtttaagatgccggaggagtcgataccaaaggaggcagcgtatcaaataataaacgatgagttgatgttggatgggaacccaaggttgaacttggcatcatttgtgacaacctggatggagccagagtgtgataaactcatcatggctgccattaataagaactatgttgacatggacgagtatcctgtcaccactgagttacagaa

SEQ ID NO: 175891 - DNA, 277 bp, Glycine max
ctttccctacgaaagcaaattcttcaatttaaacagagaaataaaatcaccaccttcaaagtcttctctctcgagaatcatcgaataaaactagggtttccgatcgtcgtcgaggagaatgccgaagaacaagggaaagggaggaaagaaccggaagcgcgggaagaacgaggcggacgacgagaagcgggagcttgtgttcaaggaggacggccaggagtacgcgcaggtgctccggatgctggggaacggccgctgtgaggcgatgtgcatcgac

SEQ ID NO: 175892 - DNA, 279 bp, Glycine max
  unsure (1)..(279): unsure at all n locations
gtttccacacccaagtgaagaagcaaganctcgaattctacagatccattcgaggaagatgaatgttcacccagatgtcaactttgaagaacttgctcggtccacagatgatttcaatggagctcaactgaaggctgtttgtgntgaggctggcatgttggctctacgccgngatgcaactgaggtgaaccatgaggacttaatgaaggtattattcaagtccaagcaaagaagagagcaagcctcaatattatgcataggctggattttggaacaagc

SEQ ID NO: 175893 - DNA, 280 bp, Glycine max
ctgcaaagacatatttggaacgcaggtttgagaattttgtgggctcttcacgagaagatctgatcaaagatgcacttattgcaactagggagtccttgcaaggtgaaaaactcaggagttctgtgtgcacaattgctgtggttggtgttggtgagccattccacattttggatcaggaaactgttcaacagttgattgatacttttgagattgtgaaggaggaagaagctgctccagctgaagaagaagctcagccagcagccgaacaggatgctccaac

SEQ ID NO: 175894 - DNA, 272 bp, Glycine max
agagtttgttgtgagctataagctagtttatcgtgaggagaatatgaagttgtttgttttctttgttgctgcagtagttttggtagcatggccatgccatggcgcaggctaccaaaggttccctctccgaatgaaaactggctatggtgagcgttcttcggaggtaaaatgcgcaagttttaggcttgctgtggaagcacacaacatccgagcctttaaaaccattcctgaagagtgcgttgaaccaacaaaggactacattaatggcgaac

SEQ ID NO: 175895 - DNA, 281 bp, Glycine max
gcttgggccactgacgaccatgccctcgagagagccttctctcagtacggcgaaatcgttgaaacgaagattatcaacgatcgtgcaactggcagatccaggggttttggatttgtgaccttcgcctcggagcagtccatgaaagatgcgatcggagcgatgaatggacagaacttggacggccgtaacaatactgtcaatgaagctcagtcccgcggtggcggcggcggcggcggaggaggaggatacaatcgtggtggcggtggatatggtggtcgtag

SEQ ID NO: 175896 - DNA, 241 bp, Glycine max
cttcttctgtttatcgcatcgcgtattgactggtcgaaaaacaaagagtgtgtgttgtgtggtttggtttggtttttcacttttcttcatctttttgcgagaagacacacacacagagagagatggctacgacgaggattgaggcagagaagaagccgaagacgaagatcgtgtgcactctgggccccgcatcacggtcggtcccaatgatcgagaagcttctgcgagcaggcatgaacgt

SEQ ID NO: 175897 - DNA, 285 bp, Glycine max
cagcgaaacgctcttcgttatcttttctcagactccgcggcgtagatccgaggagttcgggaaatcctaactcatcatctcaactcaagtcatggctggacttgcacctgagggatcacagttcgatgctcgtcaatatgattctagaatgagtgacttactttcatctgatggacaggacttcttcacatcctatgacgaggtttatgatagttttgacgctatgggtttgcaggaaaatcttctcaggggaatttacgcatatggttttgagaagccatctgc

SEQ ID NO: 175898 - DNA, 285 bp, Glycine max
gttggatgcatttctatttctaactaattattgtgcttattattattgttgagaaagaaaagaatggcaaagttaataaaattctttgagttgaacacaggggccaagattccttctgttgggttaggcacttggcaagctgagcctggtgttgtagccaaagctgtcaccacagccattctggttggatacaggcatattgattgtgctcaagcgtataacaatcaagcagagattggttctgctcttaagaagctttttgatgatggtgtggtgaagcgtgaa

SEQ ID NO: 175899 - DNA, 280 bp, Glycine max
gacgttattgtctccccaaatcaaatgttctgtgctggcttctttcaagttggtgaaaatgccttctcctttgccatatggttcaacgaccctcacactcacaacaacaaccacaccgtggtttggatggcaaaccgtgaaacacccgttaatggaaggctatcaaagctttccctcttaaacagtggtaacatggtcttggttggtgcaggtcaaatcactacatggtcatcaaacacagcatcagatgctccagtaaagttgcatctccaagatgatg

SEQ ID NO: 175900 - DNA, 272 bp, Glycine max
acacaacaacactctctcttctcgctcttggcttttcgctcttcactcactctcattcattcatttccaccgttcatggatccagtaagcgtgtggggtaacacgcccttggcgacggtggatcccgagatccatgacctcatcgagaaggagaagcgccgtcaatgccgcggaatcgagctcatcgcctccgagaacttcacctccttcgccgtcatcgaggccctcggcagcgctctcacgaacaaatactccgagggcatgccgggcaa

SEQ ID NO: 175901 - DNA, 280 bp, Glycine max
tcaccccagtcacaccatggaggttgctacagcagcttctagcttcgcactcaacaagcccatgctggcattgccctcttcatctcgaactgtaaccccaatcagatgcatgaacacctccacctcccccgtcaggacctctctctctaccagcttcgtcgctccttacgccggaatctgcagcgcgtctagccctttctccggccacaagctccgtccctcctccctcaatccggcgtcgtttcttggctccaacgctaaacgaggcgtcgttaccatg

SEQ ID NO: 175902 - DNA, 277 bp, Glycine max
ctcttcttcttcccccacttcggaggagagaaaaccaaaatcactcttcactgttagggttagggtttcgattttccccttatccaatctcgcagcagcgagatgggcgccaattcgttgccatcggcggaatcaaacttcgatctcgacgagcagatctcgcagctcatgcaatgcaagccactttccgagcaccaggttagagttttatgtgagaaggctaaggagattttgatggaagaaagtaatgtccagcctgtgaaaagccctgtgacaa

SEQ ID NO: 175903 - DNA, 274 bp, Glycine max
cccaaattcattttaatcctaattttgcacttcttgatcattcgatttttctcctcaagatgcagatattcgtaaaaactttgaccggcaagaccatcacccttgaggtggaatcctccgacaccattgacaacgtaaaagctaagattcaagacaaggaagggatcccacctgaccagcagagacttatctttgcgggtaaacaacttgaggatggtcgcacccttgccgattacaacatccaaaaggaatcaaccctccatctcgtgcttcg

SEQ ID NO: 175904 - DNA, 276 bp, Glycine max
gaaaggttggtggtgactggtgattgttgatgagaataatggcaacttcaactatggatattcttcatttccaccacactcctttttattgtgaggagaatgtatacttgctttgcaaaaagttgtgcaatgatggaatagcaaatgctgatggatctgatctttttgttgctttcatttccaacgaaaagaaacagatcccactttggaatcaaaaggctagcaaaagagctgatggggtgattctatgggattatcatgtaatttgcattcaga

SEQ ID NO: 175905 - DNA, 278 bp, Glycine max
gtgctgcctaagagcactaatgagtccagaatcaagggaaactttgatgtgtttgactggtctattccagaagaagtgatggataagttctctgaaattaagcaggatagactaattaagggcactttttttgttgacgagacctatggtgcctttaagaccgttgaagagctttgggatggtgaactctgagcaatatgcttcatagagatgttgacaaatgcactgctcctcaagcagattgattccgccttttacctgttaagatcttaaagcta

SEQ ID NO: 175906 - DNA, 277 bp, Glycine max
tccttctctcgttgattcggatctagagtcttttttcactcttcagttctcgttgttgttcttcgctttcctgaaactagggttttcaatttcgattcattcgttaataattaaagatgtttgggagggcaccgaagaagagcgataatacgaggtactacgaaatcctcggcgtctcgaagaacgcttcgcaggatgatctgaagaaggcttacaagaaagccgccatcaagaatcaccctgacaagggcggtgatcccgagaagtttaaagagct

SEQ ID NO: 175907 - DNA, 279 bp, Glycine max
gtgcctaaagatgttaatgcagctgttggaattatcaagaccaagcgcactattcaatttgttgactggtgccccaccgggttcaagtgtggaatcaattaccagcctccgactgttgttccaggtggtgatcttgccaaggttcagagggccgtgtgcatgatctccaattccaccagtgttgttgaggtcttctctcgcatcgaccacaaatttgacctcatgtatgccaagagggcgttcgttcattggtatgttggtgagggtatggaagagggg

SEQ ID NO: 175908 - DNA, 293 bp, Glycine max
agaatgaacaacttgcattttgccctgccattgtggttcctggtgtatactactcagatgataagatgcttcagaccaggatattctcttatgctgattcacaaaggcacagacttggaccaaactatctgcaacttcctgctaatgctcccaagtgtgctcaccacaataatcatcatgaaggtttcatgaatttcattcacagggatgaggaggtcaattacttcccttcaaggtatgatcctgttcgtcatgcagaaaggttccccatacctcctgctatctgcagtgga

SEQ ID NO: 175909 - DNA, 291 bp, Glycine max
gtttccctccccaagtgcacacaaaaaaatgggtcttcaaatcaaggaaccgctccttttcactcttgtaacaatatcacttatttcaattacaaaactcttgcattcttatttttctatacctttctctccatccaatctttccattgctattgccaccctcatttttgttctaatctcatacaaattttcctcatcctctataaaacactcttccactactctgcccccaggtcctctatctgttccaatatttggtaactggctacaagttggcaatgaccttaacca

SEQ ID NO: 175910 - DNA, 287 bp, Glycine max
ggaaagcttgaagcagaagagagagatgtcatcatcttcagacctggacaggcaaatagagcagttgaagaggtgtgagcctcttaaggagtctgaagtgaaggtgctctgcctcaaagccatggaaatcctcgtcgaagagagcaacgttcaaagggtcgacgctcctgtcaccatatgtggtgatattcacggtcagttttatgacatgaaggagcttttcaaagtaggaggggattgccccaaaactaactatttattcctgggggattttgttgatagagggt

SEQ ID NO: 175911 - DNA, 283 bp, Glycine max
gacgttattgtctccccaaatcaaatgttctgtgctggcttctttcaagttggtgaaaatgccttctcctttgccatatggttcaacgaccctcacactcacaacaacaaccacaccgtggtttggatggcaaaccgtgaaacacccgttaatggaaggctatcaaagctttccctcttaaacagtggtaacatggtcttggttggtgcaggtcaaatcactacatggtcatcaaacacagcatcagatgctccagtaaagttgcatctccaagatgatggca

SEQ ID NO: 175912 - DNA, 283 bp, Glycine max
caacactctctccagacacttccttcatcaaatggcttctcacgacggcatctccgctgcttcttcagattccgtcttcaatcacctcgttcgtgctcccgaagatcctatcctcggggtaactgttgcttataacaaagatccaagtccagttaagctcaacttgggagttggtgcttaccgaactgaggaaggaaaacctcttgttttgaatgtagtgaggcgagttgagcagcaactcataaatgacgtgtcacgcaacaaggaatatattccgattgtt

SEQ ID NO: 175913 - DNA, 282 bp, Glycine max
tccgcatccgctagctcgcgcaggcaccagcaggtgaggttattgtgatttgaatggagggaagtggaggtggcggtgcttcaccgtctgcaccgttgaagcaatacttacaggaattctcgaagctgtttcagtactatctggataaatccactccccatcccccctacaggtggattgggactttcgtcattgcatccatctacgttttgcgtgttgtttatgtgcaggggttttacattgtctcttatggcctcggaatctacctcctcaatctcttga

SEQ ID NO: 175914 - DNA, 279 bp, Glycine max
gtgaaggtcggtgattttggtctttcacgtcttaaacatgaaacatatctcactactaagacaggaaaggggacgcctcaatggatggcaccagaagttcttcgtaatgaactgtcagatgagaagtctgatgtttacagctttggggtgatattgtgggaacttacgaccgaaaagatcccgtgggatactctgaacccaatgcaggttgttggagctgtagggtttatgaaccatcggctagaaattccagaagatgttgatccacagtggacttct

SEQ ID NO: 175915 - DNA, 282 bp, Glycine max
gcaagatatcatcacattgcaaagaaaatacacattacattactaagtctttgttcatttgagtagtagtgatggctagcctcaaggttgcatgtgtggttgctgtgatgtgcatggttgtggtggccatgagtgctgcacccatggcacaggccgcaatcacgtgcgggcaggtcgccggcgacatgtctccgtgcttcagttatcttcgaagcggcggaaaaccgtcgcaggcctgctgcaacggagtgaagtccctcagcagcgcggcgaagaccaccg

SEQ ID NO: 175916 - DNA, 286 bp, Glycine max
tgacgcaaagagatgttggtgatggttctggggttgtggccgttgactcttcatccgtttttccagtcagtggaaatgtttatccagatgggttgtatttcactattttacgtgttggaaatcctccaaaaagttattttcttgatgtggacacagggagtgatttaacttggatgcagtgtgatgctccatgcagaagctgtgggaagggagcacatgttcaatacaagccaacaagatccaatgtagtatcatctgtggactctctctgtttggatgttcagaa

SEQ ID NO: 175917 - DNA, 281 bp, Glycine max
gtcgtgtcgcagcaaaaccaagccacccactaacttgtttggtccaagacatggctctgatcctgcatgctaccaaaacaaacaagaatgccttcaagactctgattgcggcagagtacagtggcgtccaagtggaattggcccctaatttcgagatgggtgtctctaacaaaactcctgaatttctcaagatgaatcctattggaaaggttcctgttttggaaacgcccgatggtccagtctttgagagcaatgcaatcgctcgttacgttgctcgacta

SEQ ID NO: 175918 - DNA, 284 bp, Glycine max
aagactttcagattacgtggggagatggtcgtgcaaaaatactcaacaacgccaatcttctcactctctcccttgacaaggcctctggctctggcttccaatccaagaacgaatacttatttggcaagattgacatgcagctcaagctcgttcctggaaactctgctggcactgtcaccgcttattatctatcttcaaagggatcaacatgggatgagattgacttcgagttcttggggaatctcagtggtgacccttacattctgcatactaatgtgttcagc

SEQ ID NO: 175919 - DNA, 282 bp, Glycine max
atatgcggttggggctcgagttcttgagctgctttgccacagagataagggaaacagaagagagacacggctgttgaatattctttcttttgtacacagtacagtgtggaaagtattatttggaaaggtagctgattcactggagaaaggaactgaacatgaagatgaatacatgatcagtgaaaaggagctcctagtaaacaaattcatttctatcccaaaggacatgggaacgtttaactgtggagcatttgttgctggaatagtacggggcgttttgga

SEQ ID NO: 175920 - DNA, 281 bp, Glycine max
cccgaagcagccatggggatcgatctcaaggccggaggtaagagcaaaaagaccaaaagaacagcacccaagtccaatgatatctatctcaagctcttggtcaagctttatcgcttccttgttcggagaactggcagcaacttcaatgctgttatacttaagagattgttcatgagcaaggttaacaaacccccattgtctttgtcaaggttgattaagtatacgaaggggaaggaagataagattgcagtggtggtggggtctataaccgatgatattcg

SEQ ID NO: 175921 - DNA, 279 bp, Glycine max
ccttcagatgtcataattttggaaggcatccttgttttccatgacccacgtgttcgggagttgatgaatatgaagatatttgttgacacagatgctgatgttcgtttggcaagaagaattaggcgtgacactactgagaagggtcgggatattggagcagttcttgatcagtattcaaaatttgtgaagccagcttttgatgactttattcttccaacaaagaagtatgctgatataattataccccgtggaggagataatcatgtggccattgatttg

SEQ ID NO: 175922 - DNA, 278 bp, Glycine max
tctcgagccgaatcggctcgagattatcctaagtctttgggaataatgctgcaatggcttcacgtcaggaggaggtgacccactttgggagctactggaagcccatttgtgtgcagggttcatattgccctcaagttgaagggagttcaatacaaatatgtcgaagaaaatttgaggaacaagagtgaactgcttctcaaatccaacccagttcacaagaagattccagtgtttattcacaatgagaagtccatagcagagtctcttgtgattgttga

SEQ ID NO: 175923 - DNA, 277 bp, Glycine max
atcaactcactcatcaatctcgtttgttctcactaactattacttcatcatgtcgtcgagcacagttggtcaagtcatcaaatgcaaagctgcggtttcatgggaggcagggaagccacttgtgattgaagaagtagaggtggcaccaccacaagctggtgaagtgcgtttgaagatcctctacacctctctttgccacactgatgtttacttctgggaagccaagggccaaactccattgtttcctcgtatatttggtcatgaagctggagggatt

SEQ ID NO: 175924 - DNA, 278 bp, Glycine max
tgaatttcttagtcagctctgatatttaacatggcctcatcatctccctctccctctccctctccaatgttcacagtgcgaaggttgcaacccgagttggtggctcctgccatccccactccccatgaacttaaaccattatccgacatagatgatcaagaaggtcttcgtttccacattcctatgatacaagtttatcgtaaccaaccatcaatggcagagaaagacccagttcaagtgattcggaaagcactggcaaaaacacttgtgttctatta

SEQ ID NO: 175925 - DNA, 281 bp, Glycine max
tcacattctcagtctctgcacacacctcagaagaacagaacagaaccaccagtgcttttcaaagacggtttcagcaatggcgttcttaaataaaattggaaatctggtcaagaattctgctgtcaagcacatcaatcaagatttttcagtgtctaccccatcacttttccaagcaattagatccatgtcatctgcaaagctttttgtcggaggtatttcttacagcactgatgatatgagtttgcgagagtcttttgctcgctatggagaagtaatagatg

SEQ ID NO: 175926 - DNA, 282 bp, Glycine max
gttctcggcgcatttgccttcgtttgagctctgttctgttctgtgcctccacaaaccaaaccaggcacaagtaatactgtgtaatccaacaaactgaagtatagctaggtgaaaggaagtagtcaagtacaagagaatggcgaagtcattgagatcgaagagggagaagaggctgagggctattcggagggagattgttgaacctttctatgacaagaaagaagctgctaagcttgctgcccaagaggctgcccttgccgcccctaagctggaggttccttc

SEQ ID NO: 175927 - DNA, 288 bp, Glycine max
ctcgagccgctacaacgcctcgaatccacacagttctactctacgctctaaaccctctctcactctctctctcgatctatcatggctttgcccaatcagcaaaccgtggattaccctagtttcaaactcgtcatcgtcggtgacggcggtacaggaaagacaacgttcgtgaaaaggcatcttaccggtgaattcgagaaaaaatacgaaccgaccattggagtggaggttcacccattggatttcttcacaaactgcggaaagattcgcttctactgttgggatact

SEQ ID NO: 175928 - DNA, 279 bp, Glycine max
tgaatttcttagtcagctctgatatttaacatggcctcatcatctccctctccctctccctctccaatgttcacagtgcgaaggttgcaacccgagttggtggctcctgccatccccactccccatgaacttaaaccattatccgacatagatgatcaagaaggtcttcgtttccacattcctatgatacaagtttatcgtaaccaaccatcaatggcagagaaagacccagttcaagtgattcggaaagcactggcaaaaacacttgtgttctattac

SEQ ID NO: 175929 - DNA, 276 bp, Glycine max
gtcgagctgagaataccagttgctccagtagccggcactaaacaacatggcggacaaggcagtcaccatccgaaccaggaagtttatgacaaacaggcttctctccagaaagcagttcgtcgttgatgtccttcatccagggagggctaatgtttccaaggctgaactgaaggagaagctgggaagaatgtatgacgtgaaagacaccaacactgtatttgtcttcaagttccgaactcattttggtggtggcaagtccctgggtttggtttgatc

SEQ ID NO: 175930 - DNA, 277 bp, Glycine max
actcgttcttcttcttttgttgttctgtgtttgtgtttgttttttctctcacctgaaaatgtcttgctgcggtggtaactgtggttgcggaagctcctgcaagtgcggcaacggctgcggaggctgcaagatgtacccagacttgagctacactgagtcaaccaccaccgagaccttggtcatgggagtggcacctgttaaggctcaatttgagggtgctgaaatgggtgtgcccgctgagaacgatggctgcaaatgtggaccaaactgctcctgc

SEQ ID NO: 175931 - DNA, 237 bp, Glycine max
tgcagagctgcgcgtcgatctagaaaatggcgaggatagaggtttacgagcttaggaacaagacgaaggcggacctgctgaaccagctgaaggatctcaaggcggagcttgccctgctccgcgtcgccaaggtcaccggcggcgcccccaacaagctctccaaaatgtattgtagtgattattgttatgcgggaatcgcgttttgtaaacgaaatggcgtttgaatatatatatata

SEQ ID NO: 175932 - DNA, 278 bp, Glycine max
ctccttctgtccgctgcgactctctttccttccctctttttccgaatctgaatcgaaatggcttcggagactgagacgtttgcttttcaggccgagatcaaccagctcctcagtctaatcatcaacaccttctacagcaacaaggagatctttcttcgtgagctcatcagcaatgcctctgatgctttggacaagattcgatttgagagtcttacagacaagagcaagcttgatgctcagccagagttgttcattcacattattcctgacaagaccaa

SEQ ID NO: 175933 - DNA, 275 bp, Glycine max
taacaatcttacgatttcatgaatcactgagataaatggagtcagatgaagacgattttgttttctacggaacgccgatagagcgtgaggacgattcaatcagtcgcaagaagaaggccattgctgagtcctcaggtcagctccgagctctccctgcttggaagcaagaggttagagatgaggaagggcggagaagattccatggagcatttacaggaggttattctgcgggttactataatacagtgggctcaaaggaaggtgggcacctcagt

SEQ ID NO: 175934 - DNA, 280 bp, Glycine max
cttctccttctctctctctttttcgcctcattccattttcatctatcaatggctccagtagcagcagcatcttcagattcaatcaagccaagagatgtttgcatcgttggtgttgcacgtacaccaatgggtggatttcttggtactctgtcatctctatctgccaccaagctaggctctatagctattgaagctgctcctaaaagggccaatgttgatccatcccttgtggaagaagtattttttgggaatgttcttagtgctaatttggggcaagctc

SEQ ID NO: 175935 - DNA, 276 bp, Glycine max
gtgggttctaaaacaaaagaaaaaccgagaaagagttctaagctttgtctgtgactggtgagagccagtagcgaaagaaagtgaagatggcgctatggatggaaaagggttcagagccattaaccgaaagcgaaaaagcagaccttgaagccattgctgcactcaaagagtctgctgcttttgaattcaaggaaaagggtaaccaatatgtgaagatgggtaagaagcattactctgatgccattgattgctacacaagggcaattgatcagaaag

SEQ ID NO: 175936 - DNA, 272 bp, Glycine max
gcctttttgaaaaagggccatgatgaagaagagaagctgtttgaattcaaaacagatgaggaacaagttgttgatggacttgatagagctgtattgactatgaagaagggtgaggttgcactgttgaccattgcacctgaatatgcttttggttcatcagagtcccagcaggagttggctgtagttcctcctaactcaactgtttattttgaagttgagctagtttcatttgagaaagagaaggagtcctgggatttgaacactgaagagaa

SEQ ID NO: 175937 - DNA, 275 bp, Glycine max
ccgctacaagcactccttggaagaagatgttgcagctcatacctctggccatctacgccagcttttagtggggttggtgaccgcattcaggcatgttggtgatgagatcaatccaaaattggcacaatctgaggctgaaattcttcatgatgctgtaaaagagaagaagggtagctatgaagagaccattagggtcttgactacaaggagcaggacccaacttgttgcaactttcaaccgctacagagagatccatggcacttccatctctaaga

SEQ ID NO: 175938 - DNA, 274 bp, Glycine max
ggctaatttgctagttaaagatctcagaaagagctttgattcaggcatgactaagagctatggatggagggtttcccagttggaagccatagctaagatgttagaagagaaagagaaggaaattactgaagctctatataaggaccttggaaaacctcgacttgaagcatttataaccgagatttcccaggctaaatcctcatgtagtgaagcacataaagagctgaaagaatggatgaagcctgagaaggtgaatacttcaatcacaacatat

SEQ ID NO: 175939 - DNA, 268 bp, Glycine max
caagtttttgcagccactaacatgctgcaggaggctttgtcacattatcaggctgcattaaggcaggttaaacccccagaatgaagcagcaaaacggggtttagagcgattagagaagcaaatgaagggagtggatcctgatgcacctgaagaagatgaagacaatgatgttgaagatgcagatggagatcaagacgagactgaacttctgtgagtagcagtgtccagagcaagtctatttatgatgagaacaacgtggaaatagtta

SEQ ID NO: 175940 - DNA, 272 bp, Glycine max
gttttgtttcccataccatagaagaagcacaaagagaagcattagcactaggagcagcaacaactagtctcagctgaaatggcctcttcagtgatggcatctgtggccctcaaacctgcccctttcactgttgagaagtcctcagtgagaggccttccctctctctcaaggaactcttcttcattcagagttgtggccagtggcaagaagatcaagactgacaaaccttatggaattaatggtggcatggctttgagggatggaactgatgc

SEQ ID NO: 175941 - DNA, 281 bp, Glycine max
attcccgtccccggcgactgagtagcggtctcttcccaactcggaactcagtccattccgcatttcaattttctcttcacttggcaaagcccaaaccaaaccctggctgaagaagagaattgactgagaagaagaacacagaaatgggctccgaactgattttcagagggcacgagacccagcccgtggacgacgcgtactcaccaaagccccacaaaccctggctcaccgtgactcgcccgattcactacatgctccgtgagcagcgactcctcttcgtt

SEQ ID NO: 175942 - DNA, 281 bp, Glycine max
ctctttgagaggttggtgtagtagctttttggagggttgacatggaagaacggtatgagccattgaaggagcttggtgctgggaattttggtgtggcaaggttggcaaaagacaagaaaactggagagcttgttgcggtcaaatacatagagaggggcaaaaagattgatgagaatgttcagagggagataattaaccaccgatctttaaggcatccaaatataatcaggtttaaagaggtgttactgacccctacacatttagctatcgtcttggagtat

SEQ ID NO: 175943 - DNA, 285 bp, Glycine max
acaaacctcccctcacactctccaaaccctagcggcactacacacgttatctctctctctctctctctctctccctctctccttccccaagatgtcgagcgccgatcccgagcaccgagaagaggaggaggcacccgccgtcggcgacgacgaggacaccggagcacacgtcgctcccatcgtcaagctcgaggaggttgctgtcaccaccggcgaggaggacgaagatgcaatcctagatctcaaatcgaagctttaccggttcgacaaggatgggaaccagtg

SEQ ID NO: 175944 - DNA, 281 bp, Glycine max
acagaggggaagaagaagatggtgtccttgaagcttcagaagctcctcgccgctagcgtcctaaagtgcggcaagggcaaggtctggcttgatccaaatgaagtcaatgaaatctccatggccaattctcgacaaaacataaggaagttggttaaggatgggtttattatcaggaagccgactaagattcactctcgctcccgtgctcgtcgaatgaaggaggccaagagaaaggggcgtcactctggttatggtaagcgtaagggtacaagggaggcaag

SEQ ID NO: 175945 - DNA, 260 bp, Glycine max
tggctcgagggaaacgaagaagggttctgttttcttttcgcgatgagggccaagtggaagaagaagcgtatgaggaggctgaagaggaagcgccgaaagatgagacagagatccaagtagtgcgttaaacctagtttgtttccgttgcttttacaattgcttatgttgtcaaataggacacccagttgttagtggcatggtctctccttttgagttttgatacatttgttggatttattcgtcttatgtctagtgaaaaa

SEQ ID NO: 175946 - DNA, 271 bp, Glycine max
caacttccgaaacttgttccaacaccaaggttcgtcccaaacccatttatagcaccaaccctttgatcattcccacgtgtaaagtgaggccaagagtgcaatactgtggcaccatgatcaagagttctttgatagagcctgatgggggggcattggtggatcttgtggtgcctgagggtgagaggggtgctaagatcaccttggctgagtcactgcctaaggtgcagctcacaaggattgatcttgagtgggtgctgtggtgggggaaggt

SEQ ID NO: 175947 - DNA, 268 bp, Glycine max
gtggagttcaacttcgagggtttccttcacaactctgtaatttctaattccacagttactcttgtgttttagcgagattcggagtgagtgatggctgggaaggaagagaatcgaatatttgttggaggtttatcttgggaagttacggagcgtcaactcgagcatgcctttgctcgttacggcaaaattctcgaatgccagatcatgatggaaagggatacaggccgtccacgtggatttggttttatcacatttgcagaccgtaggg

SEQ ID NO: 175948 - DNA, 270 bp, Glycine max
aaaacagaaagctcgtgtcactgaacgtcaacgcaggcaacgcatcgctgataacctcaaagccttgcatgaattgcttccaaatccagcagagggaagtcaagcttacgtattggacgacataattgactatgtcaaatatttgcagcttcaaataaaggaacaaagtggaagtagattattgcaagcggactcaactgctataccactagtttttcatgagggttacggccattatatcaaccaaaagatgctgaatgaaccccttga

SEQ ID NO: 175949 - DNA, 267 bp, Glycine max
gaagaggtcactgccggaagaagggagcaacaccatctttcattttccggcgatctcttgtttcttccatcatcaccgttttccggcgatccctaatcctcgcaaacagaaatgacgacatcaaggcgccttgcggacaggaaggtggagaagtttgagaagaacatcacaaaaagaggatttgtgccagacactaccactaagaagggaaaagactaccctgttggcccagtgctgctcggtttcttcgtctttgttgtcattgga

SEQ ID NO: 175950 - DNA, 275 bp, Glycine max
caaactagtagtattattcttccattcataatgggtgttttcacattcgaggatgaaatcaactcccctgtggctcctgctactctttacaaggccctagttacagatgccgacaacgtcatcccaaaggctcttgattccttcaagagtgttgaaaacgttgagggaaatggtggcccaggaaccatcaagaagatcactttcgttgaggatggagaaaccaagtttgtgctgcacaaaatagaaagcattgatgaggcgaacttgggatacag

SEQ ID NO: 175951 - DNA, 275 bp, Glycine max
ctctcccttagtcaaagggactcattgttcttctcccaggttatttagaaaagcaaaatggtgaagatttgctgcattggtgctggatatgtggggggtcctactatggcagtcattgcacttaagtgcccatccattgaagttgctgttgttgatatctctaaatcccgcattgcagcctggaacagtgaccagcttcctatctatgaacctggccttgatggtgttgtgaagcaatgccgtggcaagaacctcttcttcagcactgatgttga

SEQ ID NO: 175952 - DNA, 267 bp, Glycine max
ctctctcttgcaaaacctaattttcatttcttccctcaaatttcaaaatgcgtgagatccttcacatccagggtggccaatgcggcaaccagatcggcgccaagttctgggaggtggtttgcgcggagcacgggatcgaccctaccggaaggtacggtggggactcggagttgcagctcgagaggatcaatgtctactacaacgaggccagttgcggtcggttcgtgccgcgcgcggttctcatggacctcgaaccgggcaccatgg

SEQ ID NO: 175953 - DNA, 271 bp, Glycine max
aaatttctctgtgttttattatgagataatgaattcacctgaaagggcctgccatcttgcaaagcaagcctttgatgatgctgtctcagacctggataccctgaatgaggattcttacaaggacagtaccttgattatgcagctgttgagggataaccttactttatggacttctgatatccccgaagagggtgaggaccaaaaaatggaaagcacaaccaggggagaagatgagttaggccgctagcccatcgttttgtcgtatatctaa

SEQ ID NO: 175954 - DNA, 270 bp, Glycine max
ggccatataatttttttttatttgaaataatgtccgggatcatccacaagattgaggagaccctccatgtgggagggcacaagaaagaggagcacaaaggagaacaccatggtgagcacaaaggtgaacacaaaggagaacaccatggtgagcacaaaggtgaacacaaaggagaacaacaccatggggagcacaaggagggacttgtggataagatcaaggacaagatccatggtgatggccatgacaagggtgagaaaaagaagaaga

SEQ ID NO: 175955 - DNA, 266 bp, Glycine max
gtgtcatgcaaacctggcttccagcaagtagtgctctattggaaatgatgatatttcatctaccctctccatcaacagcccagaagtatcgtgtggagaacttgtatgagggtcctcttgatgatcaatatgcttctgctatcagaaattgtgatcctgaaggtcctctgatgctctatgtctccaagatgattccagcatctgataaggggagattttttgcctttggccgtgtattctctggcagggtttcaactggtttgaag

SEQ ID NO: 175956 - DNA, 271 bp, Glycine max
agaaggcgtcttcataaacgcctttcttctccgtttccgtttcctcgttcgaattcgctttttgatctgcgaaaatgagagagtgcatctcgatccacattggtcaggctggtatccaggtcggaaatgcttgctgggagctctactgcctcgagcacggcatcgggcccgatgggcaaatgccaagtgacaagacagttggcggtggtgatgatgctttcaatactttcttcagcgagactggtgctggaaagcacgtgccacgtgcagt

SEQ ID NO: 175957 - DNA, 273 bp, Glycine max
gctgtggttatcatcttcttcttcctctttcttagatctcttctttctctacgccgcacgccgaaaccatggccggaaaaggagagggtcctgctatcggaatcgatctcggaaccacctactcttgcgtcggtgtgtggcaacatgaccgcgttgaaatcatcgccaacgaccaggggaacagaaccacgccgtcttacgtcggattcactgacaccgagcgtctcatcggtgatgcggccaagaatcaagtcgccatgaaccccatcaaca

SEQ ID NO: 175958 - DNA, 268 bp, Glycine max
ctctagtcctgttatttctcagcgcgtaaagcatggctttgttggtggagaaaaccacgagtggtcgcgagtacaaggtcaaggacctttcccaggccgacttcggccgcctcgagatcgagctggccgaggtcgagatgcccggcctcatggcctgtcggaccgagttcggcccctcccagcccttcaagggggcccgcatcaccggctccctccacatgaccatccagaccgccgttctcattgagaccctcaccgcccttggcgc

SEQ ID NO: 175959 - DNA, 270 bp, Glycine max
cggctcgagtgaatacataatcgttggatctgccaacataaaccagagatcaatggatggtgccagagattctgagattgccatgggtgcttatcaaccatttcatttggctgccaggcagcctgccaggggacagatccatggtttccgcatgtcgttgtggtatgagcaccttggcttgcttcatgactctttcctccaccctgaaaatgaagaatgtattaagaaggtgaaccaaattgctgacaagtattgggatatctattcaag

SEQ ID NO: 175960 - DNA, 276 bp, Glycine max
ctgatattcgtgaaatccctaacggggaagacgataaccctagaggtagagtcttcggacacgatcgacaatgtgaaggcgaagatccaggacaaggagggcatcccgccggatcagcagcgcctgatcttcgccggaaagcagctggaggacgggcgcacccttgccgactacaacatccagaaggagtccaccctccacctcgtcctccgcctccgcggcggcgccaagaagcgcaagaagaagacctacaccaagcccaagaagatcaagcac

SEQ ID NO: 175961 - DNA, 264 bp, Glycine max
cgcaccacacacacagttcgtcggaatgggaagggtgattcgcgctcagcgtaagggtgctgggtcggtgttcaagtctcacactcaccaccgcaagggtccggcgaggttccgcagcctcgacttcggcgagcgcaacggctacctcaagggcgtcgtcaccgacatcatccacgaccccggtcgcggcgcccctctcgccaaggtggcattccgccaccccttccgctacaagaagcaaacggagctcttcgtcgccgccga

SEQ ID NO: 175962 - DNA, 263 bp, Glycine max
  unsure (1)..(263): unsure at all n locations
tctttttctcttctcactgcatcgcttcaggttcttctgaaaagatgtctcgcgtgtatgttggtaacttggattcacgagtcaccgagagagatctcgaagacgaattccgcgttttcggagttattcggagtgtttgggttgcacgtagaccacctggtnatgcttttattgactttgatgaccgcagagacgcacaggatgctatccgtgaattggatggcaagaatggttggagggttgagcttctcacaactctagag

SEQ ID NO: 175963 - DNA, 264 bp, Glycine max
gtttaataagtctcagaaacactcactcactcgattcttctcaaaccgtcaccgtcgaggctatgcccaccaacgaagacttccagagtgtttcaaattgctatgtgttcaagagccgattgcaggagtatgcacagaaggcggggctgcccacgcctgtctatgaaactattaaggaagggccttcccatgaaccttctttcaggtcaacagtgatagtgaacgacgttcggtatgattctttgcctggatttttcaaccgca

SEQ ID NO: 175964 - DNA, 266 bp, Glycine max
aacaaaactatccggaggattcgtgttcgaggtggcaatgttaaatggagggcattgaggttggataccggcaattactcatggggtagtgaagcagttactcgcaagactcgtattctagatgttgtttacaatgcctcaaacaatgagcttgtgcgagctcagaccctggtcaagaatgctattgttcaggttgatgctgctcctttcaagcagtggtaccttcagcactatggtgttgaaattggtagaaaaaagaaagtggc

SEQ ID NO: 175965 - DNA, 269 bp, Glycine max
aagagtttgtagagaatctctcgatgatggcaaacagttgtgtttcaatggacaataataatatcctgggtcttctcaagcttcgaattaaaagaggcgttaatcttgcaattcgcgatgctcgtaccagcgatccgtatgtcgtcgtcaacatgggtgatcagaagctgaagactcgtgtcgtaaaaaacaactgcaaccctgactggaatgaagaattgaccctttctgtaaaggacgttaaaaccccaatacatctgacggtttat

SEQ ID NO: 175966 - DNA, 274 bp, Glycine max
attcaccatgactaagcaacaagctaattggtctccatacgataacaacggaggatcatgtgttgcaattgctggagcagattactgcgtcatcgccgcggatacgaggatgtccaccggttacaatatcctcactcgcgattactccaaaatctcccaactggcggagaagtgtgttatggcttcttctggttttcaagctgatgtcaaagctttgcagaaggttttgtctgctaggcatttgatttatcagcatcaacacaacaaacaaatg

SEQ ID NO: 175967 - DNA, 269 bp, Glycine max
agtttagctacctacccatgggaaagattgccctagccaatgtcctcttggtccttctcttgaacttgagcactttgctcaatgttcttgcttgtccctattgcccttacccatctcccaagcctcctccaaaaaagcctcccattgtgaaaccaccagctcacaaacaaccaaaaccatgtccaccacccaagtcatctgcaaaaccaccccatgtacacccaccctatgtcccaaaacctcctcactaccctaaaccaccagttcat

SEQ ID NO: 175968 - DNA, 266 bp, Glycine max
attttagtttcttcgttacgcctgcgttgtgcgtgagaaagtgcgcgtggtgaaaaccatggcttctcagctcctgagacgaaccttcggaagtcgcatccttgcaaaccctagggccttctccttctcctccgctgcttccactccgatccgcgccactctcttccccggcgacggcatcggccccgagatcgccgaatccgtcaaacagatattccaagcagctgatgtcccaatagaatgggaagagcactatgtaggaactg

SEQ ID NO: 175969 - DNA, 258 bp, Glycine max
cagcagcatcagcttctactcgtgtaatctctgcgtgggctacaatggattccggtgtccaaggttgcatcttagccactttaattctccacgacgaggaaatctcagtcaccgctgagaagatcaacgctctgttgaaggcttctaatgtctccgtcgagtcttactggcccagcctcttcgccaagctcgcccagaataagaacatcgaagacctcattttgaacgccggcggtggtggggccgccgttgcagttg

SEQ ID NO: 175970 - DNA, 263 bp, Glycine max
gagaaaacagaagaaaacaaaatggaagacacagtttctgcgttgaggtctttgatggtttctcactctccgccgctggatgccttagtggtgccctctgaagattatcacctgagcgaatatgtgtctgcacgagacaagcgccgcgaattcgtttccggcttcactggaagtgccggcttggcacttataacaaagaaagaagcactgctgtggacggatggacggtattttttgcaggctgagaaagaacttagtgctgg

SEQ ID NO: 175971 - DNA, 261 bp, Glycine max
cctgaattcagcaacaaggataagacactagtcttccaattttctgtcaagcatgaacagaagcttgactgcggtggtggctacatgaagttgctcagtggtgatgttgatcagaagaaatttggtggggatactccttacagtattatgtttggcccagatatctgtagttacagtacaaagaaagtacacgctattcttacctacaatgacacaaaccacttgataaagaaggatgttacttgtgagactgaccaactt

SEQ ID NO: 175972 - DNA, 262 bp, Glycine max
attcattcacacttcccactttccaatatggaatgctgcataatcgccaggctcaagacccaacctttatggttcgcgctgctcttcgttgtcggattgttaacgattctcaaattggctttcgttgttttcagatgggtctacgtcaatttcctccgaccaccgaagaatctcaaaaagtacggatcttgggcagtggttactggacccactgacggcattggaaagagcttcgctttcgagctcgctcgctagggcctga

SEQ ID NO: 175973 - DNA, 263 bp, Glycine max
ctctctctctgaagatggcttcacgcaggctcgtatcttctctgcttcgatcctcccttcgtagatctcaatcgaagccctcaatttccgcatcgacatcgaggctcacgtcatccaaccgtgcctcaccgcacggatacttgctgaaccgcgtcgccgagtacgccaccgccgcggctgctgctaccgctcctccctctcctcctcctccggggaagaaggagctcggcggcggcgggaagatcaccgatgaattcaccggg

SEQ ID NO: 175974 - DNA, 269 bp, Glycine max
aaagaaaatggcggtgcctctactctcgaagaagatcgtgaagaagagggtgaagaagttcaagaggcctcagagtgacaggaaaatttctgtcaagacaaactggcgcagaccaaagggtatcggttcccgcgtgaggaggaagatcaagggatgcacgatgatgccaaacattggttatggttcagacaagaagacccgccactatctccctaatggttttaagaaatttgttgttcacaatgtgaaggacttggaactgctcatga

SEQ ID NO: 175975 - DNA, 263 bp, Glycine max
ataggagcttgctatatatagagacagcagataggccgggattgctggttgaaatcatcaaagtcattgcagatgtaaacattgatgttgaatcggctgagattgatacagagggtttggttgctaaggatacatttcatgttagttacggcggggctgcattgaacagttcaatggctcaggttttggtgaattgtctgcgttactacctgcgaacgccagatacagatattgacagttactgaagaaaccacccttgtgaa

SEQ ID NO: 175976 - DNA, 261 bp, Glycine max
gagcttcagcaatggtgtacgtcaaggctcagaaatcaaaagcctacttcaagagatatcaagtcaagttcaagagaagaagagagggaaaaaccgattaccgtgccaggattcggttgattaatcaggacaagaacaaatataacactccgaaataccgatttgtggttcgctttagcaacaaggacattgttgcacaaataatatctgctagcattgccggcgatttagttcttgctacagcatattcacatgagctgc

SEQ ID NO: 175977 - DNA, 254 bp, Glycine max
ctccaaacaacaatggacctccgtgaatcgataagcaaccaaaccgacgtggccctgagcatctcaaagctcctgttgtcgaaagaagctcgggacaagaacctcgtgtattcgccgctgtcgttgcacgttgttctgagcatcatcgccgctggctccaagggcgccacactcgatcagcttctctccttcctccgatccaaatccaccgatcatctcaactccttcgcctctcagctcttcgccgtcgtgct

SEQ ID NO: 175978 - DNA, 269 bp, Glycine max
ggctcgagcttgttgttcatagtcccccgtatatatccgttcttttttcttacttccttccttccttccttcaacgctcagcactcaaatcctctgagagaaaaaaaaattagggttttgcatttcgggtcagacagactcagacatgggaggaggcaatgcccagaagtcaaagatggctcgcgagaagaacctcgagaagcagagggctgccgctaagggaagccagttggattcaaacaagaaagccatgtctattcagtgcaagg

SEQ ID NO: 175979 - DNA, 261 bp, Glycine max
cccatggtgaattatgagtttgatacatcaactggatcattgaaaatattaaatggcaatgagcattttgtgtctaatttatccttgctgttgcgttggtcaccatattcatcagaagcagatcttctgaaacaatttgatgacattggatctcatggtactaaagttattatctataatttgtggtgcaatgatgatgcaaatttggagctagactttgatacagatcctacggatattcgtattgctggggatgtcaag

SEQ ID NO: 175980 - DNA, 265 bp, Glycine max
cactttctatctcattttcgttcggttcaaacactctcatggcatcagacaagaagattaggatcggcatcaacggatttggaaggattggccgtttggtggccagggttgctcttcagaggaatgacgttgaacttgttgctgtcaacgatcctttcatcaccactgattacatgacatacatgttcaagtacgacaccgttcatgggcagtggaagcatttgatgtgaagctgaaggactctaagacccttctcttcggtgag

SEQ ID NO: 175981 - DNA, 268 bp, Glycine max
catcccccaactcatcggttccttctcgtcatgaccgcctctcaactcatctccgttagtcccgacgaactccgcttccactttgagttggagaagcaaacattttgcgatcttaaggtcctcaataactccgagaactatgttgctttcaaggtcaaaaccacttctccaaagaaatactttgtgcgacctaacaccgctgttgtacagccctgggactcttgtatcatcagagtcaccctccaagcccaacgggaataccctccag

SEQ ID NO: 175982 - DNA, 268 bp, Glycine max
gcatggttgttgccatgagtgttacacccatggcacaggccgcaatcacgtgcgggcaggtcgccggcgacgtgtctccgtgcctcagttatcttcgaagcggcagaaaaccgtccgagtgcagctagcacggggcgaaaaacacacagggacgggccaagaccaccgccgaccgccaggcagcctgcaattgcctgaaaaaccttgccaataatatgggacagagtttgaatgccggcaacgcagcctctctccctggcaaatgtgg

SEQ ID NO: 175983 - DNA, 258 bp, Glycine max
gcatcactgaactaacaaagcaaccctatgtcgaaggtggtttgtgtcaccggagccagcggcgccatcggatcatgggtggtcctactcctcctccagcgtggttacaccgtccatgccaccgtccaagatatcaaggatgaaaatgagacgaaacatttggaggaaatggaaggagcaaagagtcatctccatttttttgaaatggatcttcttgacatcgactccattgccgctgccataaagggttgttccggc

SEQ ID NO: 175984 - DNA, 259 bp, Glycine max
cgcttcgcaaatctcaatcgaatctcagaaaaatgagagaaatcatcagcattcacataggtcaggccgggatccaggtcggaaactcctgctgggaactctactgcctcgaacatggcatccagcccgacggcatgatgccttctgactccaccttcggtgtagcccacgacgccttcaacaccttcttcagcgaaaccggatctggcaagcacgtcccccgtgctgtcttcgtcgacctcgaacccaccgtcatcga

SEQ ID NO: 175985 - DNA, 259 bp, Glycine max
cgagaccgtgaaggagcagaggagtattattcccgtgccatacttgcagacccaaatgatggagaggttctatcacagtatgggaagttagtttgggaactacatcacaaccaagaacgtgcctccagctattttgaaagagcagtccaagcctctcctgaagacagccatgtacaagcagcatatggtagtttcctttgggccacagaggaagacgaggatggtatcaatgaaccacaaagtttaccgccacattctc

SEQ ID NO: 175986 - DNA, 258 bp, Glycine max
ctgcgttatcgccgcagatacgagaatgtccaccggttacaacaacctcactcgcgattactccaaaatctcccaactggctgagaagtgtgtgatggcttcatctggctttcaagctgatgtcaaagctttgcagaaggttttgtctgctaggcatttgatttatcagcatcaacacaacaagcaaatgagttgccctgcgatggctcagttgctctcaaacactctttattacaaacggttctttccttattatgc

SEQ ID NO: 175987 - DNA, 262 bp, Glycine max
cttcctcagtagtgtcatttacgcttctcttctctgcagcaactacgcctaaccctaaggtcttcttcgacatgaccatcggcggtcaatctgctggccgcatcgtgatggagctctacgccgacgtcactccccgcaccgccgagaacttccgcgcgctttgcaccggcgagaagggcgtagggcggagcggcaagcccctccactacaagggctcgtccttccaccgcgtgatcccgagtttcatgtgtcagggtggcga

SEQ ID NO: 175988 - DNA, 257 bp, Glycine max
gtcgagctgagaataccagttgctccagtagccggcactaaacaacatggcggacaaggcagtcaccatccgaaccaggaagtttatgacaaacaggcttctctccagaaagcagttcgtcgttgatgtccttcatccatggagggctcatgtctccaaggctgaactgaaggagaagctgggaagaatgtatgacgtgaaagacaccaacactgtatttgtcttcaagttccgaactcattttggtggtggcaagt

SEQ ID NO: 175989 - DNA, 259 bp, Glycine max
cattttccgggcacgaaactcgaggaattcgcgcatggcgcctccaatcctctcgctcgctcttccctcgaacaccggtcgagttctcagcattcaatctcacaccgttcaggggtatgttggtaataaatccgctgtcttccctctgcaactactgggatatgatgtcgatccaattaattccgtgcagttttcgaatcatacaggatatccgacgtttaagggtcaggttttgaatggacagcaactctgggatcta

SEQ ID NO: 175990 - DNA, 255 bp, Glycine max
cattgcaccgttgcaaaactgttcacctggttaggcatgcgcaaggagttcataatgtagcaggagagaaaaaccatgatgcatacaattcttatgagttttttgatgcacacctaacctctctcggctgggaacaggttaataatctgcgaaagcacgtgaaggcaagtggactttccaaaaatattgaacttgttgtcatttcccccttattaaggaccatgcaaacagcagttggagtctttggtggtgaag

SEQ ID NO: 175991 - DNA, 255 bp, Glycine max
cacaacactacactagcaagcacacacctttagcacaatcaccaatggcttcttccgacagcaagcttcccctgacacccatccctggaagctacgggcttcctttctttggtcccatgattgacagacatgactatttctacaaccaaggacgcgacaagttctttgccgaacgaattaaaaagtacaactctacggttatacgaaccaacatgccaccgggtcctttcatttcctctaatactagagtcatcg

SEQ ID NO: 175992 - DNA, 257 bp, Glycine max
ctaagtcttcctcatatcttccaccctttggcttattagtgggagcaatacatatcattcattcagaggcaacaaaggagttgtaaattaagagcatggctgcacaagctcttgtatcatcatcatctcttaccttctcagccgaggctagaagacgaagtcttggaccaagatcactccaattagcagttggcttctcaagaaaagcctcctttcttgttaaggcagctgctactccccctgtcaagcaaggatca

SEQ ID NO: 175993 - DNA, 256 bp, Glycine max
cctcaatattcctaaactcataagagcttgtgatgaacaacagcattggaaagaattgacctatttgtatatacaatatggtgagtttgataatgctgcaactaccatcatgaaccattcacctgaagcatgggatcacatgcaattcacagatgttgttgttaaagttgccaatgaggagttgtactacaaggctgttcacttctacttggaagagcatccagatcttatcaatgatgttctgaacgtccttgca

SEQ ID NO: 175994 - DNA, 259 bp, Glycine max
cgtcaccatgacttttaagcgcaggaatggaggtcgcaacaaacacggccgtggccacgtcaagttcattcgatgctccaactgcggcaaatgctgtcctaaggacaaggctatcaagaggtttctggtgaggaacattgttgaacaggctgcagtcagagatgttcaggaggcttgtgtctatgaacaatacacgcttccgaagctttatgtgaagatgcagtattgtgtttcctgtgctatccactctcatgttgtg

SEQ ID NO: 175995 - DNA, 260 bp, Glycine max
tatcactcttacggtgggttctgccgctgactctgttgctcacctgcgccctaggtttccaatcggacgagcttctcctcgacgacgaagagttcggcatcgaaggaggacgaacctcctttgattccgattcgcatccaccttccaccgcctccacctcgaggaagaggctttccgactcctcctccgattccaagatccagttccctctccaacacgctttcggcgactccgatttctccgacgccggcaacttctcc

SEQ ID NO: 175996 - DNA, 261 bp, Glycine max
gtaccacccgaggaatcaatatatcttgcacttagatcttgaggcgccaccccgggaaaggttggaaatggcaaatgcagtgaaagctgatccaatatttcgtggggtggagaatgtgcgtgttatgtctcaatccaatttggtaacttataagggtcctacgatgattgcttgtaccctccaagctattgcaatattgttgaaggaaagttcagagtgggactggtttattaacctcagtgcctcagattatccccttat

SEQ ID NO: 175997 - DNA, 264 bp, Glycine max
catagggcaacctcctttctctgtgactctgagtatcgtatcgttttattattatttctaattctctcttatcaggtccattgaatatgtctccgtcgttggatcttcctcccaagggtggcttcagttttgatctatgccgaagaaacgcaatgcttcaaaacaagggcctcaaagccccaacctttctcaaaactggcaccactattgtcggtttagttttccaggatggtgtcattcttggtgctgatactagggcaactg

SEQ ID NO: 175998 - DNA, 266 bp, Glycine max
tagaaaaggaagaaaccaaacgcggccttgaagttgcgagttgcgagttgcagagagagcaatgagtcaggaatcgtttatatatggcttcgtggctcgggggacgatggtgttagccgagtacaccgagttcactggtaatttccctgcaattgcagctcagtgtcttgagaaacttccctcttccaataacaagttcacctacaattgcgaccaccacaccttcaattttctcgtcgaagatggttacgcttactgtgttgttg

SEQ ID NO: 175999 - DNA, 270 bp, Glycine max
gcagaactttgtttcccaatttccattgcctccgcttccacctcgcaaccatgatcatcccggagaagaaccgcaaggagatctgcaaatacctcttccaagagggagtttgcttcgcgaagaaggacttcaatttggccaagcaccctgagatcgacgtgccgaatctgcaggtgattaagctgatgcagagtttcaagtctcgcgagtacgtgagagaaacttttgcttggatgcactattactggttcctcaccaacgatggcatcg

SEQ ID NO: 176000 - DNA, 266 bp, Glycine max
atcgagcgaatcggctcgaggacagtctcagtggacatgaattacctgaaaatagctataattgggaatgatcatgctgtaatagtagttggcaagcttagaaaatgttgtgatcatgctgatatactatcagttggaccagccaaagaggagaagaaagaggaaccaaagaaagatgagaagaagccagaagacaagaaagatccaaaggaggaatatgctgaacttctgaacgccttttataatcagaccagacagcagcaata

SEQ ID NO: 176001 - DNA, 267 bp, Glycine max
ctttcttgaacaatttgactgggaagcctgtaattgtgaaaatgaagtggggaatggagtacaagggctatctcgtttccgttgattcctatatgaacttgcagctggccaacaccgaggagtacattgagggacaatttactggaaatttgggagagattttaatcagatgtaacaatgttctctaccttcgaggagtaccggaggatgaggaaatcgaagatgctgctgaagactagagagtgatagaagctgctaatggctatg

SEQ ID NO: 176002 - DNA, 269 bp, Glycine max
  unsure (1)..(269): unsure at all n locations
tgtgaaacgaagaagccctaactacgcacgcactcattcnttgagaaagctcaatattcattcgtccatggcactctcttctcgtctcttttccaaatccaaattgatctatggctgtcaaatacttctgcaaaaggagcatgctattccagttcgtcactttgctaaagagtctgcccctcctgcccttaagggagatcagatgctgaagaacatttttgtggaggtgaagaacaaatttgagactgccataggaatattaaagaagg

SEQ ID NO: 176003 - DNA, 268 bp, Glycine max
gaactcttcatactttgtcgaatggatacctaataatgtgaagtccagcgtgtgtgatatcccacctaagggtcttaaaatggcatccactttcattggtaactcgacttcaatccaggagatgttcaggagagttagtgagcagttcacggctatgttcaggcgcaaggctttcttgcactggtacaccggggaaggaatggatgaaatggaattcaccgaggccgagagtaacatgaacgatcttgttgctgagtatcagcagtac

SEQ ID NO: 176004 - DNA, 268 bp, Glycine max
  unsure (1)..(268): unsure at all n locations
tcanatactaagccagttggatgatcctcaacaagcacttcaatgggtgaacagccgcatcataccgtacctacccgagacaaagatcactggggttcaggttgggaatgaggtcttcactgatgatgacatcactctcattgagcaccttgtgccagcagtggtgaacattcacaatgctctagctcaattaggttactcaaacatcaaagtttcaacaccaagttccttagcagtgcttgatcaatcttaccctccttcagctggt

SEQ ID NO: 176005 - DNA, 286 bp, Glycine max
taactcggaatcggctcatccctgagttctcagccagggaagttctcatttccaattgaagtagaagatctcttgccttttgacgtgaagggtgtgtgggaatccatggaagagtgccagaaacttggcctcaccaaagccattggagtcagcaacttctctgtcaagaagcttcagaatctgctctctgttgctaccatccgtcccgtggtcgatcaagtggagatgaaccttgcatggcaacagaagaagctaagagagttctgcaaagaaaatgggataatag

SEQ ID NO: 176006 - DNA, 267 bp, Glycine max
tggaaaagaggattagagggtcgccacgtttagcaataaccaaaccctctctactcttttttcttctccttctcttcgctagggttttagcttcttcctcttcacttcgttctttttcgcctctacaatgagcaacgacaaggacacattcaacgtcgccgatctcacttctgctctcaacgaggacaatagagcagaccttgtcaatgctcttaagagcaagatacagagtttggctggacaacactcggatattctagagtctct

SEQ ID NO: 176007 - DNA, 262 bp, Glycine max
gtctgacatgtgtgcgagtcaacgggcgagtaaacccgtaaggcgcaaggaagctgattggtgggatccccctgtgggttgcaccgccgaccgaccctgatcttctgtgaagggttcgagtgagagcatacctgtcgggacccgaaagatggtgaactatgcctgagcggggcgaagccagaggaaactctggtggaggcccgcagcgatactgacgtgcaaatcgttcgtctgacttgggtataggggcgaaagactaatc

SEQ ID NO: 176008 - DNA, 263 bp, Glycine max
atgatcgaccttcttatgatggatacaattggaggaaatatggtcagaagcaagtgaaagggagcgagtacccgcgaagttattacaagtgcacacatcctaattgtccagtgaaaaagaaggttgaaagatcatttgatgggaatattgcagaaattgtttataaaggtgaacacaaccattcgaagccacagcttcataagcgaaactcagcagcagggacacaaggatcaggggttatgtctgatggaatggttcaagat

SEQ ID NO: 176009 - DNA, 264 bp, Glycine max
actggcggtgtgatgactgtcttgatccctaggaacactacaattccaaccaagaaggaacaggttttctcaacatactctgacaaccagcctggtgtgttgatccaggtctttgaaggtgaaagagcaaggactaaagataacaatttgttgggcaaatttgaactttctggcattcctcctgcccccaggggtgttcctcagattactgtgtgctttgacattgatgccaatggtattttgaacgtctctgccgaagataag

SEQ ID NO: 176010 - DNA, 264 bp, Glycine max
cagaagcccgtcaccgtttttggaatcaggaaccctgaggaaattccatggggtgaggttggtgctgattatgttgttgagtcaactggtgtattcactgacaaggacaaggctgctgctcacttgaagggtggtgccaagaaggttgtcatctctgccccaagcaaagatgcacccatgtttgttgttggtgttaacgagaaggagtacaagccagagcttgacattgtttccaatgctagctgcactaccaattgtcttgct

SEQ ID NO: 176011 - DNA, 264 bp, Glycine max
ttcacacacactctctctggtgttgttgagttttgaaaatggtgtcgtcgcaggttgtgaatacttacccgttgtccagctacacgttcggcacgaaggagcccaagatggagaaggatacctccgtcgcggatcgtctcgctcgcatgaaagtcaactatatgaaggagggaatgaggaccagtgtggaaggaattttactggtacaagagcacaatcatcctcatatacttcttctccaaattggaaacacattctgcaaac

SEQ ID NO: 176012 - DNA, 264 bp, Glycine max
actttccattcgttcaccgccccaatctctgcagcgccttcgatctagaaaacatgactaagagaacaaagaaggctggcattgttggaaaatacggtacccgttatggtgccagtctgcgaaagcagattaagaagatggaagttagtcagcacagcaaatttttctgtgaattttgtgggaagtatgctgtgaagaggaaagctgtaggaatatggggatgcaaggactgtggtaaagtgaaagcaggcggtgcttatactt

SEQ ID NO: 176013 - DNA, 264 bp, Glycine max
  unsure (1)..(264): unsure at all n locations
aggaaatgaagatagaagaagaaagaattgaggctgagaaaaaacgggtaaaagaagaggcacagcaacttgctctaatttttgaaactgttggggctttcaaggtgaagcgtaaaggtggtaaaggaaaacaaatttttggaagtgtcactgctcaagatcttgttgacataatcaaggcacaacttcaaagggaggtggacaagagaattgttgatcttccagagatcaggganacaggagaatatattgcagagttaaagc

SEQ ID NO: 176014 - DNA, 264 bp, Glycine max
gaatttctatctatctcttgtttcaatttcaacaacggttactcctttttcgttttgagtttcaatcaagccatcatcatgtctaccgcatcgcaacccaaggccaagaaaacggcgtcgtccaagaagcccctctcccaccctcccttcgccgtgatgatagcagaggcgattgcgagtctgaaagagagaaccggttcgagccaatacgcgataaccaaatacatcgaagggaagcacaaggagttgcctgcaacctacaag

SEQ ID NO: 176015 - DNA, 262 bp, Glycine max
tcttttgtagtgttcctcggctatataacagaatatatgctggtattactaatgctgttaaaacatctggtggtctgaaggagagactatttaatgctgcctacaatgctaaaaggcaggctttattgcatgggaagaacccatctccaatgtgggacagattagttttcaacaagataaaagaaaagcttggaggacgagttcggtttatggcatcaggtgcctcacctttatcacctgatatcatggaatttttaaagat

SEQ ID NO: 176016 - DNA, 261 bp, Glycine max
ccgcaactcacactgtcttccttctctagggtttttagctcctccaaattcttcgcccaacatggttcttcaaaatgatattgatttgctaaatcccccggctgagcttgagaagaggaaacacaagctcaagcgtcttgttcagtcaccaaactctttcttcatggatgttaagtgccagggttgcttcaacataaccactgtctttagccactctcagactgttgttgtatgcggaaattgccagaccgtcttgtgcca

SEQ ID NO: 176017 - DNA, 263 bp, Glycine max
caacactgaaggcatagggagagagagagttctcgaggaagaagaaaaagaggtgaaatatagagagtgaagaagaagaaatagagggttttggtgtttggtgtttgaatcgtgaaaatgttcagaaaccagtatgacacggacgtgacgacatggagcccggcggggaggctgttccaggtggagtacgcgatggaggcggtgaagcagggctcggctgcgatagggctccgatccaagacccacgtggtcctcgcatgcgt

SEQ ID NO: 176018 - DNA, 266 bp, Glycine max
cggtcgaactcgagcgatccttctctgttctcctagaacttgattacttgaacattccctataacagatgaggtggttcttctggatttctggccaagtccatttgggatgagggtcaggattgcacttgctgaaaagggtatcgaatatgagtacaaagaagaggacttgaggaacaagagtcctcttctcttacaaatgaacccggttcacaagaagattccggttctcatccacaatggcaaacccatttccgaatccctcat

SEQ ID NO: 176019 - DNA, 260 bp, Glycine max
ctcgaagcagccatggggatcgatctcaaggccggacgtaagagcaaaaagaccaaaagaacagcacccaagtccaatgatatctatctcaagctcttggtcaagctttatcgcttccttgttcggagaactggcagcaacttcaatgctgttatacttaagagattgttcatgagcaaggttaacaaacccccattgtctttgtcaaggttgattaagtatacgaaggggaaggaagataagattgcagtggtggtggg

SEQ ID NO: 176020 - DNA, 260 bp, Glycine max
ctgcgtggtgagtgaaaatggcggtacccttgctctccaagaggatcgtgaagaagcgcgtcaagaagtttatacgcccccagagtgatcgcaagatctccgtcaagccaagctggcgcagacccaagggtattgattctcgtgtcaggagaaagttcaaaggatgcactttgatgcccaacattggttatggctcagacaagaaaacccgccattatctaccaaatggtttcaagaaatttgtcgtgcacaatgtgaaa

SEQ ID NO: 176021 - DNA, 260 bp, Glycine max
tatggtagcagcagctgagcttgtttccgtcgccgcttcacccaccgtagcaaccatgatcattcccgagaagaaccgtaaagagatctgcaaatacctcttccaagagggagtttgctttgcgaagaaggacttcaatctggcaaagcacccagagattgatgtgccgaatctgcaggtgataaagctgatgcagagcttcaaatccagagagtatgtgagggagacatttgcgtggatgcactattactggttcctca

SEQ ID NO: 176022 - DNA, 257 bp, Glycine max
caaccatggccagacaatatgttcgtagtatcattgcatctgttcaaagggtttcattagcactttctccttcgcgctttggttctcacaatgctttccacttaccacctggcactcctgaggcacaaacacttgctcgatggatctgtaacagctaccggttctatcttggggtagaacttctaaaatgtgaaggcagtgaatccattctcaagtctctttggcatcactcagatgcagttttgtgctgctcttta

SEQ ID NO: 176023 - DNA, 257 bp, Glycine max
ctcgaagcagccatggggatcgatctcaaggccggaggtaagagcaaaaagaccaaaagaacagcacccaagtccaatgatatctatctcaagctcttggtcaagctttatcgcttccttgttcggagaactggcagcaacttcaatgctgttatacttaagagattgttcatgagcaaggttaacaaacccccattgtctttgtcaaggttgattaagtatacgaaggggaaggaagataagattgcagtggtggt

SEQ ID NO: 176024 - DNA, 259 bp, Glycine max
cagggagaggaaatcgcggaagagacgcaacggtggaagtgattatgtggaagacacacttgaaaagtggaaggagtacaacaggcagcaacaacttggctctagagaaaatggggtggaagtgattcacaaagctcccgcaaaagggtcgagaaaagggtgcatgagaggaaagggagggcctcagaactccgattgcaagttcagaggtgtgaggcagaggatttggggtaaatgggttgctgagattcgcgaacct

SEQ ID NO: 176025 - DNA, 258 bp, Glycine max
tgtgactcgttcttcttcgtcgttatcttcttcttttgttgtttgtgtgtttgttttttctctcacctgaaaatgtcttgctgcggtggtaactgtggttgcggaagcgcctgcaagtgcggcaacggctgcggaggctgcaagatgtacccagacttgagctacaccgagtcaaccaccaccgagaccttggtcatgggagtggcaccagttaaggctcaattcgagagtgctgaaatgggtgttcccgctgagaac

SEQ ID NO: 176026 - DNA, 258 bp, Glycine max
cagcgagtgagtgagcgagccaggtagggttttcggtgttcccctctttgtgttcgttcgcgacgatggggaccatccccgatccaggcgagttgagcgagttgactcagccgagcttcgacgagttccagcgccaaacctctctcatgaccagctgcaccctcctctggaaggagctctccgaccacttctcctccctcgagcaagacctcaaccacaaatccgaagccctcaagcgcaagattcacaccctcgaca

SEQ ID NO: 176027 - DNA, 258 bp, Glycine max
ctttctcttccttctcatcattctcatattattgtcgccactatcgacctcaatcaccctcgcgccctcgctcttcccttcctggtggcgacaatgtcgactcctgctaggaagaggctgatgagagacttcaagaggctgcaacaagacccgcctgcagggatcagcggtgccccccaggataacaacataatgctgtggaatgctgtcatatttggtcctgatgatactccatgggatggaggcacgttcaagttg

SEQ ID NO: 176028 - DNA, 256 bp, Glycine max
ctgggaagccatcgttgtctcggcgaatcctacaagatttgggaaatggctgctgcacgagggttggtactgtcacgtcctgttacttttgtaactgccaatgccaaaaagcttgaagaagttcgtgccatcttgggcaattccattccttttcagtccctcaaacttgacttgccagagttgcaaggagaacctgaagatatctccaaagagaaggctcgaattgctgctcttcaggtgaatggacctgtgttgg

SEQ ID NO: 176029 - DNA, 257 bp, Glycine max
agcggacaattctttctgatcttgtaactgtttacgcaaagggtgggaagactatagtttttacacagacaaaaagagatgctgatgaagtatcattgtcattaacaaatagtataatgtctgaagcactgcatggtgatatatctcagcatcagagagagagaacactgaatggtttccgtcaaggaaaattcacagtgcttgttgccactgatgttgcagctcgtggactggatattcccaatgttgatttgatt

SEQ ID NO: 176030 - DNA, 257 bp, Glycine max
cttctttcctcaaccttctttcttcttatatatcgaacatggctaagtatcattcaagtgggaaaagctcttccatgactgctatagccttcctgtttatccttctaatcacttatacaggcacaacagatgcacaatccggggtatgttatggaagacttggcaacaacttaccaacccctcaagaagttgtggccctctacaatcaagccaacattcgcaggatgcgaatctacggtccaagcccagaagtcctc

SEQ ID NO: 176031 - DNA, 258 bp, Glycine max
taggtgtgcacggccaccttaccaaaagacccgaggcaatatcaggactctgctgctcaaggtccttgtaaacattgagcagcagagccctgatattgcccagggtgtgcacggccaccttaccaaaagacccgaggaaatcggtgctggagaccagggtcacatgtttggctatgccactgtcgagaccccagaattgatgccattgagtcatgttcttgcaactaaactcggtgctcgtctcaccgaggttcgcaa

SEQ ID NO: 176032 - DNA, 260 bp, Glycine max
  unsure (1)..(260): unsure at all n locations
caatcaatgaagcagcacactttgataactcgggttttcttgntgtcaagtggtcttctgttaggaacgtaaacccagtgatgcagttgctgtcattcaagttctaaatcagaccttgtctgatacaaagaagtcaggcatcaagggtgaacttcagaagcttgtatctgagtggcctttggaagttattaagcaccaaaaagaagaggacagaaaggcattagcagcctctttgaaatctgatatccttgtcatggtta

SEQ ID NO: 176033 - DNA, 255 bp, Glycine max
atatcttctaaaattaaattaccatatatagtcacattttctttacactttgtgaggtctaaaatgttgtccatttttcacaaggggtttgctcacccacctgaagagcttaaaagccctgcatctaacagtggctccaacaagcctaagattcctgaggaaactctaagagaatttctttctcatcatccccataacactttttctctgagttttggtcactctgctgttctagcttatactcgtcctgatcca

SEQ ID NO: 176034 - DNA, 253 bp, Glycine max
attggggataatgttactgtcggccacagtgctgttatccatggttgtactgttgaggacgaggcttttgttggtatgggtgcaatactacttgacggtgtagtagttgagaaaaatgccatggttgctgctggtgcccttgtgagacagaatacaagaattccttctggcgaggtatgggcaggcaatcctgcaaagttcctgagaaagctcactgacgaagagatagctttcatctcccagtcagctacca

SEQ ID NO: 176035 - DNA, 253 bp, Glycine max
gtgcaactagcagcctccaaatccaatggcttcagagaagaaactttcgaacccaatgagggagataaaagtgcagaagctcgtcctcaatatctctgttggcgagagtggagatcgtctcaccagagccgccaaggtgttggaacaacttagtggccaaaccccagtgttttccaaagcaaggtacactgttcgttcctttgggattagaagaaatgagaagattgcatgctatgtcactgtcagaggtgac

SEQ ID NO: 176036 - DNA, 254 bp, Glycine max
  unsure (1)..(254): unsure at all n locations
tntaattcgtggagggaatacttttccattacgcacgcactttaattacagacgagaaaattataattaatagtaatacagacagcagcatgcgcccaccggttattctcaaaactaccacctctcttttggannnnnnnnnnnnnnnaccaccctgtgatcgcagactcaacactctcgctagacacttccttccgcaaatggcttctcacgacagcatctccgcttctccaacctccgcttctgattccgtc

SEQ ID NO: 176037 - DNA, 273 bp, Glycine max
accaagtcaagttctcactttgaagagaaaataacaacgtaaagatgtctgcatcaggaggcagaggaagccaagaggaagagaagaagccttctgatcaaggagcacatattaatctcaaagtcaagggccaggatggtaatgaggttttctttaggattaaaagaagcactcagctcaagaaacttatgaatgcatactgtgatcgtcaatctgtagattttaactcaattgctttcttgtttgatggaaggagactccgagctgaacaga

SEQ ID NO: 176038 - DNA, 271 bp, Glycine max
aagcaaccatggcaatggcaacccaagcctctctcttaaccccacccctctccggtctcaaagccagcgaccgcgcctccgtgccatggaagcaaaactccagcctctccttctccagcccgaagcccctcaagttctccagaacaatcagagcagcagccgccgacgagaccacagaggcaccagcaaaagtagaggctgcaccggtcgggttcaccccaccagaacttgacccaaacaccccttccccgatcttcgggggcagcaccgg

SEQ ID NO: 176039 - DNA, 268 bp, Glycine max
actacttctctgcctttaatcttccttcttatggaaccaaactttaacaacaacccaaagatgttacagaaaaagtggctttctactgctttgaatgtgagaagccaaggatcaggcagtgaaaccatagtctttgctcatggctatggaacagaccagtccatctgggagaagatcactccctcctttgctgaaaactaccgggttgtgctgtttgattggcccttttctggagctgtgaaggatccaagcctctatgaccctttga

SEQ ID NO: 176040 - DNA, 265 bp, Glycine max
ctcttagtcccaattttctagggttttattcattttccgatggactctgcagatgttgagtaccgttgctttgtcggtgggctcgcttgggccactgacgaccatgccctcgagagagccttctctcagtacggcgaaatcgttgaaacgaagattatcaacgatcgtgagactggcagatccaggggttttggatttgtgaccttcgcctcggagcagtccacgaaagatgcgatcggagcgatgaatggacagaacttggacg

SEQ ID NO: 176041 - DNA, 266 bp, Glycine max
gacgaggaagggcgtagtaagcgacgaaatgcttcggggagttgaaaataagcgtagatccggggattcccgatataggtcaacctttcgaactgctgctgaatccacgggcaggcaagagacaacctggtgaactgaaacatcttagtagccagaggaaaagaaagcaaaagcgattcccgtagtagcggcgagcgaaatgggagcagcctaaaccgtgaaaacggggttgtgggagagctatacaagtgtcgtgctgctaggcg

SEQ ID NO: 176042 - DNA, 265 bp, Glycine max
tagggttcgtgcggttcgtgttggagcttcagcaccactggggctctcgaaggtgctcactttctgtctacaggggaacttgtcagtcttagcgagcagcagcttgttgattgtgatcacgagtgtgatccagaagaaccaggatcttgcgactccggatgcaatggtggattgatgaatagtgcttttgagtacatccttaaatctggtggggtcatgcgcgaggaagactacccttattctggtgctgatagcggaacctgca

SEQ ID NO: 176043 - DNA, 282 bp, Glycine max
acgtaatctgggtctagctgtgttgcttgcatgttatccacacaaattgcttggtctcgcatatcaagagttttcctccacatactgcccctgcaggatatgcgtgtccttcatgttctacttcaatatggcctcctaaaagtgtgaaagattcaggatcacgtcttcattccaagttgaaggaagctatcatgcagtctggtatggagaagaatgtttttggaaatcatcctgtatcagtgacagaatcacgaagtcctccacctgcttttgcttcagatc

SEQ ID NO: 176044 - DNA, 263 bp, Glycine max
agcccatcatggcttcagagaagcaagcggctcttgccgtcactccctctgatgctgatgctcctaccatatttgacaagatcatcaataaggagattccttctactgtggtttatgaggatgacaaggtgcttgccttcagggacataactcctcaagctcctacacatattcttatcattcctaaattcaaagacgggttaagtggtctatccaaggctgaggagaggcactttgagattcttggccgccttctgtacact

SEQ ID NO: 176045 - DNA, 273 bp, Glycine max
caccttgctgcttctctcactacattgcagggtcttgagggcattgtgggcaaagataagcttgttgtgtccacctcctcctcccttcttcacactgctgttgatcttgttaacgagaccaagttggatgacgagatcaagtcatggctagcatttgctgcacaaaaaattgttgaagttaacgcattggctaaggcattgtctggcaacaaggatgtggccttcttctctgctaatgctgcagctcaggcttcaaggaagtcctctccaaga

SEQ ID NO: 176046 - DNA, 269 bp, Glycine max
catcgttgcagctctactagctatggcttcgcaatttagatcgaagaagaacgatggagatggatgctgatctgcgtcgcgaaggaaggcgtcctatccaaccaatcaacggcctccgatcctctatcatctctcgagaccaatcccctcatggcgcgcgcttcatttccactcaagtcgtgacaaaccgcatgaagagtgtgaggagtatccagaagatcaccaacgccatcaagatggctgccgcatccaagctgagagccgctcag

SEQ ID NO: 176047 - DNA, 285 bp, Glycine max
gaatgcccctcgacgcaagccccaatcaaccatcacacctctcctcgttcacgctacccctttctgctcttcttctacctttcaagttttaaaagtataaagatggcagagacattcctatttacctcagagtcggtgaacgagggacaccctgacaagctctgcgaccaaatctccgatgctgtcctcgacgcttgcctcgagcaggacccagacagcaaagttgcctgcgaaacatacaccaaaaccaacttggtcatggtcttcggagaaatcacgaccaag

SEQ ID NO: 176048 - DNA, 270 bp, Glycine max
attgccagtgccattcccttcacaccattctcacaaaacaactttcaaactctgagaaagaatggctgccaacacattgatgagtactgctatctcagccttcccatctctcctttcttcctcaaaatccagatttgccaccgcagttcctctttctagctttggtgtcaccaatgcctcttcttctcgcttttctatgagtgctgactggatgccaggccagcctagacctccttaccttgatggttcagcacctggtgactttggatt

SEQ ID NO: 176049 - DNA, 266 bp, Glycine max
ccggcttgttcagtctttcttggaactttgttactctcacacatgtctcgctccgtgcctttggtttcaaccatttttgtcttgcttctgcttctggtggccactgagatgatggggccaacaatggtggcagaagcaagaacttgtgagtctcagagccaccgtttcaaggggccatgtttgagtgacaccaactgtggctctgtttgccgaaccgaacgtttcactggaggacactgccgtggcttccgtcgcagatgcttctg

SEQ ID NO: 176050 - DNA, 266 bp, Glycine max
atgagttctaccttgggcagagagatggtggtgactactggacttctgatgccggtccattagaggcatttaagaggtttggaaagaagcttgaagagattgaaaagaagcttatagagaagaacaaagatgagacattgagaaaccgctatgggccagctaaaatgccttacactctgctctatgcttctagtgaggagggattgactttcagaggaattcccaacagtatctctatctaaggaccctatggttgcttaagtact

SEQ ID NO: 176051 - DNA, 265 bp, Glycine max
ctttctttctcttcgagggtttggctttctcttcctccctggaacccaaagaagagtcaccgctacgacgccgttcgtgcttttttgaggtgccacagtcatgtttgggcgtggtggaccaaggaggagtgacaactccaaatattatgatattctcggggtttccaaaaatgccagtgaagatgaaatcaagaaggcctatagaaaggctgctatgaagaaccatccagataagggaggagatcctgaaaagttcaaggagtta

SEQ ID NO: 176052 - DNA, 267 bp, Glycine max
catcttgttctatctgtgacgagcatcatggcctcaagagcagtgttattgttggctatgtgtgtgcttccggcgatggttgtggccattcgcccagcaaagaaccctttttgcgtgaagggtcgtgtctactgtgacccttgccgtgctggttttgagacctcagctaccacctacattgctggtgctgagattatgttgcaatgcaagagcagggttagcaacgaggttgtgtacacgaagaaggggtacaccgactcaaccgga

SEQ ID NO: 176053 - DNA, 265 bp, Glycine max
gcttcctctctctttgggggctcaattgcactcttcaagtttgagctgtactttgggcttttggtgtttgtgggctacgttatagtagacactcaagaaattattgaaagggctcactttggtgacctggattatgtgaagcatgcattgacattgttcactgatttggctgcaatctttgtgcgaattcttattataatgttgaagaattcatctgagagaaatgagaagaagaagaaaaggagagattagtaggctgaccgac

SEQ ID NO: 176054 - DNA, 258 bp, Glycine max
aagaaaatcaacatttttcttctatcaattcacacgacaaaatttagcagagttcaaaacaccaaccaagtaaagtaaagaacggaagatgtcactgataccaagtttcttcggtggtcgaaggagcaatgttttcgaccctttctcgctcgacgtatgggaccccttcaaggatttgtctttcccttctgctgaagattcagctttcttgaaaacacgagtggattggaaggagaccccagaagcgcacgtgttcaa

SEQ ID NO: 176055 - DNA, 267 bp, Glycine max
caacaaatcaaagccatggccacctccaacttctctattgttctctccgtctccctagccttctttttggtgctacttaccaaggcacactcgaccgataccgtttctttcaccttcaacaagttcaacccagtccaaccaaacattatgctccaaaaagatgctagtatttcatcctctggggtgttacaactcaccaaagttggcagcaacggcgtgcccacctcgggatctctcggtcgtgccctttacgctgccccaatccag

SEQ ID NO: 176056 - DNA, 269 bp, Glycine max
ctctctctctttctctttctctctcatccagatcttgcaaaaaacaaaaaacacaatggcagcgagcgctcccactccacgcgaagagttcgtgtacatggcgaactggcggacaggccgagcgctacgaggagatggtggagttcatggagaaggtctccgcctccgccgagaccgaggagctgaccgtggaggagcgcaacctcctctccgtcgcctacaagaacgtaatcggcgctcgccgggcctcctggcgcatcatctcctca

SEQ ID NO: 176057 - DNA, 272 bp, Glycine max
cgaagacaaacacaacaatcgagcttgcaacttcacccaagtctcaaacaaccttttaaacctcatcaaacatgtctctgattccatcattgctaagcaacagaaacatcatggaccccttctccaccaacatctgggcaccctctgactccgacagcgaggtttccgccttcgtgaacgcacgtgtggactggaaggaaaccccggagtcgcacgtgttcaaggcggacttgccggggctgaagaaggaggaggtgaaggtggaggtggag

SEQ ID NO: 176058 - DNA, 274 bp, Glycine max
caagaaaaaccaaaagatgtctctgattccaggtttcttcggtgcccgaaggagcaacgtcttcgatccattctcactcgacatttgggatcccttcaaggattttcatgttcccacttcttctgtttctgctgaaaattctgcactcgtgagcactcgtgtggattggaaggaaaccccagaggcacacgtgttcaaggctgatattccagggctgaagaaagaggaagtcaaggttcagattgaagatgatagggttcttcagattagcgga

SEQ ID NO: 176059 - DNA, 267 bp, Glycine max
cgactataagctagtttatcgtgaggagaatatgaagttgtttgtcttctttgttgctgcagtagttttggtagcatggccatgccatggcgcaggctaccaaaggttccctctccgaatgaaaactggctatggtgagcgttcttcggaggtaaaatgcgcaagttttaggcttgctgtggaagcacacaacatccgagcctttaaaaccattcctgaagagcgcgttgaaccaacaaaggactacattaatggcgaacaatttag

SEQ ID NO: 176060 - DNA, 266 bp, Glycine max
tcgacaccgagcgatccgatcctaaccccgcgatgctccgccgcgcaaccagctccctcatctccggcgcctcccgccgccgcctctccaccgacgtgccggcgccgccgcggcggagttccgtcttcgcggaggcgtggaagaaagtgagccccaacatcgacccgccgaagacgccgctggcgtacatgaagccccgaccacccactccttcgactctcccctgcaaactcagcgtcaacttcgtcttgccctacgcttctcaa

SEQ ID NO: 176061 - DNA, 265 bp, Glycine max
cagataactagaaacagtgtgatgaaaatgaaggtccttgttctcttcgttgctacaattttcgtagcatggcaatgccatgcgtacgatatgttccctctccgaatgaacactggctatggtgcccgtactccggaggtgaaatgcgcaagttggaggcttgctgtggaagcacacaacatctttggctttgagaccattcctgaagagtgcgttgaagcaacaaaggaatacatccatggcgaacaatatagatcagactcca

SEQ ID NO: 176062 - DNA, 264 bp, Glycine max
tcttttgggcaaagattaacaataaaagtgtggagtactgttgatagcaaagatgtttgggatcttcgacaaggggcaaaagataaaggggacagtggtgttgatgccaaagaatgtgttggacttcaacgccataacctccatcggtaaaggtggtgttattgacacagccaccggcatcttaggccaaggcgtcacttagttggtggagtaattgatactgccacttccttcttaggccgtaatatctccatgcaattgatc

SEQ ID NO: 176063 - DNA, 265 bp, Glycine max
gcttccttctgggtcaaagaagattgtgcctagtgggtgcagggcgatgattgggcaggttgcaggtggagggaggactgagaagcctcttctgaaagctggtaatgcttatcacaaattcagagtgaagaggaattgctggcctaaggtgcgtggtgtggcgatgaacccagttgagcatcctcatggaggaggtaatcaccagcatattggtcatgccagtaccgtcaggcgtgatgctcctcctggccagaaggttggtctc

SEQ ID NO: 176064 - DNA, 265 bp, Glycine max
atcaaatcagctattatgaccacagctacaacactagataacaccaatcaaccgattcgcaatgcatttcataacgtagcaactccattcgaatatggtgccggacacattcagcctaaccttgcaattgaccctggactcgtttacgatttacgcaccaccgattacttgaacttcttatgtgcttctggttacaaccaagctttactcaacttatttgccaaattgaaattcccatacacttgtcccaagtcttacagaattg

SEQ ID NO: 176065 - DNA, 262 bp, Glycine max
attgcaagaatggcacttcgttgcttggtgatgtccctttctgttctcttcactcttggtcttgcgagagaaagccatgccagagacgaagatttttggcatgctgtttggccaaacactcccattccaagttcattgcgagatcttctaaagcctggccctgcaagtgttgaaatcgatgatcaccctatgcaaattgaagaaacacagtacccgaaaaccttcttctataaagaagaccttcatccaggcaaaacaatga

SEQ ID NO: 176066 - DNA, 260 bp, Glycine max
ctcaagcccagattcaaccagttaaacttggaacccaaggctttgaggtttcaaaattgggattcggatgtatgggccttactggagcgtacaatgaccctctccaagaacaggatggcatatctgttatcaagtatgcgttcagtaagggaatcacattttttgatactgcggatgtttatggagccaatgctaatgaacttttggttggaaaggctttgaagcagctgcccagagaaaagattcagatagccacaaaa

SEQ ID NO: 176067 - DNA, 261 bp, Glycine max
  unsure (1)..(261): unsure at all n locations
actaactgaagccgtaaggganagaccttacagtgtggtgctttttgatgaagtggaaaaggcacatacatctgtgttcaatactcttcttcaagttttggacgatgggaggttaactgatggacaaggccgtactgtggactttagaaacactgtaattatcatgacctcaaatcttggagcagagcacctcctcagtggactttcaggaaaatgtaccatgcaagttgctcgggatcgggtaatgcaggaggtgagaag

SEQ ID NO: 176068 - DNA, 267 bp, Glycine max
cgagataactagaaacagtgtgatgaaaatgaaggtccttgttttcttcgttgctacaattttcgtagcatggcaatgccatgcgtacgatatgttccctctccgaatgaacactggctatggtgcccgtactccggaggtgaaatgcgcaagttggaggcttgctgtggaagcacacaacatctttggctttgagaccattcctgaagagtgcgttgaagcaacaaaggaatacatccatggcgaacaatatagatcagactccaa

SEQ ID NO: 176069 - DNA, 158 bp, Glycine max
tataagctagtttatcgtgaggcggatatgaagttgtttgttctctttgttgctgcagtagttttggtagcatggccatgccatggcgcatgctaccagaggttccctctccggatgacaactggctatggttagcgttcttcggaggtaaaatgcgc

SEQ ID NO: 176070 - DNA, 270 bp, Glycine max
gtttggaagaggaaaatacattacagcagcaaaggaaggttgtggtaagtaaatagtagtaacctaacccttgcgtttgcgagtgaggctgaggttgggtttggaaggcaaaggctggtgttgtcccaatccaagagagaagtaaagtaaagcaaaggaatggcgaacatagacatcgaagggatcttgaagcagcagcctgatgatgggcgcgttccgaagacgaaaatagtgtgtactttgggccccgcttctcgatccgtggaaatg

SEQ ID NO: 176071 - DNA, 266 bp, Glycine max
gtcaactggattggctttgggctttcctgcgcagttaggtggagggcaaagaaggcctccttctgggggggccagagccatcagtgagataccactctggaagagctagaattctaaccttgtgccaggacctacgggccgagggacagtctcaggtagacagtttctatggggcgtaggcctcccaaaaggtaacggaggcgtgcaaaggtttcctcgggccagacggagattggccctcgagtgcaaaggcagaagggagcttg

SEQ ID NO: 176072 - DNA, 263 bp, Glycine max
ctcactttccattctcttcaaacctaacgcagcatcgctattctcttcattccatggctttgcccaaccagcaaaccgtggattaccctagtttcaaactcgttatcgtcggcgatggtggcacaggaaagacaacctttgtgaaaaggcatctcaccggagaattcgagaagaaatatgagccaaccatcggtgtggaggttcacccattggattttttcacaaactgtggaaagattcgattttactgctgggatactgct

SEQ ID NO: 176073 - DNA, 259 bp, Glycine max
caacaaaaaaagacaacccagagagcgcgtcttaataaacgctcttctctgaaaacccccatttcttttcttctttcttcttctctttcgcttcttcgatcttcgatcttcgtcgctgaaaatgagagagtgcatttcaatccacatcggccaggccgcgattcaggttggaaacgcctgctgggagctttactgcctcgaacacggcattcagcctgatgggcagatgccaagtgacaagaccgttggtggaggtgat

SEQ ID NO: 176074 - DNA, 251 bp, Glycine max
tcttcaacaatggtgctccagccgacgatgatctgtatcgacaattctgaactgatgcgtaaccgtgattactctccttctcgatttcaagctcaagtagacgctgtgaatctcatttgcggtgctaaaacgcagtctaatccagatgatacaacgggagttctcacaatggcaggtataggcgttcgtgttttggtcacccctaccagtgatctgggcaagatcttagcctgcatgcatgggctatatat

SEQ ID NO: 176075 - DNA, 194 bp, Glycine max
tgctataagctagtttatcgtgaggagaatatgaagttgtttgttttctatgttgctgcagtagttttggtagcatggccatgccatggcgcaggctaccaaaggttccctctccgaatgaaaactggctatggtgagcgttcttcggaggtaaaatgcgcaagttttaggcttgctgtggaagcacacaacat

SEQ ID NO: 176076 - DNA, 262 bp, Glycine max
agctgattttcgcggcggttaccactcatcggagattctatccaaaatcgttttccgatgacgataaaaactgttaaagtcagtaacgtttccttgggagcaactgaacaagacattaaggagttcttttcattttctggtgatattgaatatgttgaactacagagccatgatgaacgatctcaaattgcctttattaccttcaaggattcacagggagctgagactgcagtactgctttcgggagcaacaatagtcgata

SEQ ID NO: 176077 - DNA, 262 bp, Glycine max
cttgaggttttttgtagcagaattcagtgcggtgtgttgtagcagcgattagaaggaaggaggaaagatgaacacagacatcactgcatcgacgaagccagagtacccagtcattgatcgcaaccctcctttcaccaaagtcgtcggcaacttcaacaccctcgactatctccgattcgtcacaatcaccggcgtttccgtcaccgtcggctacctctccgggattaagcctggaattaggggtccttcgatggtgacaggg

SEQ ID NO: 176078 - DNA, 260 bp, Glycine max
cacaatttctctttctctctttttttgtgtgtccaaaatggctcctagttctgctcacaacaatgggttctatgtgcttatgctagttgggatagtggttagcactatggttgctacctgtgctggtagcttctaccaagactttgatctaacatggggtggtgaccgtgctaagatattcaatggtggccagcttctatcactttccctagacaaagtctctggctctggcttcaaatcaaagaaagaatacctatttg

SEQ ID NO: 176079 - DNA, 262 bp, Glycine max
caaacttctggggaatggatttcacaactgacaagttgaggtctttggtgcgaaaatggcaaactttaattgaagctcatgtggatgttaagaccactgataattatacattgaggatgttctgcattggctttactaagaggcgtagtaaccaggtgaagaggacctgttatgcacaatcgagccaaatcagacagattcgcaggaagatgagagagataatggtcaaccaagcaacagcatgtgatttgaaagaattggt

SEQ ID NO: 176080 - DNA, 260 bp, Glycine max
caagattggacggattttggtaaatgaaagatttgccacaaatgtctctggtgtttatgcaattggagatgtaattccaggcccaatgttggcacacaaggcggaagaagatggtgttgcttgtgttgagtacatagctggtaaggttggtcatgtggattatgacaaagtccctggcgttgtctatacaatgcccgaggttgcatctgttgggaagacagaggagcaggtgaaggaacttggagttgaataccgtgttg

SEQ ID NO: 176081 - DNA, 259 bp, Glycine max
gaccttcatccaggcaaaacaatgaaagtacaattcaccaagcgtccctatgcacaaccttatggtgtatatacatggttaacggatattaaagacacctctaaagaaggatatagttttgaagagatatgcatcaagaaagaagcgtttgagggagaagagaagttttgtgcaaaatccttgggaacagtaattggttttgccatttcaaagctgggaaagaacattcaagtactttcaagttcctttgtcaataagc

SEQ ID NO: 176082 - DNA, 251 bp, Glycine max
ctgaacacctgcgcgctaacctagactccacaaatggtgttggtcgattaagacagcaggacggtggtcatggaagtcaaatccgctaaggagtgtgtaacaactcacctgccgaatcaactagccccgacaatggatggcgctaaagcgcgcgatctatacccggacgtcggggcaagagtttgttctgagctataagctagtttatcgtgacgtgaatatgcagttgtgtgacatcttagttgctgcag

SEQ ID NO: 176083 - DNA, 287 bp, Glycine max
cgctcgagccgattccgctcgagccaatcaaagccatggccacctccaacttctctattgttctctccgtccccctagccttctttttggtgctacttaccaaggcacactcgaccgataccgtttctttcaccttcaacaagttcaacccagtccaaccaaacattatgctccaaaaagatgctagtatttcatcctctggggtgttacaactcaccaaagttggcagcaacggcgtgcccacctcgggatctctcggtcgtgccctttacgctgccccaatccag

SEQ ID NO: 176084 - DNA, 266 bp, Glycine max
ctctgctcttccaactcctacaacgctcttctctgcactcatgggcaaggtcaagatcggaatcaacggatttggaagaattggccgtttggacgccagagtcgctctgcaaagagacgatgttgaactcgttgccgttaacgaccctttcattaccaccgattacatgacatacatgtttaaatacgacagtgttcacggacactggaagcatcacgatgtcaccgttaaggacgagaagacccttctcttcggtgacaaggcag

SEQ ID NO: 176085 - DNA, 261 bp, Glycine max
ctttttctctctttctctctgcttgcggtgcttcacaagccaaatctaacttgtctctgttttctccgatctagtactactatcaatggccggaaaaggagatggtcctgctatcggaatcgatctcggcaccacctactcctgcgtcggagtgtggcagcacgaccgtgtcgaaatcatcgccaatgaccagggtaacagaaccacgccgtcttacgtcgctttcactgattccgagcgtttgatcggtgacgccgccaa

SEQ ID NO: 176086 - DNA, 261 bp, Glycine max
cagaaatttcccgaaggaggaagaggttctgatcttctttgttttgttttgtctggttccctttcttccttcaaccaattttgagatccgaaaccggcatcagatccgattcgaaatgtacggattcgaagctctcaccttcaacatccacggcggcttcctcgaggccatcgtccgcggccaccgcgccggcctcctcaccaccgccgattacaacaacctctgccaatgcgaaaccctcgacgacatcaagatgcacct

SEQ ID NO: 176087 - DNA, 260 bp, Glycine max
cgagataactagaaacagtgtgatgaaaatgaaggtccttgttttcttcgttgctacaattttggtagcatggcaatgccatgcgtacgatatgttccctctccgaatgaacactggctatggtgcccgtactccggaggtgaaatgcgcaagttggaggcttgctgtggaagcacacaacatctttggctttgagaccattcctgaagagtgcgttgaagcaacaaaggaatacatccatggcgaacaatatagatcag

SEQ ID NO: 176088 - DNA, 261 bp, Glycine max
cggcaatctccatacccagtagacaacttttcatagatggagagtggaaagtccctcttctcaacaatcggtttccgatcatcaaccccgctactgaagacatcatagggcatattccagccgctactaaggaagatgttgaccttgcggtggatgctgctaaaagagccttttcccataacaaaggcaaagattggtcttcagctcctggctctgttcgtgctcgctatcttcgagccatcgcttcaaagataacagaga

SEQ ID NO: 176089 - DNA, 256 bp, Glycine max
caacctctcaagtccaacctacccctttttcttctcccaccaacttcaccgtcttcttcctcgatcatgtctcacttcaagggcaagtaccatgatgagcttattgccaatgctgcttacattggcactcctggaaagggtattcttgctgctgatgagtcaacagggacaattggcaagcgtttggccagcatcagtgtagagaatgttgaatccaacaggcgtgctcttagggagctgcttttcaccgctcccg

SEQ ID NO: 176090 - DNA, 255 bp, Glycine max
cccaaagttgatccagattctccctacaaatttgggatcattggtgatttggggcaaacgtttaattctctttccacccttgagcattatatacaaagtggagcgcagactgtcttatttgttggagatctttcttatgctgataggtaccagtacaatgatgttggtttacggtgggatacatggggacgatttgttgaaaggagtacagcatatcatccatggttatggtctgctggaaatcacgaaatagac

SEQ ID NO: 176091 - DNA, 267 bp, Glycine max
ctctgttgtcaaacatgggaaccacttgcctagaatctccaccaattctccaagacccaagggttactatcctcgaaacttcaatggtttttccatccaaagaaaccgacaagaggtccttgttcctatcaaacatagacacggtcctcaacttcgaagtggaaacggttcacttctttggagcaaacgaagattttccacccgcaaaagtggcccagatgttcaagaacgctctagaggaagccctagtggtctatgacttcttgg

SEQ ID NO: 176092 - DNA, 272 bp, Glycine max
ctggataacgaaatttcttagacaaaaaacaaggatcagaaccgttgaatcaagttgaggaagatggcactagtctctggaggaagatcaacactgaaccctaacgcccctctttacattcctgccgcgtttcgccaagtggaggatttctctccggaatggtggcagctggtgacgacgctgacatggtaccatgactactggctaagccagcagcacgatgagggagccttctacggcgaggacgacgggtttgatggcaatgatgtcgt

SEQ ID NO: 176093 - DNA, 206 bp, Glycine max
aaaccaaaatgaaagaagtagcaacaacaaaggccaatgaagctagacccactattgatggttctgcaaataataataacagtgcaccagctaccaaggctcaggttgtgggatggcctcctataagatcattccggaaaaattcattggctaccacttcaaagaacaatgaagaagttgatggaaaagtgggggttggtgcactg

SEQ ID NO: 176094 - DNA, 240 bp, Glycine max
ctggaatccaaaaatgagagaaatcatcagcattcacataggtcaggccgggatccaggttggcaactcctgctgggaactctactgcctggaacatggcatccagcccgatggcatgatgccaagtgactcctccttcggtgtagcccacgacgccttcaacaccttcttcagcgaaaccggatccggcaagcacgtccctcgcgccgtcttcgtcgatctcgagcccaccgtaatcga

SEQ ID NO: 176095 - DNA, 264 bp, Glycine max
ttttgaggcggcgagatggcgcagattcaggtgcagcatcagagtccggtgtcggctcctcctccgaacggcgtggctaacgcgccgaacaacccgaaccagttcgttacgacgtcgttgtacgtcggcgatcttgagcagaatgtcaacgacgcacagctatacgatctgttcaaccaggtcgtccaagtcgtttcggtgcgcgtttgcagggaccttacgacgcgtcgttcactcggttatggctatgttaatttcagtaac

SEQ ID NO: 176096 - DNA, 270 bp, Glycine max
ataaaattttcaaagtcgaagcgagaacttgccatttcgagggttttagggttagggttttctcaaattgcaagaacatgggtttcaacattcaaccctatgggattcagtccatgctcaaggaaggccataagcacctttctggcatcgatgaagcggttctcaagaacatcgacgcctgcaaacaactttccactatcactcgaacttccctcggtcccaatgggatgaataagatggttataaatcacttggacaagctttttgtca

SEQ ID NO: 176097 - DNA, 271 bp, Glycine max
cataactagaaacagtgtgatgaaaatgaaggtccttgttttcttcgttgctacaattttcgtagcatggcaatgccatgcgtacgatatgttccctctccgaatgaacactggctatggtgcccgtactccggaggtgaaatgcgcaagttggaggcttgctgtggaagcacacaacatctttggctttgagaccattcctgaagagtgcgttgaagcaacaaaggaatacatccatggcgaacaatatagatcagactccaaaacagtt

SEQ ID NO: 176098 - DNA, 277 bp, Glycine max
agcaaaagccatttggatcctctcttctcttctttgatctccgttacccttttcgttttctcaacacagagagagagagagagtctttcggagttcgtttgcgtgtgttgtgtgatcagtcaccgatggcagcaccacctgcgagggcacgtgccgattacgattacctcatcaagcttcttcttattggcgatacggtgtcggaaagagttgtctgcttttgcgattttctgatggttccttcacaaccagttttatcaccaccattggcattgat

SEQ ID NO: 176099 - DNA, 277 bp, Glycine max
cgagctcgagccggtcttcagtttctcctcgttgttcttcgctttcctgttttcaattacgattctttcgttaatttaataagatgtttgggagggcaccgaacaagagcgataatacgaggtactacgaaatcctcggcgtctccaagaacgcttcgcaggatgatctgaagaaggcttacaagaaagccgccattaagaatcaccccgacaagggcggtgatcccgagaagtttaaagagctggcgcaacttatgaggttctgagtgaccctgag

SEQ ID NO: 176100 - DNA, 270 bp, Glycine max
cacagagcaagaacactgttccaatacggaatctaaggcaaagcaaaccaaacatcttgaatcatgggttcaacaggtgagactcagattaccccaacccacgtatctgatgaagaagcaaaccttttcgccatgcaactagccagtgcttctgtccttccaatgatcctcaaatcagcacttgagcttgatctgttggaaatcatagccaaggctggccctggtgttcatctttcccccactgacatttcttctcagctcccaacacag

SEQ ID NO: 176101 - DNA, 268 bp, Glycine max
agaatggctcccaagggtttaacctttctggctgtgttaatatgcgtttcagcactgtcactgagtccttctgttgcgggggaagggcaaaataatggccttgttatgaacttctacaaggaatcatgccctcaggctgaagacatcatcacagaacaagtcaagcttctctacaagcgccacaagaacactgctttctcctggctcaggaacatcttccatgactgtgctgttcagagttgtgatgcttcactgttgctggcatcca

SEQ ID NO: 176102 - DNA, 266 bp, Glycine max
tgaacggcgaggtagaacgacgacccccttctgcgttttgaccttcaatctcaatcatggccaaagctgaaggtggcaaggaaccaataaatgaacaagcagtagcaaatatgtatgctgcaatgaggtctgagctcaaccaaatttactccaaaataactgaactggagatggaagttagtgagcacacattggttaccaatgccattcaaccacttgaccaatctagacgatgctatcgtatgattggaggggtgcttgtggag

SEQ ID NO: 176103 - DNA, 271 bp, Glycine max
atgccttataaataataagagcaaaaaaaaaaaaccaaaacaacgatagagagaacatgggttcaagttcagcatccgaaagtgtttgcgttacaggagtctctggtttcatcgggtcatggcttgtcatgagactcatcgagcgtagctacacggtccgagccactgtacgctatccagctaacatgaagaaggtgaagcatttggtggagcttccaggtgcaaagaccaaattgtctctgtggaaggctgatcttgctcaaaaggaaat

SEQ ID NO: 176104 - DNA, 272 bp, Glycine max
atctgcacataaaaaaccactctacaaaactctccagtaattctgaaaattttattttcttttggtgaaattaacagctctgtgattgatcaatggcgacaaaggaaggcaaagccataggcatcgatctcggcacgacctacagctgcgtgggcgtgtggcaaaacgaccgcgtcgagatcatccccaacgaccaaggcaaccgaaccactccctcttatgtagccttcaccgacaccgagaggctcatcggagacgcggcgaagaaccaa

SEQ ID NO: 176105 - DNA, 270 bp, Glycine max
cctcttttctctctctcttgcaaaacctaattttcatttcttccctcaaatttcaaaatgcgtgagctccttcacatccagggtggccaatgcggcaaccagatcggcgccaagttctgggaggtggtttgcgcggagacgggatcgaccctaccggaaggtacggtggggactcggagttgcagctcgagaggatcaatgtctactacaacgaggccagttgcggtcggttcgtgccgcgcgcggttctcatggacctcgaaccgggca

SEQ ID NO: 176106 - DNA, 268 bp, Glycine max
tggcaagaatggcacttcgttgcttggtgatgtccctttctgttctcttcactcttggtcttgcgagagaaagccatgccagacacgaagatttttggcatgctgtttggccaaacactcccattccaagttcattgcgagatcttctaaagcctggccctgcaagtgttgaaatcgatgatcaccctatgcaaattgaagaaacacagtacccgaaaaccttcttctataaagaagaccttcatccaggcaaaacaatgaaagtaca

SEQ ID NO: 176107 - DNA, 266 bp, Glycine max
gtcgaaattcatgcttcgcttggggattctgatggcctaaaaaatcctgctttgaagaaaaggactaaatctgattcaagtactgcttctagctccaaagcgtgtcgggagaagttgaggagggataggcttaatgacaagtttgttgaattgggctccatcttggagcccggaaggcctcccaaaacagacaaggcttccattctgattgatgctgcccgaatggtgacacagctgcgggatcaagccctgaagttgaaagactc

SEQ ID NO: 176108 - DNA, 265 bp, Glycine max
ctttctctctctctctctctcacccagatcttgtagcaatggcgaacgctcccactccacgcgaagagttcgtgtacatggcgaactggcggagcaggccgagcgctacgaggagatggtggagttcatggagaaggtctccgcctccgccgagagcgaggagctgaccgtggaggagcgtaacctcctctccgtcgcctacaagaacgtgatcggcgctcgccgcgcctcctggcgcatcatctcctcaatcgagcagaaggag

SEQ ID NO: 176109 - DNA, 266 bp, Glycine max
ccaaaatccagagtagtaggtggtcttcttagtgcatatgatctttcaggggacaaagttttcctcaacaaagcaatagaaattgcagacagattattgcctgcatggaatacgcctacaggaattccttacaacataaaaaattaaacacatggacgagcacacaaccctagttggactggggtaaattatagaattctgttaatgcatttcagtcttacttaacagtaggagatctgggatattacttaaatgggttgtagtcc

SEQ ID NO: 176110 - DNA, 128 bp, Glycine max
gattcgcacgcattgcttcgcctcacaacagcagctgcagcagcaatggctcccaaacgaggtggaaaggctccggctcttgccgctaagaagaagcctgagaaggtcacgaatccgttgttcgagaa

SEQ ID NO: 176111 - DNA, 194 bp, Glycine max
agagtttgttgtgagctataagctagtttatcgtgaggagaatatgaagttgtttgtcttctgtgttgctgcagtagttttggtagcatggccatgccatggcgcaggctaccaaaggttccctctccgaatgaaaactggctatggtgagcgttcttcggaggtaaaatgcgcaagttttaggcttgctgtgg

SEQ ID NO: 176112 - DNA, 264 bp, Glycine max
gaatttcaaaatgcctaaagttagaagattgaagtccccgtctactgattgtaatagaccatatccttacccatccaactccaaaaacattgagctgaataaacctatgaatttgttgggatcagctgatgaaatgaaagaatgggagcaggctagatgtcctatttgcatggaaacccctcataatggtgttcttttgaaatgttcttcctatgagaagggttgtcttccttacatgtgcaataccagttaccgccactctaa

SEQ ID NO: 176113 - DNA, 268 bp, Glycine max
aacgcagcatcgctattctcttcattccatggctttgcccaaccagcaaaccgtggattaccctagtttcaaactcgttatcgtcggcgatggtggcacaggaaagacaacctttgtgaaaaggcatctcaccggataattcgagaagaaatatgagccaaccatcggtgtggaggttcacccattggattttttcacaaactgtggaaagattcgattttactgctgggatactgctggacaggagaaatttggtggcctcagagat

SEQ ID NO: 176114 - DNA, 268 bp, Glycine max
gaagagctcaaaaagtctaaggttattaaaatagactctcaaaaatcatgggaacaccacatctcttatgctaccaatcaaaagtaccctattgtagttcatttctctgctttctggtgtgtcccttctttagttatgaatcctttctttcaagaattggcctccacttatgaagatgttttgtttctgacgttggatgtggatgaggttaaggaaattgcctccaagatggaaatcaaagccatgcccacctttctgttgctggggg

SEQ ID NO: 176115 - DNA, 269 bp, Glycine max
ctgagggccttccatggcttccgcttgtgcttcctctgcaattacagctgttgccatctctacgccgagttccgggcagaagaatggatcaggaggttgttttcttagtggaaggaaattgagcgtgaaaaaggagagagcagcaattggaggacgatcgatgggcactacagtgtgcgcagttgctgagcctgacagacctctatggttcccaggcagcacccctcctccatggcttgatggcactctacctggagacttcggctttg

SEQ ID NO: 176116 - DNA, 277 bp, Glycine max
cacattttatgcctccactgggacaacctcaataaggaagatcacataaaaagtaacacacgttatatttttattgagaagcagcaccacaagcattgaagaaacttatcttagttctgtgttgtttaattgtctgtttgatttgagtggtttccaattacagggctgtcttagcttggctttctattattgcacatcgcaacaaagacaagaatcccggggagaaattgatctccgtatctgacgttgtgatggagcactgggcaacttatggaag

SEQ ID NO: 176117 - DNA, 280 bp, Glycine max
agcagaaaaggcgaaggttgctgtgtttgctggtggtgttgatacatctgcaactgagactaaaggaactgtcctcatacatacagctgagcagctagaaaattattcaaaaaccgaagaggctaaagtagaggagctcatcaaggcagtagcagattctggtgccaaagtgattgtcagtggaggagcagtaggagagatggcgttgcatttctgtgagcgttacaagcttatggttctgaaaatcagctcaaagtttgaactacgtcgattttgccgg

SEQ ID NO: 176118 - DNA, 129 bp, Glycine max
cgtgacaccatgaatattaattcacttgcccgcaaatccttggtcaatgcagacggtattatagagaaaacatttttgtggggtaggtacgctttggaaatgtctgctgttgtttacaaggactgggtt

SEQ ID NO: 176119 - DNA, 265 bp, Glycine max
cgcaagcgcttctcctctttgtgttctggctatgcctcttggcaagagttagatcggacgaggattgcgtgtacacggtgtacgttcggacgggttcgatcatcaagggaggcaccgattcagtaattggtctgaagctatacgacaagtccggctacggcatatacatcaccaacctcgaggcatggggcgggttaatggatccgggtcacaactactacgaccggggcaacctcgacatattcagtggtagaggcccttgctt

SEQ ID NO: 176120 - DNA, 266 bp, Glycine max
ataaaatggcggttcctctactctcgaagaagatcgtgaagaagagggtgaagaagttcaagaggcctcagagtgacaggaaaatttctgtcaagacaaactggcgcagaccaaagggtatcgattcccgtgttaggagaaagttcaagggatgcactttgatgccaaacattggttatggttcagacaagaagacccgccactatctccctaatggttttaagaaatttgttgttcacaatgtgaaggacttggaactgctcatg

SEQ ID NO: 176121 - DNA, 265 bp, Glycine max
acgcctctgatgctttggacaagattagatttgagagtttgacggacaagagcaagctcgatgctcagccagagttgttcattcatattattcccgacaagactaacaattcgctgaccattgttgacagtggcattggcatgaccaaagctgatttggtaaacaacttgggtacaattgctaggtctggtaccaaggaattcatggaagccttggctgctggtgctgatgttagtatgattggacagtttggtgtggggttcta

SEQ ID NO: 176122 - DNA, 264 bp, Glycine max
gccaactttctcgttcgtcgatcacaaaaatggcggcgaaacttcaaatatttacgggattgccccccgcgccatttcaatcttcctcctccactctctgcgtactcaagaagcctctcactacctccttcttcggcactgcacgagtggaagttctgaaacttcgagtcatgaggattgcgaacctgcgcgcggtggaggtgctctcggtgctcgcatgaacctctttgacaggttcgccagagttgtgaagtcgtacgcaaa

SEQ ID NO: 176123 - DNA, 267 bp, Glycine max
gttcttcctgtgggaacttcctcgttcaaggaagccatgaagatgggtgtagaagtgtatcacaatttgaagtctgtgattaagaagaaatatggtcaagatgcaataaatgttggtgacgaaggtggctttgcccctaacatccaggaaaacaaggaaggcttggaattgctgaaaactgccatcgccaaagctggttacacaggcaaagttgtcattggaatggatgttgcagcttctgaattctacaaggaagacaaaacatac

SEQ ID NO: 176124 - DNA, 271 bp, Glycine max
cactcccaaattacacgcacaaccacaccttttaattctccgcaccaatcttttagcagataaaaagcgaaaagaggttcgttccatttcccgcttcttcttttttccctcacttttccccggcgagaaaatgagagaaatcctccacattcagggcggccagtgcggcaaccagatcggagccaagttctgggaggtgatctgcgatgagcacggcatcgaccacaccggaaattacagcggcgactccgaactccaattggaacgcatc

SEQ ID NO: 176125 - DNA, 277 bp, Glycine max
ctataagctagtttatcgtgaggagaatatgaagttgtttgtcttctttgttgctgcagtagttttggtagcatggccatgccatggcgcaggctaccaaaggttccctctccgaatgaaaactggctatggtgagcgttcttcggaggtaaaatgcgcaagttttaggcttgctgtggaagcacacaacatccgagcacttaaaaccattcctgaagagtgcgtacaaccaacaaaggactacattaatggcgaacaatttagatcagactctaaa

SEQ ID NO: 176126 - DNA, 130 bp, Glycine max
ctagtttatcgtgaggagaatatgaagttgtttgttttctttgttgctgcagtagttttggtagcatggccatgccatggcgcaggctaccaaaggttccctctccgaatgaaaactggctatggtgagc

SEQ ID NO: 176127 - DNA, 265 bp, Glycine max
aagcccttcaggctatcagtgcaagccacctaacacagtcacagtggatgactttgtgttctctggctttgtagctggaaacaccacaaacactttcaatgctgcattaacctccgcatttgttactgattttccaggtgtgaatggtcttggtgtatctgtggcacggttagacatagccaaaggtggatcaatcccaatgcacacacaccctgctgccactgaacttctaataatggtggaaggtcaaatcactgctggtttt

SEQ ID NO: 176128 - DNA, 266 bp, Glycine max
aaacaataataataaagaaaattacttatagattttcgtcatacgcctgcagttgttgttctcagtctaagatcaccgtcgaggtcttccccattcaatcaaagcacaaaaatggaggtgactgttttcactcctgcactggaaggaattaagcttgtaaaatcagagcaaggagaaattttgacccagcctttcttggatgcttgcaaccatatacttcctgttatagataagtttggagctgctatggcccttgttaaatctga

SEQ ID NO: 176129 - DNA, 249 bp, Glycine max
ctgctgagttccattcaaccttgctctttgtttttgccggtgttggttcagccatagcctatggtaagttgacatcagatgcagcacttgatcctgctgggttactggcagttgctatttgccacggttttgcactctttgttgcagtttctgtcggtgccaacatctctggtggccatgtcaaccctgctgtgacttttggattggctcttggtgggcacatcaccatcctcactggcttcttctact

SEQ ID NO: 176130 - DNA, 264 bp, Glycine max
ttcttttcttttctttctttctccgatcgcatcgctcgcaaccacaatcatgccttcccgaagaagaactctcttgaaggtcatcattctcggtgacagcggggtggggaagacgtctttgatgaaccagtatgtgaataacaagtttagtaatcagtacaaggcaaccattggagcggattttttaaccaaagaagtgcaatttgaagataggcttttcaccttacagatttgggatacagctggccaagaaagattccaaag

SEQ ID NO: 176131 - DNA, 268 bp, Glycine max
ctcactcactctgcactcaccactgccacacttcaatcgcactaatagctgtcaccttctcagatctacacaccgaagagggcatcaaatccctcgatcaattcctttctgggaaaacctatatttctggggatcagttgacaaaggatgatattaaagtgtatgcagctgttgttgaaaagccaggggacacttttcctaatgctgccaagtggtacgatgctgtctcttctcaacttgctccaagctttcctggccacgctcaagg

SEQ ID NO: 176132 - DNA, 247 bp, Glycine max
agagatagagagagatactcatagaaattcgcaaacactaatttcgcaaagatcggcgatggctgcctccaaggatcgcgagaacttcgtctacatcgccaagctcgccgaacatgccgagcgatacctagagattgtggcatcaatggagaacgttgcgaatctcgacgctgatctgactgtggaggagcggaatttacttcctgttgggtacaaaatgtgattggtcctcggagacaatcgtgga

SEQ ID NO: 176133 - DNA, 274 bp, Glycine max
cgcattccctcgatatctcagtcatccaattgcctcagttaatcccttaattgcaagcatcatgcgtgaggacgtctcaccaccaccatttccaccaccacaagggcagatgatgagcatggcgatgctcgttacaagaacgaggacgatgtaccccaagcgtcttgagcaccttggggtacttggtgcttcggttgccggtgctcatgccttgcatgagaggcatgaggccaagacagacccagcgcattttgataggcacaatgtaaaagag

SEQ ID NO: 176134 - DNA, 273 bp, Glycine max
cttctctttctcttccttccttctccttctctcagagaacaacacctctctctctcaccgcctccttctcctctcacaccgccatgggcgagacttccgctcccgccgccgatgccggaatggacgccgtccagcgccgtctcatgttcgaagacgaatgcattttggtggacgagaatgaccgtgtggttggtcatgattccaaatacaattgtcacttgatggaaaagattgaagctgagaatttgctgcatagagctttcagtgtattcc

SEQ ID NO: 176135 - DNA, 273 bp, Glycine max
tctagacttagattttgtgaatggctgaagtggaagacggacaggtcatcggcgtccacaccgttgatgagtggaagctgcaactccagaatgcaaaagactccaaaaaactgattgtggtggattttactgcttcctggtgtggtccatgccgttttatggccccagttcttgcagagattgcaaagaaaactcctgaattgatcttcctcaaagtggatgtggatgaagtgaggcctgttgctgaggaatattccattgaggccatgccaa

SEQ ID NO: 176136 - DNA, 170 bp, Glycine max
tttcaaaagggagaagaaaaggaaagacaactctcaaaaaactattatagcaatggcagaacaaaaccaaaaccaaacaactgaagctggaaggcaccaagaggttggtcacaagagccttctccagagtgatgctctttaccagttattctggagacaagtgtctaccc

SEQ ID NO: 176137 - DNA, 165 bp, Glycine max
ggactcttctctagaagggcaatatgcaaacgacgatgctacaaagttggttgagcttgcttcaaaatgtcttcagtttgaggccagagaacgacctgaaattacgttccttcttactgccgttgcgcctcttcaaaggcagaagaggtagcatctcttgtgtta

SEQ ID NO: 176138 - DNA, 167 bp, Glycine max
ttagccctttaggataggaaggcttccacctgtcgttagaatcagcagtacctgttgatgggaggtttccgcatttagttctttcttgcactgcaacttctgaccatgccatcatttggatagagagagaatcccgacgggctacagatataatgcgagataacgat

SEQ ID NO: 176139 - DNA, 167 bp, Glycine max
gtagggttatcatttctccatttccattttctctctcacttttgcaagaatcgtaagctatgggaaagtcttacccaactgtgagtgctgattagcagaaggacgttgagaaggcgccgaagaagctcagaggattcatcgctgacaagagatgcgctcctgctaat

SEQ ID NO: 176140 - DNA, 169 bp, Glycine max
cgttatctgtgaccatttgggcttgggagtgaagactggccttccatacatctggcacagcaaagcaagcaatccttttgtgaatctcaaaaaggagtacaagggcattttctggcaagaagagatcattccattcttccaaagtgccaccattccaaaagaatgcact

SEQ ID NO: 176141 - DNA, 168 bp, Glycine max
ctaaaatccaaacacactctctcttcccatggcgttgaacaatggcgtccccgccaccggcaccggcctcatcgtcagcttcggtgagatgctcatcgacttcgtccccaccgtctctggcgtgtccctggccgaggcccctggcttcctcaaggcccccggcggcgc

SEQ ID NO: 176142 - DNA, 169 bp, Glycine max
tggagcttcaataggctaagcctgcatgccccaacggcttgaaccgtatcatcggattcgacaacgatcgccatgtgaagtgcatcagcttcatcgtctgcatgctcccaggcttctaagtgtgactgatttgcaatcaattgtagacggaccccacttcgtgtgtttg

SEQ ID NO: 176143 - DNA, 169 bp, Glycine max
cagaatttcctgtttacgatcttattgcaattttgcaactttcaaagcttattagctaaagtaacatcaaaagatgtcattgattccaagtattttcggtggcccaaggagcaacgtgttcgatccattctcactcgatatgtgggatcccttcaaggattttcatgtt

SEQ ID NO: 176144 - DNA, 166 bp, Glycine max
ttcaactaaaagaaagaatcccaggcgaggagaaagatggaggggaaggagcaggatgtgtcgttgggagcgaacaagttccccgagagacagccgattgggacggcggcgcagagccaagacgacggcaaggactaccaagagccggcgccggcgccgctggttg

SEQ ID NO: 176145 - DNA, 164 bp, Glycine max
tagggagaaagggtgtgagaatggagagcaaagaggaagatgtaagggttggagcaactaagttctcagaaaggcaaccaattggtacagcagctcagggtgacaaggactacaaagaaccacccccagcacctttgtttgagcctggtgagctaagtcatggt

SEQ ID NO: 176146 - DNA, 169 bp, Glycine max
ggatggtgccagagattctgagattgccatgggtgcttatcaaccatttcatttggctgccaggcagcctgccaggggacagatccatggtttccgcatgtcgttgtggtatgagcaccttggcttgcttcatgactctttcctccaccctgaaaatgaagcatgtatt

SEQ ID NO: 176147 - DNA, 169 bp, Glycine max
gtgaagtccatcacaacgacatatttatattcggcatagataacaccgtactctctaatatcccatactatgaaaaacatggatatggggtggaggaatttaatgaaaccttatatgatgaatgggttaacaagggcgacgcacggcattgccagagactcttaaaaat

SEQ ID NO: 176148 - DNA, 180 bp, Glycine max
tcagttcggctcgatatactcgttatcgtcggtgatggtggtacacgaaagaccacctttgtgaaaaggcatctcaccggagacttcgagaagaagtatgagccaaccatcggtgtggacgttcacccattcgatttcttcacaaactgtggacagatcgattctactgctgggatactg

SEQ ID NO: 176149 - DNA, 183 bp, Glycine max
atatagaaccgggtcgagcaacttcacccattcatacgtggtgttgttactgctgctcttttctcttttcttttctctttagttctctcttcccctttctttttctttttcttcttcttctgagcttgtttaagcttttcttccattaacatattatcacaatgtgtggtattcttgctgttc

SEQ ID NO: 176150 - DNA, 168 bp, Glycine max
gcgcttcacgatgggtgcttacaagtatgtttcggagctatggcgcaagaagcagtctgatgttatgagattcttgcagcgggtgaggtgctgggagtaccgccagcaaccttctattgtccgtttgacaaggtctactcgcccagacaaggctcgccgcttgggttt

SEQ ID NO: 176151 - DNA, 172 bp, Glycine max
tgtgtgattgagaaaggaggccgcaaaattggtcgtgatctggattacgatgagaaggatagcagttatagcagaatcaagagcctggtaactgaggagctaaaacaatacttgcaggccagaatttttgaatagattggatggaatgagtgtcttcaggcagctcacaaaa

SEQ ID NO: 176152 - DNA, 170 bp, Glycine max
cgacacctcactaaatgtcattgaaatacacacaaacatgttttattacagagatctctaatctagtttggactcaaattaaatacaataaatggaaaataaatcgtttgagacactttatttcaggataacctcaattttatcatacgacggatgcagagcatcacaaa

SEQ ID NO: 176153 - DNA, 167 bp, Glycine max
cagaatttcctgtttacgatcttattgcaattttgcaactttcaaagcttattagctaaagtaacatcaaaagatgtcattgattccaagtattttcggtggcccaaggagcaacgtgttcgatccattctcactcgatatgtgggatccttcaaggattttcatgt

SEQ ID NO: 176154 - DNA, 172 bp, Glycine max
tggcactggtatcaaccctgctcgtagtcttggtgctgctatcatcttcaacaaggaccttggttgggatgatcactggatcttctgggtgggacctttcattggtgctgcacttgcagcactctaccaccaggtcgtaatcagctgattcccttcaagtccatgtgattca

SEQ ID NO: 176155 - DNA, 172 bp, Glycine max
cgtggggacacatcaaccctgcggtgacattcgggttgttccttggacgcaaggtgtctttggtgagggcgttgttgtacatgatagcacagtgtgccggtgcaatctgcggtgctgggttggccaaagggttccagaaatcgttctacaacaggtacggaggtggggttaa

SEQ ID NO: 176156 - DNA, 279 bp, Glycine max
cggctcgagttctgtaagaagtgtggcaagcaccaaccccataaagtgacacagtacaagaagggcaaggattctctgtacgcccagggaaagcggcgttatgacaggaagcagagtggctatggtgggcaaactaagccgattttccggaaaaaggctaaaactacaaagaagattgtgctaaggcttgagtgcgttgagcccaactgcagatctaagagaatgctggctattaaaagatgcaagcattttgaactgggaggagataagaagagaaag

SEQ ID NO: 176157 - DNA, 271 bp, Glycine max
ctcgagccgattcggctcgagggctcgagcggctcgaggcgcacgggcttctgcatgaggacggcagtgcggagctttgaggaacaccgcagatcagtttttttctctttgaaagatagagattaatacaactacttaaaaaatatagtcaataggttactaagatattgcttagcgttaagtttttaacgtaattttaatagcttaagattttaagagaaaatatgaagacttagacgagtagcctgagggaggaaaagataaaaggttt

SEQ ID NO: 176158 - DNA, 274 bp, Glycine max
ctaactggcctctttagtatcataaagctggatgaagaaaatgtggtacatatacaccatgatatactatgccgctacaagaaggagatgagatcatgtcctctgcagggacatggatgaagctggaagccattatccttagcaaagtaacgcaggaacagaagaccaaacaccacatgttgactcttagaagtgggagctgaacgtacctaattcttgcaattcagtgtatatcctggcgagaggcagagatgaacaatcctggacagttacc

SEQ ID NO: 176159 - DNA, 269 bp, Glycine max
ggaatttgccattctgatctccaccagattaaaaatgatcttggcatgtccaactatcccatggtcccaggacatgaagtggttggtgaggtactggaggtggggtcagacgttagcaggttcagagtgggagagttggtgggagttggactcctcgtaggttgctgcaaaaactgccagccatgccaacaagacattgagaattactgcagcaagaagatctggtcttacaatgatgtttatgtcgatggaacacccacgcagggtgg

SEQ ID NO: 176160 - DNA, 267 bp, Glycine max
ctaagacgccaaatatttaagctcacttcttcccagagagaggcagctctgctcaggcctccagcgttggctggccatggccacagccagatggaggagcccatccccaggagactcaggcagtggcctggagaggctttgttctgtaacggtgccttttcttagggtccaggcaggaatgaagccaataatttattgctttccattctgccgtatgatgtgcgtgtgcgtgagtgtgtggcccctgtttattcccctcctgtcaag

SEQ ID NO: 176161 - DNA, 273 bp, Glycine max
cggctcgagggagatggaagagtggaaatttgacactctgtgtgacctctacgacacactgaccatcactcaggcggtcatcttctgcaacaccaaaagaaaggtggactggctgacggagaaaatgagggaagccaacttcactgtatcctcaatgcatggagacatgccccagacagagcgggagtccatcatgaaggagttccggtacgggcgacagccgagtgcttatgtctacagatgtctgggccagggggttggatgtccctcagg

SEQ ID NO: 176162 - DNA, 276 bp, Glycine max
ccctcgagccgattcggctcgaggcgctcgagcacagcccattctgacccgtataccagaaaaccacacatttgaagcatgaactctcagcagcagaagcagccttgcaccccaccccctcagcctcagcagcagcaggtgaaacaaccttgccagcctccaccccaggaaccatgcatccccaaaaccaaggagccctgccaacccaaggtgcctgagccctgccaccccaaagtgcctgagccctgccagcccaagattccagagccctgccag

SEQ ID NO: 176163 - DNA, 272 bp, Glycine max
gatttcgccatgttggccaggctggtctcaaactcctgacctcaagtgatctgccccccttggcttcccaaagtgctgggattgcagacgtgagtcactgcgcccagccattccatgtctcttaagtctcagaatctcccctagctccctccaggtgtctgcagtggttgtcccctcaaagctgtcccacaccctcctccgaggaccctttgtgtatctcctccagctaccgcagagcccacaaacccaggcatccatcaaagtccctcatt

SEQ ID NO: 176164 - DNA, 264 bp, Glycine max
cgcgcagaagcgtgatgacgaagggaacgtcatcgtctggcaaacgtcgcaatatgacgcacacgttgtgccgccgctgtggctctaaggcctagcaccttcagaagtcgacctgtggcacatgtggctaccctgccaagtgcaagagacagtataactggagtggcaaggctaatagacgacataccaccggaactggtcgaatgaggcacctacaaattgtataccgccgattcaggcatggattccgtgtaggatcaacac

SEQ ID NO: 176165 - DNA, 272 bp, Glycine max
caagcccctaagtttgatcttgggaaactgatggaggttcatggagattactcagaggatgttggtgccaaggtagacagacctgctgatgaaatagtggcagaggaacccactgaaattgttggagcttgatttcatgatgcattcagtttgttctaggttttctttttcttacgttatcattgaaaattaagttacaaacttctgtccaatgtttctgtgtaagccgagtgacacagttttgtttagacaatcagaagacatttttggcg

SEQ ID NO: 176166 - DNA, 276 bp, Glycine max
tcgaccgaatcggctcgagcctatctaactaccagaccaacacagccaagcatgatgaactgacctatttctgatcctcactttggacaaggcccttcagccagaagactgacaaagtcatcctccgtctaccagagcgtgcacttgtgatcctaaaataagcttcatctccgggctgtgccccttggggtggaaggggcaggattctgcagctgcttttgcatttctcttcctaaatctcattgtgttgatctctttccttcccaataggtgatc

SEQ ID NO: 176167 - DNA, 277 bp, Glycine max
caacgcgagtggagagcaccaggatctcgggctcggaacgagactgcacggattgttttaagaaaatggcagacaaaccagacatgggggaaatcgccagcttcgataaggccaagctgaagaaaacggagacgcaggagaagaacaccctgccgaccaaagagaccattgagcaggagaagcggagtgaaatttcctaagatcctggaggatttcctacccccgtcctcttcgagaccccagtcgtgatgtggaggaagagccacctgcaagatgg

SEQ ID NO: 176168 - DNA, 268 bp, Glycine max
tgtagccattgggggatctttgtggcttcagcaaattctcttgttaaaccggagtgaaaacttcaggggaagggtggggagtcagccaagtgcctcagtgtgccctgttgaaacttaggtttttccacgcaatcgatggatcgtgtcctaggaagacttttcttttcctctggatttttgttcctcctgtacaagaggtgtctttgcttggtttggtggggctgcggccacttaaaacctcccgatctctttttgagtcctttattat

SEQ ID NO: 176169 - DNA, 271 bp, Glycine max
cctaatctcactcaggcctccagggatccatgggggagtgaaaccaattctcagagaacaacccaccagagccttttaaagagaggccaggcttgggaatgggttgggagagcgcatctgttcattggagcatgagtggatgccagaactgtaggttataaggcagtcactttttctctctactcccacccacacctgcctccctcttacccctgctcccccacactgcaggaggatttgtctctaagaggtgctgccccaaagctcccca

SEQ ID NO: 176170 - DNA, 171 bp, Glycine max
cctccctcctaccacgtcctcctggcctgcattcccattccctcctgccagcactgatagggccccgcccaccgggcaccgaccaccccaggccacatccccacccatctggaagtgaaggcccagggactcctccaacagacaacggacggacggatgccgctggtgctc

SEQ ID NO: 176171 - DNA, 271 bp, Glycine max
ctccaagacgtgatcgagaaccaactcctgacggtggcgcaaccgtgcgaggacaagatcgacgatgagatcgacgccctggaacgcctcgatgccgacgacatcgaagccctccgcgagcgccgcctccagcagatgaagaagatggcggagaagcgctcccgctggatctccctcgtctcatccgaatattccgagattccctccgagaaagacttcttctccgtcgtcaaggccagcgaacgcgtacgtctgccacttcttccgcgaa

SEQ ID NO: 176172 - DNA, 273 bp, Glycine max
ctggcccccaaggacatccgggtaaactgcgtggttccaggaattctcaaaactgacttcagcaaagtgtttcatgggaatgagtctctctggaagaacttcaaggaacatcatcagctgcagaggattggggagtcagaggactgtgcaggaatcgtgtccttcctgtgctctccagatgccagctacgtcaacggggagaacattgcggtggcaggctactccactcggctctgagaggagtgggggcggctgcgtagctgtggtcccagg

SEQ ID NO: 176173 - DNA, 272 bp, Glycine max
ctgtggtccaaggccatttttgctggctataagcggggtctccggaaccaaagggagcacacagctcttcttaaaattgaaggtgtttacgcccgagatgaaacagaattctatttgggcaagagatgcgcttatgtatataaagcaaagaacaacacagtcactcctggcggcaaaccaaacaaaaccagagtcatctggggaaaagtaactcgggcccatggaaacagtggcatggttcgtgccaaattccgaagcaatcttcctgctaa

SEQ ID NO: 176174 - DNA, 272 bp, Glycine max
cagcttgctcatcaagtccaagaaccaacctaccttttgcaatctcaattcaatggcgtcctctctcattgcgaacgcttcctctcctcttctctcctctccaggtccctccttcgccccgccgcttccgcttcccaccgctctttcaacaccaacgccatgcgccagtatgacaaccgcgccgacgaccacagcaccgacatcgatcgtcactccgaacgctctttccctagcactgcgcgccgcgacgatatcttctcagatgtgttgga

SEQ ID NO: 176175 - DNA, 271 bp, Glycine max
ccgattgctagaatggaatttcgatgctcagtcatctcttgtaccattctcttctctcatgctcttgcaggagagagccatgtccatgcatcgctacctgaggaagattattgggcagctgtatggcgaaacactcccattcccactgcactgcgagagcttctaaagcctctccctgcaggtgtcgacatcgatgaactccctaagctaattgatgatatacagtacccaaaaacattctactataaagaagaccttcatccaggctaaa

SEQ ID NO: 176176 - DNA, 269 bp, Glycine max
ctgtggtacaaggccatttctgctggctataaacggggtctccggcaccaaagggagcacacagctcttcttaaaattgaagctgtttacgcccgagatgacacagaattctatttgggcaagagatgcgcttatgtatataaagcaaagaacaacacagtcactcctggcggcaaaccaaacaaaaccagagtcatctggggaaaagtaactcgggcccatggaaacagtggcatggttcgtgccaaattccgaagcaatcttcctgc

SEQ ID NO: 176177 - DNA, 265 bp, Glycine max
gcaaagctcatccttgagttaaaacaatggcagcagcttcttccatggctctctcatccccatccttggctggcaaggccgtgaagctgggcccatcagccccagaagtgggaagggtgagcatgaggaagaccgtcaccaagcaggtctcctcaggaagcccatggtacggcccagaccgagtcaagtacttgggcccattctctggcgagcccccgtcctacctaaccggtgagttcccaggcgactacggctgggacactgc

SEQ ID NO: 176178 - DNA, 270 bp, Glycine max
cgcaaataactattaccaacaaactctactttcggcaaccttcaattttcttgaaagtcatggatttcagagtgatgggtttggagcctccgttgttccacacgctgcaacacatgatggacatgtcagaggacgctgcaggggaaaacaagacgtacagtgctccgacacggtcatacgttcgagacgccaaagcaatggctgcaacacctgcggatgtgaaggaatatcccaactcctacgtgttcgagatcgacatgccgggtttga

SEQ ID NO: 176179 - DNA, 261 bp, Glycine max
cctcgagtcgaatcggctcgagatcccgaggttaagtggctcagagacttgacaaggtctatatcacggtgcaattggctgactcaaaaaatgccaaggtggatcttacaccagatggtattgttaccttctctggtagtgctggtgctgaagaccatcagtatgagctaaaactggagctctttgacaaggttaatgtagaggagagcataattactgtaggagtgcgaacctccttctgtgtagtgtcgacggcagatg

SEQ ID NO: 176180 - DNA, 271 bp, Glycine max
caaattattaaaataatgagatttttcataaaaagggatattttagctcagactgtccatttccttttctttttttttcctttccaacttttatttgaggtttgggggtacacacgcaggtttgtttgggaaaattgcatgtcgcaggggttaggtgtacagattatttcatcacccaggtaataaccatagcacctgatacatagtcttttgatccttaccctccaccggccttccaccctcaagtaggccctggtcagactgtccattt

SEQ ID NO: 176181 - DNA, 272 bp, Glycine max
ctcgaaccggattaaaataatttgaaggcgatcttttaaaaagagcttaaaccgaagggaccaaaagaccttgtcatccatgacgcagggagaattgcgtcattcaaagcctagttaacgcatttactaaacgcagacgaaaatggaaagattaattgggactggtaggatgaaacaatttggagaagatagaagtcatgaagtggaaaactggaagacagaagtccgggaaggcgaagaccagcatagagaagatagggcaattagaagat

SEQ ID NO: 176182 - DNA, 271 bp, Glycine max
ctacagcttcaccaccacggccgagcgggaaatcgtgcgcgacatcaaggagaagctgtgctacgtcgccctggacttcgagcaggagatggccaccgccgcatcctcctcttctctggagaagagctacgagctgcccgatggccaggtcatcaccattggcaatgagcggttccggtgtccggaggcgctgttccagccttccttcctgggtatggaatcttgcggcatccacgagaccaccatcaactccatcatgaagtgtgacgtg

SEQ ID NO: 176183 - DNA, 268 bp, Glycine max
ctgatttcccctattctcaggctacaccctagaccaaacctacgccaaaatccatttcactatcatattcatcggcgtaaatctaactttcttcccacaacactttctcggcctatccggaatgccccgacgttactcggactaccccgatgcatacaccacatgaaacatcctatcatctgtaggctcattcatttctctaacagcagtaatattaataattttcatgatttgagaagccttcgcttcgaagcgaaaagtcctaata

SEQ ID NO: 176184 - DNA, 266 bp, Glycine max
cggctcgagattgtctcttatcatttgttcattgaagaacagagacctgtctggaaaatcgatctctacaaattcaattaaataatgatccccaaatgctgaaaaagtgaaatacagcaattcaacagataatagagcaatgtttagtatattcagctgtatctgtagaaactctttgacgaacctcaatttaaccaatttgatgaatacccagttctcttcttttctagagaaagatagttgcaacctcacctccctcactcaac

SEQ ID NO: 176185 - DNA, 255 bp, Glycine max
ggctcgaggtgggctcctcttggggatggaacctggaatttaaaccatcgtcacagctgtgaagatctagcacaagatagaatggtaaaacacaaaaaaaattttaagtgacagtgccatagtttggacagtacctttcaatgattaattttaatagcctgtgagtccaagtaaatgatcactttatttgctagggagggaagccctagggtggtttcagtttctcccagacatacctaaatttttacatcaatc

SEQ ID NO: 176186 - DNA, 268 bp, Glycine max
ccagagcagtatattctaaaaactggagaaggcattacagaagtctgccttagtgggtttattgcttttgatgttcctcctccaaagggtccattgtggattcttggcgatgttttcatgagggcatatcacaccgtctttgactacggaaatctacaagttggttttgccgaagctgtctaattaggctttctggaggattttctttgaaaaattgttaagcgtgttgtaaataagctgttataacaattgtagctgggattcactt

SEQ ID NO: 176187 - DNA, 270 bp, Glycine max
gattttctcttcttttattaaaataatagtttgtgaggtaggtggagggtagatcgggaagcaaaatgtcgcagcagcagcgttcgatgccggcgccgtttttgacgaaatcgtatctgttggtggatgatcccgccaccgacgacgtcgtttcgtggagcgaaggtggcaacacctttgtcgtttggaaacacgccgatttcgctaatgatttgctccccaagtacttcaagcacaacaacttctccagcttcgttcgccaactcaaca

SEQ ID NO: 176188 - DNA, 269 bp, Glycine max
cttctctctcaacaacttcaccttcttcctcctcgatcatgtctcacttcaagggcaagtaccatgatgagcttatcgccaatgctgcgtacattggcactcctggaaagggtattcttgctgctgatgagtcaacagggacaattggcaagcgtttggccagcatcagtgtagagaacattgaatccaacaggcgagctccttagggagctgcttttcactgctcctggtgtacttcaatatctcagtggtgtcatcctctttgagga

SEQ ID NO: 176189 - DNA, 269 bp, Glycine max
  unsure (1)..(269): unsure at all n locations
cctgtgtgtgtgtgtgctgatgtttcctgggtgccctggctccttgcagcagggctgggcctgcgagacccaaggctcactgcagcgcgctcctgacccctccctgcaggggctacgttagcagcccagcacatagcttgcctaacggctttcactttctctaatgttttaaatgactcataggtccctgacatttagttgattattttctgctacagacctggtacactctgattttagataaagtacgcctangtgttgtcagcagg

SEQ ID NO: 176190 - DNA, 288 bp, Glycine max
attctgctcgagagagaagagaagttttgtgcaaaatccttgggaacagtaattggatttgccatttcaaagctgggaaagaacattcaagtactttcaagttccattgtcaataagcaagacgaatacactgtggaaggagtgcagaatcttggagacaaagcagtgatgtgtcataggctaaatttcagaactgcagtattttactgccatgaagtccgtgaaacaacagctttcatggatccattggtggctggtgatggaaccaaaactcaggcacttgctatt

SEQ ID NO: 176191 - DNA, 274 bp, Glycine max
cctgaatgctcccatgcggcagcggcagccttttgaagactaggccaaggccaaggctccaggtgatgatgaagccatgttcatagatgagaacttctgtactgccctggaatatgggctgccccccacagctggctggggcatgggcattgatcgagtcgccatgtttctcacggactccaacaacatcaaggaagtacttctgtttcctgtcatgaaacccgacgacaagaaggagaatgtagcaaccactgatacactggaaagcacaaca

SEQ ID NO: 176192 - DNA, 270 bp, Glycine max
cagaagcagattaacctcagaaatcctgtctggctggcagatttcaagtaaaaaaaaaaaaaaaggtgggttggggggacccttttctttctagttgtctttaaggaaaattaattttacttttttttttgttctggccgaaatttttatgagatatcccccacttgccttccattttgaaccggttaaagcccatagctgtcagctctgaatgaggaggggaaaagcccctgggtctttctttaaaagcaatccgctgcttaagggctc

SEQ ID NO: 176193 - DNA, 268 bp, Glycine max
cagaaacccaattcaaccccccacccatgtaacacgcgggcagtgacaaaatcgagaacgcacgttgccagcctggagaccaccacgtactgccccccgccatttatcgccctgattggattttgtttttcatctgtccctgttgcttcggttcagttgagggtggagcctcctggggggcactggccactgagcccccttggacaagtcagcggggagtggcgaaagccactgtccggcctggcttctggggacagtggttggtccc

SEQ ID NO: 176194 - DNA, 263 bp, Glycine max
ttttgtttttgttttttactgagaaaggaagggccaagggatgaggtgggaaccgggccctgggggcgccacagactaaggcagagactcccctacctggcgcccagccccaaccagctggccgctcctgcccatgctttttttttttttttttttaaatttttaaaattggagcccctggtgaggttacgcgtgccatgagaacccattttaaaccacgacgctggtccctcagtgttggccaaactctggagtcactgact

SEQ ID NO: 176195 - DNA, 264 bp, Glycine max
cgctgagtgttctgggatttctctagaggctggcaagaaccagttgttttgtcttgcgggtctgtcagggttggaaagtccaagccgtaggacccagtttcctttcttagctgatgtctttggccagaacaccgtgggctgttacttgctttgagttggaagcggtttgcatttacgcctgtaaatgtattcattcttaatttctgtaaggttttttttgtacgcaattctcgattctttgaagagatgacaacaaattttggt

SEQ ID NO: 176196 - DNA, 258 bp, Glycine max
ctcatcactgaaagtcgtgaaggcagcagcccaggtcttgaatacattatggcaatatcgggacctccggagcatttataaaaaggatgggtggaatcagaaccattttattacacctgtgtcgacattggagcgagaccgattcaaatcacatccttccttgtctaccaccaaccaacagatgtcacacatcattcagtcaggctccagcaaaccttcaccaatttacatcagttcctattcctcaccagcaagaga

SEQ ID NO: 176197 - DNA, 264 bp, Glycine max
ctggcccgcggcgtccaccacattgactactataagacaaccagcaccggccgcctgcctgtgaagtggatggcgcccgaggccttgtttgaccgggtgtacacacaccagagtgacgtgtggtcttttgggatcctgctatgggagatcttcaccctcgggggctccccgtatcctggcatcccggtggaggagctgttctcgctgctgcgggagggacatcggatggaccgacccccacactgccccccagagctgtacggg

SEQ ID NO: 176198 - DNA, 265 bp, Glycine max
gcaaaattaaccccctaataaaattaattaaccactcactcatcgacctccccaccccatccaacatctccgcatgatgaaacttcggctcactccttggcgcctgcctgatcctccaaatcaccacaggactattcctagccatgcactactcaccagacgcctcaaccgccttttcatcaatcgcccacatcactcgagacgtaaattatggctgaatcatccgctaccttcacgccaatggcgcctcaatattctttatctg

SEQ ID NO: 176199 - DNA, 269 bp, Glycine max
  unsure (1)..(269): unsure at all n locations
ctcgtggcaagcgtatgtcgacgatcaccttctgtgtgacatcgaaggtaaccacctcactcacgctgctatcatcggccaagacggcagcgtttgggctcagagtaccgacttccctcagttcaaacctgaggagctaactgccatcatgaatgactttaatgagcctggatcacttgctccaactggattgtatctcggtggcaccanacctatggtcatccagggtgaacccggtgctgtcattcgagggaagaagggtcctggtg

SEQ ID NO: 176200 - DNA, 144 bp, Glycine max
ccaacttcttacttccctaatgaagttaagaacctgaatataaatttgtgttctcaaatatttgctatgaagcgttgatggattaattaaataagtcaactcctagaagttgagagagcaaataaagacctgagaaccttccag

SEQ ID NO: 176201 - DNA, 265 bp, Glycine max
caggaacaagccctccaggaaatgggcctgcacctcagccagtccaagctgaagatggaagatataaaagaagtgaaccaggcactgaagggccacgcctggctgaaagatgacgaagcgacacactgtaggcagtgtgagaaggagttctccatttcccggagaaagcaccactgccggaactgtggccacatcttctgcaacacctgctccagcaacgagctggccctgccctcctaccgcaagccggtgcgagtgtgcgaca

SEQ ID NO: 176202 - DNA, 264 bp, Glycine max
cgaagagaaggactgcgaggaggctcgggggatggaaacgcgggcgagtccgcggcagctcagcacctgtcagagagccaattccttgggtgacttgtatgctcagaaaaactctggagtgacagcaaacggggggccggggagcaaatttgcaggctactgtcggaatttggtgtctgatattcccaatcttgcaaaccataagatgccaccagctgctgctgaagagactcctccgtacagtaattataacacacttccctg

SEQ ID NO: 176203 - DNA, 264 bp, Glycine max
ggcatgggtgctggagaagaaggagcggcacaggcgccagggcagggaagtcagacctgacacccagtacaccggccgcaagcgcaagccccgcttctaagtcaccacgcggttctggaaaggcacttgcctctgcacttttctatattgttcagctgacaaagtagtattttagaaaagttctaaagttataaaaatgttttctgcagtaaaaaaaaagttctctgggccgggcgtggtggctcacacctgtaatcccagcac

SEQ ID NO: 176204 - DNA, 270 bp, Glycine max
caaacccactccaccttactaccagacaaccttagccaaaccatttacccaaataaagtataggcgatagaaattgaaacctggcgcaatagatatagtaccgcaagggaaagatgaaaaattataaccaagcataatatagcaaggactaacccctataccttctgcataatgaattaactagaaataactttgcaaggagagccaaagctaagacccccgaaaccagacgagctacctcagaacagctaaaagagtccacccgtctat

SEQ ID NO: 176205 - DNA, 268 bp, Glycine max
cgaagactttctctctccatggatctttcagaccttaattccgctgaaatgcagaagttctactctgaagaacagcaaagagccatggttaatgaaatggtggcaaagctaacgagtgaatgctgggataaatgcatcacgggtacacctgggaataaattcagttccagtgaatctaattgtctttcaaactgtgctcaccgttacttggaaatgagcatgcttatcatgaaaaggtttcagagtatgcaatgaagatcgagggata

SEQ ID NO: 176206 - DNA, 265 bp, Glycine max
ctctgctgagcttcgtcacagaattcaaatcccagctctttgtggacggcctggtacaagggaatgtcacaagcacagaatctatggatttcctgaaatatgttgttgacaaactaaacttcaagcctctggagcaggagatgcctgtgcagttccaggtggtagagctgcccagtggccaccatctatgcaaagtgaaagctctgaacaagggtgatgccaactctgaagtcactgtgtactaccagtcaggtaccaggagtct

SEQ ID NO: 176207 - DNA, 271 bp, Glycine max
ctcgagccgtgtttgattcccaagtctctcgaagcatcttactatctcttcctgcagaagctatccgtgttacttgttcccaagtctccaacaagcaaagtacatggttgatttggtcatccacgtctccagcgcattcgacccgtttgccgaggcgagagtatcagatgcccccggggcacaggagtatgtgcacatacgaattcagcagatgaatggaaagcagagtctgacaacagtgcaagggctgacgtaggagttcagctacgag

SEQ ID NO: 176208 - DNA, 235 bp, Glycine max
ctcgagcctatcgagccgattcggctgaggaaaagattaggagatggcgaacgcttgattccctgatccaatcgcattctcatcgagaaaatcgtccctccctccaaaaccagcgccggcattctactcccggagaagagctcccagcttattccggtaaggtgatagcggttggacctggatcacgtgacaaggcggggaatttgattccggtgtctgtgtaagaaggtgatca

SEQ ID NO: 176209 - DNA, 276 bp, Glycine max
cacgcgtacggctcgaggtcacgcgggtctgtctcttgcttcaacagtgtctggacggaacagatccggggactctcttccagcctccgaccgccctccgatttcctctacgcttgcaacctccgggacgatcttcacggcgatctcctgcttctgggacctgccagatcgggtttgtggatcgcaccatattgccaatcatccatgagcacgcagttacgtcagaattcattccatcgacgtggatgcagccgtcaacagcctggtcaatttgta

SEQ ID NO: 176210 - DNA, 257 bp, Glycine max
atgaatggctccacgagggttcagctgtctcttacttttaaccagtgaaattgacctgcccgtgaagaggcgggcatgacacagcaagacgagaagaccctatggagctttaatttattaatgcaaacagtacctaacaaacccacaggtcctaaactaccaaacctgcattaaaaatttcggttggggcgacctcggagcagaacccaacctccgagcagtacatgctaagacttgaccagtcaaagcgaactact

SEQ ID NO: 176211 - DNA, 278 bp, Glycine max
cttatatcatatcacaatgtgtggcatacttgctgtgcttggttgctctgattcatctcaagccaaaagggttcgcgtccttgagctttctcgcagattgaagcaccgtggtcctgactggagtgggctccaccaatatggtgataatatttggctcatcaaaggttagccatagttgatccagcttctggtgatcaacccctcttcaatgaagacaaaactgtcgtggttacggtgaatggagagatctacaatcatgaagaactcaggaaacagtt

SEQ ID NO: 176212 - DNA, 284 bp, Glycine max
ctcgagccgctcctactcctcattgtacccattctaatcgcaatcgcattcctaatgctacaccgaacgaaaaattctaggctatatacaactacgcaaaggccccaacgttgtaggcccctacgggctactacaacccttcgctgacgcataaaactcttcaccaaagagcccctaaaacccgccacatctaccatcaccctctacatcaccgccccgaccttagctctcaccatcgctcttctactatgaacccccctccccattcgcaaccccctggtcaa

SEQ ID NO: 176213 - DNA, 280 bp, Glycine max
cgtgccctgaggttggacgtggggaatttctcctggggctcagagtgttgtactcgtaaaacaaggatcatcgatgttgtctacaatgcatctaataacgagctggttcgtaccaagaccctggtgaagaattgcatcgtgctcatcgacagcacaccgtaccgacagtggtacgagtcccactatgcgctgcccctgggccgcaagaagggagccaagctgactcctgaggaagaagagattttaaacaaaaaacgatctaaaaaaattcagaagaaat

SEQ ID NO: 176214 - DNA, 193 bp, Glycine max
cgccccctccctgtggagcctgttacctccgcatttgacacgagtctgctgtgaaccccgcaacctcctccccacctcccatctctccttccaggcccatccctggcccagagcaggagggagggagggacgatggcggtgggttttgtatctgaatttgctgtcttgaacataaagaatctatctgctgtta

SEQ ID NO: 176215 - DNA, 277 bp, Glycine max
cgcgctgagcggctcgagcggctcgagatcaccatggcggctgggaccctgtacacgtatcctgaaaactggatggtcttcaaggctctcatcgctgctcagtacagcggggctcaggtccgcgtgctctccgcagcaacccacttcattttggccaaaccaaccgcacccctgaatttctccgcaaatttcctgccggcaaggtcccagcatttgagggtgatgatggattctgtgtgtttgagagcaacgccattgcctactatgtgagcaatga

SEQ ID NO: 176216 - DNA, 288 bp, Glycine max
tctggtggggcaagtccgtgggcatgatgttgaccgagctggagcaagccttgaactctatcatcgacgtctaccacaagtactccctgataaaggggaatttccatgccgtctacagggatgacctgaagaaattgctagagaccgagttcctcagtatatcaggaaaaagggtgcagacgtctggttcaaagagttggatatcaacactgatggtgcagttaacttccaggagttcctcattctggtgataaagatgggcgtggcagcccacaaaaaaagccatga

SEQ ID NO: 176217 - DNA, 283 bp, Glycine max
cgcggtcgtaagggctgaggatttttggtccgcacgctcctgctcctgactcaccgctgttcgctctcgccgaggaacaagtcggtcaggaagcccgcgcgcaacagccatggcttttaaggataccggaaaaacacccgtggagcggaggtggcaattcaccgaattcgaatcaccctaacaagccgcaacgtaaaatccttggaaaaggtgtgtgctgacttgataagaggcgcaaaagaaaagaatctcaaagtgaaaggaccagttcgaatgcctacca

SEQ ID NO: 176218 - DNA, 281 bp, Glycine max
cggctcgagctggagctgacgctggcccggctcactaagtcagagctggatgacgaggaggtcgtgcttgtgtgcgacaaggtcattgaggaggctgacttggacggtgacggcaagctgggctttgctgacttcgaggacatgatgccaaggcccctgacttcctcagcactttccacatccggatctgaggacactgccgaggctgtaggggcctagaagtccaccatcctgccctgcagtcacatgggtgtggcctccaagctccccaggaaagcagt

SEQ ID NO: 176219 - DNA, 281 bp, Glycine max
cgaggaagtaagttaccaacttgcatttaacaaacaagaacttcgtaaagtcattaaggagtaccctggaaaggaagtaaaaaaaggtctagataacctctacaagaaagttgataaacatttatgtgaagaagagaacttacttcaggtggtgtggcactccatgcaagatgaatttatacgccagtataagcactttgaaggtttgatagctcgctgttatcctggatctggtgttaaatggaattcactattcaggacattctggattattgttccag

SEQ ID NO: 176220 - DNA, 263 bp, Glycine max
gttcggtgatccgggactcactgctgcaggatggggaatttagcatggatcttcgtaccaagagcaccggtggggcccccaccttcaatgtcactgtcaccaagactgacaagacgctagtcctgctgatgggcaaagaaggttccacggtggtttgatcaacaagaaatgttatgaaatggcctcccaccttcggcgttcccagtactgacctcgtctgtcccttccccttcaccgctccccacagctttgcacccctttcc

SEQ ID NO: 176221 - DNA, 273 bp, Glycine max
actggcttaagcatcccataagcctattatttagtgtgaatttgggacttttatttgtatgttgtcttaacttactgagcctgtgacttgtatttagctgtagtcaagcctcaccagccatatctcatctctgagaggaagactggatagtgagtttggttttggttttggttttaaacccttttaccttttcagtctggcagctcctactgctgctttcctaagttactcaaagcactgcttcttggtccttgttttcttttgccttgtact

SEQ ID NO: 176222 - DNA, 273 bp, Glycine max
cggctcgagtgttgcctgtggagtctctgctgaaatgaatcaggattcgagctctaggatgagacagaaaatgaaagcatgttgtttgccaggacactgtgggtttatattgatgtgtaacaagttgatttggaacactggactctcattctgttattctggttttgttttttttgttttgttttttttcttttgtaaaggcaatgagctagtcccagaaaggatccttcagttacatacaatttgtttaatgaaatgtcatggctctgttca

SEQ ID NO: 176223 - DNA, 281 bp, Glycine max
cgcgctgtgccccgcgccgcatttctctccccgctgcttccccttctcctgggcttcctgctcctctccgctccgcatggcggcagcggcctgcacaccaagggcgcccttcccctggatacggtcactttctacaaggtcattccaaaagcaagttcgtcttggtgaagttcgacacccagtacccctacggtgagaagcaggatgagttcaagcgtcttgctgaaaactcggcttccagcgatgatctcttggtggcagaggtggggatctcagattat

SEQ ID NO: 176224 - DNA, 279 bp, Glycine max
tgctttttaacagcctttagaagccgctgctgaaattgatactgggggaagggttccccttccttctagagcagaaaagggagagaggtgttgtattcctgtttggtaacctcagtctcctgtaagacctcctaccacatggcgagtatacaccaatcaggagcgggtagctgcctgcataggagcctcgcttccgattattcccttcccaatattattcatccagacttagccacagtgcacaaaagcaaacctgctagagaggcagtgaacaccaca

SEQ ID NO: 176225 - DNA, 277 bp, Glycine max
cgtacctgaagcgaattggtagcaaagcagcagctggagagccgcagttctagcctcatcattacgatgtttcccttggtcaaaagtgcactaaatcgtctacaagttgcgaagcattcaggccacacatggccatgcagagtcacagaagagtacacctgaattctatgacaaatacggtaatgctgtattagctactggagccaattgctgtattgttacatggacatatgtagtaccacaagtcggacctagatggaggctgtcccctgttggc

SEQ ID NO: 176226 - DNA, 272 bp, Glycine max
gtgccgggataaaaagcaccagcggacactgatgccggagaagctgtcacacaagctgctggaggctttccataaccagggccccgtgatcaagaggaagcatgacttgcacaagatggcagaggccaaccgtgccctggcccactaccgctggtggtagagtctccaggaggagccccaggccctctggcgcaagaaacagtgtgagctaatgccacgctgaaaactacctgtgggctaaggatgtagttcccttgtaagggtgggcaagc

SEQ ID NO: 176227 - DNA, 274 bp, Glycine max
ctcgagccgcgcggatcgtaagggctgaggatttctggtccgcatgctcctgctcctgaatacccgctgttcgctctcgacgaggaacaagtcggtcaggaagcccgcgcgcaacagagatggcttttcaggataccggaaaaaacccgttgagctcggagtggcaattcaccgaattcgtctcgccctacaaagccgcaacgtaaaatccttggaaaaggtgtgtgctgacttgataagaggcgcaaaagtgcagagtctcacagtgaaagga

SEQ ID NO: 176228 - DNA, 157 bp, Glycine max
gcctatcatatagtaaaacccagcccatgacccctaacaggggccctctcagccctcctaatgacctccggcctagccatgtgatttcacttccactccataacgctcctcatactaggcctactaaccaacacactaacatataccaatgatggcg

SEQ ID NO: 176229 - DNA, 266 bp, Glycine max
gtgacgcggggccaggcggccgtacagcagctgcaggcggagggcctgacaccgcgcttccaccagctggacatcgacgatctgcagagcatccgcgccctgcgcacttcctgcgcaagcagtacgggggcctggacgtgctggtcaacaacgcgggcatcgccttcaaggttgctgatcccacaccctttcatattcaagctgaagtgacgatgaaaacaaatttctttggtacccgagatgtgtgcacagaattactccctcta

SEQ ID NO: 176230 - DNA, 282 bp, Glycine max
gagtttctgagataaccacttttctctttgattcatcaatggcaaccgcgaggaccgtgaaggatgtttcgcctcacgatttcgtgaaggcttacgcctcccatctcaagcgttccggcaagatggagcttcctgagtggactgtattgtaaaaacagcaaaatttaaggaattggctccatatgatcctgactggtattatgttagggctgcctcaatggcaagacagatttatttgagaggcggtcttggtgttggggctttccagaggatctatggtgg

SEQ ID NO: 176231 - DNA, 277 bp, Glycine max
gcagtgctctgagccctaggattcatctttcttttcaccgtaggtggcctgactggcattgtattagccaactcatcactagacatcgtactacacgacacgtactacgttgtagctcacttccactatgtcctatccatagagctgtatttgccatcataggaggcttcattcactgatttcccctattctcaggctacaccctagaccaaacctacgccaaaatccatttcactatcatattcatcggcgtaaatctaactttcttcccacaaca

SEQ ID NO: 176232 - DNA, 276 bp, Glycine max
ccgtgctcctgggtgtgctgcaggggcaacagcagagcctacagcagggggcacactccaccggctccagccgcctgcacgacctctactggcaggccatgaaaaccctgggagtccagcgccccaagtcggagaagaaggtgccaaggagatccccagtgccacccagagccccatcagtaagaagcggaagaaaaagggattcttgccagagacgaagaagcgcaagaaacgcaagtcagaggatggcacgccagcggaggatggcacacctgc

SEQ ID NO: 176233 - DNA, 199 bp, Glycine max
ctatttttgtaccatattgctcttaaaaatcttggtttggtacagttcataattcaccaaaagttcatataatttaaaaaaacactaaattagtttaaaatgaagcaatttatatctttatgcaaaaacatatgtctgtcttgcaaaggactgtaagcagattacaataaatcctttactttaaaaaaaaaaacaaaaa

SEQ ID NO: 176234 - DNA, 258 bp, Glycine max
tcggggagtttcggtaagaggaggaacaagacccacaccctctgtgtgacgtcgtggccgccgcagcttccacctccagaagagtcgttgctctgcgtgcgcttaccccgctgcgcgcaccaggaaatataactggagctgaaggccattaggagaaagaccaccggaactggaaggatgaggtacttgcgtaacgtgcctcgcagattcaagagcggcttcagagagggtaccgaagctgcacccaggaagagagga

SEQ ID NO: 176235 - DNA, 266 bp, Glycine max
caatggaaagcggagttcctaacaggatgaaagttcccccatcagttcccccagtacctccaagcaagtagctttccacatttgtcacagaaatcagaggagagatggtgttgggagccctttggagaacgccagtccccaggccccctgcatctatcgagtttgcaatgtcacaacctctctgatcttgtgctcagcatgattctttaatagaagttttattttttcgtgcactctgctaatcatgtgggtgagccagtggaaca

SEQ ID NO: 176236 - DNA, 270 bp, Glycine max
cgggaccccactgccttctctgagcctgaaagcttccagccccaccgctggctgagaaacagccagcctgctacccccaggatccagcacccatttggctctgtgccctttggctatggggtccgggcctgcctgggcgcaggattgcagagctggagatgcagctactcctcgcaaggctgatccagaagtacaaggtggtcctggccccggagacgggggagttgaagagtgtggcccgcattgtcctggttcccaataagaaagtgg

SEQ ID NO: 176237 - DNA, 239 bp, Glycine max
cggctcgagataagacgtgaaccagcaggagttcgtcagagctctggcagccttcctcaaaaagtccgggaagctgaaagtccccgaatgggtggataccgtcaagctggccaagcacaaagagcttgctccctacgatgagaactggttctacacgcgagctgcttccacagcgcggcacctgtacctccggggtggcgctggggttggctccatgaccaagatctatgggggacgtc

SEQ ID NO: 176238 - DNA, 188 bp, Glycine max
ggggcctcagtagcctctaactcactgtgtctgcatgagcatgtggcctctccgtcgcttcaccggtggcgaacccagtgacccagggagacgtggggtgtgctgatgctgctcgccagcccaccagtgcttggtcaggctgccccttccctggacagggctgttgagatggctccggcggcttgggg

SEQ ID NO: 176239 - DNA, 272 bp, Glycine max
ccaagcccctagtcttagagataccctctgagacagagagccaagctaatgtggtagtgaaaatcgaggaagcacctctcagcccctcagagaatgatcaccctgaattcattgtctcagtgaaggaagaacctgtagagatgacctcgttccggagctgggtatctcaaatctgctttcatccagccactgcccaaagccatcttcctgcctactggatgcttacagtgactgtggatacgggggttccctttccccattcagtgacatgt

SEQ ID NO: 176240 - DNA, 156 bp, Glycine max
ccaagacccagtaccttgatgatattgccatcttgactggaggtactgtaatcagagaagaggttggccttactttggacaaagctgggcaagaggttctcggatatgcctccaaggtggtgctcaccaaggatacaacacaattgtcggtgatgg

SEQ ID NO: 176241 - DNA, 272 bp, Glycine max
gatacgtaataagttctatcattgaggaagtttcctgtgcatcgtctccgaaaatgaacgacgcagatgtctcaaagcaaatccagcagatggtgcagttcatccgccaggcagctgaggaaaaggccaacgagatctctgtctccgccgaagaggaattcaatatcgagaagctgcagttggtcgaagccgacaagaagaagatcaggcaagaatacgaacgcaaagagcgccaagttgaaattcgcaagaagattgagtactcgatgcag

SEQ ID NO: 176242 - DNA, 239 bp, Glycine max
ggaaatcctggagtctgaagaaaaaggggatcccaacaagccctcaggattcagaagtgttaaagctcctgtcactaaagtggctgcgtcgattggaaatgctcagaagttgcctatgtgtgacaaatgtggcactggattgttggtgtgtttgtgaagctgcgggaccgtcaccgccaccctgagtgttacgtgtgcactgactgtggcaccaactgaaacagaaggcgatttctttg

SEQ ID NO: 176243 - DNA, 271 bp, Glycine max
ccgaggtcaacgatccctcccttaccatcaaatcaattggccaccaatggtactgaacctacgagtacaccgactacggcggactaatcttcaactcctacatacttcccccattattcctagaaccaggcgacctgcgactccttgacgttgacaatcgagtagtactcccgattgaagcccccattcgtataataattacatcacaagacgtcttgcactcatgagctgtccccacattaggcttaaaaacagatgcaattcccggacg

SEQ ID NO: 176244 - DNA, 191 bp, Glycine max
ctaaccttgaccgccgtgagagccgccgctatctcgagatgtactatgctctcaagtaccgcaaattggctgagactgtgccccttgctgctgagtaaactgaggataaagagttggatagagacatggaggaaccgcttttgctttctcagtaggagtttgtcgcacttgaattgtataaataatgtccg

SEQ ID NO: 176245 - DNA, 266 bp, Glycine max
gaaacacgaaactcagaatccatggcgacaccagcgacgacgaagcgaaaaccggtgttcgtgaaggtggatcagttaaaacctggcaccaacggccacacactgacggtgaaggtggtcagttccaagccggtgagacggtgagcacccgcggcggtcgaccgacggtgctagccgcgcgcccgtcgcgcattgccgagtgcctcgtcggcgacgaaaccggaaccataatcttcaccgctcgcaacgaacaggtggaccatatg

SEQ ID NO: 176246 - DNA, 264 bp, Glycine max
ccggcctcagctacagcctgggctccagctttggctctggcgcgggctccagctccttcagccgcaccagctcctccagggccgtggttgtgaagaagatcgagacacgtgatgggaagctggtgtctgagtccctgacgtcctgcccaagtgaacagctgcggcagcccctcccagcctacccctcctgcgctgccccagagcctgggaaggaggccgctatgcagggtagcactgggaacaggagacccacctgaggctcag

SEQ ID NO: 176247 - DNA, 239 bp, Glycine max
gtcagattctggagtgaatattttaccactgatagatcacttgaaaaagccatgctttccagacaacatgtacctgtggaatcaagtcatctcttcaaatttattaattggagttccctgctccctgagaggttataaaaggacatgtttataacaatccaaattatggcagttctgagctggctaaaaaatatccagggttcctagatgtgagggcagcccctttgttggctgatgac

SEQ ID NO: 176248 - DNA, 213 bp, Glycine max
cattcattcaagattcagcaagtgcgttttggaagcagagaccgaaatacttcgagatggcccgtacaaagcaaactgctcgtaagtcaactggaggaaaagctcccaggaagcagcttgcaaccaaggctgcagtaagtctgcaccaacaactggtggtgtgaagaagcctcatcgttatcgccctggaactgttgctcttcgtgagattag

SEQ ID NO: 176249 - DNA, 222 bp, Glycine max
cgctacgcaaactgcaggctcagatgaaggactttcaaagagagctggaagatgcccgtgcctccagagatgagatctttgccacagccaaagagaatgagaagaaagccaagagcttggaagcagacctcatgcagcacaagaggacctcgccgccgctgagagggctcgcaaacaagcggacctcgagaaggaggaactggcagaggagctggccagtag

SEQ ID NO: 176250 - DNA, 256 bp, Glycine max
ctagactccacctctcgtatcatggatcccaacattgttggcagtcagcattacgatgttgcccgtggggtgcaaaagatcctgcaggactacaaatccctccaggatatcattgccatcctgggtatggatgaacttctgaggaagaccagttgaccgtgtcccgtgcacggaaaatacagcgtttcttgactcaggcattccaggttgctgaggtcttcacaggtcatatggggaagctggtacccctgaagga

SEQ ID NO: 176251 - DNA, 262 bp, Glycine max
atcaccatggcggctgggaccctgtacacgtatcctgaaaactggagggccttcaaggctctcatcgctgctcagtacagcggggctcaggtccgcgtgctctccgcaccaccccacttccattttggccaaaccaccgcacccctgaatttctccgcaaatttcctgccggcaaggtcccagcatttgagggtgatgatggattctgtgtgtttgagagcaacgccattgcctactatgtgagcaatgaggagctgcgggg

SEQ ID NO: 176252 - DNA, 259 bp, Glycine max
cagctgccaggatttaggctattaaattggcattttttcttcactgcaatgttatttgtttatggacggattctgagtcaacgcctggttaacacagtaacttcagacatggttttatatcggctagtgagcatcttattaagtatcatatggttatctgctactccctatacattgctggatttatgtggttcattctcacattgaagaagaagatgtacaagtaccaatttggccagtatgcttggacacacatgat

SEQ ID NO: 176253 - DNA, 263 bp, Glycine max
ctcggctttgacagagtgcaagacgatgacttgcaaaatgtcgcagctggaacgcaacatagagaccatcatcaacaccttccaccaatactctgtgaagctggggcacccagacaccctgaaccagggggaatcaaagagctggtgcgaaaagatctgcaaaattttctcaagaaggagaataagaatgaaaaggtcatagaacacatcatggaggacctggacacaaatgcagacaagcagctgagcttcgaggagttcat

SEQ ID NO: 176254 - DNA, 258 bp, Glycine max
gtcgatccagctgccagcgcagtcgccagcgccggcacatcccgctctgggctttaaacgtgacccctcgcctcgactcgccctgccctgtgaaaatgttggtgcttcttgctttcatcatcgccttccacacacctctgcagccttgctgttcattgccaccgtcgacaatgcctggtgggtaggagatgagttttttgcagatgtctggagaatatgtaccaacaacacgaattgcacagtcatcaatgacagctt

SEQ ID NO: 176255 - DNA, 192 bp, Glycine max
cacagtacttcgaatttgagtttgaggcttaagaagctggatctcctgccgggcgtggtggctcatgcctgtaatcccaccactttttttttaaggcaggcggatcacctgaggtcaggagtttaagaccagccgaccaacatggagaaacctcgtctctactaaaaatacaaaaattagccaggcatggtg

SEQ ID NO: 176256 - DNA, 258 bp, Glycine max
ccctcggaggcgttcagctgcttcaagatgaagctgaacatctccttcccagccactggctgccagaaactcattgaagtggacgatgaacgcaaacttcgtactttctctgagaagcgtatggccacagaagttgctgctgacgctctgggtgaagaatggacgggttatgtggtccgactcagtggtgcgaacgacaaacaaggtctcccgatgaagcagggtgtcttgacccatggacgtgtccgcctgctactg

SEQ ID NO: 176257 - DNA, 249 bp, Glycine max
cgacgagttccggatagccaaggccagatccacaggcagattcacagctcctgatcgcggcctgaagcgaaactctcctcctgaggccatgtcagggtccgtagccccagccactagatgccccgactcgtacacgttgctggcaatatcatccctagatccagatgctcacgggtagcgagcttacagagccagggtgcagaggtcgcggtagacccggtgggggcctgatgaggataacgtagagct

SEQ ID NO: 176258 - DNA, 271 bp, Glycine max
cttaattgccttaaggaacgttcgagaccacagaggtttctctagtcttcttctgtggagagcttgttttctcttgttcattcatctcacttccaattaaggaacaagctttccaccaatttgaatcacccatggctcgctctttctccaacctcaaggttctctctgctcttgtcgccgacggattctccaacactctcaccaggcgtgggtacgcagtagcgacacaaagcgccacaagaggaggagcagcctccatcagcggcaagtc

SEQ ID NO: 176259 - DNA, 267 bp, Glycine max
agaaaatagaagccatgtttcgaagacctgtattacaggtacttcgtcagtttgtaagacatgagtccgaaacaactaccagtttggttcttgaaagatccctgaatcgtgtgcacttacttaggcgagtgggtcaggaccctgtcttgagacaggtggaaggaaaaaatccagtcacaatattttctctagcaactaatgagatgtggcgatcaggggatagtgatgtctaccaactgggtgatgtcagtcaccagacaacatggc

SEQ ID NO: 176260 - DNA, 270 bp, Glycine max
cggctcgagatttttacatgcagtttctagctccttcaacccagctgaggtcgtgccagggagacagagtctggagaagggcagaggaattttggaaggatccctggctcatagtagggaagctgggatgggggaggggtcaaaattatggcatgactgaacctgcatctgtgttgggtggacatgaatacttagctacctcagcaggaattccttccaggtcgcctttaacagtgaggtccttagagtactatgtccttaataaaaagg

SEQ ID NO: 176261 - DNA, 275 bp, Glycine max
ctctttctctctctctgactcgaaattttgcagatctggaaatggcgacggcaacgtaccctccaccgccaccttattacagactttacaaagattacttgcaaaaccctaagtctgctcccgaccctccaccgtctattgaaggcacttatctctctgttggagccaattacaccactagtgatgttctaccaaccttggaagaacaaggggtgcgccactctattctaagggccctaatgttgatttcacgccggagctgaggtcactcatcg

SEQ ID NO: 176262 - DNA, 281 bp, Glycine max
gaatagattatcctaagtctttgggaatagtgctgcaatggcttcaagtcaggaggaggtgacccttttgggagctactggaagcccatttgtgtgcagggttcatattgccctcaagttgaagggagttcaatacaaatatgtcgaagaaaatttgaggaacaagagtgaactgcttctcaaatccaacccagttcacaagaaggttccagtgtttattcacaatgagaagcccatagcagagtctcttgtgattgtcgaatacattgatgagacatgga

SEQ ID NO: 176263 - DNA, 240 bp, Glycine max
aaatcagttcgtggttacattgtggatgcaaatctgagcgttctcaacttggttattgtaaaaaaaggagagaaggatattcctggactgactgatactacagtgcctcgccgcctgggccccaaaagagctagcagaatccgcaaacttttcaatctctctaaagaagatgatgtccgccagtatgttgtaagacagcccttaaataaagaaggtaagaaacctaggaccaaagcaccc

SEQ ID NO: 176264 - DNA, 274 bp, Glycine max
gccatgtacgttgctatccaggctgtgctatccctgtacgcctctggccgtaccactggcatcgtgatggactccggtgacggggtcacccacactgtgcccatctacgaggggtatgccctcccccatggcatcctgcgtctggccctggctggccgggacctgactgactacctcatgaagatcctcaccgagcgcggctacagcttcaccaccacggccgagcgggaaatcgtgcgtgacattaaggagaagctgtgctacgtcgccctgg

SEQ ID NO: 176265 - DNA, 272 bp, Glycine max
cgcggtcgtaagggctgaggatttttggtccgcacgctcctgctcctgactcaccgctgttcgctctcgccgaggaacaagtcggtcaggaagcccgcgcgcaacagccatggcttttaaggataccggaaaaacacccgtggagccggaggtggcaattcaccgaattcgaatcaccctaacaagccgcaacgtagaatccttggaaaaggtgtgtgctgacttgataagaggcgcaacagaaaagaatctcaaagtgaaaggaccagttc

SEQ ID NO: 176266 - DNA, 272 bp, Glycine max
gtctctctcgctcaaagttttgcataaaattctaaggtcttcttggatctctgcagttcaccaagggacccaggttaataactcctgttctagaaaacatgactttctgtgtgctgatttctttggattatccccagcacagctccctgtgggaggaagctgttgtcagaagcaagctgggggtagtgatggataatgaaaactgtgtagaggacactggtagcgactcactggtgagaaccctgaagcggcgtgctgggggccatctcatg

SEQ ID NO: 176267 - DNA, 271 bp, Glycine max
gcagaccagacttcgctcgtactcgtgcgcctcgctttgcttttcctccgcaaccatgtccgacaaacccgatatggctgagatcgagaaattcgataagtcgaaactgaagaagacagagacgcaagagaaaaatccactgccttccaaagaaacgattgaacaggagaagcaagcaggcgaatcgtaatgaggcgtgcgccgccaatatgcactgtacattccacaagcattgccttcttattttacttcttttagctgtttaactttg

SEQ ID NO: 176268 - DNA, 268 bp, Glycine max
ggcggcctgggcgcctcggaccggcagctgctgctcttctacctggagcagcgtgaggccaacctgaccacactgaccaacgccctggacgccttctttaccgccgtggccaccaaccagccgcccaagatctttgtggcgcacagcaagttcgtcatcctcagcgcccacaagctggtgttcatcggggacacactgtcacggcaggccaaggctgctgacgtgcgcaccaggtgacccactacagcaacctgctgtgcgacctcct

SEQ ID NO: 176269 - DNA, 89 bp, Glycine max
cgcattcctactactcaacttaaactccagcaccacgaccctactactagctcgcacctgagacaagctaacatgactaacacccttaa

SEQ ID NO: 176270 - DNA, 270 bp, Glycine max
actgccacccagaagactgtggatggcccctccgggaaactgtggcgtgatggccgcggggctctccagaacatcatccctgcctctactgcgcgctgccaaggctgtgggcaaggtcatccctgagctgaacgggaagctcactggcatggccttccgtgtccccactgccaacgtgtcagtggtggacctgacctgccgtctagaaaaacctgccaaatatgatgacatcaagaaggtggtgaagcaggcgtcggagggccccctcaa

SEQ ID NO: 176271 - DNA, 267 bp, Glycine max
cagggaaccatggaaaccccagcgcagttctcttcctcctgctactctggctcccagataccaccggagcagttgtgttgacgcagtctccaggcaccctgtctttgtctccaggggaaagagccaccctctcctgcagggccagtcagagtgttagcagcagttccttaggttggtaccagcgaaaacctggcctggctcccagactcctcatctatggtgcatccagtcgggccactggcatcccagacaggttcagtggcagtg

SEQ ID NO: 176272 - DNA, 273 bp, Glycine max
ctccaagtctatgtattttctggagaccaaaccagataccagatactcacaaagaaagcttttttaataaggcttaaaccaagaccttgtctagatatttttagtttgttgccaaggtagcactgtgagaacatctcacttggatgttatgtaaggcgtgagacacaacagtctgactatgagtgaggcaaatatctgggtcttttcgtcagtttggtgcatttgctgctgctgttgctactgtttgcctcaaacgctgtgtttaaacaacgt

SEQ ID NO: 176273 - DNA, 278 bp, Glycine max
cagcaatactacacaacttgctactttcagaaaacttttttttagcttcaccgatgacaacagaggaagaagggaactgggatttgggtaagttctcctccactgtttgaccaaattctcagtgataaatatgtgtgcagatccctagaagagaaaacgctgactttctttttaagtgtggcacataaggatctgcagaattttccgtagacaaagaaaggatcttgtgtctttttgtccatatccaatgttatatgaaccaattgtattgttttata

SEQ ID NO: 176274 - DNA, 272 bp, Glycine max
cggcaagtgtcgtggacttcgtactgctaggaagctccgtagtcaccgacgagaccagaagtggcatgataaacagtataagacagctcatttgggcacagccctaaaggccaacccttttggaggtgcttctcatgcaaaaggaatcgtgctggaaaaagtaggagttgaagccaaacagccaaattctgccattaggaagtgtgtaagggtccagctgatcaagaatggcaagaaaatcacagcctttgtacccaatgacggttgcttga

SEQ ID NO: 176275 - DNA, 259 bp, Glycine max
ctacgtgcctgcccggagcctgccctacaaccagcccgggacctgctacacactggtggcactgcccaaagaagaccccacagctgtggcctgcacattcagctgcatgatgcagttcactgtcaaggactgtgatcccaccactggggagactgatgacgaaggctatgaggatgagtatgtgctggaagatctggaagttactgtagctgatcacattcaaaaggtcatgaaactgaacttcgaagcagcctgggat

SEQ ID NO: 176276 - DNA, 260 bp, Glycine max
cactcactgagttgctggaacgaggggagaggctgccacggcccgacaaatgtccctgtgaggtctatcatctcatgaagaactgctgggagacagaggcgtcctttcgcccaaccttcgagaacctcatacccattctgaagacagtccatgagaagtaccaaggccaggccccttcagtgttcagcgtgtgctgaggcacaatggcagccctgcctgggaggactggaccaggcagtggctgcagagggagcctcctg

SEQ ID NO: 176277 - DNA, 263 bp, Glycine max
ctttcatgatcacgccctcataatcattttccttatctgcttcctagtcctgtatgcccttttcctaacactcacaacaaaactaactaatactaacatctcagacgctcaggaaatagaaaccgtctgaactatcctgcccgccatcatcctagtcctcatcgccctcccatccctacgcatcctttacataacagacgaggccaacgatccctcccttaccatcaaatcaattggccaccaatggtactgaagctacgagt

SEQ ID NO: 176278 - DNA, 267 bp, Glycine max
cacaactactactatctttcaagccagtaatgcagaaatttcttcatgatcacgttgatctacaagtcagtgccctgtatgctctccaggtgcactgctataacagcaacttcccaaaaggcatgttacttcgcttttttgtgcacttctatgacatggacattattgaagaagaacctttcttggcttggaaagaagatataacccaagagttcccgggacaaggcaaggctttgttccaggtgaatcagtggctaacctggttag

SEQ ID NO: 176279 - DNA, 265 bp, Glycine max
tcgagccgcgtgcaggagcttgtgaacaccttcttcagcttccttcgacgcaaaacagactactttcattggaggagaagaagggatggcagagagcccggcaggaggccgagcggcgggagaacgcggagcgggcggccagactggccaaggaagccaagtcagagacctcagggccccagatcaaggagctaactgatgaagaggcagagaggctgcagctagagattgaccagaaaaaggatgcagagaatcatgaggccca

SEQ ID NO: 176280 - DNA, 264 bp, Glycine max
aatatctgcgcctttgcctgtcctttctcccactctactgaaacccggaacagattcccgcttgccttctgatgaagagaggttaggtaaagagagtttggaggataaaagccaccaggaggcaggctgcggggtaggagagggttctgagatgaggcagcaatccagaatacctccttttctagccagcatcccttgaacttttgaaaggttgtgcctaccactggctggcataccagggcaatgatttccctgcagaaggaa

SEQ ID NO: 176281 - DNA, 268 bp, Glycine max
cgaggagttccggaaagccaaggccagctccacaggcagcttcacagcacctgatcccggcctgaagcgcaagtcccctcctgaggccctgtcagggtccttacccccagccaccacctgccccgcctcgtccacgcctgcgcccactatcatccctgctccagctgccccctggaagccagcctccgcagccaccgtgaagaggaagcggaagagccggtgggggcctgaagaggatcaggtagagctcccacctgctgaactggtg

SEQ ID NO: 176282 - DNA, 273 bp, Glycine max
gcacctactccatgctgggccacaccaccaaaaggtcctgggaggccgagcgagtcatggagtggctcaagacccaggagtggggcctcatgatcctggatgaagtgcacaccataccagccaagatgttccgaacgggtgctcaccatcgtgcaggcccactgtaagctgggtttgactgcgaccctcgtccgcgaagatgacaaaattgtggatttacattttctgattgggcctaagctctacgaagccaactggatggagctgcagaat

SEQ ID NO: 176283 - DNA, 263 bp, Glycine max
cccgctcgagctcgagccgtttcagacagggtctgaaggactggattggccaaacatcagacctgtcttccaccggagaccaagtcctggctacatcccagcctgtggttacagtgcagacaggccatgtgagccaccgctgccagcacagagcgtccttccccctgtagactagtgccgtagggagtacctgttgccccagctgactgtggccccctccgtgatccatccatctccagggagcaagacagagacccaggaat

SEQ ID NO: 176284 - DNA, 270 bp, Glycine max
ctcccccaaaggcagcatctcggaggagaccaagcagaagctgaagtcagccatcctttctgcccagtctgctgccaacgtgaggaaggagagcctatgccagccagccctggaggtcctggagacatccagccaggagtcctcgctggagagcgagacagacgaggacgacgactacatggacatttgaggggccactgcagccccaccgccacgccccaggggaccagccaggcctggaatgccccctgggcaggaccctgggcagga

SEQ ID NO: 176285 - DNA, 265 bp, Glycine max
gtcacagatcaccagccaggtaactgggcagattggctggcggcgagagggtatcaagtatcgtcggaatgagctcttcctggatgtgctgcagagtgtgaacctgctcatgtccccacaagggcaggtgctgagtgcccatctgtcgggccgagtggtgatgaagagctacctgagtagcatgcctgactgccagtctgggatgaatgacatgattgtcatagacaagcagggcaaaggcacagctgatgaaccaagcaagagc

SEQ ID NO: 176286 - DNA, 263 bp, Glycine max
cggctcgagctggagacgacgtgcagaaatggcacctcgaaaggggaaggaaaagaaggaagaacaggtcatcagtctcggacctcaggtggctgaaggagagaatgtatttggtgtctgccatatctttgcatccttcaatgacacttttgtacatgtcactgatctttctggcaaggaaaccatctgccgtgtgactggtgggatgaaggtaaaggcagaccgagatgaatcctcaccatatgctgctatgttggctgccc

SEQ ID NO: 176287 - DNA, 264 bp, Glycine max
cggacctaggtcgcggcgacatggccaaacgtaccaagaaagtcgggatcgtcggtaaatacgggacccgctatggggcctccctccggaaaatggtgaagaaaattgaaatcagccagcacgccaagtacacttgctctttctgtggcaaaaccaagatgaagagacgagctgtggggatctggcactgtggttcctgcatgaagacagtggctggcggtgcctggacgtacaataccacttccgctgtcacggtaaagtccg

SEQ ID NO: 176288 - DNA, 265 bp, Glycine max
gctgctttgccaagctcaccaacacctactgtctggtagcgatcggaggctcagagaacttctacagtgtgttccagggcgagctctccgataccatccccgtggtgcacgcgtctatcgccggctgccgcatcatcgggcgcatgtctgtggggaacacgcacggtctcctggtacccaacaataccaccgaccaggagctgcaacacattcgcaacagcctcccagacacagtgcagattaggcgggtggaggagcggctctc

SEQ ID NO: 176289 - DNA, 251 bp, Glycine max
ctcgagcggctcgagcagaaattctcagaacaggttttcaaagtggcctcctcagacctggtcaacactgggcatcagtgtggttagctacactctgaaggacattcacgatgaccaggactatttgcactctttggggaaggctcgaacagctcaagtccaaaaagatgcacggattggagacgcagaggccaagagagatgctgggctccgggcagctaaagccacgcaggaaaaggtgtctgctcagt

SEQ ID NO: 176290 - DNA, 269 bp, Glycine max
ggaagctgggggaccattttgcaccatgagtttgtgaaaaatctggattaaaaaattacctcttcagtgttttctcatgcaaaattttcttctagcatgtgataatgagtaaactaaaactattttcagcttttctcaattaacattttggtagtatacttcagagtgatgttatctaagtttaagtagtttaagtatgttaaatgtggatcttttacaccacatcacagtgaacacactggggagacgtgcttttttggaaaactcaa

SEQ ID NO: 176291 - DNA, 268 bp, Glycine max
ctcatctctgaaagtcgtgaaggcagcagcccaggtcttgaatacattatggcaatatcgggacctccggaccatttataaaaaggatgggtggaatcagaaccattttattacacctgtgtcgacattggagcgagaccgattcaaatcacatccttccttgtctacgaccaaccaacagatgtcacccatcattcagtcaggctccagcaaaccttcaccaatttacatcagttcctattcctcaccagcaagagaacaagataga

SEQ ID NO: 176292 - DNA, 244 bp, Glycine max
tattagacgcaccgcctgcccagtgacacatgtttaacggccgcggtaccctaaccgtgcaaaggtagcataatcacttgttccttaaatagggacctgtatgaatggctccacgagggttcagctgtctctcacttttaaccagtgaaattgacctgcccgtgaagaggcgggcatgacacagcaagacgagaagaccctatggagctttaatttatgaatgcaaacagtacctaacaaaccc

SEQ ID NO: 176293 - DNA, 263 bp, Glycine max
cgctcgagcgggacagatcgagctagacagccccaagcttctgagtctagatacagaagcccatgtcttctgctgttctgcacttctgggagatacaagggtctactgttcccaaggaagctcgttccagattgtctcgtctactaagatgtccacttctaaagcctggcttcttatgcttaatatgatgttaattagcactctgcgaatctgaatcttgctctcgctctctgccgtcaaatgactcaagtctagtctactgg

SEQ ID NO: 176294 - DNA, 262 bp, Glycine max
tcgccatggtaaatacatggcttgctgcctgttgtaccgtggtgacgtggttcccaaagatgtcaatgctgccattgccaccatgcaaaccaagcgcagattccagtttgcggattggtgccccactggcttcaaggttggcatcaactaccagcctcccactgtggtgcctggtggagacctggccaaggtacagagagctgtgtgcatgctgagcaacaccacagccattgctgaggcctgggctcgcctggaccacaag

SEQ ID NO: 176295 - DNA, 260 bp, Glycine max
ctcatgcctgtaatcccagcactttgacgggctgacgcgggaggatcatctgacgtcaggagttccataccagcctggccaacattgcataaccctgtctctactaagaatacaaaaattcgccgggcatggttgcacactcctatagtcctagctacttggatgctaacgcaggagaattgcttgatcccgggagacacaagttacagtgagtcaagatcgtgatactttagtccagctttggcgacagatcgagactc

SEQ ID NO: 176296 - DNA, 263 bp, Glycine max
gcgccctgtgagtgggccattcggaacattggacagaagcccaaagagccaaattgtcacaattgtggaacccacattggcctgagatccaaaacgcttcgaggcaccccaaattacctggccattcgtcaggacacccacccacccagtgttatattctgcctcgccggagtgggtgttcccgggggcacttgccgaccagccccttgcgtccccaggtttgcagctctcccctgggacactaaccatcctagcccgggctg

SEQ ID NO: 176297 - DNA, 259 bp, Glycine max
attatattatccagaacagtatcatatatcaattgatgttgtggatcatattctagtcttttctcagagttagagagtatatcagagtgtattgctgtctttaaaattactccatttggataataccacgcacttttatgagtcagaatgagtactccttagtcgttcatgtcaacttgaatcatatgaaaaatgttgtccatggccacttcgtaaatatgtgtgtgtgtacttttcagggaccattgacgattatgga

SEQ ID NO: 176298 - DNA, 265 bp, Glycine max
actcgagccgaatcggctcgagaaacaccaaaaggacctagttctgtcgaagacattaaagcaaccatgcaagcaagtatagaacaagcgcattgaacagtcctgggcactacatgtaaattaagcccaaagatggggagaaaggaaaaggagagacaaatatagtccatactgagtgtcatcaacaatccagactgaagtcttctattttcatctcaatccccttttctgatttgccacccatgcctcttcaggctggaaacaa

SEQ ID NO: 176299 - DNA, 261 bp, Glycine max
cggctcgaggcaggcaggaacaaacagggctgccttctggccttgtaagacccttattgctgtcctcggaggggctggggacttgtgtctgcggggatcagagcgcacagggagtgcacatatccaggcaccaggactagggctggagtgaggggggggtatttcaattactttctattggtctcccttctctacactcttgtaataaaatgtctatttttaatgtttgtacacaacaatccttctattctagcctgcatt

SEQ ID NO: 176300 - DNA, 260 bp, Glycine max
gaatgaatgacgaggcagcggagaggctgtggagcaggtggaggccgacctgctgcaggaccaagagggctaccgctggaaggcgcacgagcgcctggcagcccgctcagggcccgtgcgctttgagcctggctttcagcccttcgtcttggtgcagtgtcagcccccggctgtggtcacctccttggccctgcactctgagtggcggctcgtcgccttcggcaccagccatggctttggcctctttgaccaacagcagc

SEQ ID NO: 176301 - DNA, 266 bp, Glycine max
tgaaaacaaaaaataaaatatttgttttctgctagatgcaaaactgactaagcatgtatattttaccaaacttatgtattttttgaagttatgcactataaaatgttaaaacattttttgctgggacaaaatgttaagtaatttgcagtatgtagtgcccccagtattgggatttttgagctaatgggcagcagtcagctgggggcttctgagggatgctcatctttaacagtctccctcatgtacttttgctgttttacacagag

SEQ ID NO: 176302 - DNA, 257 bp, Glycine max
ctcgacccgcgcgtagaggcatgcaccgggtaggtttccgcggtgcccccgcggcggcctgaacggacgctccctgccccatcccggctgttgggctgggccgctttgcctctgcttcgccctgtgctgtgttctccagctttgtagcagcagccttgacaaacccaggcgcactgtaccaaggcaatgtaacttttgattttcggtcaatttaagttcttttgtcaccacatattaataaacagttttgacttcac

SEQ ID NO: 176303 - DNA, 269 bp, Glycine max
ccgagctgcgccgcgagctgccacccgaccaggctgagtactgcatcgcgcggatggccccctacaccggccccgcctccgtgccaggtgctctggactacatgtccttctccacggcgctgtacggcgagagtgacctctaatccaccccgcccggccgccctcgtcttgtgcgccgtgccctgccttgcacctccgccgtcgcccatctcctgcctgggttcggtttcagctcccagcctccacccgggtgagctggggcccacgtg

SEQ ID NO: 176304 - DNA, 274 bp, Glycine max
ctcgagccgttttttttgagatagggtctcactctgttgctcaggctggaatccagtggtacacaccatggttcatcatggttcactgcagccttgacctcccgggctcaagcaaacctcctgtctcagcctcctgagtggctgggactatgtaagtgcacaccaccacacctggcttaatttttttatttttgtagagatggcgtcttgccatgttgcctaggctggtctcaaactcctgagctaaagtgatcctcatgcttcagcctcctaa

SEQ ID NO: 176305 - DNA, 281 bp, Glycine max
cggcattccgctcgagatttcaggtgtgagccaccacacctggcccacagtgggatttttagaaagagttttattgaggcataattcacgtccctatagaattcattcgtttaaaatggacagttctgtgtcttttagtatattcaacgttgcgcagacattaccacaatcaattttagaacattttcattatcacccatcccactcgagccccaggcacgtctgaccacgctgtagccagcagcatcagcgccctgacccccggacctgccgctggcgct

SEQ ID NO: 176306 - DNA, 265 bp, Glycine max
gtaatcccagcactctgggaggccgaggtaggaggatcacctgaggtctggggtttgagaccagcctggccaacagagtgaaaccccatctctactaaaaatacaaaaattagccgggcgtggtagcgtgtagctgtcgtcccaggctgtacttcggaggctgaggcaggagaatcgcttaaacgcaggaggcataggtcgcagtgagctgagattgcgccactagaccccagcctgggcaacagagtgagactctgtctcaaga

SEQ ID NO: 176307 - DNA, 260 bp, Glycine max
gctttttgatgacttctagcaagcctcgctaatctcgccttaccccgcactattaacctactgggagaactctctgtggtagtaaccacgttgtcctgatctgatatcactctcctcacttacaggactcaacatactagtgcaaggcctatactccctctacatatttaccagaacacaatggggctcagtcagtcaccacattaagaacataaaaccctcattcacacgagacaacaccctcatggtcatacacctat

SEQ ID NO: 176308 - DNA, 266 bp, Glycine max
cacttttatcggcattaatttttcagtgtagtttgttgttgtaaaataatgtaatcatcaaaatgatgcatattgttacactactattaactaggcttcagtatatcagtgtttatgtcatagtgttaaatgtatacttgtaaataaaatagctgcaaacctcagtcctttgtgctacttgatgtggcttgcaaagaatagaatccttgtcctgagattctcacttggcttcaggaaggctgcaggtatgattccagaaaccagtg

SEQ ID NO: 176309 - DNA, 259 bp, Glycine max
tcccaggcctcggggagggcacccctaagaccacagtggccaagatcacagtggccacggccacggccacagtcatggtggccacggccacagccactaatcaggcggccaggccaccctgcctctacccaaccagggccccggggcctgttatgtcaaactgtcttggctgtggggctctgggctggggccaaataaagtctcttcctccaaaaaacacgaagacaagaagttttcagcctcagccaaccaggtattg

SEQ ID NO: 176310 - DNA, 262 bp, Glycine max
cttactaccagacaaccttagccaaaccatttacccaaataaagtacaggcgatagaaattgaaacctggcgcaatagatatagtaccgcaagggaaagatgaaaaattataaccaagcataatatagcaaggactaacccctataccttctgcataatgaattaactagaaataactttgcaaggagagccaaagctaagacccccgaaaccagacgagctacctaagaacagctaaaagagcacacccgtctatgtagca

SEQ ID NO: 176311 - DNA, 265 bp, Glycine max
cgcatttggccgcctccctaccgctccaagcccagccctcagccatggcatgccccctggatcaggccattggcctcctcgtggccatcttccacaagtactccggcagggagggtgacaagcacaccctgagcaagaaggagctgaaggagctgatccagaaggagctcaccattggctcgaagctgcaggatgctgaaattgcaaggctgatggaagacttggaccggaacaaggaccaggaggtgaacttccaggagtatgt

SEQ ID NO: 176312 - DNA, 266 bp, Glycine max
atttatgatggtaatattgtttcttctaagaatatttatttttccttctaaatattgagataaaattcatgcttttgaaatgttctattcagtggcttttagtatatttgctatgttgtgcaaccatcgacactatccatttctagaactttttcgtcatcccaaacagacgctctgtattcataaaaaaataacttcctacctgtctctccccctagtctttggtaacctttgttatactggtaaactttgttgtgctctctgtc

SEQ ID NO: 176313 - DNA, 271 bp, Glycine max
cctggctccggcttcaccaacaccatgcgtgttgttcctgtgccgtgatggaccccagagcccctcctccagcccctgtcccacccccttcccccagcccatccattaggccagcaacgcttgtagaactcactctgggctgtaacgtggcactggtaggttgggacaccagggaagaagatcaacgcctcactgaaacatggctgtgtttgcagcctgctctagtgggacagcccagagcctggctgcccatcatgtggccccacccaat

SEQ ID NO: 176314 - DNA, 252 bp, Glycine max
ccgctgcccccatcacctctactgtctcctccctgggctaagcaggggagaagcgggctgggggtagcctggatgtgggccaagtccactgtcctccttggcggcaaaagcccattgaagaagaaccagcccagcctgccccctatcttgtcctggaatatttttggggttggaactcaaaaaacaaataaaaaaattcattcttttctcgggcaaaaaaaaaatgccaaaactaactaaaaaaaagggggg

SEQ ID NO: 176315 - DNA, 267 bp, Glycine max
ccgaagatggcggaggtgcaggccggaaggtggtggtcgtacgctgtgaaggcatcaacatttctggcaatttctacagaaacaagttgaagtacctggctttcctccgcaagcggatgaacaccaacccttcccgaggcccctaccacttccgggcccccagccgcatcttctggcggaccgtgcgagtatgctgccccacaaaaccaagcgaggccaggccgctctggaccgtctcaaggtgtttgacggcatcccaccgcccta

SEQ ID NO: 176316 - DNA, 260 bp, Glycine max
gcgatctgcccgcctcggcctgccaaagtgctggggttacaggcatgagccactgtgcctggccagcttttttacttcaggtgattttttacttcaggtaatatgtttttcacttctaccatttccacctgctgagaacgtctgtcttttcactcattcttggggtgtccactcttgccgcggggagatcgggctggaattgctgctgtgaaatcttttcctggtccctccagcatctgagtcctggggttctgccagca

SEQ ID NO: 176317 - DNA, 262 bp, Glycine max
attagttgcaagactggcacttcgttgcttggtgatgtccctttctgttctcttcactcttggtcttgcgagagacagccatgccagagacgaagattgacggcatgctgtttggccaaacactcccattccaagttcattgcgagatcttctaaagcctggccctgcaagtgttgaaatcgatgtcaccctatgcaaattgaagaaacacagtacccgaaaaccttcttctataaagaagaccttcatccaggcaaaacaa

SEQ ID NO: 176318 - DNA, 266 bp, Glycine max
gttgtttagaagcatgcagcacctcctgcttcactctctctgtctctcctgctccaccatggccagacacgtgcctgcttccccttcgccttctgccgtgattgtcagtttcttgagggctccccagccatgcttcctgtacagcctgcaaaactgtgagtcaattaaacctcttttcttcataaaatcaaaaaaaaaaaaaaaaaaacgaaaagaaaaaaaaagaatacaaaaatagagatacaactaactacaaaaaagggggg

SEQ ID NO: 176319 - DNA, 262 bp, Glycine max
caaaacaaaatcctcacccattttcttcgtagccaaacactctgaaattctcagttatgtcgtggcaagcgtatgtggatgatcacctactgtgtgagatcgaaggtaaccacctcactcacgccgctatcatcggccaagacggaagcgtttgggctcagagcaccaacttccctcagttcaaactgaggaaataactgccatcaataatgactttaatgagcctggatcacttgctccaactggattgtatatcggtggc

SEQ ID NO: 176320 - DNA, 260 bp, Glycine max
gtttcgaacacctgtattacaggtacttcgtcagtttgtaagacatgagtccgaaacaactaccagtttggttcttgaaagatccctgaatcgtgtgcacttacttgggcgagtgggtcatgaccctgtcttgagacaggtggaaggataacatccagtcacaatattctctctagcaactaatagatgtggcgatcaggggatagtgaagtttaccaactgggtgatgtcagtcaaaagacaacatggcacagaatatc

SEQ ID NO: 176321 - DNA, 259 bp, Glycine max
atttttcttcaccttatagatgattttttaaaatcatttgttttatttagtattagggtctgtatctggagtttctcattcttcgttgagctataatttgtttccccaccaccaaggaggcatgctctagattatattctttttatagtatatatttttttctggtttatgagacagggcctcatctgtcacccagactggagtacagtggtgggatctcagctcaccacagcctcaacctcctgggctcaagtgatcc

SEQ ID NO: 176322 - DNA, 263 bp, Glycine max
ctccagcatggcctggtctcctctcctcctcactctcctcgctcactgcacagggtcctgggcccagtctgtgctcccgcagccgccctcagtgtctggcgccccagggcagagggtcaccatcgcctgcagtggcagcaattccaacatcggggcaggtcatgatgtatattggtatcagcagctccaggaacagcccccaaactcgtcatctctgctaagaacaatcggccctcaggggtccctgaccgattctctgcctc

SEQ ID NO: 176323 - DNA, 261 bp, Glycine max
cgagaacacgtgactgaaatcctgcgccgttcttcagtctggagtgccttcacagatcatcaacatgatttgttcatttctgagtcacaagcagcaggatacctcacaggacctggagttgctggctaccttaccgcaggtacatctacatcagtcatgtctaacctgccacctcctgtagaccatacgcaggcgaccttggctatcagacttggaatattcacgagatacggtacacgcccgcggtcagtgacaggtcca

SEQ ID NO: 176324 - DNA, 262 bp, Glycine max
tcgagcgagaagcctgtgaaggaagccatggcccgattccgcaagaacctcgaggccattgtcagcgtgattgctgagcgcaacaagaagaagcagctgccatattactacttgtccccagaccggattccgaacagtgtggccatctgagcacactgccagtctcactgtgggaaggccagctcccagccagatggactccagcctgcctggcaggctgtctggccaggcctcttggcagtcacatctcttcctccgaggc

SEQ ID NO: 176325 - DNA, 266 bp, Glycine max
atcgctatccccaccggcgtcaaagtatttagctgactcgccacactccacggaagcaatatgaaatgatctgctgcagtgctctgagccctaggattcatctttcttttcaccgtaggtgcctgactggcattgtattagcaaactcatcactagacatcgtactacacgacacgtactacgttgtactcacttccactatgtcctatcaataggagctgtatttgccatcataggaggcttcattcactgatttcccctattct

SEQ ID NO: 176326 - DNA, 273 bp, Glycine max
ggaactttaagatcatttaccgccgctatgctggcctctacttctgcatctctgtggatgtcaatgacaacaacctggcttacctggaggccattcacaacttcgtggacgagatgttcctggctggcgaaatccgagagaccagccagacgaaggtgctgaaacagctgctgatgctacagtccctggagtgagcaggcgagccccaccccggccccggcccctcctggactcgcctgctcgcttccccttcccaggcccgtgcgcaaccca

SEQ ID NO: 176327 - DNA, 261 bp, Glycine max
aagcaatacgtccctccttcctctgccttataattcttgtgacccttttcgctggtagcattgaaagtgcaccagcaaacgtgaagccaagccattatgctgcacccttcaataggagtgtttttccttctggttttctatttggaataggctctgcagcttaccagatagaaggagcagcagcttagatggcagaggaccaagtatatgggacacctatactaaacagcaaccagggaagatttgggatcatagtgatgg

SEQ ID NO: 176328 - DNA, 258 bp, Glycine max
aatccgcaccaaccagcaccatgcccatgatactggggtactgggacatccgcgggctggcccacgccatccgcctgctcctggaatacacagactcaagctatgaggaaaagaagtacacgatgggggacgctcctgattatgacagaagccagtggctgaatgaaaaattcaagctgggccggactttcccaatctgccctacttgattgatggggctcacaagatcacccagagcaacgccatcttgtgctacat

SEQ ID NO: 176329 - DNA, 260 bp, Glycine max
tcaagaccagcctggccaacatggtgaaaccccatctctctactaagatacaaaaattagccaggcatgatggcgggtgcctgtaatcccagctactcgagaggctgagacgggagaatcgcttgaaaccgggagattgtggttgcagtgagctaagattgcaccactgcactccagcatgggtactgagcgagactctgtctcaaaagataaataaataaataggtaaacatacatttaagacacctagccaggcgtgg

SEQ ID NO: 176330 - DNA, 257 bp, Glycine max
ctccccaggagctgagaagcctgaagagggccaggcacggaggagcaggaacgaggacagtcaaatgtgccaagcttgtctttggttgtaactggtaatgtcccatgtctgttattctagttccccactatcttgcaaggattggcagtaaagtcctagtgatggacaacgcggcagtggggaagtgacagccgtggctagatcatcagatgtgtctgtagaatccggtgtgtccctgtgaacatccgccagcagta

SEQ ID NO: 176331 - DNA, 261 bp, Glycine max
tgggaacctagaaggagatgtgagcagcccaaggtcaccagctcacgtggagcagtgctagggcttgagcagagctctgctgctgattccgggcttctgtgaagagtgattcatgctcagtgagcctgtaaatatgatcttacctgaacaagagagtttttctcatgacccacgaggaaacacttcttgttactcacagtagagacctggttagaaagtgccggagagggctaggtgtggtggctcacgcctgtcatccca

SEQ ID NO: 176332 - DNA, 260 bp, Glycine max
aatatctgtgcctttgcctgtcctttctcccactctactgaaacccggaacagattcccgcttgccttctgatgaagagaggttaggtaaagagagtttggaggaaaaaagacaccaggaggcaggctgcggggtaggagagggttctgagaggaggcagcaatccagaatacctccttttctacagcatcccttgaacttttgaacggttgtgcctaccactggctggcacaccagggcaatgatttccctgcagaagg

SEQ ID NO: 176333 - DNA, 259 bp, Glycine max
gcacgatataggttgtgaatgagactttgagggtggcaaacataataggtgcgatattcaggagagcaatgacagacatcaacataaaaggttacactatcccaaagggatggagggtcgttgcttcatttcgtgcggtacatctaaaccctgaccattacaaagatgcccgcaccttcaatcatggcgatggcagagtaactcagaagcaagtagcccttcgaatgtatataccccttttggaggaggtccacgtcta

SEQ ID NO: 176334 - DNA, 260 bp, Glycine max
agacctttgagacattacacaacctggtacacaaaggggtcaaggcggtgatggacatcccctatgagctgtggaacgagacttctgcagaggtggctgacctcaagaagcagtgtgatgtgctggtcgaagagtttgaggaggtgatcgaggactggtacaggaaccaccaggaggaagacctactgaattcctctgcgccaaccacgtgctgaagggaaaagacaccagttgcctggcagagcagtggtccggcaaga

SEQ ID NO: 176335 - DNA, 262 bp, Glycine max
ctttctattagctcttagtaagattacacatgcaagcatccccgatccagtgagttcaccctctaaatcaccacgatcaaaagggacaagcatcaagcacgcagcaatgcagctcaaaacgcttagcctagccacacccccacgggaaacagcagtgattaacctttagcaataaacgaaagtttactaagctatactaaccccagggttggtcaatttcgtgccagccaccgcggtcacacgattaacccaagtcaataga

SEQ ID NO: 176336 - DNA, 269 bp, Glycine max
tgccagcgcaggggcttctgctgagggggcaggcggacttgaggaaaccgcagataagtttttttctctttgaaagatagagattaatacaactacttaaaaaatatagtcaataggttactaagatattgcttagcgttaagtttttaacgtaattttaatagcttaagattttaagagaacatatgaaacttagaagagtagcatgaggacggaaaagataaaaggtttctaaaacatgacggaggttgagatgaagcttcttcatg

SEQ ID NO: 176337 - DNA, 273 bp, Glycine max
cggcgcgtgctcctcttctctggagaagagctacgagctgcccgatggccaggtcatcaccattggcaatgagcggttccggtgtccggaggcgctgttccagccttccttcctgggtatggaatcttgcggcatccacgagaccaccttcaactccatcatgaagtgtgacgtggacatccgcaaagaccttacgccaacaccgtgctgtcgggcggcaccaccatgtattcgggcattgccgacaggctcccccaacgagatcaccgccct

SEQ ID NO: 176338 - DNA, 259 bp, Glycine max
gtgacggtaccagacattccgtgagtcgcaaaaatgaaaacaattctttctgcagagaccatgaacatcccggacggcgtgagcgtcaaggttaatgccaaggtcatcgaactttagggcccccgcggaaaattggtgcgagacttcgagcacttgaatctcgattttcagctcatcactgacaaaacggtaaaaggtagctgaaggtggaagcctggatcggttctcggaaaacatccgatgccattcgcatcgccct

SEQ ID NO: 176339 - DNA, 255 bp, Glycine max
gaagtttgcctagaaagggcttcccggtgctgatggagaggccgagacccttctgttggacaggctgccctgttcctgggtgaggatgggcttctgcctggcactgggggtggagggtgcacacgaatggcccgccttgaggggtcatggcacggaatatgaaagcctcctccacctccaacacccccaccttggaaggagataaggagggggccccagcaaaagccactggacacacagctctgcttgacgagg

SEQ ID NO: 176340 - DNA, 257 bp, Glycine max
ctgttcgatatgccagtgttcatgctcatttgggaagaactgctagtagaagggatgatcttgaatctcttgcatatacactcatcttccttcttaaaggcaggttaccctggcaaggttatcagggtgatcataaatccttccttgtttgcaaaaagaagatgggaacatctcctgagatctatgctgtttttgccctgctccttttaggcagttccttgagattgtagtgaacatgaagtttgatgaagaaccta

SEQ ID NO: 176341 - DNA, 257 bp, Glycine max
agattatcctaagtctttgggaatagtgctgcaatggcttcaagtcaggaggaggtgacccttttgggagctactggaagcccatttgtgtgcagggttcatattgccctcaagttgaagggagttcaatacaaatatgtcgaagaaaatttgaggaacaagagtgaactgcttctcaaatcaacccagttcacaagaaggttccagtgtttattcacaatgagaagcccatagcagagtctcttgtgattgttgaa

SEQ ID NO: 176342 - DNA, 258 bp, Glycine max
attctctctgtgtatttccctacctctcccttcaagatgcagatcttcgtcaagaccctcaccggcaagaccatcacccttgaggtggaaagctctgacaccatcgacaacgtcaaggccaagatccaggacaaggaaggaatccccccggaccagcaacgtctcattttcgccggaaagcacttgaggacggccgtacccttgctgactacaacattcagaacgagagtactcttcacctcgtcctccgtctccgtg

SEQ ID NO: 176343 - DNA, 258 bp, Glycine max
catatagtaaaacccagcccatgacccctaacacgggccctctcagccctcctaatgacctccggcctagccatgtgatttcacttccactccataacgctcctcatactaggcctactaaccaacacactaaccatataccaatgatggcgcgatgtaacacgagatagcacataccaaggcccacacaccacctgtccaataaggcctccgatacgggataatcctatttattacctcagaagtttttgtcttcgc

SEQ ID NO: 176344 - DNA, 258 bp, Glycine max
cacaagccaagtgaaagtgagacacaataaaaatcaaagagcataatgtcagggatcattcacaagattggggagacccttcatgtgggagggcacaagaaggaggaggagcataagggtgagcaccatgctggagaatacaaaggggagcaccatggtgaacacagtagtgagtacaaaggaagcatcatggtgaacacaaagctggagagtaccatggtgagcacaagccagagcacaaagaggggttcctagaca

SEQ ID NO: 176345 - DNA, 261 bp, Glycine max
gattgacaacaatgagccctacatgaagatcccttgcaatgactctaaaatcaccagtgctgtttggggacccctgggggagtgcatcatcgctggccatgagagtggagagctcaaccagtatagtgccaagtctggagaggtgttggtgaatgttaaggagcactcccggcagatcaacgattccagttatccagggacatgaccatgtttgtgaccgcgtccaaggacaacacagccaagctttttgactccacaact

SEQ ID NO: 176346 - DNA, 266 bp, Glycine max
atccccttagcagggtccttcccaccagactcagggaagggatgccccattaaagtgacaaaagggtggggtgtgggcaccatggcatgaggaagaaacaaggtccctgagcaggcacaagtcctgacagtcaagggactgctttggcatccagggcctccagtcacctcactgccatacattagaacgagacaatcaaagccctcccagggtggcacacccatctgtttgctggggtgtggcagccacatccaagactggagcag

SEQ ID NO: 176347 - DNA, 267 bp, Glycine max
ctattagcaggagattcatgcctgaaaaggggtctcctgaatatgatgcgttggctaagaaccctgagaaggagtttttgaagactattactggcaagaaggagaccctcattgaccttacagttatagaaatcttgtcaaggcacgcatctgatgagttctaccttgggcagagagatggtggtgacttggacttctgatgccggtccattagaggcatttaagaggtttggaaagaagcttgaagagattgacaagcagcttata

SEQ ID NO: 176348 - DNA, 263 bp, Glycine max
gatccctcccttaccatcaaatcaattggccaccaatggtactgaacctacgagtacaccgactacggcggactaatcttcaactcctacatacttcccccattattcctatagccaggcgacctgcgactccttgacgttgacaatcgagtagtactcccgattgaagcccccattcgtatacataattactcacaagacgtcttgcactcatgagctgtcgccacattaggcttaaaaacagatgcaattcccggacgtct

SEQ ID NO: 176349 - DNA, 258 bp, Glycine max
ctcgagccgttcccaaagaactacccccttttcagctgagccctggggactgttccaaagccagtgaaatgtgaaggaaagtggggtccttcggggcgatgctccctcagcctcagaggagctctaccctgctccctgctttggctgaggggcttgggaaaaaaacttggcactttttcgtgggatcttgccacatttctgatcagaggtgtacactaacatttcccccgagctcttggcctttgcatttatttatac

SEQ ID NO: 176350 - DNA, 257 bp, Glycine max
ctcagtcagacgccaaaggcctgagaactcagacagccactttgcaactcctggaatcccaaggccagacagcctggagtttggatgtccaaaagcaccagaaggagggtgtcttaggtccaggagagagcgagctttcctatgcatttttgttttatccatacccctgaccaattggatgtgcccacccacattgaaggtgggtgtccctctattaaatattttaactataattttcactgtgatataggcactga

SEQ ID NO: 176351 - DNA, 255 bp, Glycine max
gacgacttcccctccctgcaagccatcgccagggtcatcacgtagctcccgccagcgtggccagagctgtcgcaccgtgagcgtccttcctccttcctctccgggctgccaggcagccaggtaaggcctggtgaggccacttggcctcttggttggccaggcccaccaggaagtcaccaggcagtccacccgccctgttggcacactcaagcgggagtccacccctgcctcagtggtgggccagtctcggtttgc

SEQ ID NO: 176352 - DNA, 254 bp, Glycine max
gcacccactcagccggcagccagatggccccgcaaggcctccagggatggcccctagccacaggccctggctgaggtctctgggtcggtcagtgacatgtaggtaggaagcactgaaaatagtgttcccagagcactttgcaactccctgggtaagagggacgacacctctggtttttcaatacagttacatggaacttttctgtaatgggtacaatgaagaagtttctaaaagcacacacaaagcacattggg

SEQ ID NO: 176353 - DNA, 132 bp, Glycine max
cttttaccaaaaatcaaagctattcctcagctccagggctacctgcgatctgtgtttgctctgacgaatggcatttatcctcacaaattggtgttctaaatgtcttaagaacctaattaaatagctgactac

SEQ ID NO: 176354 - DNA, 265 bp, Glycine max
gtgacaagttgctaatatgcagaagggatgggtgatacttcttgcttctcatgatgcatgtttctgtatgttaatgacttgttgggtagctattaaggtactagagttgataaatgtgtacagggtccttttgcaataaaactggttatgacttgatccaagtgtttaacaattggggctgttaagtcgaccatacatcactgtgatagaatgtgggctttttcaagggtgaagatacgagtcttaaccacagtgtaacttacag

SEQ ID NO: 176355 - DNA, 276 bp, Glycine max
ctgaagccacataaccctaaccatcaaacggctaggtgtcgctgggacttcaatggcagtgactgaagctcagaatcctcttcttggagaaaacacatgtggttccttgttaaaaaagcttcaggaaatatgggatgaggttggtgagagcgacgagcaacgagacaagatgcttcttcagttagagcaggagtgcttggatgtgtacaagagaaaggttgagcaggctgccaagtcaagggcgcactacttcaagctctgtctgatgctaagctt

SEQ ID NO: 176356 - DNA, 270 bp, Glycine max
cagacttggtgtggttctcatattttcttcttggaacttcccaatcatactgacattggatccaataattggggcactatctgctggaaatgttgtagtcataaaaccttcagagcaatctccagcaagctcttcttttcttgccactaccattcctcgctacttggactctaatgccatcaaggtgattgagggaggaccagatgtctgtgaacaactactgctacaaaaatgggacaaaatattcttcactggaagtccacgtgtggc

SEQ ID NO: 176357 - DNA, 267 bp, Glycine max
caaacattgtttgttgtaggaagaggaatcttgagaaatggcaggggacagcaagagcaagattctgttcatcggagggactggttacatcggaaaattcatcgtggaagccagcgccaaagctggccacccaactttccttttggtgagggagtccactctctccaaccccgcaaaatcacccctcatcgacaatttcaaaggcctcggtgtcaatcttgttttaggagatctatacgatcaccaaagtttggtgagtgctataaa

SEQ ID NO: 176358 - DNA, 266 bp, Glycine max
ccgtgataacacactaacaccaccacttcatcaactttacttgacaacaatattgtaaaactcaaaatctagtttcatacttttgttcttcttcttgaaatggctctccaggctgcttctcttgttcctgcttctttctcggttcttaaagagggaaagagtggtgtgtctctcaaggactccaccttgttcggtctttcattttcagaacctatcaaagctaacttcagctcttctgcattgaggtgcaagagggaattcgaaca

SEQ ID NO: 176359 - DNA, 266 bp, Glycine max
atcgagataactagaaacagtgtgatgaaaatgaaggtccttgttttcttcgttgctacaattttggtagcatggcaatgccatgcgtacgatatgttccctctccgaatgaacactggctatggtgcccgtactccggaggtgaaatgcgcaagttggaggcttgctgtggaagcacaccacatctttggctttgagaccattcctgcagagtgcgttgaagcaacaaaggaatacatccatggcgaacaatatagatcagactc

SEQ ID NO: 176360 - DNA, 267 bp, Glycine max
caagccgattggaaaaagaaatacttgatcgttatcttgatgttgtcctgaagggtaacagagatggattgaagaaattacgactaagaattgaggatccaccacgtaggaagcacatggtgtaccttggaggtgctgtccttgcaggaataatgaaggatgcaccagagttttggattaacagggaagattatctagaagaaggaattgcttgtcttagcaggtgtggccaggcatgactttgaggtccgtgattgctctgaaaat

SEQ ID NO: 176361 - DNA, 263 bp, Glycine max
caacaccgtgctaactttggtttaaggcaagaggccattgacgccattgaaaaccttcgggttctcatttacaagcagtgtctaccagttgtctcatgctcagacatccttgttatcgcagcacgtgaagctgttcgccaattaggaggccctgattttgacgtgccactgggaagaaaagacggtctaggaccaaacgccaccgcgccggacaacctaccggcaccattcttccgaaccgacgatcttctcagaggattcgg

SEQ ID NO: 176362 - DNA, 281 bp, Glycine max
gaaagatttgacgcggaacaagtggtcatataaggttggcctaagaggagaggctatgaatttggtatctcccaatggagtctcgtctgttgactgggtccaagagtcacaagctactcaaagccggtcacaattaaaatggtacaaggcatattttgatgcacccgggggaaaggaaccactggctttggaccttgaaagcatgggtaagggtcaagtatggataaacgggcagagcatagggagatattggatggcttatgcaaagggtgactgtaatt

SEQ ID NO: 176363 - DNA, 269 bp, Glycine max
gcaacctctgccaatctttaatgggtgtgattgatttctacaacactggtgctttgtgctgggttaagtccaacgccaatctgaagcagcaagtgggtttggcaccaagacccatttgttcatttgaggggaataatcagaggaagtttgtggcaatggcttctaccgttcctgtggagcaagtcaacaatggccccctgcaggtgaccggtgactccttcatcagagagcatctgaggaagttggctccttatcagcccattttgccc

SEQ ID NO: 176364 - DNA, 270 bp, Glycine max
cgaaggtctccttcagctaccttctgacaaggctcttttgtctgaccctgtattccgccctctcgttgataaatatgcagcggacgaagatgccttctttgctgattacgctgaggctcaccaaaagctttccgagcttgggtttgctgatgcctaagcaacgtttaggggattgttgaagaggcatggtgcccataatatttctctaaaaaattgtatggtcatggtttttaatgccaatgtgggttccccagattttagatagctttt

SEQ ID NO: 176365 - DNA, 221 bp, Glycine max
cattgcaagaatggcacttcgttgcttggtgatgtccctttctgttctcttcactcttggtcttgcgagagaaagccatgccagagacgaagatttttggcatgctgtttggccaaacactcccattccaagttcattgcgagatcttctaaagcctggccctgcaagtgttgaaatcgatgatcaccctatgcaaattgacaccccacagtacccgaaaa

SEQ ID NO: 176366 - DNA, 272 bp, Glycine max
cattaatggcgaacaatttagatcagactctaaaacagttaaccaacaagctttcttttatgctagtgaacgcgaagtccatcacaacgacatatttatattcggcatagataacaccgtactctctaatatcccatactatgaaaaacatggatatggggtggaggaatttaatgaaaccttatatgatgaatgggttaacaagggcgacgcaccggcattgccagagactcttaaaaattacaacaagctgttgtctcttggcttcaaga

SEQ ID NO: 176367 - DNA, 270 bp, Glycine max
cgagcattaatggcgaacaatttagatcagactctaaaacagttaaccaacaagctttcttttatgctagtgaacgcgaagtccatcacaacgacatatttatattcggcatagataacaccgtactctctaatatcccatactatgaaaaacatggatatggggtggaggaatttaatgaaaccttatatgatgaatgggttaacaagggcgacgcaccggtcttgccagagactcttaaaaattacaacaagctgttgtctcttggct

SEQ ID NO: 176368 - DNA, 265 bp, Glycine max
ctcttctcttgcggctagcgttttagcgcacatcttctagatttaaggcagatgggtaaggaaaaggttcacatcagtattgtggtcattggccatgtcgactctgggaaatccactaccactggtcacctgatttacaagcttggaggcattgacaagcgtgttattgagaggtttgagaaggaagctgctgagatgaacaagaggtctttcaagtatgcctgggtgctggacaaacttaaggctgagcgtgaaagaggaatca

SEQ ID NO: 176369 - DNA, 266 bp, Glycine max
gagatgctgaagaagtttcagggctcacagttctgtaatcagttttaccggacatactttttgacaattgaacaagagatattcgctgtcttgactgacacttttcataaacctgggttcaaattacatgtcttggtgctacagcatttgttctgtttgctagaaactggtgccctaactgaacctctttgggatgttgctacaagtcaatattcatactcaagtaatgcagtgtttgtacgtgagtttaccataaaacttctaag

SEQ ID NO: 176370 - DNA, 268 bp, Glycine max
ctgcgactctcactgctgtaagaattcccactttccaccaacgccatctcagtaaacatttcactgcaccttcttcttccttacgcctcctcaatctcgcaaagatggaaggaagtgagatcagtgagcaagtgggagaggatttgggagcaaagaagaaagtttttgtagctggagccactggtagcaccggcaaaagaatcgttgagcagttactcgcaaagggctttgctgttaaggctggggttagagacgtcgacaaggccaa

SEQ ID NO: 176371 - DNA, 266 bp, Glycine max
gttcattctctttgcgcagttccctacctctcctttcaagatgcagctcttcgtcaagaccctcaccggaaagaccattccccttgcggtggaaagctctgacaccatcgacaacgtcaaggccaagatccaggacaaggaaggaattcccccggatcagcaacgtctcatcttcgccggaaagcagctcgaggacggccgtaccctcgccgactacaacatccagaaggagtcaacccttcaccttgtccttcgtctccgtggtg

SEQ ID NO: 176372 - DNA, 268 bp, Glycine max
cacagatctgtcttccgaagcaggaactaaatatggctgacttgttggaatggtcaaagcaagataagaaacgaatgcttcatgtcgtctaccgtgttggtgaccttgatcgcaccatcaaattttacacagaatgtttaggaatgaagcttttgaggcaaagagatatcccagaggagaaatatgctaatgcttttcttggatttggccctgaagaatcccattttgttgttgaattaacatataattatggggttacctcgtatga

SEQ ID NO: 176373 - DNA, 270 bp, Glycine max
gttctgcagtgatcaatgcaggctatcgtatatctggaactcatgttaatccattgggacttaaatcagatgcacccatggatgccatttgggatataatgcgctgctgggtaaaaaatcatcctgtgaagcctcaaccagcagatcaaccaggaagcatcatacttgcaaaggaacctgttcttcaggctaattttgctcgagctgtagcatctcttagcaaggcacaagctaagaaggttgcgcgctttcttccaaatcctgaaagac

SEQ ID NO: 176374 - DNA, 268 bp, Glycine max
catagctagaagcaataagatgaaaatgaaagtgcttgttttgtttgttgctacagttttggtagcatatgaatgccatggctcagactaccagaagttccctctccaaatgaaaactgggtttggtgggcaatacagcaatgaggtggcatgtgccagttggaggcttggcgtggaagcaaacaacgtagtcaagtggcaaactgttcctgcagcttgcggagagtacatagctgactacgttctaggagaccaatatagatcagat

SEQ ID NO: 176375 - DNA, 189 bp, Glycine max
cttggatttttgacattgatgataccctgctttcaacagttccttcctacaagaataatctatatgggggaaagacactgaatgtgacatctctagaggaatggatgagcaagggcaatgcacctgctcttgatcactcattgaagctatacaatgaacttaaatccaggggggtgcaaatcattttgg

SEQ ID NO: 176376 - DNA, 270 bp, Glycine max
aaaagagtagtggcctttaggtggtgaagaacaagagctcaaatcaaatcgaatcgaaaaaagaaagaaagatcatattcatggcgatggcaagcctggctcgacggaagggttacgccgtcgttttgtcgtcgaggtcgtcgttttgtctgacaagctggaggggattcgcgtccggatctgacgaaaacgacgtcgtcgtcatcggcggcggtcccggcggctacgtggccgccatcaaagccgcgcagctcggtctgaaaaccactt

SEQ ID NO: 176377 - DNA, 263 bp, Glycine max
gggcgaagctgaaacaccaaaacccttggcgagtgaagccctagcctcactagactacacacttcgcaatgtgccgtgttgctcacacccctgacatcgccggcgagcggcagtccggccaatacgttcgcacccaaaacgttgtggcatgccaagccgttgccaacatcgtcaaaagctctttaggtcccgttggcctcgacaagatgctcgtcgacgacattggcgacgtcaccatcaccaacgacggcgccacgattctc

SEQ ID NO: 176378 - DNA, 264 bp, Glycine max
cacaaacacacgtgtcgagtgaattcaaatcaatttaggcagaaaatgaggtgttttggttttatagtgataggtctagtggaggtgcttggagggttacccttctcctcaaatgcaaaattagaaccctgtttttacaagaagacttgtccccaggtgcattttattgtatttaaagtcgtagtgaaagtttcaagaacggatccacgtatgcctgccagtctcgttaggcttttcttccatgactgtcttgttcaagggtgt

SEQ ID NO: 176379 - DNA, 265 bp, Glycine max
ctaagataaatggtatctggagatatgttctactcagttgatgagttcagattggaccccaaatggctgattgatcctaagcatctctatgttgggccactgattggagagggagctcatgccaaagtctatgagggaaaatacaaaaaccacactgttgctattaaaattgtacataaaggagaaactacagaagacattgccaagagagaagggcgcttcgcaagggcggtggcaatgttgtctagagtgcaacataagaatt

SEQ ID NO: 176380 - DNA, 266 bp, Glycine max
agaacaggagcacactgaacgttggggtcgatgcagtttcagtgttgagtggataccaagaaggagcttatcagttggtaacaattaactatctactgggaaacttgggaaatcattattcagaaactgttgcagtagttgatcttggaggtggatctgttcaaatggcttatgcagtctcagagacagatgctgcgaaggctccacgagcaccggacggagtggaatcgtacataacggagatgttcgttaggggatagacatat

SEQ ID NO: 176381 - DNA, 269 bp, Glycine max
caactgagcaacaaagtgctaagttggtgaaagccactgcagaaaatgttgatgaagctgtccgagaacttccagatgccaacttgacgacagaagatttgtgggcaattcattcccaacctgtctttccacgacctcacaaaaacgacaatccttcttggatagcaatacaaaaggtagctgcaagagatgaacaaactggcctgcaacattttgtgcccataaggccgttaggttgtggagacactggcagtgttcatttggtggag

SEQ ID NO: 176382 - DNA, 264 bp, Glycine max
cccccttcttgaaggggttgcttggaaaacaagatagaatgccaaccatcatattggtttggtcaatccttctcgccaccatcttgactctcatgtgggtcagaattaacccgtttgtgtcaagagacggccccgtgttagaaatttgtggattgaattgtgacgagtcttgaataaagaaaagctgaagaagaaggttagttatttttcagctacactgcagtcatgttgaagcatgtagcacatcatgcttcacaaagttgc

SEQ ID NO: 176383 - DNA, 264 bp, Glycine max
ccaggcgacgagaaagatggaggggaaggagcaggatgtgtcgttgggagcgaacaagttccccgagagacagccgattgggacggcggcgcagagccaagacgacggcaaggactaccaggagccggcgccggcgccgctggttgacccgacggagtttacgtcatggtcgttttacagagcagggatagcagagtttgtggccacttttctgtttctctacatcaccgtcttaaccgttatgggcgtcgccggggctaagtc

SEQ ID NO: 176384 - DNA, 262 bp, Glycine max
ctgagctataagctagtttatcgtgaggagaatatgaagttgtttgtcttctctgttgctgcagtagttttggtagcatggccatgccatggcgcaggctaccaaaggttccctctccgaatgaaaactggctatggtgagcgttcttcggaggtaaaatgcgcaagtcttaggcttgctgtggaagcacacaacatccgagcctttaaaaccattcctgaagagtgcgtcgaaccaacaaaggactacattaatggcgaac

SEQ ID NO: 176385 - DNA, 266 bp, Glycine max
gtttgttgtgagctataagctagtttatcgtgaggagaatatgaagttgtttgtcttctttgttgctgcagtagtcttggtagcatggccatgccatggcgcaggctaccaaaggttccctctccgaatgaaaactggctatggtgagcgttcttcggaggtaaaatgcgcaagttttaggcttgctgtggaagcacacaacatccgagctcttaaaaccattcctgaagagtgcgttgaaccaacaaaggactacattaatggcg

SEQ ID NO: 176386 - DNA, 264 bp, Glycine max
gaaacttgtgatttcttacacaggataacacttttgatttaattttgagataaaagtgatacgtgtagatctaggaagaggcgttgcctatttaaagaagctaaccctccacaaggaattaaggtgcaagagtttgttgtgagctataagctagtttatcgtgaggagaatatgaagttgtttgtcttctttgttgctgcagtagttttggtagcatggccatgccatggcgcaggctaccaaaggttccctctccgaatgaaa

SEQ ID NO: 176387 - DNA, 269 bp, Glycine max
agaaatgtcgggatcggaggacgagggatgcgaagagtacctcttcaagatcgtcataatcggagactctgcggtgggcaaatccaaccttctctcccgctacgcccggaacgagttcaacatgcactccaaggccaccataggtgtcgagttccagactcagtgcttggagatcgactccaaggaagtcaaggctcagatttgggacaccgccggccaagagcgattccgcgccgtcacctccgcctactaccgcggcgctgtcggcg

SEQ ID NO: 176388 - DNA, 211 bp, Glycine max
caagactggcattcgttgcatggtgatgtccctttctgttctctacactcttggtcttgcgagacaaagccatgccagacacgaagatttttggcatgctgtttggccaaacactcctattccaagttcattgcgagatcttctaaagcctggccctgcaagtgccgaaatcgatgatcaccctatgcaatttgaggaaccacgttaccgg

SEQ ID NO: 176389 - DNA, 250 bp, Glycine max
cattcatggcgtacaatgtgaattataatctagtttatcgtgaggagaatatgacgttgtttgtcttctatgttgctgcagtagtcttggtagcatggccatgccatggcgcaggctacgaaaggttccctctccgaatgaaaactggctatggtgagcgttcttcggaggtaaaatgcgcaagttttaggcttgctgtggacgcacacaacatccgagcacttaaaaccattcctgaagagtgcgttga

SEQ ID NO: 176390 - DNA, 259 bp, Glycine max
atcaacacttccaattacaatatacacatcttcaattaagccatgactctctctaagcttatagttgcttcccttcttgcctcgcttctccttcttcatcttgttgatgctgatcaatcggcacatgtacaaacgcaggggtctcttctgcagaagatagattgtaatggagcatgtgctgcgaggtgtcgtttatcatctcggccacgtctctgcaaaagagcctgtggaacttgttgtagacgctgcaactgcgtgc

SEQ ID NO: 176391 - DNA, 260 bp, Glycine max
cttgatcgagataactagaaacagtgtgatgaaaatgaaggtccttgttttcttcgttgctacaatcttcgcagcatggcaatgccatgcgtacgatatgttccctctccgaatgaacactggctatggtgcccgtactccggaggtgaaatgcgcaagttggaggcttgctgtggaagcacacaacatcttccgctttgagaccattcctgaagagtgcgttgaagcaacaaaggaatacatccatggcgaacaatata

SEQ ID NO: 176392 - DNA, 259 bp, Glycine max
ctccaacacatgagatgttgaaatcatcgtgtatcgtggtctgtactttggattgtatgattctgttaaaccagctctcgtgcactgaccctgtgaggacaactggtttaacagggtcattgcaggatagcttttttgccagctttgcccttggatggctcatcaccaatggtgcaggtcttgcatcatacccactagacactgttagaagaagaatgatgatgacctctggtgaagctgtccagtacaagagctcctt

SEQ ID NO: 176393 - DNA, 261 bp, Glycine max
acactttgtcccttaccgaggccttgtgtggcttccaatttgtgctgactcacttggatagccgtcagcttcttattaaatcaaatcccggggaagttgtgaagcctgattcatacaaggctataaatgatgagggaatgcccatgtatcagaggccattcatgaaggggaaactttacattcacttcactgtggagtttccagatcctctaaaccctgatcaagttaaggccttggaggctgttctgccaccaaagcctt

SEQ ID NO: 176394 - DNA, 261 bp, Glycine max
cgaacccgttcaacgaggggttctatcagggtcctcccacggcgccgttggaggccgtttcggcctgcacggggattttcgggagcggggcgtatccgggttatccgggtcgggttctgctggacaagacgacgggggccagctaccatgcgtacggcggcaacgggaggaagtacctcttgccggccatgtgggacccgcagacctccgcatgcaagacgcaggtgtaaacgacttggctcaatgaatcaaagctcttgt

SEQ ID NO: 176395 - DNA, 261 bp, Glycine max
tagcaagctagctaggttgaaaatagtttagttttgtagtaagtgaggtgaggtgccaaaatggtgaagataactcttggtactttcgatgactcttttggtgttgcttctcttaaggcttatttggcagagttccatgcaactctgattttcgtgttcgctggtgttggttcagccatcgcttacaacgagcttacaaaagatgcagccttggatccaacggggctggtggcagtagctgtggcccatgcatttgcactg

SEQ ID NO: 176396 - DNA, 264 bp, Glycine max
tgtttgttgtgagctataagctagtttatcgtgaggagaatatgaagttgtttgttctctttgttgctgcagtagttttggtagcatggccatgccatggcgcaggctaccaaaggttccctctccgaatgaaaactggctatggtgagcgttcttcggaggtaaaatgcgcaagttttaggcttgctgtggaagcacacaacatccgagccgttaaaaccattcctgaagagtgcgttgaaccaacaaaggactacattaatg

SEQ ID NO: 176397 - DNA, 263 bp, Glycine max
gcttgctactgagtttccacactgcataccttacgtcttccgaattcgaagttaatttgcaagatggctaaggaaaaggctcagatcaacattgtggtggttggtcatgtggaccctgaggaggcaaccaccattaacgagctgaagaagcctgttgtggagacagaagctccagggcatgccatatgagggcatgcacgtacggcctcggaggggaaccagaaaattatgttaacaaaataatctggaaccctaatgtatca

SEQ ID NO: 176398 - DNA, 188 bp, Glycine max
gtcaagatcggaatcaacggatttggaagaattggccgtttggtggccagggtggctctgcagagagacgatgttgaactcgttgccgttaacgatcctttcattaccaccgattacatgacatacatgtttaaatacgacagtgttcacgggcactggaagcatcacgatgtcaccgttaaggatga

SEQ ID NO: 176399 - DNA, 261 bp, Glycine max
ccgttttccgcctctttggaagggagaagccagttcactccgtcctcggcggcggaaaacctgctgatgttctcttgtggaggaacaagaagatatctgctggtgtacttggtgtagccacggctctttggatcttttttgagttgcttgaatatcacctgcttactctagtctgtcacatttccattctgttgcttgcggttttatttttgtggtccaatgcccatacctttattcacaaggcaccacctcgcatcccgg

SEQ ID NO: 176400 - DNA, 263 bp, Glycine max
ctcacacacactttctctctctctctctctcacccagatcttgtagcaatggcgagcgctcccactccacgcgaagagttcgtgtacatggcgaactaggcggagcaggccgagcgctacgaggagatggtggagttcatggagaaggtctccgcctccgccgagagcgaggagctgaccgtggaggagcgtaacctcctctccgtcgcctacaagaacgtgatcggcgctcgccgcgcctcctggcgcatcatctcctcaat

SEQ ID NO: 176401 - DNA, 259 bp, Glycine max
attaataacaagctagctattagttcgattttgtagtaagtgaggtgccaatatggtgaagatagctcttggtactttggatgactcttttagcgctgcctctcttaaggcttatttcgcagagttccacgcaactctgatttccgtgttcgctggtgttggatcagccatcgcttacaacgagcttacaaaagatgcagccttggatccaacggggctggtggcagtagctgtggcacatgcatttgcactgtttgta

SEQ ID NO: 176402 - DNA, 261 bp, Glycine max
cagctataagctagtttatcgtgaggagaatatgaagttgtttgtcttctttgttgctgcagtagttctcgtagcatggccatgccatggcgcaggctaccaaaggttccctctccgaatgaaaactggctatggtgagcgttcttcggaggtaaaatgcgcaagtcttaggcttgctgtggaagcacacaacatccgagctcttaaaaccattcctgaagagtgcgttgacccaacaaaggactacattaatggcgaaca

SEQ ID NO: 176403 - DNA, 264 bp, Glycine max
cactcaccctcattaccaacacgaaagcatagccaaaaccttttttcgaagtctctgattttcctaatggctccggcaaaggcagagaagaagccggcggagaagaagccagcggcggagaaggcaccggcggagaagaagccgaagggtcagaagaagatctcgaaggaaggagggagcgagaagaagaagaagcgcacgaagaagagcgtggagacctacaagatctacatcttcaaggtcctcaagcaggttcaccccgac

SEQ ID NO: 176404 - DNA, 263 bp, Glycine max
gtttccacactgcataccttaggtcttccgaattcgaagttaatttgcaagatggctaaggaaaaggctcagatcaacattgtggtggttggtcatgtggaccctgaggaggcaaccaccattaacgagctgaagaagcctgttgtggagaaagaagctccagggcatgccatatgagggcatgcacgtacggcctcggaggggaaccagaaaattatgttaacaaaataatctggaaccctaatgtatcagtgtcatcatca

SEQ ID NO: 176405 - DNA, 260 bp, Glycine max
cagaacgggcacttaaaagagtttgaaggagcttcccagagactaactctgcataaggttgacctccttcatcttgactccgttagatctgttattaacggctgtcatggtgtctttcacactgcttctcccgtcaccgataaccccgaagaaatggtgcagcctgcggtgaatggagctaagaatgtgatcatagcagctgcagaggctaaagttagacgcgtggtgttcacctcatccattggtgccgtttacatgga

SEQ ID NO: 176406 - DNA, 266 bp, Glycine max
attcccagtgtttctttatggaagacgttcccgacacggcggcgaaccggtccgagccggggctcagggcggagatcgacacatcggcgccgttcgaatcggtgagggaagccgtcacgcgattcggtggagttgggtattggaaacccattctcaacggtcttagtaacaagcattttgcggccactgagccgcatcacacagaagagcttgaccctgaaaaactggaggagcaagctactgtattggagaaagagctgatcctg

SEQ ID NO: 176407 - DNA, 263 bp, Glycine max
tcgaatttcattgcagagtgttattttgagtatcagcatcaatggctccaattgcactgggaaacgtgattccagacggcattttggcctacttggatgaagagaacgaaccccaaactgtctccattcagtctctcgccaccggcaagaaagtcatcatctttggggttcccggtgccttcactcctacttgcaggtctttactttcccttttcaccataaactagactgaaacagattcatgggtacttgagattcagcat

SEQ ID NO: 176408 - DNA, 269 bp, Glycine max
actcactctgcactcaccactgccatacttcaatcgcactaatggctgtcaccttctcagatctacacaccgaagagggcatcaaatccctcgatcaattcctttctgggaaaacctatatttctggggatcagttgacaaaggatgatattaaagtgtatgcacctgttgttgaaaagccaggggacacttttcctaatgctgccacgtggtacgatgctgtctcttctcaacttgctctttgatttcctggccacgctcaaggggta

SEQ ID NO: 176409 - DNA, 271 bp, Glycine max
cgcgaaccgcactcctcttcctcttcgatcatcagctctcgacaacggcgccgaagttcgacacctcccagatagtcggcgtcttcgtccgcgttaccggcggcgaagtcggcgcggcgagttccatggcccggaagatcgggccctcgggctctcccgcaagaagatcggagaagacatcgccaaagaaatcgtcaaggactggcagggcctccgcgtcaccgtcaagctcaccgtacagaatggtcaggcgacggtcacggtggtcccc

SEQ ID NO: 176410 - DNA, 270 bp, Glycine max
  unsure (1)..(270): unsure at all n locations
ctgaagcgatataagcctaatcatgaaatggatagatgtacatgggactttaatagaagtgactgaagcacaaaatcgtcttcttggagaaaagacatgtgggtcgttattaaaaaacgttcaggaaatatgggatgaggttagggcgagngacgagcaacgagacaagatgcttcttcagttagagcaggagctgttggatgtgtacaagagaaaggttgagcaggctgccaagtcaaggtgcgcaggtacttcaagctctgtctgatg

SEQ ID NO: 176411 - DNA, 267 bp, Glycine max
gatcgagataactagaaacagtgtgatgaaaatgaaggtccttgttttcttcgttgctacacttttggtagcatggcaatgccatgcgtacgatatgttccctctccgaatgaacactggctatggtgcccgtactccggaggtgaaatgcgcaagttggaggcttgctgtggaagcacacacacatctttggctttgagaccattcctgaagagtgcgttgaagcaacaaaggaatacatccatggcgaacaatatagatcagact

SEQ ID NO: 176412 - DNA, 267 bp, Glycine max
ctaaaccctagcacacttttatcgcttagtggcagcagcagtggcggcaagcaactccatccgcaatgggaatcgatttgaaggcaggaggtaagtgcaagacgaccaagcgaaccgcccccaaatccgatgatatctacctcatgcttctcgtcaagctgtaccgttttcttgttcggaggactgggagtaacttcaatgctgttgtcctcaagcgccttttcatgagcaaggtcaacaagcccccgctatccctctctagattga

SEQ ID NO: 176413 - DNA, 272 bp, Glycine max
tggcaagaatggcacttcgttgcttggtgatgtccctttctgttctcttcactcttggtcttgcgagagaaagccatgccagagacgaagatttttggcatgctgtttggccaaacactcccattccaagttcattgcgagatcttctaaagcctggccctgcaagtgttgaaatcgatgatcaccctatgcaaattgaagaaacacagtacccgaaaaccttcttctataaagaagaccttcatccaggcaaaacaatgaaagtacaattc

SEQ ID NO: 176414 - DNA, 262 bp, Glycine max
ctcgcaagcaaatcagaacaagagaagagaatggcaggagcagaggggctaaacagagaacagtacgtgtaccttgcgaacctgtcggagcaggcggacggtacgaagagatggtggagttcatgcagaaggtggtggtggggtggacgccggcgtcggagctcacggtggaggagcgcaacctcctctcggtggcctacaagaacgtgatcgggtctctgcgtgccgcgtggcgcatcgtgtcctccatcgaacagaagga

SEQ ID NO: 176415 - DNA, 260 bp, Glycine max
cttgcttcttttcttgatcatgtcccttgctggtaaaatcagctctgaaattggtgttcaggcaaccgctgcaaagtggttcaacctcttcacaacacaacttcatcacgttcaaaatcttactgatagaattcatggaaccgagctgcatcatggtgaagactggcatcacaatgagtcggtcaagcactggacttataccatagatggcaaggttacaacttgcaaggagagtattgactccgttgatgaagagaaca

SEQ ID NO: 176416 - DNA, 266 bp, Glycine max
cagcaactgcgattttggatcggaacctcttctgcggcgtagaactgggacactccaacgtttggaattctcacccaaaaaactacggtcctggttctcgcacttgtttcttgcagccgagtgtgtgggaatccacatggattgatcaggaagtatggccttatgtgctgcaggcagtgcttccgtagcaatgccaaggaaattggcttcatcaagtatcgctaaaagagctgttgtcacctacggaccaatattatgttctggca

SEQ ID NO: 176417 - DNA, 266 bp, Glycine max
agaagagtcgtggcctttaggtggtgaagaacaagagctcaaatcaaatcgaatcgaaaaaagaaagaaagctgctattcatggcgatggcaagcctggctcgacggaagggttacgccgtcgttttgtcgtcgaggtcgtcgttttgtctgacaagctggaggggattcgcgtccggatctgacgaaaacgacgtcgtcgtcatcggcggcggtcccggcggctacgtggccgccatcaaagccgcgcagttcggtctgaaaacc

SEQ ID NO: 176418 - DNA, 261 bp, Glycine max
  unsure (1)..(261): unsure at all n locations
cgaanccgttcaacgaggggttctatcagggtcctcccacggcgccgttggaggccgtttcggcttgcacggggattttcggacgcggggcgtatccgggttatccgggtcgggttctgctggacaagacgacgggggccgcctaaatgcgtacggcggcaacgggagcaagtacctcttgccggccatgtgggacccgcagacctccgcatgcaagacgcatgtgtaaacgacttggctcaatgaatcaaagctcttgtt

SEQ ID NO: 176419 - DNA, 265 bp, Glycine max
caaagagcaagcctcacccacttgtacatttccggcagtgcctgacgagttctctaaggctctctacacatttgacattggtcaaaatgatctctctgttgggtttagaaagatgaattttgaccaaatacgtgaatccatgccagatcttctcaaccagttagccaatgcagtcaaaaatatataccaacaaggagggagatacttctggatacacaacactagcccctttggctgcatgccagtgcaattattttacaagcac

SEQ ID NO: 176420 - DNA, 264 bp, Glycine max
aaacactgttgttctacacgcagatcagactgaaataatatctggtgaccaaaatggcaacattcgtgtgtgggatttgacagcaaattcatgcagttgcgaattgacatgtaggttccagaggtggatacagctgtacgctctttaacagtaatgtgggatgggagcttggtagttgcagcaaagaatcacgggacatgttatgtgtggcgcttgttgcgagggactcagacaatgacaaactttgagcctcttcacaagctg

SEQ ID NO: 176421 - DNA, 261 bp, Glycine max
ggctatccaaaacaagaagttgttcatcttagatcaccatgactatctcattcctcatatgaggaaaataaatgcaaataccacaaagacttatgctacaagaaccatatttctcttgaaagatgatggaactttgacaccattggccattgagttaagtaagccacatcctcagggtgaagaatatggtcctgttagcgaagtctacgtgcctgccagcgaaggagtggaagcttatatttggttactggcaaaggctta

SEQ ID NO: 176422 - DNA, 267 bp, Glycine max
cttccattctctctgtgtatctccctacctctcccttcaagatgcagatcttcgtcaagaccctcaccggcaagaccatcacccttgaggtggaaagctctgacaccatcgacaacgtcaaggccaagatccaggacaaggaaggaatccccccggaccagcaacgtctcattttcgccggaaagcaacttgaggacggccgtacccttgctgactacaacattcagaaggagagtactcttcacctcgtcctccgtctccgtggtg

SEQ ID NO: 176423 - DNA, 261 bp, Glycine max
cccagattcttctgttcttactcgagaagcatcatctaaagtgagcatcgacccttcaccggcaaatggctttccaagggtcttgcaaggtcaagaattctcgaccttgagaggcaattttgctgaaagtaatgagtctgatactgctgagaagtctgttgtttggccacctgctgcagtagacgatgaaaagatggatgtttctacttcaaggaggtatggttcagagagctggatgtcaatggggaggaatgagcctac

SEQ ID NO: 176424 - DNA, 252 bp, Glycine max
cttgatttctccagagagaagaagaaacttaatcgatcatcacttcacttcactaatacatcatggcagacgagatccagaacaagtatgagagctctgaggtttaggtccaggatcgttctacttatgactttctcggtaagaattaggatgaagaagataagcctcatccttaggaggaggtcatcgacaccgagtttcaaaaagtcactgtttcagaccatggagagaacaagcatagcctcttagaaa

SEQ ID NO: 176425 - DNA, 251 bp, Glycine max
ccaagaatggcacttcgttgcttggtgatgtccctttctggtctcttcaatcttggtcttgggagaggatagccatgccgagacgaagatttgttgcatgctgtttggccaaacactcccattccaagttcagtgggagatcttctaaagcctggccctggaagtactgaaatcgatgatcaccctatgcaaattgccgacacacagtacccggtaaccttctgctctatagaagaccttcatccaggcaa

SEQ ID NO: 176426 - DNA, 234 bp, Glycine max
aacaagaggagaggatcgcaggagcagaggggctaaaccgattacagtacgtgtaccttgcgacctttacagagcacgcggacggtacgaagagattgttgagttcatgcagaatgtggttggtgggtggactccgacgtcggagctcacggtggaggagcgcaaactcctctcggtggcctacaggaacgtgatcaggtctctgcgtgccgcgtggcgcatcgtgtcctccat

SEQ ID NO: 176427 - DNA, 264 bp, Glycine max
caacattcaacctcaatttgcagagttctaatattacattgcagagaaaatgtctttgattccaagtttctttggtggcagaaggagcaatgttttggatcctttctccctcgatgtgtgggacccttttaaggattttccttttcccacttctctttctgctgaaaattcagcgtttgtgagcacacgagtggattggaaggagacaccagaagcacacgtgttcaaggctgatattccagggctgaagaaggaggaagtgaa

SEQ ID NO: 176428 - DNA, 204 bp, Glycine max
gcttgcttgagttgagttaacagcatggagagggaggaagatgttaaggtaggagcacagagattctcagagagccaagcattggggacaggagctcagggtgacaaggactacaaggaggcaccaccagcatccttgttcgagccaggggagttaaagtcatggtctttttacagagttgggattgcagagtttgtggccaca

SEQ ID NO: 176429 - DNA, 258 bp, Glycine max
tctccagcttcgttcgccaactcaacacctatggtttcagaaaggtggatccggatcggtgggagttcgcgaacgagtggttcctgcgaggacaaaagcacttattgaggaacatcgtgcggaagaagcacggtggagctgggacgaccaattccaattcgcattattcgcatcccttgaagctggaggagttggacgacgaggctatggtgatggagatagcgaggttgaaggaggagcaaaaagcgttggaggagg

SEQ ID NO: 176430 - DNA, 264 bp, Glycine max
cgagataactagaaacagtgtgatgaaaatgaaggtccttgttttcttcgttgctacaattttggtagcatggcaatgccatgcgtacgatatgttccctctccgaatgaacactggctatggtgcccgtactccggaggtgaaatgcgcaagttggaggcttgctgtggaagcacaccacatctttggctttgagaccattcctgcagagtgcgttgaagcaacaaaggaatacatccatggcgaacaatatagatcagactc

SEQ ID NO: 176431 - DNA, 250 bp, Glycine max
ggcacttcgttgcttggtgatgtccctttctgttctcttcactcttggtcttgcgagagaaagccatgccagacacgaagatttttggcatgctgtttggccaaacactcccattccaagttcattgcgagaccttctaaagcctggccctgcaagtgttcacatcgatgatcaccctatgcaaattgaagacacacagtacccgaaaaccttcttctataaacaagaccttcatccaggcaaaacaatg

SEQ ID NO: 176432 - DNA, 256 bp, Glycine max
cgagagagaaagtagcagatcctccatggcctccaccaaggaacgtgaaaacttcgtctacctcgccaagctcgccgaacaagccgaacgctatgaagaaatggtggaagcaatgaagaatgtggcgaactaaacgtggaattgacggtagaggagcggaaccttctgtcggttgggtacaagaacgtggtgggtgctcgtagggcttcgtggaggattctttcctcgattgaacagaaagaagaagctaaaggga

SEQ ID NO: 176433 - DNA, 255 bp, Glycine max
ctacagatccagggagacaagacagagcagtacaggttagtaccaatggctaccaaggtttatattgtttattattctacatatggacatgttcagaagctagctagagagatagaaaaaggggctgcttcggtggatggagtagaagcaaaactgtggcaggtacctgaaaccttgcctgaagaggtccttgcaaagttgggagcacctccaaagagtgatgctccaattattactcccaatgagcttcctgag

SEQ ID NO: 176434 - DNA, 258 bp, Glycine max
ccagatgttggtggtgttgccagagcacgtgcttttgccaaaaaattatctgatgctcctttagctattgttgataaaaggcgccatgggcataatgttgctgaggtgatgaatttgattggtgatgtaaggggaaaggtagcagttatggttgatgacatgattgatactgctgggactattgccaaaggtgcacctctgtctgcatcaagaaggggcaagagaagtctatgcatgcactacacatgctgttttcag

SEQ ID NO: 176435 - DNA, 213 bp, Glycine max
ctggtggccatgtcaaccctgctgtggacttttggacttggctccttggtgggcaacatcaccatcctcactggcttccttctactggattgcacagtttcttggctccatcgtggcatgttttcttctcaactatgtcacaggaggcttgccaactccaatccacagtgtggcttcaggggttggagcagttgaaggagttgtgaccgagat

SEQ ID NO: 176436 - DNA, 255 bp, Glycine max
  unsure (1)..(255): unsure at all n locations
cttgnatgctatgtcactgtcagaggtgacaaggcaatcgaacttttggagagtggtttgaaggttaaggcatatgaacttctcagaaggcatttcagtgatactggttgcttcggctttggtattcaggagcatatcgatttgggaatcaagtatgatccttcaactggtatttatggactggatttctttgttgttctggagcgtcctggcccccgtgttggacgtcgccgcagtgcaagtcccgggttggaa

SEQ ID NO: 176437 - DNA, 190 bp, Glycine max
gaattctgatggctcacaggaagttcgagtaatcaaggcatgggtcattgggatttctcgctaggaagtgtgctgctcgtcacaggggtaaagtgatggcatccccaaggatgacccatccaaggcatccaagctcactgcattcttgtgttacaaggctggtatgactcacattgttagagaggtcgag

SEQ ID NO: 176438 - DNA, 251 bp, Glycine max
cggggagaagatgtggttcatcccctgaaggtctctctggaggatctttacctcggaacatctaagaaactctctctttcacgaaacgtgctgtgttcaacatgcaatgggaagggctcaaagtctggggcttcaatgacctgtgctggttgccagggtactggcatgaaggtgtctattaggcaccttggtccttctatgattcagcagatgcagcatccttgcaatgagtgtaaggggactggagagag

SEQ ID NO: 176439 - DNA, 279 bp, Glycine max
tatctcgatattcggctcgagcttctcgagtatgttcctgaaacagttaatcgggtgataaaacattacaataagttgaaccatagacatgccactgatatatgtgaaactctatacataccagatctttagtgcattatcttatattcatcgttctattggagtctgccatcgggatatcaagcctcaaaatctattggtcaatccacacactcaccaggtcaaattatgtgactttggaagtgcaaaggttttggtaaaaggtgaaccagatatatc

SEQ ID NO: 176440 - DNA, 254 bp, Glycine max
cacacacacacaaattctcaaacccaaatcccaagtctcctaaaaccctaattcgcagtgaaaatgagagacatcttgcacatccagggagggcaatgcggtaaccagatcggagcgaagttctgggaggtgatatgcgacgagcacggcatcgaccacaccggaacgtacagcggcgactccgagctccaattggagcgcatcaatgtttattacaatgaagccagcggcggaaggtacgttccacgcgccgt

SEQ ID NO: 176441 - DNA, 254 bp, Glycine max
ccgaacccttaccagcggatcgtcgtgctgagtgcgaaggaaggcattatggggttgacgaatttcgtgctgacagtggcgggtgtaagcgccgtcgttcttctccttaggagtgacgcgaagcaatctgcctccatcttccggcgcaacgtcaagcacattcgcaactggctcgaagaagaaagcgccgcttcatccaagacaatggagaagtccactcccaaagaacttgaatcaaaggttcctccgaaaga

SEQ ID NO: 176442 - DNA, 254 bp, Glycine max
cggtgctgctgacagggttttgaatcaattgcttacagagatggatgggatgtcagcaaagaaaactgtgttcatcattggggccactaatcgaccagacattatagatcccgcacttctgcgaccaggccgtctggaccaattgatttatatcccactcccagatgaggattcccgtcatcagatatttaaagcttgcttgagaaaatctcctgtctcaaaagatgttgaccttagagctcttgccaagtata

SEQ ID NO: 176443 - DNA, 245 bp, Glycine max
gtagtaccttcacctctctcaacaatctagctagagtttgctcctatctatatgtaataaggtatgctgatatgcactattcaaataggagcattagctatgtttgttaatgtcactttatgttacgtggagtgcttacgtgacttacccacataacataaagtgacattaacaaacatagctaatgtcactctatgttatgtgggtaagtcacctaagacactccacgtacctacttgttgtct

SEQ ID NO: 176444 - DNA, 238 bp, Glycine max
ccaatttaaccagtttaaagcacgcaccaaacaactctatgaagaagccaaggccccacatgacaagagcaagcttccagtgcctgaggagttctctaaggctctctacacatttgacattggtcaaaatgatctctctgttgggtttagaaagatgaattttgaccaaatacgtgaatccatgccagatcttctcaaccagttagccaatgcagtcaaaaatatatacccacaagga

SEQ ID NO: 176445 - DNA, 207 bp, Glycine max
cgaatttcctgtttacgatcttattgcaattttgcaactttcaaagcttattagctaaagtaacatcaaaacatgtcattgattccaagtattttcggtggcccaaggagcaacgtgttcgatccattctcactcgatatgtgggatcccttcaaggattttcatgttcccacttcttctgtttctgctgaaaattctgcatttgtg

SEQ ID NO: 176446 - DNA, 254 bp, Glycine max
  unsure (1)..(254): unsure at all n locations
gtttccacactgcataccttaggtcttccgaattcgaagttaatttgcaagatggctaaggaaaaggctcagatcaacattgtggtggttggtcatgtggaccctgaggaggcaaccaccattaacgagctgaagaagcctgttgtggagaaagaagctccagggcatgccatatgagggcatgcacgtacggcctcggaggggnaacagaaaattatgttaacaaaataatctggaaccctaatgtatcagtg

SEQ ID NO: 176447 - DNA, 256 bp, Glycine max
cccagcatgccgtgggataaaacagaactttgggttggctatatttctgaaaatggtgagatctacaagcgcggttgtattgctgggaatgatcctctcgtgtggagtctcaactgagcccaagtggtccctgatggggagctgtttttcgtgacagacaaggaaaatggtttttggaatatccataaatggattgagtttgagaataaggttgtgtctgtctatcctttggaagctgagtttacaaggcctctgt

SEQ ID NO: 176448 - DNA, 136 bp, Glycine max
aagagaaagtttgtggcggatggagtgttcttcgcggaattgaaggagtttctgacacttaatttggcgtatcacggttactcgggcgtggaggttagggttaggccgatgggcaccgagattatcatcagagcca

SEQ ID NO: 176449 - DNA, 185 bp, Glycine max
ggtaaataattgagcctcactctatcagtgcagggttggactaccccggggttggactagagcatagtttctcgaaagatgtagggcgtgctgactactaaagtattactgatgaagaagcattggaagcctttagagatatctcagctggaaggtattactgcagctctgggagacatctcatg

SEQ ID NO: 176450 - DNA, 264 bp, Glycine max
gggtgttcaccacagtttacactcacgagagtacccattttctcttctcaatttctcaagtgtgccgagaaaatcatggtggacgcagcagaacgtagatacttggaggatgatgattcatctctcatgaaaactataagggcgcaacaactggtttagtggctggaactatctggggtactgtagttgccacctggtatgatgtcccccgtgtcgagagaaatgttgctcttccagggctgattaggactatcaggatgatgg

SEQ ID NO: 176451 - DNA, 265 bp, Glycine max
gttacagcataacttctattctatatttctttctactcgcaagcaaatcagaagaagagaatggcagcagcagaggggctaaacagagagcagtacgtgtacttggcgaactgtcggagcaggcggacggtacgaggaatggtggagttcatgcagaaggtggtggtggggtcgacgccggcgtcggagctcacggtggaggagcgcaacctcctctcggtggcctacaagaacgtcatcggctcgctgcgtgccgcgtggcgca

SEQ ID NO: 176452 - DNA, 213 bp, Glycine max
ccaagccctatacaaccaaaccctaacacacacccatttgattcagtttccatggctagcctcaaggttgcatttttcgctgcagtgctctgcatggttgtggtgagtgcacccatggcacatgcagctatcacgtgcgggaggtgacgaataccctgtccaatgccatcggttacctccagaacggaggaccgccgccgtcgggatgctgca

SEQ ID NO: 176453 - DNA, 250 bp, Glycine max
caggcgcagacgcaaacgcaaacgcaaacgcaaacgcaaacgcagagcgtgatccattgacgaagatggtgcagcgtctcacctaccgcaagcggcacagctatgccaccaagtccaaccaacacagggtcgtcaaaacccctggtgggaagctcgtttatcagactaccaagaagagggccagcggacccaagtgccccgtcactggcaagaggattcaggggattcacacttgagggctgcagagtac

SEQ ID NO: 176454 - DNA, 227 bp, Glycine max
cgttgaagcaacaaaggaatacatccatggcgaacaatatagatcagactccaaaacagttaaccaacaagcttacttttatgccagagacctcgaagtccatcccaaggacacatttgtgttcagtatagatggcaccgtactcctaatattccatactacaaaaaacatggatatggggtggagaaatttaactcgaccttgtatggatgaatgggttaacaggg

SEQ ID NO: 176455 - DNA, 259 bp, Glycine max
ataactagaaacagtgtgatgaaaatgaaggtccttgttttcttcgttgctacaattttggtagcatggcaatgccatgcgtacgatatgttccctctccgaatgaacactggctatggtgcccgtactccggaggtgaaatgcgcaagttggaggcttgctgtggaagcacacaacatctttggctttgagaccattcctgaagagtgcgttgaagcaacaaaggattacttccatggcgaacagtatagatcagact

SEQ ID NO: 176456 - DNA, 227 bp, Glycine max
ctctatttctcagtctctgtgtttgcggctgaggattccgaacgactgaccttcttcgtttctcgcaaagtttaagtaatcatgggtaaggaaaaggttcacatcaacattgtcgtcattggacatgtcgactctgggaagtcaataccactggtcacttgatctacaagcttggaggtattgacaagcgtgtgattgacaggttcgaaaaggaggttgccgatatg

SEQ ID NO: 176457 - DNA, 177 bp, Glycine max
ccgttttcctgaatcggtgtgaacaatggcgacgtacgctgcgatgaaacccaccaacccagggttggaggagtcccaggaacagatccataagataaggatcaccctttcttccaagcacgtcaaaaacctcgagaaggtttgtgcggacttggttcgtggtgcaaaggacaagcg

SEQ ID NO: 176458 - DNA, 262 bp, Glycine max
gttaaatagaaaagaggagtttgagaatggcaacgatcagcgcggttcaggtggagttcctggagtttccagcggtggttacttcaccagcctccggcaagacctatttcctcggcggcgcaggggagagaggattgacgattgaggggaagttcataaagttcacaggcataggagtatacttggaggacaaggcggtgccatcactcgccgctaagtggaagggtaaaacttcagaggagttagttcacaccctccactt

SEQ ID NO: 176459 - DNA, 266 bp, Glycine max
cctcttctccgccacttctcaatctattgaatcaacaatcatgtcggacgaagagcaccatttcgagtccaaggccgacgccggagcctccaaaacctaccctcagcaagccggtaccatccgcaagaacggctacatcgtcatcaaaggccgcccctgcaaggttgtggaagtttcgacttccaaaactggaaagcacggtcacgctaagtgtcactttgttggaattgatattttcactgccaagaaacttgaggatattgtgc

SEQ ID NO: 176460 - DNA, 261 bp, Glycine max
cgttgcagagctgcgcgttgatctagaaaaatggcgaggataaaggtgtacgagttgaggaataagacgaaggcggagctactgaaccagctcaaggatctcaaggcggagctagccctgctccgcgtcgccaaggttaccggcggcgccccaaacaagctctccaaaattaaggtggtgaggctatcgatagcgcaggttttgacggttatttcccagaagcagaaagcggcgctgagagaggcttacaagaagaagaag

SEQ ID NO: 176461 - DNA, 261 bp, Glycine max
gtttctttattaattctctctttcaaatatatggcagaagatgcttcaattactccaacacacacaaaagcctggtactactctgaacatggtagtccaggtgatgttctcaaattagatcctaattggcccttaccccaacaatcaaagatgaccaagtgctcatcaaggtcatcgctgcatccattaatcccgttgattacaagaggctgcacggcgagttcaaggacactgaccctcatctgcctattgtgccgggtt

SEQ ID NO: 176462 - DNA, 270 bp, Glycine max
ctataagctagtttatcgtgaggagaatatgaagttgtttgtcttctttgttgctgcagtagttttggtagcatggccatgccatggcgcaggctaccaaaggttccctctccgaatgaaaactggctatggtgagcgttcttcggaggtaaaatgcgcaagttttaggcttgctgtggaagcacacaacatccgagcccttaaaaccattcctgaagagcgcgttgaaccaacaaaggactacattaatggcgaacaatttagatcaga

SEQ ID NO: 176463 - DNA, 269 bp, Glycine max
gttggtgcaaagcatccttcgcttcaatctctctctctctctttgcgctttctgcaaaccgaacatttcatctccaaagggatcaacaggtcgaaggagaaatggggctgacattcacgaagcttttcagccggcttttcgcgagaaggaaatgcgaattctgatggttggtcttgatgctgctggtaagaccactatcctctacaagctcaagctcggagagatcgttactacaattcctaccattgggttcaatgttgagactgtgg

SEQ ID NO: 176464 - DNA, 232 bp, Glycine max
acatatggcaacatgcgaagaagtggttgccgctggcggaggagccggctggaggcagggctgaagcacaaactggagagaaaatggacgttttcgtgcgacaaccaatccaaacccaaacagggcgctgcttgcgggtacctctcttcgcaaggtctacaccttcgacaccgttgaagagttctggtgtttgtatgatcaggtattcaagcccagcaagttgcaaatcaat

SEQ ID NO: 176465 - DNA, 244 bp, Glycine max
tgtgaatggaacaattcatgtggttgttggtggagggggaagtcacctgtcagacttcacaccatcaccccctatttggagtctttatagggacgttgactatgggtttggcaaattgactgctttcaatcattcatatctcttgtatgagtacaagaaaagtagtgatggagaggtctacgactcctttaccatttcaagagactacagagatgttttggctgtgtgcacgatggtgtgagaa

SEQ ID NO: 176466 - DNA, 269 bp, Glycine max
tccgtcgctccgcaccagtttcatcgcacgaatatcttgttgtgtggagcgatccgagaaaaactctgtaaacatgttggattaccaggacctccttacaagtgatgatcttctctcggactccttccgtgacaaggaaattcagaatggaatgctgtgggaagttgacgggaagtgggttgtcataggagcagtttatgtagacactggtgcaaacccttctgctgacggtcgaggcgaagatgatggagttgatgacgcagctgtta

SEQ ID NO: 176467 - DNA, 179 bp, Glycine max
atgagtgttacacccatggcagatgccgcaatcacgtgcaggcaggtcgccggcgaagtgtctccgtagctcagtgatcatcgatgcggctgaaaaccgtcggacgcctgctgcaacggagtaaagtcgctcagcggcgcggcgaagaccagcgcagaccgtcaagcagcctgcaattg

SEQ ID NO: 176468 - DNA, 199 bp, Glycine max
catggctacctccatggtgaagctgatgctgttctctgctctcatactcttgtccgtggcaagcagttgtgtctgtaacaccaccggattttcaacatccactagaccccttaaccaaacaagagataagtcttgtccaaaccatagtccaaaacaagtacccaagctcaagtaacaggttgagcttccactacattgg

SEQ ID NO: 176469 - DNA, 251 bp, Glycine max
tctgagatctcgaccaagactgacaggcgatctggtaaggagcttgagaaggagcccaaatttatgaagaatagtgatgctggtatggttaacatggttccaaccaagcccatggtggttggcactttctctgagtatcctccccttggacgttttactgtgagggacatgcgtcagaccgtaactgtcggagtcatcaagagtgttgataaggaatacgccaccggagccaaggtctcaaaggatggcgc

SEQ ID NO: 176470 - DNA, 175 bp, Glycine max
gcctgttgatcgagataactagaaacagtgtgatgaaaatgaaggtccttcgttttcttcgttggtaccactttagtagcatggcaatgccatgcgtacgatatgttccctctccgaatgaagactggctatggtgcccgtactcggaggtgaaatgcgcaagtcgggggcttcc

SEQ ID NO: 176471 - DNA, 269 bp, Glycine max
caaaaaaaaaatatcaacaaaaacaagaaaaaaggttacctctctcaattttatcccttgttctgagcttaattcaatttctgctcacacataatggcttgcacgctcgctgattcattactcctattcaagggttcttatcagaaaccagttctgaggagagacattgctgcccggtactccccgggtatatttatcctaaacagtaatgggcttatccagaaaaggtacaggcgtcaaaggaattttgttaccaggaataaggttac

SEQ ID NO: 176472 - DNA, 253 bp, Glycine max
ctgtgctcagaaaatctctggcttatggtggtcttgcacgaggctttcacgaaggggcaaaagtgattgacgagcatgctgcacaactctgtgttctagcagaagactgtgaccagcctgactatgttaaactggttaaggcctttgtgcagagcacaatgttagcctgctgacagttccgagtgcaaagaccctttgagaatgggctggtttgtgcaagattgattccgaaggagaagctagggagggtact

SEQ ID NO: 176473 - DNA, 263 bp, Glycine max
cggctcgagattcctctgtggttgagcacagccaaactcaaagaagaaagaagaaaatccagcgagactatgaccagcatccgaaaaagatgagcagcatcggaacaggttacgatctctccgtcaccactttctccccgatggccgtgttttccagatcgagtatgctgccaaagccgtcgataacagcgggactgttattgggatcagttcaaagatggggttgtgttgggcgtttaaaagcttatccgtcgaaaatgatg

SEQ ID NO: 176474 - DNA, 265 bp, Glycine max
gttgaagctaaatggaggcttgggcacaactatgggttgcactggtcctaaatctgtaattgaagttcgtgatgggttgacatttctagattgaatggtgatccagattgagaatctcaattccaaatatggaagcaagttcctttgcttttgatgaattcattcaacactcatgatgacactcaaaagattgttgaaaaataccaaaactccaatattgagattcatacttttaaccagagccagtatcctcgattggttgctg

SEQ ID NO: 176475 - DNA, 268 bp, Glycine max
atctacctaaaaattactacactggtgagcctcgcggctttggatttgtgaaatatcgatatggtgaagatgcagctgaggcaaagcaacatcttaatcatactatcattggtggacgtgaaataaggattgttttcgtgaggaaaacaggaaaactcctcaagaaatgcgtgttaacactcgaggaagtggtcgatatggaggtggtagaaggaggaatcatactagatccccacgacgccgatatcgttcatattctcggtctcca

SEQ ID NO: 176476 - DNA, 275 bp, Glycine max
tgctttctttgaaactcacagcttcaatcctcgaccacaccacccatcagcgacatgcttcctctttcccttctcaagactgcccaaggccaccctatgttggtggaactgaaaaatggggagacatataacgggcatttggttaattgcgatacatggatgaacatccatctccgagaagtcatttgtacatctaaagacggacatagattttggaggatgcctgaatgctatatacgaggcaatacaatcaagtaccttcgagttcctgatga

SEQ ID NO: 176477 - DNA, 239 bp, Glycine max
tgctctggacctttggcagcccttgttgggaatgtaatatgttgtcctcagtttagtagcttgatccacatcttccagggtttcttcagcatgaaatctgatcatttggttttgccaaatgcagttgctgatcattgtttttctgatatcattagtattctagccagtagaggggcaaatagtacaatccccacactttgttccataaaatcatctaattttacaggcgggtcatgtcc

SEQ ID NO: 176478 - DNA, 254 bp, Glycine max
cgagataactagaaacagtgtgatgcaaatgaaggtccttgttatcttcgttgctacaattttggtagcatggcaatgccatgcgtacgatatgttccctctccgaatgaacactggctatggtgcccgtaatccggacgtgaaatgcgcaagttggaggcttgctgtggaagcacacaacatctttggctttgagaccattcctgaagaatgcgttgaagcaacaaaggtctacatccatggcgaacaatata

SEQ ID NO: 176479 - DNA, 256 bp, Glycine max
  unsure (1)..(256): unsure at all n locations
tgacaagagaaaaatggcaatctccatacccactagacaacttttcatagatggagagtggaaagtccctcttctcaacaatcggtttccgatcatccaccccgctactgaagacatcatagggcatattccacccgctactcaggaagatgttgaccttgcggtggatgctgctaaaagagntcctactataacaaaggcaaagattggtcttcagctcctggctctgttcgtgctcgctatcttcgcgccatcg

SEQ ID NO: 176480 - DNA, 255 bp, Glycine max
tcttctcttcacagaagcgtaaaaacaaaaagcttgactagagaaagactgagtgatatgttcgaatcgaaactcagaagtagatataaactctaatcacaatcgctatggctaggtacgactgagtaatcaccgtgttctcccctgacggccatctcttccaggtcgagtacgtcctcgaatccgttcgcaagggcatcgccgacgtcggcgtccgcggcaccgacaatgttgtcctcggcgtcgagaagaaat

SEQ ID NO: 176481 - DNA, 218 bp, Glycine max
gcgaaaagagagtaatcagcagagaaattcatcgtcgtagttatgggtaaagttcacggatcacttgcacgtgccggtaaggttagaggccaaaccccaaaagtggccaagcaggataagaagaagaagccacgtggccgcgctcacaagaggatgcagtataatcgccgattcgtcaccgccgtggtgggattcggcaagaagaggggactaaactc

SEQ ID NO: 176482 - DNA, 208 bp, Glycine max
ctttgttgtgagctataagctaggttatcgtgaggagaatatgaagttgtttggttgctttgttgctgcagtagtcttagtagcatggccatgccatggcgcaggctaccagaggttccctctccgaatgaaaactggctatggtgagcgttcttcggaggtaacatgcgcaagttttatgctggctgatgaagcacacaacatccga

SEQ ID NO: 176483 - DNA, 287 bp, Glycine max
tgattcataggcccaagagcaaagaaactaagaagattttgagcacaatggcatccacacaatgcttcttgcaccaccatgccctcaccactccaaccagagcttcatcacagcgcttagttgtgagcaccaaaccaaaccacattgtttgcaaggcacaaaagcaggttgtccaagagggtgaggacactactaacattgtctctcgcaggttggccctcactgttctcattggtgctgctgctgttggctctaaggttgcacctgctgatgctgcctatggagaa

SEQ ID NO: 176484 - DNA, 282 bp, Glycine max
acaaaccctaacaccaaaaccagaagcgaaatcgcaatcgcaatccagcgaatatgaaggtcgtcgctgcatacttgctcgcagtgttgggagggaatccttccccttctgccgatgacatcaaacacatcctcggcgcagttggagctgaggctgagaatgagttgattgagttgctcttgactgaagtcaagggaaaagacttcaatgagctaattgctagtggaagtgaaaagatgtctgcagtgtctggtggcggtgcagcggttgccgttgctgctg

SEQ ID NO: 176485 - DNA, 281 bp, Glycine max
gtgtctctgacacttcagaagcggcttgccgctagcgttctcaagtgtggtagaggcaaagtttggcttgaccctaatgaggtcaatgaaatctccatggctaattctcgacaaaacataaggaaattggttaaggatggtttcattatcaggaagccaactaagattcattcccgttcccgtgctcgcagaatgaaggaggccaagaggaagggacgtcactctggttatggtaagcgtaagggtacaagagaggctaggctccccaccaaaatcctttg

SEQ ID NO: 176486 - DNA, 284 bp, Glycine max
tgagaaaacaaaagcacagaatcgaaagaagagttcttttttgagagagattgggatggcttcgacgaagaagatcacactgaagagttcggacggcgaggccttcgaggtggaggaggcggtggcggtggagtcccagacgatcaagcacatgatcgaggacaactgcgccgacagcggaattcctctccccaatgttaccagcaagattctggccaaggttatcgagtattgcaagaagcacgttgaggccaattgcgctgatgagaagcccagtgaggatg

SEQ ID NO: 176487 - DNA, 284 bp, Glycine max
gatgaaattaaaaatgctatcaaggaggaatcagagggcaagttgaagggaattcttggttacactgaagatgatgtggtctccactgactttatcggcgatagcagatcaagtatttttgatgcaaaggctggaattgcattgaataagaactttgtgaagcttgtttcttggtacgacaacgagtggggatacagctcacgtgtcattgatcttcttgtattcgttgccaagaagtctctttaaggtgttacttcaaagtagcttgtcttcacattattacc

SEQ ID NO: 176488 - DNA, 287 bp, Glycine max
cgtccatggccactttcttcgcccaaacctccttcccctcccactctctctccaaaaccttcgatacccatttcgcccctgccccgaaagtcaacgtctttgtgaacttcagggcgaggaggcacgttggggtgcgagtttcgaacgcgctgatcgaaccagatggagggaagctcgtggagcttgtggtgacggattttgagagggatttgaagaagggtgaggctctttcgttgccgaggatcaagctctcaaggattgaccttgagtgggtccatgtcctcagc

SEQ ID NO: 176489 - DNA, 296 bp, Glycine max
attccgctcgagtcctaattgtttaaacctaattctcatttcttcatcgttcgattcttctcctcctaaagatgcagatcttcgtgaaaactttgaccggtaagaccatcacccttgaggtggagtcctccgacaccatcgataacgtgaaagctaagattcaagacaaggaagggatcccacctgaccagcagagacttatctttgcgggtaaacagcttgaggatggtcgaacccttgccgactacaacatccaaaaggaatccactctccacctcgtgcttcgcctcaggggt

SEQ ID NO: 176490 - DNA, 281 bp, Glycine max
agaaaaatctaagtccctttggtcttcatcttctgttctgatccaggtatggcttctaaacgcatcttgaaggagctcaaggatttgcagaaggatcctcctacctcatgcagtgcaggccctgtggctgaggacatgtttcactggcaagccacaatcatgggacctgctgatagcccatatgcaggtggtgttttcctagtttcaattcattttcctcctgactatcccttcaagccaccaaaggttgcttttcggactaaggtgttccacccaaacat

SEQ ID NO: 176491 - DNA, 279 bp, Glycine max
catttatagtttactattgaaagatgggtttgaaaatggcaatactgatcctaggcctgctggccatgttccttttggtctcctcagaggtggcatccacgaattcaaaagaggtgacaaatggagttgaagatgccaaatatcctggtggaggctatggtgggggttacccaggcaatggcggtggtggctatcctggccgtggtggtggctaccctggtcgtggtggtggctatccaggtcgcggtggtggttaccctggtcgtggtggcggctatc

SEQ ID NO: 176492 - DNA, 279 bp, Glycine max
gtgttatttcctcacttccattagttaacaatttagctacttggaactcttgcagcaccaagtctgagggtaaattgacatctctggatcagtacatatctagaatgaaagctgggcagaaggatatcttctacataactggaaccagcaaagaacaactggtaaactctccattccttgagcggcttaagaagaaaaattttgaggtgcaatttaaattgtttgatttttattatttgctctattattttgttctctaaaaacattagcctttctatt

SEQ ID NO: 176493 - DNA, 280 bp, Glycine max
ctgcagtgtcgtgaagctgctgttaagtattatgatacctatctcccattcctgttggaggcttgtaatgatgagactcctgatgtcagacaggcagccgtgtatggtctcggtgtttgtgcagagtttggtggatctgtgttcaaacctctggttggagaggctctttcgaggttaaatgctgtgatccagcatcctaatgctcttcattcagataatgtaatggcatatgacaatgctgtttccgctttgggaaaaatttgccaatttcatcgtgaca

SEQ ID NO: 176494 - DNA, 280 bp, Glycine max
gtcaaatacatgagatcattcaatgtgcccctcttgctactaggtggtggtggctacaccattcggaatgttgctcgttgttggtgctatgagacaggagttgctcttggaatagaagttgatgacaaaatgccacaacacgagtattatgaatattttggtccagattatacccttcatgttgccccaagtaacatggaaaacaagaattcccgtcatttacttgaagaaattcgatctaaactacttgagagtgtttccaagctgcagcatgctccta

SEQ ID NO: 176495 - DNA, 291 bp, Glycine max
ctcgagcgacaccaaaccgtgtcgctcaggccacatgccagaaccgacattggccgcaaccgttacaaggtcgccgtcgacgccgacgcagggccgccggagaagcgaggacaacatggtcgagatccgcaagagcaagcgcgaagagagtttgctcaagaagcgtcgtgaagggctccaagcgcagcaacagtttcccgctcctcttcagaactccaccgtcgacaagacgctggagagtcttcctgccatggttgctggagtttggtcggatgataatcgtattcaact

SEQ ID NO: 176496 - DNA, 279 bp, Glycine max
ctgccaaacgacagcgttctgagtcttttcttcttcgttaccctcttcacatgccttctctctgctaattcccacgatgaccatattttcctaccgcgtcaactccatgacgatgactcagtgagttgcactgctaccgacccaaaccttaactacaagccggtgatcggaatcctgacccaccccggcgacggtgcctctggccggctcagcaacgccaccggggtttcttacatcgccgcctcctacgttaaattcgtggagtccggtggtgctaga

SEQ ID NO: 176497 - DNA, 278 bp, Glycine max
ggcataacctacacctatctttcttctctctctgtgtgtgcgcttgaacggcaaccagaagcagccatggccactgcaaggactgtgaaggatgtttcacctcatgagttcgttaaggcgtactcctctcacctcaagtgatcaggcaagatggagctgccagagtggactgatattgtgaacactgcaagatttaaggagttggctccttatgatcctgactggtactatgtcagagctgcttccatggcaagaaagatctacttgagaggcggact

SEQ ID NO: 176498 - DNA, 270 bp, Glycine max
cgttctttctctcgcaatcttcactacattcaccgctcatttgcattcacattgaatatggctgagactacacaatctaatgctgagttgttggagtggcctaagaaagataagcgccgcttcctgcatgttgtgtatcgtgttggtgatcttgatcgcaccattaagttttatactgaatgttttgggatgaagcttttgaggaaaagagatattccagaggagaaatatgccaatgcttttcttggatttggccctgaacaatcccat

SEQ ID NO: 176499 - DNA, 278 bp, Glycine max
ctcgagccgctctttctcttcttccttcgctcgttgttctccctcgcgtagatcgacaatggcggagacagagacgtttgctttccaggctgagatcaaccagctcctcagtctcatcatcaacaccttctactccaacaaggagattttccttcgtgaactcatcagcaacgcctccgatgctttggacaagattcgatttgagagtttgacagataagagcaagctcgatgctcagccagagttgttcattcatattattccagacaagactaaca

SEQ ID NO: 176500 - DNA, 277 bp, Glycine max
atttcagcgaagagcaactacaatttcgagaagcctttcctctatttggccaggaaacttgcaggtgatcctaacttgcactttgtggaatctcctgcattggctccaccagaagttcaaattgatttagctgcacagcaacaacacgaagctgagcttcttgcagctgctagtcagccccttcctgacgatgatgatgaatcttttgagtaaaattgtgctttttctgagtcgtgttactgcgtatgctatgatatgtattttgggggggtgtatt

SEQ ID NO: 176501 - DNA, 280 bp, Glycine max
aattcagctcgcgacttattgaaagttgaaagaaaacataaggcaatggattgggtatgagatggtgaaatccgggaataggagtatggcatcaaccgcaacagttcagccttccaatgatcctgaactccatcccgactcttacgccctcgagaagttcagactatacgaaaccagagcgaggttttacacgatcggtagtgatcggaacaagccgttactcagggtgttgaaaatcgatcggtccgaggcgtctgatctgaatatcagccaagacccc

SEQ ID NO: 176502 - DNA, 280 bp, Glycine max
cttctagtcacagacaccgacacagatctgtcttccgaagcaggaactaaatatggctgacttgttgcaatggtcaaagcaagataagaaacgaatgcttcatgtcgtctaccgtgttggtgaccttgatcgcaccatcaaattttacacagaatgtttaggaatgaagcttttgaggcaaagagatatcccagaggagacatatgctaatgcttttcttggatttggccctgaagaacccattttgttgttgaattaacatataattatcgggttacct

SEQ ID NO: 176503 - DNA, 284 bp, Glycine max
ctataagctagtttatcgtgaggagaatatgaagttgtttgtcttctttgttgctgcagtagtcttcgtagcatggccatgccatggcgcaggctaccaaaggttccctctccgaatgaaaactggctatggtgagcgttcttcggaggtaaaatgcgcaagttttaggcttgctgtggaagcacacaacatccgaactattaaaaccattcctgaagagtgcgttgaaccaacaaaggactacattaatggcgaacaatttagatcagactctaaaacagtta

SEQ ID NO: 176504 - DNA, 283 bp, Glycine max
atcaagaaagctgcaactcctagaccactttggaatgcagcctctcaaattctgatggcggtgggatacatactcctggcaatggctatgccaggttccctttacatagggtccgttgtggttggcatatgctacggggtgaggcttgccattactgtgccaactgcctcggagttattcggcctcaaatattatggtcttatatacaacattctcattcttaaggttccccttggctctttcctcttttctggtcttcttgctggcattctgtatgatatgg

SEQ ID NO: 176505 - DNA, 277 bp, Glycine max
tgccacaataaaccagcgaaaagtcatggaagatatcgcggcaatatttaagaaggctgacaaagacaattcaggaactcttactgtcaaagaatttcaggaggtattggctgatatctgtgagagataccctcaggtggagctatatctaaagagtcaacagatgcacaacattgctgatttgttgaaaggatccaaggaagatgttgaaaaagaatctattgaactgaatatcgaagaactcaaaaccatactctctaaagtggattcccagatg

SEQ ID NO: 176506 - DNA, 279 bp, Glycine max
taaacaaatgataagaatgattccgatcttggttgctacatttgtgcctagtacaatgatggctcagataaataccctttttgtgaagcaaggtactactcttgacagacacctcggaagcttcaaaattcccccagcaagtttggctgcatttgttactgtgtccttgcttgtttgcattgtgctctatgatcgcttctttgtgaagatcatgcaaaggtttaccaagaaccccagaggcattacccttcttcagaggatgggaattggccttgtaat

SEQ ID NO: 176507 - DNA, 280 bp, Glycine max
caagaatttccattgcatgcaaagcaaatacgcattatattactagttttaatttgttttgtcgtttgcttctttctttgattaatgatgactagctttaaggttgcatgtgtggttgcgatgatgtgcatggttgtcgccatgagtgttacacccatggcacaggccgcaatcacgtgcgggcaggtcgccggcgacgtgtctccgtgcctcagttatcttcgaagcggcggaaaaccgtcggacgcctgctgcaacggagtgaagtcgctcagcggcg

SEQ ID NO: 176508 - DNA, 303 bp, Glycine max
cgttagcgctgcattccgctcgagagagtttgttgtgagctataagctagtttatcgtgaggagaatatgaagttgtttgttcttctttgttgctgcagtagttctcgtagcatggccatgccatggcgcaggctaccaaaggttccctctccgaatgaaaactggctatggtgagcgttcttcggaggtaaaatgcgcaagttttaggcttgctgtggaagcacacaacatccgagcccttaaaaccattcctgaagagtgcgttgaaccaacaaaggactacattaatggcgaacaattta

SEQ ID NO: 176509 - DNA, 277 bp, Glycine max
tctgtcaacacctgtctgtggcgcgcgagagagaaatcggagatgtcatcaaaccctaacgatcctcgtcagccctcggcggcgagaccctacgtggcgccgcagatttcgccgcaggaccttccgatcgactacgccggcttcatcgccgtcatatttggcgtcgccggcgtcatgttcaggtacaaactgagctcttggctggcgctcatattctgcgcgcaatccgtcgcgaacatgcggaatgtcgagaacgatctcaaacaagttatgatgg

SEQ ID NO: 176510 - DNA, 272 bp, Glycine max
ggtcaaacatcatcatgtcggacgaagagcaccatttcgagtccaaggcagacgtcggtgcctccaaaacctaccctcagcaagccggtaccattcgcaagaacggctacatcgtcatcaaaggacgccctcgcaaggttgtggaagtttcgacttccaaaactggaaagcacggtcacgccaagtgccactttgttggaattgatattttcactgccaagaaacttgaggatattgtgccctcttctcacaactgtgatgttcctcatgtg

SEQ ID NO: 176511 - DNA, 278 bp, Glycine max
attaattgcaagaatggcacttcgttgcttggtgatgtccctttctgttctcttcactcttggtcttgcgagagaaagccatgccagagacgaagatttttggcatgctgtttggccaaacactcccattccaagttcattgcgagatcttctaaagcctggccctgcaagtgttgaaatcgatgctcagcctatgcaaattgaagaaacacagtacccgaaaaccttcttctataaagaagaccttcatccaggcaaaacaatgaaagtacaattca

SEQ ID NO: 176512 - DNA, 279 bp, Glycine max
gataaagcaggcttctatgactctggtcaagatgtatatgaaaagagtgacaatggagcttggatcagctcggaactcagacagacagtctagccaagaatcccttcttctccagggcatgcattttgcatatagagctcatcagtttgctggtggtctagatgcagaaactttgtgtgcttttgaagagataaggcaacatgtaccagcacacttggcaggttctcgggaacttttggctggcatagcatcatcatgagaggcctttgatatattata

SEQ ID NO: 176513 - DNA, 281 bp, Glycine max
  unsure (1)..(281): unsure at all n locations
cctgccactcctgcctcactctctcactctctcagcaggactatataatctgagcgatgtcagatctcgagcctcncttgcgccctaagaggaagaaggtctgggtggactattttgttcagtttcgatggatccttgttatttttgtggtccttcccatctccttcaccatttatttccttacataccttggggctgcaagatccgagtggaagtcctataagacgcgtcagcaggaacatgatgagaatgtgaagaaggttatcaaacgtctcaaacag

SEQ ID NO: 176514 - DNA, 265 bp, Glycine max
ctcaaacattgtttgctgtaggaagaggaatcttgagaaatggcaggggacagcaagatcaagattctgttcatcggagggactggttacatcggaaaattcatcgtggaagccagcgccaaagctggccacccaactttccttttggtgagggagtccactctctccaaccccgcaaaatcacccctcatcgacaatttcaaaggcctcggtgtcaatcttgttttaggagatctatacgatcaccaaagtttggtgagtgcta

SEQ ID NO: 176515 - DNA, 279 bp, Glycine max
gtgaatccattccttggagtgagacagctagaaagttagacagcctctctaaaaatttggagattgaacaactcgatgtcaagacaacgttccttcctggtgatctagaggaagaaatctacatggagcaacccgagggcttcaaagttccgggcaaggaaaacttagtatgtcgcctcacgaagagtttatatggccttaagccagcactgaggcaatggtataagaagtttgacgctttcatagcagaacatgatttcaaaaggatggacagcgatc

SEQ ID NO: 176516 - DNA, 279 bp, Glycine max
ctctaccctcctggtgctcctggtcttggacaacaatttttgtatgggcaaggacccccagccatgatgcctccacaagctggatttggttaccagcagcaactagttccgggaatgagacctggtggtggtcccatgccaagcttctttgttcccatggttcagcagggccaacaagggcagcgcccagtgggccgccgaggaacaggtcctgtgcaacaaccccagcagccaatgccaatgatgcagcagcagatgcttccaaggggacgtgtctat

SEQ ID NO: 176517 - DNA, 278 bp, Glycine max
ctataagctagtttatcgtgaggagaatatgaagttgtttgttttctttgttgctgcagtagttttggtagcatggccatgccatggcgcaggctaccaaaggttccctctccgaatgaaaactggctatggtgagcgttcttcggaggtaaaatgcgcaagttttaggcttgctgtggaagcacacaacatccgagcctttaaaaccattcctgaagagtgcgtactaccaacaaaggactacattaatggcgaacaatttagatcagactctaaaa

SEQ ID NO: 176518 - DNA, 281 bp, Glycine max
ggctagtccatctgatcctgaaaactttccatttgttgtgttgggaaacaaaatagatgttgatggtggaaatagcagagttatttctgagaagaaagcaaagtcatggtgtgcttcaaagggaaacataccatactttgagacctcagcaaaagaaggatttaatgttgaagctgctttccagtgcatagcaaaaaatgcactcaagaatgaacctgaagaagaaatgtacctgcccgacacaattgatgttggtggtggtggacgacagcagagatcta

SEQ ID NO: 176519 - DNA, 282 bp, Glycine max
caaaaatattagtatggagaaggtgagttttgtgaagaatggagagcttagattgcctccggggtttcgtttccacccgactgatgaggcgctggttttgcagtacttgaagcgcaaggtcttctcctgccctctgccagcctctatcattcctgaggttgatgtttgcaagtctgatccttgggatttgccaggtgatttggagcaagagagatacttctttagcaccaaagaggccaaatatcccaacggaaatcgctctaacagagcaacaaattcggg

SEQ ID NO: 176520 - DNA, 277 bp, Glycine max
gaggagttacacgaaccagttcgacgctctgatggacgcggtgcactcggcgatgcatgccttggggtacggtgacgtggacatcgccgtcggcgaaacggggtggccctccgtttgcgacggttgggacgcgtgcagcgtggcgaacgcgcagtcctttaacagggaactggtgaagcacctggcgacggggaacggaacgccattgatgccaaaccgaagcttcgagacttacatcttcgcgctcttcaatgagaaccaaaagcccggcccaata

SEQ ID NO: 176521 - DNA, 281 bp, Glycine max
tcgaactgttgtttggtctcttctctcttatccatggcatcaacgtttctcaccctaccaactcccttcctacacaaaaccaatgccatcagtttctctaacaagagaccctcatttttgcagaggagctctctgaagattcatgcaattaccaaaaaatgggaacccacaaaggttgtgcctcaggctgatagagttcttattcgtttggaggagctttcagataaaacagttggtggagttttgctgcctaaatcagctgttaaatttgagcgctatct

SEQ ID NO: 176522 - DNA, 282 bp, Glycine max
  unsure (1)..(282): unsure at all n locations
gatttttggcatgctgtttggccaaacactcccattccaagttcattgcgagatcttctaaagcctggccctgcaagtgttgaaatcgattctcancctatgcaaattgaagaaacacagtacccgaaaaccttcttctataaagaagaccttcatccaggcaaaacaatgaaagtacaattcagcaagcctccctttcaacaaccatggggtgttggtacatggttaaaggaaattaaagacactactaaagaaggatatagttttgaagagctatgcatc

SEQ ID NO: 176523 - DNA, 282 bp, Glycine max
cttgattaagctttctgggttcattacacgaaaatgttgaagttcttgtcgagagtgaaaatcgagttcaacgcgttggacccgcgaacggcatcgtgtatagagtttctggcgcaatgcaattcacggagggcgaaggagtcgaacccgacgtgcgaagtggacgtgaagcgcgtgacggaagagcgcgcgccgcagataacggtgacattcgttaacggcgtcgaggaagtgttcgacgcgacggcgacgccggctcagagcataagaaacttgattctg

SEQ ID NO: 176524 - DNA, 280 bp, Glycine max
aaaactctaagcacaatttctctgagtcgttttgtgagacaatagcacatagcataacaagggaaggagtattaacaaccgcaaacctgaagagaaaaagagcagcagaagaagaaacaccaacgatgggtgtggattactacaagatcttgcaggttgataggagcgccaaagacgatgacttgaagaaggcttataggaaacttgctatgaaatggcaccctgataagaaccccaacaacaagaaagaagctgaagctaagtttaagcaaatttccga

SEQ ID NO: 176525 - DNA, 277 bp, Glycine max
ctcaatggcttggcactcgttcctcttattagcgacggccattctcgccgttgtgtgctccgccgtgagcggttgctcgccatcggatagggcggcgacgctggccttccggaaggcgctgagcgagccctaccttggcctcttcaactcgtggacgggctccaactgctgcctcgactggtacggcatcagctgcgacgccaccaccggccgcgtcaccgacatcaacctccgcggggagtccgaagaccccatcttcgagaaagccggtcgctcc

SEQ ID NO: 176526 - DNA, 277 bp, Glycine max
cctggagcagtgaacagggttttgggaaaaatggaaggtgttgagtcatttgacattgatctgaaggagcagaaggtgacagtgaaaggaaatgtggagccagatgaagttctgcaagccgtttccaaatctgggaagaagactgcattctgggtggatgaagcaccacaatctaaaaacaagcctttagaaagtgcacctgttgcctcagaaaacaagccttcagaagctgcaactgttgcctcagctgagcctgaaaacaagccttcagaagctg

SEQ ID NO: 176527 - DNA, 279 bp, Glycine max
ccaacacagaagcagaaggaggagaagcagaaagaggagacgaagcaatggcgccgaagaagccccgaaccacgtcgaggaaccctgatttggtcatgggaattggcaaatattcgaggtcgcagatgtaccacaagaggggcatctgggccatcaaggccaaaaacggcggtgttttgcccctccacgatcccaagcccaaacccgaggccccggcccagaagccgcccaagttctacccggccgatgacgtgaagaagcccctcgtcaacaagcaca

SEQ ID NO: 176528 - DNA, 273 bp, Glycine max
cgcgctctatatattattgaattgacaatgaggcctgctcttgctttgcttcctcttctatttgctttctcgttagctgccactacagaatcaagaaaagatacaggggaatattggaaaatgatcatgaaagatcaggaaatgccagaaggacttcaaggtcttgtttcatttcaatctgaaaataaccctaagactcaagagcagcttggtaaaggctccaaaaaccattgtgaagagtctctagttacaaatacacaagttaatagtgac

SEQ ID NO: 176529 - DNA, 212 bp, Glycine max
tatgtcgttgagtatttggtaccggggttactatctgttcagatctggggaattagctcgcttagatgcaattagcagagcaccagttattcatcacttctctgaaagcattgcaggggtgatgacaattcgctcattcagagagcgctagaatgtgtgtgaagaaaatctcaaacgggtgaatgataatttgcgtatggatttccacacaa

SEQ ID NO: 176530 - DNA, 278 bp, Glycine max
ccttcctcttgtcactcccccagctatctggctatattccttgtccacgtcatcgactgccaaggtttgaccctcaaactggactaccgactgggacaaatgatgggacacttgttaacttctttctaagaaatttaggccgaaagtccgaaaaggcactttgtatttatcttcttgctttccaggctatagcgtgctgtgtatgtctcttgctacggtatttccttgctggttggtacaaatgaaagcacgaagtggatagtaggtaagatatggat

SEQ ID NO: 176531 - DNA, 275 bp, Glycine max
tcacgtacgaatatcttgttgttggagcgatcgcgacagaactctgtaaacatggttggtttaccaggacctccttacaggtgatgagcttctctctgactccttccgctacaaggaaattgagaatggaatgctgtgggaagttgaggggaagtgggttgttaaacgagcagctgatgtagacattggtgcaaacccttctgctgagggtggaggagaagatgagggagttgatgatgcagctgttaaggttgttgacattgttgacacattca

SEQ ID NO: 176532 - DNA, 268 bp, Glycine max
cgaaaacgcgtcttcataaacgccgcccaaaacttctcatacccttttattcattccattcgtttctagggtattcttttctttgccgagaaaatgagagagtgcatttcgatccacattggccaggccgctatccaggttggaaacgcctgctgggaactctattgccttgaacacggcattcagcccgatggacagatgccgagtgacaagaccgttggcggaggagacgacgccttcaacacatttttcagcgagaccggcgccg

SEQ ID NO: 176533 - DNA, 273 bp, Glycine max
acgtggaaagggtgccgactattcttttgagtgtactggagtttccactttactctctgaatccttgaaagccacaaaaattggaacaggtaaagcaatagtaataggtgtaggaattgaaattactttgccattgggtctttttgccattctgcctggtagaactttgaaaggttctgtttttggaggactcagggccatttcagacctttccattttagctgacaaaggccacaaaaaggaattccctcttcaagaactcttcacccatga

SEQ ID NO: 176534 - DNA, 279 bp, Glycine max
tcttcatttctacacatccctagctcagtccgttccgtcgttgacgatggcgtttcgggtgcgaaccctgacctccgctctctctttcttctctctctcttgtccatcgcttccgccaatgtcttcttccaagagcgtttcgctgacgggtgggaaaatcgatgggttaaatcagattggaaaaaagatgagaacgtggctggggagtcgaaccacacctctggtcaatggaatggagacgctaatgacaaaggtattcaaaccagtgaggattacaga

SEQ ID NO: 176535 - DNA, 273 bp, Glycine max
attctctgtggagggccagcttgagttcaaggccatcctctttgtcgcgaagagggcaccctttgatttcgtttgacaccaggaagaagatgaacaacatcaacgttcatgtcaggagggtgtttataatggacaattgtcaggagctcatacctgagtaccttggatttgtgaaaggtgttgttgactccgatgacttgccgctcaacatctctcgtgagatgctgcaacaaaacaagatcctgaaggtgatcaggaagaatctcgtgaaga

SEQ ID NO: 176536 - DNA, 272 bp, Glycine max
cgcatcttcatcaagctccgctccaacacaggggaaaatgagggagatccttcacgtgcagggagggcaatgcgggaaccagatcggttccaagttctgggaagtggtgtgcgacgagcacggcatagatccgacggggaagtacgtcggaaactcagatctgcaactcgagcgcgtgaacgtctactacaatgaagcctcgtgcgggcgcttcgtgccacgcgcggtgctgatggacctggagcccggaaccatggacagcgtgcggaccg

SEQ ID NO: 176537 - DNA, 274 bp, Glycine max
ctcgagccgttggtgagtgtgagtcagtctatcaatcggccacatagaaatgggcagtgcacctctgattccagtttcctggttgccttggcggccactttctcctttcaagggaacggtgaaaaccttggtcgcaaaaccatggctgaagaagattcagcaagcaagacccctcatttccgtggttaacaaggctgcctctctatcttcccccgtgacagcacccagcgtcggcgttcggtttcggctggacaatttggggccgcaaccgggt

SEQ ID NO: 176538 - DNA, 276 bp, Glycine max
cacataacaatgtcgttgattccaagtctcttcggcaccgggcgaagaaccaacgtcttcgaccccttctccctcgacgtgtgggacccattccatggcttccccggcaccaccgccctctccgctccgcgctccgcgacggcggccttcgccaacacgcgcatcgactggaaggagacggcggaggcgcacgtgttcaaggcagacctgccggggctgaagaaggaagaggtgaaggtggagatcgaggaggagggaagggtgctgcagataagc

SEQ ID NO: 176539 - DNA, 275 bp, Glycine max
tcttcttggaactgcaacaatggtgccgcaacccattttgcatctaaccctaatgtcattaataatctctctgaccactctttccttggtcgatgccgccgatcccacatttggcttcaaccctcttggattatctagtagctcaaacttgcaaatccaaaagccttacgacgttgcagtcaacgagcgctacagcttttcaaatggagtgcacagattttgggtatactccacggacaagcctcatatgcaatgcagcaatacgaagccacgaa

SEQ ID NO: 176540 - DNA, 271 bp, Glycine max
cttcagaactaagaagaaggaaatggcttcctcaatgatctcctccccagctgttaccaccgtcaaccgtgccggtgccggcatggttgctccattcaccggcctcaaatccatggctggcttccccacgaggaagaccaacaatgacattacctccattgctagcaacggtggaagagtacaatgcatgcacgtacggccaccaattcgcaagaacaagttcgagactctttcctacttgccagacctcgatgatgcccaattggcaaag

SEQ ID NO: 176541 - DNA, 273 bp, Glycine max
cgaagttgtttgcacaaggttcaaggctgaatttcctatctttgataaggttgaagtcaatgggaagaatgcagcgccactttataagtttttaaaggagcagaaagggggaatatttggtgatggtatcaagtggaacttcacaaagttcttagtaaacaaagaagggaaggttgtggacagatatgcacctaccacctcacctctgaaaatcgagaaagacatagagaagcttttgcaatcttgaatagtaagatttgattctacatatct

SEQ ID NO: 176542 - DNA, 273 bp, Glycine max
ctctctctctctctgtctctctctctctagacttagattttctgaatggcttcagtggaagagggacaggtcatcggcgtccacaccgttgatgagtggaagctgcaactccagaatgcaaaagactccaaaaaactgattgtggtggattttactgcttcctggtgtggtccatgccgttttatggccccagttcttgcagagattgcaaagaaaactcctgaattgatcttcctcaaagtggatgtggatgaagtgaggcctgttgctgag

SEQ ID NO: 176543 - DNA, 272 bp, Glycine max
caataatgacggcgaactatccacgcttagtggcataatgaaaactgagtatcgtattgccttgaggtcttcactacgacatgatttttcagaaggtgtccgagcagtgctggtggccaaggatcagaacccaaaatggaaaccatcaagcttggaggaagttgatccgagtgaagtggaagccgtctttaaacctttaggaccagaagttggggagttgagagtgtaattttggaaggaaaatgtactcttctcatttcttcaaatgcatt

SEQ ID NO: 176544 - DNA, 269 bp, Glycine max
cttttgtagtaagttaggtgaggtgccaaaatggtgaagataactcttggtactttcgatgactcttttggtgttgcctctcttaaggcttatttggcagagttccatgcaactctgatttccgtgttcgctggtgttggttcagccatcgcttacaacgagcttacaaaagatgcagccttggatccaacggggctggtggcagtagctgtggcccatgcatttgcactgtttgtaggtgtctccgtcgcagccaacatctcgggtgg

SEQ ID NO: 176545 - DNA, 273 bp, Glycine max
ccggcagctacttcggctccatcttcttcgatctctcaaactctatcggcgcagaaccaatcctatatcactatggggaagacacatggaatgggagctgcccgcaagctgaagtctcaccgtaggagacaaaggtgggctgacaagtcatacaaaaagtctcatctcggaaatgaatggaagaagccttttgctggttcatcccatgcaaagggtattgttcttgaaaagataggtattgaggctaagcagcccaactctgccattcgaaaa

SEQ ID NO: 176546 - DNA, 270 bp, Glycine max
agtcaacaacacttttgtcttcgttccattatctagttctcaattctcttcaccctttgcctctgaaagaaatgggtagtcttgaagcggaaagaacaacagtaggattggcagcaagagacccttcagggattctctccccatacacctacaatctaagaaacacaggccctgatgatgtttacattaaagttcactactgtggaatttgccattctgatctccaccagattaaaaatgatcttggcatgtccaactatcccatggtcc

SEQ ID NO: 176547 - DNA, 266 bp, Glycine max
caagctagtttatcgtgaggagaatatgaagttgtccgttttcttcgttgctgcagtagtcttggtagcatggccatgccatggcgcaggctaccaaaggttccctctccgaatgaaaactggctatggtgagcgttcttcggaggtaaaatgcgcaagtcttaggcttgctgtggaagcacacaacatccgagcctttaaaaccattcctgaagagcgcgttgaaccaacaaaggactacattaatggcgaacaatttagatcag

SEQ ID NO: 176548 - DNA, 269 bp, Glycine max
cttcacaagattctcacaaacaactcttgagacagaaagaatggctcccaacacattgatgagttctgccatctcagccttcccatctctcctttcctcctcaaaatccagatttgccgcagcagttcctctttccagctttgttgtcaccaatgcctcttcttctcgcttttccatgagtgctgactggatgcctggccagcctagacccccctaccttgatggttcagcacctggtgactttggattcgaccctcttcgtcttggtg

SEQ ID NO: 176549 - DNA, 220 bp, Glycine max
aaagaaagagaaagagcgatgccaggatcattgaggcctcggtttgttatctttggttcttccatcgttcaatttggtttttatgatgaaggttgggtggctattctttctcatttgtatgcccgcaaggttgatattgatttgcgaggatatgctggttggaattcaaggcgtgctgtgcaggttctggataaagtttttcccagggatgcccctatac

SEQ ID NO: 176550 - DNA, 282 bp, Glycine max
gcgggatcagcacaagattgcaaaatgaagttcaacattgcaaatcccaccactgggtgccagaagaagctggaaatcgatgacgacctgaagcttcgagcattttgggacaagaggatctcccaggaggttcttggtgatgctctgggtgaggagtttaaaggatatgttttcaaaatcaccggtgggtgtgacaaacaaggattccctatgaagcagggagtgctgacccctggtcgtgttcgacttttgctccatagaggaactccttgtttccgtgga

SEQ ID NO: 176551 - DNA, 282 bp, Glycine max
cattcctcttgtcactcccccagctttctggctatattccttgtccacgtcatcgactgccaaggtttgaccctcaaactggactactgactgggacatatgatgggacacttgttaacttctttctaagaaatttaggccgaaagtccgaaaaggcactttgtatttatcttcttgctttccaggctatagcgtgctgtttatgtttcttgctacggtatttccttgctggttggtacaaatgaaagcacgaagtggataaaagaaaagatatggatgaga

SEQ ID NO: 176552 - DNA, 282 bp, Glycine max
caggtcagaaagcagtgcaatgttgccaacaagcaccatgatcaggaccaagccttatgtgaagaaaatggccaagagccaagactatttcttcaaggagttctctagagccattaccttgctctcagagaacaaccctctcactggcacaaagggtgaggtcagaaagcagtgcaatgttgccaacaagcaccatgatcaggacccttgaattttcctccccttgtctatgatcgaggaagaaaatctgtaatatattatgcaaaaactaattaaggtctt

SEQ ID NO: 176553 - DNA, 278 bp, Glycine max
ctagtttatcgtgaggagaatatgaagttgtttgttatctttgttgctgcagtagttttggtagcatggccatgccatggcgcaggctaccaaaggttccctctccgaatgaaaactggctatggtgagcgttcttcggaggtaaaatgcgcaagctttaggcttgctgtggaagcacacaacatccgagcctttaaaaccattcatgaagagtgcgttgaaccaacaaaggactacattaatggcgaacaatttagatcagactctaaaacagttaa

SEQ ID NO: 176554 - DNA, 282 bp, Glycine max
caaagggtggcttttttgagcttgtgatttgcccccactacttctttgagattactgtgttttatgggatcttcttcatttctcagacattatattcattcgctttcgctgtaggcactactatgtacttggtgggtaggagttactcaactaggaaatggtatctttctaagtttgaagatttccctcagcatgttaaggctgtcatcccatttgtcttctaaatgttgtaatgaacatctaattctacttgagttgtaagtgtgctgctagattgtgttt

SEQ ID NO: 176555 - DNA, 271 bp, Glycine max
gcaatggaaaattttggaatgccagacatcgtgtaatatgcaaggaaacgggtactcgccattcatccggtgcatttatgttatcaccaagggatggtaatgttgaggccccaaaaaaattggtggaagttgaccatgtacaacgctatcgaccatttaagtacgaagatttgagggatttcagaatcaccacaggaaagagggatggcgaagtccttgatccatatcgcatttgttagtcatttcatgcatcgaaatacatcgccaatag

SEQ ID NO: 176556 - DNA, 282 bp, Glycine max
caaagatggaagacgcaagtcaggtttattaggggaagcgtggctagcagagactagagagatagaattagaattaaaaagcgtgaaggacagtgataggtttggtttggaaggaagaagaaaatgaaggccatagtgataacgaggccaggaggtcccgaagtgctccaacttgaggaagtggaagatcccctagtcggagacgacgagcttctcatcggagtccacgccacttcccttaacagagccgatacctttcagaggaaaggctcctaccctccc

SEQ ID NO: 176557 - DNA, 278 bp, Glycine max
attcatatctctctctctctcccccaagaaattcaacagagttttgattaacttgaaattgttcaacaagaaatggagaattcattgggaaagtacggaaaagagcttaatctcgaggctacagagttgaggttggggttgcctggaagcgatgagcctgagaaacgttctgctgttagaagcaacaagagatcttcaccagaagcaagtgaagaagagtgcataagcaagggcaacatgaattcttctgatggttctgacatcacaagtgatgacca

SEQ ID NO: 176558 - DNA, 279 bp, Glycine max
acttcctcttgtcactcccccagctttctggctatattccttgtccacgtcatcgactgccaaggtttgaccctcaaactggactactgactgggacaaatgatgggacacttgttaacttctttctaagaaatttaggccgaaagtccgaaaaggcactttgtatttatcttcttgctttccaggctatagcgtgctgtttatgtttcttgctacggtatttccttgctggttggtacaaatgaaagcacgaagtggataaaagaaaagatatggatg

SEQ ID NO: 176559 - DNA, 274 bp, Glycine max
gtgattgttgtgactcgttcttcttcgtcgttctcttcttcttttgttgtttgtgtgtttgtcttttctctcacctgacaatgtcttgctgcggtggtaactgtggttgcggaagcgcctgcaagtgcggcaacggctgcggaggctgcaagatgtacccagacttgagctacaccgagtcaaccaccaccgagaccttggtcatgggagtggcaccagttaaggctcaattcgagagtgctgaaatgggtgttccgctgagaacgatggctgc

SEQ ID NO: 176560 - DNA, 252 bp, Glycine max
cgtgcctctagggttatcatatctccatttccatttcctctctctcagtttccaagaatcttaagctatgggaaagtcttacccaaccgtgagcgctgattaccagaaggccgttgagaacgcgaagaagaagctcagaggcttcatcgctgagaagagatgcgctcctctaatgctccgtttggcatgggcatctgctggaacttacgatctgagctcgaagaccggtggtcccttcgaacccataaagca

SEQ ID NO: 176561 - DNA, 273 bp, Glycine max
gttgaacaagggtttctctgtctgcttcttcactttctctcgtttcaatcgaaaccaaaacaaaaacatgggcagaaaattcttcgtcggtggcaactggaaatgcaatgggaccactgaggaggtaaagaagattgttactactttgaatgaggctaaagtccctggagaagatgtcgtagaagttgttgtgagccctccttttgtgttccttcctgttgtaaaaagtttgctgcgccctgatttccatgtttcggcacaaaactgttgggt

SEQ ID NO: 176562 - DNA, 282 bp, Glycine max
cgagataactagaaacagtgtgatgaaaatgaaggtccttgttttcttcgttgctacaattttggtagcatggcaatgccatgcgtacgatatgttccctctccgaatgaacactggctatggtgcccgtactccggaggtgaaatgcgcaagttggaggcttgctgtggaagcacacaacatctttggctttgagaccattcctgaagagtgcgttgaagcaacaaaggaatacatccatggcgaacaatatagatcagactccaaaacagttaaccaaca

SEQ ID NO: 176563 - DNA, 281 bp, Glycine max
gaagcttattgagttgagttaacagcatggagcgggaggaagatgttaaggttggagcacagaaattctcagagaggcaagcattggggacaggagctcagggtgacaaggactacaaggaggcaccaccagcacccttgtttgagccaggggagttaaagtcatggtcgttttacagagctgggattgcagagtttgtggccacattcttgttcctctacatcactgtcttgactgtcatgggtgtcaacagggcacccaacaagtgctcctctgttggc

SEQ ID NO: 176564 - DNA, 282 bp, Glycine max
cagaaacataccgaatgagagcatcaaactcttcttcttcgatttccattgcgaacgttactttttcttcttctttctcttcattttcttcgctcttcgatcttcgtccggggactgctccgaatatcaccaccaccactcgccgatggccacgatcggaggcttacacgactcccaaggctctcaaaacagcgtcgaaaccgaagccctcgctcgattcgccgtagacgaacacaacaagaagcagaattcgcttctggagtttgctagggtggttagggc

SEQ ID NO: 176565 - DNA, 281 bp, Glycine max
cttctctctcccttagtcaaagggactcgttgttcttctcccaggttatttagaaaagcaaaatggtgaagatttgctgcattggtgctggatatgtggggggtcctactatggcagtcattgcacttaagtgcccatccattgaagttgctgttgttgatatctctaaatcccgcattgcagcctggaacagtgacaagcttcctatctatgaacctggccttgatggtgtggtgatgcaaggccgtggcaagaacctcttcttcagcactgatgttgaa

SEQ ID NO: 176566 - DNA, 283 bp, Glycine max
tctctcgtccaagaaccaacctaccttttgcaatctcaattcaatggcgtcctctctcattgcgaatcgcttcctctcctcttccctcctctccaggtccctccttcgacccgccgcttaccgcttcccaccgctctttcaacactaatgccatgcgccagtatgacaaccgcgcctctgaccacagcaccggcatcgatcgtcactccgaacgctctttccctagcactgcgcgccgcgacgatatcgtcgcagatgtgtaggatccattatatccgactcg

SEQ ID NO: 176567 - DNA, 256 bp, Glycine max
cctaaacaactctttctcttcttccttcgctcgttgttctccctcgcgtagatcgacaatggcggagacagagacgtttgctttccaggctgagatcaaccagctcctcagtctcatcatcaacaccttctactccaacaaggagactttccttcgtgaactcatcagcaacgcctccgatgctttggacaagattcgatttgagagtttgacagataagagcaactcgatgctcagccagagtggttcattcata

SEQ ID NO: 176568 - DNA, 282 bp, Glycine max
tgccaagtgaaagagagaagaaaagtcaaagacaatgtcagggatcattcacaagattgaggagacccttcatgtgggaggccacaagaaggaggaggagcacaagggtgagcagcaccatggtggagaatacaaaggggagcatcatggtgaacacagtactgaatacaaaggagagcatcatgttggtgagcacaagccggagcaccatggaggagacgagcacaaagaggggttcctagacaagatcaaggacaagatccacggcgaggagggtggcgc

SEQ ID NO: 176569 - DNA, 272 bp, Glycine max
aagagaaagaagggggagctatagccataaagagaaaaactttcaaagaagtgaaagcaaaaaagagttgttcttttcctttctgctgataagctgtgtgagtgagttcattgacaagcctgaaatgacaactatgctgacaaatgagcatggtctgagtttgaacctcaaggagactgagctttgcctcggtttgcctggcgggggctctgaagtggaaactccaagggccactgggaagagagggttctctgagaccgttgatctgaagc

SEQ ID NO: 176570 - DNA, 277 bp, Glycine max
ctctctgtctcgtttacacatctctccaacctttcactttcgtttctcagttttattcgaatccctctctcaatctcctttccaaatggccagcgttgaggttgcacagcaaacaccaacaacagttccagaaaatgaaacaaccgaggtaagcaagacccaggaaacaaccccagtcactgaggctcctgcaacagaacaaccagcagctgaggttcctgcaacagaacaaccagccgctgaggctcctgccccagaatcaaccaccgaagcacca

SEQ ID NO: 176571 - DNA, 262 bp, Glycine max
cgataacacttttgatttaattttgagataaaagtgatacgtgtagatctaggaagaggcgttgcctatttaaagaagctaaccctccacaaggaattaaggtgcaacagtttgttgtgagctataagctagtttatcgtgaggagaatatgaagttgtttgtctcctttgttgctgcagtagttttggtagcatggccatgccatggcgcaggctaccaaaggttccctctccgaatgaaaactggctatggtgagcgttc

SEQ ID NO: 176572 - DNA, 276 bp, Glycine max
gtttcctgcagtgtctggaagaggcaggacaaggaaacccactgaacaaaacctttgtgaaggtttataagtcagggtcctttggaaggtcattggatatcactaaattcagcagctaccatgagctgcgtggtgaactcgctcgaatgtttggccttgaaggcgagttggaggaccctgtgagatcaggctggcagcttgtatttgtagaccgagagaacgatgttcttctccttggtgatggcccctggccggaattcgtaaatagcgtatggt

SEQ ID NO: 176573 - DNA, 273 bp, Glycine max
ctgttaacggactatctacagagcagcgcaaaaggttgactatttctgttgagctagtggctaatccttctatcatattcatggatgagccaacttctgggctagatgcaagagctgctgctgttgttatgagggctattaggaaaatagtggacactggaagaacagttgtctgcaccatccatcagcctagcattgatatatttgaatcttttgacgagctttttctaatgaaacgaggaggacaagagatatatgtggggccacttggac

SEQ ID NO: 176574 - DNA, 276 bp, Glycine max
aaatttagagtcgtaaaaatctaaatatcgaatttttaaagattacatgtaattaattttgattttgcttgtaacatgttctttttaaaaataaataaaggtgatttattttagcaattttgttctctgatatctatatatattttcgcgtgactctgtaggaaaatgaggttgaagagggtagtgagggtaccagctataagcttgaagatggctgatattccaccagatgattattcttggaggaaatatggacagaaactcattaaaggatcg

SEQ ID NO: 176575 - DNA, 297 bp, Glycine max
ctcgagccgttcagccacagtttcggaggagaagaaaatagtcgttcgagatggcccgtacgaagcaaactgctcgtaagtccacaggaggaaaggctcctaggaagcagcttgcaaccaaggctgcacgtaagtctgcaccaactactggtggtgtgaagaagccacatcgttaccgtcctggtaccgatgctcttcgtgagattaggaaataccagaagagtaccgagcttttgatcaggaagctccccttccagaggctggttcgtgaaattgctcaggacttcaagactgatc

SEQ ID NO: 176576 - DNA, 293 bp, Glycine max
ccttcctttattctctcctcttaaacctttcacttcaagcttcaagtttccaagctacccacccactgctcatactcacacccaatgaagatccagtgcgacgtgtgcaacaaacacgaggcctccgtcttctgcacagccgacgaagccgccctctgcgacggctgcgaccaccgtgtccaccatgccaacaaactcgcctccaaacaccaacgcttctctcttctccgcccttctcataaacaacaccctctctgcgatatttgccaggagagaagagccttcacgttctg

SEQ ID NO: 176577 - DNA, 292 bp, Glycine max
ctaaacgactctatctctcttcgttttgttcttccttgcgctcctcctcgttcgttcgttctccctcgcgtagatcggcaatggcggagaccgagacgtttgctttccaggctgagatcaaccagctcctcagtctcatcatcaacaccttctactccaacaaggaaatcttccttcgtgaactcatcagcaacgcctctgatgctttggacaagattagatttgagagtttgacggacaagagcaagctcgatgctcagccagagttgttcattcatattattcccgacaa

SEQ ID NO: 176578 - DNA, 295 bp, Glycine max
attttcaattcatggcttccctcatgagcaccatcctcaagcaaaggtcttgttcttcttcttcacatgctgggaggctgttgttctccacaaccacagcagccattgttgattccccttcacttgctcagagaatcagagatttgcctaaggaccttcctggaaccaccatcaagaagcatgtttctcagctcattgggaggactccactggtttatcttaacaaagtcaccgaaggatgtggagcttatgttgctgtcaagcaagagatgatgcaacctactgccagcatcaa

SEQ ID NO: 176579 - DNA, 294 bp, Glycine max
caatattgtaaaactcaaaatctagtttcatactttttttcttcttcttgaaatggctctccaggctgcttctcttgttcctgcttctttctcggttcttaaagagggaaagagtggtgtgtctctcaaggactccaccttgttcggtctttcattttcagaacctatcaaagctaacttcagctcttctgcattgaggtgcaagagggaattcgaacaaaagctctgtgctgtgagggccgaaacagtggctacagcctctccagcagttaccaagtctacaccagaagggaa

SEQ ID NO: 176580 - DNA, 299 bp, Glycine max
cagaagagaaggtgtagacaaactcaatctctaatggcactcaggatgtgggcttcttccactgccaattcactcaaagtctcttctacctccagacctcatctcttgcatcctttttctttctccagatgcttgtcttccgtcttggatggacttaagtatgcagattcacacgaatgggtcaagcacgaaggctcagtcgccaccattggtatcactgaccatgcccaggaccatcttggagaggttgtgtatgtggagctgccagaatcaggtggcacagttacccagaagtctgg

SEQ ID NO: 176581 - DNA, 300 bp, Glycine max
tcggagagggagatagatagaaaggtgaattggattgcatctctctctgtgtgttggaagaggggaatcgtagatctgatttctttctttctttttaataattttgtgatcagaattattgagctgaacaaaagacaatgggattgtgggaagcttttctcaattgccttcgcagcctttttttcaagcaggaaatggagttatctctaataggacttcagaatgctgggaagacttcccttgtaaatgtagttgctaccggtggatatagtgaggacatgattccaactgtgggattca

SEQ ID NO: 176582 - DNA, 297 bp, Glycine max
gttcttcaaaaaattgctagtttgtactcacttgattgcttcatcttaaatgattctgtaagtgaggttatgcctggatggagtaatactgatgatggcagcattattatttatctgatttctgataagaaggagttcttacctaaattaagcagctataattggctggttgttgttctaaatgttggaggtgaaagcttatgtcacaatccaaatatacttcagattgaaaacgtagaggagtttccattgaccatatgccacttaaataaaagatcaattggaaccaatgctgtg

SEQ ID NO: 176583 - DNA, 297 bp, Glycine max
cagaagagaaggtgtagacaaacacaatctctaatggcactcaggatgtgggcttcttccactgccaattcactcaaagtctcttctacctccagacctcatctcttgcatcctttttctttctccagatgcttgtcttccgtcttggatggacttaagtatgcagattcacacgaatgggtcaagcacgaaggctcagtcgccaccattggtatcactgaccatgcccaggaccatcttggagaggttgtgtatgtggagctgccagaatcaggtggcacagttacccagaagtct

SEQ ID NO: 176584 - DNA, 304 bp, Glycine max
atcccaacagaaaaccaaagtaatctaacaaagtaagcacaatgagggagatattgcacgtgcaaggtgggcaatgcgggaaccaaatcggttccaagttctgggaagtgatatgcgacgagcatggcatcgaccccaccggaaagtacaccggcgacgaggcctccgatctccaactggagaggatcaacgtctactacaatgaagcctccggcggaaggtacgttccccgggccgtcctcatggatctcgagcccggcaccatggacagcatcagatccggcccatacggcaagatcttccg

SEQ ID NO: 176585 - DNA, 296 bp, Glycine max
aaaaaagggacaacgccctgtgtcaaataatgagaagaaaagaaacaatcatgtctgccgcgggccacgtcggctggctcccgaaaagatatcttggaatgtccttgacctgaagaaggagaattacttctcgtgtgccgttggacgaacacagaccaatgctcggtatacgcttggatcaccagatgaagttgttgcatttctcaaggaactagccaatgtctgagacttacccagcttcagaaattccctatattgccaacattgcaacttgccaaatttactctcttgtacac

SEQ ID NO: 176586 - DNA, 298 bp, Glycine max
atggctcccaagggtttaacctttctggctgtgttaatatgcgtttcagcactgtcactgagtccttctgttgcgggggaagggcaaaataatggccttgttatgaacttctacaaggaatcatgccctcaggctgaagacatcatcacagaacaagtcaagcttctctacaagcgccacaagaacactgctttctcctggctcaggaacatcttccatgactgtgctgttcagagttgtgatgcttcactgttgctggactccacaagaaggagcttgtctgagaaggaaacagata

SEQ ID NO: 176587 - DNA, 303 bp, Glycine max
cccgtttcatattggattaagcgccaaattttccgaatttgcattatggtattgctagttggaattgcattgcttctgggtctcttcctcgctgttcttctattcaacccacgacaccgtaaatctgggcacaagggaaaagctcaagccagtttaaacgataataaggcatcaaagtcctacagtaaaacagaaatttcattgcataacaagagaacagattgttggataatcatcaagaacaaggtatatgatgttacctcatatgtggaagaacatccaggtggtgatgccattcttgca

SEQ ID NO: 176588 - DNA, 291 bp, Glycine max
caaacatagaaatgttgaagctttcgtgcaatggcttcgaacgggctcattccctggcccaatgccgcttcgcgccgcggcccgcctgcctcgtccctcgccggaggaggagcggcgtctccggattccggttgccggaaggcaggtcgatccgggtgtccgcggcggtgtcggcaaaggacggcgcgatcgcgacccgagtagaggcggatcactggtagctagcggaccggctgacggtggggagcttgacggaggatgggttgtcttataaggagaagttcattgtga

SEQ ID NO: 176589 - DNA, 296 bp, Glycine max
tatatgtctccagagagaatcaatggaagccagcgaggctacaactacaaaagtgatatatggagtttgggactaatattacttgagtgtgctttacgtcggtttccatatgcaccgcctgatcaaagtgaaacatgggaaagcatttttgagcttattgaaaccattgtcgataaacctcctcctatccctccttctgaacaattttctacagaattttgctcatttatctcagcatgtctacagaaagacccaaaggatcgactgtcagctcaggaattaatggcacatccttt

SEQ ID NO: 176590 - DNA, 292 bp, Glycine max
acattacttggaggttacaaacagggaaacgggatagtctgtggttgttgtgatatagagataagcccttcacagtttgaagcccatgctggaatggctgctaggcgtcaaccttaccgacacatatatacttccaatggattaacacttcatgacatagctctatcgttggcaaatggtcaaaaccttaccacgggagacagtgatgatatgtgtgcagtatgtggagatggaggagatttgattctttgccatggatgccccagggcatttcatgcagcctgcttgggtt

SEQ ID NO: 176591 - DNA, 301 bp, Glycine max
gtctttcttggaactttgttactctcacacatgtctcgctccgtgcctttggtttcaaccattttcctcttacttctgcttctggtggccactgagatgatggggccaacaatggtggcagaagcaagaacttgtgagtctcagagccaccgtttcaaggggccatgtttgagtgacaccaactgtggctctgtttgccgaaccgaacgtttcactggaggacactgccgtggcttccgtcgcagatgcttctgcaccaaacattgttaattttaaaaaattaattaagagtgctttgata

SEQ ID NO: 176592 - DNA, 297 bp, Glycine max
cacattgcaaagagaatacacatgacattactaagtctttgttcatttgagtagtagtgatggctagcctcaaggttgcatgtgtggttgctgtgatgtgcatggttgtggtggccatgagtgctgcacccatggcacaggccgcaatcccgtgcgggcaggtcgccggcgacatgtctccgtgcttcagttatcttcgaagcggcggaaaaccgtcgcaggcctgctgcaacgaagtgaagtccctcagcagcgcggcgaagaccaccgcggaccgtctcgcggcgtgcagttgcc

SEQ ID NO: 176593 - DNA, 289 bp, Glycine max
attttgtccatccaaaccttaaaaagattcagtgaagaacaacgcttaatggcatctcttggtgtgcaagcagttcatcctcctccattaacatccacctccgacccacctcctctttttgatggcaccaccaggttgtacatcagttattcttgcccctatgcacaacgtgtatggatcgctcggaacttcaagggactaaaagacaagatcaatttggtccctataaaccttcaagacaggccagcttggtataaggagaaagtctaccctgaaaataaggtgccat

SEQ ID NO: 176594 - DNA, 277 bp, Glycine max
agggtttggtggccctcttgagatttgttggtcacaaattccagccagcatccaaatttcaagagggctcccaattctgcagagggtttggtggcattggtggaattcttcgttaccagcttgacatcagatcatttgatgagttatctgatgacgacgaagtgtatgaggattctgattaagttcctgttactgcagaacccttactttgttttggaagattggggccttcaaaaatgatttggatattattgattatggttctaagacttagact

SEQ ID NO: 176595 - DNA, 295 bp, Glycine max
  unsure (1)..(295): unsure at all n locations
cagcctcaacaaccctaacgcgtgcagagcagagagagacgcagccatggggcgaagacccgcgaggtgttataggcaaattaagaacaaaccataccccaagtcacggttttgccgtggtgttcctgatcccaagatcaggatttacgatgttggtatgaagaagaagggtgttgatgagtttcctttctgtgtccatctggttagttgggagaaggaaaacgtttctagtgaggccctggaagctgctcgtattgcttgcaacaagtacatggccanatttgctggaaaggat

SEQ ID NO: 176596 - DNA, 286 bp, Glycine max
gtaagaaggagatcaaggacattctggtgaggtacgatcgtaccttgctcgtcgcggatcccaggcgctgcgagcccaagaagtttggtgggcgtggcgcacgtgcgaggttccagaagtcttaccgttgaaggagaatggtggtgtttttgtgtttttttgtttttggttcggttcatgttttatgctgtggaaaaaatgaaaacttttgttggtcgttttggtagttttataattttgatcgttttttttataatggttggattatggattcttgttttgattc

SEQ ID NO: 176597 - DNA, 290 bp, Glycine max
cagaggttgatgggtcggcgaaagaacaacagcaacaacaatcagtgctcctcaagcaaggaagacgctgacatgaatagcaaccaccttcggtttgaagaagctgacgaggctgtcgacgagagttccaacctcgaccaatccatgtgcgacatcgaagaatccgatgataaaaccagcgccgactattacttcgattcctactctcattttggaattcacgaagaaatgttgaaggacagtgtgagaaccaagacatatcaaaatgttatttatcagaacaaattttt

SEQ ID NO: 176598 - DNA, 290 bp, Glycine max
atccatctcttgtttcttgctttctttcttcaccatgtcacttgctgggaaaatcaccactgaaatcggggttcatgcaaccgctacaaagtggttcaacctcttcgcaacacaactccatcatgttcaaaacctaactgatagagtgcatggaaccaagctgcatcaaggtgaagactggcatcacaacgagacagtcaagcactggacttataccatagatggtaaggttacaacatgtctggagagtattgaatccattgatgaacagagcaaaacaatcacctaca

SEQ ID NO: 176599 - DNA, 290 bp, Glycine max
ctcattgcattgtgaaactttactactcatttcaggatgctgagtacttgtatttaattatggagtatctgcctgggggtcacgttatgactctgctgatgagggaagacaccttaagtgaaaatgttgctagattttacattgcacaaagtgttctggccatagaatctattcacaaacacaattacattcacagagatattcaacctgataaccttcttctggataaaaatggtcacatgaagctctctgattttggtctctgtaagcctctggattgtattgccttg

SEQ ID NO: 176600 - DNA, 296 bp, Glycine max
tggacctgaagttcccttccatcctggaagagaggacaaacctgagccaccaccagagggtcgcttgcccgatgccactaagggttctgaccatttgagagatgtctctggcaaagctatggggcttagtgaccgagatatcgttgctctgtctgggggtcacactattggagctgcgcacaaggagcgttctggattcgagggtccctggacctctaatcctcttattttcgacaactcatacttcaaggagttgttgagtggtgagaaagaaggcctccttcagctaccttctg

SEQ ID NO: 176601 - DNA, 279 bp, Glycine max
cttccagtgaaagacaggcagcgatggaagaagacttcgacatccccggcggcgaggaaatggatctcggcgaagacgaggtcggcgaggagagggagatcggctctggcggcctcaagaagaagctcctcaaggaaggtcaaggctgggaaacccccgaagtcggtgacgaagtccaagttcattacacggggactttgctcgacgggactaagttcgattcgagccgcgacagggattctcccttcagcttcacgctcggacaagggcaagtaatta

SEQ ID NO: 176602 - DNA, 274 bp, Glycine max
actagaaacagtgtgatgaaaatgaaggtccttgttttcttcgttgctacaattttcgtagcatggcaatgccatgcgtacgatatgttccctctccgaatgaacactggctatggtgcccgtactccggaggtgaaatgcgcaagttggaggcttgctgtggaagcacacaacatctttggctttgagaccattcctgaagagtgcgttgaagcaacaaaggaatacatccatggcgaacaatatagatcagactccaaaacagttaaccaac

SEQ ID NO: 176603 - DNA, 274 bp, Glycine max
gaaaagccttcaatcatatagcattctaagaaatgaagagccctaccattttcattctctttctactttctgccttctacacctcactcctaccttcagccaccgctcaagtcgtggttgacatggaaggtaatgatcttcaaaatggtgggaaatattatgtgttgccagtaatagagtcatcatatggtggaataagagtagccgcaactggaaaagaaagatgccctctcactgttgtacaatctgccgatccgtatgataaggggattcc

SEQ ID NO: 176604 - DNA, 276 bp, Glycine max
gtgatttcagtgagtgatcggtgttcacttgatctcatcataatcgtcagcgtcaattgaagaagatgccgatcagaaacatcgccgtcggaaggcctgaagaggcgactcaccccgacacgttgaaggcggctttggctgagttcatctcaaccttcatcttcgtgttcgccggctcaggctccggcatcgcctacaacaagctcaccgacaacggcgctgccacccctgccggcctcatctccgcctccatcgcccatgcattcgccctcttcg

SEQ ID NO: 176605 - DNA, 276 bp, Glycine max
gagaagaagaaacttaatcgatcatcacttcacttcactaatccatcatggcagacgagacccagaacaagtatgagagctctgaggttgaggtccaggatcgtggtgtttttgactttctcggtaagaaaaaggatgaagaagacaagcctcatcctcaggaggaggtcatcgccaccgagtttcaaaaagtcactgtctcagaccaaggagagaacaagcacagcctcttagaaaagcttcaccgatctgacagcagctctagctctgtaagct

SEQ ID NO: 176606 - DNA, 272 bp, Glycine max
ctccgtaaatcattcatagcatattccaaaccacactcaaaaggcttccctccctgacttggatttgattgatttcattccattgctacactatattctttttattggtgaattgctatttgctacactatattttaaggacacttatacatagactatatggggttgatggctgcgaaccaaactcaattgttgtctaagatggccatcggagatggacatggtgacgcatccccatatgttgatggatggaaggcttatgatgacaaccc

SEQ ID NO: 176607 - DNA, 277 bp, Glycine max
ctgttggacagtacgaatctcacacagccttcacccttcctggactctaccgcgttgtgcatggtattgatgtctttgatccaaaattcaacattgtctcccctggagctgatcaaaccatttacttcccccacactgaaaccagccgtaggttgacatccttccaccctgaaatcgaagaactcctttacagctcagtggagaatgaagaacacatatgtgtgctgaaggaccgcagcaagccaattatcttcaccatggcaaggttggatcgagt

SEQ ID NO: 176608 - DNA, 275 bp, Glycine max
aagcaataagatgaaaatgaaagtgcttgttttgtttgttgctacagttttggtagcatatgaatgccatggctcagactaccagaagttccctctccaaatgaaaactgggtttggtgggcaatacagcaatgaggtggcatgtgccagttggaggcttggcgtggaagcaaacaacgtagtcaagtggcaaactgttcctgcagcttgcggagagtacatagctgactacgttctaggagaccaatatagatcagattccaaaacagttaacc

SEQ ID NO: 176609 - DNA, 274 bp, Glycine max
catttctccatttccattttctctctcacttttcaagaatcgtaagctatgggaaagtcttacccaactgtgagtgctgattaccagaaggccgttgagaaggcgaagaagaagctcagaggcttcatcgctgagaagagatgcgctcctctaatgctccgtttggcatggcactctgctggaacctttgacaagggcacgaagaccggtggacccttcggaaccatcaagcaccctgccgaactggctcacagcgctaacaacggtcttgaca

SEQ ID NO: 176610 - DNA, 140 bp, Glycine max
tcgagataactagaaacagtgttatgacaatgaaggtccttagttttcttcggtgctagaattttcgtaacatggcaatgccatgcgtacgatatgttccctctccgaatgaacactggctatggtgcccgtactccggt

SEQ ID NO: 176611 - DNA, 274 bp, Glycine max
aaagatgcctattatagaaacaacagaacagaaaccaattaatccatacggaaaagccaagaaactggcagaagatatcatccttgatttttccaaaaattctaagatggcagtaatgattctgagatacttcaatgtgattggatcagacccagagggcagattgggtgaggctccaagacctgaacttcgtgaacatggccgaatttctggtgcctgctttgatgcagctcgtggtattacaactggcttaaaggttagaggaactgactac

SEQ ID NO: 176612 - DNA, 275 bp, Glycine max
cgcaatgagttcgtcgaacctcagagatcttcaacgcgaattggagaacaaagccaatgatctcagcaagcttcaaaaggaaattgcgaagaatcaccaaatgagaaagaaatacacggtccagcttggcgagaacgagctcgtccttaaggaactggatttattgaaagacgacgcaaatgtttataagttgattgggccagtacttgttaagcaagatttggccgaggccaatgcaaatgtccgcaagagaatcgaatacatctcagctgaat

SEQ ID NO: 176613 - DNA, 277 bp, Glycine max
caggcgcagagtagagcagcacagaagagggaaaacggcaccgccgccgtagaagaaaacaaccatggtgcacgtctccttttacaggaactatgggaagacattcaagaagccgcgtcgtccgtacgagaaggagcgtctcgacgcggagttgaagctggttggtgagtacgggcttcggtgcaagagagagctgtggagggtgcagtacgcgctcagccgcatccgcaacaacgcgcggaacctcctcaccctcgacgagaagaacccgcgccgg

SEQ ID NO: 176614 - DNA, 272 bp, Glycine max
atgcaggtccttgttttcttcgttgctacaattttcgtagcatggcaatgccatgcgtacgatatgttccctctccgaatgaacactggctatggtgcccgtactccggaggtgaaatgcgcaagtcggaggcttgctgtggaagcacacaacatctttggctttgagaccattcctgaagagtgcgttgaagcaacaaaggaatacatccatggcgaacaatatagatcagactccaaaacagttaaccaacaagcttacttttatgccag

SEQ ID NO: 176615 - DNA, 273 bp, Glycine max
tcggctccctccagcaccaagaggagtgcctcagatcaatgtctgcctcgacatcgacgctaacgggattccgaatgtctccgcagaggacaagactgctggtgtgaacaacaagatcacgatcaccaacgacaagggtaggctgagcaaggaggagattgagaagatgttgaaggatgcagagaggtacaaggcggaggatgaagaggtgaagaagaaggtggaggcgaaaaactcgcttgagaactacgcgtataatatgagaaacacaat

SEQ ID NO: 176616 - DNA, 272 bp, Glycine max
ctcgtgcatttttacggcttcctaaatctgtgggtgtggattttcgtgcctcgtgtttctgccataaacaaacaattgacatgggctatgtgtgttctgtatgcttattcatattctgtgagcaccatgataagtgttcaacctgtgggggttatcatgtcaagaaaagctatgagatgaaggcaatcccagctgattaagatgaagttttcagtcctgtatttggataatctcttgataacatctacacagccgcaacatttccatgagca

SEQ ID NO: 176617 - DNA, 272 bp, Glycine max
tgaagattttatttttctttctttctttggaagataaataatgggttctaagtccgaaaccgtttgcgctactggggcttctggttacatcggatcatggcttgtcatgagactcatcgagcgtggctataccgttcgagccaccgtactcgacccagctgatatgagggaggtgaagcatttgctggatctgccaggtgcagagagcaagctgtctctgtggaaggcagaacttacagaagagggaagctttgatgaagccattaaagggt

SEQ ID NO: 176618 - DNA, 222 bp, Glycine max
tacggttaacgattttgagagatggcatcgactaagaagatcaccctgaagagttcggacggtgaggccttcgaggtggaggaggcggtggcgctggagtcgcagacgatcaagcacatgatcgaggacgactgcgccgacagtggaatccctctccccaatgtcaccagcaagcttctggcgaaggttatcgagtactgcaagaagcacgttgaggcgaac

SEQ ID NO: 176619 - DNA, 266 bp, Glycine max
attttcaattcatggcttccctcatgagcaggatcctcaaggaaaggacttgttcttcttcttcacatgccgggaggctgttgttctccacaacaacagcagccattgttgattccccttcacttgctcagagaatcagagatttgcctaaggaccttcctggaaccaacatcaagaagcatgtttctcagctcattgggaggactccactggtttatcttaacaaagtcaccgaagcatgtggagcttatgttgctgtcaagcaa

SEQ ID NO: 176620 - DNA, 274 bp, Glycine max
agctgaagatgcatatacattccttgttaattggtttgaaagatttcctcagtataagcatagagatttctacattgctggagaaagttatgcaggtcactatgttcctcagttgtctcaacttgtttaccggagaaataaaggaatcgagaatccagttataaatttcaagggttttatggttggaaatgcagtcattgatgatttccatgattatattggaacatttgagtactggtgggtcaatggtttgatttcagattccacatataag

SEQ ID NO: 176621 - DNA, 268 bp, Glycine max
cactcacaaacgcacactgaattcaaaaacatcgaaagagagaggcatggccgagcaaaccttcatcatgatcaagccagatggcgttcaaagaggccttattggcgagattattagcagatttgagaggaagggtttttacttgaaagggttgaaactcgttactgtggaccgtccttttgctgagaagcactatgctgatttgtctgcaaagcctttctttagtggtttggtggattacattgtctctggccctgttgttgccatg

SEQ ID NO: 176622 - DNA, 268 bp, Glycine max
ctcattcgttcactgtcactttacccaatcctaacactttcttctccctgttttccttcttcctcgcatcaatggagtcggacggcgttctcctcggcatgtgcaaccctctcctcgacatctctgccgtcgtcgacgacgctttcttgcaaaaatacggtatcaagttgaacgatgcgattctcgccgaggataaacacaaacctatgtatgaagaattggctaacaatcctaatgtggagtacattgctggaggtgctactcagaa

SEQ ID NO: 176623 - DNA, 270 bp, Glycine max
ctttgtcttttgcttgcgaatctgaatcgaataataatcaatcaatcatcatgtcgtcggcgaagaagatcacactgaagagttcggacggcgaggctttcgaggtggacgaggcggtggcgctggagtctcagacgataaagcacatgatcgaggacgactgcgccgacagcggcatccctctgccgaacgtgacgagcaagatcctggcgaaggtgatcgagtactgcaagaagcacgtcgaggccgcgaatcccgaagacaaaccct

SEQ ID NO: 176624 - DNA, 267 bp, Glycine max
attcgatactctactagcttcatttcagagaaccgtattgaatgcgtacaagtcaaaatttacccagtatgtgatgttctatgcatgtgcactggaccctgaaggatgtggtgtgaaattcgccatggttcttgctgatatgtttggatgtgatgttaatccccctattactaggatgagtgctgctgcttatcttgctagttatttgactcgtgcaaagttcctttcagctgcattggtcactaacatcatacaaagcttggttga

SEQ ID NO: 176625 - DNA, 272 bp, Glycine max
attctattctggttgacgcttctctcaccatccccatttcgccttggtgcaaagcatccttcgtttcaatttctctctctcagcgctttctgcaatcgaacctttcatctccaaagggatccacaggccgaaggagaaatggggctgacattcacaaagcttttcagtcggcttttcgcgaagaaggaaatgcgaattctgatggttggtcttgatgctgctggtaagaccactatccttttcaagctcaagctcggagagatcgttaccac

SEQ ID NO: 176626 - DNA, 270 bp, Glycine max
ctctctgtctcgtttacacatctctccaacctttcactttcgtttctcagttttattcgaatccctctctcaatctcctttccaaatggccagcgttgaggttgcacagcaaacaccaacaacagttccagaaaatgaaacaaccgaggtaagcaagacccaggaaacaaccccagtcactgaggctcctgcaacagaacaaccagcagctgaggttcctgcaacagaacaaccagccgctgaggctcctgccccagaatcaaccaccga

SEQ ID NO: 176627 - DNA, 268 bp, Glycine max
cttttctgtgacattggaagactatctatggctgctagatatttaaaggaaattgctgaattgtatgagggtgaacagaatattgagcaggctcttgtttactatgaaaaatcagctgatttttttcaaaatgaagaagtgacaacttctgcaaaccaatgcaaacaaaaagttgcccagtttgctgctcagctagaacaatatcagaagtcgattgagatttacgaagagatagctcgccaatccctcaacaataatttgctgaagt

SEQ ID NO: 176628 - DNA, 271 bp, Glycine max
aaagaagaaatggaggaagcaaagggagttgtgaagcacgttttccttgcaaagttcaaggacgacgtcactccagagcggattgaggagctcatcaaggactatgccaatcttgtcaatctcatcccacccatgaagtcattccattggggcaaggatgtaagtgctgaaaacatgcatcaaggcttcactcatgtgtttgaatcaacctttgagagtacagaaggcattgcagagtatacagctcatcctgcccatgttgaatatgcaa

SEQ ID NO: 176629 - DNA, 269 bp, Glycine max
gaaagcgaaacgcatagaatcgaaagaggggaaaagaaaaagaaaagttagggttagggattttgagagatggcatcgactaagaagatcaccctgaagagttcggacggtgaggccttcgaggtggaggaggcggtggcgctggagtcgcagacgatcaagcacatgatcgaggacgactgcgccgacagtggaatccctctccccaatgtcaccagcaagattctggcgaaggttatcgagtactgcaagaagcacgttgaggcgaa

SEQ ID NO: 176630 - DNA, 269 bp, Glycine max
attttcaattcatggcttccctcatgagcaccatcctcaagcaaaggtcttgttcttcttcttcacatgctgggacgctgttgttctccacaacaacagcagccattgttgattccccttcacttgctcagagaatcagagatttgcctaaggaccttcctggaaccaacatcaagaagcatgtttctcagctcattgggaggactccactggtttatcttaacaaagtcaccgaagcatgtggagcttatgttgctgtcaagcaagag

SEQ ID NO: 176631 - DNA, 269 bp, Glycine max
gtttgttgtgagctataagctagtttatcgtgaggagaatatgaagttgtttgttttctttgttgctgcagtagtcttggtagcatggccatgccatggcgcaggctaccaaaggttccctctccgaatgaaaactggctatggtgagcgttcttcggaggtaaaatgcgcaagttttaggcttgctgtggaagcacacaacatccgagcctttaaaaccattcctgaagagtgcgttgaaccaacaaaggactacattaatggcgaac

SEQ ID NO: 176632 - DNA, 295 bp, Glycine max
tcgttcgtctttgacatcaggatggagtctcaggtgaagcacgcacttgttgtcaaagtaatgggtcgtactggatccagaggacaggtgacccaggttagagtgaagtttctggatgatcagaaccgtcacatcatgaggaatgttaaaggaccagtgagagaaggagacattctcaccctactcgagtctgaaagggaagctagaaggttgcgctaagagggtctttctttcttgatctttatggtagttagtcggtgctaaaggttatagcaccctatctggtcttggatct

SEQ ID NO: 176633 - DNA, 287 bp, Glycine max
gaatgagtggcggaggaggaggagaagaggaagcaactctggagttcactccgacgtgggttgtggccgccgtttgcacagtcatcgtcgccatatctctcgctgctgagcgcctccttcattatggcggaaagtttctcaaagccaaggaccagaagtcgctctacgaagctctccagaagatcaaagaagagctgatgcttctgggcttcatttccctgcttctcacggttacacaaaacggcattaccaaaatctgcgttcgtcccagtttgacgcgccacatg

SEQ ID NO: 176634 - DNA, 286 bp, Glycine max
gttccatctcttgcttcttgcttctattacttgcttctttcttcaccatgtcacttgctgggaaaatcaccactgaaattggggttcatgcaaccgctgcaaagtggttcaacctctttgcaacacaacttcatcatgttcaaaaccttactgatagagtacatggaaccaagctgcatcaaggtgaagactggcatcacaacgagacagtcaaacactggacttataccatagatggtaaggctacaacatgtctggagagtatcgaatccattgatgaacagaa

SEQ ID NO: 176635 - DNA, 284 bp, Glycine max
gctataagctagtttatcgtgaggagaatatgaagttgtttgtcttctttgttgctgcagtagttttggtagcatggccatgccatggcgcaggctaccaaaggttccctctccgaatgaaaactggctatggtgagcgttcttcggaggtaaaatgcgcaagttttaggcttgctgtggaagcacacaacatccgagcctttaaaaccattcctgaagagtgcgttgaaccaacaaaggactacattaatggcgaacaatttagatcagactctaaaacagtt

SEQ ID NO: 176636 - DNA, 280 bp, Glycine max
atctttttgatattttgttgaacctcattgaagctgatggtgctgacaataagctcactagagagagtgccaaagcctttgctctggacatgttcatcgccggcacaaacggccccgcaagcgtcctagagtggtcactggcggagctggtgagaaacccccacgttttcaagaaggcaagagaagagattgagtcagtggtaggcaaagaaaggctggtcaaagaatcagacattcccaacctaccatacctacaagcagtgctgaaggacaccctaag

SEQ ID NO: 176637 - DNA, 276 bp, Glycine max
ccttcagtcatgtctctctctgcattctcattccctctccatcccagaccaacaacaccaccttctgatcctaaaacatcatcaacccctttgcctttgtcttctcactcccattggggtgcagatctgctcacacaatcccaacgccaactcaaccacgtgaaaagaaggccacatggggtatgtgcatcactatcagaaatgggggagtattattctcagaaacctcctattcaactgttggacaccataaactatccgattcacatgaagaat

SEQ ID NO: 176638 - DNA, 279 bp, Glycine max
gaacaagaacaacaaagtaacgtgaaagagagagagatggaggcgattgttccagtggtggatttccagaggctttcagaggaagaggagcgcaagaagctgagaaaaacatgtgagacaccagggtgtttcagaatcatcaaccactcaattccactaacactcatggccgacatgaagtcagtggttaaatacttgcatgaccttcccacggaaatcaaaatgcgcaacaaaccctccgtccctgagagtggctatagggcggcaatgccaacaagt

SEQ ID NO: 176639 - DNA, 263 bp, Glycine max
ctctgtgttgtgttgtgtacttgtgttaattgtgttgttgttgtaggaaatttaagtgaagagagaatgatgatgaagtctgctatgtgtgcattggtgcttgtggcactggttgtggttgaagtggggcccatggctgaggctgcggtgacttgcaacccaacacagttgactccttgtcttccggcaattaattcaggttctgcaccttcgagtgcttgttgcccagaagctgacgagcaaaagccatgcttctgtggcta
